United States Patent Application Publication US 2004/0031072 A1 - sequence listing, part 15

SEQ ID NO: 66473 - DNA, 1589 bp, Glycine max
  Clone ID: PAT_MRT3847_31039C.1
cggccgctcaggcggcgggcgggtttgcgtggctcggtgccaaagttcatattaagagagaaagagagagagagatagaagggaaaaaagcatcaaagatcatgaaacccaacttttcctttttatctaagcttttgatactgcaatatctatcagttttatgcatttctcaggaatttgatttcttctactttgttcagcagtggccaggagcatactgtgacacaaagcagagctgctgctatcctaagactgggaaacctgctgctgatttcagcattcatggactctggcctaacttcaaggatggctcatggccctcaaactgtgaccctgacagtgtctttgataaatctcagatctcagacctcattagcaacatggagaaggattggccatccctgagctgcccaagtagcaatggcatgaggttctggtcacacgaatgggaaaaacatggtacttgtgcagaatctgagcttgatcagcgtgagtactttgaaacaactctcaaactgaagcaaaaagttaacctccttcggatcctcaagaatgcagggattgagccagatgatgaaatttacaccctagaaagggttacagaagctataaaaaaaggcactgggtttaccccagggatagagtgcaatagagattcagctcgtaatagtcaactttaccaagtgtacatgtgcgtggacacttctgggtcaaatctcattgagtgccctgtgcttccaaggagcagatgtggtgaacaaattcaattccccaaattttaagaagaaaatttagttcggtaaaattgacatgtaatttccccattgcatttgtcttcaaagtaataaatgttcgcaacgaggccttctaatgtcctcccactgcatttggaggacggaacagccccaagttttttaagtcattcatgtattaatcttaatacaaaatttagcggttgagttctgtttaagaattcaatatcaagttcaaggtgaattttaattacatggtatcggtcttcctttcccctcttacgtataaaaagttgaagcaaatggtggtgataaatggtatattagtagattgggaaggaatagatttagtatgaaagtaagtttttgtagggttagagttgtattttcatcattccgcccagtgaaaccagatgatccagtgttagatccttttcttgtgcatactttgaccatacgctttgagcctagaagacagaggcctgttgaaggaaatgcaccaatgaaacaggatttaagaagctttaagcttatattggaatatattaaagccttgcctactgggcaagaaaccgattttgtattagtttcatgttctggactaggaattgagccttccaggcgggagcaggttcttaaagccaagagggctggtgaagattccttaaaaagatctggccttgaatacacaatagtccgtcctggtccattgcaggtaaagtttctattgctgctcctaggtagaacatgtgattgatttagttgcagaaattagcatttctgtggcacctggatacaagggagccccaaaaaaaaaaaaaaaaaaaaaaagggcgg

SEQ ID NO: 66474 - DNA, 375 bp, Glycine max
  Clone ID: PAT_MRT3847_3103C.1
tataaggggtttaagctagtagaccaatgccccagatcaaattgtaatattatttttctaacattctctctccataccatttcaacatttttaacaattttatatatcaatatacattcctatttacctcacagtcaatgaacaacctacacccatacaaactatgcgaccaaactttctatgctgccctcaacactccccttgaacaatacccacactactaggttgccttctaaacatccaccacgaccatcttcgaaatttctatcctaaacatcaccaccaatctctacaacaactaccataagatctatagtaacacctccataaacatatactccacctaaaactaaattcaacataaatcttacaact

SEQ ID NO: 66475 - DNA, 414 bp, Glycine max
  Clone ID: PAT_MRT3847_31040C.1
cgaaaaaccacaaaaggaaggttcgttggcaaacttttaatggggattttaaaaaacaaaaaaaccccaggggattggggttggattttttaaggtaaaaaaaatttttttttttttgtttatcccaaaccttgtggtcaaagttaaaactaaataacccttttgggggaggataaacgtgaaccttgaattaagttgaatggtccctttgactgacaaggggggccaaaagtggcccccaattttaattgggttggcctttaacaattaggccagggattttcaggggtggggggggaccctaagaaataaatggttggtttcaaaatgggggaaacattttttggggtgggggtccctcaacatgaaaacaaaggaggggtaccaccgccaccacctttcatttccaaccaa

SEQ ID NO: 66476 - DNA, 191 bp, Glycine max
  Clone ID: PAT_MRT3847_31041C.1
ttccgcaccgagccacttacccaacgcgcctgctaggaaacccccatccgcgcaaagctttcaaaaaaggctgaggctgctgacatctcgcctgtcgccgctggaaagggcacagggctgttcaatgcaacatcggccgggcgggactcaactagggcccccctgccgagaactatactgccaccacccca

SEQ ID NO: 66477 - DNA, 622 bp, Glycine max
  Clone ID: PAT_MRT3847_31042C.1
aaggggaaaggctgacgggaaaactttcaggatggaattgatgggcgagcccaagttcatgttacagggactaaaaaaagggcctttttgaagggggtatgttttcctttttttacaacccaacccaagggggaatataccgcacaccgcccaaccccttaaaaaattggttaatatcggctcttttaagggaaaaggggcccaaaattaaattgaaaaccttttcttttttatcccttgaaaaaagttatttacctgcttacaaactacaccccctgaaacatgaacatgtttatgaaaaacggcctatgccgaccacaggacttttcccccaaccaaaacctgccaagccctggaaaaccccctccttggaagactggctaaaacaacccgggtataaaaggctggaaaaaaaaggctatttccctctcaaaactttcttcccggggcccaacccgacaaatttcttttatccgcccccccctttcctcctttttccaccccccccccccccaaataaacccccttcttggcttacaccccggcgggggggcacggcctttctccaggggcccccttttctctcccccccatttcccccccccggcccccccctcccccc

SEQ ID NO: 66478 - DNA, 290 bp, Glycine max
  unsure (1)..(290): unsure at all n locations
  Clone ID: PAT_MRT3847_31043C.1
ctccaccattccccatcccnccttttcncgatctcanctcccagccaccatcaaaaanaataatctgaaaatgaaaagaaactaaaaatccaaaccaaaccaaaccaaattcaaagacacgatgaaattganctatcaattttgataccaatganggactaaagangtttcatcaaaatgagaaganactaaaaaccgganccgaactcnacgaacacccatttcncccccactaatggtgtcatctccattgtnagtgtccctcatttttttctttctctccctntntg

SEQ ID NO: 66479 - DNA, 243 bp, Glycine max
  Clone ID: PAT_MRT3847_31044C.1
ctgtcctttttttttttttttgtttatgactgattttatccattaaggcagagaaagaggagggttaagcattggattgtaaacctttgaacaaacattctttccattattgcctttgggaagattaaaccagccatgggccgacaatgttatttaccatgaagggggacatgaaacaactgaagtcttcttaagccatgctttacaatgtatgatgaggcaatgcaccggatttttatgatg

SEQ ID NO: 66480 - DNA, 422 bp, Glycine max
  Clone ID: PAT_MRT3847_31045C.1
tggattatctagttgacaatgcgagaaagaaaagaaactgcagaaagttaacatctgttggtgcaattcagagaaatattaggaaaacaaactgccccacagctggaacagataagtctaacagatgcctgattaaagacgatgatttattggtgtctgcaatattcaggaataaggacttcagcccagagacgatccggggtaattctagtgctaaatcctgcaaatcaaggggtcagaaaaagtttaaaagccaaaagggccgatgcaggttgctaccaaggaatccctctaatgcagggaagcacaataaggacggcaataggttttatttgggtgcaaggacaatattgtcctggttgattgataatggggtcatatctttaagtgatgtgattcagtaccgaaatcctaaggataat

SEQ ID NO: 66481 - DNA, 672 bp, Glycine max
  Clone ID: PAT_MRT3847_31046C.1
ccccccacccacacccccacccccccaccttcccaagcgccaacaccagtccctcaccaatgccccccccagtttaaatggaagtggcagaagccctggaaactctcagaatggctcaaacgcagtgatgagtcaaatgaggtcaaggcctcgagcacaagctttgattaatgtgatgtgatgttgaactcatactaaaggatggacatttccaattctgaatattgaccgcagtgtgtttcaacacaggttgacaagaggacagttgattgcaggtacgatgtaaattggacagtttcctgggatttgtcagggtcgttttgctggagaaagtttggatgttggagaaagttgtcataattctgtgtagcttgtaagttgtaacaacacatggtaggcgtagcgcgacatggacagtatcagaggaaggaattagttttataatatataggttgatcagggtaacattgcacaagtgcatagattagaatatgtagatcgtgaagttgcctcatgttaattctgtagctttttttataaggttttttgacaaattttgtgaattgtgatcgatacaacgtgaaagtctgttttttttgacagctgtaatatttctcaaaattgctgttgtttttttgtcagctaattgtaattgattcatttttaattctg

SEQ ID NO: 66482 - DNA, 256 bp, Glycine max
  Clone ID: PAT_MRT3847_31047C.1
aatcggctcgagataattgcgtgttcgcaggccaggcaactgagagagaaagaatacagagatagagagtagcatcaataatgtattgtgactgaaaacaaaataagggaagaggagcacaaacaaaaccaaacaaacctcataagttagggattcctttttggttcgttgctgtggaatcgattcctttgccacatattaaacgtgcgtcgctgtgaagtaaagcatgatcgcagcattgtctgctagttatgac

SEQ ID NO: 66483 - DNA, 769 bp, Glycine max
  Clone ID: PAT_MRT3847_31048C.1
agagggggtttttttctttttttttggacaaccctttgacccaaagggggccggggtcacctaaaacggggaggaaaaaaaacacccggacgcccccaaccaaaaagcacaccaaaccccgggccacccgaaaggaaagccaaaaccccccccccccctaaacccaaaacaagggggaacacacgcaaaaccaccccaaaaaaccccccgaccccccggcgaaccccgggccgcaccccgaaaacccccccccgtccccgaaagggacccaccttaccccaaagggaaaccaataaaaccccgggccaaccagggaaaaaacaggccccccgggaaaaaagaaacccgcccacacagcccccccaaaaacaaacccgagggcaaacaaggaaaaccccgggccccccaagaaggagcccccccccccaaaatggggtggcgccccaaaccccgccctccacacagaaaaacccgagcgcccccccgccaaaaaaaaaaccaccacccccgggaaacccgggaacgcactgccccccccggggaaactcccccacccccaaaagaacacgccccaccacggaatgcgccaaaccccccccgaccccagaaacaaaacggccacacccccccccccccacagaactccccccccccccgagcgcgaaaaaaccccccggcaaacaaaaaaacacaaaaacccgggcgcggacaaaatacaccacaaggaccccggccctcccacaagaacgacaaccccccccccccccca

SEQ ID NO: 66484 - DNA, 150 bp, Glycine max
  Clone ID: PAT_MRT3847_31049C.1
tacggctgcgagaagacgacagaaggggaccactccattcaatcagatcgagggcattctcgcctctttggggtctgagctcaaggatgatctactctgcagtgggtatcaagaatcttgtgatgatgctaggagcattttttttttagg

SEQ ID NO: 66485 - DNA, 1204 bp, Glycine max
  Clone ID: PAT_MRT3847_3104C.1
gccgtccgtgtctctttctctcttctattactattagtaatatatctatcttttcttgcacaaccaaactcgtcactctgtggtattaattcaatattcatagacttcactgtctgattgtctttgtttaataccatataggattcattaaggattctctaatgttggcacaaatggacatggaggagcttgtctcatgtaacaacaacgatgccaccaacatagccaaagggaagcgcacaaagcggcgcttgaggcctttgtctccttgtgctgttgtcgctgctaccactatcaccaccaccaccactgctatcaccgctatcaccaccgtcatgacatctagctgttcaagtgcttctgccggtggcggtggatcgtcttcatccaccacctttgaggaggaagaggaagacatggctaattgtttgattctcctagcacaaggaagagtaggacgggaccctcctcatcatcacaaggacctatgtggtgatgtcaagacagagaagggtagcaccaaagttgatcatttatatgtttatgagtgcaaaacatgcagccgaacattcccttcttttcaagcactaggtggccacagggcaagtcacaagaagcccaagatggaggagaaaaagttgttatcaccaccactgttattgccaccactgccagcttcgtcttcgtcactatttaattttgaggaagcaaaacaaagtcacatgaagaatattattagcccttctgtctcccttcaattagggtgtggcattaacaaggttggtttaaatttccatggcaacaagtccaagattcatgagtgttccatctgtgggtcagaattcacatcagggcaagcattgggtggtcacatgaggaggcatagagcatctaacaataataacaatattgttcagacaacaacaacaacaacaactacttctaatggtgctgttgatgttaagcctcggaatgttctagagttggatcttaaccttccggcgccggaggacgatctccgggactcgaagtttcagtttccggcgaatccgaattctatgatgctgtcggctgctccggctttggtgggatgccattattagaaaccagggtgggaattagatggagaggggggaaaagttatattatttgattaatgatcattgtgaattatttagctttattttaatttacaattattctt

SEQ ID NO: 66486 - DNA, 700 bp, Glycine max
  Clone ID: PAT_MRT3847_31050C.1
ccacgcgtccgggaaacacaagcatctcgatattcactaaagggacatacaaaatcaatacgttctgtgtgttgggatccttctggggagtttctggcatctgtcagtgaggactctgtcagagtttggactcttggatcagggagtgaaggggagtgtgttcacgagcttagctgtaatggcaacaagtttcactcatgtgttttccatccaacatattcttcgctgttggtcgttggttgttaccagtcattggagctctggaacatgactgagaacaagacgatgacactatctgctcatgaaggtcttattgcggcattggcggtttctactgtaaatggtttggttgcttcagccagtcatgacaagtttgtcaagctctggaagtgaatttgttgtgtcattaatacaggttgttttttagtctgttgatattgttgtagtttatgatgtccccttttttgtagtttggtcaaccaccctccctcgcatgtttgtagtttatgtacccttttatgtagcttgatcaaccaccctccctcttttgccatttgggtataatctgattttctatgtaaccatagatactaactttttgtaatattgtcacccctgttgtatcctgtttcataattgttatacttggagatttctgctcatcatttagattggcctattataatctatgagtgctaac

SEQ ID NO: 66487 - DNA, 563 bp, Glycine max
  Clone ID: PAT_MRT3847_31051C.1
gaatggaagtcaagtaaattctgggggcgaaactccactgcaaagaccccggctcacaaaattgagagtttcagttcccccaaggtggacgcctgaggaatttatggcagatgtgaaagttccatctgctgctagtgcaagtgagtctgctgggaaggacaatgaagtatctaaaccagagccttctaagcatgcacctttggtggactgcataaggacacgctgggcgcgtgctgtctgcagctggtcaggggatcctcctagtatagtttgagaggacattatttggagtcatttgtggtggttcttacaagtgtttttacagggaaagcactattggttcagcaaagagtagatacagtttttatgtaatttgatgtggtacctcgaggcacatgaacagggaggggttcagatctccaagtttttatgtaatttgatgtggggggatattattagtaataaacgtgaaaacctgttcttgtttctgaaattgctgtaatagtaaagcatcattcttgtttcataaaaatattatcgcatcctctgttgtggaccctttt

SEQ ID NO: 66488 - DNA, 1428 bp, Glycine max
  Clone ID: PAT_MRT3847_31052C.1
cgcgttgcttttcctcccctctgccttagtcgaatgggagcattgcttttcctaatctctgctttactttctcggggactggacttggttcaaagtgacagggatgatcccagcctaccactggttactgcaccttttgggcatgcctcccaggaaattgtgaaccgactgctctgtggggaggcggggcctgttggggttgagggtagcccggtttgtggaggtgggatgtctgtctctggtatatcccctgatgttttgcaaggatggtcagtttctgaaatccccaaagtggcctatatgggttgtggggagtgaatcccattacacagtgttgtttgctcttgaccccagtgtccaaaatgagaatgaactggaaggaagggaaactcagattcgcaaagcttttgatgcacaagatcagagtggaggtggtggtttcattagtgtggaagggttccatcaagtcctcagagaaacaaatatcaaatttccaccagagaagctggaacatctttgctctgcagggttcattgtatggagtgaattctggcaagtaattttggatctagacaaaagcttggggggtttgaaggattcatcaggattgatgggtaagaaggtttttgatctttaccattttaatgggattgccaaatcggatctgaatggaagtcaagtaaattctgggggtgaaactccactgcaaagaccccggctcacaaaattgagagtttcagttcccccaagatggacgcctgaggaatttatggcagatgtgaaagtttcatctgctgctagtgcaagtgagtctactgggaaggacgacgaagtatctaaaccagagccttctcagcatgcacctttggtggactgcataaggacacgctgggcacgtgctgtctgcacctggtcaggggatcctcctagtatagtttgacagacattatatagagtcatttgtggtggttcttacaagtttcgtacagggaaagcacaatcggttcagcaaagagtagataaagtttttatgttttaatttgatgtggtacctcgaggcacatgaacagggagggttcagatctccaaattttctccaatatgtgcataatagccgttatatatagtgtggattagtgtatattcaacgttctcttcgattttgtcatgctattctaaaggtacaaaaaagagggatgcgatattcattgtcaaagcctaagtgtaacatccattttaaatgtattgccaccggaagagttatatacagttcgtggggggttattagtaataaacgtgaaaccgggtcttgtttctgaaattgctgtaatagtaaagcatcatgcttggcttctggaatatgggaaaatgaacagtcatataataatattatcgcacctagatgtgtaggttgtgtttgatttatat

SEQ ID NO: 66489 - DNA, 455 bp, Glycine max
  Clone ID: PAT_MRT3847_31053C.1
agattttatgcccaaggccctcctgctatcattacttcccagactgcatttgcttatcaacggcaacttggtcctgctatgaggccatgtgcagcttccgttccaaaattgttcgtgccaatgggtcaaccgggacaacatggacaatgaccttctgtaatgcgttcagttgcacaccataaggtctaaccgcccgattccaatgatgccaactcttatactacctaggtcgcaacgccattcttatggacctggtcaacctatgccacatgttttgatgcccggagttgctggacgtatattatctgttccatatgatgtgggtgggatgccactgctcaaagcatgaatttcccagcaaattcctgatgaggctttatcaacagctatgacaaatgcttctccagagcagaacaggaccatgctaactgagaaactctacgagcttgtggaac

SEQ ID NO: 66490 - DNA, 495 bp, Glycine max
  Clone ID: PAT_MRT3847_31054C.1
ttccaggaaggtttcccgtcatcactgtatgacgtcctccttctttgggggggggggggggggggggggggggatgcatgattcggaggtcgagttgggccagaaaggaagctgccgagagcggataacactatagaacaaaaagcgaaaaaaatgagtataaaaggggaaagaacgggtgggggtgtcaaaaaccgtggtaacgcttagacgggtagtttgctgatccagaaatacataaacactcaacctaaatgtaattacaataggtgctgcggccggcggtgcggcacggttgcgtagggtggtggtgtgggtatcaacagaaaatagtgttgtagcaagccaccaaatacgagttgcgtaatggtgggaatgtgactgttaggatagtaatggccttggggggagtaataggacattaagttggcctgctaatatttcggggttaagtaaaagttatacgtaatcgggttatcccggcgcagttatact

SEQ ID NO: 66491 - DNA, 632 bp, Glycine max
  unsure (1)..(632): unsure at all n locations
  Clone ID: PAT_MRT3847_31055C.1
tctcagtgtcagaacagaactagattcagattcggatgccctgaagcgccctcacacatggccacgacgacaacaaggtccccgaaccgttcctccgaggatgccgccgccgatcccacgccgttcctcgccacttcctccgacgaatccacctccggccgcctcctcctccgccgccccagcctccgcgaggccgcgcgcttcctgcgccaggccagcggccgctctagaggatccaagcttacgtacgcgtgcatgcgacgtcatagctcttctatagtgtcacctaaattcaattcactggccgtcgttttacaacgtcgtgactgggaaaaccctggcgttacccaacttaatcgccttgcagcacatccccctttcgccagctggcgtaatagcgaagaggcccgcaccgatcgcccttcccaacagttgcgcagcctgaatggcgaatgggacgcgccctgtagcggcgcattaagcgcggcgggtgnggtgnntacgcgcagcgtgaccgctacacttgccagcgccctagcgcccgctcctttcgctttcttcccttnntttctcgccacgttcgccgnnnttccccntcnngctctaaatcggggnntccctttnnnnnnnng

SEQ ID NO: 66492 - DNA, 985 bp, Glycine max
  Clone ID: PAT_MRT3847_31056C.1
tgaagtttccacaaaatccaaaggaattaatgcgattcactcttctatcccgtgcgcctgttccttttctttctgccgccttccttaaattcaaacccgttgcaccttccacagcgactttcactagggtttcttgcatggccgcttcaccttcttccgcggcggttcgcgacggcgctccttctgcttcctctgccattgatttcctctcaatctgccaccgcctcaaggcaacaaagagaacaggttgggtacgaaaagatgttaagaatcctgaatctatagccgatcatatgtatcgaatgagtttgatggctctgattgcgtcagatgtccctggtgtagaccgaaacaagtgcattaaaatggctattgttcatgacattgcagaagcaattgttggggacataactccattggatggagtttcgaaagcagaaaagaatcaacgagaacaggaagcactagatcatatgtgtaaagtactcggaggaggatctacagcaaaggaaatagctgagttgtggatggagtatgaagcaaattcttctccagaagctaaatttgtcaaggaccttgacaaggtggagatgatactccaagctttggaatatgaagatgagcaggggaaggatctagatgaatttttccagtcaactgctgggaagttccaaactgaaactggcaaagcctgggcatcagagatagtatcgagaaggaagaatactaaataaatctcccagtatggatctccttgtcaatgggatagggatagggataggtggggtttatttggtttgttggtgtgggttttctgttcttttggtcactggcatgaatgggagtaataggtggtagaggtataataacagctgctagatgtacggaccaacaaaaaacagagaaattgaagctgtgcatgaagcagcgtatagtgaattttactaggagatttgaacataatcaaatttgttcgactatgtct

SEQ ID NO: 66493 - DNA, 550 bp, Glycine max
  Clone ID: PAT_MRT3847_31057C.1
ggtcctgaaaatttcctccctaattgggcgtttcacatctgcgcatccttttactaccaccaagtgtgaagtttccacaaaatctggagagacaagagaagtgaatccaaaggaattaattaattgttagtggaatgcgattcactcttctttcccgtgcgcctgctccttttctttctaccgccttccttaaattcaaattcgttgcaccttccgcagcgactttcactagggtttctcgcatggccgcttcaccttcttccgcggcgcttcgcgacggcgctcctttcgcttcctccgccattgatttcctctctatctgccaccgcctcaagacaacaaagcgaacaggttgggtgcgaaaagatgttaagaatccagaatctatatccgatcatatgtatcgaatgagtttgatggctctggttgcatcagatgtccccggtgtagaccggaacaagtgcattaaaatggctattgttcatggcattgcagaggcaattgttggggacataactccattggatggagtttctaaagcagaaaagaa

SEQ ID NO: 66494 - DNA, 320 bp, Glycine max
  unsure (1)..(320): unsure at all n locations
  Clone ID: PAT_MRT3847_31058C.1
gaccccggcacggaaccaaccnccaaaaagaggccncagggggcgncccccagacacagccagtacggcaagaaaaaaaccgccancacncaaacagnggaccngggaagaggggggatcttctaaagggagttgagcgcagcgnanaaacgangccagacaaaaaacaccccacccaggggggggggcgggaacaaaaaaaagcannccnnnggacannaanaccaccanggcagccagccagaggcnngggccccgaaacagaagcngggcagacacaacnacgcgaacnccaccgaaagacgccccancacaggacc

SEQ ID NO: 66495 - DNA, 425 bp, Glycine max
  Clone ID: PAT_MRT3847_31059C.1
gaacgcctaactaattatctaaaagaggaccgaaaccatgccaaattacttacattgattcaaatcgagcagctacactttcttgcaacagactcaaaggccaactagaggatcccgatactaacaaataatatagagggggcttgtgcaattatgatacataaagctacatttccacccttaaggctgagtattggatctaagccctgaactccatcatctttaccacctgttttgagcagaccgtcgcacccttatataaacacgacggcttacagagggaatcacagcaacctcgtcatacaaaacatttgactgctgcccgtctgcattctaagaggaccctctgggcatgccagagatctacggtgagcatatctcagtctcatgacatcagctaatgttgattgcctgcagcgcatgag

SEQ ID NO: 66496 - DNA, 485 bp, Glycine max
  unsure (1)..(485): unsure at all n locations
  Clone ID: PAT_MRT3847_3105C.1
agctcgagccaattctgctcaagctctatcctttctcatcgattctcaccacacactgggaagtaatactaaggtctcctaaagaacatcagagagactgnctactctncccctgctactcaagatcatatcaattctttagtcaaggatcatcctccaactggcttttatggaatacatccctctaatgttcctggaacgtcctagctatcatctccgacgcccactaaagtacactgcccacgttataattcagcaccatgtcacaaaagtccttgctatgaaccagtcccaggcttaatttgattgagtgatccttaacaagacccatacatttgattcatttattccaatttcctttaattaaaaaaccacctctataaccttgacccccattttaacttcacttttattcctatgaacttacattcccccctgttttaccttgccctttattttcaaaagaactctttgacccccccccc

SEQ ID NO: 66497 - DNA, 357 bp, Glycine max
  Clone ID: PAT_MRT3847_31060C.1
ggctcgagctttgcaaaaacttttcgttttttctcttggttaagtactgcgcatgaaccaaatgatgagaaggattacggctgacaatgccaaaaccaatatccatcatatgatatggttagcgcacgcgcacaaacacacggttgaggtacatgaaatctcccgaaccctagttttaggtcagaggctaaagaccagtgccgtcttaatgaagcttatgtgcacacgtaaaagactgcgtcctaacggagtggcgaacgataaaatgttcggtctcatttgggaaccaccagcttcggcgtggcgtgtcatggaaggcggtaagcctactatcatcaccaacgtgggcggccagag

SEQ ID NO: 66498 - DNA, 895 bp, Glycine max
  Clone ID: PAT_MRT3847_31061C.1
gcaaggagcccctcttttgatattagcgaacaagcaggatattcctgaagcagtatcagctgatgagttacctcaatatttggatttaaagaagctggatgaaagagttttcatgtttgaagctgtgtcagcatacgatggaatggggattagggaaagtgcagaatggttggtggaggtgatggagaaaagcaagaggactgaaatgttaagagcgagggcaggtgcaatgggtgcaggtccctagaagggtcttacattaaactgaagttatttctcggttcctttatatagctttgtaaatccaaattgaattatacatgattaaaagtcagtgagctgaaaaggtaaaagaataacttggtgttgcattaaactgagccttgaaatttgatgccatggtttaatttgtaatacagccgtttcatgagaggctcagtctccactctccagtatctcttagagcaatttttcttctgacatgccttgtaaaagcaatctgtgaaatgatgggctgtgccggagggttttctgcttctgcctccgggcatacttttgtcaaccctaaattgtaattggtacggtttctatttgactgtatcggtacttgcacttggtattcggagcatatatggtatatatgcaaagggacacttgggttgtagccaaaattttatgggagtagtgtgattggggtggatgtacttacgtttgatttccatgcgagtcatgccagaggaaaagtttggtttaactctggaaaaagggcagaaacaacaaacagaactaaactttcttggtaggtcattcaccaatattatttcgcaatgcgtgtcaagtattttgtcttctctcgagaaaaaacgtagttataaaactgatttcttctcaggtc

SEQ ID NO: 66499 - DNA, 199 bp, Glycine max
  Clone ID: PAT_MRT3847_31062C.1
ggaatcctaaagaccgtgaggtatattattactatttctcattctttttctgctggcttcattctggaacctctgtttattcttgtttatgaagtattagtttgagctttgaaattgctgtatttccacatccatcttttcatattctgctagttgttgtgtggtactatggaattcatcccatatagcaaattgaagt

SEQ ID NO: 66500 - DNA, 146 bp, Glycine max
  Clone ID: PAT_MRT3847_31063C.1
tacggctgcgagataacgacagaagagtgatattttatgacgcatataggggtaactcgcaggatatagcaatcaaaataattatatattctcctaatgtcaatcactctgttagagatgctaaaaggaacactaccagcctgaat

SEQ ID NO: 66501 - DNA, 484 bp, Glycine max
  unsure (1)..(484): unsure at all n locations
  Clone ID: PAT_MRT3847_31064C.1
ctttatccttagttctttattactccttctcctgcgagaaacagaactttcagaagcggaatcgctcactattgatccgattccaccgtcatcggatctttctgcagccaccgtctatcgcacttcgttgccgtcattggcgccggtaaacctattcaaccactcttcttttccttcttcaatttccggatctgttactactgaattgattctatcgattgcggtggttccgatggactgtgattttcacagtcttgcatctctctctcaattttctggaaattcgagtcttatatatgaattctgaatgttaatgaatttgtgaagtaatgatgagtggaagagctatccaataacatgacatgaactgcaaattcttgtatacttgaaggttaagacagcttaaacaatacaaggatgttttcgttgttttatggactatggaagtacttgntcagcaagatggagcttcatgtactcattc

SEQ ID NO: 66502 - DNA, 1438 bp, Glycine max
  Clone ID: PAT_MRT3847_31065C.1
ccacgggcccctacagggccgaaagagggtgggaagggaaggaggagagggagagggagagagaaagaaaggtgaattggattgcatctctctctgtgtgttggaagaggggaatcgtagatctgatttctttctttctttttaataattttgtgatcagaattattgagctgaacaaaagacaatgggattgtgggaagcttttctcaattggcttcgcagccttttttttcaagcaggaaatggagttatctctaataggacttcagaatgctgggaagacttcccttgtaaatgtagttgctaccggtaggatatagtgaggacatgattccaactgtgggattcaatatgaggaaagtgacaaaagggaatgttacaataaagttatgggatcttggagggcaacctaggttccgcagcatgtgggaacgttactgtcgtgccgtttctgctattgtttatgttgttgatgctgccgatccagataaccttagcatatcaagaagtgagcttcatgatttgctgagcaaaccatcattgggtggcatccctctgttggtattggggaacaagattgacaaagcgggggctctgtctaaacaagcattgactgaccaaatggatttgaagtcaattactgacagggaagtttgctgcttcatgatctcgtgcaaaaactcgaccaacatcgactctgttattgactggcttgtaaagcattccaaatcaaagagctgagagcctactttctgttttgaactctagtgtaatttatgggtgacacattttctggatttactagaggcatttgcatgtctaactcggttgctgattgatttgtttttcccttttgtcagatgctttgtaatataatatcacatcattcttgtccaatagggagttaaacgggatgacatacatgtgaagggttactttatgaaatcatatcgtgacattttttagataaaaatttattgaactgcatttttcgggagtgttgcattaaactgagccttgaaatttgatgccatagttgtaatacagccgtttcatatgagaggctcagtctccagtatctcttagagcaatttttcttcttacatgccttgtataagcaatctgtgaaatgatgggctgcgccggagggttttctgcttctgcctcgctgcatacttttgtcaactctaaattgtaattgtaccgttcatatttgaatgaattaatttactttcctatctgtaacattgtataagcacagctctgccatattgatcctggtagtcacttggtattcggaggatatatggtatagtatgcaagggacagctgggttgtaaccctccagtatctcttagagcaatttttcttctgacatgccttgtcgtgctaaaaaaaaaaaaaaaaaaaaaaaaaaaaaaacggccgctttagagga

SEQ ID NO: 66503 - DNA, 1609 bp, Glycine max
  Clone ID: PAT_MRT3847_31066C.1
cctgaggcagtatcagctgaatagcttgctcgataatttggatttaaagaaacctggttaaaacacttccatgttttgaacccttgtcagcgtacgatgggattgggattacggaaagtgcagaatggttggtggatgtgatggagagaagcatgaggactgaaatgttaacagcgagggcaggtgcaatgggtccaagtcactagaaaggtcttacattaaactgaagtgatttctcgattcctttatatagctttgtggctcgagcttggatccttagttctttagttctccttctcctgggagaaacagaactttcagaagcgaaatcgcccactcttgatccctttcgaccgtcatcggatctttctgcggccaccgtctatcgcacttcgttgccgtcatcggcgccggaattctgaatcttaatgaagttgtgaagtgatgatgagtggaagagctatccaataacatgacatgaattccaaaattttctatacttgaaaattaagccagcttaaacaatacaaggatgttttcgttgttttatggactatggaagtacttgttcagcaagatggagcttcatgtactcattctgggtattgacaaggctggcaaaacgactttgctggagaagatgaagtcggtgtactcaaatatagaaggcattcctcctgatcgaattattccaacagtgggattgaacattggtcgcattgaagtggcaaatagtaaacttgtgttctgggacctaggaggtcagcctggtcttcgctcaatctgggagaaatattatgaagaggcacatgctgtaatatttgttgttgatgcttcttgtccgtcacgctttgaagatgcgaagtcagcactggaaaaggtgcttcggcatgaggatctacaaggagcccctcttttgatattagctaacaagcaggatattcctgaagcagtatcagctgatgagcttgctcgatatttggatttaaagaagctggatgaaagagtttccatgtttgaagccgtgtcagcgtacgatgggatggggattagggaaagtgcagaatggttggtggaggtgatggagagaagcaagaggactgaaatgttaagagcgagggcaggtgcaatgggtccaggtccctagaagggtcttacattaaactgaagtgatttctcgattcctttatatagctttgtaaatccaaattggattatacgtgatcataaatgcagcgagcagaaaaggtaaaagaataacatcgtgttgcattaaactgagccttgaaatttgatgccatagttgtaatacagccgtttcatatgagaggctcagtctccagtatctcttagagcaatttttcttcttacatgccttgtataagcaatctgtgaaatgatgggctgcgccggagggttttctgcttctgcctcgctgcatacttttgtcaactctaaattgtaattgtaccgttcatatttgaatgaattaatttactttcctatctgtaacattgtataagcacagctctgccatattgatcctggtagtcacttggtattcggaggatatatggtatagtatgcaagggacacttgggttgtagcc

SEQ ID NO: 66504 - DNA, 427 bp, Glycine max
  Clone ID: PAT_MRT3847_31067C.1
gggctcgagttgctctaacacttcacaatctctgtttcagctctctctcttttctacagtggcttgcaccaccgtcgggtggacgctcgtcgccgctttgttggtaacctgggtcggggctttgtgtccagcgtccttaccagctatgtctacagagggcaccctcgtggtcacacctgagaagtgtacctcggctgggattgatcccttcggcgagttagcgtcgttctgtccttccgatggcgtggtgaacactctgcctgcgggctcaaactcactcagaggtccgcatctgctgctggggatcctgagcgggaaccagacgagggtgcctcctgtgattcttgaggaatctgcgcttctaccactggagcaccggagtactctctaaacggtgccggtctgaacagagacactgatgctggat

SEQ ID NO: 66505 - DNA, 241 bp, Glycine max
  Clone ID: PAT_MRT3847_31068C.1
cttcaaacttgcagctccaaatttgtgcttctgcagacacagaaacccctcattcacatgctaacataatttaatgttaaaatcagatatttagatgaagggctattttcaaatatgtacacaacttgcagttgcagtactgtttccacatatttaataacagatgaaattttgttgcacagaaagttcatagatttggatactcattgccgtctgcacagaaagttgtggaatttggagc

SEQ ID NO: 66506 - DNA, 418 bp, Glycine max
  Clone ID: PAT_MRT3847_31069C.1
ggtttatatggaaagaatacctcttgccacatctgagggtttttctaatgtgcttccacgcaaaaatggtgaaaaaggcaaaaggagatttgtttctggggacggcgaagagatcacattgattccgggaaccagagttgaataggctctcaacacgctcatagttgaacttgagaaaagtgactctacattgattggcattgcacgctccaaggatgagaaacattctcggcgcaaaatttacgacaaacctaagacgcgctgctttactattctccctatggagatgaatcttgaggtccggcagaagtctttaaattttgtgaggttcattatgaagaaaagggacaagcttagttgtcaagtcggaatcaacccatactccatggaatggaccggattggccaatagattactg

SEQ ID NO: 66507 - DNA, 678 bp, Glycine max
  Clone ID: PAT_MRT3847_3106C.1
atggtgagacaatgctcctttgttgaattgcaaattttgtctcacctcttgatcaggcaccaatttttcaatgcctacatacaaccttgtcagaaatcgacgacgcaacagccgcgacgcaagcaaaggaaacactctcttgttttgttactgccttttctctcactctggtgtcttatagatgaaaatctttgtcacagcttagagtgcaatgctggtgcactcacaaattttgaggtccttgatttcttacgagctaaaggagcttcaaaggatccaacaagggttattgccaaagtagcgcagtctgaatacaaggtttatgattatttggttgacactgctgcctctgttcaaacaagagagagcatcaatgagttcttgacaagtgttaaacagcatgacttggcaaaagctgaggttctgaacatattaaacattgggccagctgctgaagttgaactatacccaatcatagaggattgtgatgagcgttttggagatgaaggggtccttgaaatagtagagctggtgaagaaaacattgcaactgcctctcaatatgaagcaggaagaaatcaccaaggttgacgaagaaaccgcaacactgaaaaatgaaaagggtaatcagattagtcaagaccaaagcgaaggtggagaacaaatgaacactagttaa

SEQ ID NO: 66508 - DNA, 119 bp, Glycine max
  Clone ID: PAT_MRT3847_31070C.1
gacccgctgctggattctaaccgaaaacaccaacctctgggaaatgctttccaaaccatcaaatcgttccgtaaaccggccctttctgaggccttctgacacccggacggacgcgtggg

SEQ ID NO: 66509 - DNA, 328 bp, Glycine max
  Clone ID: PAT_MRT3847_31071C.1
gaagagggctcgcgggttacttgagcggcaagaaagaggaaactaaagagatggctacggagaccgccgaggcgacagctaataaggcaggtgagatgaaagaggcaacaaagaacaagactgcggagaccgcagaggcagccaataataaggctggccagatcaaggacagagccgctgagacggccgacgccgcaagtgcaatgaccggagagaccgcggatgtggttcagactcatatgcatgatagcattatgattgccaaagataaagaagatgctcttgctactaagaatcttgttcctggtgaagctgcttacaacgagaa

SEQ ID NO: 66510 - DNA, 369 bp, Glycine max
  Clone ID: PAT_MRT3847_31072C.1
gccacgcgttcgtccactcgttcatccactccttcgtcttctccttcgtgatctcttctatcgcaactattacactattctcattgctccaccattctagctaatgggtactcacagtgaaagaaccccacagatcacattggagattccatcattttcaatcacaagcaacaccacaacatctacataatcaagaaccagaaagcctttgacctcttcaatttcacacaagctacttttttcaccaacctcaacactgcttactacatgttgcattcatcactgcctggtctatactactttaccttcaatgatgggactctcaaaacatgtaaagcttgacagaagctagcatttaatgtcatcact

SEQ ID NO: 66511 - DNA, 326 bp, Glycine max
  Clone ID: PAT_MRT3847_31073C.1
gggaaaaaaactaaatggggtattatttcaagacaaataagttctccaggcatattttaccagttaagtctcacatgacccaacaggagagcaatgaaattttttcaatttgaggggatctaaaccacaattttattctattataaataaatggccccttttatgaagcaaaaagaaaaagatttaaaattgccaaatgatgagaaatttagctgcactgcacaaaactgtaccagttatctaactttcatttcaaagactgcctaaagcctgtttaaatggatcctaaagacctcccaattaagctaactaaaaaaaaagggaat

SEQ ID NO: 66512 - DNA, 371 bp, Glycine max
  Clone ID: PAT_MRT3847_31074C.1
gattacaggagaatggttcacaaacagtattttgctcgagaagctcttgaaagctgattgataaaattccaaagcgagatcaattagtttccacgtcatagttgtaaacgtttgcctgaagaaaaagtctgcaccttataaatgtcctttttttttccttgctttgatattgtaacctgaaactacgagagttctaagtcctcttaaaagtcttttaattactttctgtatagtagtaaaagttttcattgcaaaatagccaaatgacgcaatgacatctttgtgatattttttgcttcggatgcacgatgcttacaactgtatattcatgttacgtaatatctgtccctttgcccctgatgcttggcttc

SEQ ID NO: 66513 - DNA, 366 bp, Glycine max
  Clone ID: PAT_MRT3847_31075C.1
ctcaagccacacaaaatttgcaccatcttgattaatccctttggctgtctgtatttgacaatggggcaatcttcttattttcttaaaacccttaaaccgggttttatgataattgttatgcaaagaacaccaaggaggtcaaatcccggctggctgaattacaaagcgaacaacaattgatcatcaacatataaaaattttttagaagacacttattggaacatggcacacattgtaacatctgatggtggatgctacataatacatattattgtcttaaaatatacttcttcttaccgacccattaaggttctttgaaccctatttacaattttatttttagcatcaacacctgttaattgaaac

SEQ ID NO: 66514 - DNA, 657 bp, Glycine max
  unsure (1)..(657): unsure at all n locations
  Clone ID: PAT_MRT3847_31076C.1
ggcagtctccaaatcaaaaatcaatcttttccaaactcgaattcgattccttggtcacaatatatatcaaggtacaatcattccaatcgaaaggtcaatagagtttgctagcaaattccccaaccaaatcttagacaaaacccagttacaaagatttctaggttgtctaaattacgtaggagaatttgtcccctatttaaataatattgtcaagccattacatgataggctgaagaaaaatccgcctccttggtctgacctccatacacaaacggttaaagaaatcaaagtcaaagtccaatccattaaatgtctgtatcttcctattccacaggcatttaaaattgtcgaaactgatgcttcagacataggttatggtggcatcctcaaacaaagagtccatggccaagatcatgtcattgcatatacatcaaaacattggaatcctggtgtactctgaatgcgaacctaactccttgtaccaagaggttatcttcttttgaggcttcattagattccaactctttggttacccttttcatgaattcccttgataacttcaatgaactcagcttcatctgaccaatgnaggcctgtgtccagcatccactcccaagggatatggaaactnctatatcttatacttgcactctccct

SEQ ID NO: 66515 - DNA, 336 bp, Glycine max
  Clone ID: PAT_MRT3847_31077C.1
gtccaaaacaaatatcttgttttttgaggggctaaacccaatattaaaaaaaatccccaaatacttttaaaaaattgaaaatctcaataaacattgatatgaagaaaactttgcaaatttaaccataaaacccatctatataataacaagtttttaattaaccccaaataaaaaaggggtataaaaatttattttataatagcttctagccattttcttttgacctaaaataaacatatttcactaagaatttgtatggacaattttgtaatttgtgcccaacacttttataacaaaactagcttccttaatttttggaaccaaaattaggaggtt

SEQ ID NO: 66516 - DNA, 250 bp, Glycine max
  Clone ID: PAT_MRT3847_31078C.1
gtcaggttctggaatctgcgcaaagcgagtggtggtggacgctctccaccacatgtttggttctctagcgtccatcgtggccaaagagcttctgaatgggcacaacgtatctgtggttcccttccaatagaatttcatctccagctttctggttacgcaaaatattaaatacttgtgattcctccgcttactcatgaacaccacaccctcccatggccctatccactttcacgccccatccgatatcttc

SEQ ID NO: 66517 - DNA, 266 bp, Glycine max
  Clone ID: PAT_MRT3847_31079C.1
acactttggggatagaacatctttacttgcttggatatatttcttggattgcacccgaactttggggggaaaggctaacggccccctccttttttaattataaggccggaagtttaatttttcaaaaaaaattttggggggagggaaagcttttttgggccctaaatgtaatttttccctcgaaagaaccacccagggagagtgccaaagcccgggaaaagttctttctaatttgaatgtggggcttgaacccccgggttatatct

SEQ ID NO: 66518 - DNA, 396 bp, Glycine max
  Clone ID: PAT_MRT3847_3107C.1
aaataactcagtaatcgcattgagtaccctgagagagtatggaagaaaagagcttattgatgtgttggattcagtacgaggaaagaaaggattagttttagatcccaaattttctggtcctttggggctcatcgccgaagtatcccttctgaaggagcatggtatagaaaatatttatcatcttactcccggaaaactaaacacgcaatgcaaaaatctaatatatttggttcggcccaaggtacatttaatgaaaatgattgcagaacatattcatggacatattcaagaaggtcaaaagaaagagtattccgtcttctttgtacctcgaaggacaatgatatgtgaaagagttctcgaagaggaaggtgtctatccggagatcagttttgggga

SEQ ID NO: 66519 - DNA, 264 bp, Glycine max
  unsure (1)..(264): unsure at all n locations
  Clone ID: PAT_MRT3847_31080C.1
ctggcctgcnttgctcttgnttgtgcgcnggcgttggtcnctgccacgaaccngctcngccgttgcgnngngctgtgcgctnacctgatgggccggtgcttnacggtcggtgctggacggttccggtgccctgnngttctttccagccntccntgnttggggtggngtctcctggtgtccgtgaggcancgtgtnactctannntgncgtgtggtgtcgacgtcnggncgggtctctntggtnccgtngtcttgcgtggtggtt

SEQ ID NO: 66520 - DNA, 564 bp, Glycine max
  Clone ID: PAT_MRT3847_31081C.1
ggggcagggaattccccatgggaaaaacattttttacaggtagcttttaaccccaaaaaacaaaagcaggttcaacaggggccggtttttaactttaaaaaaagggttttttcaaagcccccattctttaaaaaggaaaaaaaaggagaggccctaagtagcaaaaggcccgggctatttgggaaccacaaaattttttttccattaaaaaaaaaaccccccttaaagctggggggaaacccacatgggaatctttatgccccccaattttaaaggctaaccagcttcaaatttagggccgggatattaaggccggaaattctgaattgcatttggagcccaagccttaaaaaaggaagggaacactggaagcttacagccatggcagctcagggggccttatatttttaattacaaaaaacaacccccccaaccaaatttgcatattcccccaaggacaaaaggcggggaaatttacttgacatctctataaaaacttaggagggaagaaaactttcaaaaccggggctttggaaaaaatggcaatgaaatccccatctttga

SEQ ID NO: 66521 - DNA, 299 bp, Glycine max
  unsure (1)..(299): unsure at all n locations
  Clone ID: PAT_MRT3847_31082C.1
gagcggtcgtccttttttttttttttttgnagcataaagcgaatgttaagtcaattttatgggnnncatctttaccggatttgaacaagaaaactctaaatcaaactaaaagctctacaagagattaacaccccttaactaaacaggtgggtttagaagtacaaataaagaacttccttgtttaaaccattcaagttttgggaagacaaccaatttaccgggggggcgagggaatattttttggaaggaaggaatatgttttttaagaaatggccaggccacctgcaacaaatggttaa

SEQ ID NO: 66522 - DNA, 196 bp, Glycine max
  Clone ID: PAT_MRT3847_31083C.1
ggctcgagcttcctccaaattcagttgctagattaccatcgctatacgacgtaggacttctaggcaagattagcacggagccactagtaagccatggtgggacctatgagcgtgatatccagatgtcagagcattgttacattacataactgaccattttcgactacttctgaagaagaagggatgccggcagata

SEQ ID NO: 66523 - DNA, 280 bp, Glycine max
  Clone ID: PAT_MRT3847_31084C.1
cgtcaaagataagacgacagaaggggaaccgcgaaccatctgaagattctgaagtctgaaccgaacagctacacaaagttcgcgtaggttggaggcacgggttggttaagccgcgtaacaggtgaacaaacactgagagagcgattaccattacttacaagcgtgtgtgtctttcgttcgttcagtctccatttcctcatcgatcagatctgagtcaatctcacattcctcaatttaatttcagtcggaattcacttatcgtgatttccgaatctgggcg

SEQ ID NO: 66524 - DNA, 154 bp, Glycine max
  Clone ID: PAT_MRT3847_31085C.1
tggaaccttacaatgtactcaaatctgattgctatcgaaagggatgagtaaagatgtagcacgctttaaaagaaaaatgcaccgtcccgttaaagggtggatatgagaccaaggctgctcctgtatagctgcaaccattgtctattccagatct

SEQ ID NO: 66525 - DNA, 269 bp, Glycine max
  Clone ID: PAT_MRT3847_31086C.1
tcgcccactcgttcgctgacgcgtgggttttctttaaaccttctttgcaatggttgtttcgcggttctaacttccaagtcagataggttcctcactgcggcatgagtgagtgaactttggataatggcaagcatggcaagaggaagagcagatgtgaactccagaaaaaaattggtcacagctgtgttaggcttggtgattgttggtgggtttctctatttctattcttagaatagtgattcatcttccggtgtgtatggtgataaatc

SEQ ID NO: 66526 - DNA, 2179 bp, Glycine max
  Clone ID: PAT_MRT3847_31087C.1
ccgctagacgtagtttggaattgttggatatgaaccttcagtttctcagcaacttcgctttaacccgtgacggaaaaactcaaaaagcagcgtaaatcaaaatccttggaatcccttttgattccctcacttcagttttcaccttaatcttctcaaagatttctcctttctctccttttctctctttttcgctttctgggtgttgtcgtaacggaattgaaaccgtgatgggtgcggtcctcgtgtggtatcctcagccgcgcacggcagggctgtgccgaaacaccttgccgttaggtttcggtttcggttccaccccacaggtgactatagacgatgacctccactcgaggatcaacgcaaatggtgatggtgttagtgttagtgttggatgttggagtgtgctcgtaacagacttggatagtgcctgtatgtcctttgtcgattatttaggaaacaagatgagagtcttgcagcttcaaacggtgataatgtggataggactactggaacaactaagacaggcgtcatcgctattggtagtgtacgggaaaggataggagtattaagtctagcttcatcttgatttgaagcagaagataagcctctatcagtttctttctgagaactctgaggaagcaatatccaacattattacccctggtgagattcatagtgacggatgtaatgctcctgatgcacaagatcaaattgtagaaccagttgcagaggaggatcagccgttgaacgtggacatattttatgacccaacaaatctgccattagacgacaaattattctcccctgtccatgcacatttcccaacagatttttattatcaagctaacaatcaatcagaacttcagtatggtacaaatgagaatatttcagaattttttgactcggttgttaattgggatgcgttctctcatgatactagcagtctagatctgagctcatccttccttattaataatacggacaatggatcaggcagtgactcggatgttgaaatgaccaatatgccacatctgcaagcattacataattatcctaaggaggcagttgagcagaagagcaatgtgggattatttcagaacaatttccagatggcgttgtcaaatgatagtactatgggccaagtgcacaatatggtcaactattgcgagcaaccaagaaactttgatgcatttgttagtgctgatactggaatcagaataaggactcgtccaggaagaaatgaacagccaaacatggacacgatggtacaatcacaaggtattgcaccaaggagaatacgattgggagttgttaggcgtccgcttggttcccaggatgggagttgtgcttgtgccccagaagaccataattcaaaaaccatcattactgcagagaaaaaagcttcagaatcagaaaaccatgctgccgatgggagttccactgtttctgacatgagttccactgttacagatgatgtggatgaaccagaggaggcatctcccgagtcaaccgacctaagaaacattagtgagaaacatgttgcaactgcagaatccgtcgcagggtcgaaagtccttctagtgaacagaagggtccactacacctcaaaggtttcctctaaccgtgccacgtggtctaatgttctcgcagtttctgccgctgtattggtctcagcaatactccttgttaatatatgggcatatgtcagatcttaaactgcttacatgtagtggaagatcatttcttttgtgcgaaatttgcctccattgcttttttgcccggttaaggaggcgtgtaggattgacttgttctgacttgttgataacaatgttgtacaatatatatgtgcatatgtatgtagtagtcattccacaatatggtagcatagctgtctagtatgatagacacgtctgtgtcgtgttgccgcagttagattcacagtttgaccgtatccatttttgttttgaggttaagtttagttttctctcttggttagtgataataacacgcagttaccctgggattttgagtgtcactttaccacttgtgctttgttcccatgtggttttgttgtatcacttttttggctatgttaactaggggaggaggattctgtgtagcttctgttaaactgcagaccatctcaaggcttaaaagttaaaatttattttttgtatgg

SEQ ID NO: 66527 - DNA, 813 bp, Glycine max
  unsure (1)..(813): unsure at all n locations
  Clone ID: PAT_MRT3847_31088C.1
cggaggcagctgccgggcattcgtgtggtctcgtcgtcagcgcagctgggcctacacacaagcaaccatgtctaagggacctgcagttggcattgatctcggcaccacctactcctgtgtgggtgtcttccagcatggaaaggtggaaattattgccaatgaccagggtaaccgcaccacaccaagctatgttgctttcacggacacagagagattaattggggatgcggccaagaatcaggttgcaatgaaccccaccaacacagtttttgatgccaaacgtctgatcgggcgtaggtttgatgatgctgttgttcagtctgatatgaagcactggcccttcatggtggtgaatgatgcaggcaggcccaaggtccaagtggaatacaaaggggagacaaaaagtttctacccagaggaagtgtcctccatggttctgacaaagatgaaggaaattgcagaagcgtacctcggaaagactgttaccaacgctgtggtcacagtgcccgcttacttcaatgactctcagcgacaggcaacaaaagatgctggaactattgctggcctcaatgtacttcgaatcatcaatgaaccaactgctgctgctattgcttatggcttagataagaaggtcggagctgaaaggaatgtgctcatttttgacttgngaggtggcacttttgatgtgtcaatcctcactattgaggatggaattttttgaggtcaaatcaacagctggagacacccacttangtgggagaagattttgacaaccgaatggtcaatcatttcattgctgagttcaagcgaaag

SEQ ID NO: 66528 - DNA, 396 bp, Glycine max
  Clone ID: PAT_MRT3847_31089C.1
tttcggtttcattcgggtggttacatttccgaataccattgtgtttattgaaccagacatgaatttacggttccagcttttgagtaccactaccaatggagattttgttcaaggaaaagatttcgcaatggttaaaggcaatgtagcatgagctgctgttggtttgacatcaagatacactccaactccattgttggaatctggtctgcaaaaagacagagggttaattgtggagcactttgtaaggaagtcttacgctgctcattacgtttaacagccccaagagaaagatttgtttgagggaaatacttcctttggtattgaaactggctctagattggagaatgttctcctctacaaaagctctaattcgctagtggaaaaaccttcacatat

SEQ ID NO: 66529 - DNA, 230 bp, Glycine max
  Clone ID: PAT_MRT3847_3108C.1
catacgcattctgaaaaacctaaattgcctcatcaaaaccaaacttttggaaaggtggaatggtcatttgaagaactttgatttggagaattctatgcggaccttgggtcacatggatctattgtgtctgctacatggttgaacagtgctagccattattatgtatgactgaactaaatgcacatccatattttggacaactgtatcactgtttaaataatagtgaggct

SEQ ID NO: 66530 - DNA, 463 bp, Glycine max
  Clone ID: PAT_MRT3847_31090C.1
gaccatctcactggtcttcggccgcccttagtgctcgggtgctttttttttttttataggtattctcattttttggcttactgtctacctcctggctgattcaaggtgggactgcagcttctgatagcggtacataaacgacttcctcttcaaaatgaaagcctacaaacacgtccaccggatcagatacaagtactgcctgaccccgaagaggattcagcgtgagattagcgaaggggctgaccttatcgacatgcttccccaacagtacacgttccaagagatcatagccaagctaaggccgatcccgagtacattctcacccggaaaaaaaccagcctatctgctggagcaattctatcgggacaggtgccttgtcccaggcaactgccttttatatagtggctacgcacttggaagagccccggctgcataatgaccctcccgcccacggacgtcgctc

SEQ ID NO: 66531 - DNA, 209 bp, Glycine max
  Clone ID: PAT_MRT3847_31091C.1
aacatagtttttgaagcaatttttagttcaatttttaatcaattgaaccgggactaaacactgcttataaaacctgaatttaagccggcgcgtttattataattatttgggggaaaaccaggtgggccagtgattggttatgttgaagacacattgtttgacacccttctggtgtctcctctctaagaagaagccacagaagaaagaat

SEQ ID NO: 66532 - DNA, 423 bp, Glycine max
  Clone ID: PAT_MRT3847_31092C.1
ccttagcattttttaagcaccaaattcttcttacacaattttttttttccaaatcattctcttgatctgcaatgggtttctgtttgcctggttttcaaaggcgcagtgatgtcccaaagggctgccttgtagtttaagtgtaggacaaaaccaaaagaagcagtttgtgattccctttatcatatttgaaccaaccttcaatgcggcacatgctgagtgaagttgaacaagaatttggatttgataatcaatggatggcctcaagaatgccatgtagataagataatccaatgcattagcatgatcttgaactcactaatctttattaacatgtagtttcttcttctgtaatgcttgattaataaattagcggggatgtgcatgtgtgtattcaggataaaagtcaaatagccaatgcttttt

SEQ ID NO: 66533 - DNA, 472 bp, Glycine max
  Clone ID: PAT_MRT3847_31093C.1
tcgtccactcggccggcgccccttccctccgagcgccgtttctgggcgccttattgcagccaatggggagaggaaatgggcctcataggaaataggaccagatctgaaacacagctggctcaaagaaactccaaaagcaatgacactgagaatcacgtacaggaacaaaacaccctggaactttatgaccgtgcaaagaagcaagatgaggagatcctctcccttcgtgaacatattgccattgcctgtatgaaggaactgcacctgctgaatgataaatgcaaactagataggcaattgtctgaactgacaatggcagacagctgacgaagcaaacatgaagccatctaatgcgccttatcatgatattggcctcaaagaaaaggcctatctcagaagaagaatgtaaacactagctcatgatctgaaagctgaagacgatgagagatacatctgcatggtatctatgctg

SEQ ID NO: 66534 - DNA, 846 bp, Glycine max
  Clone ID: PAT_MRT3847_31094C.1
ggtttcgctataaacttagcccttctacactctactttgtatcatcttaagtatttttattcatctttaatttatttgttttataatggaactcgctaagactccaatcaatgttcttaaaaacatttgtgccaagaataactggaccgttgattataatatgatctccgaggaaggcagagtccatgaaccaacttttactttccgtgtttttattgaagaaactcaactatcggctatcgctgctggattcagtaaaaagaaggcaaagcaagctgcagcttttcaagcattgaagattctcgctgaaaaggatgaagaagcagctcaagagcttgccggattggaagaagccgtcccttgtgaaaaagaagctgatacagctgtagacaaatctaaccctgttggcaaattacaagaaatttgtatgaaaaagaaatgggcccctccattatatctgacagatgaggaagatggtccaccacatgccaagattttcacgattacctgtaaattagagaattttgaccttgattcgcaaggaagagacaagtcaaagaagggcggtaaaaagattgcagcacaagaaatgctaaggcttctggagcttaaaggactatatgatgcccaagatgattcggtaaaagctctaaaggaaaaagtcgagtcattaccaactattgaaaatttgcatccagtcgaagaatagttacttttttagattcaaaatctattttttatacatggatattcctccctttaacctaatgttttctatgatttacaattctattataattagataaatctaacttttacgttcactagagattgtgtaaaaagtgt

SEQ ID NO: 66535 - DNA, 423 bp, Glycine max
  Clone ID: PAT_MRT3847_31095C.1
tttttagctttcttttgttattattttttaaaaacatcaaaaacttcagtgggtacaacaaatgttacagaagaaatcttatgtaagccccacctaaagcaagcatgaaaaacaaatttaataaagacagaatttaccaataccttcttataaaggggcctaaaaatgtaaatcaatgggctcataaaatgatatcttttttagcctgtacatatgctttgtaactaataaaatctactgtaaaactgttctaaacatttgacatagtctttaactcaaagcagggttaccaatttactgtaaaactgttctaaccaagaaaatatttcccttagctgtagaaccaagggtcccatattggcccattatggaaaggtttgatacgatttggtttccaattaactgagtattaaaaaatggttt

SEQ ID NO: 66536 - DNA, 242 bp, Glycine max
  unsure (1)..(242): unsure at all n locations
  Clone ID: PAT_MRT3847_31096C.1
gtccttttttttagacaaatttgggattttnnatttcattttcttgcacccaattggntttntatctgnanccagtaagctttttttgatgtcattntacttttactaagttcgtttggctgtgtgtggtgtggcggttgtnatggatctgaacactgaagcgttttgcaacatgggtgtgtttgatgtggttgntgcccatgatgcaattagagtctattttttaatcgttgttatgcata

SEQ ID NO: 66537 - DNA, 379 bp, Glycine max
  Clone ID: PAT_MRT3847_31097C.1
gtctgataggtgggaaggctggagaggcaggtatggtgaggaagctgtatctgaccatcagtatggtgaggtgagtgatgatatatctgggtggcctatgagggagagagatagaggctgaggaaagagactggtctggcacttagtgagagaaggtacatagattatagagattatggatctgagagagctgctcctgacgaagaacacatgggccatgaccatgaatgttacgaaagagggccttgtgatgatatagaatcgggcctagatctacctcgtgaacaagaccgggaacgatctctacaccgagatcgtgacccccaaaagtatcaccgtgaccgtgacctgcacactaaacatatggacatctatggag

SEQ ID NO: 66538 - DNA, 557 bp, Glycine max
  unsure (1)..(557): unsure at all n locations
  Clone ID: PAT_MRT3847_31098C.1
tgtctnntttcgttcgaacccttcccttgggtgcnntgtacataggtaacnttngtatttnntgtcaaagggaagggcaattatacttcaatgttgatgcacctnaaaccatnaaaatnncaaaggattaccaaattgtgcnnaggatangnncttgcattgttacagcnnattcggaggaaaagcnnattgaggaanggacacnnttttcctttcttggtcttggtctttcaagctggtggtnnttttccaaacttttgnntcgtcttattggcaaaggacaaagaagtaaaggaatcnncgtatgnnatgaaaannacggttgctttcatacanataatcggcgtgataccagaatagataaacatatgtcgccagaggggacttcccaaaatttttgttaagagaaagggttttcaaagttaaaaggtagtatcaatttcagatatactatataaaaagaggtggatttcagggcttcaatatacncggagatttntgtaagtttggtcaaggttgatttgcccaaagggatggttcagcagggttactttttc

SEQ ID NO: 66539 - DNA, 1384 bp, Glycine max
  Clone ID: PAT_MRT3847_31099C.1
cttacaaagcggcccgcggagctaaaagggatgcaggacattcaccgaaggagttcaaggttgaagtggaagctataggacgtgttcgccacaagaatttagtcaggttgcttggttattgtgctgaaggagctcatagaatgcttgtttatgagtacgtggacaatggtaatttagagcagtggctgcatggggatgttgggccttgcagtcccctaacttgggaaattcgaatgaacattattctgggaacggctaaaggattaacttatcttcacgaggggttagaaccaaaagttgttcaccgtgatattaaatcaagcaacattttgctcagtaagaagtggaatgcgaaggtttcagactttggcctcgcaaaactccttggctctgacagcagctatatcacaacccgtgtcatgggtacatttggatatgttgctcctgaatacgcgagtactggcatgttgaatgaacggagtgatgtttatagttttggaattcttattatggaactaattacaggaaggaatccggttgattatagtcggcctccagaagaggtgaatttggtagactggctcaagaagatggttagcaacagaaatccagagggggtgcttgatcccaagcttcctgagaaaccaacttcaagagcactaaaacgagctcttcttgtagctttacgctgcactgatcctaatgcacaaaagcggcctaaaatggggcatgtgatacacatgcttgaagctgaagattccccttacaaagaggatcgcagagctaaaagggatgcaggacattcacctaatgatagagtaggggatgggttgaaagaggaggtaactgtgtctgtgtcagttgatgatggtaagcttgaaaatgggatgtgtgccaatgagacaagatcgaaccctcaaatagaaaagcaataaatttggatagctgtctctttaatggccaaaaaaattgtggctccctttacaacctgtcatttctgaaggccaaacaatttgcatccatcggacataacatacttgatactttgctctgcattgtttgcgccttctatacatgagtctatactctcataaacccacacatcgagatttcccgtattctgtctgtcccgtctaataagggatgattgcagccacaggttgctcatgtaaattttagccatattgttcgattcacccaataaaagattataatgcatcatcgttggatatcaaacaataattgctgctaaagttaatttcaacctcagagtagggctaattaatgcattagtgaggtatgcatatcatgtgtttgttctttaattaactgggagtataaattaagatgtgaagttaaaaggaaacatattttaagttcaaat

SEQ ID NO: 66540 - DNA, 292 bp, Glycine max
  Clone ID: PAT_MRT3847_3109C.1
gtagggagtggaatttaaatggagaagacacgtgttcgacagagagcttgagatgacagattgcttccttactgaagttgcttgcagcagtatccagattcacagaaaagatgagttgatctggaaatcagagcctactggacaatattcggtaagaagcgcctataatatgctcaatggagtggatgttgacgacgataatgggtgggtgtttgacgagttatggaagattcgagtcccaactaaaatcactacatttgcatggaggttattatacgagagactacaaacg

SEQ ID NO: 66541 - DNA, 519 bp, Glycine max
  Clone ID: PAT_MRT3847_310C.1
ggctgcactctctctgctcgtgccacgtgggcgtgatgactggctcctgtggcggtgcttctagagtacaggtgcccagacagaaactcatccttggagccaagagctagcttctagatgccatcatcctgctctatctaagatgatatggatgcccttcattgggctgctggtcagctcatgcatagactctatgctcaatgccgagcatagagctatcttagagagagatgcagcatcgataatcaacttaccgattcactccaacatctatgagtccaatgccattgtcacggaggaagggagcctgcatgagtatcagcctgctttggacctcatcgatattttacagatctaggacatacctaccaagaaagatgatgattcctactgcagagtcagcattgctaccctcttccaacgagctatgctgcagctgctgtcaagtgcacattttgaagagctatcagctagggatcgtgatgttaacgtcctgcattgagcacagacgagcacctt

SEQ ID NO: 66542 - DNA, 427 bp, Glycine max
  Clone ID: PAT_MRT3847_31100C.1
aaacattaaaaaaaccttttttaatttacaccagctaggggggaccatattagctatggccgagaagatagattactttaacatatttggctacaacgggatggaaaaaactagaatgctccgtgtaaccacaacaaagttccgtatgggataaatcaactgatactggctgattgttttcaacttgtagaataacctgttggaacatgacagataaccggtctcaggaagccgaaacttggacaaacagacaaactaagaccgtctttgatttcatgcggctaaggcaagatgagagctataactgtgataactgccgaggatatacctaccatcgagtcctttcttcactgacaacaccctaggcttgttaactaggctcccactgttaactggaataacattctgcataacagccatgcccaat

SEQ ID NO: 66543 - DNA, 308 bp, Glycine max
  Clone ID: PAT_MRT3847_31101C.1
cccacgcgtccgcccacgcgttttgttatgaggagtaatgtcaccaagtaaggacatattctcataacatgttttatgcgagattcattaaaaaaatcttgttgataattgttttactggagatccacacgagtttgagcattgagatttgggtgcgcggtttttggtgtgatatataagttgatagttggaacattagtcttggtatgataaagaccttgccaataatttgagttctgattcacagagctaggacagttatgtcttaagactttgaaaggtgtttaatgatatttaactttaataac

SEQ ID NO: 66544 - DNA, 419 bp, Glycine max
  Clone ID: PAT_MRT3847_31102C.1
gaatgtgtcctacaaggaagagttcattccagatgatgaaggctcatacagtgtattattgcaaaaccaaagtgtagatggtagcagcactagaaactccttttacatcagtgaacctgggaagatagtgataacagttgaaaatggaacctataagaagaaaaaaatgttctatagatttacagctagaaccactgttccaatgttcttcttgttacagtagcaatttgatttgaagatattgtacattcacactcagttataccaacatgaaatttctggcagaatagaccccttttactcactgctagaattgattctttgcatatccatatgtttctaatgggtttttttttttaacatttgggacacaaagccatgaattaatggaatagaagattttatgttaaaaaaaaaaa

SEQ ID NO: 66545 - DNA, 167 bp, Glycine max
  unsure (1)..(167): unsure at all n locations
  Clone ID: PAT_MRT3847_31103C.1
gggagattgatcctgtggctgttccttatgctgtctcgannangctaatagagcatgtccgcattaggcatgactgggngcnatgnatatnngcattaaanggggagnntgaanaatttnatgtagacntaaaggantatganatgntttgtgaagatntggggggc

SEQ ID NO: 66546 - DNA, 511 bp, Glycine max
  Clone ID: PAT_MRT3847_31104C.1
gtccaccttgtgacctttattctctccatatgcgttttgcatattgttttcatttttctcttttgatcatttcttttgggttggaaggaggttctgtttttatttttagtttgggcggtagatacagacaaaagttattgaatatagctctatagtaaactgttgttaatttaggcagtgttggaatgggaccagtgtttcgtttctgagctataatgcatgaaggttttgtgatgttatgaccatatttatatcttgtaatgcatgccagttgcatctaccaatagggccattggggtgtctcatataatttgcagcaatattggaagtttcattttctgggctagtttatcgtgggtttataattctattattgtggaatggtttgaaatatttcatatactttcatcaacaagaaaacaagttttttatctaatatcgctttacctttcttcataattttcatcctacgatgtctgtttcctctctctctctttctgttttgtatata

SEQ ID NO: 66547 - DNA, 504 bp, Glycine max
  Clone ID: PAT_MRT3847_31105C.1
atccttagtgtttgacttttcccttccttcgagagaccccatattctccgctatggcccaagacacccctcgagatctcgcgactggggcaggagcgcccgaccaatatgctctagcccccatgattgccaccggagcgatcgctgggtcccgaccagacccggatgctacgcatgctccacattcctcctgcaccagacccgctgaatgggtctaagatgcaataggaaattgctccactcactcccctaaaacgtgtagttgctgcaaccgatgctgctggacgcatccactgggctcaacttgcgcaggatggatgccggagcacgtatactaataagcatggcacgtcaggagttcatgactcacatgctctccatttacaagccccaggcgtttgacctcataacgcgtgacgttgccaacctccaggatattgacgcacctagcccagcagtgaggcctgcatggctcttgacaaaaattgctcccatctattcccgg

SEQ ID NO: 66548 - DNA, 417 bp, Glycine max
  Clone ID: PAT_MRT3847_31106C.1
aaaaacatgaacgtaggatgagaaagatggtcggaaattgaggaagtagtaaaatgattcccaagatttctccgatgaacgaggatgggaagaacagaggaatcggaatagccaccgaaaacccttattatggaacctttcaaggcgtcgctaaccactatcctcctcaacaccaacaaccacccgttccctacgctaattattaccaacgacaaggataccacgtcgttccagtttatgccgttgctgaaggaaggcctgtgagagaacgtcgtcttccttgctgtggacttagtctgggttggttcttgtttataatgggttggtttcttggtggtgttccctggtacgttggcactttcattctaatgtttgtacatatggattgccgagaaaagcctggattgattgcatgcg

SEQ ID NO: 66549 - DNA, 1387 bp, Glycine max
  Clone ID: PAT_MRT3847_31107C.1
ggaatggagaaaatagttcaatccaaataaaccacgtcgtctaaagtccagtccatatcgcgttatcaaagttgtttttttttctttttctgagagcgacagaaagtggagaagaaaaagatggagaaaatagagcacaaaacggtgaggacgaatggaataaacatgcacgtggcatccattgggtcaggcccagttgtactgttcctccacggcttcccggagctttggtacacgtggcgccaccagcttctgtccctctccgccgtgggctaccgggccatcgcccccgacctccgcggctacggcgacaccgacgccccgcccgacgcttcctcgtactccgccctccacatcgtcgccgacctcgtcgggcttctcgacgctttgggaatcgagcgagtttttctggtgggccatgactggggagcctccatagcctggcatttctgcttgctgaggcccgatcgtgtgaaggccctcgtcaacatgagcgtcgtgttccgccccagaaaccctaatcgaaagcccattcagagcctcagggccatcatgggcgacgattactatatctgcaggttccagaaacctggggaggttgaagaagagtttgcacgtgctggtgctgcgagaattataaagacatttattgcatctcgcgatccacgaccaccttgtgtgcctaaggagataggatttggtggttcacctgaccttcgtattgatctaccttcgtggctgaccgaagaagatgtcaattattatgccagcaaatttgaacagaaaggtttcactggcggcctaaactactatcgcgctatggacctaacctgggagctcacagcagcatggactggagtacagattaaggtaccagtcaagtttattgtgggagaccttgacattacatacaacactccaggtgttaaggagtatatacataatggtggctttaagagagacgtaccattcttgcaagaattggttgtgatggaaggagtagctcactttataaatcaggaaaggccccaagagatcagcgcgcatatatacgacttcatcaagaaattctaatccacgttattatccttcagaagtataccgtgcacaagtcattaataattcctgtaatcctgacttggatgcactgtttctcaagcttgtatcaatgtcatctacacaacttctggcgtaatgccaaggtttcttttcttaatttggcttgtataaaaataaaaatatttagtgcatttaactaaggggacgtttggcaggaaagcactttttcatgttgggaaatcaagaatcttgagaatcatatttcttggaaaaaaaaaaaaaaaaaaaaaaagcgcaaaaaaaaatgggggccccgcgccatgagcat

SEQ ID NO: 66550 - DNA, 158 bp, Glycine max
  Clone ID: PAT_MRT3847_31108C.1
acgcgttcgaacacgttagaagacgatttttagaggactacttgatgtggtgatcaaagcgagaattcaccgcaattctcgtgcaataagaaaaaatctgacagaagagaagtcaaacgtctcacacattactttcttgctgtgcaaaaaactgaagc

SEQ ID NO: 66551 - DNA, 271 bp, Glycine max
  unsure (1)..(271): unsure at all n locations
  Clone ID: PAT_MRT3847_31109C.1
ctcacttggnttttctcaagaaattcaaacgctttaaccctctagagtcttctttaggagtactcgcctttttcttcgtccgcttctctcttcatggcctncttcttctacttggattacaagggcttccgctccagaggcacnncatcattgactggannnnnnnnnnnnnnnnnnnnnnnnnnnnnnnnnnnnnnctgctccggttcagtttctgagcccaagatggtgataaagtgatgtctttgatgggaatgggtttgggatgaga

SEQ ID NO: 66552 - DNA, 758 bp, Glycine max
  Clone ID: PAT_MRT3847_3110C.1
ctttttctctgcattattattgtgattgatgatgatgatgggtcttgcgcgatcaaatatgaatatgaagcagcgattgttgagactttgttactattgcttgtctcttattccgcaactattgcgtctcctccaaaggcttctcttcaaatgtaacctctttccttggaatcggaaaggcatcactctccctcaaaccttttctcttccctctccgattccccaatggccccaaggacaaggttttgcttctgtaattgtaaaccttgggggaatagaagtgtgcaaggtcactgggtttgagtttgtttggaacagcaacatcggaaagcctgttgcattctataaacctgtgggaataccagatgggttccatatccttggacactattgtcagtccagcgacaagccgttacggggttttgtgcttgttgttagggaagtggaaactgcttcatctgagacaagcaaccgtgacaagttaacagccttgaagaatccccttgactacatgttagtatggtgttccaatgcaggaagtaaggaattgccaattggttctgcttatttttgggtgccccagcttcctgaaggttacagtgccctcggctatttggttactaacatgcctgacaagcccaatttggatgaaatgatttgtgttcgtgctgacctcactgataaatgtgaaccttaccggctgatgcttgatgctgcttctgtaattcctgagtttccatttcaagtgtggagtttga

SEQ ID NO: 66553 - DNA, 168 bp, Glycine max
  Clone ID: PAT_MRT3847_31110C.1
aaacaaatatcacttcctgaggagtttctatttcttacaagaatacttataataaaatccaacaatcttcaactttttatattttattcaatttaacatacaactcaaattccaactattcataacatatcataacaccacctattaactttatcataccacccaaat

SEQ ID NO: 66554 - DNA, 1309 bp, Glycine max
  Clone ID: PAT_MRT3847_31111C.1
tacctgcctttttagcttgcagctgccgtccgtgcacagaggagtcttaggaggaacaactgtagagaaaaggatctgccaaattcgctagaaaattcaccggaaacaccacccgttatccaattaaaccagatttttggatcatttgtgaagttgaattgctatccaactgctattcccatttctaaaccttgttacacgagcatcttgatcaatggtctagaaagggaaatagcagttgagtggtgcttcaacgataagttattggatttagtatttatcttagcctgttttcgtgtactttgttttgccggatggaggtatgtgattttgtctatgattcttaatacaataacctacacttactctcattgatggtttgtgcagatctaatagctatgaagcaccataccggacatgacacggtcaggtggacacatgtaatgtctaaaatattaaaatatagaacgtagtacgagtgtcgtgtcggtgttagacactgatagggacgcgtgtcggacaccggacacgtgtcggacaccggacacgacaaaggacttgaagtgcttagaattgtttatgtttgagatctagttgatgagaggcagatagaggtcaacttgccaagataacctacagttctatattagatgctttgtgcaaaaacgatcatccaaaggctattggattattcaagaaaactaaagaccaaggagttcaaaaccgcctatgtacacatgcactatacttatggatggattgtgcgaagtggaagacttcagaatgcaaaaatgatttttcaggatctactgattaaaggctatcaactaagtgtctgtctgtactctgtataatgttatgattcataggctttgtaaagagggattttttgatgaagcattgatctagaaatctaaaatggaaaacagatcttaaagaagatacactgggtaaatgtgtaatggcactggcactctcgtgtgtgattaaaagtcatatatggtttaagatacttttttttataaagatagtagtggtcaatttttcgatattacacaagtgtttctttttcttctcaatgcactgtagatctgatttactttcaatgattgtttaagtcactggtgttcaactaagtgtctgtctgtactctgtataatgttatgatttgtaaagagggattttttgatgaagcattgatctagaaatctaaaatggaaaataatggcactggcactctcgtgtgtgattaaaagtcatatatggtttaagatacttttttttataaagatagtagtggtcaattttt

SEQ ID NO: 66555 - DNA, 559 bp, Glycine max
  Clone ID: PAT_MRT3847_31112C.1
acgagctcaactggggcaaggaaaaatgaagaaatgagttctctatatatagggagtgaaacgctattcaagtgtttatcctgagcgatgtgggacttgaagcctttttttcttcttttttttttttgttcctaattgtcctttcaacttagtttctcttagtcaacagacaaaatcattaaactgtcctgtaacatttgatgttgattcctttgttatacagaaatgtggtacgggttagttgattggtgtaggacatgaatccagtggtctctactatcttgtacccagcccgtttgtgtcttgttttgcatccccatctcctaaacttatacatgatcgcttgggtcatccacatttgtcaaagttgaagaaaatggttcctaatctcagcaaacttcaagtcttagagtgccagttatatcaattaggataacatgtcagattcttttttccaaagagaattgacacaagatgtaactctactttgtccactattcactctgatatttggaggcctagccgtgtcacatcttttgggttaagatatttttttacc

SEQ ID NO: 66556 - DNA, 284 bp, Glycine max
  unsure (1)..(284): unsure at all n locations
  Clone ID: PAT_MRT3847_31113C.1
ttttcttttttttntaagggaaaacggggggttttacctcggcccccagtttaatgtgcacagggtcacgcccgaacacaagctttcattaaaaggatttggcctttttaaaactccaatttaggggtttaaggagaaaaattttttttttttttcctttttggaggcatttaaatttgaaaattgccagggtcttaaggttttaattttgggggggcctaccttacttacttatttaccaggtggaggggggcttaaaatccaggcctataggtcatcatttt

SEQ ID NO: 66557 - DNA, 526 bp, Glycine max
  Clone ID: PAT_MRT3847_31114C.1
gtgtgggaaacaaactaatggggggaacttttccttgaaaacgttaatggcattttacccttaatttttttttttttgaaaaacattttatttgataaaagcccctcttaagatttattatttccgcaagaaaaaaatgccttctattttttttccctttaaatacataccttcaagggactaactagcccactttttattttaaacaaagggtgaatagttgacacccccctgggaatggcaccaaacttgtttttgatccacttgaacccgtttttggcccttgttttaagctttttttccccagggaacacgttttaagccttggatttttttttcctaataagctctgggtaattggggtgaaaaaacccattttctttttggatgggcccccttaaaaatggaaaaatttgatcttttaccgaacccaaatttttttttggaggatgggttttttggggggggggggttttttctccctcccctttggttttgggggggtattttcaaatttccccccgga

SEQ ID NO: 66558 - DNA, 258 bp, Glycine max
  Clone ID: PAT_MRT3847_31115C.1
gtaggtggtgcttggtggttgggatatattgttggttagtatttattgtatgtaggcactgatatagtgctgtagccttattgatgaaaaatttggtggtggagatagtcatactaaatagtagattaatgatttgtggttagttatgcaacatacatccaccctggtgacaaaatcaccgctatagatgttgatgagcacaactgctgatttatttctgtaagacttgcgtagatgctgcttatagtgtttatgtta

SEQ ID NO: 66559 - DNA, 215 bp, Glycine max
  Clone ID: PAT_MRT3847_31116C.1
gaagaaaagttgtaacatcaatattctgtgatgcacctaatgtttatcgaacttattttccttatgtctgaaatggctatgtttggcatctacattatgaggttcttaattggcttaattaatattgaagagtttacccgtcaaaaaaaaaaaaacaaatataaaagtgggggaaaaatataaaagaatacaacaaaaaacgatactcacagaag

SEQ ID NO: 66560 - DNA, 216 bp, Glycine max
  Clone ID: PAT_MRT3847_31117C.1
tttcaacttttcttttttcacttcctcctccctcaaacgccgtgatggccctcgtccgccaccgtcgccaccccaacctgcgcctcccgctcccggagccctcagagcgccggccgcggtcatacctggcactccctaccaccacaaccatcgcatatcaccattagtcggatacactatgggcgccgccgaccgggagatgatcgtcgtcctcgg

SEQ ID NO: 66561 - DNA, 469 bp, Glycine max
  Clone ID: PAT_MRT3847_31118C.1
ggctaacttaaagatctcttgctcagctgtaaccgctgtccaccgagccaatgccagcatgattgctccattcactggcctaaagtccatggctggctgtcccctagcaaagactgccaatcatattacctccattgctagcaacggcggaagatagcactgcatgcatgtgtggccgccacttgtcaagatgaagtttgagactatttcctacctgccagaccatgatgatgcacaattggctaaggaaatagaataccttcttacgataggatggattccttacttcgaattcgaattggagcacggtatcgcgtaccgtgaacacgacatgtcacctcgatactaccaaagacgctactggtacacgttaacctgccaattcctgactgccctgatcgctaccacggtgtcgtatgagctttagcaggctagaactgaatactccatcggctacatccgaatcatc

SEQ ID NO: 66562 - DNA, 280 bp, Glycine max
  Clone ID: PAT_MRT3847_31119C.1
ggagatcaactgtcgaaacacttccgatacagcaacttgcagacactgctgcagatggatctgcagcatcaacatggaggcgtgttgaaacctcatcgatatcgccctgctactgttgctcttcatcatattacgaaacgtgagttgatcatagatctcctattcaggaagcttcctttccacaggttggttcgtgaaagtgcccaacatttccagtctgagtagcatttccatagcaatgctgtgcttgcattgcaatgacgatgcctacgcatacctt

SEQ ID NO: 66563 - DNA, 226 bp, Glycine max
  Clone ID: PAT_MRT3847_3111C.1
gtaatatgatattttggcccccttttgtttacaattactgatacattgatatactgtgaatgcctcgctattgtaaaactggatttcgatgatcaatctaggagctgctaaccaatattcgtttaaaacaatgaaaaggcttcatttttaatttaaaaaaaaaaaaaaaaaaaaaaaaaaaaaaaaaaattttactaatttaaaaaaaaaaaaaaaaaaaaaaacc

SEQ ID NO: 66564 - DNA, 1214 bp, Glycine max
  unsure (1)..(1214): unsure at all n locations
  Clone ID: PAT_MRT3847_31120C.1
cgaattcgagctctgtacccggggatcctctagagtcgacctgcagcaagtgcagcttttgtttctgggaattcgttgtttccttccnaagtcctgcccatcttttgaacttggcacctctgctccctcttcgccggtctaatctgttagctccaatgtggtccaagttctactttagttggcagcccaccaagtctgaatttggttccacatttagtacatcatcgtcatccactgcgtctgttacttctgccagttctccctcaatgttttaattaaccaccagtgcatcaactcctcaattcattcactccagcagcagcagcctctacctccacacaagtcagcaacctgccccagttcaatcaagttttgtatttggaagcatcaactacatcaggagggagccctttccagtttggcagtcaactgagtttcagtcatgggtttcaatcaagcaatcaagcttcaccgcagcatctaacttagaagaagaatctttcttatgcttcagctcatgttccaagtttggagcatttaatttatatgctccagcttgagggggagtgttaaatatatattgtagacagctgtattgtgtagacagctgtgtaggtaaaaagctgttttgagtgtgtgtgaggttgagtgtgtattaagctttatgtgttgtcatgttgatagtgtgggaagctgtggtactagatgatgatcaccggcaggtccctctcaaacgttctctgattcatatcttaaataaagatgagcatgctcttgatatggctgctcctgttcatgagagattgggtgatatggatggtcctactgacgacaattcctcattgaagaagagaaccaatgttctcctcctcggtgatcacactggagacttgggaatgtctgatggtttgaattatgagactcgaatatccatgggattcctgaatcacaacgttgagaactcacttagctgctatcaagaagcttttgatgttgtttttgtgaatgatgcacccatgtggggagttatcaaactggtctctcatatgtgtttaagtgggaggtgatgtttcctgcaatgatgtattcttagcagtctcattcttttttgttatatatcttaggattcctcgttatgaaatttattttacctatagctaagaaaaccgtgcacaaactcaaccattaaaatgttttgttttaccgaacaatat

SEQ ID NO: 66565 - DNA, 257 bp, Glycine max
  Clone ID: PAT_MRT3847_31121C.1
tgaatctgaacatgatgtgcctgtacgcattggaggttatcaagtctccagacctggtgctgacattgccggtcgtgctactattgcttcgcatcgcagtgcaacgatggttgctgctgacataacgcgtgcgatgcatgtaggctccgaatgtcctcttcgctcgtcctactcgcaaagactaatcaattactacagtaatgtctcgcttggggtatgctcccccccatggccctacggctggtgacttagtccgt

SEQ ID NO: 66566 - DNA, 944 bp, Glycine max
  Clone ID: PAT_MRT3847_31122C.1
ccacgcgtccggccccagtcattcctcccaaccggttacaaatcggtcaggagcttacacgaggacttggagctggtggtaatcctgagattggcatgaatgctgccaaggaaagcaaggaatcaatacaggaggcagtttatggagctgatatggtctttgttacaaactcatttgtgcaggctggaatgggtggaggaactggcactggaggagctccagttattgccggtatcacaaagtcaatgggtatactgactgttggtattgtcacaacccctttttcatttgaagggcgaagaagggcagttcaagcacaagaaggaattgctgcattaagagataatgttgatacactgatagttattccaaatgacaaactgctgactgcagtttctcaatctacccctgtaactgaagcattcaatctggctgatgatattcttagacaaggtgttcgtggtatatctgatattattacgataccaggattggtgaatgtagactttgcagatgttcgagctataatggccaatgcaggttcttcacttatggggataggaactgcaactggcaaaacaagggcaagagacgctgcattaaatgctatccagtcacctttactagatattggtatagaaagggctaccggaattgtatggaacataactggtggaagtgatttgaccttgtttgaggtaaatgctgcagcagaagttatatatgaccttgtggaccccactgctaatttaatatttggagcagtaatagatccatcactcagtggtcaagtaagcatcacattaattgcaactggattcaagcgtcaagaggaaagtgaagggagacctatacaggccagccaatttacacaaggagatacggttggtatcaaccggcgatctttctctttcactgatggtagcctttgttgagatccctga

SEQ ID NO: 66567 - DNA, 233 bp, Glycine max
  Clone ID: PAT_MRT3847_31123C.1
cctctacacgtggctccgaaaatccccaaaccctaattccaatataatcgattccgcggtcgagattctctcgcacttccatccagatgatacctcttcccccgaaggtgttcttctcttgggcgcgttttccttcgtgccttccgtttccgaaaagaccaagacgcgctgtctggacatgatgctgaaagtactgttggcggcggagaagggtaaattgctcggtgaactgc

SEQ ID NO: 66568 - DNA, 470 bp, Glycine max
  Clone ID: PAT_MRT3847_31124C.1
aattcggctcgagaagcaattaaggccacaagtgcatcagtgtttgaacagagtccacatggatatgaaactccattggattcaaagtgaagaaattttgaacacttacacgtcctctgcaccttttatatatatcaaaacacttaggacttttgaatccaaaaaattcaccgaaacaccaaaacaataaatcgggcggagaaaaataaggaaaaacaaaaacgaaatgtagacgaggaacaatcgattcgccaatcacagaaagggcgaccgaaacgatgactcgcccaataggtttgttatacctcaatgttcaaacgatggcagagacactttcaacagtctcgtcactctcatagaaaccatcgaggcctttcttttacaacaaattaaaaacaaacaattgaaacacatatcataattaatcgcctaaccctgttattcccttctacggcgtcggcgtgttattg

SEQ ID NO: 66569 - DNA, 179 bp, Glycine max
  unsure (1)..(179): unsure at all n locations
  Clone ID: PAT_MRT3847_31125C.1
agaacgggnnnangtctgcangcacgcgtacgtnagctcgggaattcggctcgagnananctcagnnatctaatnacctcaatnaanccnttaatngcnancatcatggctnaggnganacaccaccacnantntccaccaccacaagggccgggatgtgcctggcgaagnccattatn

SEQ ID NO: 66570 - DNA, 157 bp, Glycine max
  Clone ID: PAT_MRT3847_31126C.1
cacacgcgtacggggtggagaaggtgacagatgctacgtagccttcacgccggaacatgcaagcttcacgtacaggaaccagcttgtcgtccgagccatacgctattattaaatggcggaagcataccacaagaggggcatcctgaccatcaaagtc

SEQ ID NO: 66571 - DNA, 732 bp, Glycine max
  Clone ID: PAT_MRT3847_31127C.1
cattgcaaactatcaccgccacttgaagaatgaggacacaggaccttacatgataagggccaggccaaaacggtataggtacactcaaagatggttggagcatgctaaaagggtgccaaaacctgctcctatcactgaatcaaccttttgggctgaagtagaagagctttatagctggattaacagcaagaggcatcttgatgatgaagtaaagcaaagggttgtgcagcttcagaaagaccttaaaaagtggactgatgatgagaaggtactaaccaaggatacgttcttgaaggatcctaactttattaggtggtgggatattctacctcaggaactcagggtcacttccttctagtcttgttactgctgtggaaggatagtgaattggtgtttttttccactctaaattaatggagaagctatagaaatttcggcatgcaggtgcagtgttggctacttcggtgttgtaactttgtattcccaatgtttatgattcccaagttttgtatgacttgtgagtgagaaccacaaatcattcagactgttgaactaaataaatttgtttaatctagggtctgtattagtgggttactcagtgtgttttttaaagccaactcagcatatggttaactttaaaataaaaattaatagtaataaaatatgtacaccacgcataaaaaacagaaatagttatgatttttaattaaaatttgattatacatttaaaaa

SEQ ID NO: 66572 - DNA, 420 bp, Glycine max
  Clone ID: PAT_MRT3847_31128C.1
cttcggttctcaattgaaccaagctggcccaacttcgcaaaatctcagctttcgtttcgtcacacaaacaaacctcgtcccgctcctagttacacactacaatgaatgccctttaacatttgttgtcttctttttttttctcccccccttccccgagcattgtatgacttcacttccgcttcctcggacctcactctctctcttcaattctcggttttgttattgtagaatggttttaagttaggggggcggtgtggcgtgttagggtttttcctagtccaattcacgtcggtctcggaacgacccatcgtaggtttaagaatgtctggtggtggtggtggctgtggcggtgttttcgtgacgtgggaagagcaggtgatatgtcaggagcgtgggaaccgagtgattcacttttacctg

SEQ ID NO: 66573 - DNA, 413 bp, Glycine max
  Clone ID: PAT_MRT3847_31129C.1
cacgcgcgtagacaagctgcatgcgaaagttgagttcttgcaagagttggggttttcgtacgaggaggctgtcagggcttgtgctaggttacccgcaatttttgggtatgacgtggagaacaatttatggccaaagtttgtgtatcttgtcaaggaaatggagagggatttggaggacttgaagaggttccctcagtactttgggttcagtttgaaggagaggattgtgccaaggcacttgcatttgaaaaaaaggggtgttaggattcccttgaatagaatgttgatgtgggctgatcaaaagttctacgccaagtggaagtgattagtcaactcacatatttgctcataaccttatatgattcaacaagatattatcttctttttaattgtctaatccaaatagactgtta

SEQ ID NO: 66574 - DNA, 1059 bp, Glycine max
  Clone ID: PAT_MRT3847_3112C.1
cttttctgtccaaattctgattctcttcatggatttcccgttcctggtatctactctacctttttctttttctctttccttttcttttcttttaattttgttttttttcttgcgaaactaggaaaagctgaaaatttggaagaaaaaagcagagcaagaagaagaaggtcctcctctggtgtggttcgaaacctctgccactgtttctcgccgcttccagtttgaacccaatggccaactttctgtactctccaactactcaccctctttacaaagttgtaattgtctggaaacgtaagagtggggaagaatgtgcacaaggtcattaagccttccaggcttcttgaattaaaacaagtgtggcccgaggagtttctcttaaattttggaaataaatgcattgacatggtattggaacaagatgctagtggtgaagatgcattgagggggtggctagttgctgcatatgctgcacaaacacatagtttctctcatgagctcagtgctactagtgtcctgcatgaggcttatgagaaaatgaatggtgtctttcctgtattcttaagggaattgcagaacaaagggtggcacactgataggtttttggatggaactgggagccgttttgcattctagataaatttcatgttgatttaagtaggtttttatccattctttgagagaaattttgatgtgctatgggtggagtaaactgtatattttatctattattttttaaaaagtaatgttaggacatacctttcttcaaaaaacatgaagatggaggaaggtatgataaggactttgtggcttgtttgagggatgcggattgaagcttcttgatggccaaatctggtcttattttcagcacgaggagaggtcaatactattttgcagacaataatttggctttcccagccccccagagttaatgttgtttttgaatcagattgttgatcatatatacaataaaggggaagatattcctacttgctctaaggaaatgtttttttttttttttttccaatggtaattacaaaaacattatcttatttcact

SEQ ID NO: 66575 - DNA, 432 bp, Glycine max
  unsure (1)..(432): unsure at all n locations
  Clone ID: PAT_MRT3847_31130C.1
gggccgtcgacccacgcgtccgctcatcctcctggaaccttgctgtcctgatctgtgatagttcacccgctgagatcccctgagcccaagggtgcccagaacttccctgattgacctgctccgctgctacttggctaacctgacctcttgctgtctctgctcgccctcctttctgtgccctactcattggggttccgcactttccacttcttgctttctctttctctcttccgtcagaaactagaaatgtgaatgaggattattataaaagggggtccgtggaagaatgatcagcatctgtgatgggagcgtcagggttggtgtgctgaggtgttagagagggaccatgtgtcacttgtgctctgctcttgtcccacgtgttttccactttgcatatgaaccgngaactgtgcatagtgctgggatggaggg

SEQ ID NO: 66576 - DNA, 489 bp, Glycine max
  Clone ID: PAT_MRT3847_31131C.1
gaaaagttttcctcagctttatgtcttgaaagtttggaatttgaagcaattaaagaattggttgataaagcaacaagcactcccctctctcagacaactggaaatccgatcatgtcctggcttgacaaatcttccttttggactgtggcatgttaaaagtctccttgagttgacactgacaaacatgtcaaaggaaatcaatattggcatatatcgccttccggacaattgtaaagtccgcagagataattctcagtagaacatcattaattgcatgtgagcaacagtttgtcaacagcttgtggctaaaggaagccttacagacgtcactgaagctaacattgaaggtaagattggttcttcatccaaatatacgaaattgaaaatttgtttcttgaaataatttgtattgggacatgtaattatattagtgacagctgaaatttatactataaaggtatgtttggttctttgttgaaggctacgaaa

SEQ ID NO: 66577 - DNA, 533 bp, Glycine max
  Clone ID: PAT_MRT3847_31132C.1
cttaactcaacgacacatcatataaaattaacactggaactaaactatgacttcattaatcatatatcacaacctctaactattacaatcttccctaaccatactgacttttatatccacaaatacctttgacgaccaggattggaggacaataacaaaacctatcccaccatgagggacataccgtgaaaaatatcattgaaatcaacttgggttgtgtgatactaactatcttgccacatgtaaagaatacatgtgctttatatggaaagagaatgcatactaaagaaagactggaaccagttgatgattgtataggcatgaaaactgataactagaattatacctacttagaggaatatcaagaactgatctatgccgggaaactaaacactggggaacgagctaaatgtactggaaagatcacaaccataaaaattaaaatgctcaaaacatgcatatttgagactgacattcttcaacaaatagaaaactgatatagattcgctacaagatctgctctaactaggaca

SEQ ID NO: 66578 - DNA, 173 bp, Glycine max
  Clone ID: PAT_MRT3847_31133C.1
caaggcaattcttcaccggaaatttaaattcccagcctttatttttagagatggggaaacccaaccaaaaaaatttcccctttggcgcgggaccaataaattttcgggccctggccttattttaggagacttttccaatggagcctccaccaagttttttgggcgtccaaaaa

SEQ ID NO: 66579 - DNA, 156 bp, Glycine max
  Clone ID: PAT_MRT3847_31134C.1
tttatttatttatgtaatgtaatattggcttttggttaaattagttggtaagggaatgtgaactatgcacatgtatgagattcagagatttctatatattagatttcgcattccatttacccaatttagtccctcttccataaaacatttttatct

SEQ ID NO: 66580 - DNA, 757 bp, Glycine max
  Clone ID: PAT_MRT3847_31135C.1
aagtgcaatagccaaggcacgcaagtactataaagaaagtagtgatgttgttgggacacttaagcagttgcctcgatatttagttgctgaaagggctgtgctgcaaactttaaaaacgtctcctggaaattatttgcaggctttgaaaagtattccaaggactctgagaatgttgtatgttcatagttaccaaagctatttgtggaaccatgctgcaagtaagagggtgcaaaaatatggaactgaaaatgtagtattaggggacttggtatattgtaaagaaaattctactggaaaggttacagagtctgttggatctgaatatgctgaagactgcagtggtaggtatgattctaataacgaagatgaaatctctggagagattcatgaagaaatagatagtgtcaaggttagacttttggttttggcccattgcagaggtctgctagtactcaactgattcgtaggtatagcaatatgtcacaacatatctttctcatctatctatttagagtctagtgtgcacacatgacacaatgtgtagtcttgtttatacatctatgcacagatatttgaggatttctctttaactagtatcactggattacactggaggtattctgagaagccaattaaaagtgaatgggaattactttcatatagtgacagtagtgagcaattggtatgaaaagattttgacaaaattaacaagtctaagcctatgaacactgtcaaacaaatgggtgcagcaaatggg

SEQ ID NO: 66581 - DNA, 450 bp, Glycine max
  Clone ID: PAT_MRT3847_31136C.1
atttaggcttccaaatataaatcacttcacttgaaaatcaattttgtatatgctcatccaaacacattgaaattgacaaataacttctactttactttgaaagctcttatttaaatacttgagagactaaaagtgaaatcaagccaaaaaaaaacaaaaaaaactctaggcaaagcacaatgggtttggttttgacactggtacctgttccatatgctgacttgccctcgcattctagttgaaacatctcattattgcagtaacttttggctttattcttttcaaatttccccttttgtttatgaaatagcacgaatgctacgacattacataaaatggttgtctcattttttatcagttaccttgttgctgctgctggcttgcaagctatgtggagcttttcattggctattactgatgtatatgcccttttaataaagcggtctttgc

SEQ ID NO: 66582 - DNA, 450 bp, Glycine max
  Clone ID: PAT_MRT3847_31137C.1
gtggtgatatagggaaattgtgatttgagtgttcattttgagcagggtgatggatcgtgtgacgatggcgtggctgctgctgctgctgttgagagtgatgttagggaggagattgtgaaggggttgagtgggcttagagttggtgaaagggttgtttctgagagtgaggcttcgagtggggattcttcttccctccttgatgctggtggtggttcgtgtgcaccgccgactcctgtgccgcctgccaagccttccgtgacagggaacctgtatccgaagaggagtgtgtccgggcgtatgatttccggcattgtggcatcctcgaggatgccttggccgatcgatgcggctctgtcttcgtctgctgggtctaagcgcgcttctcccgagctacatcctgcatgtgaggggttcatcagtgctgatgagcagaagccttgcctggtttca

SEQ ID NO: 66583 - DNA, 160 bp, Glycine max
  Clone ID: PAT_MRT3847_31138C.1
atcaagggggccacgaccaccactcacttgtacacttgagaccaaaggcttcttgacgcgagccaccgggacctgaggcgttcaaggggagtactgcttatcatatggtggacttcaacatgagtacaaaaggttgtggccctcgtgcttctaaccctca

SEQ ID NO: 66584 - DNA, 498 bp, Glycine max
  Clone ID: PAT_MRT3847_31139C.1
accggtccggattcccgggtcgacccagcgtccgttgatctagagcgagtgctttgatagcctgcggactgtgtacttcgacttatagtacagtaaaggagtcctcattggtgtggtggagacgcaccgtttaggaatagctccattaaatgaaagcttgcctggtgagatgccatctgacagagagagctcgcctaatgatgcttgacttcagcatgctatagataatgaaggcaatagggactggcacagtagttgctctcagcattgaacgctatgttgattctggatcagaagcgggtgctctaatccgtggggtctgatcaccatcaagccttacctgaggcttatagttgtagacacctgcatattatcatggttcagcggaatatctagatccacatgatcggtatggacagtctctacccataggatcggagtgctgagctattgcatggtacacacaatgctcatggtcgctctgcagatgatgatgca

SEQ ID NO: 66585 - DNA, 572 bp, Glycine max
  Clone ID: PAT_MRT3847_3113C.1
agaatgtgcacaaggtcattaagccttccaggcttcttgaattaaaacaagtgttccctgaggagaaatttctcttaaattttgggaataaatgcattgacatggtattggaacaagatgctagtggtgaagatgcactgagagggtggctagttgctgcatatgctgcacgaactgagagttcctctcatgagctcagtgctactagtgtcctgcatgaggcttatgagaaaatgaatggtgtctttcctgtattcttaagggaattacagaacaaagggtggcacactgatcggtttttggatggaactgggagccgtttttcattctagtgcttgtataaatttaatgttgctttaaataggttttatccattctctgagaattttttatgagctatgggtggagtaaatccaatggttcacattacctgtgcttaattgtgtattttacctattatttttcaaaaactaatggtagacataccttccagaaacccgatgaattcttgtagtgaatgaactaaattcaatttcttttttaaaagtttgatgattaaattcatggatatg

SEQ ID NO: 66586 - DNA, 343 bp, Glycine max
  Clone ID: PAT_MRT3847_31140C.1
caaagctacagtgataacagccgactaatgtaccaatatagaaaagcttttgacctgttgaggttggactgctgtgctgtatctcagttttaaattctgcccatcgattagtgctgctactttaaaccgagtctatgactccaggaaatgtggatattttctttcactagtgcgactccattgcatatattagtctttgttgcgcatggttcatgctccagaacgtgagattttctttactggagaacacacgagagaaagatttactggctatgtccatggtacatacctcgcacgtatcaattctagcaaagaactacttgaagaaatgagaaaggacaac

SEQ ID NO: 66587 - DNA, 410 bp, Glycine max
  Clone ID: PAT_MRT3847_31141C.1
ccacgcgtccggctggtacacatactagccagcctgccagccagcttgccatggcgcccaccgtgatgatggcctcgtcggcaaccgccgtcgccccgttccagggtctcaagtccgccgccagcctccccgtcgcccgccgcagcaccaggagcctcggcaacgtcagcaacggcggaaggatccggtgcatgcaggtgtggccggcctacggcaacaagaagttcgagacgctgtcgtacctgccgccgctgtcgacggacgacctgctgaagcaggtggactacctgctgcgcaacggctggataccctgcctcgagttcagcaagctcgggttcgtgtaccgcgagaactccacctccccgtgctactacgacgggcgctactggaccatgtggaagctgcccatg

SEQ ID NO: 66588 - DNA, 454 bp, Glycine max
  Clone ID: PAT_MRT3847_31142C.1
agttattatgtactatggagagatcatgaatcaaacattatttactgcgtttttgggcctatatgctcttgactctaacaaactaagctacgagccactttggatacactaaaaaaaaaaaaaaaaaaaaaaaaaaaaaaaaaaaaaaaaaaaaaaaaaaaaaaaaaaaaaaaaaaaaaaaaaaaattaaaaaaaaaaaaaaaaaaaaaaggggtaaaaaaaaaataaaaaataaaaaaaaagggggcggattttaaaaaaaaaaaaaatttttacaccgcggtataaaggaaaaaaccgttttaaaacaagggaaaaaaaaaaaaaaagggggcgggcgttaaaaaggtgggggaagaaaaaaaaggtggggaacaaaggttatttcgaaaagaggcccaccccttttggcaaatggagagaaaacggaaagggccccttaagggggcctttc

SEQ ID NO: 66589 - DNA, 215 bp, Glycine max
  Clone ID: PAT_MRT3847_31143C.1
cttcactcttcactctacactcccaaccctattcaaacgcaaaccattcattcattcagttcggtaactcacctcaccatggccgcatccattacattggccaggctcgtctcttccaccctcaccactgtctacctcttccacacccatatccctgcctttcaaactctactatctccgactcctcaaccgacttcatccaatgccactcatat

SEQ ID NO: 66590 - DNA, 654 bp, Glycine max
  Clone ID: PAT_MRT3847_31144C.1
ggctcgagcttagttattccaaagtttctttacagcaacgtatggaaggatccaagccagtttggagatatataccaggaggagtatttcatgaatatcttgaaggatgacatcaagattgagaaggaacttccacctcatatgaaatctctggatgtagaagcaattggcagccagattacagatgcagatcttgccaaggaggccacacctgcagactatattaaagttgtgcttcctcttcttttgagaaatggagttgttcacttcctgggatatggaaatcgactaggttttgatccaatgccttctgaaattcagaggttaagatgcaaatgtaatttccatgctttgaagttcgcgcctacaattcaacaaattggctcgctattgatccaaaggattagaaaatatggtgctcgacgcagcatgttagacactcaattgctggggaagttcatccgcaacaatgaatatcatgaagctaaaaggggctcagcaaaatatcttgctttgcacctgaggtttgaaatagatatggtggcctattccttatgtgaatttggaggtggagaagacgagagaaaggaactacaagcctatagagaacgccatttccctttgtttcttgagcgctagaagaagaattcaacc

SEQ ID NO: 66591 - DNA, 1001 bp, Glycine max
  Clone ID: PAT_MRT3847_31145C.1
aacaagagtgttctcatgtcatgataatagatttctctcttcaacttggcatgctcccaaaccttaaccaaacatcgtttgacctgccaactgttacgtacagttttagctgcctcctatgatgggaggagtgtctggcggcggcgacgacgacgtcgttcaaatccagcaaccgaacaagcccggcgaccctttcatcatcaccgtcaattgccccgacaagacaggcctcgcttgtgatatctgcagaatcattctcgatttcggtctctgcatcgccaaaggagatgtttcaaccgatggcgtgtggtgttacattgtgttgtgggttattccatactccgtgttgcttcctatgagctgttcttatctgattctcaaagaacgacttcagaaaatttgtccgccttgtttagcctccttttacgtcattcagcaaccttcgagatcttctcctgtctatctgttgaaattctgttgccttgaccggaagggcttgttacacgatgtaacgaaagtgctctcggagcttgaacttaccattcaaaaggtgaaagtgaccacgacccccgatggcagagtcttggacctctttttcgtaacagataacaaggaacttttacacacaagaaatcgacaggatgagacatgtgaaagattgaatgctgttctgcgagactcgtgtatcagctgtgaacttcaattggcaggtccagaatatgagtataatcagggtatctcttctctgtctcctgcattagctgaggagctatttcgatgtgagttatcagataacgaagttcgtgctcaagctcttagccctgatatgacaaagttgaagaaaaccaatgtaacaatggacaattccttaagcccagcttacacgctagttcaaatacgatgtgctgatcacaagggtcttctttatgacattatgagaactttgaaggacttgaatatgaagaattcatacggccgattttacccaattcgatggggta

SEQ ID NO: 66592 - DNA, 563 bp, Glycine max
  Clone ID: PAT_MRT3847_31146C.1
tagaacgaaaacgaacactcatagccgcgaatcgatctgcatgatgctcatgtttcgctctatcgcgtctaaatccaaaaccagcaacactgctcttcttcttcttcgtgctatcgctacatcccaatcccttcacagcaacattaccaacctccaccctcccaatgctaataattcttatcattcattttctcgccgccatgctttttcattctctaagccacgcgccaattctagggttccgacttctcagagcttctgcaccgcgtcctccgacagggactcaatcgagtacgacgtcgtcatcgtcggcgcaggtcccgccggcttatcggcggcgatacggctcaagcaaatgtgccgcgaacgaaacgccgatttgtccgtctgtgtcctcgagaaaggtgccgaagtcggtgctcacattctttctggaaacgtttttgaacctcgcgcgctaaatgagcttcttccgcagtggaaggagcaagaggctccgatcactactcctgtttcttctgacaagttttggtttctgaccaaaggtcgcgcaatttcgcttc

SEQ ID NO: 66593 - DNA, 130 bp, Glycine max
  Clone ID: PAT_MRT3847_31147C.1
cgattacagctaggggaatgctccttactcaaaggaatggatagaggtttgctccaatttgagcatgaaggaatagtggtaggcggaaacaggacagagttctagacgagttctaatattattggagttg

SEQ ID NO: 66594 - DNA, 484 bp, Glycine max
  Clone ID: PAT_MRT3847_31148C.1
tgttaacatagcatgcagatgaactaaagacatgattacctgggaggaagcaagacgcggatgtgaaagattgaatgctgttctgcgagactcgtgtatcagctgtgaacttcaattggcaggtccagaatatgagtataatcagggtatctcttctctgtctcctgcattagctgaggagctatttcgatgtgagttatcagataacgaagttcgtgctcaagctcttagccctgatatgacaaagttgaagaaaaccaatgtaacaatggacaattccttaagcccagctcacacgctagttcaaatacgatgtgctgatcaaaagggtcttctttatgcattatgagaactttgaaagacttgaatatgaaaatttcatacggccgattttcacccaattcgatggggtatcgtgatttagatatatttattcagcaaaaagatgggaaaaagattttggatccggagaagcaaagtgcac

SEQ ID NO: 66595 - DNA, 770 bp, Glycine max
  Clone ID: PAT_MRT3847_31149C.1
agaaaaagttaaccataacaaatatcccgccacgtccagaaagaagtgccgtcgcgattgctgacgtgtacttgtatcatcgtttgacttgccagctttacagtgttagctgcctcctatgatgggaggagtgtcgggcggcgacgacgacttcgttcaaatccaccaaccgaacaagcccggcgaccctttcatcatcaccttcaattgccccgacaaaaccggtctcgcttgcgatatctgcagaatcattctcgatttcggtctctgcatcaccaaaggaggtctctcactttcattgaattcttcgtttacagatcctattccattttattcttatcttaatttaatggaccttcttttgaatatcattcagatgtttcaaccgatggagtgtggtgttactttgtgttatgggttattccacactccgtcttgcttcctatcacttgttcttatctgattctcaaagaacgacttcaggaaatttgcccgccttgtttagcctccttttatatcattcagcaaccttccagatcttctcctgtctatctgttgaagttctgttgtctgaaaagtttgatttgtaaaatgcagaatgtgaagtttttctaaatgtctcggtggaatatgttgttaatcatgatggaatctcaagattgtctccctattaactcacgtgccaattagagttagtttgtcacgtacctttatgctgactttccctaatatagttctgtgcatatacctatgtcataagccttttgccc

SEQ ID NO: 66596 - DNA, 567 bp, Glycine max
  Clone ID: PAT_MRT3847_3114C.1
gttgtttccacgcctacactccattaggccccttttccattttcctcccaacttttcctaactccaccacccacattgcaattctcttctgaacctttacattttccatgtggggatgagtaagttgcttccttttttgttctggacttgtggggtttttgctcatctttcattgaaatgctaagggatgatcatttggccattcattcagagtatttctgtgtctgctagcactacaatacactacatatgtttcggagattaggatggttcgtgggtctgaatcaaaccaatttgtcaaccaaaaggttgctcaatgcagaccaaactgcctctgctaggccaaatcaccaacttcctatgctcgatgctgttcatgaagttgctgtttacattcataggtttcacaatcttgacctttttgaacaaggatggtacagaatcaagattactttgagatgggaggacggtgatgactcccatcccggggttcctgcacgggttgttcagtatgaagcttctgaagtgggtgctgacaatttatgtggagtttggatgattgatgat

SEQ ID NO: 66597 - DNA, 137 bp, Glycine max
  Clone ID: PAT_MRT3847_31150C.1
agactaaacagtaaacagccgtctacacgtagtacgatggaagtgctagaggctacaataaaggtagctcaaagacacttaaggcatctcgaacttgatgtgtgcgtcggtgggtacatttggattgtcatctatct

SEQ ID NO: 66598 - DNA, 253 bp, Glycine max
  Clone ID: PAT_MRT3847_31151C.1
gtgttgatgaatttggctgtgtgatcatttatgtgtaagtagagtggtattgagaagctgttcgaggttggattggatgaaccaatattggcgaataggaacaatggattgatgaacgcattcttatatgaagttgttagtctcactagttcacactgcatagagcgaatgaaattcagtgcctgacatatgctgagggtctctaatgtctgcaaggatgtttacttgagacagatagatgtgatcatgcatg

SEQ ID NO: 66599 - DNA, 1259 bp, Glycine max
  Clone ID: PAT_MRT3847_31152C.1
ggtgggaggcgaggaaagaaaagcattagaatagcgttggaggaggatccgtcatccctcgcaaagtattacttttgcagagctcatcaaaccgaaccttcattcccgccttcacgttttctttcctttcaccaacaacaacttttgtttcttttcctttttattgtattggtgaagcttcaccataattcaattatgagctccaccacttcgaaagccacgtccacgatttgattcctggatccaacgcatccattaagctttcgcgatggcgtggtttagtgggaaaaatacatggggaaacttccctgatttggcgggagccgtcaataagcttcaggagagtgtgaagaacatcgagaagaattttgattctgctcttggattcgaagagaagggtgaatccagcaatgaagatgccggatcatggcctatacctgctgacaggaaaaccctatttaatcccgtcatgtcttttatggcgaacaaaagtgaggaaactactgaagaaatgtctcaaaaagacgaatactctcaacaagactctgaaacggagaagtcaccggaaaagcccaagtctcttgatcatacacctgtggctgagggaaacgacacccttgaaactgataacacaatgcatatggaacctgaagaaaacacaacaaaagaagaaaataaagtggttaaggaagaagatggtgagcatacagagtcagcggatggaacagttgcacagaacttggatcatggaaaggaagaaaaccatttactggagttgcctgttgaattgcctgaatcccctgttgagaagcttgagagttcagattctgtagaacattctcaagagaaagagattgctgatccgggatcctctgggagtctagtgtcagtgcaatttatgccttctaatcttggagacaatgtagttgagggtgtcactacggagtcgggtgaatcacatgatattagtgatgggcatgaaaattctcaagttgagacaaaagaggagagtaaagaagaagagagggtccaagcagaacaaagtgaaaagagaaattcttctgttcaacccgaggcatcaagtgatagtgagaacagagatgatactgacacttctattctacaatctgtgacttctgaggaaaccaataacactgatcaatcaaatattgaacacttgtccagtgttactccaccaaatgaatcttctaaggtggtaactgatatgttttcacctgaaaatgaaacaactgcaaaaa

SEQ ID NO: 66600 - DNA, 376 bp, Glycine max
  Clone ID: PAT_MRT3847_31153C.1
ctcgagccgagtccgctcgcaaacaaatgaatgaataaatgtcaactgctatctggatccatgctactccaactgaccctatgtgagttcttacttatctacagctttacactgcatgcagaccacctggtcttgtatccccaaataccttgagggtgaaaagaagggagatcgtgatgtatgtacaattgattaaattgtcagggcatatcgacctctaagatacatagacaccagggagaggaggccggaccgctgccagaggacgatcctgcacatgtatatatgagtcgattatataccagacactggaaaccttatagggagatacaatgagaggtgggtactcaatggcatggcgacacgacgacgaata

SEQ ID NO: 66601 - DNA, 302 bp, Glycine max
  Clone ID: PAT_MRT3847_31154C.1
gggctagaacactctaatattaatgggcgggggcactcacagagtccaagttcaaacttttggaaaattaatcacgtttaattttaattaatacctcataaggcccaacatccctctgacagttagtacgctcacaaacagtggtgttgtaatcctccacattgaaagaactgtagccttgctctgcaacgtgctacaatgtttctctttcctcttagagtaagaccctctgacgtgctttatactgtttcttaccctgatatttccttttaacaagcaaaggtttgcttaccaaaaccttg

SEQ ID NO: 66602 - DNA, 263 bp, Glycine max
  Clone ID: PAT_MRT3847_31155C.1
caagaatgcaactgccggggaagatactcaaaccaataagtgaacttgtttaggataggaccctttttttccctcgaaacatatccttctaaactatgtactctgaaattcaataatctatatattgtgaatagtttaattttattcttgaatttcaattgcaacacttgatatatatgttttttcttctttatttaattttaaaagagagattagggaaccattggatgattgattgattatgcagttctttagctgttctg

SEQ ID NO: 66603 - DNA, 370 bp, Glycine max
  unsure (1)..(370): unsure at all n locations
  Clone ID: PAT_MRT3847_31156C.1
ngcatgcgtaggacaaaaacatcaacaaggcttttaaactcacagcatctaattcattgagcaggaagactagaatggggcgccaatcaccatcatttgctgtacgtatacaccactccaaaactaatgtggaccggtgtgaaagaatatgctaaattaggtggtggagatgaacatgcctagatgggaggtaaggagaaattcctaaccagagaggaagaaccacatcagtattggcagacagcttgtgtatgggaatgtgagaattccatgtagaccctttttccttacaaaattatattcgttatgttaacttcttttgttatcttggcctgcgcttttgcaaactgttggattaaggtgccctgtt

SEQ ID NO: 66604 - DNA, 450 bp, Glycine max
  Clone ID: PAT_MRT3847_31157C.1
cagaaggacgaggcaacactaacctgtctgctgtgtccattatcagtatggcaagcctcagaagaatcatgtctttagattctcaataggaatgggctatactatattttcttgggatacattggcaatacctatagggtcagcggcgggggactgaatcggttcacatatggaattcccatcatcctgggggggcggacagagcgcttttgggcaactctcgatcacatgggtgccatgcggatcatcacgttctactgcatctggatgtctctgaacttgtacagctttaggactcacaggaactttcatttcagaagctggttctgaacactgtttcacggcgggttctaataccttttgcgaattatgcccaaatggcttctctttctcagtctccagcaactgagaagaaggaactttatccccaacattccccttttcataaga

SEQ ID NO: 66605 - DNA, 283 bp, Glycine max
  Clone ID: PAT_MRT3847_31158C.1
ggacgcaaaaaactccaacgttttcactcacattcatgcgtgcataaaagtactccaaataatacaacattgatctatttttcaacaaattaatgtaacgaccttacattttttcaacacattcctccatttccgactacgaacttaaaaccaccacctttaataatgatcgccgttttttccactgtattaaccgacacacccgaccacagtgtgtataatcccaacctcacattattataataacattgcatgtacatacaatcatttgctagaactttct

SEQ ID NO: 66606 - DNA, 494 bp, Glycine max
  Clone ID: PAT_MRT3847_31159C.1
ggcctgtccacacttatttgtaataaatatcaatcagttgataaattcaacagtaacacccatttcacatgccatgtactctcacttttattaatacagatagacccacaacaaaaccacggaagagattaatccaatccaaaatctgaacacgtaaggagctacaatttttttacaaaaacaaagcaaaactccacataatttggaagtcaatattggcaatagatgccgggtcaagaaggtaatcctgttaccagtttcctcatagagctcctccatcggcttagatacccacgtggatgaggacatgagggggccccacttaaaccaccaccttccagacaaggtctccgtctctctcacccttccagctaaagtgttctaaaaacaaaaacactgataatgttttttaaaaataatttcacccaaatgacaaaacttattgtcaagtaatatttttcttttgattttagagacaaaaaaatatatttttt

SEQ ID NO: 66607 - DNA, 313 bp, Glycine max
  Clone ID: PAT_MRT3847_3115C.1
ctgagttcttcacttcttttctataacagactattctcgtcgttgtgttgcctccactatcggcaaattttgtgtcgtcgggaaataatagccattgtaatcactaatctttttttctctgtgtggtttttaaatttattttcgttctggccatttttgtaagttgtaacagtcatgtagtagtcgtgtttattccttgaacgttgaagctttgcattttattatattaattatttttaactatatgatgatatttttttttaaaaaaaaaaaaaaaaaaaaaaaaaaaaaaaaaaaaaaaaaaaaaagaaaa

SEQ ID NO: 66608 - DNA, 527 bp, Glycine max
  Clone ID: PAT_MRT3847_31160C.1
tactgagcatcgtctagctatctcgatcgaactgtccaaggtcctgtcaccagggacattggctacggttgtggcaagttattaaacaaccggctgcgggcacataatggaggggccagcaggcgcacaagtggtacgaaaggacaccccaggttattacctagacacgggggcgtgctaataaatgctacagttggcatgcttgtagcgacacaagctgatgcaaataccacggctagcacgtgccaaagaacacagaggtggccttaccaataaccaggttacaagccggctcgtatggtactaccccataagtaagggttggggccgggtcgaataacggtttacgaagagtgtgtgcgtgcatgccatgtacgtagaactatttggggccatggaaattgaggcgcagttaggaagcctaagaaaagcaacattcacgggtaaccacagccggggagggtcacggtttacgaggaatgcagcagagatggagagggccgcaaacgtacaggaaagggcaacag

SEQ ID NO: 66609 - DNA, 622 bp, Glycine max
  Clone ID: PAT_MRT3847_31161C.1
agcaataccaggagaggtgggagggaatcatttgtgcgaatatgtcgtaagaaaggagacgatgctcacgaggctgtgaaacccccgcgcgctctttccgttgcttctcacttctctctttacattattattgtatcccaatttcactctcaaacagagaagagaaaactttaactcttcactccctcttttctctttctctctcgaaactcttcaccccattcttcgtagctatggaaccctggcttccccaagacgattttcttctaaaaaatgccattgatggcggagcgtcgttggaatcgctggcgaaaggagcggttcggttctcgcggcggttttccgttaccgaattgcgggatcggtggcaggcgctgctgtacgacccggacgtttccgccgcggctctagccgcgatggcgcatttggaggccgcgaagtacggcggagccgcggggaccagcgaaggtggcggaggtgggaagaagaggaaatctgaaagtatccggaagcattactttgcaatgcaaagaagacttcgcgggtgccggcattccgatgcaaagaacgcgactgaggggtgtgaaggtaacggtcgtgggttggaagtgagagtgaattc

SEQ ID NO: 66610 - DNA, 140 bp, Glycine max
  Clone ID: PAT_MRT3847_31162C.1
agatttcgttgtaccacaaagattgccttaaccgctcataaaaaagtcatgggtggatgacggtatcataacatttatccacaccaggaagaaatcacgtggtgttgtggaaccaatcttccctacttaactaactccct

SEQ ID NO: 66611 - DNA, 734 bp, Glycine max
  unsure (1)..(734): unsure at all n locations
  Clone ID: PAT_MRT3847_31163C.1
caaaatttggatctctcttcttaagaaaaaaggtgattattcaagagattctgggcatgagcttgaggtacatgagcagggtgatataccaaggtgggatgagaatgcttcagggcatgaaggagcaattagggtctaataagtgtgactcaaccataaagtctctgaacctgagggattcatcctctaagcagaatcgcttcttgtcatcaggcacatccttcaaacctcccaacaatgacaacaagctaaaacaggcagaagactctctcaggactgtcatgtacttgagttgctggggtcccaactgatccatcttctaattctaagaccacatgcgccattgcatgcttatatgtataatatgggatttatttattaattttatacctatctttgtataaatgtacttgcagatgatgattaaatccataattcaaatgcctatattttatatataanaaaaaaaaaaaaaaaaaaaaaaaaaaaaaaaaaaaaaaaaaaaaaaaaaaaaaaaaaaaaaaaaaaaaaaaaaaaaaaaaaaaaannnnttttttcccccttcccccccccggtggaaaaaaggaattttgggggcccaacattttttttaaaatttccttttcccttggtttttggggaaaaaacctttgtccttgttttctcccggggaaaaaattttgggaaatttttttggaaaaaaccccctttcccctgggggggggaaaggtttt

SEQ ID NO: 66612 - DNA, 616 bp, Glycine max
  unsure (1)..(616): unsure at all n locations
  Clone ID: PAT_MRT3847_31164C.1
tacaacatgggcacactctttactccattgtcggacgcacatctagggtattttatttcctttgtatttggggatgataatgcgaagaagctcttctattcatggattccctcttcttcgatactttgctttgtcttctaatcccacgcactttcttcttcacccatcacattcttcttcaactttctccacctacgcctctataaatacaagcagagctcaattccttgattccttgagaaatgtgaaatctgtagacgttgctttggatttctaccacaaaatggtcacaatgaagcctttcccatgtgtcaaggacttcaacttgttgtttggcatcgttgcgaagatgaaacactacacaactgcaatttcgctaatcaaacacatgtcttatattggtgtcaaaccgaatgtccccactcacaatatcgtcattaattgtctctgccgtttgaaccacaccgtgtttggcttctctgttttggggcttatgttcaaaattggtgtggaacctagcatcgtgacttttaccaccattgttaatgggctttgcgtagaaggaaatgtngctcaagcaattaggtttgttgaccatttgaaagatatgggcctt

SEQ ID NO: 66613 - DNA, 194 bp, Glycine max
  unsure (1)..(194): unsure at all n locations
  Clone ID: PAT_MRT3847_31165C.1
tagtncatctcncncagccanaacctctctnaggaaggnnacattnaagaccttccgtcttcgcaaccctgtaacactgccttcttctccttncctcttnattcntcctttcccctnctctcatgcaaganaggctgtntttgctgcccctggcccccatcatcaccccaactgtgagagaggntatggcaaag

SEQ ID NO: 66614 - DNA, 441 bp, Glycine max
  Clone ID: PAT_MRT3847_31166C.1
attgatattcatttcagattcactctagtttttttttcttccccaattctcaaagataaattgcaccttagcttgacttttggaagtgaaacattttatcacaaaacttctctaagtttttatgacatagggattggggagaatgaccttttgatgtactttaaggagcaaggtggagtattatatgactaatatagtactcaactagtgcatttaagtgaaatcatgttaaagtgagtcattttccaggttatcatttgctcaaattctcttgaaatccatttttatttctttgcttgttctgaatcatggtctctgtataccgtattcctcttagtagcaatagagtgttagtccaaaatgcatcggtatatttctgtgtttttaccattacaataacagctgaaataacactcattatatgtttcaatagttgtggtc

SEQ ID NO: 66615 - DNA, 296 bp, Glycine max
  Clone ID: PAT_MRT3847_31167C.1
ggggggaaacaaaagatgcactaaactatgtgggtaacttaaccaaaaagtgataccggcaaaaccctctaaaacgaacaaactcaccttgtatataagcgggaccatctacttactattgctagatgttttcataactagtgaacctaacaaaaggtggggcattggggcaggatagctcgctgcccactatgatacgctcaatcgccgtaaatgttctcaccccgttaaccgccgccttcactaggacccggcacttctgggttattagttgcaaaggttccccttctgcttct

SEQ ID NO: 66616 - DNA, 497 bp, Glycine max
  Clone ID: PAT_MRT3847_31168C.1
gggtgatgatggactaactgcgctgtctctgaacgcacagaagcgggtgcttacaacttgtgtttggtgtacaggatccgtatggaaatgacgtgttccaaaaagcatctggagaactcaaaattaatcttgctgtcatatctgcacactatgtttccaacctcaatattcatacaccaggatgctgttctaaatgcagatccttaagaataaatatattatcaagatgaccactatacggatcaaagagatgccttgaatagtcaaggctttaaacattcatcctgcgaccatgccttttacaagggacaaaaagttcacttgcatgatattatatacgctgatcagttactttataatattctcaaggccattaatgaaaatgcgcggtatatgacaaacgaaaccataggattctactggtggcacatgatgtcaaggaggacattatggccacactactttatgagcctcatactaaaactagactttaatat

SEQ ID NO: 66617 - DNA, 595 bp, Glycine max
  Clone ID: PAT_MRT3847_31169C.1
cttttttttttttttttttttttttgcaatggaacaaaatttactacatgcaatgaataaatattgtttaggtatcaactgcagcagtatcagcaaatgctacacttttagggagaataaacgatgcgcacaacatccattttccaggagcaacaagtcgtacccgtcgcatgtctacgttgaccgcaacttctagcagcgcaattcttattctctcgtgaaaatcaaatttctggatctcgtgctttggagaatccataaacatggatcaatggcaaagtatattccccatccttgggtctatttttgtatattccccgaaatgcatctgcagaggaagccaagcatatccagaaattaaatcaagatattagaattgtttactcctacagaaagtaacgggaaaaaaaaaaaaaaccagaccaactatagcaactcacaactctgctgatcattgcatttgttcgctacataataaacattgacgaccctaatgactaatatcatattctgagacaaattaattttccactaatacataaacaaacagcacatcaataaacaagcaattatatagtaggattttcatggacag

SEQ ID NO: 66618 - DNA, 267 bp, Glycine max
  unsure (1)..(267): unsure at all n locations
  Clone ID: PAT_MRT3847_3116C.1
gccgatacacatagacccggagtcggtgaaggcgccgaagccggaggaacgtgaagntatccgaaggatcnanagagcgtgncgcngnggaacngaagngaaaggntaaccganaggntaaggntactncagagactggtccccgggggaactaagatggacactgcttcnatgttggatnaggccattcactacgtnaagtttcncaaancgcaggttcantcnactcgancgcnnttcctccgctaccancaatatcgggccatt

SEQ ID NO: 66619 - DNA, 478 bp, Glycine max
  Clone ID: PAT_MRT3847_31170C.1
tactatttctcgggcgccctttttttttatcctcatctttttcattttacgaaaacctaccacctattgcgggggggagaaacaccttctatatctccaaaaggacatttactaatgtatgatcaagccgtttcagaattcaaagttcttgtaatcctattaaataaacggttcacaacatattttacacataactttctatctgaaacatgccaaagcagatagctttcttttcctatcccgttcctttctaaataacacctggtttttttatgatgaaaaagaaatccgattgctatcaaaagccttatcaagcagcttatcctaattacactaatggtttctaaatatcataactgagaacttaaaatgtggtgggatgctgatatgcatgatgattcatctccttacatatacatccattggacttttcactatatgaggctggtttataacatacactatttactcctttttt

SEQ ID NO: 66620 - DNA, 499 bp, Glycine max
  Clone ID: PAT_MRT3847_31171C.1
gggaacacatgcaatgatcagcagagttgtaagttgctatagttggtctactattttttttcccaatagctttgtgtaggagtaaacaactataaccgttgatttaatttctggatatgcttggcttcttctgcagatgcatttcggggaatatacaaaaatagacccaaggatggggaatatactttgccattgatccatgtttatggattctccaaagcacgagatccagaatttgattttcacgagagaataagaattgcactgctagaagttgcagtcaatgtagacatgagacgggtaaggcttgttgctcctggaaaatggatgttgtgcgcatcgttccttctccctaaaagtgtagcatttgctgatactgcagttgatacctaaacagtatttagattgttatttattcattggatgtagtaaattttgttccattgcattagttgtctaaattgatattgtgtatatatctaacatgactttttttttt

SEQ ID NO: 66621 - DNA, 2010 bp, Glycine max
  Clone ID: PAT_MRT3847_31172C.1
gttcgctatcctgggttgcagaatgataagcaaggtattcctaaagccccatctggttggtcttcttcttccctctaaattcggcttggtcttccctcacacaaccaagccttcttcttcccttcccaccactttcttcatttcacacttctcctctgcccctctctcttcctacggaccctccctccacaagggaacaacaatcccctcccaatccctaaacgacgccgttctctgcgaagaagccttcacgcgagtcttccacctcgccgcactccgcgtcccctcctccgaatgctccgccctcgagagccgcctccgtggccacctccttaactggccccgcctccgcaatatcgcccgcgtccccggcgacgacatcgaccccaccctcgcccctctcttgcctcaaccaggtaacggagaattcgacttcgacgaaaatgaagtagaagaaagacgtctcgtctcgctgcaacgccggattcacggcaaggcggacggcgacggcgacgtgttgagccccgtgctgtaccgtgacaggctcgcgaggacgttcaacaccagcggcttcgtgaagttccgccacctcgcgaagatttcgcggccgaacaggaataagaggaggaggaagaggaaggagaaggagtcgagtgaaggggttaagcgcgtgggggagaatgggtttgctgcagttgaggttattgaggaagaagaagaaggagaagaaagtggtggtttgaggaatttgcttggagaagagtttgcgaggaaaaaatggagaggttccacgaggttgctgcttctggatgaacgctacgccgatcgcggtttcgaggagttgcctgaggcaactaaggctgttttgaaggagtatgcagaaaagagtacaaatttgatgcttgagctagttagatgcaagttgacactattctatgattactggcagatgaatgaggtcttggagaccttgctgcctgagggtatgattattccttccgcttttgagactgttggtcatatagcacacctgaatttgagagacgaacatttaccatacaagtggctaatagctaaggttgtgctggataagaataagccaaggatacaaacggtagtgaacagggaacaagattgatacaattcaaaatgagtacaggaccatgcagcttgaggttttagcaggaaaccactctctacagtagttgagaatggtattcactttcaggttgacttagcgacagtatattggagttctaggctaggaactgaaagacaaaggcttctgagtggttttacacggaacgatgtcgtctgtgatgttttctctggagttggtcctttagccatatctgcagcaaggatagttaaacgtgtttttgctaatgacttaaatccttatgcagttgagtatctggaaagaaattgtgttctaaacaaacttgacaggaagattaaggtctttaacatggatggaagaaggttcattaaatctatgtatgacagtgatatatctcagtccatcacacaggtggttatgaacttgccaagtgaagctgcagaatttctagatgcatttcggggaatatacaaaaatagacccaaggatggggaatatactttgccattgatccatgtttatggattctccaaagcacgagatccagaatttgattttcacgagagaataagaattgcactgctagaagttgcagtcaatgtagacatgagacgggtaaggcttgttgctcctggaaaatggatgttgtgcgcatcgttccttctccctaaaagtgtagcatttgctgatactgcagttgatacctaaacagtatttagattgttatttattcattggatgtagtaaattttgttccattgcattagttgtctaaattgatattgtgtatatatctaacatgactttttttttttaacctctagtctctagcattactaattagtggatattgaaaaaaaaaaataaagcccatgatattggaccctttt

SEQ ID NO: 66622 - DNA, 572 bp, Glycine max
  Clone ID: PAT_MRT3847_31173C.1
taagcgtgtttttgctaatgacttaaacccttatgcagttgagtatctggaaagaaattgtgttctaaacaaacttgagaggaagataaaggtctttaacatggatggaaggaggttcattaaagctatgtatgacagtgatatttctcagtccatcacacaagtggttatgaacttgccaagtgaagctgcagaatttctagatgcatttcggggaatatacaaaaatagacccaaggatggggaatatactttgccattgatccatgtttatggattctccaaagcacgagatccagaatttgattttcacgagagaataagaattgcgctgctagaagttgcggtcaacgtagacatgcgacgggtacgacttgttgctcctggaaaatggatgttgtgcgcatcgtttattctccctaaaagtgtagcatttgctgatactgctgcagttgatacctaaacaatatttattcattgcatgtagtaaattttgttccattgcattagctgtctaaaattgatattgtgtatatatgtaacatgagtatttatttatttttttaacctct

SEQ ID NO: 66623 - DNA, 1011 bp, Glycine max
  Clone ID: PAT_MRT3847_31174C.1
acaagccctttaattgcctctagttggttggatcgacacaaagaagcaaggcgaggcaagggttttcactttttcagaaaagtcgaacggcgagcgtagtcgcaagagacgcaacagaatagaacgacgaataggcgtgcagggaaaccatttcattttcgagcgcgtcgctttcgaatccaatggccttcaacaacgcactgagatctgccgcgaagctcgtcgcttcttccgaatcttccttctctaactcagtgagcagaggttttcattcaactggcatgaagaggatgggaggtggacatggtcatgatgagccctactatcttcatgcaaagcacatgtacaacttggacaagatgaagcaccaggggttgaaaatgtcccttgctgtgttcactgctttcagcattggtgttgcagttcctgtgtatgctgtcattttccagcaaaagaaaacagcttctgcctaggctcatcttttacttctatttgcaataaggtggatttggggattctagactagcctattggttctggtgttcattactgctttgaactttatttatgttcaaccttctatatagatttttcatatatatctgataataatcaacttctctgcactaccaaatacttgtgcttggacactttattgttttgcacatctgtttcgtgcgtttcatcaatagtttgattatttggttaatgcatttttgcaatcagttctgatttgtagctttcgaagtttccgttgttaaggtaacaatgcccaaaaaggcagtatcacttaagtgttgtatttgttttcatattttttcttttgaaataaatactcaaattatactcttttttttgagagaagaaacgtgctgctaaatctctatacttgcagagaaaaaaccttttaattttatcttttgtttactttttctccccttattttcatgtaattacctagctgaaaattaattagaatggattaatttccatagttcctcgatcgtactt

SEQ ID NO: 66624 - DNA, 439 bp, Glycine max
  Clone ID: PAT_MRT3847_31175C.1
ttttgtcttcaacctagtacctagttcttttgcctttattggattatctctattttacaaagcaaatcattctgaacaacattcaatgaacaattacggaacaaatgcagggaaattaaaaaaacagaaaatatttttcttctaacggttaaatatttacataacattaaaagattttctctaagctgctacatttaaaaagaaaagaaaatctaagctaagtgacccttaatgtcgaacaaatatggatcacatgggtgatttagaaaaagggaaagccaagaaattaacacaatctcaagatgccaagcaagcttcccagaagagcctgttcttttccatttcatccagagatttgtggcctgaatcaaaagacacataggatttcatctgttcttgttgcatctcatcatcttcacaatatgacattccataaaca

SEQ ID NO: 66625 - DNA, 324 bp, Glycine max
  Clone ID: PAT_MRT3847_31176C.1
ttttctacacaagcatttattcctttggggtattgcaaacccaaagcgaaacaattttcttcatttagatggcgccagtgacaactaaagtcgaaccctagaaaactgggacaagaagcttgaacttattaaatttcttaaagcactttgaagcgtcatccgatataacttaagacacaaatgctccaatcaactcctatatggacacagggctgaactcacactgaccataaacaaaaaatttggtcactgcccaaaaactttcattattgaaaaggtggatcctcaacggggaatgttctttccagcggatccaccaggaaa

SEQ ID NO: 66626 - DNA, 239 bp, Glycine max
  Clone ID: PAT_MRT3847_31177C.1
aattgcttctagttctctcacttaaactattttcacaaaccatagaaaaataataatttttttttccatggtaaaaggccttcctcaaagggggccttggaacagggatttgagtccccagaagccaacaatgtcctcctcatgtcccaaatggaagaggaccaagaggaagagtacctatggcgatgatagacttgtgagcatgattcaatcattggaggcagagatcactgacactg

SEQ ID NO: 66627 - DNA, 1582 bp, Glycine max
  Clone ID: PAT_MRT3847_31178C.1
tacggctgcgagaagacgacagaagggggatcgaaacaaagaagccacgcaaggcaagggttttcatcttttccacaacagtcgaacggcgaacgttcgcaagagacgcaacacaaagttgaacgaggaataggcgtgtagggaaaccgtttcattttcaagcgcgtgactttcaaatccaatcttccataccaatggccttcagcaacgctctcagatctgccgcgaagcttgtcgcttcttccgaatcctccctctctaactcagtgagcagaggttttcattcaactggcatgaagaggatgggaggtggacatggccatgatgagccctattatcttcatgcaaagcacatgtacaacttggacaggatgaagcaccaggggttgaaaatgtcccttgctgtattcactgctttcagcattggggttgcagttccagtgtatgctgtcattttccagcaaaagaagacagcttctagctaggctcgtctttttacttccatttgcaacaataaggtggatttggggatcctagactagcctatggattttgctgttcattattgctttggactttatgttcaaccttctatatggattttccaaatatatctgataataatcaatttctctgcacgatcaaatactcgtgcttggacaccttattgttttgcacatctgtttcgtgcgtttcatcaatagtttgattatttggttaatgcatttttgcaatcagttctgatttgtagctttcgaagtttccgttgttaaggtaacaatgcccaaaaaggcagtatcacttaaaaaaaaaaaaaaaaaaaaaaaaaaaaaaaaaaaaaaaaatcccgcatcttccaataccttaattgcctctagttctctcactttaactattttcataaaccaaagaaaaaagggtcactccttttttttcattgtaacataacatgtcttcctcagagggtgtctttgaattgggaattgagttctcagaagccaacaatgttcttctcatgtcactaatggaagaaacacaagaagaagagtactatggcgatgatagacttgtgagcatgattcagtcattggaggcagagatcactgacactgaaatgggtcaaatgtatgagatgggacacgtggatggtcaagattgctccacgtcagtcagtgatcctaatcattgggttgacatggaattgatctcttccttgccctttgatgagatgaatgcatggatcccttgtggagatgacatgatggagcatgcagcaatggaatatgaagctggaaatgacatcaatgattttcaattgtgttatggagttttcttggagcaacaatatagagagactaattatttggcacaagggtgtgatgcagtattatgaaattaattaaactgttgtttttatatatatgaaacagaagagaacttggattactttgtaattaattttgtgaagtgtccttaactttaagtacatgttattgccaaaccttttaatttttatcttttgtttgcattttcctcctttactttcatgtaatttcctagctgaaaattaattagaatagat

SEQ ID NO: 66628 - DNA, 498 bp, Glycine max
  unsure (1)..(498): unsure at all n locations
  Clone ID: PAT_MRT3847_31179C.1
atctagagaggagttggtatatcgcgggtattctacagaaaaggaaccctagctgacgaagaaggaagacgttcatcgcgcgcacaaagtatgctttatgtaatgcccccccttcccccccgcagaaacaccgtcgccaatgtacagcagcacccgcagatgcagcgactgtgagtagccgctgcagcccaagacgcctgtttccctccgccctaggtatctcgctcccaacaaacaaacaaacgccgcgcttgcgaagggcaagcgatgaagttaaagcaaaaaattgttgaagtgcccggccgcaccgtgggaggtggggggcgttttgaaggttcttttggccgttacgaagaatgggaataaagggtgtatgttntgaagccggcgacgggatgaccgtctagcgaaagaagtggaaacacacagacagcgatgcaaatagctcaagcagccatctcaccaagctgcctgccaccaccgacaagttctaggatc

SEQ ID NO: 66629 - DNA, 308 bp, Glycine max
  Clone ID: PAT_MRT3847_3117C.1
gaggagtacccagcttttgatccggaagctccccttacataggctggtgcgtgaaattgatcaggacttgaacactgatctgcgttaccagagccacgccgtgcttgcattgcaagaagctgctgacgcataccttgctgggctctttgaggacactaacctgtgtgccatgcacgccaagcgggtaaccattatgcccaaagatattcagctggcaagaaggattctgggagagcgagcttgagttggtggttggaaagatgactatgatcggtggctgcggttggagtacttgttattcagattcc

SEQ ID NO: 66630 - DNA, 247 bp, Glycine max
  Clone ID: PAT_MRT3847_31180C.1
gacgccttgcaaaataggttcatttgactctcacattccttgcagcaaaccaaacatggattccaatgaacttaacgtaatgggctgtcactatgccatatctggtgcagcatgctccgagctcactggcaaggtgatttccgtggactttgttgtaacctctaggtataagttgctcatatgatgatatgtgaagtcagatttctgaccgtcattttatctcatcgaaagagaggtgcccttgttc

SEQ ID NO: 66631 - DNA, 256 bp, Glycine max
  Clone ID: PAT_MRT3847_31181C.1
aatttctctagctagctagctaggtgtgcttccaattttcacaaaccccacatctcactcatcatcatatatagcaccaaacatatatctgttatttctgctctctttctttcaataaattaagctccctctcacagccgttgaaggggagaatggggagaaagtgctcacattgtggaaacataggtcataattccaggacctgtgcatctttcagagcaactaattttgtaggagttcgactttttggggttca

SEQ ID NO: 66632 - DNA, 308 bp, Glycine max
  Clone ID: PAT_MRT3847_31182C.1
aaaaggaattaggacccgggtaacccaaggccctggctttcgttttgggctgaaatttgcttggaacccttggtttctggaaaatttttttttaaccataatggggggaaaaaaaaaggggataaatagggaaaacaggggggggaaaaaaagggggggattttttcggtttgccgttggataattggggaaggccaatttaaggtggcccccgagatttatttggctaagaaaaatgcatttgggtaaaggcgacaaggggcctaaaacccgactttgggctttgtttttttttttgggggcccttt

SEQ ID NO: 66633 - DNA, 436 bp, Glycine max
  Clone ID: PAT_MRT3847_31183C.1
cggactcgtgggttgaaaaattactgagattcatcttaatgtgctgaattctataatatctcttggcacaaattcataaacaattgttagatctggcttgaatatactgctaactgctcttggaagataccaaataccatgtttcacaaacgtatgtcttgactcttgactatcctcaattcctttgccacatccccttctccaacgagtagtgtttctctcttgatcttctctctctctgtgcttatatcccatttatttgcatcactcttcggattatcaaccttctcgggcatattcattcctttcaggtgttcttggctagattgccaccatgataaagcaaattcttagcaaattgccaaagaaggtgccaaaatctgactcatcagattctgcaaggagtgattctagcaataccactacttttgggaat

SEQ ID NO: 66634 - DNA, 429 bp, Glycine max
  unsure (1)..(429): unsure at all n locations
  Clone ID: PAT_MRT3847_31184C.1
aactgtacctgctatggttattggttgtaaattggcgcgtgaattaattattgtgctatttgtaacatacatgagaactttgatggacaggagaacagagatatttgtcctgttgcccttttaagcttatttttttaggctgctcatattaaattactagttgaaaaataactcagcctctggcatctaaacatcatcttgttcttttccaacaactatttaacaagatcaaagttttcatattgcttatatttatttatttggggngcaggggtgaatccctttggttttcttatgatttagaaccatatattattttagccatggcattcaatgcgcatcacagttttgatgagcttattgatttatgggtactctggatatcttttgaacaattcttgcctttttttcagattattttgttgtcat

SEQ ID NO: 66635 - DNA, 465 bp, Glycine max
  Clone ID: PAT_MRT3847_31185C.1
tctctgctgcgagaagacgacagaaggggattgcagtctcaaactgaaagtctcacaaattttgtagaaaactgtagttttatccccacccccctcccccatctgaaagaaagagtatttgcctcgcatcatttttcttttctttctctctttctgtctctctctctgtcggtaccatgagaccagaacgaaacccattagatcttaacaatttgcccgatgagtactctagggatggcaaacaagtcctcgaagaccatacctcttcacccggttgcaggaaaaagaaaagcggcgggaaggatggaaaagacgagtgtgggaaggtctacgagtgtagattttgttccctcaagttctgcaagtctcaggctcttgggggacacatgaaccgccaccgccaagagagggaaacggagacgctgaaccaggctcgtcaactggtatttcgtagcgatcatatca

SEQ ID NO: 66636 - DNA, 315 bp, Glycine max
  Clone ID: PAT_MRT3847_31186C.1
acccacgcgtcagaccgctcctacatgctgatgcgaggggacaacaaaagggggtgcactgctgactttgttgatcgagatatctaccgactgtgtgattaaaatgaacgtccgtaattacctcgatgctacacatttggcaacatgttgataggatccctacgagttttacctgcggcaactgatcactgcctcctgtgcccgtaccccgcaggtgtaatgcccaagttgaaagggtcctgtgcaagctcacaacatccatggcttttatagcagtcctgacgagtatcttgcagcaaccttggattacatcca

SEQ ID NO: 66637 - DNA, 598 bp, Glycine max
  Clone ID: PAT_MRT3847_31187C.1
tttcaacatcggttattaattgatgttgaaagtaccgatgtggaaagtagtatcattaacatcggtttttcaaaaccgatgttaactaataaatacaacatcggttatttaaataagcgatgttatatgatacgaattatgaaaaaaaaaaattataaatctataaattaacatcggttttttaaaaaactgatgttgtaagtgacatttaacatcggttttttaaaaaactgatgttgtaagtgacatttaacatcggttttttaaataaccgatgttgtaagtgacatttaatgttgtaagtaacatttaacatcggttttttaaaaaactgatgttgtaagtgacatttaacatcggttttttaaataaccaatgttaaatgtgacatgtgacatcggttttttaaaaactgatgttgtaagtaacatttcacatcagttttttaaaaatctgatgttgtaagtgatatttaacatcggttatttaaataggcgatgttatatgatatgaattatgaagaaaaaaaagttataaatctataaatcaacatcgatttttaaaaaactgatgttgttagtgacatgtaacatcggtt

SEQ ID NO: 66638 - DNA, 452 bp, Glycine max
  Clone ID: PAT_MRT3847_31188C.1
tattgttactgtgccaactcattgttaggccacatgtacctaacacccacctaattttttggaacttagaattaagcagggaccttactccaactagggtggtcaaccaatcaaaatcctttttctcaattctctctctctctctctctgactctctccacaataagtgttgattttttcctaaattagttaaagtgtacctacacctttatctagtcgtttaccacttttgtgctcctacaatttcctaagttttcttgtcatataaaaattgccacattaacaaaccaaaacgcctgactcacaatcagttacaccaccacctgctgctgctccttcacaatctcctccatctgcttatgctaaacatgttcctaatgctccaaaagtattggctgaagaaaacatctaaattccagatccttcttcttatgacaaacctgattaatcca

SEQ ID NO: 66639 - DNA, 357 bp, Glycine max
  Clone ID: PAT_MRT3847_31189C.1
cggccgccctttttttcttttttttattatttaaaaggcattgtatttttataatcagctacaaaagcacactacaaatatgcaatacaagagacatcgtatagataatagaacatagcactcatagcagccatctcttttagtatctcaataatagaaatgaaactggattaatatctcatccacaccatgctgccttttaagacctctctgtccaacttgtgcaagaatgctcaacgcggatgaccagttgcttggatgacatcccgtctgcagtaggcatctgaaccatcacattccgacgtgacgagatgccttcaaataagagcctctttccagggcatgcagatcagcggc

SEQ ID NO: 66640 - DNA, 254 bp, Glycine max
  Clone ID: PAT_MRT3847_3118C.1
aagcttatatctgtcattcttgtaaatgtgttgcgtgtatttgtaaaggcacaaaatcacatgatgctagtcgacagagaaagaaagccccctctcgaccagaatgggtgcactctgttgatgggccaaccataccacacattgaagagatacaggcgatgcagacgatgatgaatgcttttgaggcaaatgatactatcgaaaaaatgacgggcatagatacaactgggggaaaaaaaacaagtttttttttt

SEQ ID NO: 66641 - DNA, 309 bp, Glycine max
  Clone ID: PAT_MRT3847_31190C.1
ccacgcgtccgcccacgcgttcgtttagtttctatcatacccactttgccttctccgtttcttactgggggcacatcgggcctgcatttcgctgcattccctctgggttcttcaacgaggaaacttatgttgtacacttttgcacgtgccactcttggtcttacacactcttctaatattgaaacccctaagatctcttttggtgcttaggatgttgatgtgactgtatggaaaggggacatccttgcagtgggtgtttctgtaaatagatttgctagagatgcaatcctttagtttttgaattcgttt

SEQ ID NO: 66642 - DNA, 412 bp, Glycine max
  Clone ID: PAT_MRT3847_31191C.1
tcgcccacgcgtttgtggattcgtggtgacaagagatctacactacacgtgcaacgtagggtttcatcccagtccactaggaggacgaggtgcaggtgattgctagtaacatacaagggttgtcggagcaaggtgagtcaaatttaccggctacgttttgattacattgatggcataacactgataagttgaatgtgtccacatttaaatttgggatacacctcctcaacgttgtgctgaccaaactcaaatctcgcaaagaccttacgggcattcacgatcgcaccggcatggttcttgccggtctgatcggtcacggcctcggttcgatcccatacattaagtgccactgatgaaattgctcttgtggctgcttatcatacaaactcagtttcattactggattgaatac

SEQ ID NO: 66643 - DNA, 363 bp, Glycine max
  Clone ID: PAT_MRT3847_31192C.1
ggcctccggcatgcagtagaccgatctgtctctggtctctagctggggaatagctggtctagcgtgcgtatttcacctgcttttcctatcgatcttagcagacgacgccggcgtgctctctgaagataactacgagaaggaagttgttcatgccataggagctttcggtgaactctatgctccttctcgttgacactgcataaagcttgctccagaatttcaaaagcttggtaccaacttcaagaaagcccaacctgacccaatcggcaacgtcgactgtgatgagctcatcagtcttgtcaagacatatggagtcttatgttacgcatctattcattggtttccaaaccgatctcttgtacc

SEQ ID NO: 66644 - DNA, 409 bp, Glycine max
  Clone ID: PAT_MRT3847_31193C.1
aattcggctcgagcggaaggatttgaaggagatgggaaaaatgatggatcaagatgcagtcccaaatctagcaccaattcaaggaaagcgatcatcatattgataattgctttgagtgtgagtgtaagtcttgtaacactacttgggggaagcttttatgtgtattgggtatcgaagaaaagaaagatcatcaaacttaaagaacaattttttcaacaaaatggtggccttttcttacaacaacatatgtctaggcataaaggatcaattgaaacggccaaagtcttcactattgaggagttaaaagatgccaccaacaactttgatgaggacaagatcctatgtcaaggaggccaaggaacagtttacaaaggagtattgctagataatagaattgtggcaatcaaaa

SEQ ID NO: 66645 - DNA, 267 bp, Glycine max
  unsure (1)..(267): unsure at all n locations
  Clone ID: PAT_MRT3847_31194C.1
ttgctctacgnctctccctctctctcaaaaatcgttctcttcgattttagggtnttgttttgctgctgcctccgttccccccttctcataaacaacgcgttttctcttctgcttcgtnttattctngcgcttttgggatnggttgantnaaggcctncanagcattcgntgcggcattctaatcganttatccaancaggnctgaatnaactantggagtctaaaggnnggacaaagaagtctagtngtngtagnagtaaancattg

SEQ ID NO: 66646 - DNA, 221 bp, Glycine max
  Clone ID: PAT_MRT3847_31195C.1
acgcaaaattcaaggcgtaattgaagctggagtttgtagccggcgaggtgaccttgggatgcgcccttccaattcagtgcttattcctgctcttcagactgatggaaatattgatactggagatgaatatcatacacaggtcatgattgaccatcaagctctcacacgtacatagaatatgttgactaatgcttatcttatgagcatattctatcgaacca

SEQ ID NO: 66647 - DNA, 813 bp, Glycine max
  Clone ID: PAT_MRT3847_31196C.1
atcgtccacgcgtccgacggctgcgagaaggggacatattggggcgtgtttgtctcaatccaaacaaacagttcccacgtgtccgcccacgcgtccggcaacttaatctattctcaccagatcaatccaaacagttttgttcatgagaattagctctctctaacctaacttgtttcttctatattttaggatgcgtttgcttctatattgttgatcatgaaccgtcacgaccaatttcagaaacctcaatctctctctaaaggaactacagatcatagtcagcatcagaacaaggaagatgtggtttctataaaagattgtatctcaccggacttgacatcatttgcgacctcctctggagatgttgctgctggtttcacaggtgtgcatgaatcagaagccctgtcttgttattcatcagtctcaacttctgttggcgtgcaaagcaaaactgtcaagggttctgtaattgccaaaaataatcctaaatcttctggtttaatgaagccaaacaagttaaagtctacacatagaaatgggattttaagcagcacgatatctgagactgtggctgatacaggaaaagatatcaaaattctaaacaaggctcctcatttgcgttctaattttccagcagccactgctccaaatacatatcaccaaataggaaaattttcatcattaggccacccaacatgccatgtttccccccccacaaaccacaggccaaatacctctactaactacagaccaactgggagagtgtctaatgtaaatgatcgagttttggtgggtgacaacaaattcaggagt

SEQ ID NO: 66648 - DNA, 545 bp, Glycine max
  unsure (1)..(545): unsure at all n locations
  Clone ID: PAT_MRT3847_31197C.1
ggctcgagccgtatttcaaggtctattaagcgatatttgtatctcaccaaatcttgcaacccaaatgcttccatgcaagagacctcataggtctccagaaggttcagagcattatcagatatactatgatgctataataaacagacggaggcttttttctactgatactggttcagatcattgtaggcaaaaggggaaggttccattgttatcattggaatctgtacatcaccttcacatttttatctttgtattggccgttgtacatgcaatattctgtgtcaccacaatgcttcttggaggagcaaagatccgcgaatggaacagctgggaggattattgtaggaacaagatcataagttcaaaaaaagattaccgtgagttcttcaaagtgcatgctgacggatattggagaagagcagctgttattagttggctgagatcattcttcagcaatttcatggctctgttacaaaatctgactaccttgcactgcngtaccgatttgtcaaggaacaccacccacaaaacccngaatataattt

SEQ ID NO: 66649 - DNA, 1155 bp, Glycine max
  Clone ID: PAT_MRT3847_31198C.1
ccagcgtccgattaatatcagtgcttggaaagaaaaggaagcaaaagaaaagagaagatccatagctaataagctaggttcagtagttagtgagtgatcgatatctggagatgggtcgaggcaagattgagataaagttgattgagaaccccaccaacaggcaagtcacttactccaagcgaaggaatggtatcttcaagaaagctcatgaactcagtgttctctgtgatgccaaggtttcacttatcatgttctctaaaaacaacaagatgcatgaatacattagccctggcctcacgacaaaaaggatcattgatcagtatcagaagactttgggggatattgatctgtggcgttctcactatgagaaaatgcttgaaaacttgaagaagctgatagatattaacaacaagctcagaagacagatcaggcataggataggtgagggtttggacatggacgacatgagcttccagcaactgcgcactcttgaagaggatttggtttcttccatagggaaaatacgagaacgaaagttccacgtgatcaaaacacggactgatacctgcaggaaaaaggttaaaagcctggagcagatgaatagagatctgctgcttgaacttaaggaaaagtgtgtgatccatccacaatttcttttgcacgatgaaggagacgaggaatcagcagcagcagcagcagcagcagcagttgcactggccaacggtgcctccaccctgtatgcattctgtcatcagcaccattctcatctgaaccttttctcccaccattctaatggagaagagcaaccctttaaaactgatcatgaccttcgccttgcttgatccagtgcaacaattaactagcaataatgtaaattaactagctagcaagcaagcactaagcacttgttaattatgctttgtattatcctatattggacctgttaaacttaaacgcaacgttgcttccaacctctctagtctctatccagatcgagaattagctgaagcttatatatattatgtagtatttggcaagagtgtggtatgaaaaacagaaagactgtattttatttgttattataagtttacattgagtggttatgtaatattaattgcttggtacgttgcttcagtatgatcatactacttagat

SEQ ID NO: 66650 - DNA, 412 bp, Glycine max
  Clone ID: PAT_MRT3847_31199C.1
gtgtactgtttgtgagaagacgacagtagggggctaatcactcacaaagtgtaactttttgacctattattcacatatatttttattattcacacatcagttatagtggctgcaaaatatcgcttcaattcgaggccacgcagcaagacttactatcaagaactcttgaaagactcgccgcgctatatatgaatagtagatcataatccatctacatttatatggttgaaggtgctaatactgacaacctggctagagttaaactttaatgagaggaggaaccctgtgcccactgatccgtagagggaggcacctcaagtactgcgtgcaactaagccttgtttgcaacaacccaaaccagaaagctggcatgtactaagaccagagttaactctttgcaacctaccttggc

SEQ ID NO: 66651 - DNA, 347 bp, Glycine max
  Clone ID: PAT_MRT3847_3119C.1
ccttaaatttcttatcatatctgactaattttacttttacaacctttcctcttatgaaggctttttaaatatctgaatcctactatcaaattcctactaccttctatcctttttctgattcaaattctcatgacttctttccttcatcaaaacattatctgcatattcgcttacatcatctaaatgtaatgaaaatccttacaacctttcattcattgaaaaaagaattcaactataacaatatacttaaacatgttaataaatactttcttttcaatgcaacattttttcatgacccataactattacattttattcaactttaaatttatcatacgaataatttt

SEQ ID NO: 66652 - DNA, 298 bp, Glycine max
  Clone ID: PAT_MRT3847_311C.1
cgggcccggtttacccatggctacttcattggtcaaaggagggaaaaaacgactaggcatatcacgccccaactaatttattttaaccgtacagcgacatcccaaccagactcgaatgaactgcattccatatacagggtttgctcacacagggctttaccaacgagaacgctggtgcctttgatggatggattctgacagcatactaccgttggcaaatttgatctcgccaatcaatgtatggaccatggtcccaggggagagtgtaatccccatatcggggctaccatgtccacct

SEQ ID NO: 66653 - DNA, 428 bp, Glycine max
  Clone ID: PAT_MRT3847_31200C.1
ggaaaaaagtttcaaattgttttttttttttaaccccttaagacttttttccccagattgggggggaagaaaaaacctttcaaagggggggcgatcctcaatgaacccccccagcaagttcctaacccccttaaaaaaaaacaaaaagggggattccaaaataaagccccctttttaatggttgaaattcgggatccaccccaagttaaacaagaaaatcctttccaaaccctgtgctttaagcccagggaaaaaaaaagctgatttacattacattggcggccatcatgaaagggggctagcttttcgtttctacaaaagcctgctcctgaattgccctgatgtttattgcccaaacagcaaaaaaaaaaacgtccttttttttttttttttccgataaaaaaaaggacccctaaattcctttttaa

SEQ ID NO: 66654 - DNA, 421 bp, Glycine max
  Clone ID: PAT_MRT3847_31201C.1
gctgtgcctatgtaatattctcttctatgatatttcttgttgtaaaaataccggctagtagtaaacagtttttttcagactgttttatatgctctcatcaatgctttcatctaccttttctcccaaggtattagatatacatctctctctatgtctcttttgctctctctctctccaccgtctctactagaaacaatatttttttttttgttcttccagcaaatttcactataaattgtttaatattttttcccatcaaaaagttgtggagtgaaatatcctgtattttttagggggttcctaggatttactttttttttttgcttctttggtctttgtcttgattgattagagggcagagctaggagtattcccccctatgttctcaatgtgcatagttgattattattttcaagtgcag

SEQ ID NO: 66655 - DNA, 496 bp, Glycine max
  unsure (1)..(496): unsure at all n locations
  Clone ID: PAT_MRT3847_31202C.1
cttccaaggaaggctttcccgtcatcactgtatgacgtcctccttctttgggggggggggggggggggcatgggtaaatagagcatggtacaaccttaaagttctatggatatattagagaaagaaagacgagttgcgtggatgaagagtatatggttaaataaaccaagaacgggtattaaacccaatgttggtacggatatcgttgtgtgactaaaaatagcaggggtcggcgaaccaagggcaaattaaacggtaaggcacgttggtgacgagtcgtaccagttaataccaaagaagacaaagtgcagatgtagacgcgataagcatagttcggggaagaacaagagcaggaataacgtacttatttagagcggatactgcgatagtgccaagctgccngaccaaaacaaagtacctgcatgccaggtgcggctgcgatagagcagatctaccacatgctttactaaaggaaaaaaaaaaaatgtggtgcaag

SEQ ID NO: 66656 - DNA, 305 bp, Glycine max
  Clone ID: PAT_MRT3847_31203C.1
tttttgtattttatgcaccataatgttctttccattcccttctctttgcatacatgtgtgtgtgtgtttgttttacatcatcagaaggccttctcatgttggctgatattagctcgagacttaaaagagttatgacttcgttaaatgtttggtattaattctcttagaagttgctactagattgtgacaaactctagtaactctacctgttatttttttaaatttacactatccctgcggtgttaagccttatacttttcctgaggaagatcaactacttgttggctttttgattttcgtatttc

SEQ ID NO: 66657 - DNA, 191 bp, Glycine max
  Clone ID: PAT_MRT3847_31204C.1
ggctcgagagacaatgaaaaaattaattactcatttccttgaatgtgctatgcccacaatcccataggatcaatcagataatcatataatgcaccaccatatatcatgacaactcacgaagcatatgtgcctataagatatgagggtctagagatcccttttgttcataaaccgccgggattgattttttt

SEQ ID NO: 66658 - DNA, 1840 bp, Glycine max
  Clone ID: PAT_MRT3847_31205C.1
ggctcgaggttgttaccgttttgctttgttgaagattttttgaggttattcgcgttttcttcttttgcatgttcatttctccgtcgatcagtgaagtgtgaaacgacgccgtttcgttgctctcggctcgaactgatggagtgggtttctctgtgatctcgagggggagttcggcgatgtgtgagctaattcggtgcctggtgtttgattctgttttcggttttgcgcatttttttgctcgaattatatgaaatgtttgattggaacgacgaagagctagctaacataatatggggtgaaggaggtgagagtgttgatcatattgtgccatatccagaggtaaatgaagatgttagcaacataaaagagtggaatcaagaagctgctgcgactaagctcaccaagctgaagaggccagaggctaaaactgattttcatgaaagaaagctaggaagcagttccaaccttgataatagtggagaactactaacctcaggatatggaacctaggaagcagttccaaccttgataatagtggagaactactaacctcgatatggaacaaatgcatggcctgacttgtctttatccacttcagctaacattgatcagggttccctgggtactgaagtatctaaaaatttaagtgaacttagcaaattcagttcatcaagagaagaaactacacaacatgaaaaggatgctgaaattttccaaactgctcatgaaggtaaagagcaaggtgattttgttgattatggatgggtcaacataggaagttttgatgaccttgatcggatttttagcaatgatgaccctatatttggccatgcaagtcttgatagttctaatgagctttggtcgtctaaagatgtgagtaacaatgcagcacctttaccattggatacaccaagttcatctggtgctttaaggaacagaactgagtctttggaaatcaaagaagaatatgttcaatgtagtgatgaatcattggacctcagcaatgagaagattgggggtcctggatcccaagttatagaaaattcatgcacaaccacagctaatgtgggaaatggtggagttagaagtaagcctactggaaaggaacagcaggtttttaggcaaaagaatcttttgaaaactcggaaaaaatcactggtaaaacaagaggagaataccttgcaggatttctatgataattggtctccttcagcagcaccggcaaaacaatttcagaatcaattggcaccttctgttatacaatcttctccctcttcaattctggggcagccaaagcagatccaaggagctgaaaccctatatcagaatatcataaatccatatgcggcttcttctgtgtatgggaaccttactaatacatatcctgctatgccaatgctatcacagactcacccagcactttctgggtacgaagtgtctcctggtattgtgaatcctgtgaataatttagtggactcagtcaagccccaaatcatgacccctcaggagaaaattgaaaaattgaggaggcggcagcaaatgcaggcaatgattgctattcagaaacaacgccaacaattgggccatcaagttcctagtaaatcaagcactcaaaaatgtcctccagaaattcaaagtcaccttagtgatgggactgatgaagatctaagaacttttcctgcgctagatccaccaattgaacaagatgattctaatacaatgtcagtggcagttggtaatgatttcgttgaagacaccgtactgtacgggcttcagcatattatatcaaagttagacatcaaaataagactctgcatcagagatagtttgttccggttgg

SEQ ID NO: 66659 - DNA, 274 bp, Glycine max
  unsure (1)..(274): unsure at all n locations
  Clone ID: PAT_MRT3847_31206C.1
aaaaancaggcaccannncncagaggcagcagaaggnnacaaagagaggagaaanncggaaagncggnagaggccnagaaagggacnacggaggaannngagagaaagagagcnagttcganaggcnnnngaanncnaggagggnacnnccaaaacaacaaacagggcaagggaaagaaaattttttttgaaggaagcaggtctctcgggagttaaaattttttgtttggacttgatgggaagaatggagacaacctccgaaaatactgaaagg

SEQ ID NO: 66660 - DNA, 1332 bp, Glycine max
  Clone ID: PAT_MRT3847_31207C.1
cagattcccacccgcgagtgcaaaagctactaccaacgaaaccttgtccgaaattctagactcatcaagagcgcagaaactcgaccttgagctcaaaacattggaaccctttttcagaatcacagcaagaagcgtggtaacggacaaagagctcggaaaggccgaagggttcataagattctgggtaggaggcaaaattcttcacttggactcaatcaaactacaaagagagacactgggcatggagaaatcaatctttggccttggcttgttcatcggagccgttgcaattcgacatggttatgatagcggatgcaaaacagcgcagctattgtccatcaatgattcggatctttaccattccaagcaaagacatccaaacgagaatgacctatccagctatataagcccttctcaaatttgttaaacaaggtactattctcgacatgggactagaagagttaactaaattagttgtttttttcaccgttggttcggttctacactagacttgggtttaaagttgtgtacgaggttacggggtcatcggttgaggatgttgggcacatgcttgtgtggggtggtgttggtacccgcatggatgctagcgttgaagaacttatgaaaaaatggtgtacacgatttaaagcgccacattaatgatttcgtcagtcagatgagcaattgaattttagcaaaggcaacaacacagtaagaaaacgggtacagcatagcaaattaaagaatgttcgatttttaactctttctatgttcccaccctatgcggggatgaatctagagaggggtactaatgataagtccaacccatccctcaatttttcttttaaaaaaatatttgtacagattctaatttttttataagaaaaaaatcatatttttattaattgtaattatatataattatttagttttaactcctcctttcattttctggcgattcaatatttctggaatgatgcattttgaggttgagatgattgtttttctctggcggctttcatttctagttctaatggcagctttcgtttctatgaatggaacaatggaaccacaagcctgagttttcttttcatccaatttgaatctgttgaaaatttgttgtttccttctatttagtgatacaattgcctttcttaaggatttgcgctgattgagaaattagtctgtttgatggtttgattgtattattaatcgctagttactagctaaatgcagattcaacatccagtttattgacatgttatacagataaccatttaaattgtacaagatttgttctttatctaatcgtagattcaaaatccacagttt

SEQ ID NO: 66661 - DNA, 407 bp, Glycine max
  Clone ID: PAT_MRT3847_31208C.1
tggaagacgacagaaggggagagacagagcaagaatgtggtcagagaaggaaagcgagagtcggaagagatttggcgcgagttgaaaaccctagtgagttccaatgatctccactcccttaacctcatgcaacacaccatattgggaaggttgcaggatagcaatgcggtgttgtcgcatttcaacgacttctctcagcactgctttgctgagatttccggcgacatcgctagaaacacgcgtgttttgagaagtatgaaataaaaaattatggctacttatcccgatgcatttcctgaagactcatcgagcgaagtgattgataggagaccggatcttgaaatgtccaagtaactaacgttatccgaacacagattagaatgagttatactaatgaaaagttggtt

SEQ ID NO: 66662 - DNA, 619 bp, Glycine max
  Clone ID: PAT_MRT3847_31209C.1
gagagaaggaaagcgagagtcggaagagatttcacgcgagttcaaaaccctagtcagctccaatgatctccactcccttaaccacatgcaacacaccatattgggaaggttgcaggacagcaatgcggtgttgtcgcatttcaatgacttctctcagcactgcttcgctgagatttccggcgacatcgctagaaacacgcgtgttttgaagtctgtcaagtctgaccttgattacatctttcagaaactcagaagtatgaaatcaaaaattatggcaacttatcccgatgcgtttcctgaagactcaacgagcgaagtgattgataggagaccggatcttgaaatgcccaagtaactaatgttattagaacacagattagaaagagttatatgagagtttgtttcttcttggtttttcttctattcttgtaataaacttgtcctatttgtcactatcgttttaccagagcttcttgcccttaatcaaattctctaaactttttgtctatacacttttatattgcagacagtaaatgcattacgtccaaatgataaaatattaatttcagataaaaaaaaaaaaaaaaaaaaaaaaaaaaacaaaaaaaaagaaagaaaa

SEQ ID NO: 66663 - DNA, 581 bp, Glycine max
  Clone ID: PAT_MRT3847_3120C.1
gcaacaaaactgccttctaaataatatgccccttataacatcccttatccgccaaggaaatggactaacaccctataggtgctggagaaatctgaattatttcacactcttcttaccatcaaaacaaaaaacggtcctcatcacaatcaaacaggattgaaaactgaccaccgcccatcaaaaacctaattatgaaagttacggctacatgaaatcggcgaaaacttaaaaatattgcttaaacaaaacacctagcactctgcccggatcaaactactataaaggaccatccacgatgatgatcacatgcgctagcaaaactgaccacatgcactcactgcttcttggcaccggccttgtggaccttggctccggcggggtctttacttctaacactcttgatgactccgacagacacagattgacgcatgcccatgacagcatagctaccaaggggaggatgctcagagaaagctgcaaccaccatgggctctgacggaatcactgtaaccatacctgcatcaccattacttagaagatggggctgcttctcaagctctctaccagatcgcctgtcaatc

SEQ ID NO: 66664 - DNA, 444 bp, Glycine max
  Clone ID: PAT_MRT3847_31210C.1
gtggatgacattggcctacagctgaacttctcaaacacgactataagtctaacctccccttctttggctctggctgtgatcagagtgaatgccagtagtttcaacacaactacctttgtggcccaagaccctgcaaatcttcaggtttctctggaaacccaagctcctgagaacagtattggcacaattactcttccttcatcgctgatgaataatttaccagctcatgacatggagctagcttccagggttcagttcaatttttttgaaacacctgctttgtttcaggtaaaactgctgctcactgcttttggcttgggctttatttggagatgagggcatttcatttcttttagtgctcgaatattcttaaggctgccgtaagtcaaatgaattgccgaaatgctgcagttcatttttaaatgcagcctaatgatactggtg

SEQ ID NO: 66665 - DNA, 540 bp, Glycine max
  unsure (1)..(540): unsure at all n locations
  Clone ID: PAT_MRT3847_31211C.1
ccttannaagttgcatttacaaaattcaattgtcataaaacatgttatccttttagcgagctgaaacttcgtgggtaatgatttgattagtgtaaatgacgcaatgatattaacagaagagtcaaacttagttgccacctttatatcacataaccaaccacctcagcctataatcacttcatggcaccagagaggagacatttcaaggctagaatcattttgtatttgaaccacggtttgaccataggcgatgttggtcctgtctccatataaattaagcgcttcaaagttcaagaaacacaacataaatcaacaaccccaccaagaatatcattgcattcgtgggcacaaaagcactttctcggccaccgcagaatgagaatatatgcaaatctctagatggtttggattttgagctttttggtgataataattcttggctatttctgttttgaaatctaactttggtacataattgaatagaatggagagaaattgacaagactaaacatagtgctctttggcaaccggacgcgtggg

SEQ ID NO: 66666 - DNA, 348 bp, Glycine max
  Clone ID: PAT_MRT3847_31212C.1
cacactcctccgaccactcctcctatactcgaattcgcctaatacctcattgtagagcaataccttactatattatacttcataaataataaaatcttactcatttcattcagtttaaatcataatttataacatcctccattatcaatcatactatacatcacactttacatactacctccactcatctaaatacctcatctgtttcctataccactaataactactattagaccaacactcaatctctatcttacaaatcaatcgatcttcagataatcatctcactatccaactcgtttatacgaactacacagctttcttacatattatactcttacagaccca

SEQ ID NO: 66667 - DNA, 835 bp, Glycine max
  Clone ID: PAT_MRT3847_31213C.1
gaattcgagctctgtacccggggatcctctagagtcgacctgcagagagaaaaccagatattcatcaatatgtagttcttacttcttatataaaacccgtaattcatgggagataacaattcataaattcaatgaataattacttctgaaaactaaaatttgataatcagaagaaaaaaaaagagatcaattggcctccctaccaaactgaaatattttaaaaacccaatcccttgagttccccaactaggaattattgcatttcaatttgaaacgaatattagattgactactaaccaaaaggccataagctacagctatcagtcagtgcttaaacctttcaagttagcagcaccaacacaagtgacacaatgaacaatcaattaaactctaacccacctaggtgttgctcgcacaacacaatatgttggcccaaagccaacaatcttacaatcccctttccagttcagcctcatacagttcaacaccatttcagaaatataactcctaaactcagcctgatagcacttgcttaccattgaattaaaagactacagcgcaatcttacaacaatccacctaggccttgtcaaggcaagatgctgacccaaaaccttaactcagcacatctttttttttttgctcagtaaaaatagataatatatattatattgagtaccagaggtactaaattacagatatttggattgccccaagtaaagggttccaaaacagactaaaatggagtcggggagtggaaaccacagttgggctaccccagatttgagcaaactataatttagtctaaatataactgttacatgaaccctgctgga

SEQ ID NO: 66668 - DNA, 288 bp, Glycine max
  unsure (1)..(288): unsure at all n locations
  Clone ID: PAT_MRT3847_31214C.1
aaaagaaggatattcatcatctattttggctgangagctacttagctgctggaaagctggtggccgagatggattctaaggtgattaacttcatagggtgctgatatattattgtgctgtgaanttctatgatattgnctgtagcttatagtgacaggagatgtgtatgctatctntgcataaatgcccatggancntatgactaactagaatcgacactccattatggcttnnatgccngataccatgcnatgcttgcttcntcactcgctaaggccccacggcaca

SEQ ID NO: 66669 - DNA, 391 bp, Glycine max
  Clone ID: PAT_MRT3847_31215C.1
tggttggttaaatcttttttttttttttttggtagcaaccccgattatctctatatagacagaatagcatcacatgttccacttttcagtattttatacttctgagttgtaaaatcagcattattatttaacgaatcttgaagggaaagtccacctgcttattcagaagaggcgattcttattcagaaatagcaataattggatttacaatgaccttatcttccttggaagggagaaaattataaaaggaatccatgcttccatagcacactagaaggccatctgtttagaaaattttcaattctatatttttcccagttaatgagaatatccttatgagccccaactattatatttgtcatagattttcggctcatcctgctattgctac

SEQ ID NO: 66670 - DNA, 426 bp, Glycine max
  Clone ID: PAT_MRT3847_31216C.1
cagaaggattttttttgggttttggtttttttttttttttttttaaacaaaaacaaaagggggcccccttgggccttttgcaaaggccctgaaacccgcttaaaggggggctggtgttgccccccccaaccccaaaccaattaaaacaaccgggaccattttccgccccctttttaccaaaacaaggggcaagcccctggaaaccggttcccgaaaatggccccctttaattccccccccaacttctttttttttttaatcgggaaaaggtttttgcccccatgccaagagggcccaaaaggggggccaaatatgtttttttgccccaacaaaaagggggaaatttaccccctcaaaccaaaaacatttttttttccccaccaggcggccacttggaaaaccccgggtcttttaaacttgggcccg

SEQ ID NO: 66671 - DNA, 589 bp, Glycine max
  Clone ID: PAT_MRT3847_31217C.1
ccaccagtattcatccttttttaacaatcatcaccctcaccgttcttctcgtccacctcacgttcagaatccgaattatcggtcccaccgtcattaactttgtcctctttctcattcaattcaacagcagcaccctcaaaccctttatcagcgccactgaattcgactccattctcaacagcaacatcatcaccgccagaggcctccacaaagacctcgttactatcgctaacttccccatccttcaccgcctcacccgattcctctttctcaccgccttcctccaaaacgacgtcgtcgtccgcgtcctcaacaatggaaccgtcatcatcatcatcatcatcgtccccggacaccttcgcaatgggtctgtggggaggagaatcgaagacgggctcatgagggggctgagaagaagagttgacgagaacgggcctggtgggctcgggctcgaaatcggactcttcaccgcttaagaagccatcatcgttctcagagtcggaagcgggaggaagagaggtttggggaagagaagaagaatccattggaagagataaggttttaggattgggtgaggccggacgcgtgg

SEQ ID NO: 66672 - DNA, 641 bp, Glycine max
  unsure (1)..(641): unsure at all n locations
  Clone ID: PAT_MRT3847_31218C.1
caattaaatgacaattaacaaagaaaaaacttaagttgttatgtattgtcaattaatattagacggtaaacattaccaataagattcaatacacatgttagattattgggttttttaaatatgttgacaaaggtttaattttttgtatgaaaaaaacgttattgagaaagacaaaactaaacttgctttaattatctttaaattttgatggttaatcttatcattttggaccaaaaaaatatcttactttcattaaaaaaaatcagagagtcaacgttgatttctatctagtccttcctgcggttaccctacaattgggggtagagtagagtgcaacttgttgatttcctttctacatttctcacctctaccacatctacaagtcacaaaccaaacacacgtaatttaagtcatttccatgacttttgaaaggaccccagcaaatttgttgttcaatataacaaccacaatgcacagtcattcaccactcttctctctcttcattgacacgtttcaatctcaataaaaccacacatacccacttcacactagctagagagaagtgaattgaagtagtaacaactaccaccattgatggagtcagaggnataacagtgcagtgatcatcatgtgccaacaaa

SEQ ID NO: 66673 - DNA, 201 bp, Glycine max
  Clone ID: PAT_MRT3847_31219C.1
gtggttcaacggattctctgtctgcttcttcactctctctcgcttcaatcgacaccagaacgcatccatgcgcagaacatccttcgtcagtggccactggacatgcaatgggaccactccagcggtatcataagattgtaactactcttactgatgctacagtccctgcgacgacatgtcgtagcaagttgctgtgagccc

SEQ ID NO: 66674 - DNA, 392 bp, Glycine max
  Clone ID: PAT_MRT3847_3121C.1
aacccggaaaaaaaaggcaaattattttgatattagggagaaaacaatttgttttttatcgaaaacaaaaaatccctgctagaaaaaaaaagattctaaacggggttatcccatcaaacatgggaaggcccaaccgctaaacccaaaggaactttgaggcaccccaggaccgaaaatcactatgccttgtttgcaagggtgttggagagccaaccaaccccttaaaaaagcccttcaccaaagggggcacatgggctcgggaaataccagggaccctgccgaaaaaaaggaaaaccaagcttttcagttttttcagcagcattcatagcattggaaaaatcttgtttgtttgcaaaaactaaaagcccaggatttttaaactaatcctcttt

SEQ ID NO: 66675 - DNA, 779 bp, Glycine max
  Clone ID: PAT_MRT3847_31220C.1
aagtaatttagcgtacacaacacaagtttcgcgagcatggtggacacatggttgggtcccaccttctgtaatacccttcccctctccttcccaacttgtaccagaatcctctcatcatcgttttcttcttcctcgtcttcaatggctacctctccgtcgcagcagcaccaccatcaccatcgccgctgttattcaaaccctaaccctcctcaccctcaccctcagcccgctctgctcgtcttttccggtgggaccgccttcaacggcgtcgtcgaggagctcaagaatttcaccacccgcgtcgctcacgttctccccgtttccgacgatggaggaagcactgctgagattgttcgtgttctcggtggtcctgctgttggagacatacgttccaggtgcctgaggttgtctgatcagagtaccgttgaggctctcgcagttcggaatttgcttgggcatcgtctaccacttgatccactgcaagctaaatcagaatggtactctattgtggaaggtgatcactttttatggaaaggtgtgtcaaaaccctacagggagactattcgagcttttctggtttatttccagagtcagattctctgccgggccgaagaatcattttgtttcagcaacggcaggtcccttatttctaattcagtcacatgcttgcttattttttttttttgtggatgctgcttctttttcttattcacgggtttcttatatattatattcatcatgctataatgagaaaaggggcttcccattgcattagaagc

SEQ ID NO: 66676 - DNA, 591 bp, Glycine max
  Clone ID: PAT_MRT3847_31221C.1
tcgaggcttctcgagccgattcggctcgagacggctgcgagaagacgacagaagggacctccagcacccccagaacgtgtcgttgttagttcaatatcttttgggtcaattacgacttcaacttcatcagcccttgtaaaaggggctaggacatccctcttccaaaattttaactagttaaagttgtctcaaaggctctcaagtgaaaaatatcttgttaaatacatcctaatctaaaacacttaatgtcaagaatgttttcaatgcctcttactcgttacaatggttgagtgctgaattagaatgtagcttgattgagaaacgtcaattccatcagtttttgggctatcttgaggtgcagtgatagtggcattgaatgtgtgtgtgtgattagaattatttatagatatatggtttcttgcactattgagacgactagtcccagttagctggaggttgttgcagttgtgaatagaaatgatctgcataacataaataaatgagctaaatgttttcaactagttcattaaatattgcgagttcaaacaccttattatagaatacttagtacatcacctaatgtatgagcta

SEQ ID NO: 66677 - DNA, 353 bp, Glycine max
  Clone ID: PAT_MRT3847_31222C.1
ttgttcacgcgtccgatcttgtaaaggagttaaggacacctccgcctggagctactgatttgcatatccacactaagaatcctcaattcacattggggcaatgtagaacctgtttctggaagcagtggctgacatactggaggagcacaaattttgagattgccacatattttaacacattggcttgtgccctcatgataggtacaggcttttggagaattggcaaaaacggggagagctcagttgacctgacagtgtatataggagccatgtatgctgctgatattattgatggaatcaacagttgccatactgtgtcaccgaatgaaaacgttgaaagaactgagttctat

SEQ ID NO: 66678 - DNA, 523 bp, Glycine max
  Clone ID: PAT_MRT3847_31223C.1
tttcttttgtttatattattttttttgttttgcaaaacgaccacttagcccttattgaaacccactttctataaaacaacgtatatgctgtgagaatccatcttggtatactagaccaaatgggcctttgagcctggaaatatcacaaactggctaactactagaccaaggagtggacacatttataacccccccttggtgaaaaatcctatggagaggaacctttcataactgctcctcatacgagattattaagctttgatggcctaaacccaagttgaaaactcagcttgccttattttctcagcgctaaacatgacattaccggactacttggccttccaaccttatcaggcttgcaatattacagcgacgcgccatgcactcatgactcttgtgggcagacagtatttataagattccacattcactaaaaaagggggcactcccttggggggagcgctggggtacaaacaacctttgcgaaactcccttggagggagtagggaaattggtatgaaca

SEQ ID NO: 66679 - DNA, 188 bp, Glycine max
  Clone ID: PAT_MRT3847_31224C.1
attgttggaatctggcccgcaaaaagacagagggtcttatctgtgagaactatttctggaaaggaccgtctgtaggttgattatcacgcaatacttttccccaaaagaaagaatgggggggagggaagacttcacctctggggactggtccacacgtatacaggaaaaagtttcctctactaaagcac

SEQ ID NO: 66680 - DNA, 321 bp, Glycine max
  Clone ID: PAT_MRT3847_31225C.1
gtgttgtgaaagcatttttgtgttttacactaagctatcctcataggggcactgtaattatttgacaagataagcgtctaaccttagtaacattgtcacatattgtgttcattttggaattgtgcctctaaaattctattcaatttatctatggctgcctcttcttatgctatgcaattaattctggcaaaccctttgatccgtattttcagcggctctagggtgaaccaatttgtcgttcctgctttgcacatgattaaggattgtaggcctgtgagataattccatggctcatgaagaacaaccaagtgagcctgcatt

SEQ ID NO: 66681 - DNA, 1572 bp, Glycine max
  unsure (1)..(1572): unsure at all n locations
  Clone ID: PAT_MRT3847_31226C.1
ttttttttttttttttgataaaccggctaatgggcttaaccggcatggatattctccttaactatattaagccaagagagaatcaacttcttcgataaagggaaataaaattcaaaaatacaattgaatttgagggaagtaactaaattcttaaggacattaatgaaacatgggtaagggtttacagaaatagggaaccttcctccctccctttcactagaaagatatctcttcccatcctatcgaatcactacatttcatcctttacaaaccctccaaaacaaacaaatagaaatacaacctttggaagagatactataacattcctcagcagtgtaacctactgccttacaggtctccgatgaacacttcggttcaccaacattcatgccttgtgtaagagccagcctctcataacagacaaagctagacagaaactgaatgcaggatacggctcgcctgagatagcggtttacaaagtagcatgagtgcacagtctactacatttggggaaaataaggtattgcacagcatgaggaacaggtggcacaaattgtaacaccaaatgcccacagcacattgacaacatggttataaacattgccatattatttatcaattcttagattgttacatagatgagcaagctctggtcttgcatccatccatgctgcaaattccatattggcaggagagttgcagtagagataagatctgaatgtgataaggaaaaaatatcgcctcaaagccttgatacccatgtccataagatacccacgttcctcgtcatcatcatctgtgaacttctcaaattctctattataataaagaatatcttctcgtatatgccctgcgcctgcacatctttcaatgacaatgtcaacatctgctttgctctggggaccatgtatgaggacccttgtaaggttcaaaatgtcacgatagtcacccatactaagtgccatttcattagaagtttgagaaggcaagtcctcttcagtcacggcatctatatgaggaccgaataatggctgtgagactttggatccagcatcaagtctgatacagattatggccattgcatacgcgactccaccaaagcctgtgtgtgatacaaaaaggtaactacctgcagagtcatcttgacaatactgtattgcatcaatgtcagaggccaaagcatgtctctctcttgttaaaggtatcctctggtagacaatatcatatccatcatctttaagagcagaataaacttctgcaggtgtcttcacgtcatctgctcgaatattttcccagtatccaaccacacctgactcatttgttgaggggttatattcttcacggtgtaatagcattcgcccaccagactgcctaatctcagctagtatcttcttttagccgtgcttccatgtgttccaccacaggaccagtaattcctacatgcttgagtgtattaactggtttatttaactccctcaggacaaagggagtataattcatataaacaactgcatcttcccccagatcggtcaatatagctttttgagcngattgcggacgcgtagaacgacc

SEQ ID NO: 66682 - DNA, 707 bp, Glycine max
  Clone ID: PAT_MRT3847_31227C.1
attttacttcccttcatcgaagaagtaaattctctgctaaattcttaaggacattaatgaaacatgggtaagggtttacagaaatagggaaccttcctccctccctttcactagaaagatatctcttcccatcctatcgaagcactacatttcatcctttacaaaccctccaaaacaaacaaatagaaatacaacctttggaagagatactataacattcctcagcagtgtaacctactgccttacaggtctccgatgaacacttcggttcaccaacattcatgccttgtgtgagtgtcagcctctcatgacagacaaagctagacagaaactgagtgcaggatgctgctcgcctgagataatagcggtttacgaagtagcatgtgtgcatagtctactacacgtgaggctttgtagcaaagataaggtattgtgcagcatgaggaataggtggcgcaaattgtaactacaaatgcccactgaacactgacaacattattataaacattgccatattatttatcaattcttagattgttacatagatgaccaagttctggtcttgcatccatccatgctgcaaattccctattggcaggagaagtgcagtagaaatacgatctgaatgtgataaggaaaaaatatcgcctcaaagccttgatacccatgtccataagatacccacgttcctcggcatcatcatctgg

SEQ ID NO: 66683 - DNA, 1611 bp, Glycine max
  Clone ID: PAT_MRT3847_31228C.1
aaaaaaagaggcaacatattgaagatggatcgccacaagtatgtgaaagtaggctcgagtggatttagagagttatcaaaagaagataaagttgggacctatggaaatactttagtacgtgattcttttgatgagccagactatgctctaattgatacactcttttcacttgcggaagcctacttgtttgctcaactggttgattttaaggattgcaatcctgacaagattcaggagggtgttgattatgctcgcatgtacaaagatgttcgagctgcagttgacttgtgccaccgtgatggaacattgaagcaaatggttgctatagaaccaaagcggtatattaatgaagactcctcaatagtgcccatgcttgaaatgctcagagactctggacaagcaacgtttttagtgacaaatagtttatgggactatacaaacattgtcatgaatttcctctgtggatccagtatggcagatgtcagtaacaatttcggctggcttcaatactttgatgttgttatcactggcagtgcaaagccaggattttttcatgaggaaaatcgtgccaccctatttgaggttgtgcctgagactggaatgctactcaatacagataatggctctcctataccccaggtgggtaatacctcagcaaggctattcacagaagcaaagaatcatgcttgtccagttttccagggaggcaatgtttctcatctgcataaactgctttccattgaatcaagttcacaggttctctatgttggggatcacatttatggagatatactacgcagcaaaaaggttcttggatggagaacaatgcttgtaatcccagagctggagaaggaggttaaactactctgggaatctagggatacccgcaaggaacttcaattcttgaggagtgagcgtgactgcattgaggatgaaatacatcatttgaaatggtctctcaaattcaagaatccagatgctgattccaagcagaagttatcttctgaacttgataaattaaagcttgaaagagagagagtgcgattaagtcatcaagaagctcagaaaaaattacatcaaaggtttcacgagccatggggacagcttatgaaaactggttatcagaattctcgctttgctcatcaggttgagagatttgcttgcctttatactagtcaagtatctaacctgggcttatactctccagacaagtattacagacctagtgaagatttcatgcaacatgaatttggcattatggcttgtgagacgccagacatttaagttgaggaatttggggtagtttggatttggaaaccgaattgccgaattctgctctgcccagtgttcagtgttcctggttctcatctcccttctctgttttgttggctttggacagagctccgtttagtaattgatctctccccctcccccccaaagaaaagaaaaagaaaaaattgctatatagtattatttttaacgtttgctacagtgggtaaaaaatactagattttagcgttgtatagtttcgtcgggcacttcacaaaagtaattcgtgccactaagcagcaggaattacactaattgagtttcatcatttaatgttcgatt

SEQ ID NO: 66684 - DNA, 1257 bp, Glycine max
  Clone ID: PAT_MRT3847_31229C.1
cccgccacacacagaggtattctcacttctctcgctttcattttgcgatgcgtcgattaaaaattgaacaaccttcactgactcgttcagcgttgggttattgactttgatggttccaaattgtgttctgtttagagacaacaccgctaaccaaacgcctttctctcaacttcaacgtctttgctatttaaatttaaatcactgcacaacctattgcagtgtacctcattcttcgtttggttttggtttcaatttgcgtcgcacaagttgacgtttcctcggatacacaatgataggatcttttattacaagggcacttgtgatggtttttggctatgccttccctgcctatgaatgctataaagcagttgaaaagaataggccagaaattgaacaacttcgtttttggtgccagtactggattttggtagctgttttgtcagtatgtgagcggattgctgatgcttttatatcatgggtcccaatgtatagtgaagctaagttggcatttgtcatatacttgtggtacccgaaaacaaagggaacaacatatgtgtatgattccttctttagaccatatgttgcgaaacatgagacagaaattgaccgcaacttgttggaactaaggacaagggcaggagatactgcagttttgtattggcaaaaagctgctagttatggccagactagaatatttgaaattttgcagtatgttgctgcacagtcaacaccttcgccacgccctgctcagcaacaaccagctatgagggtgcgtcaagccgcaactagtaatagccaaccagcatctgcgacagaaccacaagctgagaatccatcttctcctacttctagttcatccagtcagcaacagaaggaagtagcagaggaggagttgggttcttcacaagtgcctaaagcaccttatactgtagcaggtttaagtagccagaagtctaatcctatacctgaaacggccaatcaatcggtacctgaagaggatgagccaatgcagattgaagcagcagcaccttcatcctcttctgcaaatgaaaatgagaaccctcccttggaagatacaataatggaagccagccttacggtaacgcgtggtagactaagaaaaaatcgatcagctcgaatccgttagatatcattgttttcaagttttagcctggaaaacatgggtagatggataatagtgggtgtggaatagtaccccctgtgtgtaaaaaaaaaaaaaaaacaaaaaaaaccaag

SEQ ID NO: 66685 - DNA, 286 bp, Glycine max
  Clone ID: PAT_MRT3847_3122C.1
ccggtcgacccacgctccgccaacctcaaaacttcacatggaaggtgatacgtatttaacaacctaaataatagggaaaatcgggggaatctaaggcttagagggccccctccctcgaagacattctttctcttccctatacaaatttgatgtcatcctgaggctttccaggaaaatcacttcttgccatttattaacaattcatggccaacaattcttttgcgccttctaaaaacgtcgtgaagcacctccttgcatctcaataatatacaacagggctccactg

SEQ ID NO: 66686 - DNA, 654 bp, Glycine max
  unsure (1)..(654): unsure at all n locations
  Clone ID: PAT_MRT3847_31230C.1
acaacgctaaaatctagtattttttacccactgtagcaaacgttaaaaataatactatatagcaattttttctttttcttttctttgggggggagggggagagatcaattactaaacggagctctgtccaaagccaacaaaacagagaagggagatgagaaccaggaacactgaacactgggcagagcagaattcggcaattcggtttccaaatccaaactaccccaaattcctcaacttaaatgtctggcgtctcacaagccataatgccaaattcatgttgcatgaaatcttcactaggtctgtaatacttgtctggagagtataagcccaggttagatacttgactagtataaaggcaagcaaatctctcaacctgatgagcaaagcgagaattctgataaccagttttcataagctgtccccatggctcgtgaaacgtgctaataggaagaaaggaaactggagataatctacaggtgaactttctaccctttgatgtaattntttctgagcttcttgatgacttaatcgcactctctctctttcaagctttaatttatcaagttcagaagataacttctgcttggaatcagcatctggattcttgaatttgagagaccatttcanatgatgtatttcatcctcaatgca

SEQ ID NO: 66687 - DNA, 201 bp, Glycine max
  Clone ID: PAT_MRT3847_31231C.1
gcatgataaataagagaactgatgtcacattcaagagagtggggggtgcatgcatattatacctagggagaaactccattttgcattcaatttgcaacacttgtaaaagtattacaagagaagtaaaattgttcccaccattaaaagaatttctacaaccaactaaggagtactaaattttaagaatatgtcagaaatttg

SEQ ID NO: 66688 - DNA, 1559 bp, Glycine max
  Clone ID: PAT_MRT3847_31232C.1
gtgaatatgaaagccctagagtgtagagtagataagcgtatccagcaaaacagaaatggaagcaacgaacatagaattacaaattaaacggctccaattcctttctctctgcctctgaacaaatttcatttttcatttctcttacttacactacacagagacagggatacgcaatgataggatcttttattaccagggcacttgtgatggtttttggttatgccttcccagcctatgaatgctataaagcagttgaaaagaataggccagaaattgaacaacttcgcttttggtgccagtactggattttggtagctgttttgtcagtatgtgagcggattgctgatgctttcatatcatgggtcccaatgtatagtgaagctaagttggcatttgtcatatacttgtggtacccaaaaacaaagggaacaacatatgtgtatgattccttctttagaccatatgttgcaaaacatgagacagaaattgatcgcaacttgttggaactaaggacaagagcaggagatattgcagttttgtattggcaaaaagctgctagttatggccagactagaatatttgaaattttgcagtacgttgctgcacaatcaacaccttcaccacgccctgctcagcaacaaccagctgtgagggtgcgtcaacccgcatctagtaatagccaaccagcagctgcaacagaaccacaagctgagaatccatcttctcctacttctagctcatccagtcagcaccagaaggaagtagcagagaagttgggttcttcacaggtgcctaaagcaccctacactgttgcaggtttaagtagccagaagtctaatcctatacctgcagaggatgagccaatgcagattgaagcagcaccaccttcatcctcttctgcaaatgaaaatgagaatcctcccttggaagatacaataatggaagaaagcattagagttacgcgaggtagactaagaaaaaatcgatcagctggaatccgttagacatcaatgttttcaagttttagcctggaaaacatgggtaggtggacaatagtgggtgtggaatagtaaaattgtgtatatttttgcctatgtttcattccatttattttttttttttcatatgaataattgttttttttacaacaccttatcaatccccttattaaatgaaaatgtatgaaatgcttattttatgcttctcattcgggttacacgtggtagactaagaaaaacccgatcagcaggaactcgttagcaaatgaatattgtcaatttttagcctgaaataggggtaggtggacaatgatgggcattgaattgttgtaaaactggatgtaaatctgttttcctaagtttccgttccatttgttgcttcattttatatatatatatatatatatatatatatatatatatatttacaaattttgtcttggcatggaagcatttgtagcctgatgccacttcatgtggacttagatttcaagggggtgtttgcatcggctgctttgtatagctggtcttcatgttagtgcaacagtattaacaagtttt

SEQ ID NO: 66689 - DNA, 610 bp, Glycine max
  unsure (1)..(610): unsure at all n locations
  Clone ID: PAT_MRT3847_31233C.1
ccggngtcgacccacgcgtccgggggttctgtggccaaaaggtgattgggtttgtggcaaaggccaccttgaattccgttgagggcattttggctaacaacaagtccaacaacaaccccattgctgttattgacaaccatgacagcttcacctgtaatctctgcccaggttggttctttcatttcatttctttcgcaattgtccgtcaatttcttcttcttcttcttcttcattgtcatggcttttttgtctgtaatttttgtttctatctgatgcctttgaaaacacttttctttttttgttgccaaaacttacgtaaaaaggggggaaacagcgatcaataaagctatctcctctcctttagggatgaccaaactcacatccccaaaacgacggcgtactgtgtaattttttttatgtttntgttntgtaagctaggcacttttttgtgttttactttccaacttccaagacacacggaccgtgggcttttaactttgggccctcagttatattggctcttttgcttagagatggcactaggttgggaaagaagaaaattcgtacttacaaatcggttcattaactattaactatttgggtatatacc

SEQ ID NO: 66690 - DNA, 715 bp, Glycine max
  Clone ID: PAT_MRT3847_31234C.1
tttttatttttttttttttttgtgattttttttttttttttttcgggtggggttttttttctttttttggtgcttctctttgggggaaaaaaaaaaggccctttttttcttctcctggaaacgcccaaggccaaaaccccccctggatttcagggggggaaaacccaactcccccctttatgcccccctttggaaacaaagccccattaaacgcggatttggccaagggccaaacaaaaccgggggcccaccccccccccatttttccccaaaagtgcgggcccccccacccagaaatctttttgggaccaggggggcttttatagaagcctttaccaaccccatattttttaaaaaactcaagcccccccccccttcttgaattttttttggaaccaaaagggtttccataataccccctgaaaaagggaaaaacggggtccttggggggcaaccccttttggccacaaggggggggcaaaaaattctgggcccccattgggggggtcaaaaaatcccccaccgggggaaacccccccccccccattttttgggcccctggggccccaatgggtttgggcccggggacatttttccccccccctcttttcctttcccaaaaaaaaaccgcggggcccttctcccctctcaaaaaaaaagcggggagccctccattggtttccccacaaacatttttttccaccgccctcttttt

SEQ ID NO: 66691 - DNA, 465 bp, Glycine max
  Clone ID: PAT_MRT3847_31235C.1
tgggtttttttttttttttacgacaaacagaaatgacatcctgggggaaaaaaagtttatattcacctaaacctgaccgatcatccttggtaggcacaagaagattacttaggataaaaaaaaaaaacaaaaggggccattaacaaaaaaaagaccccctcaacccagagagggccccaacaggctgaaaatggtcgctataaacacgagagcgaccttgtcatgaatcaaaccaaaaaactaacaaatgaggccaccccgaccaaaggtttatgcccccgaaacaaaagtgaacggagcaatccaaaaacaaagcccggagaatattgaagcaacaaaaacggtccaaacaaaaacaaaggaggggggacgccaaaaaccaccccagaggccctggaagaaaaagtatacctcggcaaggggccaaatatcccccaacaacaggccagatgttttaccacaaaa

SEQ ID NO: 66692 - DNA, 316 bp, Glycine max
  Clone ID: PAT_MRT3847_31236C.1
gggggatgcaagcagagaatgctatgagtgattgatccgtattcaggtgatcccatgatatgcgtgaccatcgattaacaacgacgtggctcataaagatgtcagtcggcttgccaggataagcaagtcaaatcgatacgtggaatgtcgccttgactgaatgcatctcatcattcatctacaggttggtgggtgctagtgcatgcaatgactatctacggattactgagtctgtctctacccatcctgtgtgttttggtactcagttcacagcacatgaatgcgctggcaatctagctgcatctgcaagaacaaa

SEQ ID NO: 66693 - DNA, 274 bp, Glycine max
  unsure (1)..(274): unsure at all n locations
  Clone ID: PAT_MRT3847_31237C.1
tctttttaaaagtaatgatagctatgggataaacagtgttactaagaagaacaatctgaatggttatgaaaagtccaaaaccctacataaaatggctgatgaaaagccctacacaacggttttcaagaagncnncgggagcgaacacggaacccccccccccaacggcggggggacgacccccggcctttttatcgaaaatgggcttgcgatccttgtgcaatttgagctttgtgacaaccaccttggaggggggaatcccaacgttgacgggg

SEQ ID NO: 66694 - DNA, 574 bp, Glycine max
  unsure (1)..(574): unsure at all n locations
  Clone ID: PAT_MRT3847_31238C.1
ggctcgagcgcggcgctcgtggcgatcctccgcgacggcaaggggcgggagaggaaggaggccgccaccgctctctacgcgctctgctcttttccggataaccggagaagagccgtcaattgcggcgccgtgccgattctcctccaaaacgtcgaaattggacttgaacgctgtgttgaagtaattggatttttggcaaaatgcanagaagggagagaacaaatggaatgttatgacggttgcgttcagattctggttaacgttttgaggaatggtagctcgagggggattcaatatgcactctttgcactcacttcgctttgctcttataaccaggaaatggttctggtggctctggaagaaggggttctagaagcttctcttgggtttgtggaagatgataatgagaaagtgaggaggaacgcgtgtaatttgattaaggttttgcgtttcaaccacaatcgggtgaggtgatactgatgatgatgaaaaatggaaatgtggagtgtgcctgtgaagtatcaagnttgatgggaagaaagatttgttggctctctctgttgggtgagttttt

SEQ ID NO: 66695 - DNA, 193 bp, Glycine max
  unsure (1)..(193): unsure at all n locations
  Clone ID: PAT_MRT3847_31239C.1
ggagtttgggtaccttcgcggtcaggagggaaatggtaggaaaagnctgacaaccggtcagggatggaaaaaagaagggagctataacaagagaggtgaagacgtgaagaaagagttctggtgcaatggaacagttggtcaggacccagaactagggaaggggattcagagtcaaggggatgagaggaagaat

SEQ ID NO: 66696 - DNA, 228 bp, Glycine max
  unsure (1)..(228): unsure at all n locations
  Clone ID: PAT_MRT3847_3123C.1
ctacngttttgcntctacngcctnnctccctctctctcaaaaatcgttctcttcgattttagggttttgttttgctgctgcctccgttccccccttctcataaacaacgcgttttctcttctgcttcgtatctattctttgcttttggttttggttgattcaggccttcacagcattcgttgcggatttaatcgattatcaacgactgtgactatgagctaaggggaa

SEQ ID NO: 66697 - DNA, 301 bp, Glycine max
  unsure (1)..(301): unsure at all n locations
  Clone ID: PAT_MRT3847_31240C.1
tctcgagccgaatcggctcgagtacggctgcgagaagacgacagaagaggatctatgtttcttcacttatttttcacaagtcactttattttatgttttaaaaaaaattattcaagaaacataaaacatatttttaattatattttgttttacctttttatacaatcttttagaaatacaaatacaaaatatctttccgcacctanatgactcgttatntttgtattttcttcatggagtggtgacaaagctcatagtaaacacggatcaaacacgtgctattanagttttttatactgct

SEQ ID NO: 66698 - DNA, 519 bp, Glycine max
  Clone ID: PAT_MRT3847_31241C.1
tttgatttaactaatatgcttgaaattttttaactactaatgtttgatttggggtcaaatgcaggaggagactgcaaaactttaatgtttgtgcaagtaagtccaagttcggcagacttgggagagacactttgctcgttgaattttgccacccgtgtccgtgggatcgagagtggcccagctcgcaagcaagtagaccacactgagctgtttaagtacatgcaaatggtataagtttgtgtaactggttcctctattaagaataaccatgatttttcatttcctgatactaagaatctttttgtcataattaaaggctgataagctgaaacatgatgagaaggaaacacagaaattacaggatagcttgcatatcatgctactcaagcttgctgctagagaacatcattgtagaacccttcaggaaaagggttaaatataatcttcacaatccaaggtactttatagacaaagatggttttttttttttaaatgatcacaattttttttttcatgaca

SEQ ID NO: 66699 - DNA, 1612 bp, Glycine max
  Clone ID: PAT_MRT3847_31242C.1
cccgggtcagccacgcgtccggtttgaacattccctttcatgctggaggagatacatggctttgccgtctcaaaatcattctcatttgttcaattctgctctacagttgagtggatcgaaacatgagtcactttttagtggaaaggtgggtcaatttactgccggctcccatctaaattatcaaatgcagaatccctgggtcaaccaatcagggttgtattctggagatcatccaaacctcctcagtaatatgttgcagcaacaattacaccatcgtagtggatcattatcacctcatttgttgacccaattgcagcaacagcagcatagattgcatcatcccattctgcaatcaggaagctacatgtcaggtttccaatcccatttaattaaccctcaactttcttctggatcatccatggttagcaaatatgaacatatgcttggtcttgctgatgttagagaacccagaccaaaatcaactcataagggtaaacagagtcatcgtgtctttcaacagggttccgatgcaagtagccagaagaatgaaagtggttcattacactttaggtccaagtatatgactagtgatgaaattgagagtattcttaaaatgcagctagctgtgactcattgtaatgatccctatgttgatgactattatcacctagcttgtctttctaaaaaaactggtgctaagttgaaaaaatcattttgcccaacccaaataaaggaacttccttctcgagcccgctccaatacagactctcatggttttcttcaggtggatgctttagggagggtttcattcctggctattcgccggcctcatgctctgcttgaagttgatccgtcaaacagtggtatctctgagcgaaatatttctgagaaggcccttgagcaggagcctctgtttgcagccagagtgacaattgaggatggtctatgtcttgttcttgatgtagaggatattgatcgttttctacagtgtaatcaactgcaagatggtggaactcaattaagacgaagacggaaggtccttttggaaggactagcaacatcactccaacttgttgacccactgggaaagaatggacacaaagttgggtttggtgctaaggatgatgttgttttcttacgattagtatctatagccaaagggcgtaaactcctagcaaagtatcttcagttacttgttcctggtagtgagcttatgcggatagtctgcatggccattttccgtcattagagactcttattaggtggtctgccctctgatccagcagctgcagagactacaagtgaccttgctaaggttgtttgtcagtgtgtcctaagaatggatcttggtgccctaggagcttgtatagcatcagtggaatagttcgtatgagcagcctcctttacttctcttgaagcaccgctagggacggtgcctgcgggattttaatatctgtccttgagagggccactggacttcttaccgatccctatggtgcttgggagctaattgtacgtaatctgttttgtttcggcaagccttaatttgaagaatttattgggcactctacaatagtattgcttgaattaataatagcgtattatgcaatca

SEQ ID NO: 66700 - DNA, 316 bp, Glycine max
  Clone ID: PAT_MRT3847_31243C.1
tctacccactcttcctaaaaaaaaaaataatctaaaaaacatattttatcaaaaaaaaaatataggatatttaaagatacattaaaaaaaaatctaacatccatacatatttccattcctttattcttactaccattcaattcttctaccatataatactatctctcatttacatacaacattttctaaatccatttaaaatcatctttctctaaaaacacatcaatttccttcctatatatccaatcttcaaaaacccatttcaccatcaaactacttacactaattttatttcaatttatatcacacttataaa

SEQ ID NO: 66701 - DNA, 535 bp, Glycine max
  unsure (1)..(535): unsure at all n locations
  Clone ID: PAT_MRT3847_31244C.1
ccgtacaccggggacagaacggccaacccggacagtcggcaccgcccgcgtctcctggccgccccgggccccagggacctcctggacccgatggacagcctggcaaccccggagagtctggccaacccggccagcccggcaaactcacccaggccccgccctccctcggaccgcctggcccagcaggaccccctggccagcccggacagcccggcgagaacggacagcccggccagcctggaaaccccggcccgcaaggataccctggcgacggcggaagccccggccaacccggcaaccccggaggcagcggcgagcccggacagcccggagcacagggatcaagcggccaatgctaccattgcccaccgccccgcaccgnccccggctactgagtgtgatcagtcgaccaccgagaattggagaagaacccccactgatgatccacgaggctgctgtcctttcgtctctcaccattttcccgatcattttggcattttcaaacgctgatcggacaattctcaatgttattttt

SEQ ID NO: 66702 - DNA, 405 bp, Glycine max
  Clone ID: PAT_MRT3847_31245C.1
cccccaaaaaggggagaaaaaagtaaatttttttaaaaaaataaacggctttagtggaacaaatgaaattttggttttccaaaacagttttcccccccctcatatcttttgaaaggacaaaaaagggaaagattgctggcttcaaaagggatttaaaacgcccaactcttttagggggggggtcctgaacaaaaacccccctggggggcagcttacccaatatgaaaagccccccccctgatggaacaatctctcccaacaaatagtactttaggttaaaaaggggatggcccaaaacatcaaaatctgaattctcatcaaatgcaaaaggggcaagcaaagccctttttatcaggaaacaagggcaacaaatacttgaaacagacccaccctggaaaagttttt

SEQ ID NO: 66703 - DNA, 556 bp, Glycine max
  Clone ID: PAT_MRT3847_31246C.1
aaagggacccaaaaaaaaatccccaaaaaagggcaaaaaaaacctctaacctaaaccccatccccaaaaaagggatcccccccagtttgtccccccccacccaaaaaaaaaaaacccccccaaacgagtttcttaacaaaaccaaacccttcccaaaaaaaacggaaaaaagggggccccaacttctaaacaaaacccaatttcccgcgggggcgggggaggggggaaatccccacccccaaaaaaacccccaaacaaatgggggccccgcccagcgggggcaaaaccaaaattttaaaacccccccggaccaaacccggagtacccccccccccccccattccacgggtttgcatcggggagaccccgtttgtttaaaggaccccccccccaaaaaacccaaacattttgccccccaaaaagggggccataaaaaaccccaagggccttttccccacagttccggccccaaaattggacaaaaccacatcggtggcccgggggaatcttcacaaaaaccaaccccccaaaaggcccaaaaacttgtccaaaaggg

SEQ ID NO: 66704 - DNA, 1990 bp, Glycine max
  Clone ID: PAT_MRT3847_31247C.1
ttgaggaaaagattataattgaaagtttcatatcatatcttatcctctgtattctcatttttccaccacacataaaggtaatcttcaagcagttaaaagttatttcattacattatagcaagaagtcggcatggacacatatagttgattaaactacaggtcaatttgcttttcaattgttgcaaagatgaattatcacaataaactttggaaaatttcacaataataataactaaaattgtatgacaaacaagtcatggaaacacaaccccataacaaggtgcagaaaatgaaatcattcatgcagcacgcgattttaatttcttcaggcgtttgacaggagcaacacccttaattgacttcctggccctcttcagttttggctttttggtaggaagaggcatctccctgataggacctggaggcaaaccctttttgagtgcacttcctctgggtgttgcagagggaggcaacctcaaactctgaggaggtaaaggattttgtggcttccacaccaagttatttttcatcgaaaatcttaccttctttttacttttctccccaccctttgcgactgcactctcctcgccatccaattcagcagaatcctgagacaccttccctttcaaactctttgtcctcttcctcttcttagacagagttcttccggaagcagacacagcctgaggcgaatcacacgcgctcgcaactccatcatccaagcccgcctcctcagcaaccttctcaaattgcctttgcaggttagcaatcatagtttcatttaacagcactgcgctttcatcgttcaaattcccaccattctcactagccacattttccttgtcactcgaatcctgagccgccgccgcatcacccttcttatttttcttcttcttcttcttgcttttgccaccttcaacaggaacattcttatccttctcgcacttcttcaacacctcgccattaccagcaggccccagcggaaccaattccggcacttcctcctcatcatgatcaacaacaacatcaggaatcacaacctcaaaccccgaattcgcagcctccctctccagcttcaaaaactcagaatgcagcgcaaagagcaccttcctattcccctgaatgcactgcgcagaagaacccacttcataaagcctcccagaaaaccccatcaccagtgcaactgttccaattagaagaacctcatcacgagaatcaacctcaaccccgtccccactcttcttaacctccaacaaactcttccccgtcttaagcaacaaatcaaacacaccagacctaatcttccccaccaagaccttatcctgcaccttccccatagccgaaacaaacggcttcagcagcacctcgagaacctcctgcttgagcgggagaaaaggtcgaagctcctcaagaaacacagtggcaatgtggtaattaacaccgttcccgtgagacttgttctccaaagaggagagagtgttctcgtccaaaacattgatcaagcgatgcacgagttggagatcccaggaattggttttcatgagggagaagaacttggagacaaacctgcggatgaggaggtagaacttgtcgagtcgcagcgcatcgatgccggaccactcgcggcgcatggtgaggaggaaggtggagaagtactgtagggagacggagaggtggagggacagaaggagagaggagaggcgatcgacgagatcggattggacgaggggcttgtcggagtgccacatgcagtagaagagacccttccagagcttcttggcgtcgtcgtcggagaggggttgggactgcgacgggagccatgatttgaggaggaggcggagggatttgtctctggtggttctcttgcagcatgccagctgcttcacgagggagcgacccacatgggaagcgtgctcctccatagatgaggaagaaacagaaaccctaatagctgctttgaggattctgatgtctggaaattgcactcttt

SEQ ID NO: 66705 - DNA, 331 bp, Glycine max
  Clone ID: PAT_MRT3847_31248C.1
cacttgaaggaggtatttaaagaaaaatagttgttttttaatatctacacaaagatttatgtacattattacattaacaaaacagattcaatacaaaagcacaacaaaatctttagagtttaaaaagcactaacaaggctacaaaattacatagaaacccgataaaccaactggggccactgccccttttgaacccaatcccttagttgagcaaccaggatgacaagcaggactaatcatccaaagcttacggatcaatgaccgggggaaggttcaagcaacggaacatgccaagagcgggccagctccaaccaccctcaaccctaaaacc

SEQ ID NO: 66706 - DNA, 641 bp, Glycine max
  unsure (1)..(641): unsure at all n locations
  Clone ID: PAT_MRT3847_31249C.1
tgtagcgannngcttgcnnnnnnnnnnngatagagacactcggnnagagtttatgctttgtaggatagcaaagtgggtcccannnnnnagnnncttgtttattgcttcaaatgaaaggactccagggtttttttcaccactttctgccaggtatagattggcatattcatcgaactatagccatatcttggatccgttaattgagaacaattatcaattattcatgatcgagaggcttataatgatgggtggtaaaacgttcattaggacattcaaggaggatgagacagatcttagcctcactgatgaccccaaaaagaacactaagctttggcagatacctgtttacaatgtggatgaaacttgttgacgaactagacctaacatgctacaatttctacgcaacacacatgaaattaaagaaactagcatccccgaaatctttaggaagaaattcttgcaatcgaagatgagaggtgattgattagtttgtgttgtaaattattatgtgagctacagtcaagagttcattaattcattaaacgtatgtacttgtctcatagaaaagttgaaatgaactataaatttttagggttaattaacattttaatccctgcaaaatacatattttttactcctaa

SEQ ID NO: 66707 - DNA, 1267 bp, Glycine max
  Clone ID: PAT_MRT3847_3124C.1
cctccttctagaatataaattcacgagagaaacacgaaaatctttcgattccggacagaaaaaaacttgggacggtgaaattggagggttttccgggatcccaaggccgaatcttgattcaatttacgaaaagagaacaccatccgttgctgaatcttgaagccgaatcaaatcgtagagagagagagagacacccagataggcgaatagcgtttagagagagaaaggtgaagtggggttgtctaaagtttgggtcttgtgtttgttgtgtgtggtgggtgaaagggaaagatgacggatgtggtactgcatatatacgatgtgacgaatagtggatccgagaaaaccaacagcaccattgttcagatcaacaagatcttcaaggatgggattggtcttggtggcatcttccacagcgctgtgcaggtttttggagatgatgaatggtcatttgggttctgtgagcaaggtaccggggtttttagttgcccttctggaaagaatccaatgtatacatatcgtgaatccattgttctagggaaaacaaacttttctattttcaagttaaatcaaatactgagagaactcagtagagagtggcctgggagttcatatgatctgctgtccaaaaactgcaatcacttctgtgatgaattctgtgaaagacttggtgtaccaaaacttccaggttgggttaataggtttgccaatgctggtgatactgctatggaagtggctggaaatacagcattacggttccggcaagctaaaactgagattgtatcagcaagcaaagtagcataccggttcctcttaggagttaccaataatgttactaataatgttaaaaatggtcctgagacccctaacaattcaaacagaggagggtcccctaggcttcaaggttcttggttgaaaaatattattactaatggtgcaaaaccgtctactagttcagaagccgagaatcagaacggagttatgcccctaccgccaacacgagaagatgatcaagcattgctacatagctcatcttagttatgcaatgtattgtaattttaagtcagaaaaagtataacggaattttacatgctattcatgtgtatcaaatgtaaaatttttcgtttgttcaactcaaatcttattggtgcctcgtaagactatgttctttgaaaggtacttttactgtttttctctttttcctatctgacttggcaaactatattcacgcagtcacaattccaaattttgatgagtttgaatttat

SEQ ID NO: 66708 - DNA, 319 bp, Glycine max
  Clone ID: PAT_MRT3847_31250C.1
ccacgcgtccgggcagctgtatctttgatttctctattggataaagcagagagtgttgttcctcgggaatttcggccaaagacacccgttagagttggggcaactgcaggtttgagggctttggaaggagatgcttctggcaggatattgcaagcggtccgggatttgcttaagcaaagaagcactctaaaatctgagcctgatgcggtaacagtgttggatggaacacaagaaggtgcttttcaatgggtgactattaattatctactgggaaaattgggaaaagatttttcagagactgttggggtagttgatcttg

SEQ ID NO: 66709 - DNA, 217 bp, Glycine max
  Clone ID: PAT_MRT3847_31251C.1
ctcaaggcaaccagttaggatctactttggtgaatgacttacaagagcaggaagaaaagcttaaacaatatatggagcaacttgaaaatgcggaggctgcaagggattcattgctttctcagcttaagcatgcacttcaggaacaagaatcaaggcaagagctcgttcacacccagttgctagttgcacgaagccagatcaagaaagtggttggtat

SEQ ID NO: 66710 - DNA, 367 bp, Glycine max
  Clone ID: PAT_MRT3847_31252C.1
ctcctccttcaatcataacattatataaaatatatggtacactgattacatttataatattatattattatatataatttcacaatctctagctattcattctcatacaggaatgtactgcataaaattctgattcaataatctgtccctctttgtggtgaattcctatctgaaggattgatttggggataggacctcatggatcgtctaaaatcttctccacagctcatgattgtgacggatcttgatcacacaatggctgatcatcatgattctgagattgggcccctatttacgatcaatgcccactgagaagctcattatcgccaagatactgtgctgggtgtctaaactggaaggtcaccta

SEQ ID NO: 66711 - DNA, 399 bp, Glycine max
  Clone ID: PAT_MRT3847_31253C.1
gagtgagccaccgagatccgtcaccgattcatcggggataactagaccttatagtatgaactctgttctacaaatgcacataccgcacatctacatgatatactggaatacatgagaatcaactacaacgatcaagttatagatgcatacgtctaagacgatgtaaaatcaaatcttctttcactcccacataaccatcttagtgctttagcacaagctaacatacacagccacattcagaacattaagtctaatctcacgttagatggtacattcatattgactgttcctactactttgcatgccattctaattgtctggtccactagaactggcaaatatgactttagtgtcactactgctaactttattgacgatactctaaaatgtactatatcc

SEQ ID NO: 66712 - DNA, 517 bp, Glycine max
  Clone ID: PAT_MRT3847_31254C.1
tcgcagaaaatgaacgaaagctcagaaaacacacacacaaacacaaagtgaagaaaacgaaacggaaacgagaaaaatggaaacttgccattaccaaagtgtgcggatcgtgatgtttgattcataaagcgacacacgccctttgcttttatgctccggcaatgcatcatcatctgccatagatccttagcttcgccgaataatttctacagacccatgttgattctctctttttgattgttccaaggatccgtttttttgtgacttagctggtgcattagctttttaggttccttgcaaatcgaaagaatcaaccttgccttgcacgtaagtacgaattcgacgcgttcagttcagggttcattctcgcaccactaccaccggtctctctcctgcatctgctgcctactgctactgccaatagactatctccaggaggagccccatcattagctaccgggattgcatggtgagcattgattccctttttagatgaactggtctgggtctgaatctg

SEQ ID NO: 66713 - DNA, 188 bp, Glycine max
  Clone ID: PAT_MRT3847_31255C.1
gaagagagagaagctaataggcccagacgtaacaaatgctcgagcaatggctagcggattctaggatcaaggtttatgagctgatgcagaatactaaggctgatctgttgaatcacgtgaaggacacgcatgcctagcttgacttgcttggtgtcgataacgtatgcgctggagcctataaatagctt

SEQ ID NO: 66714 - DNA, 301 bp, Glycine max
  Clone ID: PAT_MRT3847_31256C.1
ggtgtttgtggggccatgttttgtggccgagtgtgcatacaagatatggtggtacgcatccggagcctcacagatccccttcttaggaaacgtgtacgtgagcgatgcggtggcgtgcatactggaactgtggtcctggctgtaccgaaccacggtgatcttcctagtgtgcgtgctgttccgatggatctgccacctgcagatcctgccgctgcgcggacttgcgagatgcttacacgtgggactccgtgtggagatggtgatgacggagcacattaggattaggaggcacatgcgaata

SEQ ID NO: 66715 - DNA, 949 bp, Glycine max
  unsure (1)..(949): unsure at all n locations
  Clone ID: PAT_MRT3847_31257C.1
attctcatccccactatcaaccactatataaaatatancacatacctttgaagatgacaaagtaagttattcccacgttattcatccacttagagagacattgtggttacccatagtctcatatagtgtcatacagcaaaaaaattcagcaacacaaaacaatgggttctcttatggcaggatggtattctacccacatggatcctcaatcagccacacttaaaaggaaccgctcactcactaaggatgaaattgatgcttactggaaatcaaagaagaagatagaggaagaacaccttagagctatttccaatgtgtcagagactattcaggctagcaaaaacacagagcctgaaaagaagttgcagaagtcaatgaccatgccagttacccgtgcacgggactacttaaatatggtggacattgacacaagtttggagcaacttattaagcgaaatggctggtggaccaagagtagctgggcgtttctgaatgagcctccagtgactgaagctgcgtccaataagtatgcatcgcagtttcacgtagcaagcatgagatcatcaaaatttaacccccgagatggaattagtgcttgatacatatgaatctaactaattactatataaaactactcaaccatatatatatatatattttttcactagtactagcgttcgtatctacatgaatactataatataatatgcgaagtattgaaccaattaatggtgagcttcgttggtctctcgtccgtgttgtaatgatggatcgggtactagctagttctgcagttccactgtgttgtaatgtctggttttgtttgaagtgcttataagcatgattaatttgctgtgttctgcagtagatgaatgaatctgatgtgcttattaaaaaannaaaaaaaaaaaaannnnnaaagcggccgctctagaggatcccagcttac

SEQ ID NO: 66716 - DNA, 1006 bp, Glycine max
  Clone ID: PAT_MRT3847_31258C.1
cttaatttctgggtttgacccacgcgttcttacttttgcgagagacgacaaaaggggggggctgttttcgttatttgattgtgcatagtctcatatagtatgcatttagaaagacattgtggttacccatagtctcatagtgtcatacagcaacacaaaacaatgggttctcttatggcaggatggtattctacccacatggatcctcaatcagccacacttaaaaggaaccgctcactcactaaggatgaaattgatgcttactggaaatcaaagaagaagatagaggaagaacaccttagagctatttccaatgtgtcagagactattcaggctagcaaaaacacagagcctgaaaagaagttgcagaagtcaatgaccatgccagttacccgtgcacgggactacttaaatatggtggacattgacacaagtttggagcaacttattaagcgaaatggctggtggaccaagagtagctgggcgtttctgaatgagcctccagtgactgaagctgcgtccaataagtatgcatcgcagtttcacgtagcaagcatgagatcatcaaaatttaacccccgagatggaattagtgcttgatacatatgaatctaactaattactatataaaactactcaaccatatatatatatatatatgtgtgtgtgtgtgtgttttcactagtactagtgttcgtatctacacgaatactattatataatatgcgaagtgttgttgaaccaattaatagtgagcttcgttggtctctagtcatgtgaggaatcaattaatgtatgatggatcttggtactagttagttctctttttgctggccggtcctagttctccaacttcactgtgttgtgatgtctggtttgtttgaagagggtaatgtgatataatccaaagttccaaacagttaatgaatgaatttgatgtgctaattattttgcaaatttcactagtactagcgttcgtatctacatgaatactataatataatat

SEQ ID NO: 66717 - DNA, 1536 bp, Glycine max
  Clone ID: PAT_MRT3847_31259C.1
gcaggagccattactctccgccaccgccatgacggttgcaagcgccgcctcttcacgcaccaagaggctcgtcaagctaacgctctcgctcctccgcctcggcttcaactcctccaaatgcaaaacggcagcgaagatggccgtggcgaggatcaagctgctgcggaacaagagagaggtggtcgtgaggcagatgcgacgcgacattgcccttcttctccagtctggtcaagacgccaccgctcgcatcagggttgaacatgtcatgagagagcaaaatgttttggctgcaaatgagttcattgaactcttctgtgaattagtggtggccaggctcccaatcatttcaaagcaaagggaatgtccagcagatttgaaagaaggaattgctagcttaatatttgcagcccctaggtgctctgaaataccagaacttgtggcacttaagaatatctttgacaagaaatatgggaaagattttgtatctgcagctgttgatctcagacctagctgcggtgtaaatcgccagttgattgaaaagctctcagtacgaacaccaccgggtgaagtaaaattgaaagtgttgaaggaaatagctaaggaacatcaaattgattgggatactacagaaagtgagacagaacttctcaagcctccagaagagctaatagtagggccacgtgcttttgtcagcgccagcagcctaccagtgaaacattcttcaaatgtgtcagtggaatcaaatcagccagctactagattatcaggtggtggaagaactgaggccgtgtattacgaggattccaagtctgctgctgaagcagcagctgaagcagctaagaaagcaattgctgctgctgaagttgctgcttatatggctatgaaggagtctattgaagctcctcaaccatatgcttacaatgataagttgtataactcaggagtcaactctgggaccttccaatcaaacaatcctgcaaaatgtggcctgaacatgactccaaaatctacaactgaagagaaaatgtacaggtcacagagcgtaccaagatctgatcatctgaacagtgaggatacattgcctgaccaatatggtggaaatgattataggaggcacagctaccatccaacttctgcgcattcagatattaagtttgatgaatcaagttgtgatgaagaaattgaagcagaagagcctcctccggttactatgccccctaatcggcttccaccaccggtaccctcatctatggctaaacaggaaagccacattcgtgttcatcccaaattgccagattatgatgaacttgctgcccgctttgatgcactaaaattcaagaagtcacaatcctgaacccactttagcaaccaaccgtttatgaatctattaaattaatttatacacaataaatacatataagaatagtatattttgttatatagagatactaagaatgtattggatgctaaactttgctatgtatggttctgcctcagcatgttatagttgtttctggtatagtattaactttcctc

SEQ ID NO: 66718 - DNA, 270 bp, Glycine max
  Clone ID: PAT_MRT3847_3125C.1
cgttggagaaactaaatccgattaattataacgacgcgacgcaacgccggcgatgggagcgtcctcttcgtcggagccgagtttcggcggaacagaaggagtcggaggccgtcgcagcctccaccggagctcttccactgcttcagacagccttctctaagctcgccaatcccgagaccaacgccgtttccttagaaaatatccagcaatgcttcagtttcggtcgcgaaggtcgtactttttccggaagcaacgtgccggattcgtttc

SEQ ID NO: 66719 - DNA, 742 bp, Glycine max
  Clone ID: PAT_MRT3847_31260C.1
gggcgtgggtacggctgcgagagaccacaaaagggggtagctgagttggttatttatccatttagaaagacattgtggttacccatagtctcatagtgtcatactgcaacacaaaacaatgggttcccttatggcaggatgggactctacccacatagatcctcaatcagccacacttaaaaggaaccgctcactcaccaaggatgaaattgatgcttactggaaatcaaagaagaagatagaggaagaacaccttagagctatttccaacttgtcagagactattcaggctagcaaaagcacagaacctgagaagaagttgcagaagtcaatgaccatgcctgtgacccgtgcacgggactacttaaatatgggcatagacacaagtttggagcatcttattaagaaaaatggctggtggaccaagagtagctgggcatttctgaatgagcctccagtgactgaagctgtgtccaataagtacaaatcgcagtttcacgttacaagcatgggatcatcgatcaaaatttaacccccgagatggaattagtgcttgatatatatatgaatctaactaattactatataaaactactcaaccatatatgtacatatattttttcactagtactagcgttcgtatctacatgaatactataatataatatgcgaagtattgaaccaattaatggtgagcttcgttggtctctcgtccgtgttgtaatgatggatcgggtactag

SEQ ID NO: 66720 - DNA, 752 bp, Glycine max
  Clone ID: PAT_MRT3847_31261C.1
ccacgcgtccgaaataatttcctttttagaagaccgtgactcttatcttggcttctctttctccccttaaaccccgcccggttactctcccgcgtcatcaccatgacggtcgccagcaccaagagactcttcaagatcacgctctctctcctccgcctcggcttcaactcctccaaatgcaaaacggcagccaagatggccgtggccaggatcaagctgctgaggaacaagcgagaggtggtcgtgaggcagatgcgtcgcgacattgctcttcttctccagtctggtcaagacgccaccgctcgcatcagggttgagcatgtcatgagagagcaaaatgttttggctgcaaatgagttcattgaactcttctgtgaattagtggtggccaggctcgcaatcatttcaaagcaaaaggaatgtccagcagatttgaaagaaggaattgctagcttgatatttgcagcccctaggtgctctgaaatcccagaacttgtggcacttaagaatatctttgagaagaaatatgggaaagattttgtatctgcagctggtgatctaagacctagctgcggggtaaatcgccagttgatcgaaaagctctcagtacgaacaccacctggtggagtaaaattgaaagtgttgaaggaaatagctaaggaacatcatatggattgggatactacagattgcgaggaaagaacttctcaagcctccagaaggacctaatagtaagggccacagtgcttttg

SEQ ID NO: 66721 - DNA, 3520 bp, Glycine max
  Clone ID: PAT_MRT3847_31262C.1
atcataacccagtccaatcctcgcacacatgcgtgctggctctgccaaaggtggggccaagtcataactacatttgcattgttacgattctgtctgtccatcccaaccacttattaagcgtctgatccaatttgtttctgtcaccatggatcatcgcaaactgggaactgggtcctaacgtacagtcgtatatagtcatatacaccaaaatattcaggcccgaactcacactttcaaccccatccaatcctcccaaacatgcatgctgtctctgccaaagttcgaagtcacattcttacaacatttccattaccaatgcttctttctttccatcacaaaccacttattaaaccgatcctcacattttctctccaaaaaccatggattcatcgcaaaccattgctacccacttcctctgacgatgctccaaatccacacactaaggaagacccttgttctagttaatttgccggattgtttttgctctcttcccttgttgcctttggagggtacagggcctccaacgcgccacatgccgacgtgtcatcgccaacatcgaacgatgagcaaacgtagtccgacatcggtgccttctccgaaatggatacccggtttcacgaggtgtttcttccggggtgtcagagaagtcatcaagcatgattgtttgcggttaaagatggagcttcggaatcatttccatgggacaatagcatgttgtcgtggcaaagaactgcttttcatttccagccagataaaaactggatgaacgatcctaacggtcctatgtactacaagggatggtatcacctttctttctaccaatacaacccgaacggtgcagtttggggtgacatagtttggggacacgcagtgtcgaagggacatgatccactggcttcacccttccactaggcaatggtggctgatcaatggtatgacatgcaaggtgtgtggacaggctcagccacgatcttaccaaacggtgaaatcatcatgttatacacgggttccaccaacgagtcagtgcaggttcaaaaccttgcataccctgcagacccctctgaccctctccttgtggattggatcaaataccctggaaaccccgttttggtgccaccaccaggcattggtactaaggactttcgcgacccgacaaccgcgtggctcacctccgaagggaagtggcgaatcaccataggatccaagctcaacaaaacaggcattgcattggtttatgacactgaggacttcaagagctatgagctcaaggagggtttgcttcgcgctgtcgatggcaccggcatgtgggagtgtgtggacttcttccctgtgtccaaggagaatgagaatggattggatacttctattaatggggctgaggtgaagcatgtgatgaaggtgagcctggatgatgatagacatgattactattcaattgggacttatgatgagaagaatgttctgttcacaccagatgatgctaagaatgatgttggcgttggattgaggtatgactatgggatattctatgcatccaagacgttttatgatcagaataaggagaggagagttttgtggggttggattggggagtctgacagtgaatatgctgatgtggccaaaggttgggcttcagttcagagtattcctagaactgtggagcttgataggaagactggcagcaacttgcttcagtggcctgttgctgaggtggagagtttgagattgagaagtgatgaattcaaaaatttgaaggctaaaccagggtcagtcgtgtcaatagatattgaaacagccacacagttggacattgttgccgagtttgagatagacaaggaaacccttgagaaaacacctgaatccaacgaggagtacacgtgtggcaacagtggtggatctaaacaacgtggtgccttaggaccttttggtcttttggttttggcagatgaggggctttttgagtatactcctcagtatttttatgtcattaaagggagcaatggaaatcttaagacttccttttgcgctgatcaatcaaggtcttctcaggcaaatgatgttcgcaagcaaatcgttggcagcgctgttccagtacttaaagatgaaaagttttccttgcggatactggtggaccattctattgttgaaagctttgctcaaggtggaaggacggttgtgacatctcgggtttatccaacaaaggcaatctatggagctgctaggttgttcttgttcaacaatgctactgaggccactgtgacagcctcactcaaagtttggcaaatgaattctgcatttatacgcccattccaccctgatcagaagagttaaaaaattgaattggagataaaagagttatagtcacaaaggatcggaaaacatcttgggttggcaatttgtacttatcaattgttgtccttccctgaaacccacataaggttatggttcttgctcaaagcgcattccttcatttttgcccatttatgtttatcagaatttttgttgtaattttatcatatcatgtgaaatgatgcttacaagagaatctgttcaaagaaatatgatgttaatgttatccaattctatgctaaaaatatttacatatggaaaagatacagcaaaaaatttcagcaacacaaaacaatgggttctcttatggcaggatggtattctacccacatggatcctcaatcagccacacttaaaaggaaccgctcactcactaaggatgaaattgatgcttactggaaatcaaagaagaagatagaggaagaacaccttagagctatttccaatgtgtcagagactattcaggctagtaaaaacacagagcctgaaaagaagttgcagaagtcaatgaccatgccagttacccgtgcacgggactacttaaatatggtggacattgacacaagtttggagcaacttattaagcgaaatggctggtggaccaagagtagctgggcgtttctgaatgagcctccagtgactgaagctgcgtccaataagtatgcatcgcagtttcacgtagcaagcatgggatcatcaaaatttaacccccgagatggaattagtgcttgatacatatgaatctaactaattactatataaaactactcaaccatatatatatatatatatatatatatatatatatatatatatatatatatatatatgttttcactagtactagtgttcgtatctacatgaatactattatataatatgcgaagtgttgaaccaattaatagtgagcttcgttggtctctagtcatgtgaggaatcaattaatgtatgatggatcttggtactagttagttctgttttgctggccggtcctagttctccaacttcactgtgttgtaatgtctggtttgtttgaagagggtaatgatataatccaaagttccaaacagttaatgaatgaatttgatgtgctaaaaaaaaaaaaaaaaaaaaaaaaaaaaaaaaaaaaaaaaaaaaaaaaaaaaaaaaaaaccaaaaggaccaccctttt

SEQ ID NO: 66722 - DNA, 420 bp, Glycine max
  Clone ID: PAT_MRT3847_31263C.1
aaaacccgcccagcttaaaatattatttaattctacggggcccacaggattacctgggaaaaaaattggagggaaaccctttttgggccaaaggaacttcacatgattaggggggggcccacccttttaaaaggaaaaaaaaaaagcccctgataaaagaaaaagaagaggggggttcaagctttaagctggcattttcacggggaccaaaaaaaaataacagggtgtttttgaaaaacaaccatccctaaaaaccccccttggaaaacccccttgaaaacaaagggggcccaatcacagggggaacccaacctcaaaaggaagttgttggtggtgggaatggccccaaaggggggggcattcaaagttttgaaccgggcaaaatgaccttccccccttgaaaaaaagggaagaatgggg

SEQ ID NO: 66723 - DNA, 272 bp, Glycine max
  unsure (1)..(272): unsure at all n locations
  Clone ID: PAT_MRT3847_31264C.1
tgagtggtgatggtatccctcctctaggngggagacaataaattgttgattgatgccattacagcccaaatgcaaagaatgttgacagaacataccgaagagctgtatggcgtaattgaacaactagacaatcaagaaaatggcgatgatggtagaggtagaaggaggagatggaaaaataatgcaggtgatgctagagaggacagaattgaaggagtacagctaaacagacccccttttcaaggaaagagtgcaccagaagcatatttgga

SEQ ID NO: 66724 - DNA, 171 bp, Glycine max
  Clone ID: PAT_MRT3847_31265C.1
caccaaacttttctccggcacgatgtgttagtcctgcaaagggatcaaagtcaccattcatcaacagtagcaaccttccccaaagaggggtaggagttagcaaagttttgactcattttggtggcattgagaggaaagagaagtttgttccaaccttgaaaacattggatg

SEQ ID NO: 66725 - DNA, 274 bp, Glycine max
  Clone ID: PAT_MRT3847_31266C.1
ctgggggctttttttcgatgaagctgatgcactgcacttggcgaacgttgttttttccgatgatacccatgaagccgttggtgtatgcagtcttagcctcttgaagctccttcaacacctagaaaaaatcagtgctaccaaacctaggcagcttccacatggtccagtagcgtccatcttattatcctggtgacctggtgtgctcacggtaccctaatccgtgctccaactcgaattccaggcagggaatccctcccttgctaaaaagggattc

SEQ ID NO: 66726 - DNA, 565 bp, Glycine max
  Clone ID: PAT_MRT3847_31267C.1
ggctcgagtgcgagattgaaaaaatctgggtcatttcctttggcctcaacttcacagatgagaaacataagctctaggtccttaaaacacaagcaaaacgaaatttgggcctttccaaagggagaaaaactgcatgctggtactcaagaatcaaacatgttggtgtccagttctgtgaaagatacttcttatgagaagtcaatgcctttagcgagtgatcttggtgtggatagtgccatgaaacaaaaagcaataatttcttcagggccttctcagggatcaaatcacagagggtggaatcaagtggttcttcatcaattcaaagttataaaacagaagataaaacatgttcttgtggaattcagaaaaagcggttaccaaactacttctgctgaagccatccatcgcagagcttcacctgaatatagcatcataaaaaatgaggaagagatctcacaaagcttagaagatggtgtggttcaacaattcaaaaggagtaaaagctcaaatgaaactagagcttctgattatgattccaacaagcatgatgctcgcctcatgcgaa

SEQ ID NO: 66727 - DNA, 157 bp, Glycine max
  Clone ID: PAT_MRT3847_31268C.1
cacgcgtccgacggctgcgagaagacgacagaagggggcccaacccattttagttcagttttgagacacgggtgcgggcctctcatggcttccgcttgagcttcctttcgcaccacagctggagccatctctacgccctggttcgggccaaagaatg

SEQ ID NO: 66728 - DNA, 147 bp, Glycine max
  unsure (1)..(147): unsure at all n locations
  Clone ID: PAT_MRT3847_31269C.1
accggccggaatttcggncgaccggcgccggacattgggctggatttgaaacagccgaagggaatgagcgactagagatgttcgaatgaatatattgctttggtcatatatatcctgtctccttcactacgtcaccatagatatgcc

SEQ ID NO: 66729 - DNA, 387 bp, Glycine max
  Clone ID: PAT_MRT3847_3126C.1
gtgagaaaatatagggaaaagaaaggtgtttgatgtaaagctaaacaaggaagatatatggaaaagattaataggtgagaaataaagtgaaaataactagtgggtctcttgccttttttatttcccacctatttcttattggcttaatgtcacttttggtctactatatttcagagttgttttgctttggtacatcaagttttaaaagtttcattctaatcatttttgttttcgaaatatatcgttttggttcttttttcaatttttcgttagaaacgttagtgttctggtaacctttaaattttaaaaaaggaccaaaatgatacattttgaaaacataaaaggacgaaaatgaaacttttaaaacttaatgtatcaaagtgaaac

SEQ ID NO: 66730 - DNA, 398 bp, Glycine max
  Clone ID: PAT_MRT3847_31270C.1
aaacgcttgacttcatcgcaggtatcatgcgtgcataaagtccaacaagtgtacatcatcaggtctatctattaccatacacgatatcaatcaatgacaattacatagcccaccatcaacgacttatacttcagaactcagcctaaaagatctttgtttagctccacattcaacacctaccaactatttacattctacagctgaatgcagctcaactgctatcactcaaacatatacgtttgctctcgctggctcctggcattctgctatcttggattctgtacgtccaatctcctcttatcacaggagccttccttctgcctcaagacggatcggaaaagaggagagttaacatgggtctatgcatggccgtatactgatcgctaagatgaaaccct

SEQ ID NO: 66731 - DNA, 687 bp, Glycine max
  Clone ID: PAT_MRT3847_31271C.1
gtcgtttgattgtgaagtgagttcccattgagcagatgttggaggcaacaacgtcgacggcagctcctcgaggagtccggcaacctcaccaaagcccccaaaaagcccttgtcagtttttcccctaatactaataattaatgattaacgattaacgatttataacaacaacaacgacgacgacactttgacacacctaaccctccaaattcctatctctcttcgaatggaatccgcagctctgtcgcgcataggcctggcgggcctggccgtgatgggccaaaacctagccctgaacatcgcggaaaaggggtttcctatctccgtctacaaccgcacagcctcgaaagtggacgagaccgtagatcgggcccgcaacgagggctccctccctctcacgggccaatacacccctcgcgacttcgttctctccctccagcgccctagatccgtcatcatccctcgtcaagggccggcgcccccgtcgaccaaaccatcgccgcccctctccgaccacctcgaccccgggcgactgcatcattcgacggcggcaacgaagggggaaccaaaaccacccgagcggccggatgagccctcgtcgccgacaaaggcctcctctacctcgtgggggcgtctccgggggggaaaaacgggccacgccacggcccctccctcatgcccggggggg

SEQ ID NO: 66732 - DNA, 1459 bp, Glycine max
  unsure (1)..(1459): unsure at all n locations
  Clone ID: PAT_MRT3847_31272C.1
acgcctgcacctgctcgagagaaaattgatgaggactttgacttcagtacaagatgttgtctttgtgttctccaactacaatctaatgaacccaaccacctacggcacacggaaagaatttcgttgtagtgttcattacacccaacaaccaagtgcagcaatcaccaaaaaagaagaaggcaaatcaaagttttgaaccttggttcaatatctagagtccctgcaagctcaacacatcagagataatcaaaatgcatcctgcgcagatcgttttgtatggatcaactttatgtgtcatgataacagtgcacttctccatgaagctactcgctgaacatgttttgaactggaagaaaccaaaggagcaaaaggccatagtaattataatccttatggccccattgtacgctgtggactcctatgttggtttgataaatttctttggaagtgaagcatttttcacattcttggactcaattaaagagtgctatgaagctctggtgattgctaagtttttgggcttgatgtacaattatctaaacatctccttaagtaagaacatagtgccggatgaaatcaagggaagagaaattcatcattcattcccaatgactctttttcagcctcacactactcgtctggaccataaaacactgaagcttctcaaaaactggacttggcaatttgttgtgatacgtccagtgtgctcaatcttgatgataactctacagtatcttgatgtttatcccacttgggtcagctggataaacacagtcattctgaacatttcagtgtcactggcattgtattctcttgttgttttctaccatgtgttttctaaagagctggagccacataagcctcttgccaagtttttatgcataaaggggattgtctttttctgcttttggcagggaattgtgcttgatctcctggcagcactaggaataatccgatcccgttattcctggctagctgtggaacgcattgaggaaggctaccaaaaccttttggtttgtgttgaaatggttttcttctcaatatatcagcaatatgcatacagtgctgctccatacaaagttaacagtgcaccttcagataaaaagtcaaagtgattccaggacatggattacttggctgctaaagaacatcaatgtatgtactttcaatatgagtgttgcttctctcccacttctcttccatgagacaattagtaaacaaatgtgtggcagagtcttttgaataagatccagatacattgatgcctattctaatgatctagaaagttttatccaacatttctgcttggattttctgctttaattatttgtatttgtcttgactcattgcagacctaattacatttgtggtcttacaccaacagaaaccctaaaccccgagttacaagctatttactattacatacatgattacaacctttttttgtgtgcttnnnnnn

SEQ ID NO: 66733 - DNA, 272 bp, Glycine max
  Clone ID: PAT_MRT3847_31273C.1
ggcattcaggggaagctcatataccaactactctgtctgcactccagtgcctttacaatcatgcaaaatgcattgggctgggtctgaaaccaacagtgcgtgagatggtgcccttagcttgagaggcgaaaaaacctcgacaacatttacttgcttactctatcatgctgtgtggcggaaatgatatgacacccttacagataatattgagtcgagaaatggagacgaatttggccctactctgcatacaaccattgaagaagcaaggatta

SEQ ID NO: 66734 - DNA, 478 bp, Glycine max
  Clone ID: PAT_MRT3847_31274C.1
aaattctgatgtattgtgcatcaaatatctagataatcctcactcaggggcatactgccggtcttgaaacaaaggaaggatcattctcaaaaaacctttgtcgggcgaatcacatggaaactgtatgggccataacatatcaagagaagcggggttccactgatcatgaaccgatgcacagaatcgagctacaagaacacacatgtgtttgttggggccatttgcccatgaatctcggaacaaaggtggcttaatatcactaatgcgtgcatatttgatgccatatgccagggctactgatttaaaaatgaattgacgggattccagaatgtaatgccaaaaactttctatcatgcggtcctgaagaagacagcattaactggggacgggtcatgattgcgtgtgacgatccagagcatacgcatgaatctgagaggctctaaaaccaagtcttttgttaatggtaccataatggaat

SEQ ID NO: 66735 - DNA, 266 bp, Glycine max
  unsure (1)..(266): unsure at all n locations
  Clone ID: PAT_MRT3847_31275C.1
tggtgatgaagaattgatgcgcgaaaggacgcaccctgctgtgggctctgtggtgcaagagatggcaattntgtagagacagataggttggagagttgaatggggaatcccttctggatttcccgtcacaggtattttggcatagcatttttaatgagatgctcattatatatagctatgaaaaattactgcgccaggcttaaggctccaggattgttttaccaatccttaaaaattttgtgtctctgtgtgtgtgtgtggagaat

SEQ ID NO: 66736 - DNA, 453 bp, Glycine max
  unsure (1)..(453): unsure at all n locations
  Clone ID: PAT_MRT3847_31276C.1
cnnncgtacgtaagctcggaattcggctcgaggtaatttttaattgaaaatcatgttgtgaaatatatctacccaaagaggtaacatcctataaatagtaataattaatttagctgcagccttttcaggtattaaattatatgacaaacagttaaaatgaatttaagagtaaacataaggcatagttttcagtgaacattaataatttctcaatttgcagattagcatctgcaaaggtatcttcttccattgcataaaatgccttttaatagttaactaatcaaatattctgaatgacttcaaaaatttgattgaaaatttgagatatcacattatttgtactaggatttgacctaaaacaccttttatatttgttaacctttcttaaatttagttaaaatttgaagtatttctgtcgtaattataaacaaaattattttgtgttttaacata

SEQ ID NO: 66737 - DNA, 111 bp, Glycine max
  Clone ID: PAT_MRT3847_31277C.1
ctcggtacggctggagaagagacgagggggcatgggaataacaatggaatcatcctaagtggggagcatgacatgtcaactgtatgttcacaggatacacccttgcggtct

SEQ ID NO: 66738 - DNA, 306 bp, Glycine max
  Clone ID: PAT_MRT3847_31278C.1
atggcaaggtcatgagcttactaggccatgagtctcgctaatggaaatctcttttgacaaaaaaaaaaaaaaaaaaaaaaaaaaaaaaaaaaaaaaaaaaaaaaaaagtaaaaaaaaaaaaaaaaaaaaaaaaaaaaaaaacggccgctcaaaaagattcaaacttaaataagcctgaaaggaaagttaaaacccctcaaaaatgttaactaaattcaattcaatggccgttcttttaaaaagtccttaatgggaaaaacctggcgttaaccaaattaaaccccttgtaagaaaatccccttttcc

SEQ ID NO: 66739 - DNA, 343 bp, Glycine max
  Clone ID: PAT_MRT3847_31279C.1
ggctttgattctgtaatttgtcaatttaagttgattattgaattgtcctgccattcctcttataagttacttgggcaagtaatactgtgtttccagtatagagtttcttatgtggtctatgttattgttactagttgcttagttttttaaatctgtgcattggtctactatcaataatgtattgttgtcttactgaactccatgtagaggaatggcaggacaattcaatctcgagcttagtcctggtggttgcgtctttgctttcctatatttttttatctatttggtgggggggggggggggtctatttttattcttctttctattctgtttctttctatct

SEQ ID NO: 66740 - DNA, 1391 bp, Glycine max
  Clone ID: PAT_MRT3847_3127C.1
acggctgcgagaagacgacagaaggggacgcacatgacaccacactctctctctccttgttatgttccctcctcctagaatataaattcacgagagaaacacgaaaatctttcgattccggcgagaaaaaaacttggacggtgaaattggaaggttttccgggatcccaaggccgaatcttggttcaatttacgaaaagagaagagagaggaacaacaacacccgttgttgaatcttcaagctgaatcaaatcatatagagagagaaagagagagacccggataggaaaatagcgtttagagagagaaaggtgaagtgaggttgtttaaagtttgggtcttggtgggtgaaagggaaagatgacggatgtggtactgcatatatacgatgtgacgaatagtggatccgagaaaaccaacaacaccattgttcagatcaacaagatcttcaaggatgggattggtcttggtggcattttccacagcgccgtgcaggtttttggagatgatgaatggtcatttgggttctgtgagcaaggtactggggtttttagttgcccttctggaaagaatccaatgtatacatatcgtgaatccattgttttagggaaaacaaactgttctattttcaagttaaatcaaatactaagagaactcagtagagagtggccagggagttcatatgatctgctgtccaaaaactgcaatcacttttgtgatgaattctgtgaaaggcttggtgtaccaaaacttccaggctgggtgaataggtttgccaatgctggtgatactgccatggaagtggctggaaatacagcattacggttccggcaagctaaaactgagattgtatcagcaagcaaagtagcataccggttcctcttaggagttaccaataatgttactaataatgttaaaaatggtccagagtcccctgacaattcaaacagaggagggtcccctagacttcaagcatcttggttgaaaaatattgttactaatggtgcaaaaccgtctactagttcagaagctgagaatcagaacggagttatgcctctaccgccaacacgagatgacaaggcattgctacatagttaatcttcacatgatagttgagggatctttgtcaaatcttagtcatgctgtgtattgtaattttaagtcacaaaaagtataacggaattttacatgctattcatttgtgtatcaaatgtataatttttcgtttgttcaactcaaatcttattggtgcctcgtgagactatgttctttgaaaggtaattgtactgtttttctctttttttctctgaatcgctgctaacacaattggcttcttattaatttcaaaggaaatttactttcatttgttttttcaattgattatcaatcaat

SEQ ID NO: 66741 - DNA, 362 bp, Glycine max
  Clone ID: PAT_MRT3847_31280C.1
tagctctagccgaagtaagcttggtttcatgaccatgatcctgaattacgtcttgcagaggctgaaattaatatttcgcgaacagagctcattggaacatactgtccatcattaacatgtactatataggtcactttgattagcttcttctatctagcagagaccttttatgaacatatctctgctagcttatgatcatcatctaatcgtcatgatcgatactcttacgtgtggaaactgagacgagtcattggcgcactgtgtatctcattgactccctgtctgtactaagcgaacgtgaatgatccttgtcattcacctaacatatacgtatttactgtactggttctaagtttaactat

SEQ ID NO: 66742 - DNA, 245 bp, Glycine max
  unsure (1)..(245): unsure at all n locations
  Clone ID: PAT_MRT3847_31281C.1
caagtgttcgggtcgtcatcatcagaagaatgtgattctgatggatacagcgagagcgaggagcgangtgggagcccatctcagaagtgaatggcctatggctgtgccctcacttcctctcnccacgccgccagtctcacatactctcctccatccaagccgacaattggttcccctccccttccatcaaccaggccatgcgcttcggcctacaacacctcccttcttgggcancctttgggcca

SEQ ID NO: 66743 - DNA, 367 bp, Glycine max
  Clone ID: PAT_MRT3847_31282C.1
ttgagctttttattacattcaaattgcatagggcggcgtaactatccatacagacccatatgaaaagcgactgaatgcactcagggcctatgaggattttagtgagcatagactaaatgacttaagtgtcgagacatcaaaatttatcgagggagaaacaaacatgcagacatttgacaatcttcgaaaccccttcaatgtgatggctataggccctaaacaggctctccctactaagctcggtatatatcctccctttaaagacgtacccagactccacaccacatcatagcacgcgcctgctcgtacccgtttacacttaaaaacccgcctggcggcgacccttgacacgcaccgggtcaaaccc

SEQ ID NO: 66744 - DNA, 1909 bp, Glycine max
  Clone ID: PAT_MRT3847_31283C.1
attcaaagtaaaccacgactctgatgtgaccattctccattcccatggcaccaccatcctctcctccgctcgtcgacaattccgatgccgagcgccgccttcgcgaagcggaggagcgcctccgcgacgccatcgaggagctccagcgccggcagcgccgcgccgccgctcacgcccagcagcaccgccacgtggactcgctgccttgcgatcacggccccgacgagtcctgcgtggctcacgccattggcaacctctgccagaccttcctcctctcctacggcgtcagagtcggcattggcatactcctccgcgccttcaagcttgttcgaggccaatcctactcctctctcctcgatctcaagcaacttgtttcagaaaaagatctgatagtaagggaagaagcatgccgcattggtcttctttttggtggtttcactggatcttatcatgctcttagatgcttgttgcggaaattgagaaagaaagagacaccggctaatgcagttttagcaggttctatagctggtttctcgattatggcattgaatgattcaaataggagacgtacactggctttatacctgttggctaggctagcccagtgtgcttataattctgcaaaatctaaaaacaagtttcacctttgggggagtcattggagacatggagattcattgctgtttgcccttgcttgtgcacaggttatgtatgcctttgtaatgcgtcctgagagcttgccaaaatcctatcaagacttcattcaaaagaccgggccagttgcagagcctgtatacaaggctgtaagggatagctgtagaggtcatctagttgatgttgcgtcactgcatgcttatttatctcgtgtaggaagatctgactatgtaaagttggaagaatttccctccattattccatgttccattattcagccagcaacaaattcatgcttagctcatcaaggaaatgcaacatcattaacgtttaagaaaacattttcgttttacttctctttgacctttgtgccttttgttgttctgcacctacagaagttcactgatgctccttttcgcactttctggcttgccattaaaggtgctgttcgctcgacaacctttttatccgcttttgatggaatctttcagggagtcatatgttcacatagaaaagttttttcaagagatcacaagcttgtatattggatagcaggtggaatagctgccctatctgtgctattggagaaaaaagctaggcgtggtgagctagctttatatgttcttcccagagcagtagattcattgtggtatatcttggtgaacaggcaccttcttccaaatatcaggaatgctgaggttttcttgttttctctgtgtatggggggaatcatgtattacctggaacacgaaccagaaaccatggccccatttcttcgaggcttgatccgtcgcttccttgccagcagaatcagcaatccaagcccacctaatcggactgcttcctacacatacctgcaagctcttgatggcataacgaaaccaacattacaggagaagagggatactgaatcttccgaaaagtacaaccttgaatctattcctgggctttaacgttgtttttttgggttgggtaggttaataggttatcttgtatcgggagccagattcaatatttggctccccatttttttattgattgctaatgaaggtgctctcaatgttaggtgttttaaagcttttataattatgtgagaaagtaaataaataaaaagaacatgatctgatgatgtcttcaaattaagtgcggaacaattgattgacacgatcatattccggcagataaaggtgccataaaagactacccataacaaaaagttcaaatcgacagttatagattttattcttaacaaaaa

SEQ ID NO: 66745 - DNA, 437 bp, Glycine max
  Clone ID: PAT_MRT3847_31284C.1
gtcttaaccttgtcttcccatattgaccgcttcccggctatgggacatgatcatgatctacaatcacccgctacccctggtccgataccaccctgggagactctctctgtctcttctctttcgcactcatttttgccgccacgtacattttaccctcgccgatgacgacaaaaaggcacccgagatcgggcagcccccgcttggtcccggaaaaaacccccccctttggcggggtgatagaaaaccccccaagaagggatggctggaaatcaaattttttttacctcggaccaggggaaaacttatccaaaccaccatggggctaaagtggcacccacaaacgacggttcctacccgcctaataaaaagctaagggcttttccggggttaaactggaaccacccctgccccgccccaatttaaaacccaatcaccca

SEQ ID NO: 66746 - DNA, 265 bp, Glycine max
  unsure (1)..(265): unsure at all n locations
  Clone ID: PAT_MRT3847_31285C.1
aaaaactcttatctatgcctatgtctctgtctctgtcaaccgtgcctgcgttcaattctctcacaatggctgaatccctgcctnctatcnctcccttccctcttctacgccaaanacaaaancctttctctctcaattcccactaatccnctcaatctgcaattnccatgctcaaantcttcgcttttgcccctcaccaccaagactacgcgcnactcttctctcctcanattcgtggctcagacatctggttgggccaaagaag

SEQ ID NO: 66747 - DNA, 1086 bp, Glycine max
  Clone ID: PAT_MRT3847_31286C.1
gaataattgtccaggtgtaaggcggaaccttgtacacgccaaggaccccatctccgagtccagtgttaaactcaacttgaaccctcgttgtcgttgtagagagcaaaacactgcaaaccccttcggcgttttgtccttacgttgttattaagaagcgtaacgcattcaccacgatggtgaccaaagcgatggaggtggtgaaggatctggacgtgaagcggtacatgggtcggtggtacgagattgcgtgcttcccgtcgaggtttcaacccagtgacggcaccaacaccagagccacctacactctccgagatgacggcaccatcaacgttcttaacgagacttggagtggcggcaaaagaggtttcattgagggcactgcttataaggctgatcccaacagcgacgaggccaagttgaaggtcaagttctgggtgcctccctttttacccatcattcccgttactggggattactggcttttgtacattgaccaggattatcactatgctgtcattggccaaccttccaggaattatctttggatattgtccaggaagaaccatatggatgaggaaacctacaaccagcttgttgagagagctaaggatgaggggtatgatgtgagcaaactccacaagactccacacagtgattctccaccggaggaagaaggtcctcaggacaccaaaggcgtttggtggatcaagtcccttctggggaaataggtgtggctgaaggtgaaggagtgtttcatatcgttaataaaagtgatgaatcggagcaatttagattggatctctgtatttttacacatgttgggttgttgtgtagatagactaagctggtgcgatatgaacctttgtaaagttgatgtttgatgctctgattgtgtttgttctttattagttgttttggtgagaatccaatgatgaaagactttgcagcgatttccattttgcttttacttttttttttggttgaattctctgccaaggtatatgggctttcttcattttgcctctctctgacacacattttggtgtggcaaagataaaggtatgggtattcattcatattattctg

SEQ ID NO: 66748 - DNA, 635 bp, Glycine max
  unsure (1)..(635): unsure at all n locations
  Clone ID: PAT_MRT3847_31287C.1
acatggtatctagagctaggttgaaggaataaggaaaaaccatccctcaccaaggacagtgggtccttgatgagcccttttgctcgctaccctcttccgataaaccctatctccttttctagcaacttctttcacatttctcccagcttctctatacccgcgacctttttcctttttccgcattccagtggacccttctactagtagccccttatctcgtcccctgttccagcgacctttttctctgttttccagtgtttctttttctgccaaccaccgttgctccgatcaccacttcggtcggtgaccccaccatcagcatcaccatccaccaatctatacgatggtggtcacggtgtcatgaacggtccagcgacactcctgcgcacgctctctctttgccagccaaacaacagccgcatgtcactgttctccaatgcctgacagtacctttgtcggcatacttccacctccctcgacgtcccttcctcttgcacctacccctgcagtttcaggccattccgacctctttcgacatggtctctcttttgtaacccattcatttttccagcttttttcttttgttgcagatactgttngtttgtcccttttgctgcactctcatggctgctttg

SEQ ID NO: 66749 - DNA, 503 bp, Glycine max
  Clone ID: PAT_MRT3847_31288C.1
atgacccatgggcattcgctggaaactatccatcatggacagctgacttgcagcttgtccatggaaacacgcgataactatgttgaacacaaccccactgaaagcggagcattttcagccgatcacagtcttagactgaaaccgatgagcaacacatgagcacagataactgattcttctttcaaacctacttctgacatggcatacaggactcctacctcagccaacgcggaaagcactgtcggatctacgaaaagaggattatccatcaactgaaaaggactcgcaccctagatggcatagagctctcgacgtggattgctacaacagtgcgccagataggcctaaatccttgctggctgcttatgcctgacctggaacaggccgatcttgacctggattcatctcatagccaggctgcgaggaagacggcttatgtatacatagattgctcactatatgagcgtatgagcgagactgagatccatgccgctgcttagaac

SEQ ID NO: 66750 - DNA, 235 bp, Glycine max
  Clone ID: PAT_MRT3847_31289C.1
tcgagtacggcgagaagacgacagatggggctccaaaactttgctcaataaccacattacgcccctataaaaacaccaatttaacaataacaatcgtgatcaacaccaatcaaaatgaagggactactattgatatgtttcaagcctggatccaaaagacattctctccccttagacaaccgaataaataagtggttaaaaaaagcggggtccccaatataaaatattttacaac

SEQ ID NO: 66751 - DNA, 1064 bp, Glycine max
  Clone ID: PAT_MRT3847_31290C.1
cccacgcgtccgcccacgcgtccgcccacgcgtccgcccacgcgtccgcccacgcgtccggctcgagcaacaaccaaaacaaaccaaacaattccccacaaggaacatacattactttgttctttttctttttctcaaatcttcttttaaagacaatcttatttgtttatttctgcacgagaattcgaaccttgaacaacataaacatgggaataaacacacgtacactagaaatcaccgttatctccggcgaaaacctccgcgtaacggaggacgcgtacgtcgtcgttcgggcggagtccttaaactgctgcaccacgagaaccgccaaggacgacggcaccaaactcctctcgtggaacgagaagttcctcttggacatgcccatgcatgcaaggtccataaccttcgaagtgcaatgtaacaggttcaagggctttcggccgctcggggtggcccgaatcgccgcctccgatttcctcggcggcgccgtgccggaaaatggcttgcaggtgctgagttacgggctgagggactgggaagggaggcggaacggggtcattcattttgccgtgagggtggcggcgacgtcgtcgtcgacggaggagtgtttgaattcgaagcccgccgtggaaccggtggtgccgagaaagggttgcggtgatcgaatcaatgtcggtggcaataagtccaatgaagttgctgttggtgttccgatatggtggaactaccccaacattatttagagattaattttttaaatttacattatttattttttataacggtcaagcatcatagaagaagttcagttttaattcaattatagattatagatattgtgagaaagttgacacactttgctaaaaagcttgaatgtcatccttgtctttttttaatttgttttttttattcatggtatttatgtaaaatatttatttgttttttacggtatccgttaccgacaagtccaataaatttttcttttgtatataaaatataaagtattttttaaaaaaaaaaaaaaaaaaattcctgcggccgcgaattcctggtgccgaatt

SEQ ID NO: 66752 - DNA, 411 bp, Glycine max
  Clone ID: PAT_MRT3847_31291C.1
agaccaaactttttttatgtaaaaaaatacggggaaatatgaatttcaaaatccaattttgactaatatcatgccttggtttatcatatacaaaatgggcctttccattttttgggggcctccttatccatttttctacagaaagccataaggggctcgatttatggcttcattacaaaaaataacttttttgatgggggaaccatagatctagcatatgcagctggcaaagaaaggaacttcttggctttgctcacataagcccttttagggaaattgttggaatcattagcttctatctgggccaatatttggggatacaataacaaaaacgcccatacaggccatttgatagcttcattaagctccggaactcccttttgtgcctcatcaaaaaacattcttgccctt

SEQ ID NO: 66753 - DNA, 933 bp, Glycine max
  Clone ID: PAT_MRT3847_31292C.1
ggccccaaagcaaaagtatccaatattatgacttaaaataacgtgaatgtcatcaactttaaataactagagtgggaagccaaaaggggaaaaaaaaagcaaaaggaagaacactaaaatggaaagaatgaataaaatgatcgatccacaatgttacaaaacgagttgcgctcgttatgaagggatctccctaaaattgaagaaaataaataatgaagcttgtaattcagatgtttatcttcattgtgaagagggaaaatcttcatcaggtgagtcatcatgagcttcaggcgatggaggtgaaccaaagtctaaattagggaagacaccaggaggcctctcccgaggctcaattgaaagtaattgggttgaatcacccacaacatccgcccatccataatgaggttcggcctcataataagtttcctcgtctacaactatatcccagctctcaccagttgtgctatttccatacttatggactttcccatttccaaagtgttcttctccccaagttcttgaccaacgttcactgcttggagatacgtgccatgtttctccatgtcttgaacctatgcctttaaagaatctctcctcccacttgtctccccattttgttccaagctcagtttctgcccacttaactgtccatttgagaacagatcctcttccatcataatgctctccccacttttcccaccatgattgttcattcagtctaccgtacttatgtgcccctttctcagtccagcctttagcatcatacttttcccaccatttttcataccatccagcattttcagttcctgattttgcttgtttttgtgcacttctttctattcttgctatgttactccattcatcttgatgaagattttcctgccatgtttcccgccaagtatccccctcaaaatttctcggacgcgtgggtgg

SEQ ID NO: 66754 - DNA, 226 bp, Glycine max
  unsure (1)..(226): unsure at all n locations
  Clone ID: PAT_MRT3847_31293C.1
cccttttgctttagtcaggtagtgtgagttgtggtgttttttgagtttcaagttactccactccagaccaagatcacataagcgaagnaacttggtctggagtggggtcnctgattttagcgtttttctnttgtntcgtntaataaaatgtgtntgttnttagtaaannanaaaangggnncccncaaaannngggggccnngctttggnnngccnttnncccngg

SEQ ID NO: 66755 - DNA, 345 bp, Glycine max
  Clone ID: PAT_MRT3847_31294C.1
cacgcgcacgcgtgcgtaagaatcggagctcgaggaggagagtgagctagcatatggcgagtaccttctgcttacttcactctactctctatcaaatcaaatcctaattttatgttttttttgggcccataaaatagcgagcttgcacaacatcttgcttggtgcaggcagacaaacagccactctgtatcagacgaaccgatcgtttgaccagcatcgatcttttttcgttccgtcggtcgaagcaagccccagctatctaatgcatacctacatctacatccactacatgaaaaaccgaccggcagacacacagaagatgaccacgaagccgagaaagcacct

SEQ ID NO: 66756 - DNA, 447 bp, Glycine max
  unsure (1)..(447): unsure at all n locations
  Clone ID: PAT_MRT3847_31295C.1
cggaattcccgggtcgacccacgcgttcgtccacgcgtncgtgctagatactcatttgtacaaatttatatcaaggaagcgagcactgaggctgtgacgttcttcagccaaatgtctataaagttttaggttttaatttcacccctctattccaatgcatgaagatttacttcgaattggttattgtttgaatgctatttgtttttgttccagctaaatttgtcttcgtgttttcatgtctttatttgaactgatggcaactagtcctgcatgtgattaaagtttattgaatgaaaactgttattgcggcattattaagtatataaattgagccctcttccacaatattggaattcttttgttaaagtttctatatacaaaatggctctttctagcagattacacacattgggagcatatcaagtgagagtgtatgaacatgaaaag

SEQ ID NO: 66757 - DNA, 436 bp, Glycine max
  Clone ID: PAT_MRT3847_31296C.1
gtccattgccatagccaacgcttcatctcccaaattccatcggcggtgccattctccgtccgtctcccccccccccctccggtgctgcttttcctctgctcttccgctgatctcactccctccccaccgtttggtcctcaattatttctcattagtgccattttatgcttattccttcttctctccgcttcatcatccgctgtcattcttcagctgctgctgagtgttttttgccttcgtttacaattcatttgaattagccgaggttcactcggttctcagccagcagaatggccaactccagtggccatgacccaatcgcgcggtggctcactcggctaaggcctcgttcgcgcatcgctttggtcattttcggcgctgtgatgatccaccctaacatcggcacttaccacacctttgggcaatatgcttccct

SEQ ID NO: 66758 - DNA, 264 bp, Glycine max
  Clone ID: PAT_MRT3847_31297C.1
ccagcctgcgagaagacgacagaacgggggggtgttggcaactcttgatatgatactcaattcttccgataaacaaaattattctaggctatgactttgacaacatacagactatggactaattgaacatataggtacatagggtggccaatatcagatagaggagttcgtacacttgagtatacaataggcatattttacacttgttaagtcattacatgtattagttgtactcaatcagataagttctagcatgtaaaaata

SEQ ID NO: 66759 - DNA, 1207 bp, Glycine max
  unsure (1)..(1207): unsure at all n locations
  Clone ID: PAT_MRT3847_31298C.1
cttgtgtatagcaaattttgttaagtagacactttttttttactttgggaataataaagatgtgtttgttttgtacttggntgtgtgaaatgatgagaaaacatttgagaatatgtttattgaagnntcgagcacttagaagtcttagtacggctcgaggtgatgttttccctttaaatttaggtaacagcatagcatagcaatccttgtcccgccgaatggctcctccatatccctccctgctcattctcctatttttgttgacaagccaagttacttgttatggttcagagaaggaaaagagtaaaactttcataatccaagtccagcacgaagccaagccttccatattcccaacccacaaacactggtacgactcctccctctcttccatctccaccaccgcttctgttatccacacctaccacaccgttttccacggcttctccgcaaagctctcaccttccgaggcacagaagcttcaatctctcgcccacgtcatcactctcatacccgaacagcttcgctcgcctcacaccacccgctcccctgagtttctcggcttaaccaccgccgacagaaccgggttgctccacgagaccgatttcggctccgatctcgtcatcggagtcatcgacaccggaatctggccggagcgacagagcttcaacgaccgcggcctcggccccgttccctccaaatggaagggcaagtgcgtcgccggagaaaattttccggcaagttcgtgcaaccggaaactcatcggcgcgaggtggttctcaggcggatacgaagccacccacgggaagatgaacgagaccactgagttccgctcgccaagagactccgacggccacggcacgcacactgcgtcgatcgccgccgggaggtacgtctctcaggcgtccacgttggggtacgcgaagggcgtcgccgccggcatggcgccgaaggcgcggctcgcggtgtataaagtctgctggagcgacggctgctacgactccgacatcctcgctgccttcgacgccgccgtgtccgacggcgtcgacgtggcgtcgctcagcgtcggaggtgttgtggtgccttaccacctcgatgtcattgctattggcgccttaagccccnnctcgccgggcgttatgtctctgcctccgctgggcacggcggtcccggcggactcacggtgaccaatgtggcgccgtgggtg

SEQ ID NO: 66760 - DNA, 382 bp, Glycine max
  Clone ID: PAT_MRT3847_31299C.1
taataacacctaatgaatctgaatccgaatgtaccctcagagatgatggaagtgttacagatgcttttattgcaggagctggaattttcaattctgaggatatgtttctagcagttgaggaagttatgcctggcaccaaagttgaacaaatcaaaattgttgagaaagatgtgtataggtcactgtcacagctgctgaatgataaattttgtcaagaccaagggcactcactcaatgaaatggttcaagatgttagaaacaagcacacagatagcacctcccccacactgcatcagatagaatcagtcaatttgtcagtgccagaagtagttttgaatattatgaatgaggatcagaccctgcactctgaaatggaaatcct

SEQ ID NO: 66761 - DNA, 392 bp, Glycine max
  Clone ID: PAT_MRT3847_3129C.1
gggggggaaaaaaaaagggggtttccaaaaaaaaaaaccattcgccccggttttactcaatttcccctggcaaaggggcccccaaaccccttttgaaacggggatacctttaggcccgcccatgaattcctaactggttattttaaaaaacccaaaaattttttttaatccctggccgcgggggcccccgtttttttcccccccaaaaagccagattttttccccccccggacctaggggccccatttaaccccatttaaaggggatttcccggcccgcataacttaaaagtcccccccccccaatttttctctaattcttcacccctgttacctccctggggggcctgggaaccacctcccctggtttcccctcacccccaattttcaggg

SEQ ID NO: 66762 - DNA, 396 bp, Glycine max
  Clone ID: PAT_MRT3847_312C.1
tttgggctgatttagtgcttggaaaagttccttacattctttaaacccccaagagtatcattccgcctgtctctccctgatcccgcgtttctatcctacggacattcattcctagttattgtcgacgcggcgtcggatacggacggcaacttctccggaaatggccggtaaaacgaacaccctacgccgttagccataagaggaagtggcggcggaacagtatcagtcgtaatcggaaacgaaagacgtttcgcaatcgctgcgtaactctataccgagtgtgccaaggggcacgtggtaatccccagagtcttaccttattctttccccactgtagaaagttccttcccgatgaccctacctgacaatcccgaagcgccattgtggcgcgctttt

SEQ ID NO: 66763 - DNA, 453 bp, Glycine max
  Clone ID: PAT_MRT3847_31300C.1
cgggccgacccacgcatacaaccaattattataagccattcactcacgtttttttttaaaaaaaaacatataataacaaaggcagtgttattcacagactcgaattgtacataaacattcttcaactcaccatataattcctcatgatcttcactcaaacacttctcatacttcagcatataaccctatatcctctcctaattattaatcttgcaagtacacctcttcctttctatgactacctccactgaatattaaatagcatctctatattaattactttctagctttcttttcttctatcaaattccacaattttctatagaccctgttatttcttacctttttctatcatcaatctcttatttattcaaacccacactattttctttttaattaataattattcctcttcttttttatccattttttctttctacatttttttttctt

SEQ ID NO: 66764 - DNA, 891 bp, Glycine max
  Clone ID: PAT_MRT3847_31301C.1
atgaatttaagtgcaaatgagactctattcttgtcagttgataaaatcaaatttttaacctataatgtgtgcattgttgttccacccaatattgtttcagatggcttatggggtggccaacttaatggccggactccattgaaatcttcactcccattgtttgagttgcaggtgcttgtaattttttctatcacccaaatctgccaattcctcttaaagagctttgacttccctcaatttattccacaaatgataactattagtggtcctacttatggagtaatgatgatcaacataatggtcattgcaagcatagtgaaatggtctgtgaaactaatctatgatccatcaaggaaatacgctgggtacccgaaaaggaacatagcgagtttaaaaccagactcggagctgagagtagttgcttgccttcataaaacacaccatgcatctgctaagaccccaactgtggatgcaatgcatctaattgagctagttgtagcaatgatttttctgggtggaaacgatgaccgagaggctttgtgcttagccaaacgagttacaaggaatccaagggtcaacttggttgtgtaccacctagttcctaaggaacaaacaccagacgtggagtatatacaagataaggaggcactaaaacatgttatgaaaccacacttgggaaatagacatttcttcttcggcaaaatagtaaatgaacatcactatttcattgttgggagaagacacgagttagactcacctcagacggttgggcttacaacttggagtgaattttcagagttcggtgtcattggtgatttgcttgcttcatcagattttcagagcagagcgtgtgttttggtagtgcagcaacaagtaaaagaaacatcatag

SEQ ID NO: 66765 - DNA, 452 bp, Glycine max
  Clone ID: PAT_MRT3847_31302C.1
ctcaagccaaccctcaacaccaagcccctcaacataaccgtctcctcgctctgcaaggcgaagcaaatccccaaagccaaaacggcaatcgtcgatggcatacgacttggcttgctccccgacgcggtcacctacaaccccctaatcgacgcctactgtcgtttcgccaccctcgatgttgcttactccgtcctcgcgccaatgcacgacgccggcattccacacgacatcgtttctttcaacatgctgatctctggcgcagtcagaaagtctctcttctcgaagtccctcgacctgttcgacgaaatgctcaacagaggcatatggcccgacgcgtggagccacaccattttgatgcactgtttgttctaattgggaaagcccgacgaggcaaatcatgttttcaaagaaatcgtgctccgcggcgaggttcacgccactacctacaacgt

SEQ ID NO: 66766 - DNA, 317 bp, Glycine max
  Clone ID: PAT_MRT3847_31303C.1
ggcacttcaagtgcaatcaaattagttcaatcgctttgcgcagttccgtacctcgcctttcaagatgcaaatcttctggaagaatcgcaccggcaagagtatcacacttgcggtcgcaagctctgacacgagtcgagagtgtcagtgctccgatggagaacagcgcaggttttccgcctgctgaggaacgtcacatcatcgctggaaaccagcacaatgactgacgtatgcgctcagacaacaacagccaacatcgatggcgactacaacttgtcagacgccaccgtagttgcacgcaaatcttagttttaagccac

SEQ ID NO: 66767 - DNA, 305 bp, Glycine max
  Clone ID: PAT_MRT3847_31304C.1
gggttggggtttttttctctggtttttttttttggggaaaaacaaaaaaatcccttctggcggccccacaaaatctattttcccggaatccctcattttctcaaacccaaattaacaaaaccggatttttttgtgtcaaaattaaaaccctcaaaaggggggggcccattgtttaccaacttccatatttaatattcaacatctgaaaaataccctaagggaaaaatgaaacggggcccctttgggggcaaaaataaccggcaaacaatttggttttaggcctatgtcccccgatggggccccta

SEQ ID NO: 66768 - DNA, 209 bp, Glycine max
  Clone ID: PAT_MRT3847_31305C.1
attatgtcttttatgctgtgttatttttgtttgagctaataggtaaaagtgtaaggggtttatagcaaattttttacttacaagggtggttttccatttttggaaaaggggtctaaaccaagggaacttggaaagggagcacaaaatctcctttgctcaaggccatcgaaattggccggggcaaaattcttgggtaatggcccaacctt

SEQ ID NO: 66769 - DNA, 301 bp, Glycine max
  Clone ID: PAT_MRT3847_31306C.1
accgagaagacgacagaagggggtcggatagaatgattcttaactttgtttaaggcctggttggttaactaatttaaaaatagcctttggttttttaaaattggttgtgccaacccctaattacattgggaagagtttgtgccccgggcatattttttgtttttttaaaaagtgattttatagtacacggggagagaggactttgagaaaacaaaaaaaatgggggaacaatttctagattttgccctttgattctgaaactcttgttttataaacgattttctaaacttaatggagtttg

SEQ ID NO: 66770 - DNA, 323 bp, Glycine max
  Clone ID: PAT_MRT3847_31307C.1
gtgtagttcatcttctgctaaccctttttcataatttcaaagttcttcttccttaaagaggaggtttacctgtcaactgccctacaatgtcatttcctcacaactttcacattacattgccacacacttctccaacttacactgctaaatacttcatttcaacatatagactcctcaattcaatgcgaatgttttttgatatgaactgttacactaacccttacttctaccctcccctttacacaatctttattatgacattcttcttctcacctaacttttcattgtctaacaacaatttgtgctatttcaacctttctttt

SEQ ID NO: 66771 - DNA, 307 bp, Glycine max
  Clone ID: PAT_MRT3847_31308C.1
ccaactccatcaatcactcaaacagctcaagtcctcaaactacctgctggcgcctcataatctaccgaacatgcattgccagcaatcaacacggccgtaagagtaaggaccaccatatatgaaaacccttcaataagttcaaacctatgcatagcggcatacttcgcagcacctgcatctaccaaaaccatgacaacaccaacacccacaactccattcgatcaaagacccaccacttaacgaactaatccaacctatggactaatcaacaaccttgtaattacgatcctctagcgcctatatcacc

SEQ ID NO: 66772 - DNA, 417 bp, Glycine max
  Clone ID: PAT_MRT3847_31309C.1
aaaaaaattaaaatcccttaaaatggggaaaatttaggttaaaaaccttgccaaaaacctccttttggaaaaaaaggtttggggccccttttttttaggaaagtccgagccccttttttggactttaaagggggccacctttttcgatttatcacaaagctgaatctggtaataggccttgggccctaaccaaggctttgggggtgggttctcccccacggattggcacaaaaccttttagggggggttggccccctccaaaaccaagatgggtctccggaaactttccccaattttttttaacagccttgtctttatccatcccagcttcctaaattgcaaaaaaggcttttgcaaacagcccctaaccccattggtaactatagtttccagctgcatatccccctgcaaattttt

SEQ ID NO: 66773 - DNA, 410 bp, Glycine max
  unsure (1)..(410): unsure at all n locations
  Clone ID: PAT_MRT3847_3130C.1
tatgcgaagtgagggtgaaattggattacatgcatttgtctcttacggagaggctccaaccagctgaatcttcgaaacattccaatataataaacttgaactccagaagaaaaatggggtaggcaacagggcacctactaagtgtttataacaccacagatccatgcctgctgcagttctgtctgctcttcttttgtcggacacaggcttgattggatccaaccagacattacataacatgacgtcggtagctattaacggaattagctcgttagttacacctttagttctttgctagtgtcgcctctgcataatgatgatatctatnccttttattactgatatttagtctttattttatattctcctaaaatattagatgttacacacgtgtatgattcatctaatgt

SEQ ID NO: 66774 - DNA, 943 bp, Glycine max
  Clone ID: PAT_MRT3847_31310C.1
ggccgctcgaatttatcttatctttaattcaattctcacaagcgaaatcatttaagataagagtgcattactactaagaggagaaaaaatgaaagttgtatacttccttgttgctatcttggctttgacatccactgtggtctctgcctatgaccctagtcctctgcaagatttttgtgtggcggccaaagaaaaagatggtgtatttgtgaatggaaaattctgcaaagatcccaagcttgtgaaagctgaagatttcttcaaacatgtggaacctgcgaatactgcgaatccactaggttcacaagtgactccggtctttgttgatcaactacctggactaaacacactgggcatatctttggctcgcatagattatgcaccaaagggtttaaaccctccccacactcatcctcgtggtactgagatccttatagtacttgagggaactctttatgttggatttgtgacttctaatcaagatggaaatcgcctcttcaccaaagtgctgaacaagggtgatgtgtttgtcttcccaattggtctcattcatttccaactcaatgtggggtatggtaatgctgttgccattgctggtcttagtagccaaaatccaggaactatcactattgcaaatgctttgtttaaagctaatcctcctatttctcctgaggttctcaccaaagccttccaggtggacaagagcacaattgattatcttcaaaagcaatcttggtatgacaacaataactagatttgaaatatggacgattatttgacgctaattatggatatttgattacttcaatatgtcaatcaccgtaggcaattgacctacaaatagttattattgtaataagtaaaatgtctgtggtttgtatttctttaccgtgtagttgttctgttttgtgtttgatatagttcaatatattgtttgagtttt

SEQ ID NO: 66775 - DNA, 394 bp, Glycine max
  Clone ID: PAT_MRT3847_31311C.1
ccgcagggaccggaacggaaggaacgaccggctcactaagctgacgtgacgccctgccgcccttttttttttttttttttttttttttttttaagacaacacacggttattattaatgatgaacattgacaactcaacaaccttgcattgtaaaatgataacacttggcatatattaaccaacacaaattaactcttttttaacctataaacccccattgcatatttatgatgctttggggaagctatttagaaggataacttacttcctgtcgtggccaaggacattcacgcaataaatccaacgcggctttttgaagtcaaataggactaaaaagcagtttttatttataggaattatacattatggacgccgcttcctaggatgaaatttt

SEQ ID NO: 66776 - DNA, 503 bp, Glycine max
  Clone ID: PAT_MRT3847_31312C.1
attcatatgagcaaaaagtaaacagaactgaacaactagtaatgggagatccttgcttctttgtggtcttatcgtccttgctgctcctcatagttagtacacaaacaagctcaggtcaacttactcgcggcttctatctaaacacatgccccaatgtggaacagttggttcgttcagctgtggagcagaagttccagcagacctttgtgactgcccctgccactcttagacttttcttccatgattgctttgtgaggggttgtgatgcttccattttcttgcatctccaaacaacaaggcagagaaagaccatcctgatgatatttcactcgctggggatggctttgacacagttgctaaagccaaggcagctgttgatagtgaccctcaatgcagaaacaaagtctcttgtgctgatatacttgctctggctactagagatgtgataaatttggctgggggaccattttatgaagtttgactgggaagacctgaccggagaa

SEQ ID NO: 66777 - DNA, 699 bp, Glycine max
  Clone ID: PAT_MRT3847_31313C.1
gtatattgcaagcctggtgaagcatttaatcaggttgttgaggtgaatgtcaaagttgaaaagccaggagacaataatgttcataacaatgcattttatgctgaagaaaaactgcttaaatcagaaatggaagcaatgcgtgattgtgaccctttatctgctcgtcactggattgtaagttcttactgattttgaaaccccctctccccaggaaaaaaaatattcagatattaatttttttccctgggtgaatatttctgctgtcactgtccactttagatgttgtagcaggggcaatctaaaattttctgatctggctgctgttttatgctgcttctgatctgtaagttatgaaggatattgcacagtactacttatgctacatatgtgaaaatttatttacataatttgaaaaaaagtttttttttttgagattgcatgattcaagtagtcattgatttaagatgtccataggcaattaattgtaccaaatttttcttatagacatagtagtgtgtttggaaatcatttgttaatatagatcaacaatctctcattgtgtctgacacagaagctaccctcagtggcttctgcgtctcttaatttgacatgaaaaataacacgggcgtgagtaaaaaaaaacgtgtccaaacactgatactattccaggatgcttatatttttgaaaatcatgaatct

SEQ ID NO: 66778 - DNA, 282 bp, Glycine max
  Clone ID: PAT_MRT3847_31314C.1
acggctgcgagaagacgacagaaggggaagcatagttgaaacaagtcaagtcggaagaaagggagaaatgccgaagcaaacaattcaaaggtgggaaagatgcatatcagcatcaagaagaaggggtgatggtcatacgaaacggaagaagcacttatttggcaaatgggtcaggagcatgagcagcagcaccattcaaagtaatgataataggacaacctgggacagtgttccaaaggagagagtggagtgtgtggtgatagggagctgtgtggttggcat

SEQ ID NO: 66779 - DNA, 231 bp, Glycine max
  Clone ID: PAT_MRT3847_31315C.1
ggtcgggtgtaacactccatgcacaggtagatatggcttaatggcggagtaaattgtggaagtcctgaagcagcctgtttgaatcaaatacctgtagagtggaaagtaattgaaaaaaaaatgtttacctagctataaaacagtgatgactacggtgggggaggaaccttagaggggagaaagggagattgaccgcacgcacttttgtgccaaagttgataggtcctatcg

SEQ ID NO: 66780 - DNA, 465 bp, Glycine max
  Clone ID: PAT_MRT3847_31316C.1
ccctcgtgatcgataaaaaatattattattattatgagtattcataaaaaagatatgagtagtgtataaatctcagcgttgacaataaaggacagttaaattcttaaattatggtgtaaaagtaaaataaaatataaaaaaaaagttaattgaaatttataatcagttttaattataacaaattaaaaacaaaaacaaaactcttcaattaaacaataaacatccataatttgtggacttcatttatgttcatattagtttagcctctttgaataggaaaagtgattaacatcctaaatttgtgtagtgtctatgaccacatatgttggttggtaatgagaaatgaggatggtagatatcatgtaagttagctttatctggaactgctggttctaaaggctctgaagcagaggagttaccgaccaatgggcaccattgttttttcttatccactgggtttttttt

SEQ ID NO: 66781 - DNA, 296 bp, Glycine max
  Clone ID: PAT_MRT3847_31317C.1
tcgatcacgcgtccgaccacgcgttcgcccacgcgttcgagaaaaaagaccaccttgttcggatgatgtgttgttctaaatgggagctacctatatggtccgaggaggagttacgagtgttttaccccgaagggaatcactggggagcgagaaactacaactaggagatcgagatgtggaatttgaatttctcgatgattggtgagatgaagatatcactggtcaaaaatgatgaaagttctggcaatgagtttctgcaatccaatgaaatggaattggaatgatgattatgaata

SEQ ID NO: 66782 - DNA, 217 bp, Glycine max
  Clone ID: PAT_MRT3847_31318C.1
gtagaatcagaagaaataaatttctatgtgcggagagcttacacatatagctctatactaattaagaatgagcagaaaacagctacactgctcctaggcagttaacaatgccagacgacggttgtaaaaaacgcatatctcgatgccaccgccagcagagggttgataagatcatagatcaagacgagtaacacttgagacccgttatattaggtgg

SEQ ID NO: 66783 - DNA, 301 bp, Glycine max
  Clone ID: PAT_MRT3847_31319C.1
gtataattgagatctattcataattgagctttcaacatgccttttatggatacgaaatacgcgttccctctatttctgtgtgactaagccaacatatgaaaaactctgccttaccgtgttttccacgagatgtgctattcgcaagccgataggtatgataatagatcaccgacgatcaggaacctactcttctaaactatatgctatttgatgctgctgatgatgagcttggtaacctatatatcccggctaactgtcttacatgttgggacccctgtcagcgagagcctacccttatttt

SEQ ID NO: 66784 - DNA, 195 bp, Glycine max
  Clone ID: PAT_MRT3847_3131C.1
ggcgttttcttcgtcacaacaacccttctctgattcgtcgtcaatttttgtgtctcgtcgtagaaaagcttaggtcagatttctgggtttgtcttttctgagaatctggagtggggctaagtcaagatgccgtgggtttccttgtttgtggatgacaaaagaaattgtgttcgcgtggtggggttttttcgtgtg

SEQ ID NO: 66785 - DNA, 423 bp, Glycine max
  Clone ID: PAT_MRT3847_31320C.1
gatgctcgcggacctcagcccggagttcggcttgcgcgtacagcatttaggatgcacgtccagttgtaccaactactggtggtgtgaacaaaccacgtcggggccgtactggttccgttgctgttagcgagattatgcaataccacaagagtaccgagcttttgatcaggaagctcctacagatataggcaggttcaagaaactgttctgcacttaaagactgatctgcttttccagagcctccgcagtgcttgctttggacgataactgtcacgcataccgtgataggctatccgaggacgctaacgtttgtgccattcaccctaagtggggaacatggatgcccattgctgtccaggttgcaaaaaggatctggggggagcctgctttaaatggaggttgtgaaacgaaatatctagaatg

SEQ ID NO: 66786 - DNA, 2150 bp, Glycine max
  Clone ID: PAT_MRT3847_31321C.1
ctaattttcaaataagtcgaactatctaaatataaaactctgaaccggttaaaatagtttaaaatcaattcagttcaatttttttaccaaactaatttttgcacacccctaaccaaaatcagttgggttggttatttaagctttatgtaaaaaaaaaaaaaaaaaaaaaaaggtgtgaatgaaaacattagatagcttaaagagaagtaaagcataacatatatttgaaatatgatgtcataactcataagtcataacatgctatggcttgtttctgctttccccagatccagattattggatttttcatacctaacatcctgtgtgttactcccaaagtaaaatcagctaaattgcttgttatcttttaaaatgtgaatcaatgatacctaaatataaccttttatgcgtatgttttaatctgttttcaaattcatcattagatttcaccattaggacatatctagatacaacaacaaaatcgatgaatttaccagtgaacatatacgagtatcattgatatgatgatgatgtatatttgctcgcgtcggcaatcctcatggctcaatatagtgcaacctttgctgtggtagtggaagcacacaaagagcacaaagttacatatagtaactatggcgtgagcaaaatttgaaatagaaataatctgtgctgtggtagtggaagcatcgagaacatcgcagcgatggcgagagtgggtagaatgaagttgggttcacaaggcatggaggtgtctttgcagggacttgggtgcatgggcatgtctgcgttctatggtcctcccaagcctgaccccgatatgattgctctcatccaccacgctgttcaaactggtgtcacttttcttgacacttctgacgtctatggtcctcacaccaacgaactccttctaggaaaggctctgaagggaggggtgagagatgaggttgaattggctacaaagtttggaatcaacgttgctgaagggaagagagagatccgtggtgatccggcatatgtgagggctgcttgtgagggaagcttaaagagacttggcatcgattgcatagatctctattaccaacatcgtattgatactcgtgtgcctattgaaatcacgattggggaacttaaaaaactcgttgaggagggaaaaataaaatacattggtctgtctgaggcctcggcttcaacaatcagaagagcacatgcagttcatccgataacagctgtgcagttggagtggtccctatggtcaagagatgtggaggaagaaatagttccaacatgcagggaacttggtattggaattgttgcatatagtcctcttggacgaggattcttgtcatcaggaccaaagttgcttgagaatttgacacaggatgatttccgacagagtctacctagattccaacctgaaaatttggagcagaataagactatattcgagagggttaatgaactggctgcaaaaaagggatgtactccatctcaacttgcattggcctgggttcatcaccaaggaaaagacgtgtgccctatacctggaaccaccaagattgagaactttaatcagaacattggggctttgtcagtcaaactaactccagaagacatggcagagctcgagtcctttgctgctgcagatgctgtcaagggtggcaggtacatggatggttttgctacatggaaggaatctgatactccaccactttcttcttggaaagctgcatgatgaagtgcattgcttaatgcttatactagtgatccttaagtgtttgctgctgctactttaagaaacatatcagtatgagtggcaagccttcacagttgaaaggaataagccattctagtttctagtaattgatgtgtctttttaagtggtttgaactctgtggcagatggttccatatatgtgtttatgtatgtattaaaatgaacaaagactggctatggcatgacttttacttgagtgtgagttgattattgcctcaacaagttagcttgagcatatcttgcttcagaaggcatgctaatctttgagtacagtgggagtgaattttcacatctacatgaagaataagtctgtatcttttaaaatttgaacagttgatttcgttctaagagttttcagtttcacactattatacttc

SEQ ID NO: 66787 - DNA, 291 bp, Glycine max
  unsure (1)..(291): unsure at all n locations
  Clone ID: PAT_MRT3847_31322C.1
ggacggcatgaaatttcccagatattggttcnatgctcttanaaccccaatcccaaggaaccacatcccaaggagcaattngaggatnccttgaccttcttctcttcacttntccagaaagcctttcacatgttcaccttttatttgatgatttgggtgttcccacaagantaccagggcanatggatggttttggagttaaacaccatataacggctggatcnancaaggcctgggaaagcagtgtatgtggaattccactggaagacccattagttggtataaagtgtc

SEQ ID NO: 66788 - DNA, 497 bp, Glycine max
  Clone ID: PAT_MRT3847_31323C.1
aaataaacgcttcttccagcttaatttgaaacgaccacatctacgaccggaaatggcaccctgacaattgccgaagacagattggcccttacactaatacgagctagtaacttgcccggaccgcagaccctcggttgcgagttaaaggaccattcattgtcggcaggaaggggatgactaggagaggtgataaacacatcctcatgctgttgcggcgcacatgaccaaagtagaactgttggaggcgaccatcaacgtttttgtagaaagggctagtgagcatctggtgcaagtttcccggcctagggcacaaatgggctttcaaagttgtggttgctcttagaggatctcttggagctctggaaatcctggcgcgggtgaacagaaacccggtatggctctacttgtctaaagttggcatatacctcgagggcgtagagcacaacggggatgttatcactgactttacccagatcaccgtgcccgggggggacatt

SEQ ID NO: 66789 - DNA, 772 bp, Glycine max
  Clone ID: PAT_MRT3847_31324C.1
ttacggctgcgagaagacgacagaagggggtgtctggtgtgtgagcaaaatcaaaatgtgggcaagcgccgcagaaggtggtgctccggaggtgactctggaaacttccatgggttctttcacctttgagctgtactacaagcatgcgccgaggacttgtaggaacttcattgaactgtctcgccgaggttactacgacaacgttaaattccataggatcattaaggacttcatagtacaaggtggggatcccactggaacaggaagaggaggagaatccatatatggtgcaaagtttgaagatgagattaaacgagagttgaagcacactggagctggaatcttatccatggcaaatgctggcccaaacaccaatggtagtcagttctttattactctggctccatgcccctctctcgatggaaaacacacgatatttggaagagtgtgtagggggatggaaattatgaaaagacttggcagcatccaaacagataacaacgataggcccatccataacgtgaagatactacgtacttcagtcaaggattgaaatgaatcgcatgacattgccatgacgggaaatgttaagactcattgatgaatcttcagaactgtcaattgtatttttatgtactaatcactaatacggggaagacaatgtactttttttcaggactatttttttgacctgcagtgttgagactatttattacagagcaagaaacttgaactttatgtgtaaaaaaaaaaaaaaaaaaaaaaaaaaaac

SEQ ID NO: 66790 - DNA, 778 bp, Glycine max
  Clone ID: PAT_MRT3847_31325C.1
gccacataaggtgctttttcagcatcagacatggtcttccattttgctccagcagctttgcccacagcagacactgctttgttttcaggatgttctttgttgaataccttcctgaactcctccatgaaaacgaagaaagcacttggaggcctctttggctttgcgatttgatgtatctagaggaattcagccccagtatttcaagagtgcatttgtaggatacactgttggcttggtccttacaattgttgtgatgaactggtttcaggctgcacagcctgctcttttgtatattgtaccttctgtaattgggtttttggctgctcattgcttatggaatggtgatgtcaaacagttgttggagttcgatgagtcaaagactgccaattcacctcaagagagtgatgacgacaagtctagcaaaaaggttgaataagttgaagcgtgcccaataccaatactttcgagtcacagaaaaccgttacttttaaagctaacttattcagcagcacacctatgtaactgattttgattttaaaaaaatgtattacttatttttcaaattggcattttgcttttactgcctgactgcccgcccaatctgggtttccatagcaaacttttcaagaattttcttctcttttctctcgagcgcactcgtcaatgcaattattcgctgcctattttgaagtttgtttttcattttcagcggtgttccctttttaaaaaaagaaaaatttccccccccgtgtaccatgggtatgtggggctttttttt

SEQ ID NO: 66791 - DNA, 344 bp, Glycine max
  unsure (1)..(344): unsure at all n locations
  Clone ID: PAT_MRT3847_31326C.1
aagaaaattgaaacgcaagacagatgctgaagttgctgctatgtcacaatctgacagatcaataagtaagggtacggtaatggcacaacaggacactcatattggtggagcagaaaatgatttcgagagaaagcctgattcaccacctttaccaaacaagcacccaccaactagctccaagcgatctggtacaaagggtgaggtgggacgaagtcagactccaaatgaactccaaaatatggataaaggccgagactcaagtcgctattcaatcaatgtggaaaaagggaaaaggatctgaacgtccccaatcattctatcccccaaactaccatctnctagat

SEQ ID NO: 66792 - DNA, 315 bp, Glycine max
  Clone ID: PAT_MRT3847_31327C.1
ggcgattgttgagttgacgagtgaagaatgaatgagagagagtgtgtgtgtgtgtgattcacattctgatcttgaatcgaatgcatctacaacttcatggctgcggcgatgaggatcgatttatgtcttctcacttttgtcaccgtcagaatgattataggcgctctctctcaattggacataatacaaagatgggaaaactctaacggcaccgattctttgccatttaaaaaattgcttgaactcgaaactgatcgtcactttaaattgccaaaaggtgttcctttttggattattgacacggaagcagaattc

SEQ ID NO: 66793 - DNA, 460 bp, Glycine max
  Clone ID: PAT_MRT3847_31328C.1
gccccagtatttcaagagtgcatttgtaggatacactgttggcttggtccttacaattgttgtgatgaactggtttcaggctgcacagcctgctcttttgtatattgtaccttctgtaattggatttttggctgctcattgcttatggaatggtgatgtcaaacagttgttggagttcgatgagtcaaagactgccaattcacctcaagagagtgctgacgacaagtctagcaaaaaggttgaataagttgaagcatgcccaataccaatacttccgagtcacagaacaaatactgcttttttctgagaaaaccgtttcttttaaagctaacttatttcagcagcacacctctgtaactgattgtgattaaaaaaaaatgtattacttatttttcaaattggcgttttgcttttactggctgactgccccagtctgggtttccatagcaaacattctaag

SEQ ID NO: 66794 - DNA, 406 bp, Glycine max
  Clone ID: PAT_MRT3847_31329C.1
ggctcgagctatttgatagttatatctgtattcatgttggtttatctcgaccttcttacaggtgatgagctttggtcagagtacttccgttacactgatatcgctactggtatgctgtgagatgttgatgtgaagtgtgtcggcaactgagcattggatgcagactctggtgctaacccgtgtgctgatggcggagaacatgatggattctatgacccaactgttaatgtgggtgacattgttgatacatctcatacttcaggtgcaacccgttttagctaagagacagattggcacctatatgctgaggtagatccttcaatcagactgccaggctcattgcacagaaacaagcgctgacctgaatgcacattgagggctcctcttagtacatgctctctaagat

SEQ ID NO: 66795 - DNA, 369 bp, Glycine max
  Clone ID: PAT_MRT3847_3132C.1
ggctcgagcactgacgtatggtatcattcttgtgcaagaacaagatattgtcaagagagtcgaattgggttacaagtacttgaacgaggctgaactcgaaaatgctaactgggatgctattatcaggggaactttctatcatttttgaattggaggctaaactaacttggcatgtatataatactagttcctgaaagttgtgctgagccaagtgctataatgggtgacgggacttggcgctaacattattacaatgcttaatgtcttaggggcaaagagaagatgcctagatagaaatgatttaactatatttatcatatgggactgtatagctctatgatattgagttaaagtgaccacttagagttg

SEQ ID NO: 66796 - DNA, 151 bp, Glycine max
  Clone ID: PAT_MRT3847_31330C.1
caaacacaaataccgtctcccatcattccttacagtttcaaacacttgtttttcttctctcttctccttttttttctgtgtggatctacacccactaagcatctatggataagatgagtggttgatgagctattatgattccacacaacat

SEQ ID NO: 66797 - DNA, 260 bp, Glycine max
  Clone ID: PAT_MRT3847_31331C.1
gattcacacaactaactaagaaagtcttggcataggcccccaaaaatgaagagcaccatcttctttgctctctttctcttttgtgccttcaccacctcatacctaccttcatccatcgctgatttcgtgctcgattatgaaggtaaccctcttgaaaatggtggcacatattatatcttgtcatacataacatctatttggtggaataagagcagccccatctgttaatgaaagatgcccttttactgtggtgcaattct

SEQ ID NO: 66798 - DNA, 306 bp, Glycine max
  Clone ID: PAT_MRT3847_31332C.1
caaataaaccaaatccttgtttttcaattttcaacttcacacccaaactcttaatagcgcgttattaataaacctggactttccataaatcccaacttacaccactactcttacacccactcttcatcctaccatgtccctattgctgcctgccacaatccaaacaccctatacatctatattacaaaacttcaatatcagcataatatacttttaccactcccatctagatgatgatttagttatgcttcacagcacacaagcttctaacaaaaatactcaattaacatatgattgattcttcat

SEQ ID NO: 66799 - DNA, 322 bp, Glycine max
  Clone ID: PAT_MRT3847_31333C.1
acacaaaaagactattggcaggtttggtgggctattaataaagccatccacaaacatcgactggttcaatatcacaattggtttggtctccaattgccaggatataacaatggcacttacaagctgaacagctttaacaaataaacaaaaaaggccaccctttgcaagagctaaagtgctttagagctacataagtgacgattaaatacaaaggggtcttgcttaccaaaaaccctaaggtttgctacactatcttaacgaacacgccagatcataaaagtggagagccacataaatgctttgttatgtatcttgcgacgct

SEQ ID NO: 66800 - DNA, 191 bp, Glycine max
  Clone ID: PAT_MRT3847_31334C.1
tacggctgcgagaagacgacagaagggatgccaggaacagctttgttgtagtttagctggctgccaaaataattttggaaaaggatttctttaaaggggccgatggtataaatcggaaggttgtctaaagaatgaaacaaaatccttagttgaggcactggggttggaaggattccttcagaattaattac

SEQ ID NO: 66801 - DNA, 477 bp, Glycine max
  Clone ID: PAT_MRT3847_31335C.1
tgcaagcaaagctgaaattcccaaaatacacaggcaggtgtgttttgttggcatggagaaagcagtgatcctacaaatcaaattgttccttccgatacgtcatcattgagagattttggcgaggtagtttcagctgaagatggaagttttaccatccctggaactggaactcaagccaattttaacaacgaagggaaaccatcaaactcttttaactctgaaaacttatctcctactcctaaagctactccatatgagttaacaagtcatgaaagagattcagcattattgcgatacagagagaagaagaaaaccagaaggtatttagtattttttgttgttacattttctttttttataaaaatattgttagaaatttaatttaatgcacctgttagaagtcttttccgtatttaatgccccggttgagttttcttaacctacaaagctagaagcatactactatattatgagtga

SEQ ID NO: 66802 - DNA, 385 bp, Glycine max
  Clone ID: PAT_MRT3847_31336C.1
atctccccttccaattccctttcttcactgacgctcaaacatcgtacagagtatcttactctaacgtcgatctttctttgcctcaaaagaaccgtccgttgaaaccagtctctttccattcacaaatcgagaaaaatgtccattgttagacaacgaaacgccggcgtcgccgagaagaaccagcttctccgtgaagctgaggaaaaggaactctccgagggagaaagattcatcatccctaacttcaccgtcaagcagctcctcgacgctatcccagctcactgttacaagcgctctgctttgcgatcgtcgacttacatcgttcaggattgcatcctggtcggtgctctcgtctacgccgcttaccagattgacccattcttgg

SEQ ID NO: 66803 - DNA, 443 bp, Glycine max
  Clone ID: PAT_MRT3847_31337C.1
agtttccgtcatcactgtatgacgtcctccttctttggggggggggggggggagtagaactaggcagtatgcgttagctagcaatacatagtgtcatatcctagcatagacatagcaaggaatatctagcgaatagcatttggtgatttaatgtgaactgatggctagacgatgatagagagaagagttggaggcaaaggaaaaaaaaaataatacgaatagtccaacaggaaaaaatagacttgtggaagttgtttagttttagcgaattgctacgccgtgtccggtagcgaattactttagggaaaccaaaccattggaaggagggggcgtagaagagaggatacaggggtggttgccagtagacataaccccaccaaaaggtaacccgttgcagtaccacgtggcgccgtaatagcgtatcatgggtgcattgtatttgg

SEQ ID NO: 66804 - DNA, 198 bp, Glycine max
  Clone ID: PAT_MRT3847_31338C.1
cggttgtagtgtgacatcgtatggtggatgaactcggacatcatgttttgttgatacatggttgcatatcgattttactattacctaacaatacattgctgccaaacatactgagtgctccaaagctcctgcacctgctatatccggctgatatgcttgcatatgtaccgagacttgagctacactagttcatccaca

SEQ ID NO: 66805 - DNA, 220 bp, Glycine max
  unsure (1)..(220): unsure at all n locations
  Clone ID: PAT_MRT3847_31339C.1
tttttcaaccaatttcctccttacccncnnaannactacatcatataaagattgtttataatcactagaatttctttttcccnataccgaggatataataattctagggatcatagctaagccaacatatatcataatataatatacccttttcttattcaaagaatttatggctatgccttcccttctgtcgtcttctcgcagccgtcggacgcgtggg

SEQ ID NO: 66806 - DNA, 424 bp, Glycine max
  Clone ID: PAT_MRT3847_3133C.1
gtttacggcatggagcatataatttacagggggatcagatgtacagagcatgctcgattaattttcaattacacatcacaaaccctataagatggtgttagatgaatacgaaatcgatacaaattgtggggcaagcaccggacctaggaatttatcttgaatccagggccaaacacgaaaccgtaggcgatctcaaacactatctctttcctacaataacaccgacccttctagtttacgttaaatggaaaggctctaccagacacaagccctgtttagaagtttcacactggattcaccctatacgtacgttcccgacttcgtggaggaggaggagactgtggtgccacaagcgcagagttcagggactgctacctcaacatgtgcgccgacaagaagcccgactaggtggaccccaacgaac

SEQ ID NO: 66807 - DNA, 403 bp, Glycine max
  unsure (1)..(403): unsure at all n locations
  Clone ID: PAT_MRT3847_31340C.1
tgatgccgcaccttaaaaccggaaacagggggggttgttactagatttcagggttttctcaatctctccctacttctttgcgtacgacttcttaagggaaagaaaatcactctctgtgctgggcacacacttcgcgaatcactctcttttccactcttagattatttgctgaacactctcctatttgatataggacttcgtgtcagatttaaactttttctgtttctttctcaactctctgatcaatttcaagttcaagctggtgaaatcttggattagagctcccactctactatctgggctaggacttcgngggtagactctgctatttctctcctttctgtcactctctctctctcactgagccgcattgccgttcaaagtggtcttatttgaaaaacac

SEQ ID NO: 66808 - DNA, 390 bp, Glycine max
  Clone ID: PAT_MRT3847_31341C.1
tttttaatttgcctatgctagtgttatcggggtatggtggtttatcaaactcaccaccacagtatctggagttccaacacaagcagttatgctaaatatctgtcagaagggcttgcgtaacaatgtatagcacttaccagtattattgtttctcttatgaaagtaaaaatatcatatccggcattatgatcaacagatccaaatcgataacagatactacttactttgctggtcatcaaacttaactgaggtaaaggtgaatgagatccaatctttctaggattctggagggatgaaaaaccaattttaactatatccagtaactaccatgttaacttggctctaaaagagctatctgcatactctgaatggagagcaaacaaaaatgtc

SEQ ID NO: 66809 - DNA, 815 bp, Glycine max
  Clone ID: PAT_MRT3847_31342C.1
ccacgcgtccgactgacaaatggaggacttgagttcaaagacagaaacccccgaatatgtgatgtgaaccacactattcctagtttccaaattccacccacattataatatcatcttcacactcccaacaacattaaccattgatcaaccttccttcccttaagtagttaacaatttctcccaccttcccttctcagtttctctcacaaatttgcatttttatgttctctttgcacttttctcccatatggggctcaaaatcttcatggcctccttcatgatgacctcaatcttgttctttctcctcttcatccccacaagattgaccgtacaattctccaccctgaggccacctgtaaactacttcagtgtcccccccaagagcagcaaggcctatccagttacttttgcatacttgatctctgcatcaaagggagatgttgtgaagctcaagaggctgatgaaggtgctgtaccatccagggaactactatctgatccatgtggattatggtgctccacaggctgagcatagagcagtggcagaatttgtggctagtgatcctgtttttggccaagtggggaatgtttgggttgtggggaagcctaatttggtcacatatagaggaccaactatgcttgctaccactctccatgctatggcaatgcttctcaggacctgccaatgggattggtttattaatcttagtgcttctgattatcccttggttacacaagatggtctgatctgatccaagcgttttctgggttgccaagaagtaccaatttcatacagcatagcagtcaattgggttg

SEQ ID NO: 66810 - DNA, 375 bp, Glycine max
  Clone ID: PAT_MRT3847_31343C.1
gagaatcataccatatccattcagcctaacgcataggatctaaaagatctgagactttgggaatctaatagcgcgggaaacatcattttcttgtcttaatcattctatctacacactatcaacaccaatcttactattctatcagattattataacattatgaatattttccactatatttagactcataaatgttaattcaaatttaacatatttactttttttccgtttacataactcattattattttctgcaatatcttctattctcttcttgatcttaattattattgcttagattttactttagtcttataattactctttaattttttctttcttatttttatattattttttttttattattatttt

SEQ ID NO: 66811 - DNA, 155 bp, Glycine max
  Clone ID: PAT_MRT3847_31344C.1
actacttcatcagcgctttcgctacttggctacactccaccctggccacctctgctctcgctggcacatatctctcaatgctttctctccttcctcatacaaaggcctttaccgcaatttatggcttgagatctgcttcaatttccccttttggg

SEQ ID NO: 66812 - DNA, 450 bp, Glycine max
  Clone ID: PAT_MRT3847_31345C.1
gttggcttatatgttttgggttctgggttataaacttaacgaggctcatacactacttcagagcaaaaggtcgtgctttccaaaactggatgccattaaaagtgcaacagctgatattgtaagtcaatttgtttttatatatttattgtggtttacaatttgagtggtagctgtttttgttattccattacaggtgtgatcttcctgataagtctttttcgccttgaaagctgacataatttattgtgaaatttcaagatgatgatttaattgatgctgttcttcagtttgtttttttatcttttattggatcagtatgcttttagtacttctcctcttctttttttttttaaaatactaaccttttaagtgactttttatcattaaccattacttatttgtggtaatcagcttacaggcctcagtaaaaagtctgtcactttgtcatgg

SEQ ID NO: 66813 - DNA, 243 bp, Glycine max
  Clone ID: PAT_MRT3847_31346C.1
ttcttatcagtgagtttttaaattcccgggcccccctacttctcctaacccggatcgcttcttcatgttcccaatccaataccctcaaatctcggaaatgtacattaaagcctaagcctttttataaaccgccgacgatgtcgacctctcccaagaccttctccactgcgactccctcaccgaccgaaatcgccacttcataacccacatcctcaccttcttctcccccttcgatggcatcat

SEQ ID NO: 66814 - DNA, 318 bp, Glycine max
  Clone ID: PAT_MRT3847_31347C.1
gtttaatgtgggtctcgagacgtcaaagctagaggctggtcaccacatgctgatgcagcttggaatgatttaggaaagcgatatgctgatcttgtcacactaggaaatgcgtaccgagagttgaatttaggcgcgtcatagaacaactctcttaactgatggatagccatatttcttagcgatggggcacgaaaggctaatgtctccactatcgcacaaattgaccagtgccattcaatgcacaagattaagcatgctgctgactcaaaggctaatatctacctatgacgatcatggatttggagcccatcactgagc

SEQ ID NO: 66815 - DNA, 360 bp, Glycine max
  Clone ID: PAT_MRT3847_31348C.1
atcatcaaacccctcgaaataggaacactacagaattagaagcacagcagagacagactcactcacacacacacaacgttgttactttgtgagagagagagagaaagagattggttgtgttctgctactatggcgagcaacagagagagagaagaatcgctgacattcacaatcccttcttcctcttcccattcttcccccatcaccgtctccgaccaactcgacagttacctcgccgaccccagaagcgcctccggaagcttccagaacgacggccttctctcctccggagacgcctccgccgccgatcccgacttcggtttctcccgccccgatttccggcagagccccctcgtcggc

SEQ ID NO: 66816 - DNA, 401 bp, Glycine max
  Clone ID: PAT_MRT3847_31349C.1
acactctcccctctccattcaccattactcccctcttcttccacttttgctcttcccaccacctctgcttcaagagcaaacgtgattctgcccccgaagcccttgaatggagttcgaatctcgacacccaaaaggaggactgagtcggtgattgtctccgcctcctccggcggagagcgagaaagagagcggcgcctccgtggagaagcttccgttggagtcgaaggtgaaggagagagaggagcaaaagctgaggatgaagctggcgaagaagataaggttgaggcggaaaaggcttcttcggaaacgcaagttgagaaagaagggtagatggccaccttctaagatgaagaagttgaagaatgtatgattgtcaatttcaatgtgctttttttttttgc

SEQ ID NO: 66817 - DNA, 400 bp, Glycine max
  unsure (1)..(400): unsure at all n locations
  Clone ID: PAT_MRT3847_3134C.1
aagnnnagaagaagagggaagagaggnaaaaanaaaagggggggggggnnnaaaanaagaaagggaggaagagggnngggaagggaaggagnngnnngnnnngnnnaaaanngaanannnttttttttttttattgntngnnaagattttggaaggtttagtttttaggagtagtatggaagaggaaggggatnatgatgaagaggtaattgatggagnnnatgaggttattgagtgtattgatagagaagagttggnnaaattttttggnntaaaaaatgatggagaagatgaggaagnngagaaaatngngaaanngatggaatgaggnngggatnngttggnagaggganttgtanaaaagggggttggantgggagaaattgggtggttagaggga

SEQ ID NO: 66818 - DNA, 842 bp, Glycine max
  Clone ID: PAT_MRT3847_31350C.1
gggtgaagagcacacccacacatcacatcaacatggcacagcttatccttaaatcccaattctaattctcttcttcatttcctttccccaaacaaacatggctcttctctctttcaattccttcacactctcccctctccattcaccattactcccctcttcttccacttttgctcttcccaccacctctgcttcaagagcaaacgtgattctgcccccgaagcccttgaatggagttcgaatctcgacacccaaaaggaggactgagtcggtgattgtctccgccgccgcggaggacgcgagttcggctgtggagggtgggtcgccgccgcctcctccggcggagagcgagaaagagagcggcgcctccgtggagaagcttccgttggagtcgaaggtgaaggagagagaggagcaaaagctgaggatgaagctggcgaagaagataaggttgaggcggaaaaggcttcttcggaaacgcaagttgagaaagaagggtagatggccaccttctaagatgaagaagttgaagaatgtatgattgtcaatttcaatgtgctttttttttttgcaggtttatttaagcttcattgttcattttctcattttattttcaaattaatgtgtattgtgtattgtgtattttgataatttccttaattttcgatcaaggatgctgtccccaatttggtgaataagggttttgatttggaatccatgttaacatgattgccatatcaccaaaatggatggaacttaatatgaacacaaaatggatgatcaaatgccccctttatgaaatccctggtgttttagattgcttgggaatttgttttcaaaaa

SEQ ID NO: 66819 - DNA, 222 bp, Glycine max
  Clone ID: PAT_MRT3847_31351C.1
aacatacaattgggctcattaccgagctatagctcaaaacccacaagtcaagctcttgcccaacttgtcaagacaagagataatattcttttccaaattaaataaattatactcacaaacggatgatttccaaatcactatcattcctaaaataaatgagttgggcaagtcttcagaaataaaaacattcaaaattccgtcttgagggacccatactaaaaa

SEQ ID NO: 66820 - DNA, 2840 bp, Glycine max
  Clone ID: PAT_MRT3847_31352C.1
aaagaatctaagcccccgtgttctatctgaaataaagaaaaatgtagttgatgcagaaaatcctgaacttgaaaacccaaattcaagtagcaaaaatcatggtcatagtcattctaaagcgagaagacgacagaaggggaaattggttgttgaaatcggggacggaaatatcgaaagagacagacagagcgacgtcggagaaagaaagaaaggaatgaatgaaagagggatggtaggagaaaaatgagaatggcgtgaatgtgaggagagaagagcctgaatattagaatcggatacccttaaagaagcggagataggagtgtgcgcctccaaacccaaggggcttctgaggggctctatatcggaggcggtgctatattcccctccggatttccttcagtgtgaaagcagggttgttttttctggtgttagtgttagctctatggatccatgcttcctgtatgaggattatcatgttaccttctggtccgtaattatgcaagcaaagatcgaacattattaaattaaaaattagcatttttttaaacaattaataaaattatcgggatttatctttttcttaactttaaccctgtttcttctggtctcccgaatcagaaaccctaatcagtgtttgggatttcagataaagaaatttaaccatgatgaagggtctcttcaagtctaagccacgcactcctccagatgtagtgcgccagaccagagatcttctgctctttgttgatcgcagccccgaaacccgcgaaagcaaacgtgaggagaagatgatgtccgagctatttaaaaatatcagggagctaaagtcaatcctgtatggaaatagtgaatctgaaccagtcctcagaagcttgtgcgacagttgactcagttgttctttaaggaggacacgttgcgactgcttatcaaatgtcttccaaaattgaatttggaggcaagaaaagatgccactcaagttgttgcaaatttacgaaagcagcatgagtccatgatcatgttgtcggattattagctcgagtaaattgggtattttatggaatttttgcttgttgtgtatgatgaacccacacatgtgattttgatacgtggcggtgctgtgttggtggggaatgcatcagaacaccagattgtatcaaaatatgtctcttcgtttgccgaagtttttagactatttctttcatccaattcagcatcctacttttgacacagctgcaaacgtcacggcaatcttgacaagacataaatctactgaagcagcattcctatctgagaattatgaatggttttatgcagaatataacactaagctgttggaatcttccaattatattacaaggcgccaagctgtcaagttgttgggagatatgttacttgatcgttcaaattcagctgtaatgacacgatatgtgagctcaagagacaacttgaggattttaatgaatcttcttagagagtcaagcaagagcatacagattgaagcatttcatgttttcaagctatttgctgccaaccaacataagccagctgatatcgtcagtatatttgttgcgaacaaaagtaagatgctgagactattggaagacttcaaaattgataaagaggatgaacaatttgaagccgacaaagctcaagtgatgagggaaattgaagctctttaaacaagggaacaacgacgcacctgaactgcaaattgtgttaagtggcaagttgcaatgtggcatttcactttagcgaattgtgtattgtaatagttctgttagtctttatcacgatatgagaccatccgtttcatacagacttcaatgcttcctttctgtaattttataaccgtcctttaaaattgtagataaataattgcttaaatgagctacattattagtgtctttgtaggtgttagtaataaggtcttccaagctgccgtgtaaattattaattgtgcaaggtcatgcaataatctgacaatcacatttgtttaactaaactgttactcaaaaaaaaaaaaactacgctgcctggttgggaaaaaatttagtattttgtggagaaagatggaagagcatgctcagagggaaaagaaaaagagtggcccccgccatgggaggcgaaaaactcatcaaagagcaaagtcacccttaaatgtggtttctcaaaccccagtaattccagattttcttttgtagcattaaaggattgatttttatttctcgtcacctcttgctattgactgaggctgtttacatgttgtgtattcttagtgctgagcccttaagttagttctgtagatttttcacattttttgtcgttgtttataatttcttcatactatatttcttccttgtctgtttttggccctacatgtcacagaatgagcatatttaataagtaaattttcaagttggatgttgtttggcaaaaaaaaaaaaaaaaaaaaaaaaaaaaaaaaaaaaaaaaaaaaaaaaaaaaaaaaacaaaaaaaaaaaaaaaaaaaaaaaaaaaaaaaaaaaaaaaaaaaaaaaaaaaaaaaaaaaaaaaaaaaggggcggcccgttttaaagaacccatgtttttacccccgtctttccaacttataacttttttttttgggcccccaaattcaatttactggcccgggttttaaaaaggtgggtttggaaaaaccctggggttccccaaattaaatgccttgcgaccaattcccctttttccaggttgggaaataaccaaaaagcccccccccgaccccctttccaaaaattgccccatcctaatgggtaatgggacccccccttttaccggcctttaaacccgggggggtggggggt

SEQ ID NO: 66821 - DNA, 498 bp, Glycine max
  Clone ID: PAT_MRT3847_31353C.1
aaaattactaaatacagaaacaacgctgaaaaagcccacttactgcctaaccctgaacaaacaggctgggtagaaccagaacctatcaccacttgaaagaattacttttaaaaagagactctgcccagtttgagttacctgaaatacccaccctattatacaataaaaaacacacatctcggacttactaggcataaaattacaaaagaaaccccactttatctgactacacattaaatcctacaccgtgtgtgtccaataacgatacctcataacgctatctgtttcgaggggaatctcgttatctgacttcctcctcttgaagactatgacccttgtgaaagctttataaaatgacagcaacgccagtcaatgctccaataataccaatgtatgcctgcttccagcaactgaaaagagcctctacgtttttctctatgaatgcgacccctagcaaaatgtagacgacactgctgatcatggtattcataacctacc

SEQ ID NO: 66822 - DNA, 315 bp, Glycine max
  Clone ID: PAT_MRT3847_31354C.1
gccgggccggggagttcacaatcacccatctgccctctctctctctctgtctaacaacccacgatggcataaacgcgagaagggcaggctccgcatctggagacaggagctgcgcagacgaaaacgactccccgaggacgctcacgagacaacatcctacggagccatccctaccgccctcaccccgatcgaagtcagaacacgcgtcccctccggaatcaacgactagtcctaccacgacagcaccggtgcagtgctccatcactcctcgaccagcgcgtccaagagccgcccgacgccgccagcgccctaggg

SEQ ID NO: 66823 - DNA, 352 bp, Glycine max
  Clone ID: PAT_MRT3847_31355C.1
caacggggcgacagagggtgatacagggagcaaaagggtgactcgtgagtccttagtatcgggtggtgacaaagaaagagctcaaaaacccgatgatgtaatgtcgactctcgcatggaataagccatgattctcttgcgtctgaatgcattaggttttcgagtcaaaccttcgtatattgctttttgagggaaaatctttatgtattgatacatggcgaatgaattcacattgtctttactagaaaatgaatgttaaggagatatatattgggcttttcacgagaccaatggtctataattaactgttctacatttataacttggataaaatatttgatgcatgcctaggc

SEQ ID NO: 66824 - DNA, 155 bp, Glycine max
  Clone ID: PAT_MRT3847_31356C.1
ctaattttgtatgcatatttgcaatactgttgtataagatacaacattatgaatgtatatacggactgtatgggacaaagactataattcttgagtcctcaattgaattatccgatcacttctttgtattaaaactgttcgtatttttttcctct

SEQ ID NO: 66825 - DNA, 1448 bp, Glycine max
  Clone ID: PAT_MRT3847_31357C.1
cggctcgagcaaagacttagcatcacactccttttggttctattcatgagtctccattctcaagctagtgttgagtcttctaattggaaatatgcaccaaacattggaagtgttagagctgcgtattggcctgcgggtgatgacctttcaccctcttccattgacacaaaatacttcactcatatctactatgcctttatccaacaagaccctcaactttttcaccttagtgtcaccgaatttgatgaaaaatggataccaaaattcatcaatggactccgctaccgttacccgccggtgaaaactctcttgtcaattggaggaggtggtagcaactcaaccgcattctccctcatggctagcaacaaacacacacgacaagtgttcataaactccaccatccacgtggcgcgccaatacgggttcaatggtctcgatttagattgggagttcccagatgatgaacacgatatgtcgaaccttggtgttttgtttcaagagtggcaccaagctttggtggtggaagcaaaaataagtagaaaaccgcgattgcttttgacagccgcagtttactatgcttccaccatcaaactcatcggtgatggaccaagatcatatccagcccaagccattcggaactacttggattgggcaagtcctatgtgctttgattaccatgggacttgggacaattttacaggctttaatgcagcattatatgatccaaagtccaacataagtacccaatatgggatcggatcttggatcgaatcgggtgtgcccacccaaaagttggttatgggtttaccgttatatggtcgggcatgggcgctccgagacccgaacgttaatggggttgaggcagaagcagttgggaaagccacggatacagatggtactatggactatgatgaaattttggtgtttaacaaagagaatggtgccactgtggtgtatgatgatgtagctgtggctttctactcttatgcgggtacaacttggattgggtacgatgatgggccatccataaagaaaaaggttcagtttgcaaggtttacgggcttgaagggctatttcttttgggctgttgggaaggataaggattggaccatctcaagacaagcttcaaatgcatggagacactgacggctagctacgccgagttatttttattcatattgttgttcgacttgctaggattttacgtaagtcagaatttcatgtaatcctcaagccttaattgatgatacagaatcctcatattcggagttgtggtgccacaacataaataggactgtaacatacttgaatactttgattatgtaccaataatgaataaaaaaaaaatatttcgaattccatcaaaagattatatatatatatatatatatataaccaaattaatgatattatgcatgagtcgttaagagtgcatttgattcccaagt

SEQ ID NO: 66826 - DNA, 640 bp, Glycine max
  Clone ID: PAT_MRT3847_31358C.1
acggctgcgagatgacaacagaaaggggcacacacttcctcttaaggatatcttgatccaattggaattgaaataacaattcaaccagcgatggcttctcacagtttcatcattttggcccttttcatttctatttccttctctagcatggacatgacattagcagcacgccatctccagcagacaacaaggtcatctttgcaactattcccatttctgccaagcatcacccttccaactccacgactgccaaacatcaccctcacaaacgtcaccctcccaattccaaacatcaccccgccaaacatcacctttcccattcttaacgtcacccttccaattccacgactgtcaaacatcacccttccaattccaaacatccactaggttcaagcatgaccccctgaagctgctatgcttcacttggataaataaaagcaccaatctctactctgaatttggattctggcttcctgtcattaactatacacatattatgctacattatctgttggagatgatgttttcttttcaatgttccaattcttcttcgcctttgaattagtacgtgtatttctgtggcacttttgcgttactcgtgtaccttgagtcccattgctatacaacttattttatgatg

SEQ ID NO: 66827 - DNA, 324 bp, Glycine max
  unsure (1)..(324): unsure at all n locations
  Clone ID: PAT_MRT3847_31359C.1
angcagngtacgtaagctcggaattcggctcgagntcagatctctacttttatacaaagaganggggtttactatggtcaatgcagtgagatttgtggaactaaccatgcctttatgcctattgtcatagaagcagtttctactaaagattatggttcttgggtttccagtcaagtcaactaatccctgctggctgtgtggtggcagtagtggcaagtaaggtgaaatanaaataggtgtttctacttttgaatatttggnntgtgntgttncataatcatcttgagatcanactcaaacgacaatatntgtgtctgagatccn

SEQ ID NO: 66828 - DNA, 294 bp, Glycine max
  unsure (1)..(294): unsure at all n locations
  Clone ID: PAT_MRT3847_3135C.1
aacatgtttagagaagaaattgtatttatatatnntctgtctntagacgttggtgaagagnatattgtgttttaaatcataattgtcacaagagaacnaaagtagcatttggatttggcagtaactnatacctggtgactgattttgttgggttggtcgnanttagagatgagaacaagtagcttntagtattttaacatcaatgtcaaaggtgcttggttnataacttaataaggcncgtaagtaagtgccgacttcngtccatgtccaatnaaatagnnaatagtggattcc

SEQ ID NO: 66829 - DNA, 842 bp, Glycine max
  Clone ID: PAT_MRT3847_31360C.1
ttttatgattttctatcttcttcccttattttttctatgttgtttgtttcttttttttttttaataaggcaattgaaacaaagatatataaattttcagaagattagacgtttcatgaccctctacctctccgaaaaaataaggcataaacccagcaagaatgaaaataagaaaagcctattttctagaagaaaagcctattttatagagaaaagaaacgaaggaattttgttgttcaatattgctggtcagtcaaataatgacatgccctttacctcacgacaacaaaaatacaaataaatttgttgttcatgcactctgctcttcaacatctccattttcaccatcttcagcagctgcagcagccatcaactcatcgaagtttgctgtcttccctagtactatttcaatcttggccttttgaacaggtcgacctctagagtcatcctttatgtcaacagttgatgtcctgattttcttttcaacagcaagtctgttgtttttcaaaatttcagcaacagttactactgtggcaatagccattcctagagctgagagctcgacctcatcatgctgttgcatatatctcttggccagattaacgtagaagaagaggggcttcttggtgttagagacctgaatgcgatttttcttatacgaatcagagatgttgatgttgttcactccctctgttatgtcttccattgttctctctcactctcactcgcacaaccaaaaaaccctaacgatttgtttatcaattctcactcgcaaagcgtaaccccgaaacacagaacagaatgcacccctttctcccccttctgtcgtcttctcaacgccgt

SEQ ID NO: 66830 - DNA, 212 bp, Glycine max
  Clone ID: PAT_MRT3847_31361C.1
atcctagtctggttctagcagttcgcaaaaaagaactacatgtcatgatgcctgctgcctacttgcttagcagtagaattcattttaggggccacaagatggctatgtgacactcaaggtgatggtgtgttcaggacctatagataatgtcgcactaacccggagaggagtgggaacacaaagtcctacggtatagagagagagcttattcc

SEQ ID NO: 66831 - DNA, 739 bp, Glycine max
  Clone ID: PAT_MRT3847_31362C.1
gatcattaaggcaattgaaacaaagatatataaattttcagaagattagacgtttcatgaccctctacctctccgaaaaaataaggcataaacccagcaagaatgaaaataagaaaagcctattttctagagaaaagaaacgaaggaatttttgttgttcaatattgctggtcagtctataatgacatgtcctctacctcgcgacaacaaaaatgcaaatcactaaacggtacatatcttcaacagattcgggagtaaatttttgaagaacttcatgcactctgctcttcaacatctctattttcaccatcttcagcagccgcagcagccatcaactcatcgaagttttctgtcttcccgagtactatttcaatcttggccttttgaacaggtcgacctctagagtcatcctttatgtcaacagttgatgtcgtgattttcttttcaacagcaagtccgttgtttttcaaaatttcagcaacagttactactgtggcaatagccattcctagagctgagagctcgacctcatcatgctgttgcatatatctcttggcgagattaacgtagaagaagaggggcttcttggtgttagagacctgaatgcgattcttcttatacgaatcggagatgttaatgttgatgttgttcacaccctctgttatgccttccattgttctctttcactctcacaaccaaaagccgctcgagccgactcggctcgagctcgagccgaatt

SEQ ID NO: 66832 - DNA, 258 bp, Glycine max
  Clone ID: PAT_MRT3847_31363C.1
gtcattgtctgcctacccgaattttacacagggactgtgagtggcgtttatcattacacaattaaataaagtacataattacgtgatctttgtgtttctatatcattcgatcagagatgaaccaaaagaaacatctttgcttaatatgagtctaaagcagaagcaatgggacttaaatctctgaagcagacaaatactcataatggactaaagaattttgaacccggggggatgagctacttaacaaaaaccccgggg

SEQ ID NO: 66833 - DNA, 132 bp, Glycine max
  Clone ID: PAT_MRT3847_31364C.1
cccacgcggccaggcttccctcttcaggatccaaagggacgcacacacggctggaagggcagacatgaacgatagaatcggagaaactcggtggccagctgatggagacacacaagctaggacggacaaagc

SEQ ID NO: 66834 - DNA, 383 bp, Glycine max
  Clone ID: PAT_MRT3847_31365C.1
attgccgcagtaaagtagagttatggaaacagcgctcacttgcttcttctgtggtagactcccacctgcaactgcaagtgagcactttcgttgtaataatgcctccccctctagacacgtgcatttctctttgcctccttcatttgttattggaacccataggctaattcgaaacgccactaacaccaatgaaactaaggtggtttccagtactaatgtcaaaagtagaagaaggagaagaagaagtggctttgttgacaaaacttgtcaaactcgggaggtggaggagggtattcttcatcagaacggagaccctattgggaagaaggatctcgggaagagtgtgataaggtggattcgtgatagcatgagggccatggcgt

SEQ ID NO: 66835 - DNA, 746 bp, Glycine max
  Clone ID: PAT_MRT3847_31366C.1
gggtaagtggattcgcgttttgcagagggctatttccaagactctgtctcgggggcacaattcaattgtggctccgatcaagggcgtggtggtgaaggagccggagtggatggtggcagcggcggcggcagcggcggagaagcataacgagaatctgagcgtgaatttgagtagcgaggggagtttggaggactatgattcgatggagagtcagaatcttcaatgggcgcaggggaaagcaggggaggatcgtgttcatgttgtggtgtctgaggaacacggttgggttttcgtggggatctatgatggtttcagtggacctgatgcacctgattaccttctctccaatctctacaccgcggtgcataaggagcttaaagggttgttgtgggatgacgggtctgcaccggaaaattcaacgataaaagaggacatgttgcgagatgttacaactgtgcagatgttacggttgctgatgaagatgatgcttgttctcactgtgttgagcaagataataatgataataatagtaagagtgtaataagagaggtaggaattcgaggaacaagttccagggtgctgcgaagaaatgggaggagaatcaacggaggtggaagtgtgagtgggatagggaaaagagcttgatcggagattgaaggagcaattaaatttaagtcgatctgggtcaggtggagcagcgagttctattaatattcggatgttttggagctctatctcggctttga

SEQ ID NO: 66836 - DNA, 370 bp, Glycine max
  Clone ID: PAT_MRT3847_31367C.1
ttcggaaacgtcttttactgtctcaacatcttctgatagagttcataaacgacaaaggggtcggtgatctgctcgcgatgagagcccactgaaagaagaagcagtatgacgtgcaggttgcaacgaggaagctgtcctacagatgagacagagcatccaagaaccgcactagacctacctggtttctgatgcttttacaatcgcttatgctgacgaatgcgacacccagcagccagcggaactgggttcgccttctatgaggtatgatacatttatgattaggggaaaaaccccccgggaggggtttaaaaaaaatttttttatttgtggggtttctcccccccccccaatccccacccccccccccccc

SEQ ID NO: 66837 - DNA, 544 bp, Glycine max
  Clone ID: PAT_MRT3847_31368C.1
gagaactagtctcgagtttttttttttttttttttttttttttttttttttttttagaccatttaattctataatttctatttgatttcattttttaaaaactcctaaatggatgacaataaagtttgctatattcttaaaattttcgtctacattcattctctcaaaaaaatgagacacttttaaaggaacaagtcttcagctgcacactttcaatgggcaatttgtcatctggataaggacactcaattttctctttcagaggcagcaactcacaaggcttaggataaacattgcttgtaaccccctcaatgtcagtgcaattccattgcggtttcttttttccactatggatagtcacattagaaatacagattcccgtaaaaggatcattagcaatcccttcaagtcttgctgaatatgtgacattatctgcaatgacatctctgtagtttattcctgtaatgttgggaagtgctttgggatcaaaatcggtgttagggtgtgagccataagaacctgtcatccaaaacacatacttcat

SEQ ID NO: 66838 - DNA, 229 bp, Glycine max
  Clone ID: PAT_MRT3847_31369C.1
ggggcccaaaagtcacttttaatccaatttggggagcttttgaaccctggaaataattttctgtgttttttaacaagctttacttatattagctttaacccacatggtggatttgaataatctggctctggtgacattcttcaataataaatttaatattttttaaggttccttattagtggaaaacatgagttcaaagagttcttttttgggagaccaaattctttcc

SEQ ID NO: 66839 - DNA, 381 bp, Glycine max
  Clone ID: PAT_MRT3847_3136C.1
ttttcgcgttcatgccctgaatttggcttagatattttcgagaccatccatttgagcattggatggtgattacgatgctgcttcatgcataacgaggaaccctatcctgttagaaaggaatattctacagctggatgcatggagatatactacgaatgacatatatcctgcaagagggacagtctgtcagtgttacaggtctccaggacgctcggcaagtgcttagacagaatatacagctaaggcgcaaaattgtgaaatggggaatgtgattgcactagcaataatatagagtgttactatgactactctgatggagtcatattactcaactaaaagcactgtttactcatcaagattttatgattggaagaatggatt

SEQ ID NO: 66840 - DNA, 328 bp, Glycine max
  unsure (1)..(328): unsure at all n locations
  Clone ID: PAT_MRT3847_31370C.1
tagaagatatgatggccatacaacagtcttgtgccccgagaaacatcttgaccaagtaaactatgcggggggaaccattaaaaatactaaaactacaatagggatgcttagcaaaaaatagataattctagttgatgaaaagaaaggggcgtgcaactctacaaaccgtgggcggcgttaaaaaatgtacgaggataatgagcgttgtacatatactgtggcgtaaattatnggtgagagggacatgttaatcaatactactagaggtcagacgcgagggtgggcgtgttcttaccaagagccgatacctgtggagcgaggagtcgat

SEQ ID NO: 66841 - DNA, 374 bp, Glycine max
  Clone ID: PAT_MRT3847_31371C.1
ggctcgaggactcatggcaccctagttagagtttaaccctgtggtctcattctttatgtctgtgtgcatgacatcacaattcgcatagactgagagtcctttttctcactttggtatccaaaaatgtaacacacacagggctctaacaaatggcatatcaccaactagaaccatgtgtattggagaatgggaaaccatgggtcatgaccacggagaccaggcttggccgctctgacacagaatgtccttcaactatgtgcgcatgacagctagccggactcttgctcataggttccatgtgccactctgagaaactgacctgcacattggcatgacggtcttattgacgccagactctgcattctcatccctgc

SEQ ID NO: 66842 - DNA, 316 bp, Glycine max
  unsure (1)..(316): unsure at all n locations
  Clone ID: PAT_MRT3847_31372C.1
ctgaaatccctctaaccnatnncaaaacnaaaaaanatananaaatctccaaaaaagaaaacaataataatactaataaacccaanctcatcaatgtcacttcaaaacagcgagacgatttatccaaaaatgtaatagcaaaattaaatatataagaggttaaaattaacgtttttcctatgaatctcatcagaacgatgattaatgtcgaatatccccatattcttgtttctcaagaaacattttttgccatcaacaactctttgtaaaaattcctttaacaattcttccaagaaacttattcttttttttttct

SEQ ID NO: 66843 - DNA, 1372 bp, Glycine max
  Clone ID: PAT_MRT3847_31373C.1
agttgctcttcctttgggtatggagccatgcaagaactgggaccttttagagtcaacagtgatggaaaaacactttacagaaatcaatatgcatggaacaatgtggcaaacgtgattttcctagagtctccagcaggagttggcttttcatattcaaacacttcgtctgactacacaaaaactggtgacaagagcacagccatggactcttatacttttcttctaaactggctcgagagatttccacagtacaaaactcgagacttgttcatcactggagaaagctatgctggacattatgtccctcagctagctgacactattctcacttataataagcttacaaatcacacagtgatcaacctgaaagggattgcggttgggaatggctggatagatgataatatgtgtggaaagggaatgtatgaatatttctggacacatgctctgaactctgatgaaacccatgagggaattcaaaggtattgtgactttgaaagcggtaacttaacaagtgaatgcagcaaatatcaaattagaggggatattgagattggaaccattgacatatatggcatatatgctcccccttgtgattcagctgcaacaaaagctggtgccagtcctgccactaactctgatagcaattacgacccttgttctgacgattataccaattcctacttaaatctcgcggaagtacaagaggctctacatgctaaagcttcagtatggtatccttgcagaggggtgggatggacagatagcccagcaacaattctaccaactataaatcggttaatatcaagtggcataaacacctggatatatagtggcgatacagatgggcgtgttcccataacatcatctaggtattcaataaattccatgaaacttccagtggagacaacatggcgtccatggtattctagcaatgaggttggaggatacttggttgggtacaaagggctcacactaatcactgtaagaggagctgggcacatggttccaagttaccaaccgcagagagccctaaccatgatctcatttttcctacgaggagaacttcctcctgagttcacctcttaggtctctatttggtagatgtcctcaaaatagatgtgaaaatttgatgagtttcatttgcaaattcatcaataagattttcacctctaattaggaaagaaaaaacattcttttagatcagtatgtattcttataaaggtaaaaattcaaggacgagtttatataaataagttatataaataattcgtttatctgtctatttgaagggataccaaaccagcttttaatattggagcagcaaaatctagattttgtgtctcctttcaaagttcaactgtttaaggtc

SEQ ID NO: 66844 - DNA, 550 bp, Glycine max
  Clone ID: PAT_MRT3847_31374C.1
ccgaaaccagggtactctataaattactttgttacatccaagacaggtatcatgcatggctttgtgtaaccattgtattgttgtttattcaataatgcagtggcgatacaaatgggcgtgttcccataacatcatctaggtattcaataaattccatgaaacttccagtggagacaacatggcgtccatggtattctagcaatgaggtaattaattaagctttattatttactattcagaacttacaagcaacacctaagtaatctactgcttacaatatgtaggttggaggatacttggttgggtacaaagggctcacactaatcactgtaagaggagctgggcacatggttccaagttaccaaccgcagagagccctaaccatgatctcatttttcctacgaggagaacttcctcctgagttcacctcttaggtctctatttggtagatgtcctcaaaatagatgtgaaaatttgatgagtttcatttgcaaattcatcaataagattttcacctctaattaggaaagaaaaaacattcttttagatc

SEQ ID NO: 66845 - DNA, 761 bp, Glycine max
  unsure (1)..(761): unsure at all n locations
  Clone ID: PAT_MRT3847_31375C.1
tacggctgcgagaagacgacagaagggggtgtgcaaaacagagatgagtgcaaatcagaggagtactgctccaccctttaaggaggaatttgcaactgtactaaggatgactcattccttaaatgatgctcaacctgtacctgcaacaccagcatcattttgcaatcctactaattgcaatattggttgtgacgatgttgttcagaaccaaaaaaatgagaatgaaaccccacctgcgacacaaaattcaaagccaaaacgaggaagacccttcaaaacgccacctgaatcgattaaaaattggtatgttatacgcaaagaacgaaagatcgccaacaggttcgatacgagttattttcataaggagacaggctttcggtgtcggtctttgaaggagattaagaattacgagaaatatggaagtcctcctcgacgtcacaaagtgaaaacacaagccaaagaagaaagcaatgacaaaaccaaaaatgaaacagaagaaatggttgttgctcaaagaaaagcaaaagcagaagttatgagaacttttgttgaaaagtttctttcgaaagcttattacaatcagcttcacatgttcgacccataatcaataaaaatcaactattatataatgttcaaatcgactgaaaaacattgtcatcagtttatttaatacctatgttgacaacttccatgtgatttaggattttcatatgattttattttgactttccaaaaaaaaaaaaaaaaaaaaaaaccanaaa

SEQ ID NO: 66846 - DNA, 243 bp, Glycine max
  Clone ID: PAT_MRT3847_31376C.1
ccaatgtcgacaaacggtttgccattactgcccttggttatttgattctgatgcaagcttagctcatcaagttggtgcaaccttacccgtgagtgtgagtctatgcttcctccactcacctgcatgtataagtggcataacggtctatccgtcccaatgtgggttgcagactataatttgacatgccataacagctcacatttaattcaaaccttgaaaaagtaacactagtcttgtaaaagc

SEQ ID NO: 66847 - DNA, 201 bp, Glycine max
  Clone ID: PAT_MRT3847_31377C.1
gagtgagctttcacacatgacagataaagacgcccgttcatacatggggtcaaaccccctctcattggaacagtcaagcggcaagaggaccaaactcttaaacctgcttcttcgcgttctcattcaaatacatcacctatataagactaccctacatcggtgagatctttaaatggccccttaagcctccctaaagagaat

SEQ ID NO: 66848 - DNA, 349 bp, Glycine max
  Clone ID: PAT_MRT3847_31378C.1
gaataatacaaaacgaactcaactgttatgagaaataaccgatcaattatccatatacatttctgcctgcatagtaacagcttgtcaaaatttctggtcaagtttcacatagctacaacggatctaatttgtactcgtcaatttcaccaccaacacagttcctcaatatgtgcgaatagcacctgactggattttttcacaaactttattgatctatgacacacgcctgcaattgacgttataccatttttctccacaggaagagtcgactcgaggcccattcatgcagcaccacagtgattggccctattaacaccgagttgcatcggactatcatagcttatcatgc

SEQ ID NO: 66849 - DNA, 162 bp, Glycine max
  Clone ID: PAT_MRT3847_31379C.1
ccgaatagtgtggagaacatgggtctgtcactttattccgtcagccttagagcggtcacgcacaaacgaagacgcacaagtttttattgacggttgtgacactgttgacactatcattttacggttctgttgagtagaaagaaagggaggaccctcttgggg

SEQ ID NO: 66850 - DNA, 585 bp, Glycine max
  Clone ID: PAT_MRT3847_3137C.1
acggctgcgagaagacgacagaaggggaatgatcagtggtgtctcaactcctggacgaggaaactgacgtagcttgtatcgacctttgtgaattgatggagattccattttcttcacgacaaactttcacaaaccttattaaacatcactttctcccttcccttccttcccttgtttcccagctttgatttagagaaagagagcgaaagatgttgcagtgcatatttcttctgtcagattccggagaggtaatgctagagaaacagcttagtgggcaccgcgtagatcgctccatatgtgcctggttctgggaccaagccatttctcaacctgattccttcaagcaacagccagttattgcttctcccacacattatctattccaagtttttcgtgaggggatcacttttttggcctgcactcaagtcgaaatgcctccattgatggccattgagttcctttgtagggtagctgatgttctcaatgattatcttggggggttgaatgaagacttgatcaaagacaactttgtcattgtatatgagcttctggatgagatgatagacaatggcttcccgctaacta

SEQ ID NO: 66851 - DNA, 1470 bp, Glycine max
  Clone ID: PAT_MRT3847_31380C.1
ggaattcggctgccgctgagacacgaagagtctcttggttcagagctccttctttgttctttctccttcgctggttgatatcagcagtgtttgaagaaattccccattgacgaagctcatgggcaagaaaggaggggccaaaaaattggagtctgcgtctcacactccaatatcattgagagaagaagccaccggaaaaatacaaaccaaggcagcctctaacaccaagtccaaattgagatttgaacacttgaaaaacctagcagtgtgggccaccaccataccatctttgggtgccttctatggtcaccaattcgctacctttggagaggccaccggaataccacctgatccttctttaataacttgccaaagatgtgaaactattcttcaacctggatttaattcaactgtacgaattgagaagaataaatcaaaggtcaggcataggcacaagaagtcttgtaacatcactcaaaacaaggtagtgtacaagtgccatttttgtttgcatcaaaatctgaagagagggacccttaagggacacactgctggcttccgtcctccacgtggtgtatcgttgtttgtggtgacccctccatcaatatccatctcaagtgattcttctaaattagagaaagccattgtaagcaaagatgtatccaatgaaatacatctgtttccttcaagagttgtggctaaggatatcactcttgtgaacggtttagctactccgtcaagtacaaatacaacaacttcgttagaaggaaagaagaataggtcagagctctcctatagacacaagaagattaaaactataaacaagtatgcaaaagaagtagcaaaatcctcaagtacatccagcaaaagacgaagaaaatcttggactagtttaaaggaaattgctcagagcaacgaacataagaaaaaacaaattgctaatttaacaatccctttctatttataagcagggagaattcctgtatatgttaaattgaattgtatttgtttttacatgttgcttgtaggctttatgttttgtctgttgattacactttcaagcaaatttgcttttaccgtgtttgatgctctgttggacttttgttctcttgtaagataccaatattttttttttccttttgcaaatttagcttgtctctatgagaaacaatagttaaactgtctcattgatttttcttaattgctcaaagcaacgagcataagaacaatccgattgctaatttaacgatcccattctttttataagcagagatattttctatataggttaaaatgagttgtatttctttttacatgatgcatgcaggctttatgttttatctgctaatacactttcaagcaaatatgtttttactgtgtttgatgctctgttggactttggttttcctgcatggataccagtttagttttcttttttctatttgcaatttaagcttgtctttatgagct

SEQ ID NO: 66852 - DNA, 347 bp, Glycine max
  Clone ID: PAT_MRT3847_31381C.1
gttagaaactctggagagaggggttcatgaatgctttattagggttctcatatttgcttcgtttcatcctcttctactcctgaaatcactccttttccttctcttttctctcttctctttcttaatagtcctcgggatccgatctctctcttctcttgtgggttttttcttttttgatttggaactctcttcttgtggatagctagcaattactactacataagacgcagttggtgaaagcaaagctgtttgaggacaaagaaggaggagattgagttcaattcccgaggaaaacatttactactaactttttctactttgcttttcttgtcttctgtttttgcctc

SEQ ID NO: 66853 - DNA, 234 bp, Glycine max
  Clone ID: PAT_MRT3847_31382C.1
gattcctagcgcatagccgccatcctttcaagcgagtccgcagctatcatggagagtggattcctaaaaaaaatcgctcccactgtgggcagctaaccttacaatccgggcatcgagagttatgctcattaaggagaccacatagtattacgaaacatgctacacttggtgagctaacaaaaaaaaggcatagctgtgctccacccacccatcgaaaatctcttgtttttaaca

SEQ ID NO: 66854 - DNA, 866 bp, Glycine max
  Clone ID: PAT_MRT3847_31383C.1
ctctccctgccgccgctgagacacgaagagtaactgcctcgcaacgccgcccttgccatcgcgacagagtgtcgtacacagcggagctccctcgcgacgccatcctcactgtgccgtttcaggtgtttgacgaaattccccataaacgaagctcatgggcaagaaaggaggggccaaaaaattagagtctgtgtctcacactccaatatcattgagggaagaagccaccggaaaaatacaaaccaaggcagcctcaaacaccaagtccaaattgagatttgagcacttgaaaaacctagcagtgtgggccaccgccataccatctttgggtgccttctatggacaccaattcgccgcctttggagagggccacaggaataccacccgatccttctttattaccggccaaagatgtgaaacctattcttaacctggattgaattcaactgtacgcgacagaagggcgaattgagaagaatcaatcaaagctcaggcatagacacaagaagtctggtaacatcactcaaaacaaggtagtgtacaagtgccatttttgtttgcatcagaatctgaagagagggactcctaagggacacataaaaggaatctgtccatcaaaagataaatcatcgttagagtcaacacctccatcaaaatccatcacaagtgattcttctaaattagagaaaggcattttaagcaaagatgaagccaatgaaataaatgtgtttcctttacgagatgtagctaacgtggacggtttaactacttcgtcaagtaccaataccaaaactttgtctaaaaaggctattaaaactattaacaagtctgcaaaacaagtagcaaaatctgcaagttcattcaac

SEQ ID NO: 66855 - DNA, 595 bp, Glycine max
  Clone ID: PAT_MRT3847_31384C.1
cacgcattcattctttatgacaggtggcgatgtgctggcgcaacccttcggaggctctaactgcccgcatggaccagatcgagtgcggcctccgcgtgattgtaccggccctttcggaccgcctgaaacacgcggaggacgcattcgtgggccgcgtaatggggaactggttccgctgccgtgaccatcatcacaagggcagcggagcctcgtccaaggttgctgtgggggccgatgtgaaggcccacatggaggagctcgtgagcgtgttcctctacgcaaaccgcctcaggaggaacgtgcttgtggacatacttagtgccaccaccgtttaccaggccgcgctgtttcttgaagggttggcccagtttcttattgggttcagggaccatgagttggtgaacgccgttgaacactgcaaggccttgcctctcgcaaacaataaacagtgtcgtcctcgctgccattgatgatgataatgcaacagtgtatgtatctatttcgttcctctcattgtgattgtgtggaactttttgtgcaaacacaacaaaaaccagcccctaacgcctccagcgcccgccctacgggaaccatc

SEQ ID NO: 66856 - DNA, 448 bp, Glycine max
  Clone ID: PAT_MRT3847_31385C.1
aaaataacacacacttcacacatcattacgacacccaaagaggcgtcggtattttcatatatgcaaaccatactctgcaataggcccttgcctaattccctttatggggtcacccagactatctctctagagacaaacaaggcccacatcattcaataggattgccgcatttcaagagatctggcagcaacctgtggaacataaaatgctggcctacgagtattaccagcaatttcaaattcttgagaaattcccaatacaatatcataaactgtggattgcttgggatggtcaataaagaaactccaatgccgtgaagctggatttgcccatcataactccacattctaaaaccatttttaggaccacatacctgtattgggaaaatcaatgcccataaatgtgggtcccattaggtccaccgacatacattaaaaagctctttact

SEQ ID NO: 66857 - DNA, 198 bp, Glycine max
  unsure (1)..(198): unsure at all n locations
  Clone ID: PAT_MRT3847_31386C.1
gggccggnaaaaacccgnacgacccacgcgnccggcacgcgcgcagncnagcnagccggcgcgaccgaaggacggcggggcccnnaagcnnnagacaagaaagangggggggaagcgggaagcacaccagcaggggcgncgcgaagcacgccagcaggggcaacaaagacaacaaccacgcgccaccagcggcggggg

SEQ ID NO: 66858 - DNA, 277 bp, Glycine max
  Clone ID: PAT_MRT3847_31387C.1
ttcacgcgttcgcccacgcgtccgcttgtctgtatgtgcaaatgggctgagggcatggggaatccacagggaaatcacccgcaggccgttactacttcaccaacattaataacattgatgtctatcgtgaagagtgcaccattcgataggcattagtgcaagacccgagaactactttgtgaggtcatctttgctggtggccctgtctttacaaatggcttcactttgagtgacaatgacgagaccgcccagagtgcaaggccctcgaggcagagga

SEQ ID NO: 66859 - DNA, 452 bp, Glycine max
  Clone ID: PAT_MRT3847_31388C.1
gaaatgatgtctgatctacctggctgattctgttaaccagttagtgatatacatatttttgtctattttggaatgttgtatgtgatacttaatagtggtacctggtagttaatacccttttataggttctattatgtactgtccgatacacattggatgtatagcatatccggggacatcaagagttcttaaaatgatgtctgatctacctggctgattctgtcaaccacttagtggtatacatatttttttctattttgaaatgttgatacctggtagttaatacccttttataggttctattatgtattgtccaatacacaatacacatttgattacgagtcctttaatatatattatgtattattgaacaaaaatattaaattttgctacccttcaaaatcaaatgtgttgtctcgatgtcatgagtcattctttgatatattatgtat

SEQ ID NO: 66860 - DNA, 214 bp, Glycine max
  Clone ID: PAT_MRT3847_31389C.1
aaaaccacattaacttaatctgcgttatatcacattaaatgatcaaattctaatccaactaaagatgaaagttaaaaaaaaaaaaaccaaaaatcaattccctttttcctaaaatttacttacccaagttttgtccctcaaggaaaaaggaaccagaaaatcatttgtattttctcagcactatcacagccaattgtaaacacaaaatttcaaa

SEQ ID NO: 66861 - DNA, 969 bp, Glycine max
  Clone ID: PAT_MRT3847_3138C.1
gctgcatatcgaggtcttgcctttatgtatgactggttcatggaaccactttactctggaacatatcctgctgtaatggttaacagagttggaggtcgtttgccaaagtttaccaaaagggaatacttgatggttaaagggtcctatgatttcatagggttaaactattacacttcaacttatgcaactagttctccttgcccacgtgaaaggccaactgcctttacagacgcctgcgttagatttactactgtaagaaatgggcttctcattggtccaaaggcagcctcagactggctctacgtctatccaccaggaattcaaggtctactagaatacactaaggagaaatttaacaacccaattatctacataacagaaaatggaattgatgaggttaatgatgggaaaatgttacttaatgacagaacgaggattgattatatcagtcaccatcttttgtatcttcaaagggccataaggaatggagtgagggtgaaaggatactttgcatggtcattgttggacaattttgaatggaatgcagggtacagtcttcggtttgggctcgtgtatgtggattacaagaatggactgaaaagataccgcaaaagatcagctttgtggttcaaaatatttcttcaccaatgaaatgatccttggtagtgaaagacagaattgatgggggaagaaataagaatatgttgtttctttcttaatcctagtcattttcttttggccattgtaagatctaagcagagctactttgatgatttctgacagcctgccaatagtgaggcttcatggttatctgtataacttacttccattaataagtttctgtatttggttttcctgtccctaccccaacactcatataaggacaaccaagagctctctagggcctccgacatgttttaattaggtttaaatatatttttagtctctaaaaaaaaaaaaaaaaaaaaa

SEQ ID NO: 66862 - DNA, 512 bp, Glycine max
  Clone ID: PAT_MRT3847_31390C.1
tgggcttggaacctttgggctgatttttgggcttgtttatgtgcttgcatggtcgtgagaagatgatagaaggggatctctactataccacctcacactaaccccggccaagagctccgaaaaagtaagagaaaaaaaaacattaattacggtaattaccctcgactaattcagagggcttcatcttcacggaattctacacggagtatttcacggaattatgcacgagattaatattagtaccaataatttattcctatgttaaatagcgaagcctacaatcgtcgttatcaccggtactatatctccgtcttcgctcgggccgatttctataggtatcgctacaggcccgactaccgtaattttctcctccgccactcctagttttacttccgctttcgtcgtgcccgcgtcgccttcagccgtcctcggtcccccggctctcgggggtcgcggcgcggtcgttaccgtcgtcccgctccggacccataatcacgcgctcgggaattagt

SEQ ID NO: 66863 - DNA, 318 bp, Glycine max
  Clone ID: PAT_MRT3847_31391C.1
acatggaggcacacgtgattatgttgatcgggatatctagaaactacgtgatgaaaataaaagtcctcgtgttcttctttgctacaatcttggtcgcatggcaatgccataccttcgacatgttccatatgccaatgaacactcactatggtccccactctacgtacgtgaaatgcacaagttggaggcttgttgtggaagtacactacatctatagcatcgagaccattcctgaagagtgccttgaacctgcacaggtatacatgcacggctaacaatacagatcacactccaaaacagttaaccaacaggctatac

SEQ ID NO: 66864 - DNA, 769 bp, Glycine max
  Clone ID: PAT_MRT3847_31392C.1
ggctcgaggggaaacatattctatcagcatgtgaggactctaacgtatatctatggaatgttagtcaagaagagtctaatcctgtgaaagctaagaagattacatcttgtgagcgttttttctcaaatgcgtccatagcagtaacttggcatggtttgaaatcgcaaaatattgaaatccaacatcaactggatgccttggataaaagatcatctcaagttatacaactcagtcctcctgcttcattctccctgagtcaagagttcttcttggagtcttttccaaagggatctgcaacttggccagaggagaagcttcctgtttcaagccccaaggctaaaacatcagtgatgcgtaaatccgagtacaagttcttgaaatcttcttgcaagagtacctcctctgctcatgcatggggtatggtcattgtcactgctggctgggatggtaggataaaatcattccacaattatgggctacctatactggcttgaaatgaagtgacttttcctacactggagagtagaatcaggattcattgcttttactggacacattgtccttggaaaaattacatgctgcaaatgttcagtgatttaagagcgactttaaaatttggcagcatcggtaacaaaaatcccggttgaggtaaagatctcaagcaggagtcgcagtttagatgcgtcctgaacactggctttttggagggtcccctttcagatatcagggaatttatagtgctaatcggttaatgacaagtggtggcact

SEQ ID NO: 66865 - DNA, 421 bp, Glycine max
  Clone ID: PAT_MRT3847_31393C.1
tttttatatatctataacatttaatttatgggatgtttaacaatgcttgcggaaccgcatccatacttttaaccatctcatccccaataaaatacatacttctaaaaataatcatatcaacattctctaaaattaaaaataaactttaatttccccttttttttttgtaaaattgaccataatcattcttaactttatcattttgaatcaaaccctttttatctataattatcttttcaatttacccctaattatcatttgccctttttcttaaattttcccttacccttccatccctatttccttatatcttattcttttaattaaattccctttttaacccacctttatttattcacctttaacttatttctatatttttcaaattcatgtttccattttaaccctcccttttttttca

SEQ ID NO: 66866 - DNA, 649 bp, Glycine max
  Clone ID: PAT_MRT3847_31394C.1
gtgctttataggtagatctgagtcgtggggtttggtttttggatgaattaaagatgttggcagtttgcagattggtgtaatgatgaagcattttgacctgggggtggtttcacttgtgcgcaaaaggttttcatcattacttccttttcgtttctctctttttctttgatcaagttatgatggtgtttttgttgtcagggtgtaactacctttttcttccttcatcattagccagatcttctcccaattatgttttccagtatccgatctgtctgtttctgccatgttttctcagatctggccacctttgaaactcagctaaacattctcctctttttcaagccccttcccctccgcctcccccctcttttctttcattcgacctttctctctctacctagtttctctctctatttagggtttcgtggcctatgttatgtctctaatctctatgatttacttttattatgttaagttggtccttgagtcttatatgaagaagaagagagtggatcacaccccttttacttttattattattaactattttcattagtcatttcaccattgtcaaaccgtgttgtggtcaaatcgagtcttaatttgattaaatgtgccatctgtaaccagaatgacatatgtagtgtca

SEQ ID NO: 66867 - DNA, 484 bp, Glycine max
  Clone ID: PAT_MRT3847_31395C.1
gactcatacgcccacgcgtccgcccacgcgtccgcccacgcgtccggtcgaagtccgggagggtgaccgaggcgaggaagttgctgcgtgtgatggcggagaaaggctattttcctgatgaggtgacctatacttcactgatgaatgggttgtgtaggaagggggacgcgctaggggccctggccttgttgggggagatggaggccaaggggtgtagtccgaatgcgtgcacgtataacacgctgctgcacgggttgtgtaaggcgaggctggtggagaaggctgtcaagttctaccaggtgatcagggctggcggtctgaagcttgatacagcttcttatgggacttttgtcagggcgctgtgtacggacgggagaattgcagaggcgtatgaggtttttgattatgctgttgagagcaagagcttgacggatgttgctgcttactcgacattggagagcacgcttaattggctcaggaaggc

SEQ ID NO: 66868 - DNA, 1819 bp, Glycine max
  Clone ID: PAT_MRT3847_31396C.1
cacaacactatcttctcttcctttctctctctctctgtctctctcagaccccccttgaagatagctgcgactcgggggggagggatagagagtagacctgagtgagggatccatgaaaattaacaaattaaaacctctctctctctttcggtttggttttttgatgctctcaagatgttgtcctgttgcagtttgcaggaaagaaggaccattttggacggaagctttttgctttgaggggaatgagttcaatctgttacaaacatgggtagatctgagcagtgatgatacagaatagaatcagtttttcttgcgggtgctgctgaacagtgtaagcttttcccccgacagctttaatgtttccccggctttgatatcccacattttatccctcaacccaggatctcaaacatactccgagattcattcgacatttacatcttttatctgatattttttcttacattatattcatttggttgtatggaatcaaaccatgacaacatagtaacatactaggtttattggtctcccactctctatgtttttttttttgggggatttttgaattagtaataaatttttgtttttttcttaaatataggtagatctgagtcgtggggttttgtttttggatgaattaaagatgttggtagtttgcagattggtgtaatgatgaagcattttgacctggggggtttcacttgtgcgcaaaaggttttcatcattacttccttttcgtttctttctttttctctgatcaagttatgatggtgttttgttgtcaggggggtgtaactacctttttcttcgttcatcattagccagagatcttctcccaagtatgttttcctgtatccgatctgtctgtctctgctatgttttctcagatctggccacctttgaaactcagctaaacattctcctctttttcaagcccctcctcttcctcccccttaatttttttttcattctacctttctctctctatttagggtttcctggcctatgttctgtctctaatctctactaagatttatttatgtgataattaagctagtccttgagtcttggattttttttattttttttgtgaataccttgagtcttacatcaagaagaagcaagtagatgatgacaccccttttacttttgttattattttaattattattattattattaattagtcatttcaccactgtcaaaccgtgtggtcaaatcgaggcttaatttgattaaatgtgccatctgttactagaattaacatttatagtgtcaagagccctgtagactccgccctctctttattggattttagtggtcaaacatttgtttcttaattccctttattataagaaacaatcaatgcctttaatgtgatttgttacatcttagtaaattgatagatccttcaatctgttcttgttattgtgggtaacatttagcttccttctatggctggatatagtaatgtcacacagatctgtacttttttttctgtttgctttcattcgttttcagttcaatttgtaactaaaatggatagatctgagcactgatgatacagaataggatcaatttttcaagtgggtgctgctgaacagtgtaagtttttcaacggacaattttaatttttccctggctttgatatctcacatttgatagctgaaaccctaatttcctgcacaataaaacaaacaatgtacaagatgcttccttttgtactctttaagtttcgatgttaattaatctattagctagaagaaccaaaaactctatcatttatagttacagttcttcaaggataacctattag

SEQ ID NO: 66869 - DNA, 542 bp, Glycine max
  Clone ID: PAT_MRT3847_31397C.1
ggctcgaggcctcaccctgcttatgatcaggttaaacctgcactgcctgctcttgcccggctaatgcattcaaacgaggaagaactattgactgatgcatgcagggcactggcatatctttctgatggcacacacgataccattcaagctgcgcttgaagccggtgtatgtccccgactggatgagctgctgctgcacccatccccttccgtgctcatgcctgctgtcagaactcgcggaaatattgtcactggagatgatttgcacactcacgttatcatcaatcaccaggctctgccctggcttcttaatctggagaccaacacttataacaaaagcatcaatacggaagcttgtcggaccatatccaatatcgcagctggtaataaccacctgattcaggctgagattgaggctgagctaatcgctcctttggtcaatacgcttcagaatgctgagttcgatatcaagaaagacgctgcgtgtgctatctcaaatgctacatatcgtggttgtaatgaacatatcacgatcctagtgag

SEQ ID NO: 66870 - DNA, 1261 bp, Glycine max
  Clone ID: PAT_MRT3847_31398C.1
gttcataagatctaatatctccaacaaagtggtttacattaacatttacatgatatagttggaatttggaagacatttcgtaatgctgaataaaagcagccttcatatggttgtatggttgaaacaaatctcatttctgggagatgcaaattgttatatttttttgtagcttagggactggctggatttgtctctcaaccattctgtgccatcttccctcttaattctttctaggtattttagtattttctctgttgaaatattatctttttaaggattttctggaaaggtgtgatcatctcattctctctgtagagcattttctgtttcaggaaaggattcggctcgagaagctgttcaagctacactctcttctctgccagacgaggttgtagatactgtgggggtgacaactttgccatctgaagattctgtttcagaaaggaagaggaagttggaatatcttgaaatgcaagaggagctgatcaaggaggaggaaaagaaagaggaggcagagcaggccaaaatggtagaatctgttggtagtgaaggggatttgggtattatgaaagagagggcttctgtggcgccgtttgaggtgtgcttcagtagggagaacgtgctcgccacgcggttgggggcggcggtgccaactattgagcttgtgctgcagaaccagaagacggtttggaggatttttggagcgaactcgatggttagtgtgagcgatgataaggtgctatgccttgggtttgtgaatggaggtgagaatccgaggacttcgatagtgattggagggtatcagctggaggataatcttttgcagttcgatttggctacttcaagattgggattcagctctttgctctatggaagccgaactacgtgtgctaacttcaactttacctccgctgcgtagaaggaaaacgtttcaataattagcattatctcattctctcattcataataaatgccgcctgcggaatttaggttgagcttcgcaactacgagtttcaaataaactgttaaacacaagtattttctatttccttttgatacatacagggttcatgttttttaatttggataagcccctacatggttcatgtatcttataagtttgaatatttgttcagagacaaacgtaatccaagtgtgggacaccttcattgctctttgtcttgcattatatacacatttaaatgcatattttttattaataaatattaatgcttagtattgctaattttttttgttagcg

SEQ ID NO: 66871 - DNA, 411 bp, Glycine max
  Clone ID: PAT_MRT3847_31399C.1
ggctcatataaaagaccgtcatgtaaaagattagacctggcgtatcatcttaacagcattatccaggaagctcactcatggggcgagtctacctatgatcaaggtacgatcgcttgcaaaggctaggcccttacacatgacttttcagctggcataatgcggaatctcagactctgctgctacataaagagcgcttctcagtgtgggcttctttcctactactacattctactactatccacttacacagacactgcttcagactaggacggctcctgatttgatcccagtcatgcccatgaatgcgagactcatgctgatagctggatgggacttactctttacactgtagagcattctatctacggacagatcctacccctggaggggattgtgacagccatctgctag

SEQ ID NO: 66872 - DNA, 239 bp, Glycine max
  Clone ID: PAT_MRT3847_3139C.1
atttggtgctactgtgcgacacattgtggaaggagagaccaaggtgtcgaaactgggaaagttgaagtataagaatgaaaatgattctgtgcaagatgtgaaagcagaagatcttcggcaaatgtttctggctatgactgaggaggttcgtgttataattgtcaaattggcagataggttgcataacatgcgcacgctatcacatatgcctcctcataaacagactagcattgcgatgg

SEQ ID NO: 66873 - DNA, 230 bp, Glycine max
  Clone ID: PAT_MRT3847_313C.1
tcccggagctacctgctcagctcggcggcggccgccctttttttttttttttttttttttcaaagaacacattagacgggacgtgacaggattgcgcgattaagctatccgaagtttagcaggactcccttaataaacggatacagaagattcttcgatgtggtgaggttcagagagatctctgctggaggtcctcaataaaaagcacatccgagagagtcatatgaatc

SEQ ID NO: 66874 - DNA, 301 bp, Glycine max
  Clone ID: PAT_MRT3847_31400C.1
aaaaggttgtataacctgttttgtgaccaacaagtcctaaattaaggtacagaaaccaaaactaagttgaaaaaaaacggaactttaggtttggctgagaaaaaaaacaaaaaaaaaacttgctcgtttaaaacatggggggaaaaaaaacttggaaaaacaaaggacaggaaaccaactaatcccaagaaaaaaaacggggaacaaaaagggggggaaccttaactggagggaacccaaccagggggtttgagggtgggccaataacccggacatcccaatcttaggaagaggctttttt

SEQ ID NO: 66875 - DNA, 313 bp, Glycine max
  Clone ID: PAT_MRT3847_31401C.1
caagcccagaccgaagcaaccaaacatgacccttcttagagagcgcatttgcgactcttttcgcggaacgcagggactgcaccaagggtgacgacaactgcaccccaacacacccctagataggtcgaaccccctactgcacactcatacacataagggacaaccaaagaaagtagccttgacagctatgaccaccacagcaagctatatctagtatacaacccccacacaccagccagcatagaaggcatgagaaactggagcaccaaccttaacagatagaccctgaccctcaaaagatggagcaggcctg

SEQ ID NO: 66876 - DNA, 135 bp, Glycine max
  Clone ID: PAT_MRT3847_31402C.1
ctcatccttactaccccaactctgcgaccagagtactattgcttgtgctccaatcttgtgagcctccacatgatggaaaaggaccgggaggagatctataattacctctaacaatagctcgattgctttgccaac

SEQ ID NO: 66877 - DNA, 1508 bp, Glycine max
  Clone ID: PAT_MRT3847_31403C.1
aattcggctcgagctcgagccgaatcggctcgagtacggctgcgagaagacgacagaaggggtgaaccaactagccctcctagattgccttgtctctggttgacttactgcaatatttggctattatggcttcttcaccttctttgcacatagcaatggtcccatggtttacaatgggacacatcacaccatttctctacctcgccaacaagcttgcagaaagaggacacagaatctctttcttcatttcaaagcacacacatgcagccttacagcacctaaatcaccaccccaatctcatcacccttattccaatctgtgttcctcacaatgattgtggcctaattccccatgttgctgaatccatcacttcagaagttccttcctccactgcctcactatttgagaaggacattgaagtcctcctccttgagctaaaattaaacattgtgttctttgatcatgcatattgggtaccaagaccatgcttaactcggtgcctaggcattaagtccttagtgtattatgttataagcatttcatcattggcttatgacttatcatgttcatccccgggccggatatctaaattaggatgctgcaacatagctgaccatgacctcatacttaatcattcccatgaaccaaaactccttgttggatcaggaataaaacttgagcatggaaaaggcattgcttacattgaaagttgtacaaatactctaactcaatcttatgcaacaggactcaaaggtagtagttgcagagtggttgaaggagcttatgttgattatcataggaggcatgtgttgcttgaagggtgtgttataacaaagggaaccacatgtcatttggatgaaaattgggctaaatggcttggaaattttgaagctggctctgtggtttattgtgcatttggtagtgagtgcacattagaactatgtcagtttcaggaattgttgttggggcttgagctatcaggtatgccatttttggcagcacttaaaccccctaaggattttgagtgtgtggaatcagcttttccactagggtttaaggagagagttgaaggaagaggggttgtgtgtggtgaatgtgttcctaatcaggagttcattttggagcacccttctgtggggtgcttctttacccgttgtggatcagggtctttgccagaggaagtggtgaacaagtgtcagttggtgctgttgccaaatcatggtgaaatggtgatcaatgcaagggtggtctgctacagcttgaaggttggattggaagtagagaagttgaaggcctttaagatggtttgtgtaccaaagaaagtgtgtgcaaaactgtgaataggaatcatgcaaaaactcagtgaagcccctaaatagatcttattttcacggattagtccttgtgtttttttgttgggagctgaaaccttgctcacaacaaaacagtgatgttaacgtgtgttgcttatctaagaaataaaagggattacatgtgtttttaattat

SEQ ID NO: 66878 - DNA, 189 bp, Glycine max
  Clone ID: PAT_MRT3847_31404C.1
ttctttctctctcacttagtcaaagggactcggtgttcttctgtcatgttatttagaaaagcaagatggtgaagatttgctgcattggtgctggatatgtggggggtgctactatgggagtcatggcagttaagtgcgcatctattgaagttgtggtgttgatatctgtaaatcccgcattgcaggttg

SEQ ID NO: 66879 - DNA, 223 bp, Glycine max
  Clone ID: PAT_MRT3847_31405C.1
gggaaaaaaagctgtaggtttgaaaccctgctctgagataatatcaaacattagtggtggttcaaacattgctcgagggctctcactgctggatgttctatctcagaggtagccagttaacatgtgacctggtgggccagacgcagctgtaactggtggtcctacatccggtcctgtgcctagtgcaactgatgtggggacgaacggtggaggacctctaaag

SEQ ID NO: 66880 - DNA, 611 bp, Glycine max
  unsure (1)..(611): unsure at all n locations
  Clone ID: PAT_MRT3847_31406C.1
cccacgcgttcgcttacgcgtccggggcactattacttcttgtgtcatgcacaacattctcatcagcttctttggggaaacctgagaacaaaataaaaacatctgtttttctatcaccaaagattgagctaggtccagggttagtttcaaacaaaaattattttgatgttgactttccaagaggccatattgcaatcaagagtttcaatgctgaattagttgatgaggcagggaaatcagtaccactccaagaagtatatctccaccattgggttatagtaagataccatcaacccaaaaatgtgtcacaaaataatcaaacagataatattgttatagtgagaaacagtggcttttgccaagatggttttcttgtccaatattttgggctaggatcagaaacaagaggaactgccactgatattctagaccctnttggaatagaagttggaaacccttcagaaattccctatggatttgaagagaaatggttgatcaatgtgcatgccattgacacaaggggtggtgtggaagataggctggggtgcattgagtgtaggtgtgacctttattatgtcacaaaggatgcagatgggtaccctttgagtcca

SEQ ID NO: 66881 - DNA, 198 bp, Glycine max
  Clone ID: PAT_MRT3847_31407C.1
ctttattatacacagacaatcgcacaccgtatcccctgttttgagtttccgagagtcagaacatggcctgcgccgaaaacagagaatggaagttcctgttttcctctgcctcttctcattgacgcttgttgcagcgcattgctgaattggaatcgggtctccgggcagacatccgtggtctacgcctgcgacgatgcg

SEQ ID NO: 66882 - DNA, 479 bp, Glycine max
  unsure (1)..(479): unsure at all n locations
  Clone ID: PAT_MRT3847_31408C.1
ngagggaaatggaagatgatgtggtctgaggcacctcttggtattgtttccccattgatggtgagggtgttggcagcaaagattcccaattctttatgcttgatattcaagtcatatgacatactgaaaggtcaggtcaggggcatgctattattcccattttcagcgaggaactgatgatactggttatagtgctgtaaagaaatattatatctgaaattttgtttctgccgagagtaactaacctgtaaatgttaagccatcagatttaatagtaaaagctaaaatagtttaatcttattcatacccaggtagacgccaaatattggcaaccatatgttacaaaattgggcgtctacctgggtatgaataagattaaactattttgtaacatatggttgccaatatttgtaatatatttaggcattaaggttgcctcctggattgtaatcctggtgagtataaatatttttaccgtc

SEQ ID NO: 66883 - DNA, 310 bp, Glycine max
  unsure (1)..(310): unsure at all n locations
  Clone ID: PAT_MRT3847_31409C.1
gtacttttgacaagcaacaggancactangcaggagggggnctgggacancaaaggcaccncgccacggaggancaaannncgaaaagcnancgcgaaaccgccnngagggnncanccagacaaacaggcngcncnnncncnngccgaggaaaccgaagcngcaaaacaaacaaaaaaggangaaanagaaagncactnnaaggcaanccaagaagcanangaagngnnganngancccgngaagagaagaanccangannccacagangagnncgacgangagacncccacngagngngctccacaaga

SEQ ID NO: 66884 - DNA, 585 bp, Glycine max
  Clone ID: PAT_MRT3847_3140C.1
gcgaggattccgattccgccgctcattctgtgctgcgtggcagctgtgaagttcctcgccgaccccgaaaccgacgaggtcttcgccaggctgcggatggttcctctaagaaactccgagctcgactacgaagacagcgacggtaacggcggcggaggggtcggagaagccggcgtcgttcgcgaagacgttaacccagtccgacgcgaacaacggcggcggattttccgttccgcgatactgcgcggagacgatattcccgcggctggattactcggcggagccgccggtgcagacggtgatcgcgagggacgtgcacggcgaggtgtggaagttccggcacatttaccgagggacgccacgtcggcacttgctgactaccgggtggagcagtttcgtgaaccagaagaaactcgtggcgggggattctatcgtgtttctgcgggccgagaatggggatctttgcgtggggattcgtagggccaagagagggggagttggtgggccaaaggggccgtgcgggtggagcagttatggttctggagggcttgtgcttgagccatacggggccttttcgggtttatg

SEQ ID NO: 66885 - DNA, 323 bp, Glycine max
  Clone ID: PAT_MRT3847_31410C.1
ctcacgcgtgcgctcgcacgtaactgatcaggttacagggttggttgcttaaggcgtgcaagggattcttctatggatgtgagttcatagatgatcacctaggggttgacatgaccgatgctgactgaggaacgatagcaatgccccatcgtgcaacaccgaagggtcaaatgagtctctcaaacaactagagattgacatatcatgacctgcaatacatgcatgtggccgcttacctatggaatagataatgctgctatactgtctagccaagcgatacctaaagctactggggacatccaaattgaccgaagctccaacat

SEQ ID NO: 66886 - DNA, 235 bp, Glycine max
  Clone ID: PAT_MRT3847_31411C.1
acgcgtacgtaaaaccagatattcagctcgaggtcagattcattcagaatacttaacaaggatacaacacgtgatgatttgttcagcaaacattttccaaaaattcatgatctgaattttcggatataaacttggaaccaaaattggttcacggatccgaatagaggcttggcgataaacaagttactttccgcggagatgagttcgagttgaatttttccaatacggagagtcc

SEQ ID NO: 66887 - DNA, 258 bp, Glycine max
  Clone ID: PAT_MRT3847_31412C.1
tatactcgtaatacaatacctaagttaccaactctcaaactgacatatagagtacggttatagaaatatatggaatgcataagatatctccatatatctatacttgtcattacactcaataacaagattattttacatcaaaaacatacaaatcctatataccacctacatcaactattgtctaaatttactgcaaatactatttgtacaaaatttattatcatactaacctagactataatgacaccaatgaataat

SEQ ID NO: 66888 - DNA, 755 bp, Glycine max
  Clone ID: PAT_MRT3847_31413C.1
cgagaaactttctcaattggaagaagtaatagaaacaggatcggaggcagagtattttcatatattactttgaaaaaatcttaatgctgtgtgtggacgactttgtgagacagagagagattttgaaacagaagaaaaaacagagaaaaattacatacaggaaaaataatagtcaaacattaccggtggcgccggtcaacggttgataaacctctctctctaaagctcttctctccttctctctcttgcttggtctttgaattctgtggaggagcagcttcttgggttgggttctctgagtttttttacctcttcttggtttgatccagaaaggcttatttttctttgttctgaggaaaaaaattctgcttttcaatttctgggttttcaagcttcgtgtagaaggaaatggcagtaagttttaagttttgtttctttctttctattttgtaatttttcattttgttatggtttggttgtgtttcatgtgtctgtgattgctgtgaaaattgtggagaagggtaagagaatctaaccttagtttcaatctcctacattattatgttttgtgttttgctgtgttaggtggaggttcttttttccgtcctttacatgttatctcttttgttcatcttctgaagctttgatatggttgaccaaaattagaggctttcgttttttggtcaacgctttgtctctaatcaaccattaacagcttcatctttctgcatcttgggaacatggagcaatccaat

SEQ ID NO: 66889 - DNA, 810 bp, Glycine max
  unsure (1)..(810): unsure at all n locations
  Clone ID: PAT_MRT3847_31414C.1
caaatacttcacacccacgcgtccgcaaacacgtacacgcacgcgtcagagaatatattacattaagaaagcccaaagaaagaagaagatggcgtccgagtgcaaaggtaagagctcatggcctgagttggttggagtggaaggaacggtggcggtggctacaattgagagggagaatcctttggtggatgctaacactgtgcttaaaggatccatcgtcaccgctgattttcgatgtgatagggttcgggtttgggtcaccaaacatggaattgtttatcaggctccaagaattggataagaagtgtttacactaaagcacttcatatatatgttatgagtcatgaatataatagtatttaaataaggagttattcttccaattatgttatttgattgaaaataaaaacatgactataagaaatttgttttttcttatttttaattatgttatgcactgcaaataaatatacaaattgtgtgtttcattttctttttgtacgcaataattaaaccatttatatatctccatttgtaaaaaaaaaaaaaaaaacttaaccctatacaagaaaaattcggcacgaagacaaaagagagcacctgccggcgcgcccgggccccaatttccccttatggggggtgttttacccccccctcctggcccgggttttaaaacggnggggatgggaaaaccctggggtttcccaaattaaatggcttggaaaaaaacccccttttccccgggggggtaaaaagaaaaagggcccgcccggttcccctttccaaaaattggccaacccgaatggggaa

SEQ ID NO: 66890 - DNA, 1475 bp, Glycine max
  Clone ID: PAT_MRT3847_31415C.1
gacgacagaagggggcgtttcattctgattagcaaagcaaggaaaatgagtagtgaggagcagcagcagaagaagaataatgaagaaggggaagaagaagcgttgaagccgttggagatcgagaacggtcttcgcctagtcccgcgcgtgaagctcaacctcacggtgtacccttccacgcccctcacactctcccacccaatcgacgaatggaagatgaagcgcgcactcatcgacttcctccactcctcccactccctcacgctccccgaggacgacgacctccacctcacgcgcctcaaggacctcaagaaacgcaagcgcgacgaccccgtcgccgccggaacgctccgcatatgggacctctcttccttccgaacggagaatcaccgcttccgattaacggagaagcttaacgggatcgaactcaacctcgagggcgttaagttcagactcgccgctacggttcctgtttcggatgattttcaaggaatgaagaaggattgggaggagcattccgcgtttcgaagtcggcgcgaacctgataccgttgttctgagaggcgttccgtcgcggtggttcgctgagcctagggtttcgtctaagccctccatgctagttactcacaccatcttctccactttcggcaaaataaggaatcttaatgttgctgaggatgatgattttggtaaggatgcaaatgaagatagcggagacctagtttcgggcctttactgcaagattgtggttcagtttgagagatatagagacttccatgatgcaatgaaagttctgtgtggtcggtcgttgcaaaagcaagggtcacaactaaaggccgattatgaggttagttgggacaaagatggattctttcggaactcaaggaatcaaattcaagagaagaataacatggtatccacaagggcagctgatcattacagaagcgaagctccaagacgtcaggcctacaattctcgccacagtccagatactgtgcgccccaggagattcaaggaatgaggactgaaagctttttttaaaattattatgggtacaaatttgaaagcattttgatcatggactgactcaagtttggtacatcggctgcatacaatttctagggatcattgacttgggtcaactcaagcttatgacttgggataatggggattatattcagagattaactgtactgacttgagttgacccaaattatgatgagtcattaaaacactgctatttttacggatccacactcatcccaaataatatcctttcttttcctttcatgttgtgcaatcagttaacattagcaggcagtacttactttgattagctcttcccaaatggaaatcttatttgctaaattgtcggaccaaaatcttattttggctgaattgagttaatatcatttggatgtgctgtaaaatgatacagtgagaagaatgatactttgcgttttgtatcttgttgaa

SEQ ID NO: 66891 - DNA, 419 bp, Glycine max
  Clone ID: PAT_MRT3847_31416C.1
ccggcgactgaacccgaggcccggtggcgccttcagggcgccctgagcccaggcgccgggggccgcgcaggcggtgccccggcgtctgtccgcttcccccacacagcctgcactgcactcgtactctggagacttctctcatgtggaaactgattctcggcttcatcgtctttgccgccgccgccatgtacatgctcagcaagggcggcgacatcgacatgggcggcgagaagcatggcgtcgagagccatgacagctcgtcggcccatggcgccagtgcacctgcagcgccggcgccggcctcggcggcgtcgaactgagccggcgcctcaggcctcgatcaggccccagcgcagcgccagcagcgtcagctcggcctggttggcggcctcgagcttctgcttgacgtgatagaggtg

SEQ ID NO: 66892 - DNA, 303 bp, Glycine max
  Clone ID: PAT_MRT3847_31417C.1
cgtagtaacttggtattctaagcggccgctttttttttttttttttttttttttttttggaacaattaataatgggaaggcatgttcccttgttaagaaaaaactaattttttttttcatacaatttgccagggaaaaaaatacgttttttttttatttccacagactttatttcaacgagaatgggaaccacaatatgcattttatatactacagctgcccctaactgtttaacttgcaaaacccttttgtggttttttcccagccgtcgaacccgtgggcggacccttggatcgacccgga

SEQ ID NO: 66893 - DNA, 126 bp, Glycine max
  Clone ID: PAT_MRT3847_31419C.1
gctcggattgcggttcgagtttaggcacgagaaatagttagactagccaccccggcccgaggggggggatttgcaaaaggcctccttctcggacccatgccccaagtgtcctacaacttcttcttc

SEQ ID NO: 66894 - DNA, 143 bp, Glycine max
  Clone ID: PAT_MRT3847_3141C.1
gccgctactagtctgtacattaatacggatctaactaaattatagctcagaattagccaccacgagcgcgatccctgcgaagaagaggaagccgatactttttaacaaaggcactacgtggtcctgcatcaaagtcactgtat

SEQ ID NO: 66895 - DNA, 127 bp, Glycine max
  Clone ID: PAT_MRT3847_31420C.1
cgcggccgatccgtcaaaaatgatacatgagggggtggaaaccactctagggaccatgttccagcttaggatgatctaatctaacactgcacgaccgaagccaacatgaggcggagcaatgctgctt

SEQ ID NO: 66896 - DNA, 322 bp, Glycine max
  unsure (1)..(322): unsure at all n locations
  Clone ID: PAT_MRT3847_31421C.1
ggatcttgggggccctggggccttcagtttggccttgcgtcctctttctccgtntgagcgtcatcccttatcagtgacctgctcttggttccctaagttggagatgtggccacccttctgctttggatgctctaggggctttgcttagaggtcgtgtgtctttgtgggggggaggcctcncctccttcgtcaccttttgatttttctagggttttttgtgtgtgaacctctgctctgcgtttttgcctggcggaaactcttcttgttgctagggttgggaggtcctcttgtgtcacgtttttcttccttcacccttggtctt

SEQ ID NO: 66897 - DNA, 121 bp, Glycine max
  Clone ID: PAT_MRT3847_31422C.1
tgcttggcacttataacaaagaaagaagcactgttctatactgataaaccgttttttttgcaagctgaaaaaaaactcttagctccttacaatacaatgctaactggccaaaatcctactg

SEQ ID NO: 66898 - DNA, 975 bp, Glycine max
  Clone ID: PAT_MRT3847_31423C.1
gacctcgcaaaaataaaaaagcaataaatactagaaatccaaatccagtaaaatagaatcttgcaatttgaagagaagcaacaatcaatgcgtccataatttcctatattccctgattggtgtgattactgtcaacaaaaacagctggaattggattctccaacataacatcgacttagaaagaatctttggagcatttttcactcatggctatgattatggatgctgttcttggaaaactgcttgatgagctgctgaaagaagttgtgaatgtgaaagacagggctgtgaagttcagagccaccctgataaccttagagtcaaccctaaataaagtaggaaggttggctaaacagattgatggtcttaacaatcaattgaacaaaccagccgaggaaatgaaagagctgaaagataagttggcgaaagggaagaaactcgttatggagtgctccgaaatccagtggtggaattgctgctataaggccaactaccaagaggaactcgaggcgttgtacgagtcgatccgtttgtacttcaatctggatatgcaaggtctgatactaactaatgagttacaaaaccaggtgattctgaccgagattcatgcaacagttatggaaagtggtccgagaaggaccgaattgaaaggcgtgtgttcgcctccggcccctccggctttcacggttggcttggatgttcatttgagggagatgaaggtcaagttgctgaataaccaccaccatgctggatctgtgctcacggtcaccggaacaccaggctcagggaagtcaacgttggttaaaaagttttgttgtgatgaggaagtcaaaggtatattcaaggaaaacatattcttcatcacctttgcgcaaaagcccaagttaaataccatagtgcagagactgtttcaacacaatgcttgccaggtgccagagtttcaaagtgacgatgatgcagtttatcaattggaaa

SEQ ID NO: 66899 - DNA, 331 bp, Glycine max
  unsure (1)..(331): unsure at all n locations
  Clone ID: PAT_MRT3847_31424C.1
tcaaaagttttgtcctttcatcataatagagtttgtccatcaagtgaatgccctttcaacatcattatggtgcttatcacttctcatcattcatgattttgccaatatgcattgttgtcataatgtcatcactcactagacatgacagcattttatctacaatttggtggttgtgatgtttataatccaaaggactcaaaggtgattaccttgaatcatcccgtgactgcctccaaaagaggaaaaatagatgttgtatgaaacaaaaatataatggacaaaatatgtntttctgtttcatatggtattggntatgtttagctcattctct

SEQ ID NO: 66900 - DNA, 148 bp, Glycine max
  Clone ID: PAT_MRT3847_31425C.1
gaagtttcagcccaaacaatgccaatcaagttttgccactgtgtatcagcttacagtatgggggaacatgactacaaaccataggtactaacagcagcactataacgctggagcagagcatcacagctgcaggtcgccacaagaaagt

SEQ ID NO: 66901 - DNA, 578 bp, Glycine max
  Clone ID: PAT_MRT3847_31426C.1
atcaaaaaagaattctgcattagaaatacagaatcaaaatatcaataaaaagcaacaaatccaaaccaaaaacatgtttagagaaacatcttgaaaggttctgaagctgccaccaattatgagactaaccatgggactctaattattcattctaaaaggaccccaagtttggatgaaatccaaagttataaatgctacactgacttaccgtggcacattaaaaatgggggaaagctcactcctcctatctctagggatttttggtggaaatgcttgtcaggcttttctggtgtcacaattgttgaagggaaattaggctgattcactgaatcagggaaggcttgagactccaaacatagtcctgaatgagattggtacacatatccaccttttcccttcaaatccttaacatagttaccagtgtagaactgcaaaccaggagcatttgtgaacaactccaacactctccctgatttcttatcctgcactatagctgctagcttgatcttttggcccttctcaccatcaagaacatagttgatgtcatagcctttggtttcagccaattgattgatcct

SEQ ID NO: 66902 - DNA, 1711 bp, Glycine max
  Clone ID: PAT_MRT3847_31427C.1
cacgcgtccgccaactcgtgcatttgaagaaagacaaaaaggggttggtttttggttttggttttggtttggttaactccctcttcctcttctactctcacccatggtctccgaatccgaactcatcggccgcctccgcgagtttctccggagctccgacctcaacaccaccacaaccgccaccgtgcgccgccagtcctaccacccaaaagagaagggattttattattaaatataattcacatatgtatcaaaaaagaattctgcattagaaatacagaatcaaaatatcaataaaaagcaacaaatccaaaccaaaaacatgtttagagaaacatcttgaaaggttctgaagctgccaccaattatgagactaaccatgggactctaattattcattctaaaaggaccccaagtttggatgaaatccaaagttataaatgctacactgacttaccgtggcacattaaaaatgggggaaagctcactcctcctatctcactttgaactaatgtagggatttttggtggaaaacttaaaaagcatataatgcttgtaaggcttttctggtgtcacaattgttgaagggaaattaggctgattcactgaatcagggaaggcttgagactccaaacatagtcctgaatgagattggtacacatatccaccttttcccttcaaatccttaacatagttaccagtgtagaactgcaaaccaggagcatttgtgaacaactccaacactctccctgatttcttatcctgcactatagctgctagcttgatcttttggcccttctcaccatcaagaacatagttgatgtcatagcctttgggttcagccaattgattgatcctgctgttgttaggcaattattggcctatattagggagaaaaatttagaggcctattacaacatacggtgtataattcatcatgagtgattgcgggatttttaatgtcgatccccttcacatagaatgttgccactgttgtggttaagcaaggttccagtaagcatcagtcaccatgttcactggggtaggcttgttcagagcttttgctttcatgattatgcttaatgagtttttcccaagaatgtagctcacagttactaggaggtccccaggaaatcctccttcaccatcataactgtgataactgaaggtgattctgggtttgtcatcatcttttatgtaccttgtcactttccaaagaacatcactgaatgctttgggtccagaatgaagtgtgttgtttccttcattagcaactaatttgtaatggattccatttagagtgaactgagctcctccaattctgttagcaacccggcccacagtagctccaaagtatgatgtatcatttgtgtatgccttgggagaatcatatccaagaacaatatcacccaacttcccattcttatcgggaagtattacggacacaagtgttgcaccccaattggtgacctttatagaaaaatcacctttcttgagctcaaataacctaatatgatccttcttagaagagccatggacaaacccagaagaagctaagaagagcagacataacagcacaaagatcttggtcattgtattttcctatatatgaagcaattaaggaaattgatggtgcttattattaatggggttaatggaggagggatagcaagagagaacttttaagctaagagagaaaaacagtttgcat

SEQ ID NO: 66903 - DNA, 153 bp, Glycine max
  Clone ID: PAT_MRT3847_31428C.1
acggctgcagaagacacagagggggctcctcctattgcgaccctttcaaagttagtatctaggttatttaactctgatgcctaaatgcgggtgggcaagtcccctaaccaagtttaactcaaccccaaaaaaaaaatttttttaaacaagcgg

SEQ ID NO: 66904 - DNA, 196 bp, Glycine max
  Clone ID: PAT_MRT3847_31429C.1
ttttaacttgcaaagttattgttaacagggcaccaagggaaatgttgggactttttccaaaaacccacctttccaaaggggggctcccgggataacgtaaaaccatcttccgatgaatcgaaacaacaagctttaattactataaaagcatctgaaggctatccaacttcattatggcccattaacttgcgctgca

SEQ ID NO: 66905 - DNA, 416 bp, Glycine max
  Clone ID: PAT_MRT3847_3142C.1
acggatgcgagaagacaaacgacaggccctcgacaggggacaatctccttgggcattggaccatctctttctcttgcaagccggctcagagcttagggagcttatgtactgtccaagacccacaaaatacatgtgacatcctacatggcactctgagacacgtgtcaaccattcacgccaatcctgcaataagagcacaaacacttgtcccttagcatttgggttccctaactgacaagttatctctaacattgtctacaagcttctggatattatttataagtcaggaattatctgcaaatgctatatcagcccctataaacaaggacccgtaactacgctccactcctataaatatcaagttccatcgaaccctctacacatccttcacacacttcagcacacaagcaacaagg

SEQ ID NO: 66906 - DNA, 323 bp, Glycine max
  Clone ID: PAT_MRT3847_31430C.1
gccgctgctgcagcttgtctctgtgttcaagtgaagggagcctctcccagcatgcctgataggaaatctgttttggatcttcttaattgtcaatgataatactcgcaaaaggtcacaattcgaactatcaggaatagaataactgtgtatggcagagggaaagacccttgaaaatggcagcaaggaaagcaaaaatccttttacagagtatatctgcaagatggattcttcaacataatagtttgttgtcattgtaataagattaggacaaacactttaccgtttggtaatggaaggaaaatgaaaagaaaaatgtttatatg

SEQ ID NO: 66907 - DNA, 602 bp, Glycine max
  Clone ID: PAT_MRT3847_31431C.1
gtgattatctttccaaatctcaaacgtttggtacttgtgaagtgtgaaaatatggaatctctcttggtttctctgtcagagtcatctaacaatctgagttattttgagattcgtgactgtcccaactttgtttcattcccaagagaaggattgcctgctcccaatttgattcgtttcacagttgaaaattgcgacaagttgaattcgttgcctgagcagatgagtactcttctcccaaagttacaatatcttcacatagacaactgctcggaaattgagtcgtttcctgaagggggtatgccacctaacttgagattagtagggattgccaattgtgagaaactactgagaggcatagcatggccatccatggacatgcttacctctctctacgtccagggtccatgttatggaatcaagtccttcccaaaggagggtttgctgcctccctctctttcatctctgcatctatttgacttttcaagtcttggaacatttgaactgcgaggggcttatccctctcacatcccttcaagaatttgaaattaatagttgtcaaaagctggagaacatggcaggaaaaaagctccctgcctttctaa

SEQ ID NO: 66908 - DNA, 465 bp, Glycine max
  unsure (1)..(465): unsure at all n locations
  Clone ID: PAT_MRT3847_31432C.1
cggctcgagcggctcgagcggctcgagcggctcgagaaaaaatttgaaagaattcaccaccctttttgctctgtttatatttttaatttttctcgtgctctcagctgctgtaagtaattgttgcggtgctgttttggcaaagagggagagagagagagacccaaaagagactatgctcggggactcagctctgttgggaggaggaggaggagaaggtggtgcctccgccgatgtagtggcggcgaccgccacgcatgatgcgacaacgacgacgacgaccggaggaggcggtggcggatcaaataattcgggggacgatgagaggggtagaatcgaagaaggtgaacgtagcttcggcggtaaccggtggccgcgacaagagactntggctntgttaaggatacgctccgacatggacgtggcgtttcgagatgcaagtgttaaaagtcccttgtgggaagaagt

SEQ ID NO: 66909 - DNA, 273 bp, Glycine max
  Clone ID: PAT_MRT3847_31433C.1
cccacgcgtccgcccacgcttccgctttttttactttctcgggaaaatcacagcggggcgggggaaaaactctaaaaccccaaccatctactcaccacaatggcaactatcaaggccgtcaaagctcgccagatcttcgacagccgtggaaatccaaccgtcaaagatgacattattctcatacgatggacaaccccacagtactcttcgccttagcgctgcttgaatatttgtttcagaggctggactaataagggctggactctgaaacta

SEQ ID NO: 66910 - DNA, 242 bp, Glycine max
  unsure (1)..(242): unsure at all n locations
  Clone ID: PAT_MRT3847_31434C.1
ganaataaatccactaagaccatacaanattcggatactatagaaactgattcagaaaatcctgattgtactcctcagaggccaataactcgttctttgagcagaaagagaacgtctntccaaaaagcaactggganaagataaaagtggcccatcttcaaaaaacacagagaagcntggagagnaaactatattcncttttgnagaaaaatggcctggaaggcaagatgcttttccaaatg

SEQ ID NO: 66911 - DNA, 353 bp, Glycine max
  Clone ID: PAT_MRT3847_31435C.1
cggcacgaggagagagagagagagagagagagagagagagagagagagagagagagagagagagagagagagagagagagagagagagagagagagagagagagagagagagagagagagagagagagagagagagagagagagagagagagagagagagagagagagagagagagagagagagagagagagagagagagagactgaaattgtgagcggtattgttcttgcggtgtgtcggagggtcaattgtttgggtgtgcaaaaatctggaattctatttcttttgaaagcacatggggcgtcttttttgttgtgtgaaagttgctctgtctaccgtgtctatgagagac

SEQ ID NO: 66912 - DNA, 552 bp, Glycine max
  Clone ID: PAT_MRT3847_31436C.1
gaatatcttttcatacccgaaaaacgatgggccaatggtgcgccgagaggcagacaatgaaaaagcggcaaaagcgcaacccggcaaagaggagaagcaagcggtgaaagcggaggagaaagaggaagaaaagccgaaggacaaaaaggaaaaacgcggtgcagaggcagaggagcagaaagaaggaggagaaaagaaaggagaagaaaagcccaagggaaagaaggagaagcgcgctgcagagaaagaggaaaagaagacggaaaacaaagaagcagagaaaaaagagaatgaggagcaaaagcctgctggcaagaaggagaaacgcgccgcagagaaagaggaaaagaagacggaaagcaaggaagcagagaaaaaggagaatgaggagcaaaagcctgctggtaagaaggagaagcgcgccgcagagaaggaggaaaagacgtcagaaagcaaggaagcagagaaaaaggagaatgaggagcacaagcctgctggtaagaaggagaagcgcgccccagagaaagaggaaaagaagtcagaaagcaatga

SEQ ID NO: 66913 - DNA, 883 bp, Glycine max
  Clone ID: PAT_MRT3847_31437C.1
ccacgccgtccgaaaattatttcaagcgtataaaccatatcaaatttctctccacttttatttcctcataatttatttgtccccttattattacttttattattgctgcttagaaaaaaaaaaaaaactatttgattgaatttcataattaaaaaacttattaattgataaagagaatcacaataagatcacagatactccctaatgtacagctttaaatatcctttgttatgagttatattcatattctaattttatacgtattacttaaaagttaaaataattttatgagaattactcaattgtctttcaatactctttagttttgtccaaagtgatactcgaattttattttcttgcatataggaactagtaatacacccaatggtacacttttaggataaaagttactcaatagtaggtctgttttattatattacattttacataattaaaactaacggcattacggaaagtgacaaaagttcaagtaaactaaaatagagataataaatctaaatataaaatacctatatctaaatacggtataaaaccagttttttaatatttaaaagtgctgctattgacggggtaagattcggatattgagttttttttttaaaaaaaaaacatgttatgtaatattcacaccgagtcctcagtcctactcatcgccatcccgaatatatatatctctttccgaagataagattcaagcccatgtaatcaaactgtttgattatccaagtttataatctccttacgtggcttaaagatttcccaagcccaaatataacaaacccacatttagaacaaccgaattcccaaaaaaacacacaaaaaaagaagatcgacagacaaattatttgatttatttcatcgc

SEQ ID NO: 66914 - DNA, 418 bp, Glycine max
  Clone ID: PAT_MRT3847_31438C.1
agttcccgcgccttttgatcataatacaatgactgtgcaacaacctatgtctgtcttaagatcgacgggttcaattgagactgacacactgagtatatgtggatgagttcacacggatacgatatagatgtatgattagccattcgctgcttggcttataatgttgacgtcttcattgctcacctgatgaaatcatttaagcctgaatatgcaggactgattaatgaggcaccagttgatgaacgtatagaggctttgactgttgacagatcacatgcccctattcatccctggagagcaaggacgtaattgacgcctctcggaactccatgtgctactactggcttgtcaggctttgatttgtgagcctgattattcctaaccgctgcagcaattactccagctaaagacttagcac

SEQ ID NO: 66915 - DNA, 401 bp, Glycine max
  Clone ID: PAT_MRT3847_31439C.1
atttaaggtgctttctataatctacatacactaataaagaagtgtgtgggctagcttaatactaaagctttatgagagcaattaacacacaacaaaaacaaaaatgacagaatagccaaaaattgaccaaagccaagagatacaagaccaagcgggggctgcttgtggctgatcccactttccttgcacgttttttaaagcctaagtcctttttacgggagtacttaattcaattatgctgcccagacttttacctctcagattggggaaaacccgtgcggtacccccatttactcgctttgagtgattgacctttatcacatcttcggttattaccagagagcccgggctgatacgcttttgctaacgttggacgcgtctcaagggtgatgggtcccccc

SEQ ID NO: 66916 - DNA, 1598 bp, Glycine max
  Clone ID: PAT_MRT3847_3143C.1
cttattgtcttgtctcaaaatggtggatcaaatagaggaggtttcaatatagtatcttcaagtgccaaaagcagcattcatctggatggactattcaacattatctcatacgatttggtgccaaagctacagaatatgcttatgacatgtaactttaaggttgtgattgctgatgagtcacattttctgaaaaatgctcaggcaaagaggacaactgcttctcttccagtcataaagaaagctcaatatgcattattgcttagtggaacacctgctttatcacgaccaattgaactattcaagcagctggaagctttgtatcctgatgtatataggaacgttcatgaatatggtaaccggtactgcaagggtggattttttggagtttatcaaggtgcaagtaaccatgaagagttgcacaacttgatcaaggcaacagtgatgattcgcaggcttaaaaaggacgttctttctcaacttcctgtaaagcgcaggcaacaagtcttcctagacttggctggcaaggacatgaagcaaattaatgctttatttcgagagttggagatggttaaagccaaaattaaggcagctaaatcacaagaggaggctgaatctctcaagtttgctcaaaagaatcttattaacaagatatatactgattctgcagaagccaagattccatctgttcttgattatgttggaactgtcattgaggcaggatgcaagtttcttatatttgcacaccatcagccaatgatcgattcaatacacgagtttcttcttaagaaaaaagtgggttgcatacgaattgatggaagtacacctgctgcatccaggcaacaattggttactgactttcaggaaaaagattctatcaaggcagcagtgctatctattaaagctggaggcgttgggttaactttaactgctgccagcacagtaatcttttcagaattgtcttggactcctggtgacctaattcaggccgaagaccgtgctcatagaattggccaggtgtcttcagtgaatatatactacttgctagcaaatgacacggttgatgacatcatatgggacgtagtgcaaaacaaactggaaaatttggggcagatgttagacggccatgagaacgccttggaggtctcagctagtctgccggtgaatagcccttcaaagcagaaaactctagaccagtttgttagaagatgtgataacacggatgggttggaatatgagcccaaccccaaacgtccccgaaactgagccttgaaacggtgctcaaagtggagaaagaataatcgcaatattggcactcttgctcgtcccattagaagagggtgtagcttgtcagcacagtttacaactctaaactatgcagctgatgccgaaggagcttaacggttttgaggaatatgtatgggatgaaaatggtgatcaagtttcctaacagattttaggcttaagatttcctgtcccctaaagttgttagtggaaattgtacagagtacatgatcatatgaatgtaacttgtaaattgctttactcaatataatttcgttgccatgtcataaatggtatttaaaaaacaagaaaacagt

SEQ ID NO: 66917 - DNA, 455 bp, Glycine max
  Clone ID: PAT_MRT3847_31440C.1
ctaaactgtacatttactcatcactgaaatcacaattacaaccaacgtgcactcatggcttcctctatatttaaaaacaaaggatacatgaagccatgcttgtcggttttgttcagtacttcatttagttattgaagtagtaaatttttaacataattttgtcaacttgtcttttcctcagtatatgctttttcacctttatttttgaaatatgccttgtgctcattttttacaggtggaattgtctgatcctgaagccgagcttaggttgcttgaagttttctatcacaagatatacaaggtcttccctcccaatgaaaagatcgaaagcattaatgatcaatactggacattacgtgcagaggagataccagaagaagagaaaaatctgggtcctcatgatcgtctaatccatgtgtatcattttactaaagacacagctcagaatcaaatgc

SEQ ID NO: 66918 - DNA, 476 bp, Glycine max
  unsure (1)..(476): unsure at all n locations
  Clone ID: PAT_MRT3847_31441C.1
tccaaggaaggtttcccgtcatcactgtatgacgtcctccttctttggggggggggggggggctagggggaaggataacgattaggcataaatagaaagaccgaacttgtcgggaaaagaaagtgcaagcataaagatagcatgtccaaaaacaaaaaggccgaaggcacaaaccaactttaaccaaaagggaaagggaacataaaagaaagggaacataaaacaaacccataagggtacccacgctgccagcggaagcagagtaagttggggctaaaggttttaaattttaggggtgataaggcgcgaacaagcgccccgagggccagtacntggtatgcgtaatgcaggtggtgtgaggcgtaaggtgcgtcgaaaacaaacgtaggtacttttaatcaagaaggctgcaattttaacgacattcctattcaacttccttggctaagacgggccttgcttggaattggattatg

SEQ ID NO: 66919 - DNA, 385 bp, Glycine max
  Clone ID: PAT_MRT3847_31442C.1
agaagggcacgtgctatgatatgaaattaattttgaaactctgaatgtacaaatatgattctgtatatacaatattggcaccacaacagagaattcttaaagccactaacaattctgcacattcgtaaccttcctaatccccatagcaatggacagtgtcgttcaagttgataatagattagaattctgaaaattttaaaaaatatttcattacattgcaatatcagatgaaaaattcagctctaattcctctacaaaaaggttacactagttgcagacacccttgggatctgcattcttggttatccaaggatgctccattatcctctgaagggagagccttcgtgaaaagtcttttaccagcagtcgactaataagatttttg

SEQ ID NO: 66920 - DNA, 270 bp, Glycine max
  Clone ID: PAT_MRT3847_31443C.1
gatggtttttgttaaaacattcttctaatgaaaataagaaccttccagaatccaaatggataatgtaatgggttttaactattgaaattgctcttccattttttttcttcttctggataatttcgtgttgagaaagtaaagcaattccatgaagaaatgaaatggagcagattattttgttggagggttatacatgctatagtttgcttacatttttgtagtttgtcggaaagaacgaactttaaatcaatggaactttaaaataaaatg

SEQ ID NO: 66921 - DNA, 902 bp, Glycine max
  Clone ID: PAT_MRT3847_31444C.1
gcgagggcacaatcttattggaccaaatttctccacatgaattctcatctacattcttccaaagtgtagttaatagacgtgccaagttcctctgtgttctctttgcctcgacactctgcattcaagttccataatggcagcaaccatagcaacaacaatggctatgatcaactcaaagtgcatcaacacaacagggtcatcacacaagttgcacaaccccaagctcccaccctcaaaacccaccctctcccttttctcccttcagaacctcccaaagggcctaacctcccacgtctcaacttccacagcaggcactgccatcgcaggcgcaatattctcctcactcgcaaactgcgacgcagccttagctgcatcgcaaattgctgaattagccgaaggtgataaccgcgggctggcattgttgttgccgttgattccagccatagcgtgggtgctgttcaacattctgcagccagcactgaaccaactgaaccgcatgcgtaacagcaagggggtcatcgttgggctcgggctagggctctgtgcatcgggcatgatgtccggcccagaagcgtcggctagtgagattgctatgattgccgatgctgctgccagtgacaacaggggacagcttctgctgtttgtggttacaccagcgattgtttgggttctgtacaacattttgcaaccggcactcaaccagcttaacagaatgagatccgagtagagtgactttgctatgctaaggctaagggaatggaattttgtgcacccgattcgttccaatgcttttttccttgtaccacttcctgcttgtaacttgtatctattgctctctctctctctctctctctctctctctctcaatataaaactgcttcaagtttcattctcataagtag

SEQ ID NO: 66922 - DNA, 263 bp, Glycine max
  Clone ID: PAT_MRT3847_31445C.1
aacagttacaatctccgttttctgtttcttccatcttcctctttttcttagtgcatgcctttctccattttcttctcctcttcttcttcaagtgataaagaaactgaactgataaaagatttgcaaatgctcaacgctgggaccttctttggtgatgtttaggctgaacatcatatggtttattgccatagaacctgctgctttatcttttagtaccggacatgtggaaacacttctcataagaatgcagttagacctgttat

SEQ ID NO: 66923 - DNA, 298 bp, Glycine max
  Clone ID: PAT_MRT3847_31446C.1
gaccggccacccccccctttaataataatagttttaaatgccaaatattggcagaagtcaccactgggccccgttagaatccttagaaaggaactaacaaagcccgaaggggttggggaaaatgggacccaccttgggccaaaatgggggcccaaaaaattttgcagggccagtttaggcaactggggggcggaaaaaatgatcctggggggtgttccaccgtagcaggggggattaattgccacatttgaaccccgggttaactaataaaaggtgccaacttgttgccaggggcttg

SEQ ID NO: 66924 - DNA, 525 bp, Glycine max
  Clone ID: PAT_MRT3847_31447C.1
ggctcgaggggtagactaaaacttacacctcactctttttttccgagccttacagtgatagaaaggcagcgagggaagaagactggcacatccccgggaggaaggaaatggatctcggcgaacactaggtctgcgaggagagggagatcggctcttgcggactcaacaagaaacttctacagaaggtcacggctgggaaacccccagaagtgggtgacgaagcacaagtgcatttcagggggactttgctacacgggactaagctcgattatagccgagagagggattcttctttgaggttaacgctcggccaagggcaagtaattgaaggatgtgatgaaggtatttagaaccatgatgaaaggtgaaaatgctattatgaccatacgtgcccagctagcttatggtgaatctggttcccctaccactattcctgctaatgctacactccaattggatgttgagctggtctcatagactagtgcacaggacatctgcaaggatggcgggctgtttaataatatc

SEQ ID NO: 66925 - DNA, 415 bp, Glycine max
  Clone ID: PAT_MRT3847_31448C.1
tccggatgatttgttacataataaacattctttggcgatcatgttgtatgataggatggactctacaaggaagtcttctctcacattggtattcttattggcttttttcatcattgcttcagatatgggtatgaaatctgaagcgcaaatatctccacttgcacgctgttccaaagactcagattgtaaacgttattgtccaacttgttatcaatgtaattgtgtgcgacgtgtttgtttgtgcgaaaactcaccacctttagccaataatattcatagtcaagctcccccatattgagtatggtgatattgtgatgtaatcacatatgaatgagaataattatggattaatatgtagcatccaaaaccttatgaatgataaaggaaaacttcactaatatttcttgattgataa

SEQ ID NO: 66926 - DNA, 2757 bp, Glycine max
  unsure (1)..(2757): unsure at all n locations
  Clone ID: PAT_MRT3847_31449C.1
cccgcgtccgccaaattaataattttgatgtggcagagcaactcatgttgcagaagcttcagaaagaaaggcttcaacagcagagtagtatatccaatcatttccctgctcatcataatgggtcagatttagagcgatttcctggttttgctctttctcagaacaagagccccaacatccagcagatgatgcagaattctggatcagattttgaacgtattctggaacttcagattcaacaacgccagcttgagcttcaacaacagcaagatatgcatcatcaacaactacttcaccaacaaatgaaacttccgccccaacaacaatctcaagttcagcagttgcttcttgaacagtttatgcatcagcagatccctgatcccaattttgggcagtcaaaacatgatatttctagggataacctgttagatcaggtacaattgaggagatatgtgcatgaattgcagcagaatccacattctttaaggcatcccgatccatcaatggaacagattatccaagcaaatatgggcatcaatgctgcccaaggaaggcaagctgatttggcagacctcttgttgcaagcaaggcatggaaatatattgccttctgaacaacagcttcattttcagcaagatcagctgcaggcacagcaattatctttggctcttagacagcagttagggttggatggagaaaggcattttggtaggtcatggcccatgaatgaaactggacagttggttagaaatccagcaacccacccactgggtcattcagctggatttaatgtttcagatatccataaacagcagcagaggcttgggactcaagaggagcaattaaattatttggggaggaatcttccagagcagaaccagagagggttctatgataatcctatgatgtttgagaggtctgcacctatttttcccncaataagggntaataaggggngnntaaaaattttttacatgaccgccatcgctatttacatccaggtgatcaaatgagttctttaccgctctcatcatctacgatcatctgatgatctttttggtcatcaccctgatgcttttaagagttcactccatggcaacaatgggcatgtggaaaatagctggattgatccacgggtgcaaatacagcaacaccttgaagctgtgaggcagagaagagagttaggagatactgttacatcagcagatctaaacatacctgcatctgctggtgctcatgaagagagttcagcacgaggttttatggaacgacttcatcaaaaactgggtgttcaatccacacaaccatcaactgttgataaatggcatcctctttcatcaagaagtgacaaatcttggcatgttcctgaggctagttcaataatgcatccttttgagcatccatcagatcagcaagtccatctgaatgacccttttttagaaaggactcaaagtgctaattccaatgccttaatccatgatcatttaaacaacatgcatatcactgaccaatacaacaatctaggaaatactgaaagaatgcctcttcggtctagatctggttcattgcttgaagaacaatcactgttatctgctaataaggatactttacatcccaattacagaattccttttcagattggtaaatcatctatggaaaaagacttacttgagttagaagcaaataagggtctgagctatgactatatgggcacaatgagcaatttggttcctgggatgtcagacatgtcagagcaagtggaaagcatcatgaattccatggaactgcccacaattgcccatagtagacatagctcactgagcagtgcaggtggtgatggtggttcatttggtcgtgagatgggtttgaataattcacgtggagatgaggtttctggtgacaggatacctccttcaacaaaagggtttgataatgctttccataagcgcccccatgtaacgcgggttttatcctcacctgatgtccagtcagaccagccatccgtaccccatgtcaatcaaaataatttaataaacctcacatctggtgaagggagaagagaaacgtctggaaattcgtcaatgagtagcatgacagaggcttctgggaaaaaggaggttcggtttagatcttcctccttcagtgaaggtgctgtgtcagagacatcatttatagatatgctcaaaaagcccgttcttcctgaggtggtggttgactcacatgcagccagtggaatcgggagcgagtcatccgatgcagcacaagcagggcgaagcgggaaaaagaaaggtaagaaaggaaaacagatagatccttctcttctcggtttcaaggtctccagtaaccggatcatgatgggtgagattcaacgccctgaagattaatagttagttgcatgtagattaggtgtaaaatttttgcatttttttttgggtgggtaaagggatgaatgatgtacagtccgctagagcatagcttataatatctcaatacatctgttttttacaataggtgtaatagatttacatttttaaagcccttttggcgttgacgagtgtgtacagagatgagtgtatataaacgaggagaggctatgcttgatatcatatggtggatggctcaacgattttggtggggggcagaaataggagagaattaattgtatccatcgtggtttgttttgttaagtaaatcttgttatataaaaaaataaaagttatataatgcggagtccagaccctaaataaatccaatgtg

SEQ ID NO: 66927 - DNA, 406 bp, Glycine max
  Clone ID: PAT_MRT3847_31450C.1
gctttgccacaagccctcctaggactacatgataccccggtacttattctttcccttgatctcgtaggcatcggaagcccaaaatgccttgttatctcacatgctaattgatcttagtgccatgattgcacagaactgcataagtcttgatgcgataggagcgactaactgatcaagccgacatgcgacacttagttctagcagcgagcgtgaaagaaaaccgaacagcacgtttgcatcaacagtccttgccttttctacacaatacaaacgcatcacttgagaatgctggttgatgccttaccgtgcctgatggcacgtatgaaagggggaaacctgtcagctactaacaacatcgaccgctctgatgaatactacgtgctgaagcgaacgatggatgataccg

SEQ ID NO: 66928 - DNA, 304 bp, Glycine max
  unsure (1)..(304): unsure at all n locations
  Clone ID: PAT_MRT3847_31451C.1
tgcatgacaagactaaancaaatgggcgagtgcctaaccatacagacttattatccggaggttaatacgaacaagcatcggagggttgcagttttatttgcagcctggccttaatgaatactcctcataaaaaaggaacttgttcctgcaacatcaaaacataagggtgcttgaacaccgcgcacttggggtggaactccatgacgggtataaatccggttcaagcgggacaaaaactttgcgctgatgtggtatgggctataattgaaacacgcggttgtttcttgacaaatgaagggggtca

SEQ ID NO: 66929 - DNA, 2948 bp, Glycine max
  Clone ID: PAT_MRT3847_31452C.1
gtcctcaatcgagttgcattagatctgttgtgttgctcgcaggacttttcttctggctgttggatgtgggcccagtaagtggactcagttgtcttcccttgatccaggactgaggttttgtttgctgtcagcatgattgttggaacatttattcaaagttgacttgatcttgtgcttctgttgtggctgcaggaatactgtctattgcatctgcgaagaactgagtcaccttaggttaggtgtcctgagagatagaatgattacttgtcccagagggttggtaaagatatcgcggaaaaggaagatttggataagaggggttctccagatcggagcccttttactttgaggtttcctctgagggttcttttgggaaatatttctgatgccaaatatggcaatggcaaagctgagaaaggttttgcttctgatcccttcatggttggcaccccacgaagccggcttaagttaatgttgctttcctagatgtaactgtcgtatggaagaaaactagtaaataaaagttgattttttatgtggaaagtgtggatttgagcctctttatgtgggcaaaagtacattggttatagaaggcttcaagagaagcttgtctcggacattttggatatcagtgagttttcgcacggtcctttgaggttgaaggagtctgaattctgttctgaggagtttgaaaactttgttccttgttacaatatttctgaggatgtggaattgggagtttctgataacaatgaagtggaccggcaatgcagccacgagcttaggcagaattgtttggttctgccaccggtgaattacaaaattcccttaaggtggcctactggaaaagatgttatctgggttgctaatgtgaagatctcagctcaggaggttctttcttctggaagcttgacaaagaggatgatgatgctggatgaagaacaaatttcatttcgttcagcttctcatatgtttgatggtattgaagactactcacatcaaatcgctgaaatgattggacttagaaatgaatcttacttcatacaagctggggttcgaactatactagacataggttgtggctatggtagctttggagcacacctcttcgacagtcagcttttaactatgtgcattgcaaactatgaaccttctggcagtcaagttcagctcactctggaaaggggtcttcctgctatgattgcttctttcacttcaaagcagttgccatatccatctctatcctttgatatgttacattgtgcaagatgtggcattgattgggaccagaaagatggccttctcctgattgaagccgatagacttttaaaaccgggtggatactttgtttggacatcaccactcacaaatgctcgtaacaaagagaatcagaaaaggtggaagtttatgcaggattttacattaactctttgctgggagcttctgtcacagcaagatgaaactgttgtatggaagaaaactagtaaaaaaagttgctatgcatcaagaaagtctggttctggcccttctttgtgtggtagaggtattgatgtggagactccatattatcgagaactgcaaaactgcataggtggaatacagagcagtcgttgggttccaattgaaaaaagggaaagatggccttcccgagctaacttaaacaacaacaacttggcaatctacggcttgcagcccgatgaacttaccgaggactctgacagctggaaaacagcactccagaattattggtcactcatgtcacctttaatattttctgatcatccgaagaggcctggtgatgaggacccttcgcctccttacaacatgttcagaaatgtgctagacatgaatgctcattttggtggctttaattctgcattgttgcaggctagaaagtctgcgtgggtgatgaatgtggtcccaataagtggacccaattatcttcccttgatccaggacagaggatatgttggtgttttgcatgattggtgtgaggcttttccaacgtaccccagaacctatgacttggtgcatgctgcaggacttctatcccttgaaactgagcagcacagatgctccatgcttgacctgttcattgaaattgacaggatacttcgcccagagggttgggtaataattcgcgacacagttcccttaatagaatcagctagacctctaacagcacagctgaagtgggatgcaagagtgatagaaattgaaagtgacagtgatcagagactcctgatctgccagaaacctttcttcaagagacaggcaagctaaaaagaattgatggcctgaagaaactagaccattatatacatatattcattttccataaagttcatttattaccatagagctccaaaagcgggggttgaaaattttggacataaaaagaaaacaacatatagaggaaaaagtgtatccttgtcaatgataccaccacatcatctatgtagccgtaaggtgtacatagggccatgtaattaccaaacaagccacagagcagatgagaaactagtatactggtaggttaatttacttttccatgtgatacacagaaacaatattaagattgggaacatggtgataagttattgttgtaaaacgctccgtggttgattcccccttgtagaattattttttctgctatctttctataggttcttagatgtttcttgtataagcttggcaaaactgtactttatagtttgtcaatgtttataatgtgaaatcaaaatcatattattcatcattgtgactatgacttctggttggatagtcactggtaaattggaaccagcaggagcaagttacatgccaagaccatgacaatgtgacatttttcttcctgatgtaaatcaaggtagtagaactatcaagatttaaatgatagtaactcatgatgttcttggttttttaaattgaaactaatgattaagcct

SEQ ID NO: 66930 - DNA, 440 bp, Glycine max
  Clone ID: PAT_MRT3847_31453C.1
aaagcaacaccattcaaaattctcttttatttaccccacaaaattggatatgggaagaaaaaatgatttttcacccctcaacaaaaaaagtttaccttatcaaaaaaaccgacccactaaggaccccgaaaaaccaccttatcccaaatctgaatcttaacccaggggcaaaccgccctgatccaaacttaagaagggcattccccccccaacaaatttatcccccaaaacacagctggttgatggggccgattttttctatctatacttccaaagacccccatgccctttttaaacaccccaaaatcaaaaacctgaaagttctctttcaccccccccagttttcaccatttaaaaatgaccccagggtccctttgaaccccccaccaaaggcttatctgggcggcattctttttgtatttttcacccccccctttgaa

SEQ ID NO: 66931 - DNA, 1304 bp, Glycine max
  Clone ID: PAT_MRT3847_31454C.1
ggctcgagagaatgtctaggcctctgcaaagaggtgtgtcaggtggggttagggtccctgagagtggccatgatgacttgtgggactcccaatctaaagataaaacggaaaaggaagatttggatacgaggggttcttcagatcacagcccttttactttgaggtttcctctgagggttcttttgggaaataattctgattcaaaatatggcaatggcatagctgagaatggttttgcttctgatcccttcatggttggcaccccacgaagccggcttaagttaatgttgctttctttgaagttcagcttagtgtttatagttgttctggctcttactggatctttttggtggactttgtcgatttcatcctcatcaagaggtcaaatttaccatggttatagaaggctccaagagaaacttgtatctgacctgttggatattggggagatttcttatgctccctcaaggctgaaagaattggaattctgttctgaggagtttgaaaattatgttccttgctttaatgtttctgacaatctagctcttggtttttctgatggaaatgagtttgaccggcaatgtcgtcatgagctcaggcaaaattgtttagttctctctccaccaaattacaagattcctcttaggtggcctactggaagggatattatctggattgctaatactaaaatcactgcacaggaggttctttcttctggaagctttaccaaaaggatgatgatgcttgatgaagagcaaatttcctttcgttcagcctctctcatgtttaactcatgaagtttgactttgatgttccttgcctgaaatcttatttgattgagaatgttgtcatcttaaaatttgtaggttcgaactatactagacataggttgtggctatggtagctttggagcacacctcttcgacagtcagcttttaactatgtgcattgcaaactatgaaccttctggcagtcaagttcagctcactctggaaaggggtcttcctgctatgattgcttctttcacttcaaagcagttgccatatccatctctatcctttgatatgttacattgtgcaagatgtggcattgattgggaccagaaagatggccttctcctgattgaagccgatagacttttaaaacctggtggatactttgtttggacatcaccgctcacaaatgctcgtaacaaagaaaatcagaaaaggtggaagtttatgcaagattttacattaactctttgctgggaactgctgtcacagcatgatgaaactgttgtatggaagaaaactagtcaaaaa

SEQ ID NO: 66932 - DNA, 559 bp, Glycine max
  unsure (1)..(559): unsure at all n locations
  Clone ID: PAT_MRT3847_31455C.1
ccacgcgtggcgctaaaatgcataaccaggggtgtgaagagctaaactttagtagtatgtgatttcaacgaaatggggggtgctgaatatttaggtgttgtggaaactgcgtttaagggggtggcttgtgaaattaactagcttagagaatgtgtaagtgtgtcgctaatgagtgcggacttttttgggtaaaataatatgagaaaagcaaaaatttgtgcaaaaggagtgggaaggtgtgcctgggactttttattccgaggaacttgcgctcccatcccttgagagagaaatttgtgctatactttagttcattttaatttaagcaggcttatggagtttttttctctttctgtgggattgacattattgggactttanaaaattttaatgtgaggagggttatggaggattttgatgaatctttgggacttaagaagaggagatgaaaattctgggtgaagtgttaaagcgggtaatgtagggagtttctaaaatggcatctcatttataaaggccttaaatcaataaaaggaggtgcaacattagttgacgatga

SEQ ID NO: 66933 - DNA, 2610 bp, Glycine max
  Clone ID: PAT_MRT3847_31456C.1
ggcaaaattgagaaccgatcacgtccggttagtttctctctcattttacagtgtctgagaagagaaggcaaaattgagaaccgaccattcctgattggactctaatgaatggctcatcgaaatcttaatcacaagttgacatggcaccatcagaaccgtttgtcaatgtccctgaaaatgaaattccaaaaacagatgagtgtgccatgaaaaaaccacttccacttgcttctcttctctctctctgttcttttcttcattcatttgttctcactgtagtgctcacgaagcacttcaccagcgcatgcccaccaaagcaaaaccaattttttctccaaagtctgaatcttttcaccctttattaccaaatccggaaaccccagatctcgggtatagccggtgatctgaattttttttttcctctgcttttctttgaacattacattcccggaaaacggttttccggggaaagaagtgaaggaagggcggaattggggtttgaaaaatgcggcgaagagcgacggattttcgaaggccagtgcgtaagagggttccagatgccgttgtggtgggcattgtgctgtgcagtgattcttctctttgtttatattctgagcaaagggaacaaaattgagtccagacccgctttgtccaagaaaacttacaggcatgataagattatggaaggccttaatattactgaagagatgttaaactctaactcgttcacgagacaactcattgatcagatatccctggcaaaagcttttgttgtaattgcaaaagaaagtaataatctccaatttgcttgggaattaagtgcccagatccacaattcgcagatgctcctctcgaatgcagccactaggcgtcttcctttaacaaccagggaaacagaaagggctatccatgatatggcattattgttataccaggcccagcagctccattatgatagtgcaaccatgatcatgagattcaaagcaaaaattcaagctcttgaggaacagatgaattctgttagtgaaaagagttcaaaatatggacaaatagctgctgaagaagtcccaaaaagcctctattgtctaggtgtccggttgactacagaatggttcaaaaacttcaatttgcaaaagaaatttaaggacaaaaggcacgtggtgatgaagcttaaggataacagtcttcatcacttttgcattttctctgataacattattgcaacttctgttgtggtcaattcaactgcaatgaattgtaaaaatcccaatatgattgttttccaccttgtcactgacgaaataaactatgctgcaatgaaggcatggtttgccatgaatgatttccgtggggtgactgtggaagttcagaagtttgaagactttacttggttaaatgcttcatacgttccagtgctcaagcaacttcaagactcagaaatacagagctactacttttctggcaacagtgatgagggcaggacacctatcaagttccgtaaccctaaatatttatccatgcttaatcacctgaggttttacatccctgaagtttttcctgcacttaagaaggtggtgttcctggatgatgatgttgtggttcagaaggatctttctggtcttttttccattgatttgaatgagaatgtaaatggagctgttgaaacatgcatggagacatttcacagataccataaatatttgaactactcccatcctcttatacgtgcacattttgaccccgatgcttgtggatgggcatttgggatgaatgtatttgatttggttgaatggaggaaaaagaatgtaactggcatctaccactactggcaggaaaagaacatagaccgaacattgtggaaactcggtaccttgccacctggactgctgacattttatggattaactgagcccttggatccatcatggcatgttttgggttttggctacaccaatgttgatcctcagttgatagagaggggagctgtattacacttcaatgggaactccaaaccctggttgaagattgggattgagaagtacaagcccctatgggaaaaatatgttgaatactctcatcctttgttgcaaaaatgtaacttccattgattttgaattgcatttaaattgatacttcaaaccttggtggaagattaagattcagagttagcctctgttggtggggtcggcaaatatatcattgtttgtttggggaactggcaggcttggtgatccttaccagaccagcgaattgaggtcttgatttgtagtcagaaaatgctggtacaattttaaaaggccaagcatgtgtggtggctttaacttggtgccttattgaatccggctcttctattgtagcatatataattatacacgttcatttgtcatgtattagactatatcagttcatagtttttaagtgtagtcaaggatgagatgtgctgcaaacttcttaatgttcattactgttccttgcaagacctgagtttctttcctgtgacattcatttgctgtaactttagcatgcgtcaaaatactatagtttagttgttcccctagcagaaattccagctgcatttgttgttatgtgtggggagaatagtcacatgct

SEQ ID NO: 66934 - DNA, 426 bp, Glycine max
  Clone ID: PAT_MRT3847_31457C.1
ttggttttttttttaagaaaatttggggttaatcattagtttcaatttaaaaatccaagaacatgagttactatcattaaaatcttgatagttctactaccttgatttacatcaggaagcaaaatgtcccattgccactatccaaccagaagtcatagtcacaatcttcaatggattgatgaacaatatgattttgatttcacattataaacattgacaaactaaaaagtacagttttgccaagcttataccagaaacatccaagaacctatagaaagatagcagaaaaataattctacaagggggaatcaaccactgagcattttacaacaataacttattggatcaccatgctcccaatcttaatattttatctgggtgtatcacatggaaaagtaaattaatctaccagtatacttggttctg

SEQ ID NO: 66935 - DNA, 627 bp, Glycine max
  unsure (1)..(627): unsure at all n locations
  Clone ID: PAT_MRT3847_31458C.1
cacgcgtccggaaaaaacacttccacttgcttctctcggcgtgttcttttcctcattcatttgttctcactgtagtgctcacgaagcacttcaagatcgaatgcccaccaaagcaaaaccaaatatttctccaaaggccgaatcttttcgccctttataaccaaatcaagaaaccccagatctcgggtatagctggtgatcttgaattttttgttttttgtttttttttaatttcttctcttttctttgaacattacattcccggaaaacggttttccggggaaagaagtgaaggaagggcacaattggggtttggaaaatgcggcgaagagcgacggattttcgcaggccagtgcgtaggagggttcctgatgcgttgtggtgggcattgtgctgtgcagtaattcttctctttgtttatattctgagcaaagggaacaaaattgagtccagaccagctttgtccaagagaacttacaagcatgataagattatggaaggccttaatattactgaagagatgttaaactctaactcagttacgagacaactcaatgatcagatatctctcgcaaaagcttttggtgaaaatgcnaaagaagtantaatctccaatttgcttgggaa

SEQ ID NO: 66936 - DNA, 1639 bp, Glycine max
  unsure (1)..(1639): unsure at all n locations
  Clone ID: PAT_MRT3847_31459C.1
aaggtttgtaggtcaaatagcgatgtttctagttcacaaagggtggttggaaatggtgaagggatggttagttttgggaagttagctttcagtgataggaggaagttncttgaggttactactagtcaggttcggcaaaaggttccagataagatgatcggaccgttgtttcctgggttgagggatgatgaggagaattttcagaaggatttggtgcttctgtggaaaaggagatcacttcttagtcaaatgtataaggttggtagtggtcagaatgatgagtataagacgagttctcaagaggcggttgatccaacgcagttagaattggatgatgttagggcgagttttgatcgttcaaggtctatctctcatcctctgcctgaggaggatggtcacactcaatgcatcaagaggaagggttttcggggatatgtctggaatggcattaaacaaatccttggaagatcgaatacgatgaatgcaagtccgttagttgccaagaagcatacttcaaacggcgagattaggcaggcgcggcttcaagaatttcttagatcaagtgacacagtaagactaatgttaaaagcttcaactgtgaagctatcttcgtatcgagcatggccaaatatgcatgacagtcggtttgcgctttacaagttgccattgcgggttcccaaagatgaccaagaatatgctggtttatggggaggaacttttggttggcctcctggaaagccttctgaagacaagcctggaaaggctttattctttcttctgctctcttatgaggagttccagggacaacagcttctcattgcaacaaaaattttggaaggcacacactatgtgttacatcctaacggttcagcaatgtttacagcaaatatcaatgatccttcatccgaaccctttccctgggacactgatgcagactcggttccagtgaatatcaagcaagctttcgtgggagagggtattgcaagtggttacgggttcagataccctggatcaaagcctggttccctctttgttttagaaaatggtatccttgccttcatttggaaggagtcaagggctgttttgaacttgcaaagacttaacttgcaagaacttttgaagaagggtgaaagggtaccttctctgcctccggttaccaatttttcatatctgacaaagtcctactcgaatgtgtttgctggcttccctagctcttccaattttttgtcttcaccaaggaatgcaaatgcccaatactagtatattagtggggcctaggatgtgggcccagattagtatggattgacaaagagactatatcctataagcttcctagctgtcggtggtttcgggaattgcattgcttgtggctgtcagagagtacacttccctgctgttatatttacatgttgttgcttcttgtgagaccaaagatgtaggtaacatttgtcaagtaatgtattatgtattgcttttgttgtgaattagaatctcatgttttatagggtatatcaggctgtttgttgtgatatatgcggaagaaagtataaattgagaatcctcataggctttctctctacatttgatatataatttgacataatttccccaaaaaaaaaaaaaaaaaaaaaccaccacc

SEQ ID NO: 66937 - DNA, 337 bp, Glycine max
  Clone ID: PAT_MRT3847_3145C.1
tccgaaactttgatcatttgaatattaaactttcgatttcaaagctcatttagagcacaaaatttcgtgctcttctcttcctctcccttcattcatctccttcttcctccaagctcttatcaatggcctcctatggtggtgagtttcttttagactcatcttctccttgaagtggcatctcctctctctcttccttctcccttccgctgccattcatcttccaagaagcaaaggaatccattgatgaagaagatcataggcctacaagctccaatggagtttacattaggatatatgtactataaccgaaattgattatgctaaaaaagtttatatc

SEQ ID NO: 66938 - DNA, 228 bp, Glycine max
  Clone ID: PAT_MRT3847_31460C.1
ttatggaaccggttttgtttttccaacaacgcaggtgggaaacgcatcacgactttggataccacagaagttcggcaaaggacacaatctaaaacagcaactatgggaaaaatcaaggcattagctgtcgttggggtgggagataccaccggtaaatgaaaaaaactccatggcaaattctaaatagaccaggggttaaaggaacccctataatcacatcaactgaca

SEQ ID NO: 66939 - DNA, 349 bp, Glycine max
  Clone ID: PAT_MRT3847_31461C.1
cccggtgcgcacccacccgtacgtcggatcctttaaagcgtgcgatagtagagttttgggtaccaactagcggtttttacatgttctcaccgttagcaaaaaaccggtgttatctggtataacaccgccaggaacccttcccaattttgccagctgcagcatcccttgtttactctattatccgatgtggcgagattaattactatctaaggggcggatttataccttctaggattttttttatttttgatgagaccttggcataaattttggtgggattctgacgacacattatataacgtgcgtctgggtgaattgatctttaaattttatcttgaatagaaataca

SEQ ID NO: 66940 - DNA, 1031 bp, Glycine max
  Clone ID: PAT_MRT3847_31462C.1
cggtccggattcccgggtcgacccacgcgtccggttttggccttttcatctctctctttctctctcttctgtgtttccgccgctgcataagcaaagtagcagtgactcagtcacttgcaacattttcggcttaacatatcagacccattgaaccatcactcttttctgttcctgctcatgtatctcatcatgccccctattccaatctagagttttaatcttttcaagtttcaacctttgttcctatgtagacaccccacttagtatatcatagccataataattatatcatatcttaatcatattaatcatttcacaatcataaccaaaccatgggttgcttacactccaaaaccgcacatcttcactcccctgaagaccctcctactgccttaccagactccaaaaaacccgatccagggaatggtggtgatgatgttgatcaagagtgtcaggttccagcattcaaagagtatggcctgattgagcttagaagggccacaaatgagttcagcacagattacattgtttctgagagtggtgagaaagctcccaatgtggtctacagagggaagcttgagaacaatcgattagttgctgtgaaacgcttctccaaactctcttggcctgatgctcaacagttcatggcagaggcagctggagttgggaaagtgaggcacaagagactggtgaatctaattggttgttgtgctgaaggagatgaaaggctcttggtagctgagtacatgccaaatgatactttgtccaaacatctctttcactgggacaagcaaccattaccatgggaaatgcgtgtcagagttgcataccatgttgcccaggcactagatcattgtagcttggaaaaccgtaaaatatatcatgatctgaatgcatataggattctttgtgatgaggatggtgatccacgcttatctagttttgggcttatgaaaaatagtcgagatggggaaagctacagtactaatttagcttatactccccctgaatttttgcgaacaggcaggata

SEQ ID NO: 66941 - DNA, 276 bp, Glycine max
  Clone ID: PAT_MRT3847_31463C.1
gttttgtcacgggtcagctgttttccttcagcatcccaagctggcaaggggacatttatactactatacctcccttacttcaactgccattaaatgatgttaacagaccatgcccactattgatgatcattcaacaaggtgctacaacctctctacccgtgtggcccagaaacttgttgaacaatattgccttccacatatagcgtagataatggactgctttacttatgggccgaggccttcgacaaccaaaattggaacgccggttacgccaat

SEQ ID NO: 66942 - DNA, 744 bp, Glycine max
  unsure (1)..(744): unsure at all n locations
  Clone ID: PAT_MRT3847_31464C.1
ccggaaacgacccacgcgtncgctaatgcattagcagaaagtgtaaatggccaaattcttattccaaaaggtttgcttgacgaggttgtaaatcttgttgaggcaccttttcccgtgcttggaaagtttaaggaaaccttcttagatcttccaaaagatcttttgactatggttatgcaaaagcatcaaaagtattttgctgtatgtgatgctaatggacaattattgccttattttgttgctgttgcaaatggagcaattgatgagactacagtgaggaaaggaaatgaagctgtgctcagggctcgctatgaagatgctaagttcttttatgagatggacactcgtaaaaggttttcagaattccgaaagcaactgaaaaacattctctttcatgagaagcttggaaccatgctggataagatgactcgtgttgaaaacatggttactaaactaagttgcctcctagatatcaatgaagatgtgcaacaaattatccgggatgcttcctcacttgctatgtctgatcttgccactgcagttgtcactgaatttacatcactttcaggaattatggggcgtcattatgcccttagagatggatactcagagcagattgcagaggccttgctggagatcacacttcctagattttctggggacatacttcccaaaagtgatgctggcatagttttggcaattgctgatagattagatagcctgctaggtttatttactgctggt

SEQ ID NO: 66943 - DNA, 621 bp, Glycine max
  Clone ID: PAT_MRT3847_31465C.1
ggtaccactcgagttttgccggggggttttgcggcggcgaaggaggtgttgcaggccacgatgtcaaggagtcgccgaatgtgtgcgacagcgagctcttccgtgtagtcctcttggacgatggtcagatggcagggtttcaaggatacgatttccaccgtgtctttcagcctcgtgcctcgcacctcgtgagataaagagaagttggtaaagtgacaagtctcaatgtgtaccgctaaaagctttctcacgtctaggatcctgtccgtggagatgcccttgagggtaacttgtgattcgtctggtgtttctactgtaatctcgatgacggtaggcaaaactttctcttcttttttcttcttctctcccttggccttgtgcggcttggttttcccagttttgggagccattgcactccaacgaaatatcagttgaattggtaatgttcccgaaatttataactttgcttggacggaaattactaagagataatagttgaattcatcgaattaataaataaacaaaaaaacttcctctgcatgtgaactggggaactctggaattttcttttatttttaaacaagaaaacagcaaccatttcagctggcaaaatgagagggg

SEQ ID NO: 66944 - DNA, 399 bp, Glycine max
  Clone ID: PAT_MRT3847_31466C.1
ttcgaactttaaaccatcatttagttgccatgcatcttccaccgatgtccacttccaataccgatttcggtacggcgccgccaccgggccctaccatgaggctccctccgagcacctccggcgaggccttgttctccgtcgccgccggcgccagccccggacacatgaccctcatttccagattcttcggttacgacgacgacgtcgactgccggtccttctatcagttcctagctggtgccatggcctaaacgatggccttatacgacggtgccgcagccgccgacaactccggcgaggacgacgataggccccacaaggggttcaagcaaagctgacccatgaatttggtcattgcttgttcccctgttttaactgtgccacccgggatgagccctt

SEQ ID NO: 66945 - DNA, 499 bp, Glycine max
  Clone ID: PAT_MRT3847_31467C.1
ctcttccaggtacatagtaatagagtcttgcatctttgtcttgtttgaattgcttgtccttggctctaatttattctgtagacatacaatgttatgtttgtacctatttggttaggatactgctttgaacttgaagctgtggtgcttggtggtatctttccttggtgaagaaaagtttggggcaagttaggctccttcacaagatagtagctccccatttagaaaggaaagagttaaaagacatacttatttttaggatatggagcactatatgtaactgctgttaggtttacatatccaattaagcatataaatatgactgatttattttcccgataaatatgaatataattaatcataaatcctatgtcaaacttcaattctagaaacaaagcattaatcattgcttgtctcctggatgtagaccatcaaattttgcagggattgatattttctaatttctacttcataaatcctacttccatttgtatttccaata

SEQ ID NO: 66946 - DNA, 257 bp, Glycine max
  Clone ID: PAT_MRT3847_31468C.1
gggttgtttagttcacacatctcctctgacgtcgtgtaatgggagattgcactttacacgaattgtttgagtgactgcgtctcatacattagacctgtatgtacaatacacgcgaggctaaattggttgttttagacggaggttgttcatgagctactgtacttgctaaagagatgctgtaccgctatgggctagtgcaccgtctgcttctgttccgtatgatctagtgagcttcactacatctgtctttatgactg

SEQ ID NO: 66947 - DNA, 979 bp, Glycine max
  Clone ID: PAT_MRT3847_31469C.1
caaacacatagcatccaatcacagctcaccagcttcatccactgcttttttggtttctctccctttggtggtgccttcccctttgaggaggagagagttgcaaagtttgttttaagattcattcttgctttttcagcttccatataatttccctctttttccattgggggggctcctattccttttttgtgcttagttttttttttttttcttttcaatattttctttgctgctcagcatcagggaaaaggtggaatttttatttttaaaaaaaagttttgttttgtgttgttttctaaacaagcttttcttcttttttcttctactactacttcctcttccctcataaattcagagtctttctgctctttcctaattgggtttgtacattcattgtctttggctgtgccccttttgctcctccttagcttctaatcacttcccaattggggtaagcgcaagttgaagctgcagaaagagttgtcagttttttctctctcaaagttgtcattttttttgtgggcattttttttttgctgtgtctcagttcctgtttagtatctgggagggaagttcattgggtttagatctcatctcacaagtggtttctagggtttttccttttggaccaattaggtaataatcttgaacctcaatttggagcattctctttgatttttttttcttcaacaaagtgggtcttttgtagattcctgaggagcatgcctcctttcctacacataaaaaaaggctattctgattccttttaaaaaaaaatgcttgttgatttatccttcatagtgtttgtggtaaaacctccacctctgcttctcacttactatctccctctctctcttgccctgaatcagccctgcttcccataaagtttgtgcaatctttcaagtacaatccacaaacacaaacacacacaccaaaccaaaacatcctgaattggctgaaaaccttgttctacatgctc

SEQ ID NO: 66948 - DNA, 400 bp, Glycine max
  Clone ID: PAT_MRT3847_3146C.1
gctctttttgcataaaatttcagtttctaggactaggatatatgtggggcaattactctagcttttttcgggaatgaatacatattccaaaaatagaaaatatgcacaaaccaaaataccccatgggttgtctccttacaaaagtcacgcgctaatgccattgaggcatttcaccgaacacttggtgggcgcgcgtttaggcatcaatagcaagagaacggggacaatgtggcatgtcctattgtttcaaaatgcattataggcctagggccatctcataccaacccctaattcaacctaatcaagcaagaaaacaaatcaaaattgccccatatatttgagcacactcccacaatttagagcaccaaaaggagatcaaaatacaccaatgaaaggctag

SEQ ID NO: 66949 - DNA, 307 bp, Glycine max
  Clone ID: PAT_MRT3847_31470C.1
ttccagggtctgacgatgctactatgtcggcggccatgccctttttttttttttttggaatatccaatttccaattttttcaatttcaaaactcagttcccttttatcaagtcatgtagaaattcagttaactacaacaacatacaaagcctgatcccatacttatcagaaggcatacaggcaaaattaaagagtgttatttagcggcatctcatacttttcatacaagtccaagatacggattggaaaaaaattacttatatgaaaaaaaagggcggccggtcgagatctagaactagctcgagcc

SEQ ID NO: 66950 - DNA, 382 bp, Glycine max
  Clone ID: PAT_MRT3847_31471C.1
aattctccatgcacctctccaccaattcctaatattttttttcattgccgcacacaacattcataagttggggccatattttattaaacaatatcttcacatgctactacaatatcatcactctctcaactctgcataccacaacccacaaaaacactcagacattaacacatccatcaccagctaccaaagccaacgccccaatcataattatataacacatcccgatgcctatattgcataccaatcccccaccattggccccacactagaggcttaccaacaaaactgaatacctgaccaacgtattgtactgcacatgacatggcttcttgtatagatctaaactttactcatgatatcagccttcaacttatctttt

SEQ ID NO: 66951 - DNA, 386 bp, Glycine max
  Clone ID: PAT_MRT3847_31472C.1
tttattacgcgtgcggaaagtctgattaaccgcgatcataggtcgccgcaccttaaaaccggaaacaaaagcattcgacacctgactgcaagagaaccaacagtgccctgctacgatcaccatgtgcgatttgttaatggaaagaaaagcactcgctgtgctggcacacacacttctggaagtgatgaatcttttccattcttagctgattagcggaacactctcctactagatattggacttcgtgccagatttaaacttcttgctgggaagaaaggctgctctgtggaaatatacaagtgcaagctggggaagacctggattagtgctgccactgtcccatctgggatcggacttcgtgggtagacttttctattcctatcctt

SEQ ID NO: 66952 - DNA, 107 bp, Glycine max
  Clone ID: PAT_MRT3847_31473C.1
tacgtgaagtcggaattgggttcggcttgagaacgagtccaatttcgtttccattcgtttctgtcgattggacactgcctcttgtctctctcaattggcttttcttc

SEQ ID NO: 66953 - DNA, 301 bp, Glycine max
  Clone ID: PAT_MRT3847_31474C.1
tctcctcaaccgcctccatggctgcacatttataactacagctcctatgattatctcggaaattccgaaatttgcccagaaggtcatgtcgaccaatgatgtgaaggtggattataaatagccctacctagtctggagccaatgcatcaagagtgttccaatgaggattagggtatgaattgctcgctggacctatgacgatgaagatgcctgggcagaactatactcacttgccttcgtagttgatattcctaaggatgatctcttatggttacgcaccatagttattgatgatgatgat

SEQ ID NO: 66954 - DNA, 346 bp, Glycine max
  Clone ID: PAT_MRT3847_31475C.1
actactcgttcggaacagagaaataggaattaggggtaattctattatgggagggagggaacattcagcttgggacctaaattgctgtgtcagtgggaaaacgttgccaaataattgttctgcagaatagctggtatagcaaattgaatactgttactggccaatattatactgagtggactccaattaactgaagaggtcattgacaaccaattcacatcaatggaggacataatgtcagaaagcatgatgtcataattgaatgagatgcatgttcaaaaccaaacagattgtggctcattggttgttgccaaagttggaaaccacaaacaaatcgtaggcttcc

SEQ ID NO: 66955 - DNA, 428 bp, Glycine max
  Clone ID: PAT_MRT3847_31476C.1
gggaaaaagactggccgttcttaacatatggtctttcattaatataaaatgaatcaaacttggtccattgccaaacttttactattttttatgaattacatttactagaatggcactatgtgggttattcaaaagaagaaagcatgtccacccaaatattacaaatgagtggatattaaaaccaaaactctgcctgtgtttcttatacagaaagattggtttcagaatgaacttgattgaaattgcaagagctcccgctcagctaaaacttttggaactgttgactttaatttcaaatcacttttctgggcgagatcaatgagaaccacctgcgcagagactccatatattaatctatgtcctgcaaccttgaatattctgtccaacatccatattgctttttcttgaacctttggattctcaacttg

SEQ ID NO: 66956 - DNA, 292 bp, Glycine max
  Clone ID: PAT_MRT3847_31477C.1
tggtcccaggggttcagctgaggtagggacgtgctgtaggccggaatgttaccggctgttggatctgcggatgaggaggaggatcctgcggaggaggattgtcctgaattggttcccattgagacgacgcaaagcgaggaggaggaaaagtctggcctcggcgccaagatcccagtcacaattatcaccgggtatttaggtgctgggaagacaacacttctgaactatattttgacagagcaacatagtaaaagagtagcggtcattttaaatgaatttggggaaggaagtg

SEQ ID NO: 66957 - DNA, 180 bp, Glycine max
  Clone ID: PAT_MRT3847_31478C.1
gttgggaggtatcattaatctagacacattggatctatctagcaataattgttcagggaatgtgccagcatctgttggttttcttgagcatctcctgaccctgaatttgagtcataaccaccttgatggttacttgcctgctgatgttgggaatctcagtagcatcagattcttgatttg

SEQ ID NO: 66958 - DNA, 855 bp, Glycine max
  unsure (1)..(855): unsure at all n locations
  Clone ID: PAT_MRT3847_31479C.1
tatgaaacgtcgcatggcacgncnngtacgtannagcttggaatcctctagaaagcggccgccctttttttttttttttttttttttttttatttttttttttcttttttttttttttttttttgttttttttttttttttttatttttttttttatcattttgtttttttttttgtttttttttttttttatattatttgttttttgtttttttttttttggggaaaaaaaaaaaaacgaaagtttaaaaaaaaaaaaaaaaaggggaaaaaaaaggaaggggggggggccaccatataaaaaaaaaaaacccaaaggggagcccaaagatacagggacggggttaaaaaaaaaaaaggaaacactaaagaaaaggggaaaaacccccaagggaaaaaagaggtaaacaaaaaaaaaaaaccgagagaggggggcccacatggaaaaaaaacaaattttagtaaaaaaaaaaaaacaacccattattattggacccccaatttttttttgtataaaaaaaaaagaatccacccgggaattacggaccgccaccgggaggggaaaaaaaaaaaagtattttgagccccaaaaaaaaattggcggtgtcccccaaacaaattgttttctggagggaggggggaccccctgaaaattccaaacagatacggggggggaagcaaaatttttaaaaaggggggggcctaaaggagggggggaaaaaaaaaggaaaaagggggcccctgggggaaaaaatttaccgcgcgaaaaaaccgaaaaaaaaaaggggtggaaaaaaaaaaacaaaaacccgggggggggcctaaagggggacccccccccaaagaggggggggg

SEQ ID NO: 66959 - DNA, 398 bp, Glycine max
  Clone ID: PAT_MRT3847_3147C.1
aagaaaaaacagaaacgaattattttttttcagcagttcccataagcgttttggtcgttcctttgtcagcaaattgaaaaaacaagaaagccctgttcaataaccaacccaaattaaataactggctttgggggaacaacctggggttctaggggggaaaacccccccccttccttaggggtttttacggggctttccacgaccttttcctttttctttataaaaccctggttaaatctatcataatgggggaggtcagtagccttgaacgggcggtcgcccaaaacttgaaacaaggcggcctggggaagtacttttttttcaagcagcaactctgcaattggaggaacctgctccttggggtcctcgataagctgaatccgatgtttgtatgcttt

SEQ ID NO: 66960 - DNA, 525 bp, Glycine max
  Clone ID: PAT_MRT3847_31480C.1
aacaacccgaagctacgaggcgggaaaaaacaggattttacttcgccatccatacaaaatcgattttacgggattacataatattctaaaacacaaatcccccaaaacagattttttggtttaatagttaaaacactaaaaagtgggggaccaatagtttacaaacccgttcaattttcaacatttgaaaaatgacagaggggaaagatgaaaaggggaaccctaatttaaaggacagccctaatttttgcataagccagcgctaaccaatgtaaagatctatttgaaacaaaggagatgcatgcttttgagtacaatcagatcgttttgagggcaatgttgttgaaggttgggctgggttgtaacttggaaattgcattccaggggccatttgtgggggcatagttccagagggcatgaaaaaatttttgggcatttgcattggcataaactgaaccgttgttgctgggggaggtgtcccccatccagcctgaaacccattgtttggttggttggggagggccc

SEQ ID NO: 66961 - DNA, 305 bp, Glycine max
  Clone ID: PAT_MRT3847_31481C.1
ggtcaatggtgggagtggttactcgtgcaactccttctgctgctctgggtgtgcggtggttgtgtctctcatctcacacagtcgaacagctcttgcaactgtggtaactgtagctcctgcaactcctgcaactgctgcaacggctgcagaagctacaaaaagttgacatacactgactcaactagaatcgacaccatggacatcgtagtcataccagttaaagctgaaattgctcatgttgaaattgctgaaatcgctgataacgatgacaacaaatgttgcacaaattgctcatgcagctcctg

SEQ ID NO: 66962 - DNA, 440 bp, Glycine max
  Clone ID: PAT_MRT3847_31482C.1
tcttttttcatctactttgtccttggcacttttcattcccgggatatgattttattgagtgagatgagaccgatcttcagcggctggagtgccggtggttaagacttatgttcccatgccacattgtgctaaacaatggtctttgctttttggctatattctgcgctgatgggacaactgtcactagtgactggtttgttcaaagcgctgtgagaataaacccatagctgcaagaacctttacatttctgggcaaatcctttccaacgatgagtgaatgatctatgcctacccgacaggggccttgaatacaagactccaacaaaacagcgctcaaagtatgccaagagaccatattgctatcataattcttatggtaaatttttacctcatcgactaagaacgaccccactcatctgtggacatatacaatgtaacttt

SEQ ID NO: 66963 - DNA, 646 bp, Glycine max
  Clone ID: PAT_MRT3847_31483C.1
cttacgcgtgggttttgaggtttagcacctccagagaaaaaggaaggagcagaacacgacagagtgagggaagctttgtaaaattcttattgccttttgcttgttattacaaggttcttatagaattcctagtacagaatgattctaggaatattacaataaccaattctgataaaaagttgctccgcaggaccaacaatttcaagcaaggcgatttggagaagatttggcagaagcttctgttttgacagtttcctcagacgaaatccagacgaaatcgtgaaggggaacctgacagaggcagttaacgaacaaacagatgggttgggccatagcactacacggcggcgccggcgacatcccgctttcccttccaccggagcgccgccagcctcgcgaggaggccctccgccactgcctccaaatcggcgtggaagctctcaaggccaaactgcctcctctcgacgtggttgaacttgtcgttcgggagttggagaacattccgcagtttaacgcgggaaggggatctgtgctgacttgcagaggcaccgtggaaatggaagcttccataatggacggcaccactatgaattgcggagctgtttccggcctcactacccgtcgtcacgccatctctcttgctcga

SEQ ID NO: 66964 - DNA, 484 bp, Glycine max
  unsure (1)..(484): unsure at all n locations
  Clone ID: PAT_MRT3847_31484C.1
gtggtttttggttgtagtttgccgtctgtcctttggtatgggggcttgtntgtggtgcagaccactggggggacgggtgtgtgtgaaccgaaggtgtgttggagattttatgctggaactgaatccctgccaaaggttgaaggatcagatataacagggattgaagaaatagtgattccaaaaaagagggcatgggataaagtggctgttcttgaggcacttgcatgcacagtaaacagggatcctacaggtggacgttatgtatttgacgatgatccttacctgataccaacctgtggtgtggagtgtggttcatttttattggcggagaagtgtggagagactggagtttagtttattattgattgatatgccggatgtttgcgaatggatatgggtgggcctgatgtacggggcttgatggctgagtgctttggtcctgggatgggggatgtgatgtagtgtggcgtggtggagcgtatgg

SEQ ID NO: 66965 - DNA, 545 bp, Glycine max
  Clone ID: PAT_MRT3847_31485C.1
tattcattttcaagagcatgacattaagcctatggatcagataggacgcgctagtttagttaggtataaggctttgtttacgttctgttggttggtctcaaaagagaaatgaaattgcattaagttgatggaacgcttcttaagttcttattctgctacagctattcctgttcttcaagaatgtctgttttggaaatttgctattcaatttctctacatttccatccacgtcaacagatcttatttaatttattgatccaggaaccttttaggggagttttcggcatcatataatacaacagtttgatgtgttaaattttcacaatttatattttatatataacagaatattatattacacatattattggaaggaaagatgattttaaatggcttccactccattattgattttgatggagaaaaatattgtacgaacccctcataacctatgaaactatcccaattattgatctaaacagtttagaatttgtcttatagtaactgcagattaactttatcaactgcatattgattgctatatc

SEQ ID NO: 66966 - DNA, 282 bp, Glycine max
  Clone ID: PAT_MRT3847_31486C.1
aggaattcggcacgaggagagaggcaaaagaaaggagaaaaattaaatgaaaaaagggaaaggacgtggtaacaaagaacaaaacgaaagaaagacaaaagtgaactcagagaataaggggatttggtagaggataagctcaagtccaaaaaacctgtcctgcaaaagcataacttgctcgtgctttccttcacggtttctggttttgtgtttgagaattaattgcctaaatgaaccaagctttattcccttataacagcatattgtatcattagtatgccg

SEQ ID NO: 66967 - DNA, 644 bp, Glycine max
  Clone ID: PAT_MRT3847_31487C.1
cagagaccagaggcgggagcagggtggatgttccacacagagacttagaatctttgtagaattgcatattagccctcagcgatgcaagagtcatagtggccaaacctggggattgtgatacactcgattctgaattctccaatctgtgacttattgacacttcttgagtgggggcggggtgcactaacggtccagattggggcatctgacactacccgagtcatactgagtggggggagcgaactggggccaatccttctcactatgcccacgactacagactgcttttggtacattaaaggggcctgaatcatagccacattgctggagattcacctgcccaagcctcgtttgttgtcctaaacatgaggacaaaatgcagggttcctattgggcatgataaccaacatggctttcgattttgctcattgaggaaccgtgacgggctacagctgtgactatggtgtggtggatacctccatggggtggacatggtggtagcactatcctgccctctctcagtgttccacaagaacgcggcacatctgtctgataacgcggcatcctttgcatactgtggggtgcctatttacttagccctcctctttcctgaaagtaactcaaagtcgttggccatgacccta

SEQ ID NO: 66968 - DNA, 537 bp, Glycine max
  unsure (1)..(537): unsure at all n locations
  Clone ID: PAT_MRT3847_31488C.1
cgggaatgcaacacatgcatgcaccacatatgggtcctttttcacctataggtgttggcatgcaaatgaggttaggagtgggttgtggaatgggcatgcctgatgctaatgatattgagtcctctagatttattcaagtgccccaaatgcaaggaactcatcatcctagtcagggtcaccccattccaatgccacatgctcccatcttttctttcccaggagaaccttttatcaacccatcaactttaggacttgtggaaactgtggataaggcttcttcagcctttggcttaattaaggatcagattccacaacttgcacagaacaccaacaacggttgtaattcaacaaatcagatgtcaacagtacagtgtgaagcaaccattggtggatttgaacactcaattgtggtacttaatagtggtcatgcaacttcggtaaatgacagaggagctattaatcccagtgcagaagataacccttatcattgatanatctagcatgtattactagatgctcgtgataaatatacgtgtt

SEQ ID NO: 66969 - DNA, 1456 bp, Glycine max
  Clone ID: PAT_MRT3847_31489C.1
agcttccgccctccaggtgcctgcccgttgcggggttcccaccccgggtggggtcttgcattccgcggttcgtgcccctccctggggttcgacctgtgtatttctcaatgatgttaagtgtctttgtgaacttccagagacctatgaggcatataagaaacaacaacaccgctggcattctggtccaatgcaattgtttcgcttgtgttttcttgatatacttcgttcaaaggttagttgggtaaagaaggtcaatttgatatttcttttcttcctcctgaggaagcttatcctgccattttattcattcacgctattctgcatcattcttcctttgaccatgttccttcccgaagccgagctcccagcctgggttgtttgttacattcctggaatcatgtccctcctaagtgttctaccagctccacggtcatttccatttatagttccttaccttctatttgagaacactatgtcggtaactaaatttaatgccatgatatctggattacttcgctttggaagttcttacgagtgggtggttacaaaaaagttgggaagatcatcagagacagatttggttgcctttgagaaagaagctgaacctctaatgcgatctactagtcttcatagatcatcctcagattcaggcattgaggaactaagcaaactagaattgtcaaagaaaactgggaagaccaagaaaaatcgtctcttcaggaaagaactttatctcgcattaattttgttgactgcctcagttagaagcttattatctgcccaaggaattcacttctacttcctattatttcaagggataagttttctggttgttggtcttgatttgattggagagcaggttagttgatgtccagattttggatttttagtgcatacaaaacctctaagatcctcattgataaaggtcagaatggccaaaccataaacccatccctgaacacattgatttgagcctaagctgttcagtgtggtttttggctcccaattaaagcaaatcagttgctgcttgacgccaaacttgcagttttgtttttggtataagacttatgcctcattgttgttgccgagtcatatgccttaagttacataacagttgtttcagttcctaatggcaaaacgtatcaacactttggaaaaaagataaaggggtttaacattcctgtcctataatgcaatgccattatagaattacttgcctgcctgaattgaaaaggtggagattgttaagattataacatttgttattcttttttttttttctatattgacatactgtacaatcacataatttcattgtgtcgttgctcaatttgtatttgttatcaggcagagaggtttttggcacacctgtcagcaaacatattttcatcttttaccattaattttaactgttgtctttatcatagttaattctgtacttgattaaaaacaaaaa

SEQ ID NO: 66970 - DNA, 555 bp, Glycine max
  Clone ID: PAT_MRT3847_3148C.1
atagaccgtaaaacataaattatatatggtctatgatcaatgtacacatataacatgttatatctttcctcactctttcttcaacccaaattatatatttcaccatttgatcttgtcgagttctcttttagctttgtcaatatattacatgtacgtatttcaccatttgatcttgtcgagttctcttttagctttgtcaatatattacatgtacgtattttaattctttaattttacttttaatattatcttattaatttaattcagttgattaaacatgctaaattaataggtgtgttattgtaaatttcaaatagtatttttttttattcttaccaataaaaaatatcttattaatttaatgtatttcttattttgaataaggaattatcttaaaaaaataaataggataaaattttttaagtttatataaaattaaattatatatatgttcatcaagttattttaattaatttttaattttttgacaaatttataaatatttgatcaaataaaagtgtttaaaaatgattttttcttattgatttataagct

SEQ ID NO: 66971 - DNA, 255 bp, Glycine max
  Clone ID: PAT_MRT3847_31490C.1
atttgtgaaactaacaacaacacaggccatcatcatggcagctgcttccccaatggcaagccaactcaagtcacttcactaggactcttgtagctccaaggcctctctgctcttcaccacttacctctgccttctagaagcaatttacttcatgttaggccatcaatagagaaccacctatcaagtgattcaccaatcacggtgaccattcatgaagcctgaaacccattacatcagcccttgatcgcatgtact

SEQ ID NO: 66972 - DNA, 178 bp, Glycine max
  unsure (1)..(178): unsure at all n locations
  Clone ID: PAT_MRT3847_31491C.1
aagaaaanaannngaaaanctgcangcacacgtcaacgnnaagcncggaaattcngcncgagnnntgnggcacacnggctaganccanaaagcnntntanntagcannggccgaacgaatganatcccctcccacataacacnnanaacacaanaacccacagagaaannaaggnant

SEQ ID NO: 66973 - DNA, 130 bp, Glycine max
  Clone ID: PAT_MRT3847_31492C.1
gtcgatatccaacaaggaaagatcagttcttcccctacgagggaaaggatcatcgtccaaaatataaaaattggggtgacaaaacaataaccccaatttcttgcatatgaaacaaaatttttagctaacc

SEQ ID NO: 66974 - DNA, 921 bp, Glycine max
  unsure (1)..(921): unsure at all n locations
  Clone ID: PAT_MRT3847_31493C.1
atcaaatcaatggtttaaatttgacgatgaacgagtatcaaaagaagatccaaagagggctttagaagaacagtatggtggtgaagaagagttacctcgtataaatcctggcttcaaccactctccttttaaatttacaaaacactcgaatgcatatatgcttgtctatgtacgtgagagtgacaaggataaaataatttgtaatgtggatgagaaggacattgctgaacaccttagaatgagattaaagaaagaacaagatgaaaaggagctgaagaggaaggagaaggctgaggctcacttgtacaccaccataaaggttgcttgtgatgaagatctacgtgaacagattggaaataatatactctttgatcttgtggattatgataaagtacgaagttttcgtgttcaaatacaaatgccttttatggttttcaaggaagaaattgccaaagagttcggtatacccatccagtatcaacgtttttggttgtgggcaaagcgccaaaacaacacatataggccaaatagagcactgacacctcaggaagaagcacaatcagttggactgctaagagaagtttccactaaagcaaataatgcagagctgaagttatttttggaactagaaatggggcaggatttgcgccctattcctcctcctgagaagtcaaaagagaatctcttgcttttctttaaactttatgaaccttcaaatgagaagcttcggtatgttgggcggctttttgtgaagagtagtgggaagccagaagatatattggtanaactacatganatggctggatatgctcctgntcanganntagacntgttcgaggagataaantttgtgcctaatgnctgtgtnaccgggttgccangnnacccactttctgggggganccccntggggnggggttt

SEQ ID NO: 66975 - DNA, 281 bp, Glycine max
  Clone ID: PAT_MRT3847_31494C.1
tttttttttttttttttttttttttttttttttttcatggaccacttggcactaattttttttatactttccaaaataacaaatattcatgcgcctccaactcccctctcaaaagggaggggtaatttgacagagggtcatggcaacgtggttcttcaatttcgtaacaaaaataagcataacattaatgctaccaataccatcaaccatcaaaccatttcgaagctaacagtgactccacacgttattccattatgatttaatgccaagcggacgcgtgg

SEQ ID NO: 66976 - DNA, 418 bp, Glycine max
  Clone ID: PAT_MRT3847_31495C.1
acgcccgcaggcaccaaacccgaaaaccaccaacgcccccggccaccctttaaaatttatcgcccgcacccaaggaaaaggagggggccggggggacacgcgcagacaaagcaagacctaacccaaaccaacaccaaaacacaatccaccgcccgacaaccaacaaacccgtaacaaccaaaccccaacccaacacaaaacccaagcaccacaccccacatcccccgctggccagcagacgaaaaagccaagaggcccggaccaaacgcacatcccaacaaccacaaagccaaaatggccaacgccacgcgcccagcaaaaacacataaagcacggggggagacgccgaaacgcacaacaaaaccgccaaacccgccagcgccaaagcgcccactcaaacacaaacaacaaaccacgc

SEQ ID NO: 66977 - DNA, 400 bp, Glycine max
  Clone ID: PAT_MRT3847_31496C.1
ggaattaaattcaacccggaagttttaaaaatgttttaaggggggtttttctcccccacccttgaaaattggggttcatcggctttgggggggcccaaattcaaaaaagtaacaccgggggtgggccccttcatcattcacattttaaaaaattttttttaaaattcaaatcttaggcggggaccaaacaaaaaaaaaaggggtttttatttgaaacttaatttaagcctcaacattttcctcaggggccgaaaaaaccaaaaaaaggggggggttttcctttccaactccacacgttccataaatggggtgggtcctacccaaagccttcaaccccaaaagagcccccttttgccctgattttttcaaaaaagcgggggttatttgggggctttacaag

SEQ ID NO: 66978 - DNA, 338 bp, Glycine max
  Clone ID: PAT_MRT3847_31497C.1
gccacgcgtacggttaaaaccatatttgggtgtgattcatctatctcaaacaaccatgaacgatagatcacgctttggctagctctttatcattcgagcgcactccgacggcggtaacgacacctcctcaccgtatccttgcatccgcggcaacggaaacagtggagtgatttctccaacgcgacaggcgtggacgacgatgttatggtttctacactgagacatacatacgacctggggcgaatcttctacatgactgacaaacatgtgcaagatatgcacgcgaggaactagatagaggggctcgaccaacactaattgcgattcgataagagcat

SEQ ID NO: 66979 - DNA, 258 bp, Glycine max
  Clone ID: PAT_MRT3847_31498C.1
cagatagattggacaggtctctcacacttggtcacatgcaggggatgatgcaaatggcacttgtatggcatacagggcatgctattcatgaagatgtacctgatgaatttccaactatgattgttaacttcatttctcgtatcctaattggccctcatggtactgagatacctggcctctcctagccagcctctaccaaaccttgaatctggtatctgataaaccaagaacgaccaccactgccagatgaacatgatg

SEQ ID NO: 66980 - DNA, 339 bp, Glycine max
  Clone ID: PAT_MRT3847_31499C.1
atgaactactatgtgacaggacgatctttagtgctgctcttgatctataacagtccgggatgaattgcggctactgtatctcttgcctagtcaaagcccgatgcgtgtcatctttactcctactaacacgaatcccaactacttcaacagaacaacgacctgccactacacgacttcccctccctcgccaacgaacctgccaaacacaagaataacaaggcccatacctactgcctaaccgaattcaccatcaaacacgacacctcatttgactaccaagatcccgtattactcaccaccgttcctcgccagcgcaccgtcgaagagctctaacgcacc

SEQ ID NO: 66981 - DNA, 617 bp, Glycine max
  Clone ID: PAT_MRT3847_3149C.1
aatcatcatggacagaagcttacatcaacaaaatagaaaaattacaaaatatttcttctacaaggacttttcacaaacactttgtgaaccaataataaccaaggcttaaccactcatgacaaaagctaaaatcatcaaaacatgcctaaaaggctgaaatcattaacctaaaacaggacaaatatcaataaaacaatgaaaaaattattcaccaaacagttggtgtgcacctttctgaaatagtgcatgacttcaaacaatagtcaatatcttcaaaatctttagtagcatttaatcaaacaccttgtaggcaaactaaaactttaatggaggcaaacaattatgattgcttatatgaggctttgactgttgtcgccatgttatcagctgaaactacattgctaccagcacagagaaagactgagaagaagaggaaacatacaatatttaaccttcctgatgattttggattgggtgatcacattcaattgttgtagatatacaagtgttggaatcaaactgattttgacattggttggtgcaaagataatgtcttgcaggtgtaaggtgcagtgcgctatgtgccactagaagccagtcacgttgacgtcggtaag

SEQ ID NO: 66982 - DNA, 503 bp, Glycine max
  Clone ID: PAT_MRT3847_314C.1
cggaatatccataggttctattacgctatgtctgctaagtggtctttttttcatctacatacttatggttcttttctctgagagcactactccttttgtaaatcttagatggtaaatctgttgttcagaattccatttaccttcatgtacttttcttaccattacttatgacattaattacatatataggtacttggatgttgctggccttaagagctccaaactttacatttggaatggcattgcattgttcttcgggtggttggtactgtctaatatactctctataatcttgacctcaactctaatttctctgtaatgaaatgtggaatatgtcgtatgataagttgtgtaataatgacctgaagttacttatggtttctattttggtgctatcattttgtaattttgtatctggttctgaatgagccatatttgggctaatggcaccaattagaaagcaatggtcaaagataattagaagggttttgacaaaatgaaaa

SEQ ID NO: 66983 - DNA, 368 bp, Glycine max
  Clone ID: PAT_MRT3847_31500C.1
tgggattcggagaggttctcaatctccggttcggcacagaatgctcgatcaatctcatgcactgtcacatctactgcacaagcgacagtcacgcgaccaaatccaaccagcacatcgtcatcaggactcccggtggcatgcttgtgtagcagacgacgactaggagggccagctgttgcaactgccctgtcactgggaagaggattcaagggattccacatatagagccagcacagtatcatgtatcaatgttacacagtggccggccgactgtgagccgtgcatatggtagtgtgttgtctggcagtgctgttagagattgaatcattcaagctttcgtggatgaggagcaaaggattgtgacaaag

SEQ ID NO: 66984 - DNA, 476 bp, Glycine max
  Clone ID: PAT_MRT3847_31501C.1
ggctcgaggtcagacaagtgcctagcgtagcattgcggggtttcctatgagacagtcaccgacgataatgagtctcctcacgatccacatgccttcactcagggccttctttatactggaaatgacacctcatttgagccaactggactttatggggagtcatctgtccgcaaagccgatcttcggactgcgaaggctgacattattcacaagatggatgatccttatttaggggaaggtataactctcctcaatagcaggctcttacatggaactcgagcgcggacacatggctccatatatgacccacaacatttacgcccaattgggacatttaatcatgatatgaatgatgctagccgtctggcaactgctggaacagtcttgttcggaagtgatcggcagttcaacattgcattaaatgatttaaactgatcctcatacatttaaagctgtatcacaacgtgtagactact

SEQ ID NO: 66985 - DNA, 226 bp, Glycine max
  unsure (1)..(226): unsure at all n locations
  Clone ID: PAT_MRT3847_31502C.1
tgttgaaatggtctgattatctgattctgatctagatgatgatgaggatgagtaagaccagctnctaccatttaagcttatcatgtggtctcaggtatctaagcttactgacgatcagcagaaagcatattttgattaatacgattatcgggtgtaacttctactgtcaaagctatgtagtgtagatttgagaaggatgcttgagatctagtctggggtatcacaa

SEQ ID NO: 66986 - DNA, 434 bp, Glycine max
  Clone ID: PAT_MRT3847_31503C.1
aaaatgcttctttttattttacatatattttttcccccacacctttcattctatttcctaacattgctcacaagcaccataaacagaagacagatacaaaacgattgaacaaaaatgaatgacaaaaaaaagggggggggaggagacaagaatctaaaatttcaattatctacataagcaaaaaggaaattctctcctcccaacgtacttgaaaagagttcgcccaaaaaacaagggagcagacaaacagctttaaacgcccccccatggaaaaggcggcaagatccaacgagaaatgcagggagctctaaacgcgcgtccccctgtattaaaaaggccacctctataaccacatggttgagggacccagggacaagactcacaacacctcttgcgacagtggaggagccaacatcaactccaagctgcaaata

SEQ ID NO: 66987 - DNA, 287 bp, Glycine max
  Clone ID: PAT_MRT3847_31504C.1
gggggagaaaattgttgtggtcagtttgacatgcatcaaaaagacagacacaaaggtcagtgtgcgtgcagtgttcgaatcggtgaatctcaagatcatcactgctaacaccacttcgttttcagacacgcttttcaagatcatcttcattgaggcaaatgacgatgagaaagatcaggtgcagataaagatgcatacagccagtaaagctcgtaatgacccgttaaaccccatgagcattttaggaacaacatatatgaatttggagcgttctcactttggggtca

SEQ ID NO: 66988 - DNA, 1491 bp, Glycine max
  Clone ID: PAT_MRT3847_31505C.1
acacctccatatcttcaaaagacctatatttggtaagccaatcaaattggacattaataaaggaatggagagggcagaacaaattggaggaggcaaagctgtggccacagtcctagccattggcacagcaaatccacccaatttcatccttcaggaggattatcctgacttctactttcgggtcaccaatagcgaccatttgcaccgcttgaagcaaaagttcaagcgcatttgcgagaattcaaagatagaaaagcgacacatagtccacacggaagaatacctaaagcagaactcagacagcggcacgtacgatggccttcccttggagacacgacagaatgtccccacggaacaggtaataaaattaggtatggaagcagcatcaaaggccattaaggaatggggcgaacccttatcagaaatcacacacctcatcttctacaccacttcttgcttcggctccgttcccggtcctgaccactacctctccaaacaacttggactccgctcaacggtcaaccgcctcatgctcttcagccacggttgccacgctggcggcaccattctccgcgttgccaaagatatcgcggagaacaaccctggctcacgtgttcttgccgtctgttccgagaccatgtttgcctcgtttcgcgctcctagcgaatccaacgttgaggttctcgtaggacaggctctgttcggagacggtgccgccgccgtcatcattggcgcggatcctaagcactccatcgagcatccactcttcgaactcgtgttggcttctcaaaccactgtgcctgacaccgagaatgcgatcaaaggaagtcaacaagagaataggttggtttattatttggataaggacattcccaatattgtaactaacaatgtgaagaagtgtttggttgatgagttgggtgaagttggtttcgtcgacgaaattgattggaacaagtttttctatgcaattcatccgggtggggctgttattgtgagtggggttgaagagaagctagggttagagaaagagaagctgagtgcgacatggcacgtgctgagccaacacgggaacatgtggagtccaactgtgatttttatcttggatgagatgaggaacaggtccaagactgaggggaagagcacaaccggtgaagggttagagtgggggattttattagggtttggtcctggtgtggcaatggaaactgtgcttttacgtagttatccatgttgataaatagttacaaggagttacaaatactactactgctactcatgtttatgtatttatgggtattttttttaagaataaatgtggtaactttcttagtaagagaaattaaatgtaacataatcgttgtatgtcacgattgttttaagagtttggatattgtaataatgatttagacaacacggcctagttgttcgagaatttactattttagaatcaaaaaaaaaaaaaaaaaaaaaaactgagactagtctctc

SEQ ID NO: 66989 - DNA, 251 bp, Glycine max
  Clone ID: PAT_MRT3847_31506C.1
ctctagccgctcgagccgtttcaggcgtcgttgatctttttctttcgaagagatcctcgcatacacatctcacacttctcccacaagcagtcagatttgcattcgagttagcgcttcatatatacgcgagaatctagtagaccagtatatgtatctctactgataatcctatgcatggcttctaccgcaactcccgttatgcgatactgctcgcttttcgatcatctccacgaagagatgaaaatggagtg

SEQ ID NO: 66990 - DNA, 736 bp, Glycine max
  Clone ID: PAT_MRT3847_31507C.1
agaaggttattctagttctagaagtgaagggagggtcgaatatgattgtttctgaataggaaaatagtgtccaaccaaggtcgctccccgtttgatttcaacgccacccaccaatcaatctcacatccatcgccaatgaagcggaagaagtggtcggagctggaagagcaaaccctactctccaaatactccgagctcctccgttcaggaaccctcgccaagctcaaaacgcgcgagaagaagttcaagccggtggcggagcacgtgaacgcgctgcaccacctccgcgacccagcctcgttccccttcaagtggtcgtggcgcgacgtctcgataaaggtgcagaacatgcgccaccagtacctcggcgtcaagcagaagatccgcctctcccttcaccacttcaattggaaggacggtaacaatcattgggagaattttcttaaatacaaagaagtcttgggcgatgtgcaattgttggaatccccaaaacctatcaccaccgccaaattagggtttgatgttgattctgatgatgatgatgagggagaatgaggaggaggaagaagaagaaaaagatgacgacgatggtgatgaagaggaggatgtgttgaaagtgaggaggtttggttccgtggtggagcttagggaggcggtggtgaaacccgaggagaggcggcgggagagggagtttcggcgggagaaggggaggcggagcgggagagaagcggaggag

SEQ ID NO: 66991 - DNA, 275 bp, Glycine max
  Clone ID: PAT_MRT3847_31508C.1
catacctgatcaataactttgtatacatatgattccaggcaagttctagtgtacagtgtgctatggctggtatcctgcataaattattttaaatccttggatataataataaaataattaagggtgtagatcttgaggttgtaccatgtaacacaaagcatgtcataatatttttttccaattgataattttcttttttatcgcaaagctttctccctctctttcaatttctctgtcttctttttcagattcgctccaccacagtcccttcttcc

SEQ ID NO: 66992 - DNA, 131 bp, Glycine max
  Clone ID: PAT_MRT3847_31509C.1
ggctcgagctgctcgagaaacagatgaactgacggaattcctccgcacatcggcgatagaatgggagaaaggtctcgggattgagcagcaccgtcggacaaaccgactgtgcctagcatggggttctgaac

SEQ ID NO: 66993 - DNA, 1065 bp, Glycine max
  Clone ID: PAT_MRT3847_3150C.1
atattgtacagaagtaggagaccaacctcgcctcatggagctagcttttgggattgagttaggctcaaatccaaattttaaaatggaatgagagtctatcgtagcggttattattaatgtccagtctagcaaaattcacgctagtagtatcaattcctcggctcgagggggtgttagagataaggataaaattctaatatcataaaaatttcacttttatagttcctcagtgaagctttctcttaaacaaaacaaaaagaatgatgagagaatgaaagtgtatcatcacaaacccaataactggcaagcttggtgaaggcgctgggagggcaattcggcatcgaaaggaagctcgagaagcttctgccagaagtcagaggagagagggatggacacgtcgccgacgaagcttccgacgagatgctccgccgtgtccggcgttgacagcgccgaacccattgacttgtactgaatgaaaaaaatgtttcttttttttgtgtgtggcggtttcagggaaacggcattgcggaatcacggtggaatacgaaaagggttggattgggagatgaaaagtgaggtgggttttgaaaatgaggggagttgatgcagcacagacaccacaagaggaggaaggagcaatggcttcaaaaccaaggtttttgtttccttcccaaacaaactacttgtttactcaatgttttgtatcaaatattagtatgtcaagctaagagacaaaagattactattttttttttatggcttgtggtgataaggactaagcagaaggttaggctatctatcttctttttaaactttattttatctcctagtaaaaaaaaaatgaaactaggagtattatttgtaagtcaagattacacgttatcgaataataatttatactattaattagtctgcttaaacatgttaatcgttcaatatgtcaccttaattacgaaaactttatcattaattgtgttggttcgttatttttctaattttttttaaattatatattgaatttataaccaccacatgataatcaaattagtaacaaaatgactattt

SEQ ID NO: 66994 - DNA, 530 bp, Glycine max
  Clone ID: PAT_MRT3847_31510C.1
cggtcgcgtgggcggacgcgtgggcggacgcgtgggcggacgcgtgggctcagacccctcttatttacagagctgttccaagctggtttgttagagtggagtcgttgaaagagaaattgttggaaaacaataagaagacctactgggtccctgattttgtcaaggataagcgatttcacaattggctggaaaatgcaagagattgggcaattagtcgtagtagattttgggggacccctctccctatatggattagtgaggatgaggaggaagtagttgtcatagattctgttgcaaaacttgaagagctttcaggtgtaaaggtgtttgaccttcatcgtcacaacattgatcatattacaattaaatctgacagtggccgtgtacttcgacgtgttgatgatgtctttgactgctggtttgagagtggatccatgccgtatgcgtatatccattatccttttgaaaatgtgagcttttgagaagaattccctggccttttattgctgagggctggatcaacacgggtt

SEQ ID NO: 66995 - DNA, 486 bp, Glycine max
  Clone ID: PAT_MRT3847_31511C.1
aatacattatttatattgatcaactaaatctaccaaatgacaaatttatttctttactatagaaagagccgaaattatcttcaccttattaaacgaagatggagaagaccacccagaatcttgctaactccacgaaatttctttgaaaatgctccgcccaacagcaatgatattgtcacaccagaagctatgcggcgccttccatttgatattgcatctaccgcctggagatggacaaagctaccgacctaattcttattcaataggagtcggagcgaatcctcagatgtatccctctgagccacgagtcgaaatacggagaggagcgccagataggcagtaataaaaggcctaacgaaagggagagcacagtaaacaccacacaccacacgagagagagaccccgggcaacccccgtgcgatctgtccctaaacccgcaacactttttttattaacatatttggacctgccaagcaggcgcaccc

SEQ ID NO: 66996 - DNA, 430 bp, Glycine max
  Clone ID: PAT_MRT3847_31512C.1
aaggtttcccgtcatcactgtatgacgtccaccttctttggggtcgttgggggggggcgtaaatagagacctattggggaggtataaatgcaggaactagaaaaggtagtagtctagagttaataggcagatagtattacaaagacagctgaagagagagcgcgatagtatgcgtgcaacagaaggcttaagcagggattggataatgtgggtcgcaacaattggcgcagaaaggtagccaattctaagggttgagaaacactgctgtcagttcaaggtttcgtggatcgatctacgtagattatcgtagattgtggagagacacatattgaaccgtaaggctatgcctttagtctgggatactcgtcgcatgcccaaaatttcctccgtatttaatggaagtcttggctaatataggttgtggggctta

SEQ ID NO: 66997 - DNA, 263 bp, Glycine max
  Clone ID: PAT_MRT3847_31513C.1
aacattgcaatgccattcctaccatatggtcccttttcgaatgaaaacttgctatggtacccctacctccgacgtgaaatgcgcaagttggaagcttgctgtggaaacacacaacatctttgtctttgagaccatacctgaagagtgcgttgaatcaacacaggaatacatccatggcgaacaatatagatcagactccaaaacaatttaacaacaaacttacttttattccataaacctttaaaaccatacaaaggacacat

SEQ ID NO: 66998 - DNA, 254 bp, Glycine max
  unsure (1)..(254): unsure at all n locations
  Clone ID: PAT_MRT3847_31514C.1
ctcgangccgcgctgatttcctgtagagctcactcactttcaaacttgtccattacctcctttcatcccagcacatccttcacaatgacaccagctgtccgcagactccgcgtcgccgtctcaggccttggtcgcatgggcgctcgccatgcaaaccacttccttcaccgcacacccanagctgagctcgtagcagctttcacaccagctgagaatgagattgcgtgggcaaaggagaacctcggagcatgggg

SEQ ID NO: 66999 - DNA, 323 bp, Glycine max
  Clone ID: PAT_MRT3847_31515C.1
gggctcgagggacaattaaagaatagagttccgtttcgttaagcaaagaaaaaagctcttgaattatctgaacaggcgggtacaaaaagagttctggtgcatactgcaggacctatggacggataagaaattgcacgcgtcgcacggatctgatatggtagagttactatacaaaccattcgagcgaagatagattattggtgctatacaatcacaactatttatggggtattagggatcaaagcctggatattttgtccatatagaataagatcccttgctgcatattaaacgtgctatagtcgatcgtaaatgcgctatat

SEQ ID NO: 67000 - DNA, 463 bp, Glycine max
  Clone ID: PAT_MRT3847_31516C.1
aaaaggcggggtcaccccaaaaccaagagggaaaagcaaaacggggaaaaaaaagggaatcggggaaagaaaaacggaatcacggggaaaaaagaaaatcttgagggggcaaaaggcgggaaaagaaaattaaggggattcaacactactcaacgggccaaaaaactaatggaacgaataaaaaaaagggggggggaaaaaaattcaacaggccaaagagaggggccccaaaatccccggctacctaacccttttgacatgtcttgaaaaggggaacctgatgtcaaaagggcaaaacctcttcctgaagcaaagcaggaagattttcaatggaaaccagaccgggtttttctggcaaaagctggtcatttgggaggccggcccatggtggaaaggggaaggacaggaaaacccctggtagcacatcaaggccagccgggggcacccttatgtacctactttt

SEQ ID NO: 67001 - DNA, 641 bp, Glycine max
  Clone ID: PAT_MRT3847_31517C.1
ggcatttgttgaactcactccttcagttcagttcagaccaaacttggctacatcgtttgatattttgaagtctttgtgattgagaatgtcgtacactctgtgctttgctcccatttgttccttgaaatccacaaacagacctgggacaattgccggtaattcagttacccaaaaggcttttgggatgaacgaagtgtgtcagaattctaaagttccaagctttcagtccttgaaggttaaggctacagaagataaaactacacaaagcaaaacaattaggagcattgtttgttctgattgtgatggaaatggtgcaaaatcatgtactcaatgcaaaggtactggagttaattctgtagatcacttcaatggacaatttaaagctggtggattgtgttggctatgcaggggaaaaaaggatattttgtgtggatcttgtaatggagctggctttcttggtggattcatgagcacatgtgatgattaaaagtttggctagattgaattcaaagattcctaacggttatacaaagagaaaaggatgtaggaatctgcttgttccttcgttggtctttttgcaatgtgtattaaataatgtattctgcagttttggtaataagattttgtcttaattcatgaaa

SEQ ID NO: 67002 - DNA, 1189 bp, Glycine max
  Clone ID: PAT_MRT3847_31518C.1
aacttattcaatttagaactgatagaaacacgacaattttcaaataagttccagtagacataataaactttacataaaaagcatcaaaccagagaatttacaattaagctgacttcttaacattggtcaattttaggaagttctattcagatggttgcctgtcacgacggattatttcagaacacaagcccaaatgtgttctctccactgtaagtcatatatagaaagccatcttcatccttgttttcctcataaattgcagacatcattgccgcagttggtggtaaaatattcttaacaaaaatgaagatcgccttctcaggactcagcttgattctcttccgcaccacatacacaaactgaccaacagtcaaatcagcgggtacaagatactttttcttgtcaatttcaggaacatcactcttctcagccctttcaacaattactggaattctgtcaggatacttctctcttattcgagatgcttcagcctgcctcctctcaagtgggtgttctctctcttcttcactcttcattctcatttctcttctgaattattgccatggctaagagctcattcaagatggaacacccacttgagaggaggcaggctgaagcatctcgaataagagagaagtatcctgacagaattccagtaattgttgaaagggctgagaagagtgatgttcctgaaattgacaagaaaaagtatcttgtacccgctgatttgactgttggtcagtttgtgtatgtggtgcggaagagaatcaagctgagtcctgagaaggcgatcttcatttttgttaagaatattttaccaccaactgcggcaatgatgtctgcaatttatgaggaaaacaaggatgaagatggctttctatatatgacttacagtggagagaacacatttgggcttgtgttctgaaataatccgtcgtgacaggcaaccatctgaatagaacttcctaaaattgaccaatgttaagaagtcagcttaattgtaaattctctggtttgatgctttttatgtaaagtttattatgtctactggaacttatttgaaaattgtcgtgtttctatcagttctaaattgaataagtttaagggtatgtttgttctttgttcacatcgttgatccttgacttgtatctctcattggtgtcatacaattatatttttacatatattt

SEQ ID NO: 67003 - DNA, 337 bp, Glycine max
  unsure (1)..(337): unsure at all n locations
  Clone ID: PAT_MRT3847_31519C.1
ggggggggtgantgcacaccaaacagtaggaaagtgccaatcaccactgacacggaggaaccattgaatggccaactaacactgtggctctttacttcataccaaataaaccacacacttactctccgttttttttatcacaacgtgtaacaatgtaacgctgggcgattcctagtctacaagcacttggctttttccatacttttgaagatcagctaatgaaaacaaccaatggatctgaaaacatttattgtgttcactagtgaactccaatattaaaacaaacctccaatttgcatcctctcctgtctattcaaagctttgaaaacacgaaatg

SEQ ID NO: 67004 - DNA, 620 bp, Glycine max
  Clone ID: PAT_MRT3847_3151C.1
aggagttatgtaggtgtttcagatgcaataaacaacggctatgattcatggggtcccctatttggtaagctattttttgctctttgggtcattgtccatctttaccccttcctcaagggagtcatgggaaaacaggaaggtgttcccaccatcattttggtttgggctattcttctggcttcaatcttctcacttctgtgggtgaggatcaacccatttttgtcaaaaggtggcattgtgttggaactttgtggcttgaattgtgactaggaaattcaagtcctagatggttagatatatttttattttatacagaaaatgactgcaatatgcacagtttttggtcaaagacatccgtgcatgcagtagagtgtctattggtgataggcattgctgccaaaagggcaattgtagtgtagagggtgtgtgtgtagatacagatggctatggtctgacacataaacatttgtttttagagcattattctttgttacgtgtgcattctgtgagtttaagactttagaagattgaatttggagatcagtgaggtgttgtaatttataatttccttctgaatgaagtgtatcatctttgtaataaaatttagttccttgtgtttg

SEQ ID NO: 67005 - DNA, 1767 bp, Glycine max
  Clone ID: PAT_MRT3847_31520C.1
ggtccggattcccgggtcgacccacgcgtccggtgtttcagtagaggtttgcagttggtaagtaatgacacgcagacacagtctggatttctccagacgcaaaccctaggaaagaagaaggaattggatgcatgcaaatccaatcacagtatcgaacatggcaaatcttccggtggaagttgtcaccgaaatcctgtcccgtctaccggtgaagtcggttatccggctgcggtccacctgcaagtggtggcggtccatcatcgacagcaggcacttcatcctcttccacctcaacaaatcccacaccagtctcattctccggcaccgctcccagctctactccttggacctcaaatccctcctcgaccccaacccctttgaacttagccaccccctgatgtgctacagcaacagcatcaaggtcctcggctcctccaatggcctcctctgcatctccaatgtcgccgacgacatcgccctctggaaccctttcctccgcaagcaccgtattctcccctccgaccgcttccaccgccccgaatcctccctcttcgccgcccgcgtctacggcttcggccaccactccccctccaacgactacaagctcctgagcattacctacttcgtggatctccagaaacgcaccttcgattcccaggtccagctctacaccctcaaatccgactcctggaagaacctccccagcatgccctacgccctctgctgcgcccgcaccatgggcgtcttcgtctccggctccctccactggctcgtcaccagaaaactccaaccccacgaacccgatctcatcgtctcctttgacctcacgcgcgagacattccatgaagtgcctctccctgtaaccgtcaacggagatttcgacatgcaagttgctttattaggaggatgtctctgcgtggtggagcataggggaactggatttgatgtttgggtcatgagagtgtacggatctagaaattcatgggagaaactgtttacgctattagagaacaacgaccatcatgagatgatgggatcagggaaattgaaatatgtgaggcctttggctttggatggggacagggttttgttcgaacacaaccgtagcaagctctgttggtataacctcaaaactggtgacgtgagttgcgttaaaataactgctgcaattggaaacacgattgaaggcacggtttgtgtagaaagccttgttccgccaactttactgaatctgcgtgatgagagccagagccaggagaaaaatgggaagaaaagggatgacttcctctctcaggggttcaaattgaccttgtaaagcgagcaaaacaagaggaaatggattgaatttgaaggggaaccaaagtgctacagttcacaattttcaataccaagaaaacgatgataaaagatcccgggtggatgctgcttgattcttttccttacgttagaagctgttcatcccaacaaggagaaaactaatgcgccatctcccgttttgtttgtaataaatttgtatttatattttatactcctataggctgctacaaacttgagttctttgccccatcggggtggtttatgcatctttatattttatggttgtagccacccttatacaagccattggaataggtgaatctatacagttttacatgaatggttatctgttgaaagaaagtaagttttgttcgcttgattgataaatgattcggaacactgggattagaatgctttgtaacaagtcaatgataccgtttttcatcctgt

SEQ ID NO: 67006 - DNA, 242 bp, Glycine max
  Clone ID: PAT_MRT3847_31521C.1
aggtggtcaccgaagctaccctctcctcgactatccctcccacgcgcagcctcacctccacgctcccacgcgccaccacttcctttcctcctcctcctccagtcccaccactctccccgccgccgacatcgccaccgccgactactacccacacgcatcctccttctccgacgactccgccaaatccaactccaaacgcgcctccgactgcggcagcccctactacaacaagaagctcaaat

SEQ ID NO: 67007 - DNA, 605 bp, Glycine max
  Clone ID: PAT_MRT3847_31522C.1
cgagttgcagttggtaatactcacaatctggatttctccggaagcaaaccctagcagaaaaaaaaaacgaaatcaatgggaatctgcaggaggaagtgggaggaatagaatcaatcagaaatcgaatcacagtagtgatgatggcaaaccttccggtggaagtagtgaccgaaatcctgtcccgtctaccggtgaagtcggtgatccggctgcggtctacctgcaagtggtggcggtccatcatcgacagcaggcacttcgtcctcttccacctcaacaaatcccactccagcctcattctccgccaccgctcccacctctactccttggacctcaaatctccggaacagaatcccgtggaactgagccaccccctgatgtgctacagcaacagcatcaaggtcctcggctcctccaacggcctcctctgcatctccaacgttgctgacgacatcgccctctggaaccctttcctccgcaagcaccgtattctccccgccgaccgcttccaccgcccccaatcctccctcttcgccgcccgcgtctacggcttcggccaccactccccctccaacgactacaagctcctgagcattacctacttc

SEQ ID NO: 67008 - DNA, 584 bp, Glycine max
  Clone ID: PAT_MRT3847_31523C.1
acaaccataaaatataaagatgcataaaccaccccgatggggcaaagaactcaagtttgtagcagcctataggagtataaaatataaatacaaatttattacaaacaaaacgggagatggcgcattagttttctccttgttgggatgaacagcttctaacgtaaggaaaagaatcaagcagcatccacccgggatcttttatcatcgttttcttggtattgaaaattgtgaactgtagcactttggttccccttcaaattcaatcctgagaaaaacatgagcaaactcaagccagtaaagggtggggtaattgaaagtccccaaaatttaacaataaaaagagtggttttgtaactgatgattccaattccaactgtttcccatgaaccagggcgtccaatttcagaacaagatcacaactcaattcacaggataaaccagtttcagcttatataccatttcctcttgttttgctcgctttacaaggtcaatttgaacccctgagagaggaagtcatcccttttcttcccatttttctcctggctctggctctcatcacgcagattcagtaaagttggcggaac

SEQ ID NO: 67009 - DNA, 367 bp, Glycine max
  Clone ID: PAT_MRT3847_31524C.1
gtgttgagtgatatctattttttgcttaaaaattgaagcttgaagtgtcaatccaaatgttttttttcgtacacaagaccacactaccgacaggggtgcccgcttaacgagtactcagggagacccaacacaaacaaaaaatgcgccttagtcaaaagccataagaacagcttctggcctaacggattcaaactggggggaagataagtaacgccccccacagctggggaaaatcacaccattgggcggcccagaaagtgctggggggggcccacctttatcgctactgttgaagcaccccctgacgaaattcccaggaaaaaaccttctttcacggcgagcagaagagcagtttctatagccaccc

SEQ ID NO: 67010 - DNA, 338 bp, Glycine max
  Clone ID: PAT_MRT3847_31525C.1
atctagatttgcgcttgatttccttaatttctcattgccatatcatcgcccatgaatggacataggcagactattggctcaccgtgatgtcgattgtgcagtatttgctcaccgcgaggatgcataacgttctaatgctgatctttctcgtgctattgcatcaggtctccaactacggctagtacatcttcacttaccatacagtgacgcaggactacctgaaaggtgcgagaattctgacgtggtgacatcactcgatatggagtccaatatgtacactgtcgtcatcatgcttcatgagctagccgaggatgtttttgaagctctaacgcctacat

SEQ ID NO: 67011 - DNA, 443 bp, Glycine max
  Clone ID: PAT_MRT3847_31526C.1
ttttcttatatgggaacaaatgggtgtaaactgtcgggggctgatgaagaaactccgggagggtccatgtaggatctgaaaatccatcaatctaaaattgcactctccaaaaacacagagggtggaaccatgctgcggagggatctactggcaaatcttttgacagagggcaattctagagcaagtgatgatttgcagcgcactcatcatactaaaggaatgattaacatgggggccacagttggtattcctgcgaatacaggtatagcattggcctgtgctatgaatagttcttttagggggcgtgccagttctgatatttacactatcggctctcaagactgagaatcatggaatcctgcttgcacaaaagcgatgactatgtcatttaatccaaacccgagtgctgatgcatggagcttggaatacctgaagcgtaccgg

SEQ ID NO: 67012 - DNA, 234 bp, Glycine max
  Clone ID: PAT_MRT3847_31527C.1
aaaatgggggtaggggtgtggtttagagtccttttgtggttatgatttgtgagtatatttctgttggttggcatgattgcttataagtcacactaggttgggaaatttccaaagttgtaaatgatttcctttacaaattattcataatatgtaaccaagaatacacagaattaaaactatacttagcaagaacatcattcaaacaccctacaatatatgaatgttttttaaaaa

SEQ ID NO: 67013 - DNA, 207 bp, Glycine max
  unsure (1)..(207): unsure at all n locations
  Clone ID: PAT_MRT3847_31528C.1
ggactgaaccccatttggtnntctttcatactatagtcacnttgtggggtanaatttgaactagtaccagnagtattagccataaggcctttgcaanattcaggaaaagtgactantgnttcngtttcantaatcttggnngtcnatgtccaaatgtgttttnnangtngtttnncttttcccagnaaaaatnttgnnagntccaat

SEQ ID NO: 67014 - DNA, 279 bp, Glycine max
  unsure (1)..(279): unsure at all n locations
  Clone ID: PAT_MRT3847_31529C.1
ctttatgttgctgaggattatgtttatttgcttaaggagtttgccaatactggtgacctattgctagccactaggacctatgattttanctatgagtagggctactgataatactttcatggggaagttgaccagcaacatgattaggacccttggcaggttaaagaagattgagcttgccttggatttgtttgaagagtctaggactaganggtatggaaacactgtctattccttttctgccatgattagtgcacttggcaggaacaatcgcttttt

SEQ ID NO: 67015 - DNA, 382 bp, Glycine max
  Clone ID: PAT_MRT3847_3152C.1
gggagaagacgacagatcgggcttctggttcttgaacctcgaattgataatcctatgaggaatttactatctagctgttcagattgaacgagtgccatacttaattcaatcacgcccatgaaacatcgcttcatcttgctattacttttctgcttagttcaatctctataccttccttgcatagctcctcgctatttccaaataggtgaccccctctttgacaaaaacaacaaggtatcatactccaatacttaacttgcatatgaccactaattcttgaagtattgcacacccaaaacgatattaaacaatgcataaactttgacatagggtcttagaacgaatcgtatcgataattcagaatatacatttcatatgaaga

SEQ ID NO: 67016 - DNA, 283 bp, Glycine max
  Clone ID: PAT_MRT3847_31530C.1
aggtaatttgggggttttttgagactggttgggttatttccctagaggacatggccagactcttccccttgctcgacttttgactcattatcataaccaccgctcataacgctaccgtttgtcaaaagttcatctatttagatgcgagtcgcggtctgtctatcagaacgcactgttgtcaactttccccgccgtacaagtgggttttcccgttgggatcgaagccttcaacgtcgttgctcctggggaaatgacccctagaatctacatgggcctatccctt

SEQ ID NO: 67017 - DNA, 841 bp, Glycine max
  unsure (1)..(841): unsure at all n locations
  Clone ID: PAT_MRT3847_31531C.1
cagcctcctcatgagaagccncccatctacaagcctccttatgnaaaaccacccattcacaaacccccatggcgagccaccacccgtttacgaacctccactcgagaaaccacccatttacaaacctccattcgagaaaccacccatttacaaacctccattcgagaaaccacccatttacaaacctcctttcgagaaaccaccagtatacgagccacctcctttggtgaagccaccaccatttgaaaagccacccttttacaaacctcctttcgagaaaccaccgctttacgagccacctcctttggtgaagccacacgatctacaatcccccaccttatggccactatccaccatccaagaaaaactaataataaccagtggcgagtgtgacatgcatgttttcgtctactcaacgttagagcagtcgtttgtcatataaagttttttgtttgcgtttattaggaagcacttttaagatgccaattgaagtacaatccgccacttctgcgtgtagtagttcttcaaaataaaggctatattcctctgtgtacttaataacttcaatttcccttttcagcaatgatattgtagtgtcaattattagtggcaaaatctatgactacaatcagtttaattttctttgtgcttaaatctccagtctttactcgttaaaaaaaatagaaattaaacatataatctgttcgtgcttgttatttctatgtgaattcttaatcattgcggtcaatataacaatgcaatgtgtaaagttcccggccctacgtcttcaagtatacatatatatctctatacttgttaatgagaaatactactcttgtgg

SEQ ID NO: 67018 - DNA, 405 bp, Glycine max
  Clone ID: PAT_MRT3847_31532C.1
ggaaggttgtagaagtttgttctgcgaaatcattgcacactgcagcctgcagggccacaatacacatcacgatgagtttgctacatatctgttttttagaaggatagggggacaacgacaaaattaattaattttcaaagctgctgaagagtcacctccacgagaaggaaaataatgccattttccttcgtttcataacctgtgattcgtttttatcattttatgtctgtatttttttctttacgtattttctctaaaatgtagaatggtatgtagttagcagcgtgaaaaatttgttatcacgctaaaatttaaaaaaaatacacttaaattaatttcaactatgaattttatattaaattatgtcacaataaaataatttaattgttaagtaaaaaaaaaaaa

SEQ ID NO: 67019 - DNA, 229 bp, Glycine max
  Clone ID: PAT_MRT3847_31533C.1
ttggcgtgtaaatattttttattataaaataacaatgatgatggtgatttggtgtatatattaattaatattataaaataacaattaatcttattctttaatagatatcatttatttttgtgtggcacacaggacaaaaagtattttttttttcgaaaagaagcactagttaggcacagttcccaggaataaagtatagccggtccagtgcgtcctgatacttcgagga

SEQ ID NO: 67020 - DNA, 1624 bp, Glycine max
  Clone ID: PAT_MRT3847_31534C.1
aggctccccagccactttcccaacccaaaacctctcttcaaccctttctttctccaatcccaaaccatcatgtatcttccccgccaccacatcctcaccagactctccccttatcgccgccacttctcccactccgccgccgccgtcctccggcctccggggccggagcccctcacctacctggacggcttcccccgccccgatcccaagcacgacgagacgatcctcgccatcccccgcgccgactccggcaagaacatctccgccaaggaacgccgcgccgggcggcttccgagcatcgtgttcgagcaagaagacggccagcacggcggcaacaagcgcctcatctccgtccgcactgaccagatcagaaaactcgtcaaccacctcggccgctccttcttcctctcccgcctcttccacctccaagtccgcgcccacttcgactccgaggatgacttcgtcgagaccgtacgcgtcttgccccgcgcgattcatttgaaagctgggacggatgcgccgttgaatgtgacttttattagggctccgtcgaacgctctgttgaaggttgacgttcctcttgtgttcagaggagaagatgtatcgcctggactcaagaaaggtgcttctttgaataccatcaaaaggactgtcaagtacttatgccctgctgacattattcccccatacattgacgttgatctaagtgagttggatgtgggccagaagttggtcatgggagatctcaaagttcatcctgctttaaaacttcttcagtcaagagatgaagctgttgttaaaattatgggccaaagagtttctgaactacaaaagaaaaagtaactgctctttgtatctttgggggttattgctgctgcgctgaagcattttacagctaacatgtatcgttcatggtcattttattagttgattcatggcagcagtgagggacacagttgtagaattccaatgttagtctttttgttagcttccttttctgtgcctattcagttccttctcataaaaaaaaaaaaaaaaaaaaactcgagagaacaaggactatggtgctgaattatttgtgaatggagagatcgtccagagatcacctgaaagacagagaagggtggaaccacagccacaaaggcatcaggacagaccacgatacaatgatagaacaaggtatgtccggcgcagagaaaacatgcagtgaaggaccaatttgagatagggagagggatgtgatgtacatacactatggaagtactttgttacatgcactattttagtcttgcctttggagacattccatatatttccggtggggtaactcaaatgtttgttgtcaaacttctatggctgtatcagatggacacctcttcgttatcatttttactataaacataatgttggactcttttcacgtcattttttccccaacaaagttgccataggtgatttggttctgatgtgtttcatatccgatttctctcaactggacatggagaagagaattccaaaattgtatttataggttaggtttctcaacgccaacaaaatatcttacttataagttatacttaagcttagtcatgctttaatctacaaaaaaaaaaaggaagttttt

SEQ ID NO: 67021 - DNA, 156 bp, Glycine max
  unsure (1)..(156): unsure at all n locations
  Clone ID: PAT_MRT3847_31535C.1
cggctcggaacggctcgacgcaacggncgccttttttatttgacttaaactacattcccatttgggttgcttttagagagttgaggcatccctatatctggtttaagttattcaaacttcaatagaaattaatggattagaactaatgaataaaaa

SEQ ID NO: 67022 - DNA, 255 bp, Glycine max
  Clone ID: PAT_MRT3847_31536C.1
cacggctgctagtagacgacagacgggtgtccgagataatcccctaaaacatccatacccaacccatgggtttctttttctcgttctctcccccccaaaccctatttttcaccatgcggttccaatttctctaaccctaactccctctctccattaccgatctttgttccgcaccggcgtttccttgaatcgctacagatactccgctgcttccaccaggaggcggtgttttctcgcgattccgcgctcgaagct

SEQ ID NO: 67023 - DNA, 375 bp, Glycine max
  Clone ID: PAT_MRT3847_31537C.1
tttcgcccttgggccgcccacgcgtccgcccacgcgtacaattccagtctatccattgaacaaagcatggagcactccaatacacctcacagatgagctatacccttggcagcagaaggacgcttataacccatattagatccaagcgaacgactttccgatagaggacacagaatcacctttgtgaacacacattacaacgacaatagcctcctccaattaacagatataccctcattgcacactcaattaaccgaatatctctgtggatgcatcactgatggcataccatctgacagtcctagaaaaggtggcctactccactacgattgaatgcttatcactactagcgccagatccttagttgccaaagag

SEQ ID NO: 67024 - DNA, 311 bp, Glycine max
  Clone ID: PAT_MRT3847_31538C.1
acccatcatacacgttataaattattgcatgaaccatgaagtttagaggtatgcattatggttcaagtacaaaatacagatcactcggttcaggcgcatctacatgaacataatatacataaactcacatcactggtaggcaccacccacatacatgaagagatatgttagcctcaaaaatggataaaacttatgagcataactaaaaagcattgaaggaaaacagcttgaaaaatataacctcttgaacccatgcacaaattccttgtctatagactattcctaaaccctagctctcaaaacatgatcaa

SEQ ID NO: 67025 - DNA, 185 bp, Glycine max
  Clone ID: PAT_MRT3847_31539C.1
atgatactcgtcatacgcgttcacagacccggtagatttgagagtatcttcctgtctagcactccagctcaccagtcctacatgctcgggctccgcgggcatattctagtggcctgcatacgtcaccatattccaggaggcatccactgtgctgcatgttgtagatgcctggcagcaacaagggg

SEQ ID NO: 67026 - DNA, 273 bp, Glycine max
  Clone ID: PAT_MRT3847_3153C.1
tttttaattaccaatatgaacagtgaatgttataggggcagtgtgcaaacgaactttatatgaaaattgcgtaacagtaataggcgatctttatttttatttgtaaagcaccctttatatttgaaagacgtgtaaaagggtaaaattcccaacacccttcttagagcacaaggcgttgctaatggaaacttaatctgggtgggtttgaatgatccacttgatgctccagaaggtacagtcactatggaaagaccaataagcccatccaaattt

SEQ ID NO: 67027 - DNA, 186 bp, Glycine max
  unsure (1)..(186): unsure at all n locations
  Clone ID: PAT_MRT3847_31540C.1
ggtgacagagagagagagatgtcgagattgcgaagacngatccaagcttcagttgatgcnacnanganagttanntctgntaancttnangnnttgatnccaccaccggngagacccancntcagcttcaannccaagcaagagttaagcaagtggcattngtattcngattctgaanttggaggt

SEQ ID NO: 67028 - DNA, 512 bp, Glycine max
  Clone ID: PAT_MRT3847_31541C.1
cccacgcgtccgctgcaattcatctctctcatttcctttttctttatctgtttcttgttgctcaggctaagttgctggaagctgggccacgtttttctctctctctctctctctctcaagtatggtttatttagacactgtttggaataagcttctctataagtattagtaggagaagtaaataagaaaagaatacatgaagtaagtttatttttataagctaaaattagcttatgtaaaaattaagatcagttcttgaaagagtttattaatatcattaagcttctagaaaaagctgatgcataaactaattttatgtttatggaagaactttatttcatctaaagagaccctagtgaagccagctatttatgactaaagtactattttgttcttgaatttgtaacgctctaatcggttagtccttcaaattaggtaaatttgaaaagaaaaaagaagttctaaaaacttgttcccgcgactgggaatacatcgatacatgtaaaagacac

SEQ ID NO: 67029 - DNA, 146 bp, Glycine max
  Clone ID: PAT_MRT3847_31542C.1
tgtgcgagagagcgagcgagcgagcagtttcaaatagaggatttgggattgggaaggccagggactcgccgttttctgatgctcatcttcgttgattcactcactggtcatactatctctctcgaactcgctacttctcataccac

SEQ ID NO: 67030 - DNA, 463 bp, Glycine max
  unsure (1)..(463): unsure at all n locations
  Clone ID: PAT_MRT3847_31543C.1
aggttagggnttaagttatttagagtagctttgacggatggaaggcttagatttgggattaggtttgagcattttggttggaagaagctttggtcttagagagttaagttggatgaatggattagatgatgaaatgccgactgagttcgaggggggggcggatgcaaaagctgatgagtagagtgctgggtgaaaggagggagtgcatatttggggatagcagtgaagtggaaggaaaaggcggacaacagctcggggattgtaatgagagataagttataacaagatacttagagacgttaagaaagagttatagatggatggaacagatgttaaggacccagaactaggacagggtattcaagtgtaaggagatcagaggaagaatggtttgactatggtagtaaaaggggcaatggagaggaagggtcatgagatgattaatggtacaagagggagggga

SEQ ID NO: 67031 - DNA, 2288 bp, Glycine max
  Clone ID: PAT_MRT3847_31544C.1
tagcatcaacttgtcatcttataattgaattgtgtatgtaacaaaaaaaataaaattcagaagagaagagggttgtgagtgtgactccgctgagggatatgacgccagagagggttttcgggaagatgggacatttgcagaagttgttggatcggtttttggcttgtaggcctactgggttggctaagaatagcaggatggttttgattgcgctgtatcctgtggttaaggagagttttcagttgtatgctgatatatgtgaggttttggctgtgttgcttgataagttctttgatatggactatgctgattgtgtgaaggcttttgatgcttacgccagtgcagcaaagcagattgatgagctggttgctttttacaattggtgtaaggatactggtgtggcgaggtcctcagagtatcctgaggttcagaagattaccagcaagttgcttgagacgttggaggaatttgtgagggatagggccaagaggccaaagagtcccgagagaaaagaggaggctccaccagtggagaaggtagaggaggagccagcaccagatatgaatgaaatcaaggcactgcctccgccggagaattatactccgcctcctccgcctgagccggagcccaagccacagccacaggttacggaggatttggtgaatctgagagacgacgcagtcactgcagatgatcagggaaataaatttgctttagcactctttgctggtgcacctgctaataatgcaaatggatcatgggaagccttcccgtcaaatggacagccagaagtgacttcagcctggcaaaccccggcagcagagcctgggaaagctgattgggaattggcattggtagagactgctagcaatttgtcaaagcagaaggcagctttaggtggtgggttggatcctctattgttgactggtatgtatgatcaaggaatggtgaggcagcatgtcagcactacccaactgagtggtgggagtgcaagcagtgtggcattgccgggaccagggaagactccggttttggctctccccgccccagatggatctgtgcagccggttaatcaggatccatttgctgcatcgctgagtgttccaccaccatcctatgtgcaaatggctgatatggagaagaagcagcacttgcttgtgcaggagcagcaggtgtggcatcagtatgcaagggatgggatgcaaggtcaatctagcttggccaaactgaatggcgctggatactatgccggaggtcctatgcccatgatgccttatgggatgcccccagttaatggaatgggacctccaaccgggtattatcacactccttactgataccccttttcacttttttctttgtgtcatatctataggttgtttcgtttattttttactatgacatagtgttttccttggtttcaaatgatgtcatcttattcttgggatctgcacattagtacaacggggatgctaaggagactgggttgaagagacaaattcttgttgggttttgatgctgggagatgtgaaactcatccgtgatgtctctctgtattttgtaatagtagcattttcttctcgattttgtacttccaagtgattcttgcaccttaaaaacaaactattaactactgtaaattttattaaatgctggtgctgatgaacacgattggttataccaaatgatatttccttcttgtgggagctacgacatagtgtttggcttggtttcaaatgatgtcatcttattcttgagatctgcacattagtacaacggggttgctaaggagactgggttgaagagacaaattcttgttgggttttgatgctgggagatgtgtaactcatttgtgatatctctctgtattttgtaatattagcattttcttcccgattttgtacttccaagtgattcttgcaccttaaaaacaaacgattaactactgtaaattttattaaatgctggtactgatgaacactattggttataccaaaaaaaaaaaaaaaaaaaaaaaaaaaaaaaaaaaaaaaaaaaaaaaaaaaaaaaaaaaaaaaaaaaaaaaaaaaaaaaaaaaaaaaaaaaaaaaaaaaaaaaaaaaaaaaaaaaaaaaaaaaaaaaaaaaaaaaaaggggggggccttttttaaaccggccccggcccgaaacccggcccgggggggggccccgccccccggggccctccccgcgaaaacaaaaaaaagggattcttttaaactttcctaacaaagggaaaatgggtggggccacccccccccccggaaaacc

SEQ ID NO: 67032 - DNA, 1687 bp, Glycine max
  Clone ID: PAT_MRT3847_31545C.1
gggacctactttggtttttgattgcaataagcaaaccattagaggagagcaatattgttccatttggatcactattatagacaacatcagctcaaatactacatgccttgagcaaaattgattgatataaagagtaactcatctgagtgtggggtcatcttttaacaaggaatggaccgaacaacattatgaatccaaatccttcaactatgttcaaggcaaagaagaccatatgggtgccagtgagaaaagaagcatccattcgcttttctgaccaagataatagtgcaccacctgcagcagggccaatagctttgaatagagacatgcctggcatagcaatgccattagctgcccccctttggagctggtccactgctcggttttgtagaatgaacaaaccaactacaattgtgatagacagaatatttttcagaaatgaagcaatacttagcactatgtatagtgctaagcctgacaacaaatgctatgaaggggtagctttgcaaaagaggtatggataacatcgttgagatgcgggcaatactgataggtccactagctttttccacagattggtatatggtaagttggtaagtgataagtgcaagacctgatattaaagaacattaccaacatcattagttgtaaagttcaagccccccagcctttgaggactgacagaccataatgagaaaacctcttgataagcaatatcatgaagtgagaaaacacaataagaaaggatagatgacattaagggccaattccggaggaggttttcattcttttggattgtcttttcattgccagccccactgcttccattttctaaagcttcggcattgtctgtggattcattgctacaattgtggttgtgaagtgtttccggaatccagatacagccaatagctactacaaatgcgaatgcagaaattataaggttgggcaagaagtatggaaacttatcccaaaaagaatcctttgtaaatatatgtgggtacttctctacaggctgagccaaatagccccccaatgctgggccaatgatcaaacctatgccccaagctgcactgacagttgagagtcctatagcttggtgttcttctcgaaaaagttcagtggcatacgccttcgctgttccaagcaaaccatttaaacttcccataagaaacctcatgataacagccatccaaaaacttgtgctaaggccaaatagtgtgttgaaaatgacaactgcaataattcctataacaaaaacaggttttcgaccaaagcgatcagctatagttccccacaacaaagatgtcaaacatctgccaagcatgaatgcagaacccacataaccagcataagaactaatatcagcttctgttttcgcaatattaaaatcccttaccatgaaatagaggaatggaaagagagatgatataggcagtgcagcacacagcaccaccatccacatgataaaaagatttttaacaggtacaccctttccctcactcaactctttggcttgatccactttacaacctgggcagtccttgtagtacttcctctccaacaacggttgtttaacattctcctctcccatgtttgtgacactcacaggtccctctctttcctacaacattttacatgcatcattcaaacccataagagatgatcagaaaagcggacgcgtggg

SEQ ID NO: 67033 - DNA, 186 bp, Glycine max
  Clone ID: PAT_MRT3847_31546C.1
tggaacggactaagttagaaatgctaatgacgtcactacatggaaaggatcagctgctggttcttgtatttatgatttataactgtgtgtgaactgtactgaattttcaactccaacgatattcactattgcgaaaagacagctgactatgatgtcgaggtcaaaggggttgaaatatctgctgat

SEQ ID NO: 67034 - DNA, 443 bp, Glycine max
  Clone ID: PAT_MRT3847_31547C.1
ggtttatgcatagaagctacccttttggtctctctgagattattgaagttgagggattctaatggtggtgactcatcaggaccctactgaaaacttggtccagtcagagccagagaagaaacgcggtattatagagaaagtgaagcatttgactagcttgggaaagaaaaacaatgccaagttagatgaattggaacaaacgagtccttatgactcggatagatcccccgtgtttgactcggatgactcgtacgattccaccacaagcagtggcagcagtagcaacagcggtggaattcacaacccacggtcaacactctcaaacgggtctgagaggtttacaacctcggacacagcaaagactcgtttgtcccacttgccacggaatataagcctcaatggttggaactataagacacccacaaacgaccaacgaactcaaa

SEQ ID NO: 67035 - DNA, 266 bp, Glycine max
  Clone ID: PAT_MRT3847_31548C.1
gagagaaccccttccatgagtgagttgaatgaaattctttatgggcaggaacaccttaaacaaagggatctgtcatttgtattcaggttacagggtgctgacaactcaacactttatgggtgttgtgtcttagttgaagaactagtgcaaagcctctggattgcttctctgattctgataagagcttctactcgcttgagacggattattaccactagaatgttactgatacttcaaggtccagtgttgattgctcttggtgtatg

SEQ ID NO: 67036 - DNA, 746 bp, Glycine max
  Clone ID: PAT_MRT3847_31549C.1
cgacctagcgtccggtgactttacctttttgtattccacgcgtccggttgatactgtagacgctgcctgccgcatatttgcaactcttccgcccctttggtcgatcatttcctttccgattaaaatgtcgaatcgatctagtcagggtagacaacatgacaacaataacaacaagggtttcgccaaaacccataatcagaagaaattcgtccccaaaaaccaaagtcaaaatcccaatcctaacccaactccaaccctctcaacctccctcagacaaacacaaccaaacagagggcagaaggggaatttcgttaaatacttgccgcaagacgaagctgtggcagcgggtctcggcgccgaagatggagcattggatcccctcgaatctcagagagtcgtagatcttttgaacacacagctatctcgcttgctcaagttgaaacccaagcaattctggacacaagtggctactgacacctccctgcatgagcttttggacagcttcttgcagttcaggagcaggtggtatgatttccctcatcgcggggtgcaagggattgttgccggtgttattgttggggagctcgagttgagtcgccgcgttttcatggtattgtatcgcatttcttcgataaagaccccggtgcacgacctgtggatgctctcagtttgagagaccatgaagttcttttgcaggagaagaagttgcttgaattgccgaagttgttggatatatgtgccatata

SEQ ID NO: 67037 - DNA, 328 bp, Glycine max
  Clone ID: PAT_MRT3847_3154C.1
gaacccaaaaaatttacattggtcttcaaacaccgcttttttttattcctctatacaaactccttgatttgactttgttacacaaattccctctatgggggggattcccccactttgaacagttctatttttcccaacctaataatcctaaaaagggtatggtctttaccccccacatttacttccaaagattgggaaacataattcaccagtccaacaaacccattgtgccttaagcgaacacccccttggggccccaagtaaaacttgttccttactaaaagtttgggcacaaatatccggtaaaaacaaatccctattttggggg

SEQ ID NO: 67038 - DNA, 575 bp, Glycine max
  Clone ID: PAT_MRT3847_31550C.1
ccacgcgtccgcatgattgtgcaaacttcaagttcaattcttgaggctttttgtggaagggaacgaacctgagaaattagctgaagagtttagtgttgatgtggagagatatgccatgacagcgggctgcatttgcttgaggctaatgaccaatggaagcagatgggatatcctcatccactccacacccgtgcaaaactggaagatgatggtggtgccataaactttaccgggaaacatgttgacaagttggaggtactgaaatacataggaacaaatgttgaataaattatgttgacgcgtatttttatctcatcatttcaaaatttgttaataaaaaaaaaaaaaaaaaaaaaaaaaaaaaaaaaaaaaaaaaaaaaaaaaaattttaaaaaggggggaacccaaaaaaaaaaaaaaaaaaaaaaagaaaataaataaaaaaaaattaaggggggggggtcttttaacccaacattatcccccttcccggcccaagcgataacctttttttttttaggggcaccttaattaaattcggggggggtttaaataaattgtgttgggaaaaccgg

SEQ ID NO: 67039 - DNA, 465 bp, Glycine max
  unsure (1)..(465): unsure at all n locations
  Clone ID: PAT_MRT3847_31551C.1
cccccctaattttttaaattcccccacacggaaccatttcacaccacacccaaaggatataaactcaatccacccaaaataagactccgcccccacaattaaccaaaaaaaattcccatttgggaagagctaatcaaagtaagtactgcctgctaatngaaactgattgcacaacatgaaaggaaaaaaaaggatattatttggaatgagtgcggacccgaaaaaataccagtgttttaatgactcatcataatttggcccaactcaagtcagtacagttaatctctgaatataacccccattatcccaagtcataaccttgagttgacccaagtcaatgaccccaaaaaattgtatgcacccgatgcaccaaacttgagtcactccatgaccaaaatgctttcaaatttgtacccataataatttaaaaaaaagctttcagtcctcattccttgaatctcctgg

SEQ ID NO: 67040 - DNA, 265 bp, Glycine max
  Clone ID: PAT_MRT3847_31552C.1
gctcctcgatttctattaactgtaacgtaaatagagtgcagagacaacgctgcaatgccctggcttaataatgacgcaccaaggaatcaatatgagatcaacaactagtaatgactataaaaaatatcttcattcaatggggaacaacacatttgaatatcgagcatatatgggacctgaacctgagaatccataggtaaatatggtgaaacaacacaacctgctgcaggatgtctgattggtctaaggccatcatctcctgctg

SEQ ID NO: 67041 - DNA, 497 bp, Glycine max
  unsure (1)..(497): unsure at all n locations
  Clone ID: PAT_MRT3847_31553C.1
ttttgatttgacccacaggaggaaatcttatttcttactacattaaacttgctgttactatattggatacaaaagtgggctgagattttctggagagacgcatgtctcaggactatcacttacagctgagttttaatgtggctgtgtggggagggggagaccangacagtattagattatctggtgtactgtgaaaactagaggttagcctccgacccaacagaattcaaattgtgttaaaaaatgttggcacaaaactgacagtggtggaagtcataaatctttccctttatgagagctgaatattaggctacggaatgcttgaatacttgtactggcataagtgaacaaaggcaacctgttctttttgtcaaataatgtaattccctttattgataaatgcttttgcctaaattcaaacaattatccatgggcttatctttgactgtcacagatgccaggtaaattcccaatctagctaaccccattatatggac

SEQ ID NO: 67042 - DNA, 629 bp, Glycine max
  Clone ID: PAT_MRT3847_31554C.1
ccacgcgtccggcaagagaaaattacaagcaacgctctcgtccggtttttgtattttccaccactttcagatctgaatcgctatccgccattgccaatcaccattttgcaccgcagatctcgatcctccgctccctcgctccctgcactcattgattcctcaataactccttccacgcgaatcccagggctcgccgatttggattccgtcctctcactccgctctttcatgttcttcttcggtttcgaattctctccccatcaacaatcttgaaaattggcgccccaaagacggtcgcagcgccacatgggtggccagatgcagcagagcaatgccgccgccactgctctgtatgaccacgccggcgccggatccctgcactatgcggcagggccggccaccgatgccggcgatgccgtcatggcgcgctggttacaatccgccggcttgcagcatctggcctctccattgccttccatgccatcgatcaacgtctcctccccaaccttcttatgcagggccctggagcacttttcgcagaagaaaaacggacactcccgaagttaatgaaaaagctcgctttttttggggaatctggttctgagccatatacgcccacttcccaaaat

SEQ ID NO: 67043 - DNA, 491 bp, Glycine max
  Clone ID: PAT_MRT3847_31555C.1
gtttgagggctctcactcaaacgcatcggttgctgcaaagacaaatcttttcaaaagttgccaaaagagtgtgccaacatcgcaaatactcaactccatcagaattatacgcaatgcaagcctccaaaaacaacaattgtgtcgactcaaatttcaatttcttcgatgcgtttgacttggacagccaattgacggaggaagagcgcactctgagggaccaagcgcacgcgtactgccaggaaaagttgcagccgcgggtcacgcaggcattccgcgaagagaagttcgacccttctcttctgcccgaactcggatcggatgggttttctcggcgcgccttacacaaggttacggttgtgccggcacttccttcgtcggctacggtctgttggcgcgtgagttggaacgtgtggacagtggctaccggtcgattgtgagcgtccagacgagtttggtcatcggtccgatcgtcacttatggttccgaggctc

SEQ ID NO: 67044 - DNA, 279 bp, Glycine max
  Clone ID: PAT_MRT3847_31556C.1
gttgctgtcatggttataacacaactggtcccatggcatcatcttacactagtagcaacaagaaaaaggcccatgctcgcaagcttagtaggcaaaaacggatgatgatcacaatggttatgacgatgatgctagagatgaccatgacaaaaaccaaatcgggtggatctggcctgcgacagcatattgcgtactactgctgctagctgagtgtgtctctgtatgcgtccacagattgtggttgcatagttaatgttttatctcataggtccatgcaca

SEQ ID NO: 67045 - DNA, 341 bp, Glycine max
  Clone ID: PAT_MRT3847_31557C.1
aggaaaacaaagatagcttaaggttgtaaacattgtatacctcctaactaaaaaggaacattctacgtgatttctacacacgaaaaatataagccactagacaatcgtctcctagggggggtacaagcctaactatttgcagtagcacataacaacaaattccctgggggcgtacgggaagaacaatattgcttacgtctgtacatgacgagccactgatacacaccgactgcggctctgccaaatagcccattctcccccttaaatcagtcactcagctcacattgaatgcaacctcgcgaacttattcatatgtgctaaactcctcattaacggaggac

SEQ ID NO: 67046 - DNA, 907 bp, Glycine max
  unsure (1)..(907): unsure at all n locations
  Clone ID: PAT_MRT3847_31558C.1
attaatttaagaaagaaataattcatacagagtacataattatactttggtttgcgtttgcggtgaagtcaatggatcctcagttgtggcacaaagttgctgcgatttcaggagtggcagcacttggattgggaacctatggtgcccacgtcttcaagccccaaaaccctgcttacaaagatgtttggcacacagcttcgctttaccatttggttcacactgctgccttagttgccgccccaattacaaaacaccccaatgtttttggaggccttctgaccgctggtatcttggtcttctctgggacgtgttatactgtcgcatttcttgaagacagaaaatattcaaccatggctccatttggcggctttgcatttatagcagcttggggtagcttgtttttctgatgacttcgactctattttggtctgtgctgttacaacatctatcttaagtttgtttctaagtaattacactatcactgaatcgacagttgccctgcccatattatactcttcatatttgtaaatctcttaccatttgtcttgcaatggtttatggtcatgaaatatatgtatctaccgatgaatcatcagcgaatggcgatgatcctaacagattaaagattttctgttgattgttgaagctggctgtgtagccccctccttagccgaagtaataataataataactacttatataactttagctatgaagcatactctgcccaggtctctcctcttaagacaaaaatgaatttagcattttcagctgtgactttggctcctctctggtgctgggggtacatataggcaccagctttagccaagaggaaataaattgtacagattaaatattaatttggtttatgggggtggtttttattnttatttttatgagtttatgg

SEQ ID NO: 67047 - DNA, 315 bp, Glycine max
  Clone ID: PAT_MRT3847_31559C.1
acaccccgagattccaagattcaaagaacaactgcactgattggacctaggccatcttccattgacatctaggccctctactctcatctcctaccgaactaaaccaataaccgactaatcgaccaatcgtataccctacttctgcctctctcacgaattaaaccctcaacataaatcaatcacccaactcgccctgacaaacttacctcaaatacactgctcctgcactcaatggatcactcactctctggccacctgaggacccatacaactagcggtattaccttaaacccaagctttgaaacggacattcac

SEQ ID NO: 67048 - DNA, 415 bp, Glycine max
  Clone ID: PAT_MRT3847_3155C.1
agacgacagaagggatcctatttcacatgatggtaataaaatatatatataaactcaattcagctggaagggggctggattgggctacacgactctagaacgttaaagcaattctaggcttttccctctataggtcagatggtacagattttaatattttataaggaaattgtagtaaagatgtctttaagttttaagccatgttccaaagattatgcaccaagatgtacatagacaaattggtaaaaacataaggaaataatagaacggtattattaaaaataaaatatttctggtttctaaaaatattttttttccaaattttattagttattttttagttttagagattttttagatatcatttgatttaacatattattttctgaactattttactgcatatagatattga

SEQ ID NO: 67049 - DNA, 304 bp, Glycine max
  Clone ID: PAT_MRT3847_31560C.1
tttatttctcttgggcctcctgatatatcatagccggcagacatttttgtttggtgatcatgaaatatctacatatactaaacacatttaaaacaggtgtttttcttttttggcattttatggaacattatatttcctttcactatgtcatgacaaaagaatactagaaattggattcatgattcatcatcttgagctagttgaatccttgctttatggtggcactggaaatatgagggagtaaagcttctgaatggatctattgtttttaatttgggaaatggcacagtggattttccattta

SEQ ID NO: 67050 - DNA, 810 bp, Glycine max
  Clone ID: PAT_MRT3847_31561C.1
acgaaacccttcgaatctatgtctctggggtaacactaacggtacacggggcaatcccatagttctaagcaaccgaaagattagctcaaacacaacaagtcgctgacatggccttttctccccacatctttttctcttttcactctgcactgaatctcaccaattaggtaacacttcaccctctgtgctgaatcggactctcgcatgtgaaaaaatctttctaaagagtttgcacgtacatctttgtcctttcgggtgcaaagtctcattctttttagtaaaaattttcaaagatgaaatcagagtttgcatgaccctcccctgttttcaattcctctggtttgcttcaaaaggaatggacacgcttgtgggatggattcactccccaacgagatttgcgtgaaatacccacttccctttcggtgagcatgggttctctgaaagggtttcttcaccaaaattggatccttttttggagtacttttggatttttctctctaagcttttgaatactacgctttgggtattcaccaaaggcttcatgagattatatggttctgattcttctaaagcaatgaaaccgctttgttcttctgagtttttatgtgacaatgaaaaagctgagtcaattcattccgagtctgaatattttggggcactaaatgatactctctcacatgtatgtgatcaaattgattctaatggtagccagaaagaagcagagtccatggaaaaatgttgttctgaaactgttcatgattatggaaattctgggcttgaagaagaggaaacaacaaagttggtcttcaa

SEQ ID NO: 67051 - DNA, 561 bp, Glycine max
  unsure (1)..(561): unsure at all n locations
  Clone ID: PAT_MRT3847_31562C.1
ggctcgagctgatggttgagactgttgctactctgtcgtggtgcttgacaatgtattttctaattgtgaagcaaactggaattgaaaaatcaatcatatttgcattgtcacagtctgcatatggagcttgcttatttcttggttattggggctatcttttgctttcccaaaaatttagggtttcttacctttttccattcagagaaggaaaagtgattgattttgaccggcagttgtccaagatgtgtatgctgtttacctttcaatcctttcgaaaattgatccttcaggaaggagaaaagatagtacttgtatggttggatacaccatataatcaagcagtatatggccttgtggacaagtttggttggtatttggtttgggtagcttagtggtgagacttgtctttttaccttttgaagaaagttcatatgcaacatttgccaggtccacttcaggacaatatccaggaaaaagcaagaaattgggaaacggcgtgacagaatctttgaagttagttnntgtgattggccttgttttatggcattnggtcaagtattc

SEQ ID NO: 67052 - DNA, 515 bp, Glycine max
  Clone ID: PAT_MRT3847_31563C.1
ggctcgagtctttctgcactcttgagtccttcccaagctcgtttcgttggaaattggaattcattctctccccgagtcagagtcatgtattcggctcaagctcgagccgctcgagccgctcgagccggttcccacacttgcaaagccggttacgctggcgaagatgctcccaaggccgtctttccctctgttgttggtgcaattgatcaaatggacattgatggaactgctgatattaatgatgagaactctgacaaaaccaagggaaaatgcaaactttatgtaggatctcagtcactaggataccgcagagaccatatggaggtgctgtcacccttgaagaatggagttgttgttgactggaatattgtagataacatatgggatcatgctttgagggaatgcctcctagtcgaccctaaagaacgtccaatgctacttgccgaaccatgctccaacactcaagaacagagagaaagggcagcagaacttatgtttggaaaaatattaaagta

SEQ ID NO: 67053 - DNA, 477 bp, Glycine max
  Clone ID: PAT_MRT3847_31564C.1
gatcataaattttttatcattagcatctcttcatggaaacctaggcaacgtaattttcagtttgccagactgccaccttcaacgagtataatgtaaaataaaagatcctacacaatcggtccatcgttctttacctgcagtcttactttgtacattccagcatcttccactcagtatcagaagcacgcttaactagcacattcttcgagtccatgtacgttttggagataaacggcaatgaagtttgtgaaaatccttgttatggctcaatttcggtgtattcatccattattgctagctgttcatactcctctgataacctcttctttgaagaaactgcttcctgaattcttttcttatatgatctaagcttttgggctttatcagagcctggatagagtccaccttcggttcacaattcactgttttccctaaggctttggatattattctaaacaatgttttccaaactggatt

SEQ ID NO: 67054 - DNA, 266 bp, Glycine max
  unsure (1)..(266): unsure at all n locations
  Clone ID: PAT_MRT3847_31565C.1
ggagggcaattctaacatcgttccgttcgtgctgagtttcaggcaatcttcatngcttgcagcagccacccccataggagtgtaggagttggagagtgatcgacatcaacacaaggattcgatttcgatgccttctcttcgcatcctaaacaaaatttgttanncgataaaccaatattgcaagtacaagtaccgaacaatctcntccacggcacagttgcngggttcatggatggagaaggtccanaaaggtcatcacggnccna

SEQ ID NO: 67055 - DNA, 259 bp, Glycine max
  unsure (1)..(259): unsure at all n locations
  Clone ID: PAT_MRT3847_31566C.1
aataaattcatctaaccccaaacaaaaccngagcacacttttatcgcttannggcagcagcagtggcggcaagcaactccncccgcaatgggaatcgatttgaaggcaggaggtaagtccaagaagaccaagcgaaccgccccaaanagatgatattacctcagcttctcgtcagtgtacgttctgtcggagatggataactcatgtgtgnctnacgctttctgacaagnaacanccccgtanccnttaatgtcgtaag

SEQ ID NO: 67056 - DNA, 196 bp, Glycine max
  Clone ID: PAT_MRT3847_31567C.1
tattttaatgcttttatttgtagatcggatcacactgatacggggtgcttctattagttactcgtctacagtttctgcttacttgaaacgttgtctaatggacaatattgacatgactgcccatgcagtagtcaaaaggagttattgacccttattggaacaagtttttttaacactcattaacactacaaagcat

SEQ ID NO: 67057 - DNA, 797 bp, Glycine max
  unsure (1)..(797): unsure at all n locations
  Clone ID: PAT_MRT3847_31568C.1
gacacattaacgaatgctgttcaagtttttaatggcaagaattggaagaaaataggtatatacttttatttgctaagtagtgatgaccttttatgttttaatttaaaagtttatgttgttattgcatcctggtgaaatgaaaagttagtcaagtgattgttacaatgtaatgaatgttcgaacttactcgagatatttgaattgaaggactaagaatgtttatttctaaaataaattgcacagtaacaaaactattttgcgaagttccttgtcagagttttccatttgcagagcagactcatccatcccttgtctgaaaatatgaagtaaaaaaagactagtatgtaattaaaaaaagactcgaggataagtttgttaatgtaagtaaaaaaagtcagaatgaaattacagaaacaaattcctaaatctctatttgcttctttccttgatgtttggataaattgtttttctgtgaatgagaattattatgtgtgtaaaccaatggaattagttcgggtgagtataatcagtatatacataagattttcggtactgagtgcttactgaaagcattatgcttttttcatgaaaccaatttgaaatgtggcttgcagctgagtttttaccgggtaaatcagaagttcaatgtctgcacagatggcaaaaagttcttcatccagaactcgttaaaggaccttggactcangaggttgaaacctagtccttatcttttctatttgttagacaatcctaatcaattattaacttctcttgcttggcccacacaggaggatgat

SEQ ID NO: 67058 - DNA, 383 bp, Glycine max
  Clone ID: PAT_MRT3847_31569C.1
cgaagagctgggaacgggagattggagcaatcagaatttgtgggaatgggctgattgggaagcaatgtgtgctggtgcaatgcatttaatttcttcccaattccgcccattcctatgatttctgatgattctttcctttccttttgctttttgcaatacgcaatatgcatgtaccttatttttcattccatcctcattattctatgctaatggatagtacttccttcttctccatgtttcttttattggtataacaacacatgatgaaatttgaatattgaacataacttttggaagctaatttggttttttccgtcctttgataaacggcgttggaaaaagaagttatggtgtcatatgaattaaagggaagcacttttaaa

SEQ ID NO: 67059 - DNA, 355 bp, Glycine max
  Clone ID: PAT_MRT3847_3156C.1
tgcatcgccattcgggtcgagaattaagcctactgcttaaaaatgataaagaatttttaaaccatgcaccaacaccggggctattatcggggcatttattaatgaatggatctacatctgaacatgtagctacacatcaagcttgaaactatctcaagacactgatatcccctgaggctcctttgtcaagctctgaaaacagaacactaccaatggagtgaccaaggtggtcaaaatcgcagccatatcaactaagtttcgtattgacactagacacgtggacaaactcctagaccatataccagcagctagtacggcggcttttaaggatcatgattatgtctgagattgtatc

SEQ ID NO: 67060 - DNA, 397 bp, Glycine max
  unsure (1)..(397): unsure at all n locations
  Clone ID: PAT_MRT3847_31570C.1
gcaggaaaacgagattgcctaggttgtgcatggaaaaacacccggcttttgcacaactgataaatcttacactccagagacttgagggaactgctcgggtctgatttaaggcctttaccagaaccatagggcctaaagagtgccatgcctataaaacaattggactgtctgtttcccctttgggaaagaatagggcaccccagcaggagccaaactagacacactacaatccctatctctaacttatacacaaataaattatatgccctaatgattcattctcaatcgcctgcgtggaattctatggaagattgcctcttataatgggactcactgtgaatctctaagcttcgncaagtctcccatacgccatttacttctgtgggaatcctctcca

SEQ ID NO: 67061 - DNA, 343 bp, Glycine max
  unsure (1)..(343): unsure at all n locations
  Clone ID: PAT_MRT3847_31571C.1
aaaaaaaaatacaacagcaaaaaaaaaaaaaacgggaacgggaaaaaaaaaaaaaagagaacgcaaaaaacnaaaaaaaaanaacaaaatcaacaaaacaaaaaaataaaaaaaacaagagnaaaacgtgattctcagtaaaaaaatgaagctaatgaagacgtgaaatcacaaagcaaaaacaacaattgatcaaacaaaaaccagaaactgagggaattgtaataagggccagggaggaaacaccacataccttgcaaaaccaatcacttctacaataatctgcacgagtgaggctcaaccaagtgaaccaaaccctaaatcaacctcaacacccaagtga

SEQ ID NO: 67062 - DNA, 486 bp, Glycine max
  Clone ID: PAT_MRT3847_31572C.1
atggctctccaaacgagtaatatcactgaagagatcaatgagaattggtggcatgcagttagatgtcgattccactaccaacatgctgatggaaagcgaaatagacttggctgcaaaatttttatggaggataaagagggtctagtaccacaagtgcagcaacaggacacatggagatgggagggagagacaaatggaagatatacagtgcggaatgcatataggttgcttgatagggggtcgcctaatgagaatcaggatggagtgtttaatataatatggaagcttaaaattcctattaaggcctcaatctttgcttggagattaatcggggatagactaccaacaaagtgcaatctgagaaggagaaatatcgaaatctacgacatcagctgccctttttgcaggaatcatggcgaggatgcatctcacctattttttaactgtgacaatattctgccattagggtgggaatccatgtcctag

SEQ ID NO: 67063 - DNA, 448 bp, Glycine max
  Clone ID: PAT_MRT3847_31573C.1
gtttcctagaacatttatgtttgtataatgagtgtaaataatgtgtcctgcatatgcaagaaacctttaatgataatgcgtacatttagtggagaacagtgtaaagatcacaaatagatgtgcatctttttctttttttaactttaaacttgagttttgcaacaccatattagcaatttagcaaattccctccactaaaatagtttcttttcagctcactgctagggtctcgattctgcatctgcattggtttggcccatagatgatatcattctcagcttttgacctgctttaacaaatgtatggcaagtatgtctggtcaaatacaaccaattcacaaatattggtttctgctgagtttgcattcattctgcttggcacgagggcattttttctccatgaaattgatgtattgagtacaaagaatttcatcatctttttccctttt

SEQ ID NO: 67064 - DNA, 712 bp, Glycine max
  Clone ID: PAT_MRT3847_31574C.1
aaaccatctttgcaaaatttctggcccaaatgtataaaatcagtaaaccaacacattccaagagcaatctatgtgtgacaatctttcagtatctcctttatacacgaaattagtccttgaaaactagggttaaaaagtaaaaacacattggcataacaaaagtttaaggatattgtataagacttcactcttcttctattagtacatttataattgttttacctatagactatagtgttgtacatggatggctatcaggccacaatgctgaattgggtaaactaattcacttataactgctctctagtctctacaatgcatcaccttgtattataaataggcttcaacaaatatccaaattttgtgatgagatcttaagatgaggaagaaatggagattacagcatttaactcagcaaggcactcagttgggaggccaaggaaggaattcataaagatatcatcaatagggtcaaatgttgccacaccaaccagtctgcacttcccttctttatccaatctcttgcctcttcctctcctcattgtgccatttgtttcttcagatgtcaacactgtcttcaccatcaatggaggagccttgtagagactagcagcagaaaacaagaacttggccttgaactcaagatcaaccttgccagattcttggttaatgtttccttgaaatgcttcaggaactatatcaatcttcaaaa

SEQ ID NO: 67065 - DNA, 447 bp, Glycine max
  Clone ID: PAT_MRT3847_31575C.1
tatgtggttgactatgaatcaacagatgtccatatgaatgaataataacagcaattgggtgattactctttttaagaattctagttcaggataaagagttaaactgttaacaacatgataaaaccataaaagattaaaagggttgttctctactccttaatttctatcaaaattccatattctcagaagatacagcagtggaagcctcactagtatataacaaacagaatacatacaggtttctcttatttatgccataagctatttacagctagatagtcatctctactttactcaaccctctatatagtagccacttccaagaggtgaaaaatgggcacgcattattgtttgagactatatggttcatttgtcttgtaagatatatatccaagttcactcagagtggtaggattgaaagactgcagtaacatgagggcggtcttc

SEQ ID NO: 67066 - DNA, 239 bp, Glycine max
  Clone ID: PAT_MRT3847_31576C.1
ctcgagccgcgcgccaccccgatcacgcacaccggcactcgttcgattgcatacagtcacttttaccccccaaacgcgccacacgcctaaagatatcaccgccactctaactccccatcctccccctctgcccgacgccgcataccgcccaacatggccgcagtagcatacaaccttgtggaaaagtacgcgccggcgatcgaagagcacctcgttaccgttaatgcgactacggcgca

SEQ ID NO: 67067 - DNA, 165 bp, Glycine max
  unsure (1)..(165): unsure at all n locations
  Clone ID: PAT_MRT3847_31577C.1
cncgncgcacgcacgcgnacgnaagcncggaattcggctcgagcaccccnnccacgaacaccacnaccaagccacgncnnccanancnccnnagnaanncnagccangcacannnanaanaaannccaaccangcccctcaccncnancccacacaacaaacnna

SEQ ID NO: 67068 - DNA, 523 bp, Glycine max
  Clone ID: PAT_MRT3847_31578C.1
attcataaaataaattaatgacaataatttagaacacatggcttaaggcaaaacagaatggaggggcagaacataattgatggagtaaaactcgatgtacctcctttcaagggcaggagtgatccagatgcctaccttgactgggagatgaaaattgagcatgtattctcctgcaatgattatactgaaaagtagaaggtgaagttagccgcagctgaattctcagactatgcccttgtttggtggaataaaaatcaaaaagagatgataagagaggataggtgggagataggtacatggactgagatgagaagggttatgcgaaataggtatgttccaactagctacaacagaaccatgcgatagaaacttcagaggttgacccagggaagtttgaccgtggaggagtactacaaggagatggagatgacactagtgagggccaacattgaagaggaaattgaggacacaatgactcgttttctgagtggcctaaatcctgacattagagatgttgttcaat

SEQ ID NO: 67069 - DNA, 394 bp, Glycine max
  Clone ID: PAT_MRT3847_31579C.1
ccacgctttcggagcatactacctattatgccaaggttatcgacacggagctgacaacggccttgttattcttgccaaattgctacaaaactcaggcccgtggcaaaccagttaaaacccgagggctaaatgtttctaattaaaatgaaagattgtgccggacctccctgggaggtgaaatggggccaaaaaaaaaactatcgtgaaccaataccggcctctggggggaacccttctggaccctgttcaaaacagcaaaaccttaatcggaccccaggcgcagagaaccactcccacgcattatgcaaatcctagggcggcgattttaagctctcgtggctgaacagcatgaatatcttgaagcacatgagaaaacggggtttttcgacctttt

SEQ ID NO: 67070 - DNA, 237 bp, Glycine max
  Clone ID: PAT_MRT3847_3157C.1
atgaagcagagctcgtcgggtagaattgacattgcatgttggatcttggaagctgctgtggctgtgccggatggatccataatccataatgtatacaacacagcttcttctcttcagctacagcgtaacagctgtcgtcgtcagaactcagaagcaacccttttctgccgctacttctcattatataccaagtcaatggttggcccattcagtgcaaatatgtggcggagggtttga

SEQ ID NO: 67071 - DNA, 124 bp, Glycine max
  Clone ID: PAT_MRT3847_31580C.1
ccaacacttcagcgaaggcttcattacggatgcaatagcacgacaaaaggggaaccaccattacctccctgacaatctgcagtctgtgcatccaccattcaggggctaccttaaggatatgctg

SEQ ID NO: 67072 - DNA, 222 bp, Glycine max
  unsure (1)..(222): unsure at all n locations
  Clone ID: PAT_MRT3847_31581C.1
ctaccnaagctcgaattccgccgggagcgcaatggccatggcttcttcctcttcacagactctcctccaccctcaacagacctctcgccaacgctacttccgtttatcatcgcatgtcctcctggctctccacaaatgaaaaaacctaattctacaccgattccataaagcagctcatcgatcctctcgagaccatcgatcccgagatcgctgacataatcg

SEQ ID NO: 67073 - DNA, 870 bp, Glycine max
  Clone ID: PAT_MRT3847_31582C.1
aatagagttctaaatagacagcgccatttgttgatgattttgattcggggttaacctcttttgatgctccttgtttaacagtgatgtattgttagataccactctatttgtgatattaaaatggttctttaatattattgcccttttactaggaacttgcatggtcatatacttagaatggatcagcattgtgatttaaatgcataagatgaattcagttggtagttcaagtaaaattaagactactactaaaggtatgcctttagttgctttaaatgagccaacccaattttgatgtgtacataagcttgacctaggtcttattatgacatgcattagctgtgctcctcaaaagtcaagtatagattcaaatcattcatgaaataggaaaatcttggttagttggtagttatatatacattgtacaattgtaatttcctttctactccctaaaagggatgttgtttctatcatttatttttgtatttattattttgtctcttgtagcctgcttcgacaaaggggaagcctacaaagctgcacaagaggaagcatcaaattggttcattgtactttgatatgaaacaaaacgaaatgaaactcgctgagcggcgtgcaaagggcatgcttaccaaagctgaaacacaagcgaaatatggatggtgatttgggatgatgatattggaaatacttccattgaaacgtgaaaaagcaaagtcgaagttttcatatttagttgcaatccttgtgtttcactgttctgtgtacatttgctccgtctttaagtgcaaattatgtatttctattcttatagccagtggaattttataccgtacatttttttatgacaagaaagatcatttctttccg

SEQ ID NO: 67074 - DNA, 229 bp, Glycine max
  Clone ID: PAT_MRT3847_31583C.1
gaacgaaggcatctttgatgttgacaccaatgttttgtatagtcaatacaagattcttgtgataacttggtacaatatatccgtatgctattctgtgaataagagcctaatatatattctatcctattttgtacgactagaaggattttgtcttatatgactttagttaatgggattgttactgattttggtgagaacatgtactgggcatttgttgaaatttttctct

SEQ ID NO: 67075 - DNA, 260 bp, Glycine max
  Clone ID: PAT_MRT3847_31584C.1
aagacctataacctcttgcatgttagcctgtgtcaccggaaaccaaacatactctaaaaggtaaaaagacgggcacttattgaaaagatgcattcttgaggggtcaaaatgcgatcccataaaaggatttcattaatcccgcggcctccatctttattcgtctttctcatacctcttcaacgacgctctctcccattccttgcgcacaataacatcgtgaacgctccttctccgaccagagatcaatggtggcttggtct

SEQ ID NO: 67076 - DNA, 263 bp, Glycine max
  Clone ID: PAT_MRT3847_31585C.1
caacctcaattgaaaaaaaatgggagtcttcctactgcaaagcaagagcaaaccaggatgaactttatctggagaattggtgctgggtgtttaagatatgaaaataaaattgcatctggacctttcagtgatttgtataaaggtacgttctgcaatcaagatgtagccatcaaagtccttaaacatgagagtttgaatgacaatatgctaagagagtttgctcaggaagtggatatcctatgtaaaattcagcacaagaatgt

SEQ ID NO: 67077 - DNA, 1311 bp, Glycine max
  Clone ID: PAT_MRT3847_31586C.1
cattctcgagccgaatcggctcgagacggctgcgaaggttgttttcaagtcaactcaatggcacttccctcaggtttagggttgatgtttttcagcactttttggtatggctcaggtattgggggttgaggcaaaggcaagggctttctttgtattagggagactcactggttgacaatggtaacaacaattacttagggaccattgcacgggctgattcccctccttatggcattgactatccaactcttcgtccaaccggtcgtttctccaatggcctcaacattcccgatcttatcagtgaacgaataggtggcgagtccgtgttgccttatttgagtccacaactaaaaggtgaaaatcttctgaatggagccaattttgcttccgccggaattggcattcttaacgacactggatctcaatttctaaatataatcagaatgtatagacaattggactactttgaagagtaccagcaacgagtgtccattctaattggagtagcgcgggctaagaaacttgtgaatcaagcattggtcctcatcactgttggtggcaacgatttcgttaacaattactacttggtgccttattctgcaaggtctcgccagtattcgctacaggattatgtcaaatttctcattgtcgagtaccgtaaactcttgatgagactatatgatttgggagctcgaagagtaattgtgacaggcactggaccaatgggttgtgttccagcagaattggccatgcgtggaacaaacgggggatgttctgccgaacttcaacgagctgcatcactctacaaccctcaactaacacacatgatacaaggactcaacaagaaaattggcaaagacgtttttattgctgcaaatacagcactaatgcacaatgatttcgttagtaacccagcagcatacggatttactacatcacaaattgcttgttgtgggcaaggaccctacaatgggattgggttatgcacaccactctctgacttgtgcccaaacagaaacttgcatgctttttgggatccattccatccatccgaaaaatcaaacagactcattgtggagcagattatgtcgggttctaaacgatacatgaagccaatgaacctcagcaccgtcatatcattggatgctagaaaatgacgacatttttaattgtgtcttctttgtgattggaatcgtggtatggttgtaaacccgtatcaattatcaagtgcgtgtgtgtgactctcatagtctttagagttgtatgtgatttctccaacaaattattgatcaattaaataattgactcatc

SEQ ID NO: 67078 - DNA, 241 bp, Glycine max
  Clone ID: PAT_MRT3847_31587C.1
ggggtttgagaactcagctggtgctgaaaaacatctagcattggccttgaaggttcaagctgtcaggtccatcttttacaattgtttaatggatggattctacgacacattttacgctcacaccgtgcgtaaattctaccgtgattgctttattacaagtaccaatgactctgtctttggtgatgcagtggctgttatgcataattgcactatcgtggtgcgaaagccattggatagccaa

SEQ ID NO: 67079 - DNA, 324 bp, Glycine max
  Clone ID: PAT_MRT3847_31588C.1
acaactcgtgtatgatcttgacatgaccaaatgcatctgttgtggattttgtcaagaggcatgctctgctgatgcccttgccttgggaccagactttgaattcgctactgacactcatgaagagcttctatatgacaaggagatgctgtttgaatatgatgaccgatgggagactgagactgcagagaacctgagatctgatagcctgtatcactgaaattatacatgcgatcctagcctagggcttttgccgtctaattgggcaatgataaatcatatgaccaccgcttgaccttaaagaactgtatgcttacacgagtgtta

SEQ ID NO: 67080 - DNA, 343 bp, Glycine max
  Clone ID: PAT_MRT3847_31589C.1
gggaaaaaaagaatgtactacaaaaccccaagctggagaacattgtggcgcgaggggtggtcttggaagaaaactgccccggggaactctggggggtttttcttaaaaaaaaggtttttttaaaagcggctttttctcttgggggggggtcccaaaacccccccatgaaggggagacaaattctcaaacggggggggtgtttgttttaccaccccaacttgttaatgggggatttaagagcctaaattcccgggttttggggggcactttccttaacccggggggggcttaaaaaacaaccccatggtgtataaaacgacccctgggggggggggttttttgg

SEQ ID NO: 67081 - DNA, 259 bp, Glycine max
  Clone ID: PAT_MRT3847_3158C.1
gcagatcttcgtcaagaccctcaccggcaagaccatcacccttgaagtggaaagctctgacaccatcgaccacgtcaaagcccagatccagggacaagaaggaatccccccgggaccagcaacgtctcatttttcgccggaaagaactttaagacggccgtaccctttgtgactaccacttccgaaaggaaggaatctttacctcggcctccgtctccccggggggatggacaatttccgttaaacactctcgggaaaa

SEQ ID NO: 67082 - DNA, 1344 bp, Glycine max
  Clone ID: PAT_MRT3847_31590C.1
cctcctcgagccgaatcggctcgagacggctgcgagaagacgacagaaggggatccacataaacatcaacatcgaaaggttgttaattttcaactcaatggttcttccctcaggttttgtttccatgttgatactttttggcatggttttggtagttggggtgaatattgtcccaggggttgaggcaaaggcaagggctttctttgtatttggagactcactggttgacagtggtaacaacaattacttagcgaccactgcacgggctgattcccctccttatggcattgactatccaactcgtagaccaaccggtcgtttctccaacggtctcaacattcccgatcttatcagtgaacgaatgggtggtgagtccgtgttgccttatttgagtccacaactaaaaagtgaaaatcttctgaatggagccaattttgcttccgctggaattggcattcttaacgacactggttctcagtttctaaatataatcagaatgtatagacaattggactactttgaagagtaccagcaacgagtgtccattctaattggagtagcgcgggctaagaaacttgtgaatcaagcattggtcctcatcactgttggtggcaacgatttcgttaacaattactacttagtgccttattctgcaaggtctcgccagtattcgctacaggattatgtcaaatttctcattgtcgagtaccgtaaactcttgatgagactatatgattgggagctcgaagagtaattgtgacaggcactggaccaatgggttgtgttccagcagaattggccatgcgtggaacaaatgggggatgttctgctgaacttcaacgaactgcgtcactctacaaccctcaactaacacacatgatacaaggactcaacaagaaaattggcaaagaggtttttattgctgcaaatacagcactgatgcacaaggatttcgttagtaacccagcagcatatggatttactacatctcaaattgcttgttgtgggcaagggccctacaatgggatagggtcatgcgcaccactgtttaacttgtgcccaaacagaaactcgcatgctttttgggatccattccatccatccgaaaaggcaaacagactcattgtggagcagattatgtcgggttttaaacgatacatgaaaccaatgaacctcagccccgtcctagcattggatgctaggaaatgacaacacttcttatgtcttctttgtgattgttgtaaactcgtatcaattatcaagtgcgtgcgtgtgtgtgactctcatagtctttagagttgtgatttctccaacaaattattgatcaattaaataattggctcc

SEQ ID NO: 67083 - DNA, 394 bp, Glycine max
  unsure (1)..(394): unsure at all n locations
  Clone ID: PAT_MRT3847_31591C.1
cccactcctncgtaagcttttcatccctctgtatttgtaatttgttttgtgctttgggaagatgttcttccaaatcaagaggggctttaaaatcatattgtgtgttttgcaacaattgctaagttcttttctgctattatcttggcactcttttccattttcatactctaaacagtggtaatggcttcttatgaacaaagaggccacttttattacaacaagagcaaatattgaagtggaaatgtcaaaagttaccaattcccatcacaatgctctaagagatttatcccgacccaataccacaaaccctgcatgtttttctttcaaaaatactccaagacattccttttttttgcccccccggtattattgtaattaaacttttttccccttc

SEQ ID NO: 67084 - DNA, 309 bp, Glycine max
  Clone ID: PAT_MRT3847_31592C.1
ctttcgaccaccatgatactgtgcttcacgcttactcttggatctaacacccaaatacaccttctatggccaccaccttttgattttcccatggatcccttttctattagcccacctgtagtgatcaatcatgggctccggtatactaaaatggagcaggctggtattgtgtggccactgtataaagctccgacagtggcttccattaacctagcctttcttatttgaagcagtatttcttctattgctaatggagcgcccaggacaatacatatatgtatgggccattggggtgtctctcttggggat

SEQ ID NO: 67085 - DNA, 143 bp, Glycine max
  Clone ID: PAT_MRT3847_31593C.1
aaaaagaatcttaaaaaacccatggctggtatctcacgaatacaagtcctgctggtatgatccgttcacacataatcaccatcatgtgacacacgcgagaacaaggttacacaagcagaaacatggtttttattgagtcaaag

SEQ ID NO: 67086 - DNA, 363 bp, Glycine max
  unsure (1)..(363): unsure at all n locations
  Clone ID: PAT_MRT3847_31594C.1
caagttttatttcctggacgtttccaggtacactttttcgtttgtttttttttataattttgttactgtgattactgtatttatgtcgagtgcaccaatggaacacatgatggcatttttttgcggccatgattctcatatgaataaaaattgtacgtcgtttttgacgtctcagtttcgcaaaanaaaaaaaaaaaaaaaaaaaaaaaaaaaaaaaaaaaaaaaaaaaaaaaaaaaaataatgttgtacataatatattaattttttttaaaacattttttaaattaggatgtgaattatataaatgataattaaatttatttattntggggggggcctccccttttttggtttttctcccc

SEQ ID NO: 67087 - DNA, 1071 bp, Glycine max
  Clone ID: PAT_MRT3847_31595C.1
ctccttgggcggccctggtgctgcatgaacggggtcggtgttcgtggccgttccccgcgtccgcggaaggatttttagcgcgcactgttgtttcttgtggcgatataggtgaaatatgacctcagttggttataacttgctaacaggcagaaagtggattgaattgaagaacacgcaaactgctcctacggaagggtttttacttagcgcgctcttttgtttctcttggagatataggtgaactgtgaacttggttggtcagagcttgccaacaggcagaaagttgctgaagtccctcaattgtgcttccctgcctcctttcccaaagtctctgtctggtgcaatggtttatataactgagtgggacaagtttgtggagcaatccattgagctgttccgtgcagatcctgattctacaaggtatgtcatgaagtacaggcactgtgatggcaagttggtactcaaggtcactgataaccgacagtgtctaaagtataagacagaccaagcacaagaggctaagaagatggagaaactgaataatatgttctttgctttgatggctcgtggtcctgatgttgatctatcagaagtcacgggaaaagagcaaatggatgctcagccaaccaagaaaggaagaggaaggaagcaataacttacttggccttttgctagacaagatggttttatgaatcactggactaagaatttgaatagttatatttttttccctacctaatgattacttcagattcttatgatgtgagaggtttatattttgaagttttgaagtctcaatttctgatctctggcagtcttgagtattacaaaatttagttatatctctccagttcatgttcaccttctaatttgtacggccgttgcttgaacttaccaactacataaattagattggtgaccaaattgttgaaggtactacatggagtgaatattggatcccatgccgcaaggatgcacatgaaataatgtgtttaattactgtgtgttttgtttcatgttagacaattaattttgagtccaaaattgattttagctaatgaatttttagat

SEQ ID NO: 67088 - DNA, 470 bp, Glycine max
  Clone ID: PAT_MRT3847_31596C.1
ctatggtacatgaattaaatttcccaaaatctaagctgttcggcaaccatcaacgctagatatctagctgaaatggagcttttttttagatctatacaatttggggaatttaaattttaaaaatcatgttcatcttataattgattttcagatagaatttgttcttaaaaagctcaactctaagttggctttcttctagtctaaaattttcaaaactttcattcccttttattcttcttctctcacagagtcattgtagaataagataaaggtgtaaagacctacacatccaaaagtcaatcatcctgcaaaaaaaattacatattataacctgaatttgaattagtttttttgttagagctgtaataaaaagactataaacgattcgtaaacttcacctaatgtaacatgaatagagttcaaacgtgctgtctttgatcttttaataaaatgttgaatttcagtacaag

SEQ ID NO: 67089 - DNA, 625 bp, Glycine max
  Clone ID: PAT_MRT3847_31597C.1
ccacatcatgcatatatataattaacaccctcgcatttttttcttcctaaaagaaaaaaaagaagaagatggagtttgtgaagagagtattgggaagcagcaagagattgtatcctgaaaacagtggtggaagtggcagctacggcagaagattgagcacctcaaagaagaagaagaagaaggctccacagggttgcatttgcgtctacgttggagccgagagagagagattcgtgatcaaggtaaagatcgcaaaccaccctttgttcaaggcgcttttggacgctgctgagagagaatatggctatcgaaacaatggtcccttgtggctcccttgcgatgttgacttgttctctgaggcgcttaaggatatggaaaatagcatccaagaagaagaagaaacgggttctgtaggttgcgccgcctttgctgcgggtcacagtttccggcgcagcccctcatcagcttctaataattacatcagttgtagatatttgttgacgggatctgtcattcaccattaccaaacccttgttagttgagattaattcttgaaacagattcaaagaggcaaaaggctcatatatatataatagatcagaaatttatttgttttactgcgaac

SEQ ID NO: 67090 - DNA, 546 bp, Glycine max
  Clone ID: PAT_MRT3847_31598C.1
gacgtactcgccgcgctcgcgcgtgaggctggctgggtcgtcgacgccgacggcaccacctaccgccagtgcccccctccttccaacgggtcatttgcggctaggtctgttgaaagtcaactctctggtggttctttgaggaattgttctgtcaaggaaactattgagaaccagacagctgtgcttagaattgatgaatgcttgtcgcctgcatccattgattccgttgtaattgcagaaagggactcaaagaatgagaaatatacaaatgctagacccatcaatacagttgactgcttggaggctgatcaggaccagctgacagtgtcatttattgacacagcttatgcaagatattcattctggggtgcatgaaaatgactttactagcacgccatacgtttctgtttatgtaaagcttccagctggtattattaacaaattttgccagttgattgatcctgaaggcataaagcaggagctcatccatatcaagtctttaaatgtagatggtgttgttgtggattgttggtggggcattgttga

SEQ ID NO: 67091 - DNA, 365 bp, Glycine max
  unsure (1)..(365): unsure at all n locations
  Clone ID: PAT_MRT3847_31599C.1
cactgagcatcgtctagctatctcgatcgaactgtccaaggtcctgtcaccagcaacgcgacacaaaggacggcttgtaaagcgtgagaggtgcgcatgctgaaatagtaagacgacgtgcgtgggcatgaaacacacacccgactggtaattgcgaaacggcatggcggcatgccaccaattaggccccccaagagcgcacccaagcccngacngacnggaccaaggcagcgtggggatagcgttaaccatagccagaacnggaggtgggcgaaagaacgttcgcgaaaagacccatgtccgacggggtggcatgtgcgaagccccaagacgtgagnacgggttgcgcgtttttgggcgtgcgt

SEQ ID NO: 67092 - DNA, 324 bp, Glycine max
  Clone ID: PAT_MRT3847_3159C.1
ttcgctgatacccggcacggggctcactgaggctgtgaaaaccctcaaccatgatgggctccagggccataaagaatggctggctgaggaaaataatctgggtgatctagtccatgcacacctcgttaaacttattgtgtactgcattgaagatgatcaacggctgctagcctatgaacttacgccacggggaagcctgcataaacacttgtttaggaggtccctacctcttgcatggaccattacgatgaaaattgcactaggagctgcatagggtcttgcttttcttcacgaggtagctgaccgaccagtactatataggga

SEQ ID NO: 67093 - DNA, 230 bp, Glycine max
  Clone ID: PAT_MRT3847_315C.1
gttagtgagagaaagttgtctgtctttgttttttatccctatggcgcgctttgcaatcgaccgcgcttatggccaacagtcacctccctcgaagaatcattaaggaaacgcagcgtttgctcagtgagccagcgcctggaattagtgcgtcccctttcgaggacagtatgcggcattacaatgcgatgatccttggaccgactcagttgtcatatgaagggggagttttt

SEQ ID NO: 67094 - DNA, 111 bp, Glycine max
  Clone ID: PAT_MRT3847_31600C.1
tagacatgcatgtcgaacgtttagttactatagtctaactcaactttcatggtggaccttctttactggacacttccattgcaatatcttgaattctcaagtttacggcgg

SEQ ID NO: 67095 - DNA, 341 bp, Glycine max
  Clone ID: PAT_MRT3847_31601C.1
taaattcaaatttatagttcttatttgtgacaataaaccaggattctgactagatataccatatgtaaacaccgaaccgttatataatgagaatgggtaaatgtcttacgcaaacttgactcctaacacttgaattcaattacgcaagttagtatttttataacaacgagtgagacatgattttctgtgcttatacatcgtccattgctttaattatctggaagcttcaattccttctgaattcaaggtgattatatttgagactaggtctggccgcacctgtgcgaaagcacccattttgagcagaaggaaactggtgcgatttgatgagctagcacctt

SEQ ID NO: 67096 - DNA, 280 bp, Glycine max
  unsure (1)..(280): unsure at all n locations
  Clone ID: PAT_MRT3847_31602C.1
atcntatncaattgaaattntaaaaangactgggataaacttaagaattcaattattgaaattgaataagtanacaatttaattggattggtnaatncgtatcanaaaaatggantactaactcncatttctnatttattattgaattaaccgatcaacttgctttgttatcgaacatttctttttgatttcaaaaattntccggnaaaaatttgaatctatttttatatggngaatcaatctnactacttcggnctcgaggtttctgcgctgaaaaaaa

SEQ ID NO: 67097 - DNA, 357 bp, Glycine max
  Clone ID: PAT_MRT3847_31603C.1
gggcgcccttttttttctagaaccggcgccacatgggtgtggttttacatttgcggtaaaaaataccaacacaatcactacatggtttggccctaaaagggaaagacatcatttatcacgtggactaaagatctggctgccttatattcaaatacacatcatagtcaggattcttcatgttaaacaacctaacacaatttttaaagaccttttcctttttgcgaaacaccgaaagaggccctcacgggagaagtgtcacacaggggcagctttgtgcttggggtttaaaacatgctaaaaaacaacacacggaggccacacaaacagataaggagatgggttaaaaccgggcattta

SEQ ID NO: 67098 - DNA, 181 bp, Glycine max
  Clone ID: PAT_MRT3847_31604C.1
tactgaggaaggttagaagtcattgaacctctgctctgcaattcgtcatgctcttcacatagccttgcactctgattcacgttcttatgtttttggagaggatgtaagctatcgtgtggtctgtcgctgctcaactggattacctgacctatttggtaacatgaggagcttcaatactccc

SEQ ID NO: 67099 - DNA, 417 bp, Glycine max
  unsure (1)..(417): unsure at all n locations
  Clone ID: PAT_MRT3847_31605C.1
tggtaaatcatttacaagcaaagtattgaaactaagaaaataggaaaactattaagatcataagatattaggaaatattgaaactaagaaaataggaaatattaataactattaagatcataagattccatcattcactagcttaattatttatactaataactattaagatcataagatattaggaaatattgaaactaagaaaataggaaaactagttctacgagataatctctaacattccctaaaatattctatgacaaaatctaaacattattggatactgtaaataattntaagatactactataatataaaaatgtataaaatgcnaagcgatgtccacataggcagattcacatnattgcattaactttcaagaaattcgaatggatatggggtggtgtttaatctaca

SEQ ID NO: 67100 - DNA, 365 bp, Glycine max
  Clone ID: PAT_MRT3847_31606C.1
aaaaaaaaacgatgctttacttaaaaataatcgaaatgaacaaaggggataaacaagggggaacaaaagggaaaaaatttccccaaccagggggggagccagtttagcataaaggtttcaagcctttaacaaaggaaaattccctacaagggcatcatctcaaaggattctcactttcatagagctaaggggcaactgcagcaatttatccataggataaattccgaagattaccgaggattgggaggccggttattggcaacaaaaacccttgacccccattcaagcatttctttacggggggcacccttaagaacaatcaccccaatgaagcaaaagggttttttcttggcccccggggctgg

SEQ ID NO: 67101 - DNA, 244 bp, Glycine max
  Clone ID: PAT_MRT3847_31607C.1
gtagttggttaactcgtcaggctcataacctgaagattgcaggttcgaatcctgcccccgccatgtcttgatttcgaaaagtctgaacttgaaccctagtttccatcaagcagaagcaagacggaccatcttgagggaagagggcagtttccctgatggctatgaatggcgcggtgactatccggaagattttgaaaagctgccaagcaatcaagcaataaaagaaagcgagcatcacaaatat

SEQ ID NO: 67102 - DNA, 476 bp, Glycine max
  Clone ID: PAT_MRT3847_31608C.1
ttcggctcgagtacggctgcgagaagacgacagaagggatatcttgacctttttcctctccaaacatttcatcagatcctttgctgcttcttctgtcctccttttcatgtgtgtctccttgtgtttcttcactttaccttttttctctcctttttgttgatacacaggtcctcctcttcctcttcttcatcttcatcatcttttttcttcacccctttcattattttctgtgtaccttctatggcggttttaccaagtagctcctcaaacttggaattgaccatatctgtccctggctttgcttcttcaccagtccttcttcccttatcatctggtaagcatcacataaatataaacaactttgtcttatctttttctaatcatcatctttgtcattttgatcaacctcatacatcatcttaataaataaattccttcctttgtgtgtgtgtgttcttgctttggttaattttatg

SEQ ID NO: 67103 - DNA, 145 bp, Glycine max
  Clone ID: PAT_MRT3847_31609C.1
gaggggacccgagctagggtttctgagttatgggtggctccttgctgtagatggaacaaacctttcttttcttctctcaagtctctgagattctacatggctgctagaaggacaaggctccaccacctttctcagcccgctaatc

SEQ ID NO: 67104 - DNA, 1701 bp, Glycine max
  Clone ID: PAT_MRT3847_3160C.1
cggaattcccgcgtcgaccccgcgtccgcccaacgctacgctggcgaggccaacgaaacctcgaatttcaaataaagaaatggggtttaaagagaactccatgaattggattggcgtcacggttggtggcctcgtgggcatagtgggtgcaatattggcactaaaagatgccaaagtggcgattccatttaccttgccctggtccttcgccacagacaatagtagcttcgagaaatcgctctttgttcccggcttgcaaaacctccaaaacaattgcttcctcaacgttgttttgcaggctctagccagctgtttttgctttcagagttttcttcacagtgtgattggagagtgcgggagtaaggacctggatgaaaacatgcctcttgcgcttgctttggctactttgctagaagagctgagttcatttagttcagaaagggttacactgagtcctcgaaagatgatgcttgccatgtccaactacattccaaattttaatctaactagccagcaggatgcagctgaagcatttctccatctgttatgcttactgagagaagaatttggaggttgttatgctccaaagatgagttctttagcagaaatttttgcttctaataatagaattcttactccaatacagagtgactgccaaagtgagcaggagagatggcagcaactcttccttggaccttttgatgggattcttggcagcagcttgacatgtcaaagttgttcatctcagatctcgattaactttgaacattttgattgtttgcctctttcacctgtgcttagtgatacttccacaataagagttggttgtaccctggtggattgcctgaagcagttcattgttgctgaacatgttgaaaattatcactgcagccaatgttggcataatgccgcaatcaagtatctttctataatggaaggaaatgaggtagaactcaaaatgataaggagatgctctgacccagaaatctgcaattgccgaaaaatgtataatcttgataaactaccctggtcaaacaggttttcacatactctgaagcagctaagtattgcaaggtgcccaaggattttatgcatccagttgaaaagagtttatatgaatgtctttggagagctagtcaaactgcaggtaattgaatctctgacgtattggatttgtctcagcttttgtcccaccccctcccaaaaggaaaagaaaagttccccagacctaatgccaaattgattgttcttttaattaggatgtaaacttgaatattattatagatacttgaacaaaagaataattgagtagcatataaatattcattaaatttcgatgattgccatatttcttttccattgattttggatgtgttgtcattcatgacaactagactgggagtgaagaaacacgacatagatgtacaaagtgtgccattaaatttgaagtataacaaaagaattttttttccaaatcattctgacctgcaatctgagataagtacattgaaatttagtggccttcatggagcaaaaaaagagcagatcaagtcagatggtgttattgatgatggacttgtctcctctacaaatggacaggcacttcataatgacactgtatttccctgctctggctcttcagaaagcattcactcagatacacatatgcaatcgattgaccagaaaaaaaaaactcgagcc

SEQ ID NO: 67105 - DNA, 920 bp, Glycine max
  Clone ID: PAT_MRT3847_31610C.1
ggacgcgtgggcggacgcgtgggatttttaattaatctttctcgccaagtcttagatttttttgtttgctctctctctctctctctctactacgagctaatttctgtgggtatggaacacatattgtctctgtggaagagatcgagggtcgaccgtgctgaacagagaaatcgaacgcatgctactttttcccctccaaagagattgctttatctatcggagagctgcttaatgttaaatccccggtgattttgctgctttaagaactcggaaaccattggctagctagcattctgttttctgatcggttcaagggaaaagaaaaggacttgcgcttctgcagaattctttctctctctgggacactctcctaatgagaactgatattggtgaaggggaagagttacaaaatccccgctcctttaaggtgcatagtaaaatctgcacagaactcgcaaaattagtggatagaatctcaagaatagttccagacatagaggcggcaaggccaggattctcatcaggaatagagtctctgtgtttgctgaacaatgcaattgataaagctaaactacttctgctacattgctctgaatgtagcaaactctacctggctgtgacaggggatacagtactctcaagatgcctaaaggcaacaagatcattagagaagagcttaatccaaattcaggatatggttcctgttatgttggctgtagaggtttctagaataattcatgatctagaatgtacaagacttgttctggaccctaatgaagaaaaggctgggaagggttgtgaagagagttgcttactttaacctcagattcagctgatgattctgaagttaaagctcttcagtttgcagcatctacactgaatataacatccccaaaggccatcttaatagagccacgatc

SEQ ID NO: 67106 - DNA, 261 bp, Glycine max
  Clone ID: PAT_MRT3847_31611C.1
aaggcattgcgtcgtacaattgtgaaagctgcactgcactctcatcaactcagagttgcatagaaatttgcctatattttcgttattaacactcctatttgtggacttttaccaactatattgatcccaacgtgcaagatgttcaaagtgagcgtgggactgttgctagtggggttggacgtctctgactagcatgatgtactgttgcagcccaagatggctatggaccattgcatacacgagagagcacgcctctaactc

SEQ ID NO: 67107 - DNA, 254 bp, Glycine max
  Clone ID: PAT_MRT3847_31612C.1
cttaagctcctcattagtgctgcaccttgcagatctaattccatctcctcaagcactcgctgacgctgtcacgatcacaactgtgtcacctccagtatcgtgatatcgatgttagttaggaaagactggtggtaacttgtacgacgcgacagacatggctccgtcagtcaagctgagtcaccgctgcgtagatgcactggatggatggtcatattctcacatctgttggaatctcattgtacagaaagcttgat

SEQ ID NO: 67108 - DNA, 184 bp, Glycine max
  Clone ID: PAT_MRT3847_31613C.1
cgcaagcctaggaattgcggttcgagctcgaggggaacaactcacacactgcagaatccgttcccatggtgcgcctgacaggtgctgcgaaagctgatactcatggcctggggggaaaggtgaaccctgttgattttggtagctacggcctgggcaggcttgttgttaggtacccttgcaccca

SEQ ID NO: 67109 - DNA, 224 bp, Glycine max
  unsure (1)..(224): unsure at all n locations
  Clone ID: PAT_MRT3847_31614C.1
cttctgagagtgtctgcccgactctcgcatagatgtttcctttcgggcaaaagggtcacaagataaaggggactatggtggttatgcagaagaatgtgttggacatccacagcattgncagtgttggagggattcttgaccagggcttatgcttcataggccgtgcagtcgatgcacttacttttgcagccaccaagatctccagccagttgatttagtgctac

SEQ ID NO: 67110 - DNA, 251 bp, Glycine max
  Clone ID: PAT_MRT3847_31615C.1
ctcgagccgaatcggctcgcgaactacatcgcgttcctcgccgattggccgcaaacagtgttgccggagtcttacagaccgtagtcccgattagctgaacggatggcgtggttgatattagagctcctctacaaggaggtccgcaactcaaacctagggttcatcctcggggagaattggttgacgaagcatgaattgaaggtgaaagagtatgcttccaagtacgagcgcgtgggaaggaaacgttttta

SEQ ID NO: 67111 - DNA, 467 bp, Glycine max
  Clone ID: PAT_MRT3847_31616C.1
tcggccggcctttatttttttttttttactatctacatgtgccatgggtccttacagacacaggccatccagcgccatcaatggtagcctgtgtgggactccacaacttcaggatgcgtcaatatataaggaacaacatcttctagtgtaatcccaagatagcttgacttaccaatactttctgcacgattagtcaccttgaggagaatcttgcagatggtgacagcgaacgttttccggactgtgtgctgccatgccaagggtctcttgtgcaccagagaactttgaggtctgacatcacattgatcacctgacactggcgatattactggagacccgtggatttcatacaccagtaatcgatcgttgatcaactgtattttgtgtgcgaggtacccctgaccccttgatgtaccctggctgttttgagttgaactcctatcccatacaaggcttctcaggccttg

SEQ ID NO: 67112 - DNA, 353 bp, Glycine max
  Clone ID: PAT_MRT3847_31617C.1
acgcccacgcgttcgtccacgcgtccgtccacgcgtccgctatacactttcttcaacggttaaggcctgggtgtactcgttgtatgttattatttttcgcgcaccagacagcccgagcgcaattgatggactctattgtaagacacacgcattgccagcgaagaagagcttgatagtttacttaaccgactatgatgctgtgacattcatactgatggacgacgctactaccgtgctacatgtacttagagtaggggaaactatgtatcaagcgacaattggatggcttatgatctgggtaaaaagcgcaactgggatctcttactccagggaggatcaaatgctatggcgga

SEQ ID NO: 67113 - DNA, 2066 bp, Glycine max
  Clone ID: PAT_MRT3847_31618C.1
ataaaattaaaatttataaaaattttatttcccacgagacctagtacaatatatagtaacacaataaatacaagagattctgcaaactgaaaaagggatttcttactaaagcaaactcaaacaagaacaacttccactcatttggcatctaccgtagtagaacaggatcaaaagcagcttctctgatagaacacacgtatgtattatattgaacatcttgcacagtagtggttcatttctaacagctagctattgcaacttaaaatacttgcaatgcttctgcaaattccaaactttctttttctcccttctttatggatatgacaaagtgatcagatcatgaaacaataatcaatccattgaatttgaatctgattttgggtttggatcgataccaccattcttcatctcaggaaaggacaacaaataggccaaagcctactaattaagcgcttaaaactgcattagtggttggtttaagtgtgatgttagtaacatcagcttggttattaaagggtgttctttgtacgaagaagcatgccccaataacaatgtagcacagcaggagaacaaggcctttcatgtagtgagaagttccatcctgtaaagtgaagcctgtgactattattgccaaagcaagggaacctgtctctaagaggttgaagttcatgtccatattgatacccattatccaagcaacgattacacataatgggacatattagaggtgtgtgtatcttaccacaaacatggcaatctgagttgctgaacccaatgcaacacccaatgaaatgtccagcttgttcttgaaggcaaatataattgctcctgcatgttcagctgcattgccaactatcggcagcaagattatgcttaggaagctcacagacaaaccccatgaatctgatgcatcctcaattgtatccaccacatattcagacaacacagcaatgaatacagtcattccaaccaaccaagcaatgccactccataatccaatcacagcttgttcttctgaaccatcctcgccatctttaccgtcatcttcttcttcaaataactccctgtgtgtccacagttgaaagacaatgtagacaacatatgcaatcaacatcacaatgctagaagctcttgacaagtgtagtgaagggtctacagtgagagcagctgaggcaccactgtatttgaacagcattggaagcaagtagcacaacaatcccaacaacagcataagtgagttcacatctgcttgtcttctgtcatatttttgttccactccaacgtttgcaatgccaccacataatagagaggtcccaagaaccagaagaaggtttgaaagaatagaacccaacagagaatacttgaccacagcaattttgttactgctaagggcaaatattgctattatgagctcagtaacattcccacatgtagcattcagaagtcctccaactgtgggaccagtgtaaaaggcaacttgttctgtgatgaagctcacacgttcagcaagtggtgtaagtccaagtaagctcaatataaaaatccaaggtcttccaaagccaaagcactcagcaacgatggcagctggaatagcagggatgagaatggaaagcttggtgccaagaataacctcttgcaaatttaaaagaaagtttctgagagtggcacatggaacctttgagacaagagttcggctagatttcttgcgcaaagaggtggaggacattctgtgtgcagaacggccatgcctggtctccttggtcaaaacccttggtttcccattctccaatagccatggttcttgttggtgagaacccatttgctagatacctgtgtgtgtgagatttttggagagcaaagaagaaaaaggacacgaggcaatgcacaaattgtgatgtgatgcagaaagaaagaaagaaagaaaccacagaatggcactctagctagggtaccacgtgtctcttgacgcacttgctatagataaatagatagctatgtatgcacgtattattttgttcatgaaattaacaaggaacgtcatgtatatttataaacttgctcgagcc

SEQ ID NO: 67114 - DNA, 1223 bp, Glycine max
  Clone ID: PAT_MRT3847_31619C.1
aaaattaaaatttataaaaattttatttcccacgagacctagtacaatatatagtaacacaataaatacaagagattctgcaaactgaaaaagggattcttactaaagcaaactcaaacaagaacaacttccactcatttggcatctaccgtagtaacacaagatcaaaagcagcttctctgatagaacacacgtacgtatgattcaacatctttcacagtagtggttcatttctaacagctagctattgcaacttaaaataattgcaatgcttctgcaaagtgctaactttttttcccccccttctttatggatatgacaatgtgatcagaatgaaacaataaccaatccattgaatttgaatctgattttgggtttggatcgataccaccattcttcatctcaggaaaggacaagaaataggccaaagcctgcaaaccaacttcccacattaatttaactttatatcaaattttatgtgatttcacaagaaggattatatttatatttatgtgacacataacttgtaacttacctactaattaagcgcttaaaactgcattagtggctggtttaagtgtgatgttagtaacatcagcttggtctgtgaaaaacaagagatcaaatattaggcatgaattacaaatttataagaatggcatcacggattttgactattatatttatgtaaccattggaaatttgacatattttacttactattaaagggtgttctttgtacgaagaagcatgccccaataacaatgtagcacagcaggagaacaaggcctttcatgtagtgagaagttccatcctatgaataattaagggtggttttgtcaattctcataatattccattattcagagattgaatgaaaatgaggtaaaaaaatatgggttttttttttccagttaaaattgttaattaaatatatacctgtaaagtgaagcctgtgactattattgccaaagcaagggaacctgtctctaagaggttgaagttcatgtccatattgatacccattatccaagcaacgattacacataatgggacctatattgtgtaattgcataagctttcattaaaagaaggggaaaaaaagtaacttataaatgaaattatgaaagtgtccatttacatattagaggtgtgtgtatcttaccacaaacatggcaatctgagttgctgaacctaatgcaacacccaatgagatgtcctgt

SEQ ID NO: 67115 - DNA, 290 bp, Glycine max
  unsure (1)..(290): unsure at all n locations
  Clone ID: PAT_MRT3847_3161C.1
aaaagtaaaaattaaaacaaaaaggaatattatatccgatctatctcaattaaatatgagaaattgtaacttaaatgatncaaaattatacattagttaaaatataaagatttgaaacatatttaagtctaagattaattaaaataaattgatatatagtatgttattagtgttttgtaaaaagaggagtcttacatgacttaacttgatgacattaatttgtttctaacatctatgtgacactactaattcatgagtnatagagaattgaactaaagttcaaagaacat

SEQ ID NO: 67116 - DNA, 259 bp, Glycine max
  Clone ID: PAT_MRT3847_31620C.1
tttttcgtctttgctctccaaaaatctgacacacacaggtatctatcatatggggtctcaccaactagaaccatggctattggataatgggaaaccaagggctttgaccaaggagaccaggcatggccgttctgcacacagaatgtcctccacctctttgcgcaagaaatctagccgaactcttgtctcaaaggttccatgtgccactctcagaaactttctttcaaatttgcaagaggttattcttggcaccaagctt

SEQ ID NO: 67117 - DNA, 1073 bp, Glycine max
  Clone ID: PAT_MRT3847_31621C.1
agcattaatagaatttttatttctcacacaataaatacaagagattctgcaaactgaaaaagggatttcttactaaagcaaactcaaacaagaacaacttccactcatttggcatctaccgtagtagaacaggatcaaaagcagctctctgatagaacacacgtatgtattatattgaacatcttgcacagtggttcatttctcacagctattgcaacttaaaatacttgcaaagcttctgcaaattccaaactttctttttctcccttctttatggatatgacaaagtgatcagatcatgaaacaataatcaatccattgaatttgaatctgatttttggtttggatcgatgccaccattcttcatcttaggaagggacaacaaataggccaaagcctgcaaaatcaagttcccaaatttaactttagatcaaattttctgtgatttcacaagaagaattatatttatatttatgtgacacataacttgtaattaacttacctactaattaagcgcttaaaactgcattagtggttggtttaagtgtgatgttagtaacatcagcttgatctgtgaaaaataacagatcaaattttaggcatgaattacaaatttataatggcatcatagattttgactatttatgtaaccattggaaaaatttgatatattttacttactattaaagggtgttctttgtacgaagaagcatgccccaataacaatgtagcacagcaggagaacaaggcctttcatgtagtgagaagttccatcctatgaataattaagggtggttttgtcaattctcataatattccattattcagagattgaatgaaaatgaggtaaaaaaatatgggttttttttttccagttaaaattgttaattaaatatatacctgtaaagtgaagcctgtgactattattgccaaagcaagggaacctgtctctaagaggttgaagttcatgtccatattgatacccattatccaagcaacgattacacataatgggaccgcaaacatggcaatctaagttgctgaacctaatgcaacacccgatgagtatgtaa

SEQ ID NO: 67118 - DNA, 234 bp, Glycine max
  Clone ID: PAT_MRT3847_31622C.1
ggaacacacactaaagatagcgtgaactctgctgctcctcaccggaagcttcagcaggcggtatagatacaggctacagttacgtcgccatcaccacaacaagaaagtctcactgctgggtcaaattcggcccagtccagatcctctgtggtggctgcatcatggacatatttgactccgagcgtgcactgatagccaaggaggacaatacctgcgcagtgatggatctggagc

SEQ ID NO: 67119 - DNA, 1647 bp, Glycine max
  unsure (1)..(1647): unsure at all n locations
  Clone ID: PAT_MRT3847_31623C.1
ataaaattaaaatttataaaatttttatttcccaccagacctagtacaatatatagtaacacaataaatacaagagattctgcaaactgaaaaagggattcttactaaagcaaactcaaacaagaacaacttccactcatttggcatctaccgtagtaacacaagatcaaaagcagcttctctgatagaacacacgtacgtatgattcaacatctttcacagtagtggttcatttctaacagctagctattgcaacttaaaataattgcaatgcttctgcaaagtgctaactttttttttcccccttctttatggatatgacaatgtgatcagaatgaaacaataaccaatccattgaatttgaatctgattttgggtttggatcgatgccaccattcttcatctcagaaaaggacaacaaataggccaaagcctactaattaagcgcttaaaactgcattagtggctggtttaagtgtgatgttagtaacatcagcttggttattaaagggtgttctttgtacgaagaagcatgccccaataacaatgtagcacagcaggagaacaaggcctttcatgtagtgagaagttccatcctgtaaagtgaagcctgtgactattattgccaaagcaagggaacctgtctctaagaggttgaagttcatgtccatattgatacccattatccaagcaacgattacacataatgggacctatattgtgtaattgcataagctttcattaaaagaaggggaaaaaaagtaacttataaatgaaattatgaaagtgtccatttacatattagaggtgtgtgtatcttaccacaaacatggcaatctgagttgctgaacctaatgcaacacccaatgagatgtcctgtgttcaaggaattactttagtttaactaaattaacattttaattaaataaatttattgcttggccaatatgataatattatcactctctcagttctcaccagcttgttcttgaaggcaaatataattgctcctgcatgttcagctgcattgccaactatcggcagcaagattatgcttaggaagctcacagacaaaccccatgaatctgatgcatcctcaattgtatccaccacatattcagacaacacagcaatgaactcagtcatccctaccaaccaagcaatgccactccataatccaatcacagcttgttcttctgaaccatcctcgccatctttaccgtcctgaacaattcatggtgttaattaattaattaattacttctacgatattggcaaggattagattaattgctaaccaacttaattaaccattttcataattcaagaaaccttacatcttcttcttcaaataactccctgtgtgtccacagttgaaagacaatgtagacaacatatgcaatcaacatcacaatgctagaagctcttgacaagtgtagtgaagggtctacagtgagagcagctgaggcaccactgtatttgaacagcattggaagcaagtagcacaacaatcccaacaacagcataagtgagttcacatctgcttgtcttctatcatatttttgttccactccaacgtttgcaatgccaccacataatagagaggtcccaagaaccagaagaaggntgaaagaacccacgcgtccg

SEQ ID NO: 67120 - DNA, 954 bp, Glycine max
  unsure (1)..(954): unsure at all n locations
  Clone ID: PAT_MRT3847_31624C.1
aacccctcgacccacgcgtccgatcgatcttaatttgcgcttcccattttcttcttcctttcccccaaaagttaattaaacattaattcccgtccgttactgtaatagttacgatattaatctaattttggtggggtgagagatgttgatcaatgtgaagcaatccaccatggttcggccggcggaggagacgccgcggagggcgttgtggaactccaacgtggatttggtggtgccgaacttccacacgccgagcgtgtatttctacaggccaaacggggtctccaatttcttcgacgccaaggtgatgaaggaggctctgagcaaggtcttggtccctttctacccaatggccgcacgcctccgccgggacgacgacgggcgcgtggagatatactgcgacgctcagggcgtgctcttcgtggaggctgagaccactgccgccatcgaggacttcggcgacttctctcccaccctggagctccggcagctcatcccctccgtggattattctgccggtatccactcctatccgctgttggtgctacaggtaacatatttcaaatgtggaggggtctcattaggtgttggtatgcaacaccatgtagcagacggagcatctggtcttcactttatcaatgcatggtcagatgttgctcgtggcttggatatttccctccccccattcattgacaggacactactccgtgcccgggatccacctcttcctgtttttgatcacattgaatacaagcccccaccagccactaagaagactactcccctgcaaccctcaaaaccattaggctctgacagtactgctgttgccgtctctactttcaaattgacccgtgaccaactgagcaccctcaagggtaagtcctnagaagatggcaacacaatcagctacagctcttatgagatgttggctggccatgtatggagaagtgtctg

SEQ ID NO: 67121 - DNA, 280 bp, Glycine max
  unsure (1)..(280): unsure at all n locations
  Clone ID: PAT_MRT3847_31625C.1
ggtcgtaaagagatgattgatgggtatagtngtgggaagatggtagaggggagtggaagtgagaagattatagaagggaatggatgtgagaagatgatagaagggtatggtngtgagaagatgatagaagggcatggtngtgagaagatgatagaagggtatagtngtgagaagatgatagaagggnatggttgtgagaagatgatagaagggtataggngagagaaagtagtagaagagtatggtcgttgagaagatgatagatgggtatagtcgtgag

SEQ ID NO: 67122 - DNA, 554 bp, Glycine max
  Clone ID: PAT_MRT3847_31626C.1
gaacaatcctaaagcactggacaccgcatccaatgtcattgttggtgaatatttgctcaagctcaatgagaactgttgaggaggctctcaaatgagaagtttttgctcaaggtgtctcactttttgtgttaaaaattcactaaaacaaaaaggaagaaaactacacactactcatttgtgggtattcatggacctggaagggaatgatggggtaattccctcttattcactgtttaggaaggccagatatggtgaagatactattattgcgaattttgacactggtaattttggtcccttgtttctgctattatacatttttacctttcctgagtctcatctaccttaagctagctatttaggtcactcatgtattataattatatcactatcattactattattagaagattatgtccaggagaagaggaggctagctaggccagcagtgtcaaagatggtagggactaaagtatatttttattgtcattttacactacaatagactaaactaaatcatattttgcaaagtagggaataaatactattttttt

SEQ ID NO: 67123 - DNA, 693 bp, Glycine max
  Clone ID: PAT_MRT3847_31627C.1
agaataacaattttacggcagagcaaatatacatattagcataccagaacagttttaagtttctgttcacacattaatagcctgttgatatctgcatctactactaaatatgacatgaaaattagtgtatgtcttaccaagtagtgtatgtgcctactaagttcaacatctcaactaggcaaatatcgggtcttctgcacaaatccttgctgtttcccttttattgtgaaccagtagttcagttaacttttcctcctttgagtcattgttttcactaatcttgaataccttttcaacaggatcccccattcattgccaaatctagttaactcttttctcatttgagccaattccttcactaacatctacctggctcatattgcccaattgagttaatactttctcatttgaactattttcgtcagaaaccttgaatagttgatcaaccgtgggtacataagcccaactgcatactagataatacagtatattaacagcactcagtgaagcaagaacccagtagtacctgtcataacgacccttgttaatattatctaaaacccatccctgctttcctccccttgaagtaacattttccacgatgctgaatatcaaactagataacacatttcctgcagccattccaagtccaaaaaggcaagcagcaatacttgacatagttcttggaaactc

SEQ ID NO: 67124 - DNA, 721 bp, Glycine max
  unsure (1)..(721): unsure at all n locations
  Clone ID: PAT_MRT3847_31628C.1
tttcgggccggaattaccgcgtcgaccccgcgtccggaagtgtaaagggaaaatacgtccttaaaaaggacacctgcatgtaacttagcgaagttaacacattgatttccttcccctctgagtatgagtcagaaacaagttccaattgagctgcagtttgtcctttgttgcttgaatgatacatagaagcatatttatgcattaaagggagcacttctctcattaatttgcatttttttttatataaatcgattgatttacatttatagaatcttttataccggtagtaaaattcatgaaaattaaaatctgaaacttaagctcctttctttgatatgatcactcatataaacctaaattaataagctgattttttggctaagataggtgtccagtcagctcaccagtttagtcttttcagttctactcctagatatttatacaaatgtttgggatgaaggagtggggcaagacaatggttgatcatgatgtgcgttttgacttcatcgcatgcaaaattggagtttactttctctgtttaggctaaggtggtgatggttttgtttacttaaaaaaattaatatttattgataaaaaaaataatgaaggttttgcggacttgcagaggattcaattattgctttgcaatcaataagttcgaagactattgaaagataatttgattattttggtacattaacatgagtgaaatgannaaaaa

SEQ ID NO: 67125 - DNA, 651 bp, Glycine max
  unsure (1)..(651): unsure at all n locations
  Clone ID: PAT_MRT3847_31629C.1
gaaaggacaatcctccatagaatatttgcacaatcctctgtgggctgaaaccttaacgtggacaactccggagaaactcttgaaacctctcccacgcttcagccaaactctcctgctcctgcactaaattcccaatatccctctgtatttgatcagttttaactacagagaaatatttctcaaggaatttattaacgcagtcctcccaagtcgtgatcttgtgttcaggtaaagcacaaagtcaatcccaggctttcccattcagtgagaatggaaaagcatccaatctcacatactctgtgggcacgctttgcacattgatggtgccagtcaacctcaggtacgtggggtcttcagagtctgcctcatggaactgattgctttctataatctgcaagaagccatgtctcagctcaaaattgacttctgcccccagagttggcaacaatatgttattagctatctccacttgaggagtgagatagtctaacaaggtctgctctacctgctcattaacaacagtctcacccnccattgcctctgtttccagccatgtttcttctcctctgcttagctctattcctgcgagcaactntctcgatcttaggtcgtgtagaagcacttgtcactgagatcgagtgagcatgaaac

SEQ ID NO: 67126 - DNA, 274 bp, Glycine max
  unsure (1)..(274): unsure at all n locations
  Clone ID: PAT_MRT3847_3162C.1
gctttgatgtttccctcgggggaggcacgacaatgtaattataagcatccaaagggggaaaatcatcaaccattggggacgggcattggcgagtgaaaatcttgcaagcctccttggacattcccttnttgaacttttctggccccacttccttttaaatcctagccatcttttttttaacaaccctaccaaaaagttttttgttcactttcactccaagaccatccccattgagctccactccatacttgagccactgccaattctgcaccct

SEQ ID NO: 67127 - DNA, 518 bp, Glycine max
  Clone ID: PAT_MRT3847_31630C.1
atatttatacatatagtcatgcccgttaatttatatataataatgaggtacactttaagcatgggatttggcaatttgagaataattgaagccttaattaattaataacctagctgcgaaatattacactgcgtgccatgcatactgaaaagcttaaattgttggctttcttctgaatttgcactcactagtagaagatgtggtagctgcagctggttcagcattcggtgcaggcaaggttgccttggtgagctccctaagttgtgaatgcatgttgtttatgaaagccattgacttctgttgtggttccaccattgcttctttaagcttgccaagtgccaaacaatatgcttccatgaagagatcaagctcagattggctgaacatgcccaagttttgcttctccgttgcttgcatctgatctatcttcagctccctctccaagttggaaatgtcaccaaccttcaaccagtccaagtgagcttcaaccagcagtccatagagagggtggttggagc

SEQ ID NO: 67128 - DNA, 321 bp, Glycine max
  unsure (1)..(321): unsure at all n locations
  Clone ID: PAT_MRT3847_31631C.1
tttggggaagggttttttttttttttttaggacaaaaaacaaaattcttaattaataattaatatcgtctcttcaaaaagcaagctgattatatgttacgaatgattaaaagtctgtatcactagcattccaatttcaagcttaaactcttctcttgacacggtttgagncnacaagcnaaaacagaacaagaaaaaccacccaaacgagggcgggagcgggaccagcaaaccaaggccacagaccagcacacgcggggccaaggggaccagagaaagcagaacccggcacgccacccgggggacagacaacaacaccagc

SEQ ID NO: 67129 - DNA, 646 bp, Glycine max
  Clone ID: PAT_MRT3847_31632C.1
ttaagtgaataagcgtgacatatatcaagaatcaggtagaaactacccacatccaaggacaatcccattttgaaagtttccattaaaagttgtacaaccaagttacatctaccctttaatcacaacatttgagacaaatcttatttgtttctccaagatacaagatttatccataaaataggaagtggtggtcattaggtagttgtttccaattatagaactcagaaattagtaaagctatggctatcaagtaaatcttctcccactgggtgaggttgacttagatcaattgatatcataagcctaacggctaatgattattttatttaaaattttaaagctattttattttctcttcattctcaaaattgaaaatataaaaaaaggtagattaacataatgtaaatgccatgatgcccaatacactgaaggctaccaaaagaatttggctcaccttgtcaccctctgcccatgatgaacactgaaggctaccaaaagaattgagttttgaatccggaggtgggttatttgcaagtcccctgtaaggctctatcccaaacctagactgggctaaccatcccctccccctaaatttagaaatacccaaaactcacattaacggaagtgtgattaagagtgtgtacgt

SEQ ID NO: 67130 - DNA, 121 bp, Glycine max
  Clone ID: PAT_MRT3847_31633C.1
aattagacactacctagctctaacattctagaccttcggattactatttaccatatggcaaaatctagaatgagaccaacaagggcaacatcatcttggatcaagtcaacagctgtaatat

SEQ ID NO: 67131 - DNA, 230 bp, Glycine max
  unsure (1)..(230): unsure at all n locations
  Clone ID: PAT_MRT3847_31634C.1
acttatctcaggagcaaccaaatcagnttatgccccttgaaccttttgatgttggacgcatatctgcaaggttgatatttattgacagaaagcgagcgcgtatacactttcnacgcgaggtacaatagatccagngaagagattgaaacgtgntctgcaatcatacagagcttaaatttctcccancctattatgcagctgctggaggctgaactnatggagaggcacta

SEQ ID NO: 67132 - DNA, 430 bp, Glycine max
  Clone ID: PAT_MRT3847_31635C.1
ggggttggtttttttttttttttttttttttcaaaggaaggaagcaaggaaggatccattttcttttttaacttcaattcatataacaaaacatgttaaaccctgcccagttccatgccactccttaaagaacagcctaaaacccggtattaacccgggggattatctggaccccacaataggggcaaaagaaacggcaaactatccaatgtttaatcaagtttccattgaaaaccaccttgaaaacgcttcgccctaagcttccaaatttacgttcaattgaatgacccccggaaaggcaaagggaaccgtataggcccccatcctttcccctttgcctacgaacaggggaccggagaggggacctgcttcccgggcataaaggggtgccagaaagggcgacggcaccatggaagccgcctttggaacc

SEQ ID NO: 67133 - DNA, 781 bp, Glycine max
  unsure (1)..(781): unsure at all n locations
  Clone ID: PAT_MRT3847_31636C.1
ggcacagattagggtaatccaacttccaaaccctaaaagtctacgcttttaattttctgttgttttctctctcaaatcggtgctcccttcggcggcgcgtgagggtttccagcggcgcgtgagggtgttattcgcgcgttattccaagttccccgctgacctatgctttgtccgacccacattggagagttcacgccggagagaaggcggaatctcactggacggccgtgatttggcacctccatggcttccgccgtccttgctaatcggaacgaacctaattggcaacggcatagaggcggtggagctggattcatgggaaaaacacctttctctaaccctaattctaaattagcgaatagcaagaggacccaatcggcatccgatgatgcttcctctatcaaccggcgatcgaacgacgccctaactcactctcagtacgttaccttcaacatcgcttcgtgcacgaagaaggagctcaacgacttcaagaatctcctcgtctcagagctcgaacaaattcggaagctaaggaatcaaatcgagtccagcgagtttcaacccgggcagagcctcaacggccatccgaagaagccgtcgagcaagaaagtttctggcaacaagcggccctggccgtcaaattccgcgaaggatttgaaacggtcgcattcggaggctgngaacttgatgaagtgttgctcccaggttttgcagaagctgatgaaacacaaacatgggtggggtcttcaacgcccccgtcgatatagtncggattgaaact

SEQ ID NO: 67134 - DNA, 255 bp, Glycine max
  unsure (1)..(255): unsure at all n locations
  Clone ID: PAT_MRT3847_31637C.1
accaaagacgaaacgtcgtcgttttgtcaagtcttcgccgaagaagacgcaacgaagaaacancaagaagatgaagaanaagaaaaacgcaacacagcgcagaagtacaaagaaggctactacctgcaactcgcgtttacgaagaggctatcttgcttggcaagtctcgggtccgaaccggttctcgctctcgacgctggcaccgaaacctgggacgctgaatccgtttcgtatcgtctatgggtgagtgggtgc

SEQ ID NO: 67135 - DNA, 343 bp, Glycine max
  Clone ID: PAT_MRT3847_31638C.1
gggattgccggaaaacatgaagcttaagcagttgggaggtctcctcggtggtcttcaacagttccctcaacccaaggcagagaattcttttgaggatgtgagcgacaaagtaccggctgactttggatgcggttgtggtacgttaggtgttgcagctgcactgttgagtgcagaacatgttcttggcattgacattgatccagaatctcttgagatatcttccaataatgctgaggaacttgaggttgacatcgattttattcagtctaatgtcatggactttggatggataggtcgaagtgttgatacagttaagaatgaagcctccactttggtactcggg

SEQ ID NO: 67136 - DNA, 1079 bp, Glycine max
  Clone ID: PAT_MRT3847_31639C.1
tccggctgggaggcggcaggtttggtgtgccggaaaacatgaagcttaagcagttggaaggtctcctcggtggtcttcaacagttccctcaacccaaggtcgagcttgaacagtacccaacaggaccccatatagcttctcgaatgcttttcactgcagagaattcttttgaggatgtgagcgacaaagtagtggctgactttggatgcggttgtggtacgttaggtgttgcagctgcactgttgagtgcagaacatgttcttggcattgacattgatccagaatctcttgaaatagcttccaataatgctgaggaacttgaggttgacatcgattttattcagtctaatgtcatggacttgggatggagaggtcgaattgttgatacagttataatgaatcctccatttggtactcggaaaaaaggtgcagatttggattttctctccgttgctttgaaggttgcttctcaagctgtttattccttgcataagacttcaacaagagatcatgtgaaacgaacagcattaagggatttcaatgctagcagtgctgaagttatatgtgagcttcgatatgatgtaccgaaaatgtacaaatttcataagaagaaggaagtagatattgctgtggacctctggcgttttgtaccagcagcaagtcatcaaagcagaaatacttgatgcagacaaggatagtgtattttggaatagatgataagattgcaagtaaaaagaaaattttgggtacctaaaaggattagaaaccttctccgtaactagctcttgtagtaaattgggtgatgccacttctgtagttgtgtgtatctataaatttgagcaagttatactctttctgcttatacatacagagtgtcttcttcgagctggttataactggttgcttgattatgaaacttggtgatgttttaataatccattgcacaaagttgcataagatcttgctatcataaccacaagacaaggttataaaaaaatttacctagctccagatgtaaagcatgggaaattcttgaaccagtgaacccttcagacaaaatataatactccctcctttcc

SEQ ID NO: 67137 - DNA, 504 bp, Glycine max
  Clone ID: PAT_MRT3847_3163C.1
gatttcaacatgcatatatgcactacacaaagtgcacataatcacctatggatagtattctaaattctaataagctgactcctgtatgcacaaaaacacaggataatacacaagcaaataaaagcacttattttacagatagagtttatacgaaatcgttgcattgaattttatatcgttagcatgccattaggttgattgacactgttggaattgtacttggtttctatatatttcttcattgactaaattttataatgggcaatggctatcccaaggcttaccttggttacaagggtggatttttaagatttttaaagggaatgaataagaatataattatggtttcattttgtatgttgaaaactaatcaagaaactaaattgaactttctaaacgagtcaaaatatgttgaagaattattcatgaaattgagtgagatgaatccaatatttctaaagcatctcttattgttcaattgtgaaacggtaaaatttgatgcag

SEQ ID NO: 67138 - DNA, 232 bp, Glycine max
  Clone ID: PAT_MRT3847_31640C.1
tccggttgatgctttcttgaaaccctatttcttggaggcttatcgtcctttcaaaaaaagaaatctattttttgtcccgggaggggttaaaaatgtaaaattcaaaggcatttaaacccatcctggggaggattgggttggtgctccaaacacttaaattttctgtgaaggggagcctttggaaaaaaaagatgaaaaaagactggaccaaatttggtattattatttgggt

SEQ ID NO: 67139 - DNA, 313 bp, Glycine max
  Clone ID: PAT_MRT3847_31641C.1
aactgttaccactgtcaaccttgcccgagccagcatggatgctccattcactagactcaaggccatggctggcttacccaccaataggaccaacggtgaccttacctgcattgctgccggctgtggatcagtgcgatgcattccattctggccaccagatggcacgaacagacaatagactcttatctacctgccagaccttgctgatgcacacttggccaaagaggaacaatacgttgttaggaacggatggatagcatgcacgcaagacaggttggatctcggctctgaagacactgaacacgacaggtca

SEQ ID NO: 67140 - DNA, 1738 bp, Glycine max
  Clone ID: PAT_MRT3847_31642C.1
gtcccgctgggatcgcaggccgtcgacaggcggatctttcgcacagctgctgatgcagaatcgcgtttggatggaagcggtggcggaggggctatggggactcgccgagtaccacgagaagagaggggaaatagggaaagcagtgaagtgcctcgaagccatatgccaaagcgacgcgtcgtttttcccaatcgtcgaggtcaagactcgtcttcgcatcgccacgcttctcctccaccattctcacaacgtcaaccacgccaagtcacacctcgaacgttctcaattgcttctgaagtctattccgtcttgcttcgaattgaagtgccggcccgacggcttgctcagccagtgttaccatctcgtcggagctattccgccgcagaaacaggtcttgcacaagggactcgagctcgctgcgtccgttggatacgagatttccatgcaatagtgaatttctaccatcaatagatagaactttcaaaaagcttgttatatgtcacatctattgcaattgtcaactctctactatgcttaataaaataaaggacaatttgtgctttgcttcagctctgtctgtaatttcttgttttataataatggagcagatgttctttgccacttcaatattgcatgtccgcctcatgcaatgggatgatgataatttggttgagcaagctgttaatcgatgcaaccagatttgggaatcaattgctccagataaaagacgacaatgccctggcttactattttataatgaattactgcacatattctatcgactgcggctatgtgattacaagaatgctgcacctcatgtagacaatctggatgctgccatgaagattgatatgcagcaaacacaacgtatacaagagctagtgaaggagctcaatactttagaccaaagtctctcccgatctgaccttcactacagggataggacagcattatctaaaaagcaaacaatgattcaggagcaactgcaaaacatgactggattgagttcaattgggcaggaatcactgcaaccagtatattttgggaatgtcagaaggataataggagataagcttcagttagcacctcctcctattgatggcgaatggcttcctaaaagtgctgtctatgcattagttgatctaatagtagttgtgtttgggcgcccaaaaggactttttaaggagtgtgcaaaacgcatacagtctgggatgaatataattcaagatgagttactgaagcttggaattactgatggtgttagagaagtggatttacaacactcttctatttggatggctggtgtgtacttattacttgtcatcaccacttattttaactacggaataataattacttattatggtatgtgaaatcagtttgtatgaattggctgtccaaatagccctgtgataattttttatgttgtctgaattataccttttaacctgcactttgactgtctatcagtcatcagctattctatatgtccaatcacagccataaaatgtcttttctgttggtttctaggctttaatgtgaaatgtatcaggaagaatgaactgattagaagcattactcctttgaattgtttgttctgaaagcatgattggtgagttgagttgtttcttttattcaaatggatttccatgttagtcattgctgttatgcactgctttggagactgaaaaattgtagccactttggacttatcttccctatgaaaataatatttctt

SEQ ID NO: 67141 - DNA, 1458 bp, Glycine max
  unsure (1)..(1458): unsure at all n locations
  Clone ID: PAT_MRT3847_31643C.1
aagggncggcccacgcgtccccacgcgtccctgaatggatcaccgcgttgtgttgtgattgaaaatggagagcgatgttgaagaatctatgcggaagaggcccagaaaatatcctttctccgccgattcatcctctcgcaagcaatttgaacaatattctggacggacatttgcaattatgggggaagtgaattttatgcaagatgatgataatcgtttggagattacccgaactaaatttggaagtttgcttaaaagacatggagatttgacagagcgtcttgctagggattctgacaagataatatttgagcgtctacagaaggagtttgaagctgcacgagcttctcaaactgaagagatatgtttagacggggaagagtggaatgatggactactagctacaataagagagcgggtgcatatggaggcagacagaaaagcaatgcatggggatgctgacatattagcatgtcctcaggataaaattacatataaaattggaaacaaggtaatttgctgtttggaaggggcaagaattggtgtacaatatgagacatcttttgctggtgaaccttgtgagttttaccattgtgtgctggaaagtaagtcatttcttgaaaagatgactgtccttgaacatacagttccatttttcctgccaatacgagaaatagaaaatgatctcctttcatccaatgcaatgaaactcatagatcatgttggagatctattgcaggcttttgtggatagacgggaacaggtcagacttataaaggagctgtatggaaatcaaattagagagctgtatcatagccttccctaccatatgatcgaatttgtattggatgattctgattgcaaggtgacagtcagccttagatatgcagatctcatttcggtgcttccaactcgaatttcagtgctagcctggcctatgttcaataaaaatactatggctactttgagcaggaaggaagatggactctcaggaagtcattcttctccaattcgcttaacctatgcagaagatgccttacgaaccatgagtttacctgaagcatatgcagagattgtattaaacttaccacaggcgcttcagcagacgtatcatcaaaaagcccctgcttagagcttcgccctttgagtagcctagatgcatcagtaaaaattcttggtagagatgttaaatattagataaacaacttcagaattattacctattcacctagccaaattgctcataggttgagttcattttgctgtaatattgtcatatagcatttagcatttgtatttcggcctctctggcctcgttattccttcaatacctgctacggtgtcttgtatcattaatacaacagggctaggtttacatctattcaaactgttgtcattcatcttttctccataattcaacatgtatgtaatttgatttcatataaaaaaaaactnnnt

SEQ ID NO: 67142 - DNA, 473 bp, Glycine max
  Clone ID: PAT_MRT3847_31644C.1
cccactcaaaccctgggatataaaaacaaggaaattttacaacaaaccggccaaaaaagcgcaatcagaaaagggcaaactcaacattggcaaatagtaccccacataaaaaagggacaaatatgtttttggggggttaataaaaactaaaagcagagcataggctcccccaatttcaagccgaaaaaaaagcacaagaaaccccatctggcacaagtggataaaccgcattccggaacttaaaaaagcccccacccttggggaaaaccggacgaaaaattcgggcatacccagaaacagagcctttttccccaccaaaaaaaaaaatgggaccttaaaaataaaattcatccctaaaacgggcccaaagctttggagcatcaaagccatccccaaaccccaaaaaaggggggaaacccacctctccctggctagcactataaggcaaaggacctccagggggggtcccccag

SEQ ID NO: 67143 - DNA, 621 bp, Glycine max
  Clone ID: PAT_MRT3847_31645C.1
caagaatcggcgtacaatgagacatcgtttgctggtgaaccttgtgagttttaccattgtgtgctggaaagcaagtcatttcttgaaaagatgactgtccttgaacacacagttccatttttcctgccaatacgagaaatagaaaatgatctccattcatccaatgcaatgaaactcatagatcatgttggagatctattgcaggcttttgtggatagacgggaacaggtagattgcccatgtcagacttataaaggagctgtatggaaatcagattagagagctgtatcatagccttccctaccatatggtcgaatttgtattagatgattctgattgtaaaaggtgactagggtgaagttgggtgtgctgcagctttcagtgctacaagaaagcacatgttaatgcaaggtgacagtcagccttagatatgcagatctcatttcggtgcttccaactcgaatttcagtgctagcctggcctatgttcaataaaaatactatgagtaggaaggaagatggactctcgggaagtcattcttccccaattcgcctaacatatgcagaagatgccttacgaaccatgagtttacccgaagcatatgcagagattgtattaaac

SEQ ID NO: 67144 - DNA, 556 bp, Glycine max
  Clone ID: PAT_MRT3847_31646C.1
cggacgcttgggcgcgttctctctatgagaattgagatactagaggaagaattcgaagaagaaggcatcaccgcgttgtgttgtgattgaaaatggagagcgatgtcgaagaatctctgcggaagaggcccagaaaataccctttctccgccgattcatcttctcgcaagcaatttgaacaatattctggacggacatttgcatttacgggggaagtgaattttatgcaagatgatgataatcgtctggagattacccgaactaaatttggaagtttgcttaaaagacacggagatttgacagagcgtcttgctagggattctgacaagataatatttgagcgtctacagaaggagtttgaagctgcacgagcttctcaaactgaagagatatgtttagacggggaagagtggaatgatggactactagctacaataagagagcgggtgcatatggaggcagacagaaaagcaatgcatggggatgctgacatattagcatgtcctcaggataaaattacatataaaattggaaacaaggtaatttgctgttggaa

SEQ ID NO: 67145 - DNA, 386 bp, Glycine max
  unsure (1)..(386): unsure at all n locations
  Clone ID: PAT_MRT3847_31647C.1
cnnnnnananaggttgttttttttaaagngccgtgggaatctctacgaaacccccttaaaaatgtaatgtgctttacaaaattacactgaatacatgcaattacctaatcttaactaaaatcaactgctaaacaaagaaaccttcttaaaattacgccaaaagatgtagcctagaatagataacacacttgcaatataacattagcctctttgctgctacaaaaaccactgctagtcaccaacaattggcccaagaacctaggtcactaggtcacggcagccatcactcaactaaaagccctgacatgatggtgatacagaaacagcagcaacaacatagacatatagaaaaattaatcttaatttggaaactaataacaggtaag

SEQ ID NO: 67146 - DNA, 362 bp, Glycine max
  Clone ID: PAT_MRT3847_31648C.1
aaagccgaactctaccccttatatgatccaacaagtcacatttaagtttaaaaaaaattatgacacaaacccctctattaatgggaattatgggagttaaatactttctttggcacatattatttaaaaagaactaaagccgcatcatagtttccccccaatggtttctgcaagcaaaaaaggggggggtggggatctataatttatagagagtgagggtgggcttcaaactccaagcttcgccaggaaatcatcattgtattttcttcccgaagtgaatttaatccttgaaaggtcttcagctttttaaaatttaatagttggcgtgccaattgttacattgacggttctcatttccaaaa

SEQ ID NO: 67147 - DNA, 249 bp, Glycine max
  Clone ID: PAT_MRT3847_31649C.1
cggaacccctgagataaacatgcaaagtgaaaagttcagaatccagttttactttagcgggttctggttaaagggttagaagaccgatttgcatgttggttggctccttgaaaaaagtcctacaaataggggtacttttttacaaacctgaaatacagagcttacacttttcccccctcgtttggacaaaggggcttttttttttctattatttggccggcgcttcccccctattttaacatgttttca

SEQ ID NO: 67148 - DNA, 345 bp, Glycine max
  unsure (1)..(345): unsure at all n locations
  Clone ID: PAT_MRT3847_3164C.1
tttttacctcgtgntaggatattattgaacaataaatacattgctgattgggccgttcagatctcacgacgaggagtgcaaggcagtttagatgacttgataggatctagttgcacgtcctaatgtctgtttttcagaaagagatacctttctggttccatacaacgtcccccttctatagngaaactatagcttctcgtatccgagaatctctatgtttcgcccccaacataataacggtggaactaattatgcgtgttgaaaagggcacacttgagagaagttcctgcgcattatttggtcaagaggatgagtatgttacctatggccgcccacttgcttaat

SEQ ID NO: 67149 - DNA, 961 bp, Glycine max
  Clone ID: PAT_MRT3847_31650C.1
gacatcgttctcaccgctgtgccatggtcttgggcttctccctccctttcgcgtcttgtttgatcgctgctatcccttcagtgggagaccgcagtcgctcctgtcatccccgtgcatctcttattgcttgccgctttcgttgctcgttctgtacccgcgcaccgggggacatctagcaagccttattggcgcgtgtgtgtgcaacgccaactgacgagttactttaaataattctagaagaagagcaaatgacataagcatttacctgtttctgtagtaagtagtattaactcagctaaccaaaaataataataaacctaggaacaatttccccccttatctcattctctgctgtcattcccttgcattatttatttgaagcagttgtctttgctctttctttacacaagtattgtacatctctggaagctttatttttgtgtgtatatatattcctgagaaaaaaaatggtataatacaacagatagataatatatgcttcaattggggcatgctgcaaccacctggattagaagatatgcatggtgatgtgtagaagatacatgaagagatgaatcacattctgaatctttcttgaagaattaccaataattatgaattattggagcagccaacctatgcatattcaagtatagcacctgtatgattgaacccacatgaaacttgcaatgctttcacgtcttctccaaagcaaactcctggtaggatttatgttgtccacatcacttccatgacccagttgggcccgcagtattcgtcccacctccagaaagcggcctttcggaccccttcaagaatggcccttgatcttttcaggcagatgaatgacatccgaggaaccaataccaaggcagccattttcatttgaacccaagtataacgctcaccagcatgaaattactggtcaggacacaggtgtggtagccaccacagacaactt

SEQ ID NO: 67150 - DNA, 246 bp, Glycine max
  Clone ID: PAT_MRT3847_31651C.1
cccacgcgtgcgccgagtccaggttccgctgtagatcgtagcacaaatatgtacgtgctaatgtatcgctagaaagactaacgtatgtcctgcaaggatgcatggacagactgaagtataagggataacggatactatgtacggtacagactctcgagccgttgaagtcctagatcggctcatataccggtgcatcaaacgtaagtacattcggcgtgaacagctcattcgagagtgcaccattct

SEQ ID NO: 67151 - DNA, 194 bp, Glycine max
  Clone ID: PAT_MRT3847_31652C.1
cggacgcgagacttgacccgtgttttctgatcgtattctttctagcctacgattcttatcttcattatcgtagagacgcgactccctggtcaagtacagaacggacaaatctactgatgttcaaaggtgtggtgatggagagctcatggaatgtgataggatcattgatggtcatggattgatggactagctgg

SEQ ID NO: 67152 - DNA, 246 bp, Glycine max
  Clone ID: PAT_MRT3847_31653C.1
aacaacgtggcctatatcaaagcctgggtgtgattcggggtgtggagatgttcccattccttatccgtttggaatgaaccgttcggattgctatgcaggaaaatggtttgaaatagaatgcagaaacagtactagaccttacctcaagtctataggattaggagtggaggtgttatcctttgatgtgaatagaggcacagttgatctcaacaatccgatttaccgcagtaacaactgcggaacaaa

SEQ ID NO: 67153 - DNA, 168 bp, Glycine max
  Clone ID: PAT_MRT3847_31654C.1
atttggaaattctcacaggcatacactgcgaccccactctccctgtcgaccctatctcccactctcttgcccgcgacgctagctctcccattctcgctcgacgctggttccgcatgctccccttgctcgcggtggttcagatcaatctgtctcgcatgcactgtggtc

SEQ ID NO: 67154 - DNA, 284 bp, Glycine max
  Clone ID: PAT_MRT3847_31655C.1
cccacacttacaattaccttcacaccagtctcacttaacaactgacaaactcttacaaagaatcgctgccaacacattgatcattccttctacttcagcctaacaacctctcctttcttcatcaaataccacatttatcacccctattcccttttctaactttaatgtcatccataccatttacaatggactatctcttacagacactaccactacaatccatcctaaaccccctgatctttaattgctaacaccttactacttattaattccaaccttatcac

SEQ ID NO: 67155 - DNA, 148 bp, Glycine max
  unsure (1)..(148): unsure at all n locations
  Clone ID: PAT_MRT3847_31656C.1
ctcccgcgcgaagccaaacctnaacctcacatttaataaatccaacaactcgtcgtaatccatcctacaccgcttcagatcccaaaaaacggcgaaccaaaagnaccaataacataacctcccttacnactctgactaccacaaaaca

SEQ ID NO: 67156 - DNA, 261 bp, Glycine max
  Clone ID: PAT_MRT3847_31657C.1
cgaccgacgcgtacgataacctcaaacataacccactcattctcttttccctccccatctctccatcctatccttgtcttttcttacattcaagccaaacatcctccaaatcaccatatccacatattgaaaaccacaattcaccaaattcctgcacccaccacaataaccaccccatcccctcttgatccacacaacatttacattccctccattcttcacattcaaaaaccatcttctactcacaacccactacttact

SEQ ID NO: 67157 - DNA, 265 bp, Glycine max
  Clone ID: PAT_MRT3847_31658C.1
gtgatcgggttcctccttttgtattatattattctattcaatatatgctgagtatctaaaaaaattatttttttttttaagatgaatgatactagttcgtaatttaattgccggaaataaataataaaataatatttgctcgatcaaaatgttagtaagcaatgttttaaaatccaaattgaatattaacccataaaagcactacttgatggttcattagtttaactaatgttatatattatgattagatcggtaataataaaaa

SEQ ID NO: 67158 - DNA, 1823 bp, Glycine max
  Clone ID: PAT_MRT3847_31659C.1
ggctcgaggcagaatctacaaagggataattccttccaccggccagcttgtggccgtgaagcaactcgaccgaaatgggatccaaagcagtaaggaatttctggctgaggttgcggagctaagtctcttgcaccatgaaaatctggtcaatctcattggttattgtgctgatggagatcaacgtcttttggtctacgagttatttgcttcgcgtactctagaaaaccgtctttttgagaaaaaagcggatgagagcccattaaattggtttgaaagaatgaaaatagtagcggctgcttctaaaggactagagtacttgcatgagacttcgaagcccccggttatataccgggacttgaaagcgtcgagcatcttggtggacagtgatctgcttgcaaaactatgtgatgttggcatggccaagctttctggtggagacaagatgaacaatggacctccaagacttatgggtacctatggtcactgtgctcccgagtatgtaaaagctggtcaactcaccttgaaatcagatgtatacagtttcggagttgtcttgctagagctcataactggacgaagagccattgacacctcaaagccaaacgaagagcagaatcttgtttcatgggcaacacccttgttcagggaccccaagagatatcctgaaatggcagatccacttcttaataagaacttcccagaaaaagatctgaatcaagttgttgcaatagcatccatgtgcttacaggaggaagcagaagctcgtcctttgatcagtgacgttgtaactgctctaggtttcctttccgcgcctcctcctccacctgctcatgctcctgtccccaaaaagagtgatgttgctgaaagcgaaagggaaagcgatagcgagggcgaaagtgagagcggaagcgacgcaatatctagaaagggaagccgcagatcgtcgttggataaaagtcaacatgattattgtgatagcagccatcttccaccagtggtttcctctaaagcaagccgcaaaagcagcaccagatcaagtaaaggaaaacacagttcagaatcaggagatggggttagcgtttcttccatcagcagcaagagcagtaggaaatctcgcggtgatttaagccagaagagcagcagaaaatcttctgtggaagatttaagccagcagaagagcagcaaaaaatcctccgtggaagacctaagccagcataagagcagcagaaagtcttctagcaccaaagacttaagccagaagagcgcagaaaatcttccgtggaagacctaagccagcataagagcagcagaaagtcttctagcaccaaagacttaagccagaagagcagcagaaaatcttccatcagaaaaccttctagcagagttttgagccacaagagcaacgttgcatctgaggatggaagcatttcctcaagttgtcgtagcagcagtgtgggatcagaggatgaaggggttcggtcagagcgtagcagcatgaggctatcacaaggaagttatcgctcggacccctatggcagcagaaggacagaggatgagagcatgaatattttagaccgtgcaaccagcattgggtctgatgaggatagtggtcacccttttgaccaaacaagcagcagtggaggatcaagtgtttattcgcgataactaaacttatcaacctctgcttaattgtgccacttgtgatgatgatgatgaacatgcatgcatgctcattctttgacatgttgctttgtatttttgccacacaatatgtgggattcttttaaaaactattactttaatatcaagcgtccttaatattt

SEQ ID NO: 67159 - DNA, 347 bp, Glycine max
  Clone ID: PAT_MRT3847_3165C.1
tcccacgcataaaataaactatggcatttatttaataatttaattcacaaattcatgacactgattaattaattattattgtcatgggaattctttttgaacatgtgtgcatgcaatagagtctcgagcttttgatcttcttctgcttctgcttccatatttagatcacatcggcagcgattgttaatgcaaggacagtcagggcattcataatgaccataacaaggtataaccagatcaatttctgcgtctgaatcttctttagcttcacactgcaaaactgaagcaaaaaccaagaggacgacgaagaaacctagcttaaccaaagacttgtccggacgcgtggg

SEQ ID NO: 67160 - DNA, 467 bp, Glycine max
  Clone ID: PAT_MRT3847_31660C.1
acggctgcgagaagacgacagaagggaagtctatttcattaatctacataataaatatttatattaaagattaatataaattacgaaaaatcaaattttaattttaattagaaataatttcaaaagcacacaaaaaattacatctaagtattccatcagacatttgatttgtctcaactacttgcattagattgttgtcccgttgggcgcttttgatttcatcgaactccgctaaacctagtttggtgaattctccttaaacttgatgagttagggtatcttacacttacaccatgtggagtatatagtaaactttatctttatgcaacacaaacgtgtcatcaacacattatagttaatttatagatgaaaaattatacgtggaacctatggttagttttaaagtattaaaaaagctacattattgttagcctttactttagataaattttattatttataacaca

SEQ ID NO: 67161 - DNA, 404 bp, Glycine max
  Clone ID: PAT_MRT3847_31661C.1
ctgccgcgtcatatcctcggaaggcggctccccggctgggggtgggttttttatttgcctaactacacgcccgtgatgtacaaacccttggaccctaacaggctgaggcttacaggaactaaaaccaagccaaatggacgagatgtaccattcccttgcccccgtgcttcccaggggaaacatttgactttctggaggcgacacccacgatctttatatggagagtggatgagtttccaactgagacatagaacaccatctttgtctcctgctcttttgggccccaactctgacaaatataggcctcataacgacaggatgctttgaaaaaagaatgggcgtataggaggtgggaaccacaaaacttctccgggtaagatggatctgagttaaccccagaataa

SEQ ID NO: 67162 - DNA, 390 bp, Glycine max
  Clone ID: PAT_MRT3847_31662C.1
ctgagtcgtctaacaagcaatgtctctgacatcgtgtatgagaccaggaggatccatgagtggatcgatggactcaacaaagcactgagcttagagtcgggctttgagcgacatggtgagcattctgagcgaggttgaacaggccaaagagcatgtctacatgcataaatgcgagaggaagaggttgaagaagcagatgcagctgcatgagaaggtcaatgatatgaccgacaatgatacttacgctgatgctcataataaacctgatggtactcatgaggactgtgattatgactgacacaatctgtcacagtcactgtgaaggacactagcatggagattagcacacattgtccctgactgaactcctgactgaacatagatcgtggt

SEQ ID NO: 67163 - DNA, 734 bp, Glycine max
  Clone ID: PAT_MRT3847_31663C.1
cccacgcgtccgtccacgcgtccgcccacgcgtccgctctctttctctctttctagttcgtgttcttcgtcgcaaatccgaagtttttcgcgatggcgtcgaagcgaattttgaaggagcttaaggatttgcagaaggatcctccaacatcttgcagtgccggtcctgttcatgaagatatgtttcattggcaagctacaattatgggtcctccagacagtccctatgctggaggtgtgttttcctagtgactattcatttccctccagattatccctttaagccacccaaggttgcattcaggacgaaggtatttcacccaaatataaatagcaatggaagcatttgccttgacatattgaaggagcagtggagccctgcgctaactatttcaaaggtgttgctctcaatttgttccctgttgacggaccctaatcctgacgatcctttggtccctgaaattgcccacgaacaagtacgagtcaaccccagaaatatccatgggttaagtgaccttgtggtatgtttgagggagagcctttctactctcagtgtttaggcctctcagcccttgtaggaatatttgtcgttttaaatcatgattaaggcccctccagttgaagatgaatgggggaaaacgtttctcctgctgtttgtattgcaaatgttcatggtaatttagaacagtgaaatgttgccccaattaaatgttatgctcaagtttttaaccgttc

SEQ ID NO: 67164 - DNA, 1102 bp, Glycine max
  Clone ID: PAT_MRT3847_31664C.1
caactagaaactaagcattacggctgcgagaagatcaacagaatggcgatattggaattaggaaaggtaaaaaggaaaggggaaggaagcaaggcaaggaaggagagtggatcgattcttctgccgttctagacatttattctagctcgcaaaccctaactaaaatcgcccaaactttttttctctatttttttttcgattttttcgaaaccttacttccctcgctaacataattcataatgcaaaaagagccggtaagatgaaggagggctggttctctttgggacaacgaatcttaatggtagaaggcaattataggatctcagacggatgctatttccttcgagcctctttctaccggcgacgattcctttccttcaagaatacctgtttatcactcgcaaggaacgattattgagcgaactccagatcactccttaaatgattgaggactgtatttcctagtcagtgatttagttcccttcgagtatcacttccctacaaattccccccaagttgttcacttcttaaaccaaaggtaatttcaaccatcaaatgataaatagctaatgccacagcatttgccttgacataaatgaagacagacagtagagcccatgcgcttacaatttcaaaggctgttgctctcgatttgttccctgttgacggaccctaatcctgatgatcctttggtccccgaaatagcccacatgtacaagacagacagaaacaagtacgagtcaactgccagaagctggacccagaaatatgccatgggttaagtgacctgtggtatgtgtgaggaagagcctttctactcccagtgtttaggcctctcagcccttgtatgaatatttgtcgtttttaataaggcccctccagttgaagattaatgggggaaaacgtttctcctgttgtttgtattgcaaatgttaatttagaacagtgaaatgttgcccccaatcaaatatgctcaagtttttaaccgttctattagtgccattatttcatgtttaatttttttccccgtttatgaacttgagccttaatgaattattgtttttcattaaaaaaaaaaaaaaaaaaaaaaaaaaaaaaaagg

SEQ ID NO: 67165 - DNA, 870 bp, Glycine max
  Clone ID: PAT_MRT3847_31665C.1
gaggaattggaattagaattgtaaaaaggaaaggggaaggaagcaaggcaaggaaggagagtggatcgattcctcagcagcaccagacatttataaaagctctttcccttccctcaaatcgctcatactcttccaatcttttttttttttttttttttttacctttctccctcgctcaataatacaaaacaaaaaagaagaagaagaaggttttcgcgatggcatcgaaacggatcttgaaggaactcaaggatctccagaaggatcctcctacctcttgcagcgccggtcctgttgctgaagacatgtttcactggcaagcaacaattatgggtcctccagacagtccttatgctggaggtgttttcctagtcactattcatttccctccagattatcccttcaagccacccaaggttgcattcagaacaaaggtatttcacccaaatataaatagcaatggaagcatttgccttgacatattgaaggagcagtggagccctgcgctaactatttcaaaggtgttgctctcgatttgttccctgttgacggaccctaatcctgatgatcctttggtccccgaaatagcccacatgtacaagacagacagaaacaagtacgagtcaactgccagaagctggacccagaaatatgccatgggttaagtgacctgtggtatgtgtgaggaagagcctttctactcccagtgtttaggcctctcagcccttgtatgaatatttgtcgtttttaataaggcccctccagttgaagattaatggagcaaaacgtttctcctgttgtttgtactgcaaatgttaatttagaacagtgaaatgttgcccccaatcaaatatgctcaaatttttaacc

SEQ ID NO: 67166 - DNA, 1333 bp, Glycine max
  unsure (1)..(1333): unsure at all n locations
  Clone ID: PAT_MRT3847_31666C.1
ggctcgagctctctctttctctctttctagttcgtgttcttcgtcgcaaatccgaagtaggatctctcttgttttttctctaggtttttcgcgatggcgtcgaagcgaattttgaaggagcttaaggatttgcagaaggatcctccaacatcttgcagtgccggtatatttttatttttttgttttggtcattccatttttacctttctctcgctcgccgcaaataataacaaatatatagaagaataacgcaaacccaataacagaggagggaatcgattccgaagccccacataccatttgttattcatataaaaactcgttttccttctccatttctcgtcgcaccttttcctcttctctctctttctctctttctagttcgtgttcttcgtcgcaaattcaaaggaggatctctcttgcgttttctctaggttttcgctatggcgtcgaagcgaattttgaaggagcttaaggatttgcagaaggatcctccaacatcttgcagtgccggtcctgttgttgctgaagatatgttccattggcaagctacaattatgggtcctccagacagtccctatgcaggaggtgttttcctagtgaccattcatttccctccagattatccctttaagccacccaaggttgcattcaggacaaaggtgttccacccaaatataaatagcaatggaagcatttgccttgatatattgaaggagcagtggagccctgctctaaccatttccaaggtgttgctctcaatttgttccctgttgacggacccaaatcctgatgatcctttggtccccgaaattgcacacatgtacaagacagacaggaacaagtacgagtcaactgcaagaagctggacccagaaatatgccatgggctaattgacatagagaagagagcgatttttactttcagtgtttaggccaaacagccttgtatgaatatttgtggtcttcgattaaggcccctccagttgaagatgaatggggaaatatttcttctgttgtctgtattgcagaatgcaaacgctacttttaaaacagtgaaatgtaagcccaattaaaaagtttaaaattttaaccttgtattgacagtattgtcgaatatttagagaatgattggtttgctctgttattctgttttagttacagggggggggggggggggggggggggggggggggggggggggggcggcctcaagcttacggtacggcgtgcgacgcgattctgattttctagcagnaatatttgtatattgtaaaataaaattcctgtttagaattttgtttcttaggttttttgttgagatttatttcaat

SEQ ID NO: 67167 - DNA, 172 bp, Glycine max
  unsure (1)..(172): unsure at all n locations
  Clone ID: PAT_MRT3847_31667C.1
gaatcacactctaccacagtgcgattcattccaccaatggatcgcaacggtnttctctcctncttggcattcatntgcattgtagtcgccggcgncggaggccagtctcccgccgcannccctcgaacactccggcaacccccgccgcannnactcccgcccaagcannttc

SEQ ID NO: 67168 - DNA, 374 bp, Glycine max
  Clone ID: PAT_MRT3847_31668C.1
aaaaaccaagttgagtggctgattggatggcttaaaatttcaacttaaatacaaatctacaacgcatcagggtcataaattttaatgattatactactcgccatttttatttataaaagcattgctaaatgttgcacaacaaacggaaacgaaaacatatatgttagtggaagtgttcaacacatccatgagttggtttcttttatgttctgtatggaacataacaaaatccaatatcatgaaatcatacacccagaggcgaatccatgcatacttaaagatgatgtttctacgtttggatcattaagaccagtcggggaatacccaatttggaaggaggggttcactcaccctggcttgaagaacccctctga

SEQ ID NO: 67169 - DNA, 133 bp, Glycine max
  Clone ID: PAT_MRT3847_31669C.1
gagtttcctttgttcttttgcaagaaacaaggatatgtcaaaaggaggacacgtaggtatccattgtatgcagaaactatgtgcagaatatatatctcctgattcactacacaacgcctcaaatcgtgcgata

SEQ ID NO: 67170 - DNA, 252 bp, Glycine max
  Clone ID: PAT_MRT3847_3166C.1
gggggggcattttatgacctttaattgacatatcaaaccaccaataagagcggtcaaaaataaattgggatagaaaaagaacacgggataaacaagaacacggagagaatctttatgcaaaacaaggtgcgaactcacgaaaaaatgggggggcgagacttaaagagggctgaaaattccccaaaaaggaaattgacccaacgctgctggaagcatatatacccattgggttttgaaaaaaaaactgatcct

SEQ ID NO: 67171 - DNA, 301 bp, Glycine max
  Clone ID: PAT_MRT3847_31670C.1
atctgctctatagcactcaaccacacgatctccttcccaatggtcaacattgcgcgatctaaatcagcgctaggtgcagtcgtcgtcataaatagccaagttcaagctaacgtaagctcctctttgtgcaagctctgtatgatccatttctggatccacgtgactctgacgtcacaacgctaccatgacacgctctcatgtcctcttcaatgtccgtcgatttcaattccacgaacctcgcatcaagtctagtgacacagtctaaccgtcgctcaaccaatccaccttgcgtcacaacaaa

SEQ ID NO: 67172 - DNA, 775 bp, Glycine max
  Clone ID: PAT_MRT3847_31671C.1
caagtttacttatctagaattaaataatgaaaatgattatgtgatttctcaaagcatgcgaagcagtgaacttatgatcattgaactttgttcttgttttaaactattttaaaaaaaaaaatcagtacaattaaaatcactagcataaaactttataaaaaagaaaacattcatgcaattatctcgttttcatctatactatttttttggtgcaactttatttaaaactattgttttttaattggaagtatctataaacttatacaacagtgttgcagtaatgagttgtttcttcctccctagtgttttaaataacttaatagatttaataaaaaaaaaaaacaatctaaagaaactttagtttctacataatataagtaatcaaaacacttaccaaggaaatcagctctggcaaatgcaacaagcgagccaagaagagccccgtatagggaaccacttaccactagtccaagctgaatggcagaaagattgaaccatgatataccgctaagctcaggtgactgcagtgagattgtaacgccagaggtggcaccaatatcataaccaaataacaagccacccaatgcaaggaatagaaacctaaattttgaaataacatactgattaattggaatagaaatcaagcagaagattattatacattctaaaattaacaatggttgatcattaaactaggattgatatgggatgcttttcttttccacacattcataataaagtaacaaaattttcactttcccctccaaaacattac

SEQ ID NO: 67173 - DNA, 145 bp, Glycine max
  unsure (1)..(145): unsure at all n locations
  Clone ID: PAT_MRT3847_31672C.1
gccttgncaaaatcctttagtccaacgttgncttcggngcctcattattacataggtngntctgtnannntngnngngttgttgttcttgtcatccacaanatctggggtacccattncnccanatcattctttgctgacaaatc

SEQ ID NO: 67174 - DNA, 408 bp, Glycine max
  Clone ID: PAT_MRT3847_31673C.1
tcgcccttttttttttttttttttttttttacttttttttttttttttttttttgggtcttgtggtggtctttttaattatttttatctcgtttttttttgttgataaccaaacagtgctaaaagaccagacccttgggttttgtgaaacgccgtacccgagggaatggcccccaaggagaaagcacgcggctgaacatcagcgaaaaagaaggggctctctgtggaagagaaaaagaccccagcccccaatgcgcggggggaaggccttccccccgagcgggggggggggggagtaccaatgacgcctgtgggtgggggaatatagcgctaccagggggggggtctgccggttagggccacacccagcgggctgtgggagtttcaaagcaggaagggcgcggtagaa

SEQ ID NO: 67175 - DNA, 287 bp, Glycine max
  unsure (1)..(287): unsure at all n locations
  Clone ID: PAT_MRT3847_31674C.1
aatctcatagcnacgcgtacgtaagctcgnaattcagcgtcnagacngngcgcgangagganaaanggcgggnnttncccaggggtggcnccntanngggatagnatntnncanannacngtgagcattngnnatgaatccnanngtnanagagtagcncataanacaacatncctcgggnnatnnnactgnagcacngttngncgncntacannanngcntanactncatgttncaaccgnctcanntatnattnaaccngannnngtcntgaacttngctgtcgc

SEQ ID NO: 67176 - DNA, 1184 bp, Glycine max
  Clone ID: PAT_MRT3847_31675C.1
gggagatcactcgattcactgcacgggccacacgtgagatctctctattcctggaacgtgcctttgttcgattggaagcatggttccattggttcaaaaatctccgatccgccaaaaatgacgggaagtggaagaagtaccgttcggagctgagcgagacttgaaatgaacgccgagacactgtcatctggactggatgattatccacgagcttcacacccaagtgaagatgaacaccacttggatcttagatgttggatgttacttgcagcagactgtatgcattccattcaagagttgttggatatggaaagcaagcctggcatggattatggttctactgctaaattgctattggattttgagttactgaaccagatgcattttgatgatggatatggagcttactttgattttggaaatcatacagagaaggttcaacttaaatggaaagaactgcaggatggacaaaattatgctactcgccaacttctccgggatgttatggatatgcctgtattgagattggttcctcacattggttatgttagtttattcccgttcatgggaaggatcattccatctggatcacggattctggaaaagcagcttgaactcatttcaaatcgcagcctcttatggaccaactatggattacgttctcttgccaaaacaagttccttgtacatgaaacacaacacagagcatgaccctccatactggagaggcccagtttggataaacatgaattacagaattctttcagcactccaccattactccaaagagaatgggccatatcaggagaaagctaaagccatctacgaagaattgagaagcaatttaattagaaatatagtgcgcaattatcaacagacgggatttttgtgggaacagtacgaacagacgaagggtaagggaaaaggggctcatccatttactggttggacatcgcttgtagtattaatcatggcagaagcatatggaaatatttaggataaacacagcttggtggaggctattgtaacaaacattccttgcttccttctcattttccgtccatgaataccaaggcagtaagtgtgcatgtaacgttgttgtttaaatatgcatagattttataaaatatctatttttgaagccaaaaaaaaaaaaaaaaaaaaaaaaaaaagaggggggaaggt

SEQ ID NO: 67177 - DNA, 155 bp, Glycine max
  Clone ID: PAT_MRT3847_31676C.1
tggactgcgagttacaactttataattgtaattatttattgggattggttggggttttgcctgtgttatgtgttcttggttgaatcctaatatgggtctgttattacataggatctaggtttcagtgctgtaatatgggtctttaattacatggg

SEQ ID NO: 67178 - DNA, 162 bp, Glycine max
  Clone ID: PAT_MRT3847_31677C.1
tattggacttttaagccataactcttcaattcggggagtggatatctaaattgtgaaacacgattacttgaactatgctaagaaccacattttatcacttcatggtttcaaacataaacttgactctataccctaattacccacttcattcctactacgaac

SEQ ID NO: 67179 - DNA, 518 bp, Glycine max
  Clone ID: PAT_MRT3847_31678C.1
tcggaatttactgcaatggatagaagtgagatctctctattcctggaacgtgcgtttgttcgattggaagcatggttccattggttcaatacaactcagtcagggaaacagatgggcagctactattggcacggacgggacgataggacaatgcgtgaagtaaatcctaagacactgtcctctggtttggatgattatccacgagcttcacacccaagtgaagatgaacgccacttggatcttagatgttggatgttacttgcagcagactgtatgcattccattcaagagttgttggatatggaaagcaaacctggaatggattatggttctactgtgaaattgctattggattttgagttactgaaccagatgcattttgatgatgcatatggtgcttactttgattttggaaatcatacagagaaggttcaacttaaatggaaagaactggaggatggacaaaattatgctactcgccaacttctccgggatgttatggatatgcctgtattgag

SEQ ID NO: 67180 - DNA, 163 bp, Glycine max
  Clone ID: PAT_MRT3847_31679C.1
tggtgttgctctcacgactaatggaagtgctcaagagaagcctgggagggctctgtctaggaggaaactgggaattcagggagggggagcagtaccagcccgctgaactctttgaagcaacaatggggcaagtgagagaaggcgcagggtctttcacatctct

SEQ ID NO: 67181 - DNA, 675 bp, Glycine max
  Clone ID: PAT_MRT3847_3167C.1
cggtccggattccccgtcgacccacgcgtccggttactcttgcacaatcctatggtatcatgtggcaagttctgcgattgagtattggcgtgtcgaggctaacgtggaggagtttgaaaaggtactcacaaatcgttttaatggctttgctacacctttctcagctgtattaggagaggcctaaatgattagactgagccggtagttctgtacatgtagggtagcagaacataagaaatgtcattagggaactcatcaccagatacaaaatcaatgaatttttctagaattgattatggaaaaggagttatacatttataacagtttagagagtgctagtacgctatttttagttgatacaagtgttgtcacaacgatcatgatagtgatcaggatgattttactgatagtgatgatgatgatgaagatgttccatcaattaacactgataatgtaaaacctgaaactgaatgctgatagactacgatggtactttagatataataaagctgctgccaatgctaacgtgtcagcagttcatgtcaaggatgcagaccaataatgatactatgaggtctctgctaatgattctgatcatgatgtatctggatcttcagttgaagagatggacgatgctgatatctactgcgatgatcagagcggtgatgaacatga

SEQ ID NO: 67182 - DNA, 249 bp, Glycine max
  Clone ID: PAT_MRT3847_31680C.1
tccaataccaacataaacctatcaacagttatctcttgtcttaaccatacaaaaaaattttctattatttcactccaaccattaattattaaccagtaattgctcttttcataccaaacacttctaatgttatcatatacttccctactcatactctaaatttttcttttaacaattatttcaacatgcttttcaacttccaaattgataaacatttctactttaaatagcttgctcccaatttaccat

SEQ ID NO: 67183 - DNA, 255 bp, Glycine max
  Clone ID: PAT_MRT3847_31681C.1
agggttctagcgcagcttcttctaaatttaatgaagatgggtaaggagaaggctcacataaagtttgtagttattgtccatgttgactctggaaagtgcactaccactggccacatgatctacaagcttggatgcatagacaagcgtggtattgagagatttaagaaggaagctgctgagatgaacaaagatgtttttaagtttgcctgagtacttgataagcttatggctaaacgtgagagacgaatcacattt

SEQ ID NO: 67184 - DNA, 626 bp, Glycine max
  Clone ID: PAT_MRT3847_31682C.1
cttaaaagtaggggcataaataaagtgatttgaacatcccaacgatgcctaatttgtagcacaacctcctttgacctcttatcttccttaccaccaaagcaaggccataaacatttgtgtttgccttcatcctatatgccgcactggtccctagttacatagtgtcacaattttaccttacctaaccggttatttttccatattttgcagttagtttccctaagtcctaagataccctacaagtttgttatgagcatcatcacaccatctctctaaacatctactttctttcaacttccgattcagcttgcagactttgcaaaagtcccaaaaaaagctgtttcatcatacatcactgagcattcaatattggaatccgtgtcaaaattgctgcctaaaaatgttttgcaggacagatttgaaaaatgaccctgcaaagcattttgctgaaactcacctattttgatattcttgtcctcaacaatactaatagctggcagcaccccatctttgtgcacaacacaattctcactagattgctgtactgaatcacttgtcatttctgctttgttgcttgttctcaattcattcacattgttttcttcaatagatttctctgagtcacc

SEQ ID NO: 67185 - DNA, 447 bp, Glycine max
  Clone ID: PAT_MRT3847_31683C.1
ataacgttttcgcttcaaaacatatcatatcagatcgagttagagctaaattttaaattgtcctcacataccatggacaacaacaatgacttttggaaattcatcgaccagaagaggctcgaatcaggattggccaatctgtttctgaatgactatcccattctggagcaacaggttcagctccaagaggcctgagcagaggaggaactttgatgacaagggcagtgatattaacaacaacaacatcttataaaagcttttgatgatgatttcaatgatgggtggaagatcaccaattccgatggaccccttgtttcttagccttactaacaacgatcaactaacactcttggatggtggaggcttcaacaagggacgaggaatttattccaaaaccaacacccaatttgcctctatccttctagaaacctataccaccacgctatt

SEQ ID NO: 67186 - DNA, 239 bp, Glycine max
  Clone ID: PAT_MRT3847_31684C.1
ccaaataatttgtcaatgttgcatattcgagttccgcataaaatgttttacaaatcaaataaattataattccatttacattgcgctagctttaatctcaccgaatacctccatgatttatgttttagtgttgacatatttcctgtaataagccaactaacaccgttgacaaataattaaaacagaagaatccctgaagttacacagacacacccggtgactttggttcccaatggcca

SEQ ID NO: 67187 - DNA, 351 bp, Glycine max
  Clone ID: PAT_MRT3847_31685C.1
cctcgccctttttttttttttttttagaatttttttttttttgtattttttttttttttttggtgttgttttgtttattctattctatgattgtcacacaagaatttgttttcacacttctataacacatatcttttaaaaacgcacactgttctacttgctcgaaaattattactaaagtacaaaataaggaggttcgctgcttatgccacccagggcgagtgggggacctcactccttcacaatgagtgtggcttcagcgccaaagaaaaggagcttcctaacatgccttgtgatccaagacatcatagataaacgcccgctcacaagagaactgtgaatctcccaaca

SEQ ID NO: 67188 - DNA, 670 bp, Glycine max
  Clone ID: PAT_MRT3847_31686C.1
gcgtaatccatgactgcaatttctctgtatacaaaattcaaaataccggagggaagaaagaaagctcgaatataaaaaaaaggaagccgttagctgaactcaactcaacataacactttttttttctctgatctcttcgctctctccgatctgcaatctctcttccataatgaaccaaaccgtcgtcaccaacttcgaaaagccaataggctgttactctccatcggttcaagagcttattgttattgacgatgtgctctcaagcatgactggcattgaagggcgttacatcttaatcaaagcagttcgtggaaagaatgatgatattgctttcctggttgacccatctatggatttggccctgcaggagttggcaaaacggatattcccactttgcaagagctttctgttgatcagccagtttgtggagtcaaggtctcagttccagagtggcctggttaatcatgccttttctgctgcactgagggcacttcttctcgattaccaggctatggtgtcacagctcgaacaccaattccgccttggaaggctttctcttcaaggattggggttctattgtcagcccatgatgaggtcaatgcaggcattatccactgtcatacaaaaagcttcagtcaacaataattctgggtctgctggtcttaactta

SEQ ID NO: 67189 - DNA, 391 bp, Glycine max
  Clone ID: PAT_MRT3847_31687C.1
ctcgtcttcggaaccctagccatcatcatcggttccctcatggcctataatcacgtcggcggcgacaccgctcacggtctgttctttgcgatactgggaacactcttgttcattccgggtttctactatacgcgctttgcctattgtgcttacaaaggatacaaagacttctctttctctaacatacctcccgtatagctcagctctaacataccacctttatgtatagatcttctctgtttctaccttcttatttatattgcttgcattgctctaaactagtatatgtattactttgctaagattttgtttttgttttacagaatcaatcttcctcctctggaaaaaaaaaaataaaataaaataaaaaaaattattatataaattaaaa

SEQ ID NO: 67190 - DNA, 829 bp, Glycine max
  unsure (1)..(829): unsure at all n locations
  Clone ID: PAT_MRT3847_31688C.1
ccacgcgtccggtacttgccaagtgacaaggctcaggatgccaggctgtacattctgagtctgcagttttggcttggcggatcacctgataacttgcaaaacttcctcaagatgatttccgggtcttatgttccggcgttgaaagggacaaagatggagtactcggagccggttttgtacttggacagtggaatttggcaccctctagctccttgtatgtatgatgatgtgaaggagtatttgaattggtatggaaccagaagggatgctaatgagaagctgaagagtccgaatgcaccagtgattggtttgattttgcaaaggagtcacattgtgactggggatgatggccactatgtggctgtgatcatggagcttgaggctagaggtgctaaggttatcccgatttttgccggtggcctcgacttttcggggccagtggagaggtacttgattgatccaatcactaagaaaccgtttgtgaattctgtggtgtcactgaccggctttgcgcttgttggaggccccgcaaggcaggaccatccaagggcagttgaggctttgatgaagctagatgttccttacattgttgcattgccattggtgttccagacaacagaagagtggctgaacagtactttgggtttgcatccaattcaggttgctctacaagttgcactgccagagctagatgggggcatggagcctatagttnttgctggtcgagatcccaaaacaggaaaatctcatgctcttcacaagagagtggagcagctctgcactagggcaataaaatgggctgaattgaaaaggaaaacanaggaagaga

SEQ ID NO: 67191 - DNA, 299 bp, Glycine max
  unsure (1)..(299): unsure at all n locations
  Clone ID: PAT_MRT3847_31689C.1
tgcaattgangttgaantcttncccttctctcttcnaattccaaacacaangactcatcatccatgggctgcctccgtctccactgtcgganctgtcaacagaactcttttacaacctgaatggggtctgaaccntgngtttcnanttcccnagttcaaccttctttggaagcaanttgaagaaggttatnggctccanggtccccaanacaaagatttncctctgnaaactttcaaaatgttganngtaagaggngaggnnaaagnttnnaganaaccagcannccgncaaggncaat

SEQ ID NO: 67192 - DNA, 272 bp, Glycine max
  unsure (1)..(272): unsure at all n locations
  Clone ID: PAT_MRT3847_3168C.1
tggtttaccaacggcgaccacagacaacagtgtggnttttaatgcaaccaccggagccaccaccanntcgcactcatggntagcgatcttttaacaaattggaagtaccggcacatagtctaggtgaagcaacgatagcgatactcgacattctgattacactcaactcttcgcgaggattcagatctgtacgctgccattggctcaacatgagacagacttgctttcagttgaccattccctcataccgttaatgaatgagaccaaccttc

SEQ ID NO: 67193 - DNA, 310 bp, Glycine max
  unsure (1)..(310): unsure at all n locations
  Clone ID: PAT_MRT3847_31690C.1
tacccanaaacctgcaccataaaccatgagttctaantcatccactccacntnnnccaggctcaaatcctagggctgcgtcttccccnaactattgtccctcaacggggtcaactttggataatctgtgtccttcaaggccaaatcccacatcttcaactatttttgtctggactacttgggcaacccaagccttgtccacgcccagagcatcctcgccatctgggccacccaagttatcctaatgcgtgctgtttatggttatcgtattgcttgtgtgcccctcggtgatgtcactgacccaatctacc

SEQ ID NO: 67194 - DNA, 420 bp, Glycine max
  Clone ID: PAT_MRT3847_31691C.1
tttttaattcacatgctaaattccatcgaagccgctccattaatgtaaaaatatagattacagcagaagcaacatccggtgagttaacagcatcttcatacacctcttacaactaccgaacaaactcgcctaaggcgtaaatgtcaagagaaaaaaaaatgaatgattcaaaggcacttatagttacatccccccaaaagttctcaatagcagatcagaataatcaatgtacccactaagaaaaacaaagtgcaacagaacattcaataatatatccattagttggaccagacatgaactagtccatgcctgttgcctgtatagatttcattgcgctcttcatcatagaagagagcagtaatgtcttccaaggcttctgcaacagtgctcctcgtcttggatccatgttttcgcttctct

SEQ ID NO: 67195 - DNA, 270 bp, Glycine max
  unsure (1)..(270): unsure at all n locations
  Clone ID: PAT_MRT3847_31692C.1
anagatataaacaaaancgagncatgccnctaaccaccagnagcaaaaacagaagacaaaggcanaaactagtaatatttganatctcacaatcttganagtcacaaatnantgacacatatttcagccatggcagttcggagaaagttcttcgcgaattagtacatatgtctcccttccttttgtaaatgaatttaggagctcatggttttctaaatctaaatgcatgggtcattctanaatttttattagnnagnnttagaatctcct

SEQ ID NO: 67196 - DNA, 186 bp, Glycine max
  Clone ID: PAT_MRT3847_31693C.1
aagcatactaccacacctcaatctgatttcaaaccacagaagattaactgccggtctagtataatcacacatacggactcttacttacaatgtcattgcttatctattatataccctaaattcattttactggccttcaatttacatcatcattactgcgaaaaccatgcccttacctaacttaat

SEQ ID NO: 67197 - DNA, 150 bp, Glycine max
  unsure (1)..(150): unsure at all n locations
  Clone ID: PAT_MRT3847_31694C.1
gtngcatcaagcgaacgattatccgatggtaagggtnntttcgggtgttgatgccggagggaaaaaagccacctttattttattccttttgggggctttggtatatccttgggcttttgccctttgaaccacgctggctcattcttcact

SEQ ID NO: 67198 - DNA, 959 bp, Glycine max
  unsure (1)..(959): unsure at all n locations
  Clone ID: PAT_MRT3847_31695C.1
gggaaaaatatatacataacaagatatggcattcaacggttatttctttttgggcctcatagttcttgctcttgtgaggtcttccaaagctaggtccgggtttcctcgacccacgcgtcctgtttctccctcccctttctctcttcgttcaatcgtgatcgtaagactttcaagctatttggttctgaagcttttgttcaatggcaaaggacaagcctgtttctgtcaaagatgccgtcttcaaattgcaaatgtcactccttgaaggcattcaaaatgaagaccagctgtttgctgccgggtctttgatgtcaaggagtgactacgaagacattgtaaccgaacgatccatcacaaacatgtgtggttatccactctgcagcaatgctttgccatccgatcgcccgcggaagggtagatataggatttcactgaaggagcacaaggtctatgacctacaagagacttacatgttttgttcttcaaattgtcttgttagcagcaaaacttttgctgggagcttgcaagctgagagatgctctggtttagacctggagaaactaaacaatgttcttagcttgtttgagaatttgaatctggaaccggtggagactttgcaaaagaatggagatttaggtttgtctgatttgaaaatccaggagaaaacagaaagaagcagtggggaggtgtctttggagcagtgggctggaccttcaaatgcaattgagggatatgtaccaaaaccaagaaaccgtgattctaagggtttgcggaaaaatgttaaaaaagggtccaaaactggtcatggcaagtcaattagtgacataaatttaattaacagtgagatgggctttgtgagtactataattatgcaagatgagtatagtgtttcaaaagtaccgncaggtcaaatgggatgcactgctaatcatcaaattaaacccacagctacagtcaag

SEQ ID NO: 67199 - DNA, 273 bp, Glycine max
  unsure (1)..(273): unsure at all n locations
  Clone ID: PAT_MRT3847_31696C.1
cctcatttcatgtnnttcatttnctcncnccccccgaacactcaagtnttatctcnccncctcangtnttattggaggagatagtgtganttgaagaaaccaaanaaccgacgcanttngtatggggaaaaggagcctggagggtggagnanntgaccagcctgaacganagacgcctgctcttgccantgtnattgtggaaactctgaagntggacagtttgncgaagnnttnctcatctttagaacccantcttcgtagagttgtcgttga

SEQ ID NO: 67200 - DNA, 229 bp, Glycine max
  Clone ID: PAT_MRT3847_31697C.1
agacaagaagattatgatcggcatcaacggcttcgcaaggattggtcgcttggtggccagggttgctcttctcatgaatgacgttgaacttgttgttgtcaacgatcctttcatcaccactgattacatgacatacacgttcaagtaccacactcgtcactgggcaaggaagtatttatgagtgaagctgtaagtacttaagcaacttctcttcggcgcagatgccctg

SEQ ID NO: 67201 - DNA, 450 bp, Glycine max
  Clone ID: PAT_MRT3847_31698C.1
tagcaaaagcaagaagaactagtctaagcagaaatggcctcttcagtgatggcatctgtggccctcaaacctgcccctttcactgttgagaagtcctcagttagaggccttccctccctctcaaggaactcctcttcattcagagttgtggccagtggtggcaaaaagatcaagactgacaagccttatggaattaatggtggcatggctttaaaggaacgagttgatgcatctggcaagaaaggaaagggaaagggcatttaccactttatagacaaatacggtactaatgtcgatagttacagtcctatctacaacaccaaagactgatctccaaccaataatatctacactaacaatacaactaacttaactatctaaactataactctacttaatcttcttactactaatacacttcttatctacaacacaaatgctgtagcacaa

SEQ ID NO: 67202 - DNA, 639 bp, Glycine max
  unsure (1)..(639): unsure at all n locations
  Clone ID: PAT_MRT3847_31699C.1
ccacgcgtccggcaaccagcaagtcaccaccatggcacttgttgaagcctctgcttctctttcaatctcttctgttgctcgtcttttcactccaccaaaatgctctcccaccgctcactttcctcatcggaattttgttgcaactcgaccatcattcatcgctggttccccactctgagcattactataggccactacttcccttctcaatagtacttagcacttctgttggatcctagacttaattttagccacaattataaatgtaagcccgtctgtcaatatcttcaataaacagatgatttacagtttcctgtttttttgtttttttttctgacaaatgttaatttgttaattttgttagatatttgtcaattttgttagaaatgtgagttgggggattaaaaatcccttcatccttccgcaatcaccgggaccaaacttatatctccgagttctagttcttgtggntactccttatcatatttgattgctttataaagtgaaaattgcattcaattatgccagggtcactgcatttcattcacaataattactaccctttgcttcaaaattgaatgctcggataatttagcgatctttgggttcttcctaaatttctctgatatggtaattata

SEQ ID NO: 67203 - DNA, 194 bp, Glycine max
  Clone ID: PAT_MRT3847_3169C.1
ctttttcatactctcacactttcggtcaaaaaggggagatcttaataactaatgggtgtcatccaacccaatacttaacaaaacactcattattactctatcccaagtaataatatgtccacaatatagtgtatctataacacttccaactggaattctaaaacttcactctttacttacacatacactctaaa

SEQ ID NO: 67204 - DNA, 707 bp, Glycine max
  Clone ID: PAT_MRT3847_316C.1
ggctcgaggcctcaagttagtaacccttcctctcttcttcttcttattctgtttcaaaaaccattttttattattttccggatggcgtccggtactgtgaaaccttcttctcggtaccgttcctacgattcacgctcctccacttcctctcatttctccgacccttcctcctcccatgaattcaacaatctcaaaaccaaaacctcttcttcttcttctcgcgctctcgtcaaggccaaaccctcaaacaccgccaaggtggaccccaccttcaccaccatggtcaagaagttcatggacaggaaacccaaatcctcctcctcggccgccgccaccgccaccaggttgattattccctccgattttctcgcgaaggatttgaagaaggacgcgaagaaagtggcggggttctccgcgctgcagaagaagctcttcggaaagggcgcttccgagaagaaggagaaggtgaaggccttgaccgaggtgaagaacaacaccaggacattggccatggtgctcaagagcgagagggagcttctcagcatcaacaaagagcaggagcagcaggtttctcagctcaagcaaatgcttgaggacaagaacaaagaggggggagaagttgaaggatttgtgtttgaagcaaagggaagagatcaaatcgttgaagagtgcgatactgttccctgatgttatgaattctcagcttc

SEQ ID NO: 67205 - DNA, 523 bp, Glycine max
  Clone ID: PAT_MRT3847_31700C.1
ccacgcgtccgcatcctgctttattattcatttcacttcctccctatggtttgaaccataggtagatcttactctcgagttcatatacctacttcctttacctatacttgtcacaagaccagccgccacaaccacctctgctctctgaaacagacccagcgggacccgggacaccctacagtgtgagggcgatagagacatggccgacaccttctgcagcgactgccagaggcagacggaggtggcgttggaccactctgcgggggacacggtgtgctccgagggcggcctacctgaggagtctgactgcgttgatgaaacctacgagtggcgaacctttgccaatgagtctggcgacacacgaccctgaacgaggcggggggcccaccaacccgctactgaccggaggtgggctgtcgaccgtcatagacagcccagaggtggcgctggcgagaagacggggaccggcgacagtcgatgattcagacgtgcacttattaaaggcctcactaccgatgacgaa

SEQ ID NO: 67206 - DNA, 477 bp, Glycine max
  Clone ID: PAT_MRT3847_31701C.1
tacggctgcgagaagacgacagaaggggagtccaaatattactcctccaatgtcatcaaatgatcatgaggaaactgattttgcctaggatgagagggtaagaccaggacatgatgatgtctatttactacgacataattcgcctatcaacagagtagcacctaagaagactagaggttctcaaaaaccactttctgaagtaacatctatctttgaaatgaatgaattactgcttcagaaccgcaccttatttcattctgagaggccactgaggtcttatgattgttgatcaagagctactgtaggccagatcagagatcgaaaatgccccaatcgtcaatgatgatgttaatctttatgctgccctatttcgaaacagttccaagttcgcgaggagctatgctattaatggaaaggactcttaaagtgtgtgggtatagagaaggagatgaggccataatgcattcaccgatactt

SEQ ID NO: 67207 - DNA, 652 bp, Glycine max
  Clone ID: PAT_MRT3847_31702C.1
gtgccgaattcccggggggaccacgcgtgcgctctccctctcttattaatcactcctgagttttccctaacggggacaaaaaccctaataataatcggaaatcaaaatcaaaatggccgtgacggaggaaaccggcggcgccaccgtgatcgacgagacctacgagttctccgcgccgcgattcttcgatttcgtcaaaggagagtctgatgaggaatcgcgtaaggctgagctctggttcgactccgctctctcctacgctccttcgccattcatgcctaaaatcaagaccggtagatctattactgtggataccttgtgtgattttagtgaagctgacaaaatgcagaagatgtttgttagtgttgataacaatgttctggaaaccaatatacaacaacagagcatgactaccaaaacaaaggaagatgaagctgacaaagtgcagaagacgtcagcaaatgttatctggaaaccaatataaaaccacagagtgtgactactgtgaaggaagatgatgcaccttgccctgataaagaaagaagtgagaatgattataaagaagatagtgcatgcttaaatgtttcatctggagaagcattcgttgaagtagcaaaagatgcttgcacgccaaaaccagcactactgaaaa

SEQ ID NO: 67208 - DNA, 807 bp, Glycine max
  Clone ID: PAT_MRT3847_31703C.1
ggtcagcaaagataatatattatatatagaaagagtaccagaggtactggaatacataaggggggagccatggtaatggttccataatcagacaaaatagtctgagaaggaaccactctatagaacccaaagaaaaacatagataatggctaaagtaaacctctagtagtacaaaaagattgtctaatattgttggaccagtaattaaaatgttctgtgaagcctttctcataattcctaagccaggtccaaagaatgaaaattgcatcttcaaagactttgtttgcatcgaaagaggcattagagaatactatgctaatccttgtcttccaaatggaccaggttagggccagccaccagcactgccacctattgctcctaacaccatcaacttgaagtcccatatgttgattgaaattcatttttggggtgaggggagcagctccttttatatttatccatgacatagcttctcaccataaaggctgaatttttgagcaatggaaaaataggtgtcctgcgttctcttcttcaactctgcataaagggcatgaggtgtcagcaacctgcacttgccttcgctgtaacttatgtcttggatctttacgcgaagtctatccctaataagtctccaagcaaaaattgctattttgcttggaacctttatactccataatttggcaaaacaatcctcttgagttactgctgctgctccttccatcagtaccttgtaggcgttgtttgctgtgtattgacctgtaggattagctgtccattcccacacatcaggaccttggtgtggaaaga

SEQ ID NO: 67209 - DNA, 200 bp, Glycine max
  Clone ID: PAT_MRT3847_31704C.1
gtcttccatagccccccagaaatgaggagcaccatcttctttgcgctctgtctcttgtgtgctttcagcacctcatacggtgtgtcagccatcgctgatttcgtgctcgatagtgaggataaccctcttgaaagtggtcgtagatattatatcgtgtcagacatagcagcatttggtggagtaagagcagctccagcggg

SEQ ID NO: 67210 - DNA, 526 bp, Glycine max
  Clone ID: PAT_MRT3847_31705C.1
ttcgaaattttgggacttctgttaatgcgtaatttgaatttaggtttttatggtttaatgtgagtagtgggaagttaaaaagtggaaattctgaaatgaaaatcacttcacacttgattcagaacaaaaatacgttaatgtggaaagtgaataagggaggtttatttaacagttgccaaacgagaaatgtaacgcgcgaaatcaactaggatcacagactggtggtttcttcactaactctgttcttatgttttgttcttaatgtacgtgttactctctctctccacaaccaacaccaaagtgaaattccaccttgtcttttttttataagtccaatgttttctttttatgtttatttattcatttaataattttttttatagtcttttgtagtttaataaagattttaagttatgatttgctgtacccactttcttttttttttaggagagctgtacccactttcttgtattgtcaaatttagtactacttaattatgcccttcattatgaattttcatatataa

SEQ ID NO: 67211 - DNA, 245 bp, Glycine max
  Clone ID: PAT_MRT3847_31706C.1
cttggttgcaaactgtagagcgaagagcgttcgagtagtgagcgaaagacgttttctttcttctttcccgttgtcgtcgcggcggaaccctagctactccggtggtgcgacaaagggtgtgtgagagagaaagggtgtgtgagagagaaagcgagagagagacagacagtcacgatgagtggaaagggcggtgacaaggcgccgtcggcgacgattccagcgtcgtcgcggaagatggttcagag

SEQ ID NO: 67212 - DNA, 253 bp, Glycine max
  unsure (1)..(253): unsure at all n locations
  Clone ID: PAT_MRT3847_31707C.1
acgnacgcgcacncnnacncnngnncgcnngctcgacncnnnccnttannccncccancntccnncnaaccccccgntctcctgannacnncnacncacnccannanaccgacccccccnncncnccncncnntgcntncctattcccttccnccngcacnccncncgcntgnagccnattantnnacnacntccanccncaaccgtnncggnnccannnacaacccgncancncccctccggtngttnctnt

SEQ ID NO: 67213 - DNA, 706 bp, Glycine max
  unsure (1)..(706): unsure at all n locations
  Clone ID: PAT_MRT3847_31708C.1
aaaattttgtgggagtctgcaatgtcaatgaactctatgtatccagatggttggtttgcactaagtgctgctgcattgaaagcgcgggatataggaaaggctttggatgcgtttactcgtgctgttcaacttgatcctgaaaatggggaagcttggaataacattgcttgcttgcatatgatcaagaaaaagagcaaggaggccttcattgcatttaaagaagccttgaaattcaagacgaaacagctggcaactatgggagaactacagccatgttgctgttgacactggcaatatcagtcaggcactggaaggtgtccaaatgattttggacatgagcaataacaagagagttgattgtgaattattagaaagaatcacaagggaggtggaaaagaagctttcaacaagtaacgtgccccagttggtaactgatgataataagcctaaaacagatcaactctgcattgttgattctggatcaaaatatcaagagcaagtgtctggagtatctattgcaggaagatcacgtgaaactgaacaattattgttattacttggaaaagttttacaacagataattaaaagtgggagtggatgtggaccagaaatctggggcttatatgccaaatggcacagaattaatggagatctcatgatgtgttctgaagccctcttaaacgaggntatgactctccaaggttcc

SEQ ID NO: 67214 - DNA, 467 bp, Glycine max
  unsure (1)..(467): unsure at all n locations
  Clone ID: PAT_MRT3847_31709C.1
agctcggaattcggctcgagggcattgttgacatgtcatgggatgatcatcttacagaagaaaaccttttctatacagttcctcctactgcaatggaagcatacagaaagtctattgaatctcattttctacagtatgagaaaactggtagtagcattcaagaggaagttgaaacatctatgtatgatgctgcagcagagtttgggcatgaagaggttgcatatgacgaggatgaaggagaaaatagtacttattatttgcctggtgtctatgagggtagcagatcatcaaaatcatttcagaaaaaacacaaaaacaggataaagtcttacactcataagtccagtgaaattggaattgatttgccttatgggcgttattcaactggagctcagccatccgtgctatttggaagaaggcccgctagtttaaatgttggatcanattcaacgaaacgcatgcgtaca

SEQ ID NO: 67215 - DNA, 248 bp, Glycine max
  Clone ID: PAT_MRT3847_3170C.1
ggctcgaggttataggctgcatacttcaaacatattgtttatttcaaccatcgatatttgtttattggatccggggaacctaaaccaacaactcctgatcttctgctcatatttaactacaacttattagcggctggcaatacgatgcgcgaagaattttacaccgtccaggtccttggcgtaaccaaagtatttgtacctgcagcgaacgcttgtgaatgtcatgtaaattacaagccaaggaactc

SEQ ID NO: 67216 - DNA, 856 bp, Glycine max
  Clone ID: PAT_MRT3847_31710C.1
ccggaattcccggctcgacccagcgtccggagagagagagttttcgagaagaatttgcaacagccaacgcctaaacccccatatacgtacgttttcagtgagtaacacatggataacacagaagctgaagagcaattagcttcagagatgctgctgaatcagaaactcgaagaattggatgaggcttatcaaactaagatttcccatgtctatgactatgccaattttactcttccgaaagatttttttaaatgtggatatgagtgctttgatggaagcaaaaggcaggaagaagtaatcaattgtgtcaataattgcgctgatcgtcttactaaagtgcaaaaagctttgaataatgagataaacatgtttgagcagaagatgggtaaatcagttttggtgtgtcaactaaagcatgacgaagctaagctccaacagaaagctggtgctgggcctgatttggtttcctgtcttgaccaggcaatccaggaaaacatcaagtttctgccagatattaacaagctgaaagctgcctttggaattagtgacgatagctcgtagcttatttttccagggggaaaagactactattgttaatagttctttgcagctttattttttttttccttccatacatttttaaccccacacgcaaatcaaagtgggtgcaaaccaaacttgcattacaaacaaaaagttatggtgctttttaaaaatgcacccttcctataggctgtagttgcatatggttaacattcgagtacaaggcccccaatttccccataaaaaaaaaaaaaaaaaaaaaaaaaaaaaaaaaaaaaaaaaaaaaaaaaaaaaaaaaaaaaaaaaaaaaaag

SEQ ID NO: 67217 - DNA, 690 bp, Glycine max
  Clone ID: PAT_MRT3847_31711C.1
cgacccacgccgtccgaactcaccaaacgtcgccatgtttttaaactaccataggtggaccgactgaatgacaggggtcttttcttttctttctaacaaaagtcgcttctgtacacacaaggatacacgaacataatatgtttctttctatttttcttagtgagtacatggaatagcatagagtccccaggtgaggtgaggagtagtgttactacctgaagtgaatctgaaggccccttttaagatgatgtataagttgatggggaacctgctttggtggacattccatgggctaaaagttagcagcgccctgacttacatgactcagaccaaaattggtgagttggaataggctggtgattatactggaaaggctttgccgtgagagagataaatcgtgaaaaccccgagtcatactaggacacctagaacagtggctgctcttgaatgaatcaaaagaggatgtgggacataaaggggacgatgctctttaacaaggattcgaggtcatgagcatgcattagtggaaacacaagaacagcgtgaagctgggacaacaacggctgaaggagctgatcaaacaaccgctattgcagctaaaatatcatatagtgacactgtcgtagggacctatgagccgtggtgggccattgcaacaggaaagatagcactcctgcgcaggctcaagag

SEQ ID NO: 67218 - DNA, 172 bp, Glycine max
  Clone ID: PAT_MRT3847_31712C.1
ggtactcttgggcaaaaggcggatgggggaagtgtcttttttttaggagactccccgaagggcccacagaatgccggtttatatagggggaggagctcaggcaaagaatgctatgctaaaaaatctgccaagtgctgtccttcaaatgaggagatatgttcttagagatcaa

SEQ ID NO: 67219 - DNA, 1907 bp, Glycine max
  Clone ID: PAT_MRT3847_31713C.1
ctccatttaccctttctccttcctggagtactcgcagttcccttctcctcgactcggatcggagcaaagctctcctctgtccacaatcctccgtttcactctctctaaaatcctaacactccgaaatgcccgaaccggaatcgcaaaacggacacgagcaagacccggagccgcagccagaaacagaaccagtgccaacagagcaaacacaaccacaattggagccgaaatcgaaatccacgcccgaaccagaaccaaatccgcagccagaatcggagccagtgccaacagagcaaacgcaagcacaattggagccgaaatcgggatcagaagctgatccagcggtaaacgacgcagatctcagggaaacgacgattcattccaatgaaacgtatgccaatccttctcccactcctcagctacgtaaagacgaaggaagccgaacgttcaccatgagagaatcgctgaacggattgaaaaacgattccgaaccggagagagaagatggcaactccccctacagcccagaacaacagcaacagcaggcagaccagaacaacgctgcaatggatttgataaacagcgttgtaggtgtcgacgaggaaggccggtcccgacagaggattcttacattcgctgccaggagatatgctactgcaattgagaggaaccctgaagattatgatgcattgtacaattgggcattggtactccaggaaagtgcagataatgttagcccagattccacttcaccctctaaagatgctttgcttgaggaggcttgtaagaagtatgatgaggccactcgtctttgtcccacactgcatgatgctttctacaattgggctatagcaatttctgatcgggcaaagatgcgtggccgcacaaaggaagctgaagagctatggaagctggcaacacggaactatgaaaaagcagttcaacttaactggaacagtcctcaggcgctcaataactggggacttgctcttcaggaactcagtggcattgttccagctcgagaaaagcaaaagattgtgagaactgctatcagcaagtttcgtgcagccatacagttgcaatttgatttccatcgggcaatttacaatcttggaactgttctgtatggattagcagaggacactttaagaactgggggatcagtgagtgctcaagaagtttcaccaaatgaattatacagccagtctgcaatatacattgctgctgctcatgcattgaaaccaaattattcagtttatagcagtgccttgcggttggtgcgttctatgctaccattaccacaccttaaagttggatatttaactgcacctcctgtgggggcatcgattgcacctcataatgactggaaacgatcagaattccttttggatcatgaaaagcttcagcagatacccagaggagaatataaacaagtaccacctcaaaatctctcaggcagattggtagatgcagtgagtggagataagaagactatcaaagtagatatagcagatattatttctgtatcagcatgtgctgatcttaccttaccacctggtgcaggcctctgcatagatacaagttatggatcagtttacttggttgctgactcttgggaatcattggatggctggctggatgcacttcgtctagtttacacaatttatgtgcgaggcaaaagtgatgtactggctggtataataacaggatgaatataaattttaattgtacccaccaatttgatttgatatgccactttttgtaagaactcattatccagtgtttttcacttcgcaaacttgtgtataatattgagtaatgtatgaaataattacaataccattgaaaaatcttggtttactcattgaccagtttgttgagcattttaattgttaccaatatatatt

SEQ ID NO: 67220 - DNA, 469 bp, Glycine max
  Clone ID: PAT_MRT3847_31714C.1
acggctgcgagaagacgacagaagggtactttaataaataatataaccaaacacttattattccatataatagtttttttaacttttagctaccatctctttttcagctttcaattaattgttccagttaattttattaagtattataaaaaatagaaacactcatcgttacttaatgttattttggggaatatgttcattatgatacgtttttgtcaggtcttgttttttttatataggcaaaagaaaatattaataaaaatcaaaaggcacaacaagcataaaaagaaagataaacagatacaaactataacataaaaagtgactactaaacctcccttctttccaaccatgtcctctccttctcagttacctaatcccaacgcagaagaagaattaaaaagaaatgcgcattgtctgcttcttaactctggatctacggttgtgacttgtgagaattataaacatt

SEQ ID NO: 67221 - DNA, 336 bp, Glycine max
  Clone ID: PAT_MRT3847_31715C.1
tccgtccgatgcgacaagacgacggtacgggatgcaactgactaattaagggtagtcatttccatagcaccatatgtaggtcaagatcactaacttgttcgggatgggtctactttgcgccttcacctcatagggagcgtcggcaaacgaccacaacgtgctctacgtggatggcgatccgattccgtccagtttcatatactacgttttgccagcatcatcattgctctgtttcacaattgaacgatcaccactccggaactacatttacccaatcactgttttgcactctctcactccaggctctatcgtgttactaattgcatatgtctctgc

SEQ ID NO: 67222 - DNA, 198 bp, Glycine max
  Clone ID: PAT_MRT3847_31716C.1
tcctctatagcgcgcgcgctcgattactgtacctaaacaccaagcctggacagagaccgcagtattccctaaggtcacctctcccccatcactagctacatcgatcactgacctctgccgatgctgtaccacaggtatcatgtcacaacacactatcacctggatccaactggtctggcggaagcccttcttacatga

SEQ ID NO: 67223 - DNA, 306 bp, Glycine max
  unsure (1)..(306): unsure at all n locations
  Clone ID: PAT_MRT3847_31717C.1
aagtngcntangngtangtaagctcggaattcggctcgagntctcttntnagaancggtancnttnnctganaggncaaagntttngatntcaaagacctnatcatnnagtgtaaatnctacggcntngagtncnncctcgtgaantcccnttncaanccntcnnaattggaannttttaatctncaaaaatcgctnctntgnaancttgaacggacgcgattncccctncgccctngccgcgaccgcttccggcgnnctccacgtcgcgcacggcagcaagatcacctncttgatggggtgcctc

SEQ ID NO: 67224 - DNA, 414 bp, Glycine max
  Clone ID: PAT_MRT3847_31718C.1
acggctggcaccaggagccgtgggcaagggaagaggccacaccctgccctgctctgctgcagcgagaatgggtgtgaaggcgtctcaaacaggctttgtggtcctggtgctgctccagtgctgctctgcatacaaactggtctgctactacaccagctggtcccagtaccgggaaggcgatgggagctgcttcccagatgcccttgaccgcttcctctgtacccacatcatctacagctttgccaatataagcaacgatcacatcgacacctgggagtggaatgatgtgacgctctacggcatgctcaacacactcaagaacaggaaaccccaacctgaagactctcttgtctgtcggaagatggaactttgggtctcaaagattttccaagatagccttcaacacccagagtc

SEQ ID NO: 67225 - DNA, 238 bp, Glycine max
  Clone ID: PAT_MRT3847_31719C.1
caagcctttaatatggaatctaataattgacttatatgggagatataatgatcttagtaatgcattttttacaagagatcagatgctgtctttcgtagtttgccctaatgtatttacttataatgctttaattcttgcacaagtgaagagaggaaatttccatggtgcttgctctctgaaggaagagatgattttgaaatgtctctttcctgatgtggttacctataatttgttgata

SEQ ID NO: 67226 - DNA, 404 bp, Glycine max
  Clone ID: PAT_MRT3847_3171C.1
cccacgcggcccccacttcccacttatactgtctagttctccaaccttccaatccaacagcacatcttcacgtcttttcatggcacgttgttgttttcagacttaaaaaacgagatcttcctcctcctaggttgttgtttgttaacatttcaaaacagttagcagaacactatactctgatatcagtcaaatcatatcacatccaagctccgtgactaagtttgccatgttttaatgattcattagtccgcgggtaaagtgtttttttttattcattattttctcataatcgaagatatatatataacgctcaaaattgtaatagttttcatttcaaccagcaggggcaaagagtgacttaaatcgaggaagggtgataagataatggaattttggccagaatt

SEQ ID NO: 67227 - DNA, 841 bp, Glycine max
  unsure (1)..(841): unsure at all n locations
  Clone ID: PAT_MRT3847_31720C.1
catccccccttacaatttgattacactgnaaaatgtgccacggggngctatggacaccttttcggggaactaagctctacaaggtgaagtatggctccaaggtgcaaattgttctgcaggacacaagcatagtgactactgaggaacaccctatgcatgttcatggattccacttctttgtagttggttcaggttttggcaacttcaacccagcaactgatcccctcaagttcaaccttgtagacccacccgtgaggaacaccattggaacacctcctggaggatgggtggccattcgttttgtggctgacaatccaggaatttggtttgtccattgtcacatagactcacatctgaattggggtttgggaatggcacttctggtagaaaatggagttggcctttcacagtcagtattacctccaccaccagatctaccccaatgttaaggttaatgaagcatcattagttaataaatttattgttctgtattacaagttctacaagaatttgccaaacaaacagtatggctttctgcagtttccaataccagaattagattatgcttaattgagctgtatgttggcggtatgttgattaggtggcattgcaaacctatattaacaaaaataaaatttaaatgatttcttttgtcaaaaaaagttatttaatttcctcaattattggcttgttgttctagtgttttaccaggtctttaaatacttgcaaaatagacagtatttgtcctgtatttcaaggtccagaattggaccatgctcaattgagcagctatgtttgtgtttttcttgattgagtgcaaggtgatagtgcttttagnccc

SEQ ID NO: 67228 - DNA, 317 bp, Glycine max
  Clone ID: PAT_MRT3847_31721C.1
agggagacccccatagggatccatggttttgaaatctaaaaacaaaattgacccccgggggccctggggggggaacttattggttaaaaagggtgttaacccccgggcaaaaaaaaattttaaactttgggacaaatataccaggcggcttaaatgccacaaacaaattttcaattttgcccccttagatgggaaaaccccccccgaaaaaaaagggtatacccccccctttttccaaaaaaaaaaacaatctgggggcacccataaactggggagtctttttttttgcattgcccctttttttagggaaacttttt

SEQ ID NO: 67229 - DNA, 529 bp, Glycine max
  Clone ID: PAT_MRT3847_31722C.1
ctggctcatacagacatacttgatactggcaaaatatgcacaatgtgccagtcatcaccgtgtggacagactaccaccatccctgccagcacagggcttgaggcccttaccatggcgagagcacacctgatcgaggctgaacgcacaaaagttgcggaggcacgagatgtttttttattgcccactcatggaatgtagaggccatcatgaatggcgtaacactatgcccgtggcccgtgtaaacgattcagaccctagcgcaaacaacgtatcgaacgcagggaaagctggaatcaacaagaacgatagaacaactggacccaaagcacgctgttaaaagagcacgatgtgaggtatacaaatggcgggaccagcatgcaccaaaaggaagaacctgtaaccgtagccaagttttaaaaagatcgcaactgaaccaaaatcttatggacctggctgggtgacaagcgttgttcatgcatcgctcacccccggcaagagaatggaggggactgacgaatgtatggaacct

SEQ ID NO: 67230 - DNA, 371 bp, Glycine max
  Clone ID: PAT_MRT3847_31723C.1
attggtaattggttttttgggtgctttaaccttgaaagattgttttatgctacaaccttaaatgattattaccctatataatatgagaaaaatcgagggagcaaggaaaaaaaacaacaagctggccagaacactacaggtttaaaagaaaaaaaaagaaggagagagccgccaaggcattttgacaacaaaatttgaaagggcaaaaacacacctaaaaactactttgacataggtaataattacagggggggaataatgcgccaccaccttttgatcacctcgaacacaaaaaaaaaacaaacatgtgctttctttaaaagggggggcactccctatggggggggggtaaagaaaaataatttggggtg

SEQ ID NO: 67231 - DNA, 276 bp, Glycine max
  Clone ID: PAT_MRT3847_31724C.1
acggctgcgagaagacgacagaagggctctaccaaaggcaagcataagtggtacaatagcataagtgcaagaagccataactgataaagccattgaatatgttgctgcactatacccatctaactaacagaaaacctaatgtatccttccaaaaagctgttttcttttattaaagtggtaacaaaatcctctaaagtgagcttgtccctgaagtatgggtgtatacaccattaaattttagtaagtaaagatcacgatgaactttaaaataaataa

SEQ ID NO: 67232 - DNA, 3306 bp, Glycine max
  Clone ID: PAT_MRT3847_31725C.1
gacaacacaactgtctccattcccgcgctaaccgacgcacaaagttgaagaaacagccgccgtaacctccatcttcgaacaaatctcttacttcaagtctaaattactgactttcctcgcctatcttctaccatattacaaataattgtaaactagggtattattccgttcgcatctcttccccagttctcaaacgcccgatcagctaacgtcgactacaatgccctcagaataccggacgatttgcgatacaagaggttcgacgggatgcctttgcggtgcacgtcgatgtcggtgacggacaagaccgtctgcgagaagcactacatccaggcaaagaagcgcgccccgaattccggtatgagagcaaatatccataaagccaagaggaagtcgcagtcactgtggctgaaatagtccgattatgtttatatggagagcaagggcgatgttttctatgttactctctcctccattggcctcactcagaagaagctctccaagaaccagttccgctacgagccggagcgcgacgcgccgcgaagaggctcgtccgcgagacgctcttcgaacctcaacgacgatgatgatgatgacgatgacgacgacgtggatggggatgcggatgctgatgtggcgctctatgaggaagagaattgggtctcctgtgactcgccgccggattcttcgcgcaagaggtcgcggaggagcttggaagctaatgctaccactgaatattcggacggaacctccgccggttcttccgacgaggacaccggcgggcagacttgtcaccagtgccggaggaatgaccgcgaccgagttacttggtgtcaacggtgtgataggaggggatattgtgatagctgtttatcaacatggtactcggacatttcattggatgaaattcagaggatatgtcctgcttgccggggtatatgtaattgcaagacttgtttgcgaagtgataattcaattaaggttcggatacgcgagatacctgttctagataagttacagtatctccatgtgctgctgtcgtctgtgctacctgtggtaaagcagatccactgtgaacagagttttgaagttgaacttgaaaagaagttgcgtggtgctgaaatagatcttccaaggataaaattgaactcagatgagcagatgtgctgcaatttctgtaggatacctattactgattatcatcgacgctgtccaagttgttcatatgatttgtgccttagttgctgtcgagatcttcgagaagcaactgcagatcacaataaagaaccccaaacagagcaagcaaaaacttctgatcgaaatatattaagtaaatttcctcattggagatccaatgacaatggaagtattccatgtccccctaaggagtgtggtggctgtggttattcttcactaaatttaagccggattttcaagatgaactgggttgcaaagttggtgaaaaatgtagaggaaatggttagtggctgcagaattagtaatgccgatggtccaccggaaaccgggctgaatgatctgaaactttgccaatattctcacagagaagccagtgatgataattatctttattgcccagcatccgacgatatcaaaactgatgggattgacaattttagaaagcattggaaaactggtgagcccattattgttaagcaagtatttgatgggtcatccatttcaagctgggatccaatggtcatatggagagggattctagagacaatagatgagaaagcgaaagatgaaaaccggatggttaaggccatagattgcttagatgggtctgagattgatattgagcttgctcagttcatgaaaggatactttgaagggcttattcttgaaaatggttggccacagttattgaaattgaaagattggccttcacctagtgcttctgaagaatttctgttgtaccaaagacctgagtttatcagcaaactacctttacttcagtatattcactccaagtggggccttctcaatgttgcagctaaattgcctcattactccttgcagaatgatgtaggacccaagatatatatatcttatgggattagtgatgaacttggtagaggtgattcagtgacaaatctccacttcaatatgcgtgacatggtgtaccttttggttcatacaaatgaagtaaagctgaaggactggcagagaactaaaattgaaatgatgcaaaaagctaaagctaataaggaatttgaggcaaaagaatcacatggggatcctcaaatatcttcaagggggagttcacctgattcctcacttggtacaaaaagtagtggactggaaatagactcaaaccagaataagtcaattatggatcaagggtttgaaatttattctagtgctgaaggtaatacggccaattgtaaacttccattcaatcaaaatggagacgtctctgagaaaacacatcctggagttctttgggatgtttttcgtcggcaggatgttccaatattgactaaatatttgaaaatacattggaaggaatttgggaagtcagatgatcttggaaatgaatttgttgaatggcctctttatgatggagctatttttcttgacaaacaccataaaagaaagttgaaggaagaatttggagtggagccttggtcatttgaacagaatttgggggaagctatttttgttcctgctggttgccctttccaagcaaggaatgttcagtccaatgttcagttaggccttgatttcttatctccggaaagcgtgggtgatgctgtaagattggcagaggaaattcgctgtgtacctaatgaacatgaagcaaagcttcaagttttggaggttgggaagatctccctttatgcagcaagttcagccatcaaagaagttcaaaaacttgtacttgacccaaagtatgcaaatttcagacttgtcttggcaattgcattaacttggcgcccagatcggttatggagatcctaatttgactgcaatggtttccgagaattatgagaagatggttaagcggaggcagattacttgtgcttgaacttccacactcggtcattgaatccggaaagaggggggattgtgtacattagttgtatttgagcaatattttatgggttggtattttcagtgtagttttgatcaaatacctaggtaatcatttaaatgtgtataatagttacgttagagaatcatgtaatgaccaacttcaaatctgattttatttcaaaatgtggaaaagaaacaatgtaatatatacaaagctaaaaatttgtgtctgctgccctttaagttaag

SEQ ID NO: 67233 - DNA, 377 bp, Glycine max
  Clone ID: PAT_MRT3847_31726C.1
caagcttgtggcaggtgcttgagggtgacaaacactagaacaaaggcgtcaggaaacggggagagttgtagatcagtgcataaacgggggcttgcggtgactaaattttctatagccagagctggattagttcctactagttatattacatgctctactcagtcacaaaaggaattcaataaagaaagccatacaagtgcttcattgctgaatgataataaaataaataaagcgatgctatttggctgttcttgatttgaaaggagtaattaatagtattaccatgctgcatacatttttatatcatgtaatagccgaaatggctgactgttgtgttgcgtgtctaaagctgccattctaagcggtttgagtaccgt

SEQ ID NO: 67234 - DNA, 179 bp, Glycine max
  Clone ID: PAT_MRT3847_31727C.1
tttgtgaaacaaacgcacagaggtctttggtattaaagagttatgggtttttcctacttacaaacacatatctaattaggtttcatattataagtgcaataacaaaaaatctgtggaagctgaatccgaacctacctacccttcttaacatgggttggggctaaaaaaaatttcttcac

SEQ ID NO: 67235 - DNA, 548 bp, Glycine max
  Clone ID: PAT_MRT3847_31728C.1
cacagatcgatggactcttatgttttttcttcctaatattacttgatattttttttttcttttgaatttagcaaatctatccaaccaagacatgtattcttgtttcccattctatttccatatcttgatggacggtgacgaatttttcatcaattcttctatacaatttttttcatgttttaattcagtttatattactaatactcttgtgtcttgtatttttttttatcatttaacataatgcatatttttaaaaaaataataattgtaaaaagtattaataaagataaaatatagttattataaataattaaaatatttaaataaaatacttgcaaacgactatgtaattagaaaaaataattgatgtgttttttcaaaatataaatattttaagataaattaaaatatttaaaaagacattaaagtaaatatattttatttttattatataactagaatggatgatccgtgcatgccaccgataaatattatttatgaatattttataaatatttcaaatatattcatattttcttaaatttatt

SEQ ID NO: 67236 - DNA, 411 bp, Glycine max
  Clone ID: PAT_MRT3847_31729C.1
cccttctatgaggggtgaagcagagtatgaattgcatggggattgtagtgaaagtgatatggataatctctacttatcgctcaagcgcatacgatcacaagagcttaaaagcttattatgatgtacactaagaagcttcggatcagatgacagaaaggttatacttgtcatcaggagagaatcgtttaccatgatgaccgctagtgacaacgaacatttgacagggattatcgggtacgatgctcaccgatatgaagatttgaatgagtagagattgcaatcatcggaaggatcatttacgttgcaactgaacatgatgcctatctcgacttgttcatcaaactctataggatgggctccgctatagctatttacttcttgaacagaagagcactcgggatggaaagggag

SEQ ID NO: 67237 - DNA, 276 bp, Glycine max
  Clone ID: PAT_MRT3847_3172C.1
caagatttttctttcaacaactaatatctggagttagctattgtcattccatggtacatatgcatttagaattttgttgttggtgttaatttaaaagtcctttgtagtatcaacttctgcctcctagtgcaggacatatgtcccagggatactgaattggcacacactctaatagacggaaatccagctcctaggcttaaaatttgtgactttggtttctccaaggttaataacatctcaccagaatgagcctttatggactagtcctttcatata

SEQ ID NO: 67238 - DNA, 571 bp, Glycine max
  Clone ID: PAT_MRT3847_31730C.1
aataaagaaaataactatattaaatcaaacaacgactacaaaagattaaaatctctattatgtagttctcttgttatcttcaatcttgatttacaaagcaaagagtgaaagggcaaattttttgtgttagccaccctaatggatctagaacgacgaccacttaaacttcacttcattccatacttggcagcagggcatgtgatccctctttgcctcaggcgaccatcatgtgacagtcatcaccactcctctgctcaatcagtcgcaaatccagcccttccctgcagctcttccccgctcaataagtgggcctcattgaaatcatgtctgctgtcaataaccttgccaacaccgccatgctgctccggcctccgggtaccaattaggccatttactcctggagcaacacccacctcattgcatcatcgccgactcatgttaaagttcagctgtctcaaatgtaaaaaatgatttatgcgtatatctatacaaaccaaaccaaaccaaagtatgtgcaccctttttctggggtacaaacaggcaaaataactgtaatatgcgtctgaacgtc

SEQ ID NO: 67239 - DNA, 2565 bp, Glycine max
  Clone ID: PAT_MRT3847_31731C.1
cttcactttcacctaggactctgcccccactttctgaaggcaataaagccagcataatgttcaactctctgtctctttttcctttctctctcctctctctttcttcccaccttctctgatgaaagtctcaacacaaagcaccttcttcttcttctcttattgacttatggccaccacagagactcatttctggatcttctggtgtaaagacctttaaaagtttagtatttgtcaacttgaactggtgtatagtgctagagagtaaagtttgaaacctatcttgttactttcatcgtcagaagcttacaggttgaatccatattttttctccttggaaaatgatgatgatgtttgatgagatggggctttgtaataatttggatatgatatctgctccccttggagaggaggatattaccacccggcaaactgatcctgaggtaattgttgaggatgattttactgatgaagaaattggggtagatgaactcgagcagaggatgtggaaggacaaaatgcgtctcaagcgactgaaagaacaaagtaaatctaaggaaggaattgatgcagtgaagcagaggcagtcccaagaacaggctaggagaaaaaagatgtcgagggctcaagatggaatcttgaagtacatgctgaagatgatggaggtttgtaaggcccaaggatttgtctatgggattattcctgagaagggaaaaccggtgactggggcatctgataatcttcgtgaatggtggaaggataaagtccggtttgatcgaaatggtcctgctgccatagccaagtatcaagctgataacactatcccagggaggaatgatggatgcaattccattggtccaactccacacaccttgcaagagctgcaggacacaaccttgggttctctcttgtcggcactcatgcagcactgtgatccccctcagaggcggtttccattggagaagggtgttcctccaccatggtggcccacagggaatgaagagtggtggccccaaatcggtttatcaaaagatcaaaattctcctccttacaagaagcctcatgacctgaagaaggcgtggaaagtcggtgttctgactgcagttattaagcacatgtctcctgatattgcaaagattcgcaagcttgtgaggcagtccaaatgtcttcaagataagatgacagcaaaggaaagtgcaacctggcttgcaatcatcaatcaagaggaggccttagcaagagagctataccctgattatatccccccattagcctcagctggaggtagtggatctttggtgatcaatgatagcaatgagtatgatgttgaagggggtgaggatgagcctaactttgacgtggaagactgcaaacatgagaatcttcacacatccaatcttgggatggaaagagtgagggtaactctgccagttcaacagccctctttttcaataaagggagagactgttacaaatttggatttcattcggaagaggaaggtttctaatgacttcaacatgatggatctgaaaatttacacatgtgaacaccctcagtgcccttacagtcaagttcgccttggtttccctgaccgaatttcaagggacaaccatcagttgatttgtgcttatagaggtacttcagattttgggggtccaagttttcctgttaatgagataaagccagtcgtacaccccccgtcctttgttcaacccaaatctactgctcagcctggtagtatggttccacctgttattgatctaactggacttgaagtttcagataatggccagaaaatgattactgaccttatgactaactatgacacaaatgttcgaggcaacaagaagacaagttcctgtaatcacttagctgcagaaaatttcgaccttcctcagcatgccatgcagcagcaacaggacaacttcattcgcggtcaaggaatcactgcagaaggcaacatctttgatgaagctaacatgcccaacaatcatcacatgtttgcaagagaagaaggtcaatttgaccgtttcaaagctttgaatgctccctttgagaccaatcacaacaacaacaacttccactcaatgtttggttccctttgtgatttggcatcatttgatttcaaggaggatatgcaaggagtagggatggatactcttcagaaacagccagatatttcaatatggtaccagtgaaaatgacaagttgaatctggaagctcgttatccacatcatgaattcttattttcatgtgatgttccttcagccaagtcttactggaattttcttcacatgtaattctgtaggcctagtagaactagatatttttgacttatcctttacaggtctagtagttgttacaataaaaaacttatatgtttagcccttgtgtgctttttttttttttatcagtctagccttgttacttaagattactattctatgcaagactgggatataaataagagttgaagtttcttccaaattatagtttgagaaaaaataaacatgtattaataaggtaaaatacttttacaatatcattttagaaatattttttatgat

SEQ ID NO: 67240 - DNA, 314 bp, Glycine max
  Clone ID: PAT_MRT3847_31732C.1
caagcaaaccctcccatagttttttttttggggcaggaggaaaaggcccccccaaaaaggagttaaaaaatagctcctgcctgctaggaatattggcccgcacccagtaccccccctaaggggcccttttttggttaacaaaaattgggggcctagcttataatcaaccccaaaaggcgggaggtcccctaacgggggcttgaacccatttttttacagctttacaaaaaaaaaggccctttggaatattatggaaactttttaaaaaaaaagttgcagtttaaaactgaaaacgggctggggggggtcagttt

SEQ ID NO: 67241 - DNA, 852 bp, Glycine max
  Clone ID: PAT_MRT3847_31733C.1
cggaattcccgggtcgacccacgccgcgtccgactcactctataatgaaatgagtcatcgcctccaacttcaaggcattttcgtcacctcctttcgccaacgccacttttccttcttttccccttacacttccaccaccacaagggtatcgttttctagttctagttgcgggaaaaatttgcaaatggaagaagtgaaggttgcttcagacttgttggtgggtgaccctgcttcactggagaagaaaattgatgcaattcgtttgggtggtccccagaagcttcaggtgattgctgattttgatgccacgttaacaaagttttgggttaatggaactcgtggccaaaccagtcatggtcttttgcagcagggtaatccagaatatgatgccaaaaggcagcagttatatgaatattaccatccattagagttttcgccgactattggacttgaagagaaaacgaagctcatggaagagtggtggggaaaaacacacggtcttcttgttgagggaggacttacatatgattcaataagacaatcagttgctaatgccaacatagctttcagggaaggtgtttctgaactttttgagtttttggcctgatattgtcaagaaagagatgctcctgtgttgatattctcagcagggctcgctgatatcattgaagaggtcctaatgcagatacttcacacatccttcaagaatgtgaggataggatccaacaagatggtatttgatgatgatcgccgccttgtaacttttaaagtaaatgttgtttaatggcaacaccacttccatggtggaatggcatgacagattttttgccaactggcatacgcaatttgtga

SEQ ID NO: 67242 - DNA, 255 bp, Glycine max
  unsure (1)..(255): unsure at all n locations
  Clone ID: PAT_MRT3847_31734C.1
gaaanantgnacantgnattatctcccgacgaacagaanaatggcacatgccaatgagatggtgaaanatgtcatcganattggagaactanaagaactaaggttgtctcagcgtaganctanaaggttcctcanaatctcncaaagtaaaggaagaancctanactcctcagtgcatctcaattggcccaattcacttcaanaaanaagaattcatgccaatgcaagagcanaaatgagatanttccagttctt

SEQ ID NO: 67243 - DNA, 1750 bp, Glycine max
  Clone ID: PAT_MRT3847_31735C.1
ctcgagccgggtagccatagcatagcagagatcgacataacatagccagcaacatcaatatcatcgacagacaacaatttcgggaatccgccaacaagttagggaatgcggttgcgtttactgacctgacctcggaaatcaaagagcgaaactcccggtgttcgttgcgttgtgctctgctctgctcctttgggcctgggctgggctgggctgggctgggctgggcatggctatgactgcagtgctgtggtggtcccattgggcctgctcttcttcgcttccggcctcatcgttaacctcattcaggcaatatgctatgtggttgtacggccggtgtcgaagaatttgtaccggcggatgaacagggtggtggctgaactcctgtggctggagctcgtttggattattgattggtgggctggtgttaaggtccaagtattcacagatcctgaaacctttcattcaatgggtaaagagcatgctcttgtcatatccaatcacagaagtgacattgattggcttgttggatgggttttagctcagcgttcaggttgccttggcagcactcttgctgtgatgaagaaatcttcaaagtttctaccggtcattggttggtcaatgtggttttctgaatatcttttcctggagagaagttgggccaaggatgaacgcacattaaagtcaggcctacagcaactgagggatttccctcttcccttttggttggctctctttgtagaaggaactcgctttacacaggccaaactattagctgctcaggagtatgcagcctcagctggattgcctgttccaagaaatgttttgattccaagaactaagggttttgtttctgcagtaaaccatatgcgctcgtttgttcctgccatttatgatgtaactgtggcaattcccaagagttcacctgctcctacaatgctaagactcttcaagggacaaccttcagtggtgcatgttcatatcaagaggcatttgatgaaggaactgccagatacagatgaggctgttgctcaatggtgtcgagatatatttgtggccaaggatgctttgttagacaaacatatggctgaggacacatttagtgatcaagagctgcaggatactggtcgacccataaagtctcttctggtagttatatcttgggcgtgtgtcgttgttgcgggggtcgtaaagttcctccaatggtcttcactactatcctcctggaagggtgttgcattttcagcatttggtttgggagttgtcactctactcatgcacatcttgatcatgttctcacaatctgagcgttcaaccccttccaaggttgcccctacaaaaaagtccaagaatagcgaacaactggaagctagggataacaaacaagactagatcacacacgttacctgaatattctatacataagagaattcttctgaggtcacatcttgaacttgttttgcatttatgtgcttttttttataaaaaaaattgcattaacgtgtgtttagggactcactaccccctttctttatttgtttgctttggaattgtacctcgtatgtgttcagttcttgtattatgtattatgcatatactattcattactttcaaattaattaggatgaatttgtatagactaatatataggaatggcgtacaaaaatcctacctaacatcgcagttttttagggacttgtacactttctggtattggactattaattttgtggttatttcttgctccccttct

SEQ ID NO: 67244 - DNA, 350 bp, Glycine max
  Clone ID: PAT_MRT3847_31736C.1
gcatgaggtttcatctcggacaaaggatcatagagttgatgtgagaagactgtcttaccgtgaattacaagtttttagaaaacgatggcagaaggcagttgaggaggatgaatttttgactattagtatttgttattgaaatggatcgacccaacattcatcctcctcaactgcctcaaactattagcaatttagcaccttctactactttgtaatcgttcaagagttgtgaactgtgaagaatgagttcaacaagccgtgcttggacttggagcgtggcagcaagtgttggagtggtggaggccttgaaggaccagggtatatgcaggtggaacagtgtgatgagatca

SEQ ID NO: 67245 - DNA, 479 bp, Glycine max
  unsure (1)..(479): unsure at all n locations
  Clone ID: PAT_MRT3847_31737C.1
caagttcactccactccattggaggactctggtttgcacatagacagatggttaatagtggagcattttggaaggatgtcttacattgctcatatcgttaatcagacccatgagaaatattcgttatagggaagttgttccttagatattaaatctcgctctacattggaaaaagtgtcctctacaaaagcacattttgttagtggaaaaaccttcaaatatgatataattggtgctggttcacattcttcangagattttcctgaaatggaacatcatgataaacccatcatgatttgttccttattgagacacagaatagatcctcaatacaatgaggttcaggctcacatggaaacaaatttgcttaaattgtctcttgatgatgttgaaactcctataagctctatgttggatcttaaaatttctcaatctaaattgcacttaccaagaacacagtggaggaaccattctgcgta

SEQ ID NO: 67246 - DNA, 383 bp, Glycine max
  unsure (1)..(383): unsure at all n locations
  Clone ID: PAT_MRT3847_31738C.1
ggagcgagaaagtcaaattcatttttctatttacaaaattctaaaaaaagataggatattcatattccttctttctttacaaaattataaaactaccgatatttttcctttttctaattactactttcctaattagatgttaactaatattctaaaatcaaacttctctgggatcaacaaaaattgagaagcctggaggggatttagtccaatcacccagagagccatcactgtaatcttctcctaatctcttaaggcaccacagatcttcttcgcatgagagcattttccagtgcgggatatcgcaccgtaacggttcttggcttgaaactntggtggccacaaccttacaaccgcgatcccgggcgaggttatgggcaaac

SEQ ID NO: 67247 - DNA, 391 bp, Glycine max
  Clone ID: PAT_MRT3847_31739C.1
gaacaaaccaattttttgtgtctacacatagttaattgtttggttcacgccaacatatcctggatattactatgcatacatatttaatgatcaggagctacaactcagcttaagacaagcgaaccacacacgatgtactgacatgacctatgacagactgtacattatgatccttgtaatagttcaggtttctttactgatcgggctggttaaaaacaaccaaagagggtcgttggggctgttccactagccctgaactttggagtagcaaactttgccttaaagaatggttccctttttagggcccaagtaagggttctttttttttatgcttttaggtggattgagacttttaggcttttaaatcactttccgtattctggagctcttt

SEQ ID NO: 67248 - DNA, 133 bp, Glycine max
  Clone ID: PAT_MRT3847_3173C.1
cttgaactgctgttattgtgttgttaatactgatacaagatagagtcttgtcttttgattggtgacaaaacctaagtattctattcaagttgtctttggatgtcagtcatgtgccagcaagaaaatatagccc

SEQ ID NO: 67249 - DNA, 207 bp, Glycine max
  Clone ID: PAT_MRT3847_31740C.1
ctgagagaagcagagcagaagaggtgaagtgaagatgatgtccacacgacatacgaccttgcgaaagcaggacgtcctcgaagccaagcccccccaactgcagcccacgccgacaaggcgtcaagagaacgctgcgagggggaccacacctgagcgcaagacacccaggcgcgcctaccccgattctgacagagtgcctgtcaaacc

SEQ ID NO: 67250 - DNA, 408 bp, Glycine max
  Clone ID: PAT_MRT3847_31741C.1
gagcaggcgtctagcctatctcgatcgaactgtccaaggtcctgtcacctacaaccggccgcagagccagcatggtgtacccgaccagcccgagagagtaggtagcgagtgggtacgacgcgaaatgggttaaacgtgacgccagggtaaccccgttgtagcagcggtattggtgacaacaacagactggcaggatacggacgcagttgtgctaaaatgggggagtgctgccaaagggacggaaaatacagggcgtttacgatataatagggcataggatgcgaaaatgcctactgtgcaaggtgctagggagcgagcattcatgtaggagcagaaagtaacaaccgtgactgggtttgtcccggttagagcagagcaaccgaattgccgaggttagagtacaagtgg

SEQ ID NO: 67251 - DNA, 491 bp, Glycine max
  unsure (1)..(491): unsure at all n locations
  Clone ID: PAT_MRT3847_31742C.1
gagaccaaactcaatttaattcaattgtgaatggcaacaaccactagattattgttgcgttcctctaagccaattcaacttgctccttctcctccttcttcttcttctaattcgttgtacatgaaatgtgtacggtaccaaagtatggctagtttgaatgaaaatcatcataacataggttctgtcaagggagaaagaaaaccagtgggggctgtgaaggcaactatcgctaccaccaaccacataaccacgtcaaaaccagtgattcaacaaggtttgtcagatttagctactttgatagcaagtattcgcaatgctgttttggtttttttgaggacttttgtcaaaaggaagcctcgcaatttaagccacagatgctcattgaaaaggcaataatcgattgcagattntttacgctgttcgcagttgcaggatctttaattggttcgtgttgtgttttgttgagggttgccttctagttatcgaatata

SEQ ID NO: 67252 - DNA, 459 bp, Glycine max
  unsure (1)..(459): unsure at all n locations
  Clone ID: PAT_MRT3847_31743C.1
gcggccgccctgggggcggggggggggnannaaaaaaagaacacgcacacaaccaaccactcaagcngaatccgaaacattctataaggaccaaaaaatagaagtatgactcagtcccaacccccaagtcacaaaaaaagtagcaaaagacaacacgcttttctcgggaagcaagggccaaaattttttttctanannacnaanaacacgnnngccaccaagaaagggaagcagggcacaaacccaagggccncgaagcacncaagccccacagcgcnccnggcgggaacnncccggcggggaaccaagcaaagcacaccagaaagaagagnaagaccagccgcaccaagacggggaaccacaccngcgaaggccccggagggccaccggggaaaggcggagnngaaancaggcaaggagaggaccccaggccacggggcngcacggggggcacccaag

SEQ ID NO: 67253 - DNA, 1106 bp, Glycine max
  unsure (1)..(1106): unsure at all n locations
  Clone ID: PAT_MRT3847_31744C.1
gaatggggaaaccaccttcgatagccggaacccaagacctttgtcgaaagacatcggtgtggggttcgaccagataatggaagatgcctaggcctttagatttcgatcgaagaggttttggatttccggttatcaagagaaggtagaaaaatttctttttctggccatcatcgtatcttttccaaaacaccaaaaatgcctgcgacaacagagaacaacaaccaaggctcattcctgggtcgaataagcatccgcagaaaccaagtgatgtccatggacggaagccacgaccaagagatggaagacctggagcttttccagaagcacatcggagaccgcttctcggagctcttatcctccacctccgaagactcctcctcctcctcctcctcctcctccggcgacgcgcttctctccattgcgtggctccgcaggctcctcgacgagttcctctgctgcgaggccgagttcgaagccgtcgtcttaatgggccgcgacccttcccagatcacgaagccaccgctcgacaagctcctcccggatctcctcgaccgcggcgtcaagtccctcgacgtctgcaatgccgtcaccctcggcctcgacgccgtcaagaacctccagcgcctcgccgagatcgccgtcgcggccctcgaacaaacccccctcggtgacggccaggtccgccgcgccaagaaggcgctctccgccctcgtagccgccatgctgaacgacgacagcaacgccgccgccaagggaaccgaacgcacccgctccttcgggcgccgcgccggaaacaccaacaccactaaatacaagtcgctgtcgtggagcatggccaagaactggtccgcggcgaagcaaatccacgcgatgatgtcgaatctgacggcgccacgtggcgcggagtcctcgggattggcgcaacccatgtacatgatgagcaccgtgttggtgttcgtgatgtggactctggttgcggcggttccttgccaggaaaggaatgggctagggacccattttcctctgccgaggcaattgggctgggcccagcccatgatcggcctgcaggagaagatngcggaggagtggaagaagaaagagaagaa

SEQ ID NO: 67254 - DNA, 1061 bp, Glycine max
  Clone ID: PAT_MRT3847_31745C.1
aaaccttttaagttttatcttcctttatttcctcattttcaccaccacatccaaacacgccccaaaaccatggccagaagagtctctcctcccgttgccgttctcctctccttcctcttcctcctcaccctcacacgcgcccgcgatgttccgaaccccttctccgaacccaaacctgactccgaacctggatcccatcatcccgaacctaaaaccgtttcgtttaccatcggcaccatcgatcccgttccgctgacgctcctccgcttccgtccgatcaaccgccacttccagcccggccgtccgttgcctctgtcgctccgcaccgcccaccgccgttgccgccacggccaccgccgcgagatcccctacggcaacgacgccatcctgctcggcgacgccgccgccgcgcgccggattcatccgcgctgggttagggttcagtccgccgccgagacgcggcttccggcgacggttgagcgactcgattccgtccgcgaacaccgtcaccgcggcgagaatgaccaccaccaccaccaccaccaacatcaccgcctcgaggagagctggttcgcgaagaagattcgcaagttcatgaacctcttctgattttgatgatgcaacgatcaacgatgatgatgatgcataaatatatagtagttatatatatagatacgaatggtaactgtttgtgtaattaagtttgcatctgatatagagatgtatgatgtatgtgtggtttgatgcaccatgatctactactatactattgctactaagtttttattttatgttatttatgagttgttagggatattttatactgtagaataatatggttttactgccatagacacttgtagtggttgatgatgaatgagtatagagaagcgttacttgcaaatcctaatagtttatatcttgcttcatgttggctttgtttgaggtagaatggtttgttggcaaaatattagaatcgatttaagttttatggtaaaaagcaatttagatacatatattttaatgaatttagatacatatgttcgatttttgtacctttt

SEQ ID NO: 67255 - DNA, 342 bp, Glycine max
  Clone ID: PAT_MRT3847_31746C.1
gaaccttttgagttatttttaaacccactggtcatactacaaaattagttcggttatctcggctagtagttgactaaaatattttatcaccttcaaaataagtatgtttgttaacattatacaatagtaaaccgtcatgtatgctaatatgatagacttttataataattatcctacaaattatattaatagattttgattggttgatcataataacgacaatacgtacaaattaaactcataaattattccttattgtgtccgcaagttgttaacaatttgtagcaaataaatatactttcgtgagattatctagtacaaattcttcctggctctttttat

SEQ ID NO: 67256 - DNA, 324 bp, Glycine max
  Clone ID: PAT_MRT3847_31747C.1
aatgcccttatattctcccaaacagagaccttgagaaaactcccgtccttgcacgggcttttataaaacacgccacttctactgggtttcactttcacaaacctaacaaaatctggggcgggaattatccgacaccctaaaaactatatttgttagataccgagataggccccccactttctttgctcttggatgtttatgaggtttgccttgttttaattatcaaccgaagatctaagagggggggagggtctcatatccaccataacccactctttagcccctagtttggtgggccccttggtgggctttatgaatcttgaa

SEQ ID NO: 67257 - DNA, 1545 bp, Glycine max
  unsure (1)..(1545): unsure at all n locations
  Clone ID: PAT_MRT3847_31748C.1
gtgatgagtcactacagtgctgatagcgcgtggttgaaaaggcactcttcaagtcaggtactcccttctagaagtaaaaaactgtggtggaagatgatcctatggagccacaggaacacacgcagaactctccctagcaattcaacactagttcctactagtgctgctttaaatagtggatactcttcagtcacccttggactgaaacaaggcgaggcattgaggcctgtgacatcttctgtttctcttactatggaatcctttatcaaaagaagaattggcaagaatattggtaatcgaagggggagcaggtttcaatgcggccaatggtttgctctctcatcagaatcatcttctttttccagagtggacgcatgggtgaagggcctcgaaattcaccaaatccttcctgaggatgattttgatgatgacaatgccagaagaagcattgtcttcccaccttctcctaatgctggtgggtcaatgatgagaaccacatctcagttgacttatccagatgccaatctcttatctggtactggtataaaggccatcccttctctttctctcttacccagtcttcgtgctgtcaacttgtctaacattttcatagttcccatccctccaggagttctaccatagggtattcaaacacttaacttgtcaaaaaacaaaatcagcaccctcgagggcctctcaagatttgcacaattccaggtgctgtatcttgtttgcaacaacatatgtggtgttggacaacttctctcacgttggacgctaaccgttctgctcttgcgcttcggcaacaacacaagagctgtagcagggctccaaagtttcacaaatatcaaagtactatagctcctctttaacaatataacaacaatagaaagattactccgggttgacccgataaccaacgcactcaggggccttaatctcatgcaaagcaccatgcgaacttaccccaaagatgatgaaccaaacaaagcaacctgtcagggcccataggacacgcggaatattaagcgatagtgttgccagagctgcactcgggagcagcacgcgtagctgcaacagaagatcaattagaagagttggccatggaggatcaaatctctccagaggtaatagaaggagtaccagtgtttcccagaaaagcacgaaccggacaaggaagtgaaattgaagctgtttgttgcatgttagaggagcaactcaatggaacactttcatttggttcttctcaatgttatatcagaggaaactgtgtgttagatgttgctgtctcttgatttgtttgtgagatatgtaaaatttcatttaatagcttaaaattttaagataattgtttcctgatataatagtatcaaagccctcataatcatgttgtcgcttcaaggccaaagggctctagcatgaggggttatgttggatatgaaagtcattatttgctttcagcctacagtttgaacttttggaacgtttgattcatgacattgttaattgataaaagtgttgaagtaatgggaatgggtagtannt

SEQ ID NO: 67258 - DNA, 279 bp, Glycine max
  unsure (1)..(279): unsure at all n locations
  Clone ID: PAT_MRT3847_31749C.1
tatttttcnantaacttaangtntcanaccnaggcngttggaagtcatggcagcaacattgatgagcagcaacaactcagttnntggtaattcttaaagcaactcntttccntggcccaaggcagggtgcanatgcnaatgctcttagngatgttgtcnccatgggaancggaantaancatgggcnatgatttgnggtaagnaccagaaagggtgaaaatacttgggacccttngnaacnccnagcccttcatnccttgaaangggaatccccggggc

SEQ ID NO: 67259 - DNA, 703 bp, Glycine max
  unsure (1)..(703): unsure at all n locations
  Clone ID: PAT_MRT3847_3174C.1
tcatagaatatactttgaactcaggcacacttgtgcataatactatcatgtcatgccttcgatgttgtttggtttgattcagcaaacttgaacaaaagggcttgatggaattcacttcttcttttgatttaaccttcttctatgactatgctactccaagcaaagtagtcctatggctggcatctatcttctccggcatcatcctatgtgttcttgcttatacatcaactgctattttgagttctttgttgttcaagggatatggcaaattaagcagtgaggagaaaattgaatggaataacagggggttctctacatttcacgctctttttgtatcatctgcatctttctacctcctcattttgtcagatgtcttcaatgtgaattcacaggacgacatagttatcaatagatcatcaaggttatcagatacagtgttgggggtttctattggttattttctaacagatctggcgatgattctttggaattttccagctttagggggtcttgaatatgttctacaccacggaatatccataggttctattacgctatgtctgctaagtggtcaagttcacatctacatacttatggttcttttctctgagagcactactccttttgtgaatcttanatggtacttggatgttgctggccttaagagctgcanactntacatttggaatggaattgcattgaa

SEQ ID NO: 67260 - DNA, 307 bp, Glycine max
  unsure (1)..(307): unsure at all n locations
  Clone ID: PAT_MRT3847_31750C.1
gtgggtgtgtgtttttttttttttttttttttttattttcattcctatttttttgttttgaagaggggaaaccatatctctctttcgnataaattgggaaaaaattaataatgtccagagggcggaaaaaaaagctacatgtttaaaaagcgggctttccaggggggggggggcacattgttcccgcctccattaatccgacttttttccggggggggggggggggttgcccttcttttgggccggggccaaagatttataaaatttgtgtggggggagaccaaacaagttttaataccgcgggggg

SEQ ID NO: 67261 - DNA, 336 bp, Glycine max
  unsure (1)..(336): unsure at all n locations
  Clone ID: PAT_MRT3847_31751C.1
gatggattccaaaacaccacatancnctactggtttgtttttataaaaaaccaagaaacattcccaccactaaatatggctattactctgctgggacttatctaacagcagtagaccccaacatttagcaaaatattactggtcctaaacctaactttctctttaaaattttctttttcccccttttatgggatagggattgggaagagggaattttttgccatttttaacaaaccaattacacctcctttggttccaaaggccccttaccacccaaaagacaatgtggggggcattagccacatcccaattatcaagactttttttcctaatagg

SEQ ID NO: 67262 - DNA, 388 bp, Glycine max
  Clone ID: PAT_MRT3847_31752C.1
tcggctcgagtggcactgctatggcagtgggattggcaattgcaaacgagggaagaggttacagtgggaagataacttctattgtgattctatcttgcatggtggctgccactggaggcattatcttcggttatgatataggaatttcaggtggagtaacatctatggtgccatttttggagaaatttttcccagatgtgtacaccaagatgaagcaagacaccaaggttagcaactactgcaaatttgatagccagctcctaacagcattcacttcatcactgtacatagcaggccttatagcatccttctttgcctcatcagtcacaagagcctttggccgaaaaccatcaatcctcataggtggtgctgcattcctcattggagc

SEQ ID NO: 67263 - DNA, 362 bp, Glycine max
  Clone ID: PAT_MRT3847_31753C.1
caaaaggctttgatgtccttacctcaaagaaagaaaacaaagggacaaaagacttgcaatcatgggaccagagacttccacttattcctataccaaacttgatgaagagtattgaggatgtagtgaaagattggattcaggaggaggctccatcagaggaagttaagaaagaaactttgtccattggtgtagaaggtgctggcttggatggtgttgttgtggctcacaccaagcctagtggtgcggagatggtatcggatttctgggtggttgaacaaggtgataggcctaatcaacacaggagaggaacttcatcatgtcagaggattcagaatcttgatgatagcatccaagaagaatct

SEQ ID NO: 67264 - DNA, 418 bp, Glycine max
  Clone ID: PAT_MRT3847_31754C.1
cttaattcctcctcaatttacaaaccccatctctctaaaaaaaaaaaaaaaaaaaaaaaaaaaaaaaaagaaaagaaaaaaaaaaaaaaaaaaaaaaaaaaaaaaaaaggggggggggaaaaaaagggaaaaaaaactaacgaacgagggaaagaaaaagagaaagctgtaaaaaaagggaaaacaaaagacaagttaaatggccggtggataaaaaaggggcctgagggggaaaaccctgtcgaaaccgaggtaaatgaacttgaaaaacatgcccctttcgaacattggaaaaaaagcgaaaagggccttaaagaggggagttacaaaaaatgggaagtgaaaaaggaaaaggggacgcgcaatgaaaccgctcaaaaaacgcggtggatgagggggaaacgccaaaagaaacggt

SEQ ID NO: 67265 - DNA, 433 bp, Glycine max
  Clone ID: PAT_MRT3847_31755C.1
aactttgggggtataacggtaaatgatgggagtcgacatcgttgtgtctccttagtaggggaacactgcggatgcttcatcgagctgactggggcattagtgctgcttcccacacatgcccttgagagaagctcttattttactggaagagactaaccatggttcaccatgcttgtcaaagttttaacgggttatgcggactccatattaaagtctgacttggaaacatggaacacggaaacgctatctgcgcttaaaagagcaagattgcgatttaggtggttatacacaattattcacatgacagtagggggtattagactcccatacacggaccatgcgtatgctgttcccctcaagctttgctggaccatgcaaaggttagatcacacgttaccattataatttgtgatcaagagacactccttttgtt

SEQ ID NO: 67266 - DNA, 175 bp, Glycine max
  Clone ID: PAT_MRT3847_31756C.1
cccagacgtccgctgaagatgcttcatttccacagttactacatccagcttcactttcaggaatggttaaatgcatgtgtaggtattttagacactgctatagttccaagcctgtacttgaacttacaatctgagcaatacctgctgacacttgggagcacaaaattgtggaatc

SEQ ID NO: 67267 - DNA, 1829 bp, Glycine max
  Clone ID: PAT_MRT3847_31757C.1
ccacgcgtccgcgaataaatgcatgtttctactttccttttcttctggcagtctctctagctagctttcttctccactctctcaaatggcccaaaatgattccaaccctactccgcctccggaaccccatgtagcggcggaacccattactgaggatttggtccaagacaaagaagaagaggatgatagtagtaagattgttattccagtcccagagagcgagtccttgtcattgaaggaggatagcaatagggtttctgattccgagaaaaatgccattgatgagctgaagaagctcctgaaagaggaattagaggacgaggaggtttccatctggggcgtccctctctttaaggatgacaggactgacgtcattctcctcaagtttctcagagctcgtgagctcaaagtgaaggacgcccttgtcatgtttcaaaacactctccgatggaggaaggacttcaacatcgacgcccttctggatgaagatctgggcgaccacttggagaaggttgtcttcatgcacggacacggcagagagggccatcccgtctgttacaacgtctacggcgagttccagaacaaggacctctaccacaaggccttctcctctcaggataatcgaaacaagtttctccgatggcgtattcagttgttggagcgcagtattcggcacctcgacttcactccttcctccggcatcaacaccattttccaagtcaatgacctcaaaaactcccctggccctgctaaacgtgagcttcgccttgccaccaaacaagctttgcagttgcttcaggacaactatcccgaatttgttgccaaacaggtttttatcaacgtcccatggtggtatcttgctttctataccatgatcaatcccttcttgacttcgaggaccaaaagcaaatttgtctttgctggaccatccaagtcccccgatactcttttcaagtatatttctcctgagcaagtgcccgttcagtatggtggcctcagtgtagatttctgtgactgcaaccccgatttcactatgtctgatcctgtcaccgaaattcctataaagcctaccactaagcaaactgtggaaattgctatttatgagaagtgcattattgtttgggagctgcgcgtggtgggctgggaggttagctacaatgctgaattcaagcctgatgttgaagatgcatatacggttatcatacagaaggccacaaagatgtcccccaccgatgaaccagttgtttccaatagctttaaagttgttgaactgggaaaattgttgctcaccatagacaatcctaccttgaaaaaaaagaggcttctttacaggttcaagatcaaaccctactctgattgagagaaaataacctctggtggtggttttgggtacatgaaggaaattgaacttgaagagtaagaaatatgcatgtcatcatttgttcggtccatttttcatctatagttttggtcgtgagttgtttgcagattgtctttctctgtctttgttgtttgttgtgttgtatgtaacactttattgctagtctaaattgttcttttattttctggtgatgaacaatgttgggagtagcaaatggaattaaaattggagttggttttggaaattacatttattctcagaattacggatcacattgatgagtgaaccaaaccaacaacatgtagaaagccttgttatgaaaagtttcaatgtaaaaatttgttcttgtacttatccaactcggagtttggtccaattataatcattttgaatgtcatagatatgtaatacaaaaggaatgaatgagaagtatgcctgatttcttatc

SEQ ID NO: 67268 - DNA, 112 bp, Glycine max
  Clone ID: PAT_MRT3847_31758C.1
attcagtacaatagctatagctactacatattttactactacaggagttcttgccgcaaccgaggccgctgcttcatgctatcaatcactcgcttaccataatcatccacga

SEQ ID NO: 67269 - DNA, 329 bp, Glycine max
  Clone ID: PAT_MRT3847_31759C.1
ggctcgagataaacggtgagagccatttatttttctcttctctactcctgaaaaaatatggatttgttgtaagataaatggaattataaggcgggtgcgcacacgcgtgtgtacgtacatgcacaagattatgtatagacatgacgtaatttctagtacatacacacacgtgtgtacgtacacacgagcaccaaagaatgtatggacactacaaaagtatgtatggacaagacgtaatttctaatacatacatacaaagtgcagttggtacgtaaaggttagtaatgcagagctgtgaatgatggcatttatggattaataaagggggc

SEQ ID NO: 67270 - DNA, 188 bp, Glycine max
  Clone ID: PAT_MRT3847_3175C.1
caaacagcaccacctaagtgagtaactactctccatggaggtctcagacgacgtcgacgaccaacacgttattctgctttgcactaacactgatccgatcgaaacaaccgaaacccttaaccacgagattctcttgtccgccacccatgtcctcgcttgggaactcccttccagttttactttttcca

SEQ ID NO: 67271 - DNA, 1305 bp, Glycine max
  Clone ID: PAT_MRT3847_31760C.1
ccacgcgtccgctttgttgcgttgtgtttcctttcgccgaaaccctcgctcgcaacttctacagaatccctttcaccatggatattgaggaggacatccgttctttacagctcgattcagcagatccaaagcaggatgttgaggctgagccaaaggctgttgaggctgagccaaaagtgaaggataaggaggttccttctgttcaagatgaagaagatgaaccagagatgacaaaaagacacttgaatgttgtttttattggtcatgttgatgctggtaagtctacaactggaggccagatacttttccttagtggtcaagttgatgagcggactatccaaaaatacgagaaagaggctaaggacaaaagtcgagaaagctggtatatggcttatataatggacacgaatgaggaggagagggtaaagggaaagacagttgaagttggaagagcacattttgagactgaaacaacaaggtttactattttggatgcacctggtcacaaaagctatgttcctaacatgattagtggtgcatctcaagctgatattggagtgttggttatttctgctcggaagggagagtttgaaactggatacgagagaggtggacaaactcgtgaacatgtccagcttgcaaaaacgctgggtgtgtctaagcttcttgttgtcgtcaataaaatggatgagcctacagtgcaatggtcgaaagaaaggtatgatgaaattgagtcgaagatggttccatttctaaagcaatctggatacaacgtaaaaaaagatgtcttgtttttaccaatttctggtctaatgggtgcaaacatgaaaacaagagtggataaaagtgtttgtccatggtggaacgggccttgcttatttgaggcacttgacgctattgaagttccactgcgagatcccaaaggtcctttcaggatgcctattattgacaaattcaaagacatgggaactgttgttatgggcaaagttgaatctggcagtgttcgtgagggagattccttgttggtcatgccaaataaggatcaagtgaaagttgttgccatctttattgatgaagatcgtgttaaacgtgctggacctggtgaaaatttacggattagattatctggtgttgaagatgaagacattttatctgggtttgttctatctagtgttgctaatccaataccagcagttactgagtttgttgctcagttggtgatccttgaactgctagacaatgctatttttactgctgggtacaaggctgttctgcacatccactctgtggttgaggaatgtgaga

SEQ ID NO: 67272 - DNA, 199 bp, Glycine max
  Clone ID: PAT_MRT3847_31761C.1
cttgtcgatgcctgagcaaggtggagaacaaggactgaaatacgtagtgtgtaagacacaccacaatgccgagagcagctacattaaagatgggtttatggcagtcccttcggaggtactgtccaattcttacaaccttggacagaggcaagtgcgtcagctaaagtatcaaggaaactccgacgctttggtcaaccca

SEQ ID NO: 67273 - DNA, 706 bp, Glycine max
  Clone ID: PAT_MRT3847_31762C.1
ggaggcgaaagggtcatagggtactgttgtggttagggattcgaattttgattatcgaatcgcaaaattctgaatcaatcaatcagtaattagagccattaacgactgcaatggtctgcgagaagcgtgagaagaaattatcgaaggtgatagtaccagacaaatggaaagaaggggccagcaatactaccgagggtggtggccgcaagatcaacgagaacaagcttctctccaagaaaaacaggtccttttaacttaatctctagctttacatactttgataatttctttttttcttaattttaaaattgggtataagaattaagaagcataacttggctctgtcacctgtgtattttataattagctgataacatgttaaagcgatcatttctagttccatagcagagcctttggaatgtaaatgacttgacagttgacacttgcttgatataacagagattttggaaaaaaataatgtctctttgcattgtggaaatttattttcatgctgttctttattttcacttttgaatctcaataatattatttatttcaacatatatttcatttacgttgaagtagcactcctcccttgagaggcggagtgatcttctaaggaattggcctgggttgaacttcttaggatgagactcacctttggatcaataaggcttttgaattttttatgtttgtatatatgacc

SEQ ID NO: 67274 - DNA, 2310 bp, Glycine max
  Clone ID: PAT_MRT3847_31763C.1
cggaattcccgcgtcgacccgggcgaccatatcattggtgcttggaaaataacaggcagacagataaagagtggcttagtccaaaacctcacacgactccctttgttgcgttgtgtttcctttcgccgaaaccctcgctcgcaacttctacagaatccctttcaccatggatattgaggaggacatccgttctttacagctcgattcagcagaagacaataatggggtggtaaatgcagaggatggaaggccagaagaagttgagaaatctgataagatggatgaagatccaaagcaggatgttgaggctgagccaaaggctgttgaggctgagccaaaagtgaaggataaggaggttccttctgttcaagatgaagaagatgaaccagagatgacaaaaagacacttgaatgttgtttttattggtcatgttgatgctggtaagtctacaactggaggccagatacttttccttagtggtcaagttgatgagcggactatccaaaaatacgagaaagaggctaaggacaaaagtcgagaaagctggtatatggcttatataatggacacgaatgaggaggagagggtaaagggaaagacagttgaagttggaagagcacattttgagactgaaacaacaaggtttactattttggatgcacctggtcacaaaagctatgttcctaacatgattagtggtgcatctcaagctgatattggagtggttggttatttctgctcggaagggagagtttgaaactggatacgagagaggtggacaaactcgtgaacatgtccagcttgcaaaaacgctgggtgtgtctaagcttcttgttgtcgtcaataaaatggatgagcctacagtgcaatggtcgaaagaaaggtaggatgaaattgagtcgaagatggttccatttttaaagcaatctggatacaacgtaaaaaaagatgtcttgtttttacaaaaatcgatgtctagttgtgaccaatttctggtctaatgggtgcaaacatgaaaacaagagtggataaaagtgtttgtccatggtggaacgggccttgcttatttgaggcacttgacgctattgaagttccactgcgagatcccaaaggtcctttcaggatgcctattattgacaaaatcgaaaaagtgggatctggcagtgtgcgtgagggagaatcctggttggtcctgccaaaaaaggatccagtgaaagttgttgccatatttattgatgaagatcgtgttaaacgtgctggacctggtgaaaatttacggattagattatctggtgttgaagaagaagacatattgtctgggtttgttctatctagtgttgctaatccaataccagcagttaccgagtttgttgctcagttggtgatccttgaattgctagacaatgctatttttactgctgggtacaaggctgttctgcacatccactctgtggttgaggaatgcgagattgttgaactcttgcagcaaatcgatacaaagacaaagaagcctatgaaaaagaaagttttgtttgtgaagaatggagctgttgtagtgtgccgtgttcaggttaataactctatttgcatcgagaagttctctgattttccccagcttgggaggttcactcttcgcactgaaggaaaaactgttgctgtgggaaaagtcactggtctgtgaatttgtaacaattttgacttgaggacgggaattcctgcacaaatatagtggagtggcagctgaggcataattgacagcatcaagtttaccatatattcatttcggtatttattttgcttttacttggggtagtattcagtgaagagttatttgttgccgctggtgtccatgatgtacttgtatacggccttacaaggcctggctgcttcagtattttgcggttggctgcttccaaccgtgctactcgtgagatataatttgaaaatggatggttttaaatcaatctgccttattagctgtggaatctgatgactattttagcccaacagcggttaaacaaatttcctagttgtagttgactagcatatttaattctgatagtgatattgttttaatgaatcatgttgcttagtaaacgtgatggaattttgctgaactggaaatttgaaagttgggttcaccggcctgtttatgatttgataataaatttatttgtcaagacagacaacttatgttgagggaaataaacaaaaatacaaaatattaaaattatccttaaataaaaaacaaattatatacttttaaataatcaataattatctatttataactataaaatgggggggcgg

SEQ ID NO: 67275 - DNA, 526 bp, Glycine max
  Clone ID: PAT_MRT3847_31764C.1
aaatattcatttcagtgaagctgaatgctataagatcgataacaagaacaacaaagtttattgccgtgctagtaaagacaaaaagttgggtggccaagaagacttttccattgattatgattacctggtaatagctatgggaggccgttctaataccttcaacacacctggtgttcaagagcatgcccatttcttgaaggaagtggatgaagctctaaaaattcgtcattcagtggttgacctttttgaaagagctagccttccttctttaccagtggaagagaagaaaaaacttctgagttttgtagtagttggtggtggtccaactggggtagagtttgctgctgagcttcatgactttgtacttgaggatatggcgaagctatatccttcccttaaagactatgtgaagattactctcctggaggcaggcgatcatatcttaaacatgtttgacaagagaattacagagattgctgaacacaagtttgctagagatggcattgactgtgatgttgggatctat

SEQ ID NO: 67276 - DNA, 432 bp, Glycine max
  unsure (1)..(432): unsure at all n locations
  Clone ID: PAT_MRT3847_31765C.1
ggaaaaacattttagcttttcattttttttttaaactacaggcccctttttaatcgatcaaacaagaagggagaacatttttttttttttttctaaaaactatttactaccatttatttacctatgacggcaaaaatccaagagttttttcctcccctcgacaatctcataaaaaaaatcatcaagctggcaaacaatgttctcagccccagatctgagcaccccaaaacacaccctaacactttccactttttccttaacaccaccctccgcctcctcaaattcccctttaagttcctccacagccaccctagccctcctaaactcgaaaagaaaaatccccggcccgggggcgccgngcatttccggggccaccctttgccttagcctcgccgccgatcccaggaacatcctccccccctggtaccctcc

SEQ ID NO: 67277 - DNA, 264 bp, Glycine max
  Clone ID: PAT_MRT3847_31766C.1
cttcccatcttaatcccacctatgtcagcccgctctcttaattggccttgctctcccaatggttataaactgatctcagctatcggtgaaggcagtctaggaactgtttggaaagcaaaagtcaaggaaggaaaatatgaaggcacatttgttgccatcaagaaaatcaatttggaaaaatgtgctgataacaaaatcgaagacatcagaaagtcgattcttctcgctaatcttttacaacaccccaatatcctcagctcaaaa

SEQ ID NO: 67278 - DNA, 514 bp, Glycine max
  Clone ID: PAT_MRT3847_31767C.1
aaaaaccagctcttattaaaggagcccttaacattatatatatcggaggaaaaaggggcccaaaaggggtcatttataaggccgcaggcaaaaaagggcctttaacaaattaacggcaattttaagggcccaaactggttcaggaaaccccggccggccgggggggcattatttgctctgcactaaaaaggggctacccggaactattcaaaaagctagggctacctcacccggtttatatatatatataagggcggggggaaaacttccaggagctttaatttccagcatatcatcaaacaagggggagagcagggggggcttgacaaaaaaatgggggggggccatcaaaagctttgagatttacggggaaaaaattcctggcgtatgattgggaaggaagggacccccacaggggtcccgacaacaaaatggaggggggggggggggccctctcagggtcagctatcttagcccgcagataaatatgggggggtttgcagctcaatttcct

SEQ ID NO: 67279 - DNA, 166 bp, Glycine max
  Clone ID: PAT_MRT3847_31768C.1
acaaacaaaacaatgaccttcacttcttacctcaacaaattcctcttaccttctgacttcatactatatgcttaccaacaatttaatgaatatcaacataatttcagacctgctacaaaatcactcatacctaaaattgatacctatacacatcaactgcatactc

SEQ ID NO: 67280 - DNA, 159 bp, Glycine max
  Clone ID: PAT_MRT3847_31769C.1
ggtcaatgggtggtcaagatggcccatggcctaggatagtaatctccattgcactttggaggggtattattctaaggtctgcccaagaggcagagcctacatcataatttgtgatagtgggggcctgcgtccgcgcggtcccttttaaaaaaaaaaaaa

SEQ ID NO: 67281 - DNA, 552 bp, Glycine max
  Clone ID: PAT_MRT3847_3176C.1
gggaaaatttgaatggaaatatgggtatccctatttggcatgcattcttaattttagtcagacatgggccctgtattgccttgtacggttttattctgtcacaaaagataagttggagccgatcaaaccattggcaaaatttctgacttttaagtcaatcgtcttcctgacatggtggcaaggtgtggctgttgcatttcttttttccatgggagcatttaaagggtcattggctcaagagctgaaaacacgtatacaagactatatcatctgtatagagatgggcgttgctgctgttgtgcacctttatgtctttcctgcagtaccttacaaaagaggagagaggtgtgtccgtaatgtagctgtgatgaccgactatgcatcactaggatcacctcctgatcctgccgaggttcaagattctgaacgctcaactagaatgcggctgggtagacatgatgacagagaaaggcgtatgaagttaacccataatgtttcgtgaagtgggttcttggaagatggtgaaaattatttgtcgattgacatgaaatt

SEQ ID NO: 67282 - DNA, 528 bp, Glycine max
  Clone ID: PAT_MRT3847_31770C.1
ggtgcattaattgcaactgcatattgaattttattttcttatttgttttttttaatgctaataatactagtgaaaaacataaataagtgaatttgtgtgctaacacatattttgcatctaagtcacattcaaggataaactactattcataacaaaacaagggagaacatgaattatttccaaattttagaggatcaactggagagtggagagatgcaatagttatgaagccatattctgaactaagtagggagaacagatcctatattttgtaaccttaccagaatatgttctcatgcttcattatggtccactatttgaaagatcatcttatcagctgttcagatctcatgcatttcacccttgttataacattttagagagcctttcttttgtggtggagactttcaatagtttttggtgaattcttatgggcagggtttgggaagcaaataaagtattgcttttccccaaagcaaggggccgatacaaaaaaaacgtgtgaaaaggggaaatttcttaaaagca

SEQ ID NO: 67283 - DNA, 447 bp, Glycine max
  Clone ID: PAT_MRT3847_31771C.1
ctttttccgggactggtcacccaagtcttggggcccggctgtgtggtttggaggagaaccctctcctccggcatttcaacattgacgcatccaacctggttgactttatctgcctcctcatggaggctttctaaccatgtctatgctacctacttctgcataagcctctccctgagcggcccctctttgctggggatgactctttatcggatcggatcatcgccgtccaccgactcaatcccccatctacgaaccggtcttagaggtctctcttctgcagctgcattatggaactgtactgtttgaccacgtattgtgttgagttgctcttttgtctataccttcaacagtgattgtataagtttatgctggaacaggctgacttcttacctgccgtgagggccaactagctcttccctgccgggtgtcatgagttatctttagctt

SEQ ID NO: 67284 - DNA, 748 bp, Glycine max
  unsure (1)..(748): unsure at all n locations
  Clone ID: PAT_MRT3847_31772C.1
acacctgagccctatgcttgtgaaccatctaatttacaaagtatcctcccaccaaagaattggatataaaactgagagatgaagaagcaagaaggttcaattattcagttattgcccttgacaagttctagactgattttttgtcatggtgcccattaaaactttttttttttttaccattctcaggcagaaagctctaagtggaaaaactaatgccgttgatggtgccagaagggttagagtacgcgagcgaggtttggccattccaggccctgaagccaatgtagagatccaaaataacgtagatgtatgccagaagtttccattatatttgtcttgtctccatatttacttggaactcactttaattatgctgttgttgagtttaacagtctgttccttctgcacacccaagttcatgcacacaatttttatgtatatcctaagtccaatttactctatgtacttgcaccaatattcatgatatcttggcagttgcatgataaaagaattctatcaattataaaactctctggaacttgagacctagattctttagcatcatcttttgcttaggattctctgatcttaggctagcttggcttttaaaaaatattttaggtgttgtattgtcacttcattttatagaactttgtgatgagttttgtttgatctaatggtccatgtcatggttatccaagctttccacttcagcattgncttatttgttttcttgagcacattacat

SEQ ID NO: 67285 - DNA, 316 bp, Glycine max
  Clone ID: PAT_MRT3847_31773C.1
ggccgaaagaaagaccataaaatacttgatgttcatggctcaaacaaaacttaatgttttttatttaagtctttttaccggggttttaaaccgcctttacctctttccaagatagaaaaagagccgcccccctattttaatacggtccccccctttaccccacaagtttcctgagctgcggaatttgaaataaaccttccattttggtcccccctgggggggataaaaaaattattttcaaaaaccaaagggtgcctttatgtttcttccttttttaaacctcaaatcgaaatttccccttttgtcgttttttgca

SEQ ID NO: 67286 - DNA, 462 bp, Glycine max
  Clone ID: PAT_MRT3847_31774C.1
cttatttttttttttttttattatctttttttttttaatgaatggattcttcagggggggggatcataacgggacataaccacaacatatggccgcacttgtgctgcaaaacatactacctctatgacctcaagtcaaaggttgtagttttaggcagtttccttgcttctaatcgagattatttggtgatggtctaagatgtccatatgcatcacttttctatcctaatcctcaatcacaggctggatgtgtcaatccttcggtgcatcctctactactatagtcatctcgtgcattaaatcgcatgggttggttttattaaatctatatttgaggcataaaaggatagagttagggttcagtcttaagtcacgaattttagacagatatatcactttgtgtttcttttccttataacaagggcaagggatgggaaagggttatacacaaaatttgaaaata

SEQ ID NO: 67287 - DNA, 608 bp, Glycine max
  Clone ID: PAT_MRT3847_31775C.1
atctctctcttcttcttcttcgatttctcttcgcgaccgttttgatccaacccgcgatctgatcttactccttcatctctcaaagcttgtatctttgtgtgccatacgctttgacaattggcaatcgatgacattagtaaccagttaacttcaatgcttgctctagtagtatatagctcctctattttcttcaatatctctcatcttcctttcacatctcattaattaattttctcatctttctcctcttcacaagtaacaataacaaaggtgagagatgacgcaaattctacttcatgggaccctccaagccaccatctatgagctggataggctcaatgctggaagtgggcaattttttcagcaagctgaagcaaaacatcgaggagactattggtattgggaaaggagttactaaactctatgcaaccattgatctggacaaagcaagagtgggaaggaccagaatcatataaaatgaacatactaatcccaaatggtatgagtcttttcacatttactgtgctcatatggcttcaaatattatattcacagtgaaagatgacaatcctattggggcaaccttaattggaagagcatatgtcccc

SEQ ID NO: 67288 - DNA, 262 bp, Glycine max
  Clone ID: PAT_MRT3847_31776C.1
ctgagttatatccatgtgaatatgtgataattccaggaccagctcacgcggtacataactgttcaaaagggtaagccgatattagtgaaagtcagatctttaatattgagcaaaagttgctcgtttttttaaaaaaaaaatttcactagagatgcttaggaacatctatattggtgaaaataacctaagttgcataagtttttattttataattttttgaggcataccatggcacgtttatttattttatataatttaagca

SEQ ID NO: 67289 - DNA, 262 bp, Glycine max
  Clone ID: PAT_MRT3847_31777C.1
tgatctatctacattcaatggtggtaccaactttgttactccttgttagaccaagggtgcaaagtcttagtgcttctattattgctcatatcgtccttatttacaccattgtctccgcgaccgatgccagactgaacgccagtgattcgctcgtccccattttggcacctcttgcctattgagttcgcgatgttcttggttcacttggcaacgatcgctatcagtgacactggtatcaaggctgctcgtattcttagtgctg

SEQ ID NO: 67290 - DNA, 1147 bp, Glycine max
  Clone ID: PAT_MRT3847_31778C.1
agaaatcttcctacaaaaagttatcaaagtggttacaagcaaaatccacctctggcttgatatcagtgaaagaagataagcacaaagaggaagtaatgctattttcagtaaaccgaaaacatgctgattattcatcctttaagcctgaaaaaaggcgagtggagaaaagtgagcaacacagtgttcagtctgccaatgaaattcgttcatccaaaactcttgaagtggctgaaatctacaagccaagtgtacatgtcaattccatattttcacctgtaggagctgacacggggaaactttttagtgcttctgaagctactgatattgtcttcaaatatgttgaaaaagaaaatcttgtgaaaccaacaaataaatccgttgtggttcttgatgtaatattatgtgatgcactgttcaagggggctattaaaaaaggaacaacatatcctacagaaattcacaagaaggatttaggatcaacatttgtgagccgtatgcagcctcatcatgttgtgacaagagggaatgaatctgttgtttgtaaaggtgcacttaaaacaattcagttattgacagaacgtcggcaaggcaacaagaaggtaaccaaactctctggtatggaatcttttcttatagatgctgaagcattggcatcagaactgcagaagaagtttgcttgcagtaccactgttgcagaactaccaggtaagaaagggaatgaagttttggttcaaggaggagtcatcgatgatttagctaggcatttgattgatcaatatggagttccaaagagatacattgaagttcttgataaaaccaagaaatgagctacatacaattttattttatttttttatgtaacgctgatgggagtgctttacttagatgccgagagatgtgtatgttctgtacttttcgtacactggtttattgttgggttgaggtgaatataaaaggagtgcgataagaatataaatggacaaagcacaaatgctcttttcaattcaaaaaattgttgttttcaagtatattgttaaactctgaatggaggaaatccccattccgatcagttgaggcagcattcacactttctcactatacgaaagcaatagactctatgatgcatggatacgatgcgtcatttctt

SEQ ID NO: 67291 - DNA, 426 bp, Glycine max
  Clone ID: PAT_MRT3847_31779C.1
ggaacatggctcgtctgctctcaattctgacataccgctcctgacttatggggaggaggatcctgagatatcttctgatagacatgcgctaattgatccgccttatgtgaatcatgggagcagagtccatccaatgccttataccgatccgtctattccattgcaacccagacccatggtccccaagaaagacattgctgtgtatgggtatggaagtgtggcttggaaagaccgcatggaagattggaaaaaaagacagagtgacaaacttcaggtggtgaagcatgaagggagcaatgatggaaattttggtgatgattttgaggaccccgatttacctatgatggatgaaggcaggcagccactttctcggaagctacctatcccttaaagcaagaaatatccttacagaatgattataatact

SEQ ID NO: 67292 - DNA, 155 bp, Glycine max
  Clone ID: PAT_MRT3847_3177C.1
gaaatacagaaattgagaaggggtatataccaaatgtatagtactataaaatccatgaagaggggctaaccaaacccccgaaaccttccttctttttaaaacaaatgtgccaaaacaacctccaaaaaggccaattattccgggaatcgacccct

SEQ ID NO: 67293 - DNA, 651 bp, Glycine max
  Clone ID: PAT_MRT3847_31780C.1
tagggatggacacgaatataggttgggaagccatgatcggaaacgagagaggggtttgatttgaggctttcagtttctgctttaagagatggctcggactagtctttcttctatatcaataccttttcttattttgctgatatttgcctttactttctttgcacagcttgctccagttagtgcagatccgagaatgagaaaattgggtcccgggccaagtccacctcctccaccagggcgtaaccatggactttcacctttttttccaaatgctcctcctcctccactcatttaaactaatttttaactgtcaggcgattgatgttcttcagagtcaaataaaaaagttgttgcattattccgtgatggactatttgcaaataaaaaagttgttgtgcgatgagttgatattgcgagtgttagtgtatgctgggccatgaagaagggtgggacatttttgtccattgagctttctatgggatgtgcaggaagcaaaataaagaggtgcaggaagcaattaccaataattgattgagattttgtatacagaagccacatttgtaataacccaaattattcactcctctatgactcactagagctttgagagcgttttttttttttttttttacaatttctcttcatttctta

SEQ ID NO: 67294 - DNA, 429 bp, Glycine max
  Clone ID: PAT_MRT3847_31781C.1
cccacgcgtccgaaactctaagcgtatctgctagtacaactacaaatacaaattacaaaacctaagcaaaagcaactttacttagcatagttttcaagttattccatgcttcatctcataaccccgaggcagattattattatcactatataataatacgagagggaaaaaaaatcgaagaggcttgctctgatttcagcgtctacagttttgggcagagaacattaatttttttatattttattttttactttttcctttttctggatttttctgactttctccgtcctcaaattttaaaaacgaagacggagaatcgagaaaggtgattgcgcagaacttagaagtttaattgctttttacacagtttttgtcttctgagttctcaagaatcggtaatggaatagacgaacaagtgagagtgtgagt

SEQ ID NO: 67295 - DNA, 381 bp, Glycine max
  Clone ID: PAT_MRT3847_31782C.1
accatacctaaatgttgtggcatgatgggagggaggatggagatttaaagatcgaagtaaaatacatgaggtgtgctgaagcaattcatcacacgccatatttggtttcagttttatattttttctattaacattttatctcatctttgcaaggcgacatcaactgaagcattgtccacgacaaaattagaaggcattatatttagatttttattttatttttttattttaatgatggggttaggggcgaaaatggcgatgctgattgtcgtagggggcgtattatcctttgatgggtcaagatgtttgggtttgatttattgagacatgcatattggaaaattttgcactgaattataattatattaattatatcgtgcc

SEQ ID NO: 67296 - DNA, 302 bp, Glycine max
  Clone ID: PAT_MRT3847_31783C.1
aattcggctcgagcgagaactgccgagagcatgtattccgtctgccgtcgatcgtttcagaaggtagatacttcagccgctatttagggttaggacttaacactgctcaaagtaaaccaaatcccgacattcgcacatcatcgaaagcagatggagatcagcagcagctctactacatctgcctctcctgatttcattttatgatgtttatcccaggcagcggcatttcgagagttatctctgacggacaatagttcatgcatgcaaagaagtcattgtggatggataacgcatagagctag

SEQ ID NO: 67297 - DNA, 1175 bp, Glycine max
  Clone ID: PAT_MRT3847_31784C.1
acaacacaatcaaattaagttcaatataaatataaataaaatcttaacaattagtcaattacatcaataaaataaacaatgtcttaacaaaacaaaatccaagcaataaatctaaaatatgaaacttaaacatcttcaacaacaaatgatttcatatttgaagtaataaaattcaaatgcggacaactcacgagccaaacccgcatagttcacaagttgagcggacggcccaaaaatatgacataaccatggaccgtttaaaaaaattggtccgttacccgcgcggactacaggccccgtggatcagtccatggacctgaatccgtttacccacccctatctttcaagctctaatttactagcactcacattgtgatgattatgaaattgactgcaaaatttgaaagaatcacaacctactaaaatacataatttcccaatttatgaaggcatgaaaatccgagtatgacttcgcctttctcaacttttggtaacatgacccttttccttttgaagtaaatcagaccttttggttgctccacattctaatctctaagcacgttcggaggttgctcctttgcctttctcaacttccttgagattcttactaagtttccgtgctctaggaggcaattggagatccaaggagcgcagagacatgttaacgatctcggcgacggcaacgtctctaacatcggcggcgtcgctggtcaaatcctcgtaggcagcctcgaaggccttttcccagaaccgcggcaacctgatcctacggttattcgtgtacacgtcccacatgtgcctcaccagcttctcccgctcctcgatttcgaggacgtcgaggtggtcgtgaagggacgcgtgggagaaagtgttgagggtgccggaccagcggagagagactgtgccggtgaacatggaccagaatgccaagagcagcatggcagctagtgcccagaatttgtagcttcctcttccgaataaacctgaatcagaggcttcctttttcgcaatagggaatgtctccttatccttcatttctttgatttggttgggtttggaagtaaaattttgattatcttttttctatctgattgtgcgtgggcttcatcggagtggagtgtgtttttcaagcgtgcgtcggcccacgcgtccgcccacgcgtccgcggacgctcg

SEQ ID NO: 67298 - DNA, 2026 bp, Glycine max
  Clone ID: PAT_MRT3847_31785C.1
ccacgcgtccgagcacagcagcatgtggaagttgaggtcagctcgaatctcttatctgctttgtagattgagtcaaatcaaagtaagcgaagcccagattaagcaccaccgtttctgtcacagtcaagtgtcgtcggtattgcctcctccatctaatttgcaacaccaacagacacagtgtgatcctcctcacaccgcagttcccaggaattatattggggaaaatgtatctagaaaagataagaacaaatatctttacactacgcttcttgaactcaacgacagtaaggaggctgtttatggtgctcttgatgcctgggttgcatgggagcaaaacttccccatcgcctcattgaaaacaatattgatttctcttgagaaggaccagcagtggcatagggttgtgcaggtaattaaatggatgctgagcaaaggacaggggatgacaatgggcacatatggtcaactgatacgagctttagatatggaccatagagtcgaagaagctcagaaattctgggaaatcaaaattggttctgatttgcattcagttccttggcaattgtgtcatctcatgatatctgtttattatcgaaacaacatgctccaagatcttgttaagcttttcaagggactggaagcttttgatcgaaaacctcgggataaatctatcattcagaaagtggcaaatgcatatgaggtgttaggcttagttaaagagaaagagagggtactggaaaaatataaccatctcttcacagagacaggaccaaccaagagacataaaaggaactcatttgaggcaaagaaacatgtgcatcctacaaaagagaaaaggcatcagaagcaatctagaaaggcctcatctgaggaaaagtacaagtcagagcaaaaagatccaaaattggatattggacatatctagtgcactcttttctgatgccatgatggtattatgatatgatagtagaccaaagtgcctccatgttcaagtattctgctaacctatgtgggaagcccatcaaggctagaagtgcagcttgatgaaacggaaccaaatgtatgtcacctatggacgtcaaaagctgtttcaaatttatataccaaaagaaaaatgcttttccaagtttgctgcacggtttatagatttagttattggactacggaagtccagaggccatcatgtgtgaagtgtgaacatttttattcagtgaacatttgtcctaaattaactcaaatccttgttatgtaattatttattttccaatcttttagacaagctaccaatccatgctatgtaactattatttaaagggaaacattgaaaaacaaaataactagtcatcacattgccatcacatgtttattaaaagaatttgtaaaagcgtaatgaacatatgataatatttacttttttaaaaatatcaaattttctattcttcaatagtgcgaagttgatttataatcattattcttaacaaagaatccgggagcagagcgcatgatttacatggcttaagacagacctgtcacaaacatcaagtgagataattggcaaaatcctgttgagcttgcagaaccaagtcatcatcgtcccactcgtcacggtaagactcgggtcgcagcaccctgttcttagatgtggctatatacatttgccttctccattcttcaatagaaggaaccccacactgatccgcaatccagttattgtagtcccactgaagaatgcccatattatgagtgtaacgcttaggagtgccagaggcttcaagtgatgagtaaaaagcatcaacgtctttagccatctcctctttcgaaggaagtgcaatgcgattagacaagattccagctatccacttgctctgcagttcgaacaaggagaagggagcaaccttccaaggcaacccaacaaaagaaagccatggagccaaggctggtgggaaaacatgtttgtagagtggtcctacacggttgtcatctacagtcacctccccatttgtttcagggaggggaaatcatactt

SEQ ID NO: 67299 - DNA, 139 bp, Glycine max
  Clone ID: PAT_MRT3847_31786C.1
gcactgcgttatagcaggaccaacttcatgaccacactgctcgctattgctgttcgctcttgctgctcgtgggacttcggtaaccttgacaatgtccagttcggtatccgtaccttggccatttggtcagtctcatgat

SEQ ID NO: 67300 - DNA, 1590 bp, Glycine max
  Clone ID: PAT_MRT3847_31787C.1
atcacccccgttgttattctgtttcaacaccctcgttatctcctcctccatttatccccttcatttctctctctctctgcaccgaaaaatggcttccctcacgtgctcccccacctcgctacagctccgattggccttagccgcccctaaattcccacacaccccgcacctgcgaatgcgcaacttcaagctcaaccgagttcgccctctacgcgccgcgcaagacggcgggcccgggcccgggcccaaactcgacggcttctcgggctggtccgacaccgacgccgagcagcggcccaacaacgccccaaagaaggagtcatatggaggagttgggggagtaggagtggctggagtgcttctactttcagggcttacctttgctgccttatctcttggcaaacaaactggttccagacctgagcaacacatgaagcccttgacttcacagcaggaggaacttttgtcttctgatgaccataataatgaaataactgaacaagggaatgttgacaacacggtggaacaaggaaatggtaaaatggaaggagacgtgcccaactatgatgatgctaagccactacaccttaatactgagcaacatgatgaaataaccagttcaagtggaagtgtctccgctgagggaaatgagccttcctttgaagagcggagcattctacaccatgatactgagcagcatgatgaaataaccacatcaagtggaagtgtctctgctgagggaaatgagccatcctttgaagagcggaatgttcctggaaatgacctgtttgaagaatcatctatttcatcatcagtcaatactttggtagatgagcaggttacaaatgataattatgaggttgatgaagttaaatctaaatctccaaattctggatcctttttctctgttcccggcattcccgccccatcagtagtttctgcatctgtacaagtgcttcctggaaaggttttggttcctgcagctgttgatcaagttcagggccaagcactagcagcactgcaagttttaaaggtcattgagccggctcgagaacctagtgatttatgtacacgtcgtgaatatgctcgctggttggtttctgctagcagtgctctttcaaggagcacagtttcaaaagtgtatcctgccatgtacatagacaatgctactgagcttgcatttgatgatgtcactcccgaggaccctgatttttcttccattcaaggcttggcagaagctggacttattgaaagcaggctttcaagacgtgatatacagttgtttggtgatggagatgatagcccatttcacttctcccctgaaagtcctttatcacgtcaagatcttgtcagctggaaaatggccctgcagaaaagacagcttccggaagctgacagaaaggtgctgtaccaactttctggttttatagacactgataagatacatcctaatgcatgccctgccttagtagctgatctgtctgctggggagcaaggaataatagctcttgcatttggttatacaagagtgttccagccagataaaccagtgacaaaagcccaagcagctatggctttgctactggagat

SEQ ID NO: 67301 - DNA, 250 bp, Glycine max
  Clone ID: PAT_MRT3847_31788C.1
atctgaaaacaaaccattagtgaatgaacgggtctcctctagacaatttaacctgtacatatactctcaatgaatgcctcctttgtgagggctgttcccgagcgactgtgaggcattcaataatctccacagggcgttgactattccgagccgtaccgacataccattttgagaatgcctgaacccaggggcttgtatagcgatcctgcgactgttcttgactcacactttacgaacgaaaaacattgat

SEQ ID NO: 67302 - DNA, 362 bp, Glycine max
  Clone ID: PAT_MRT3847_31789C.1
ttggaactccgtctcgtgcaaggctcaactctttacacttatatcttatactcaaaaggatctaatgatccacactaactgaccctgaccctccgccggcttttccctccaggccatggactccaaccacaggccatcgctgacctttactcctccgacccgagggcttagacctcataccaatacacccgcatgataatgcatggggcatgaacgctcaacaacataggccaagatgcttatagtgagctggcaatgacctacatgatcaccatcaaggtcctcgaccgcagcgacactgtcactttcatgacctaaagccatacacaagacaaggattttgattctgaaatgaagccgat

SEQ ID NO: 67303 - DNA, 491 bp, Glycine max
  unsure (1)..(491): unsure at all n locations
  Clone ID: PAT_MRT3847_3178C.1
ctcgagagtaaattctttttggtattttatttattcantccttcaaaaccttaaattatacacaaccanaccctcatatggttggatttacaacgctaataggtggccaaacaacacatcaaacaattccaacctaacattccaaaccaatctaacattcctactcacatttatactatgcaacctctaatttattcccatcaaccatctcaccatcaacttcatcttgaccacatacggcgccaacagactacacatattcccacttataaaatcctccaatactataaacaacatattatgcaaaccagaatctcaaataactctactctaccccaccacaccatagtacataatattttactattagtgcatcctccgtttcaccaacctatacttcacccccaccatcgtcttaccaacatcaaacttaatttactgcaacaacatctctgcctccgactctcacattttcaatttcacaaaaccca

SEQ ID NO: 67304 - DNA, 627 bp, Glycine max
  Clone ID: PAT_MRT3847_31790C.1
aatttctaaacacctagacaagatggagtcaaagtctttcttcttgtcattctactactattccaggctttcgcagaagcttcatcaatcactggagtagccaattctcttgagattacaaatgaaggaagtcaaactgtggctctgaataatgaacatatccacctgcacaaaatcaattgcaaccatgaatgttctcgaagatgcagtaaagcatcaaaaaggaagagatgcaaacgagcatgcaagtcatgttgccacacatgccactgcgtaccccctgggacctatggtcataaggaggtttgcccatgctatgcacgcctcaagactcatggggataagcctaaatgcccttgaaattattattgacgggaagtatttttaatatgaaaaagggcattcaaatctatattatttgaatgttcgaattaattgaatgtataaggaataaaatccactacttgacattttagtatggaccatatattcattttgtatttgatgacagatgtgttttgtttgtttcctgtttatcgatatataaagaagagaatcggttattccgtaaaaaaaaaaaaaaaaaaaaaactaaaaataataataaatataaatataaaaataata

SEQ ID NO: 67305 - DNA, 1225 bp, Glycine max
  unsure (1)..(1225): unsure at all n locations
  Clone ID: PAT_MRT3847_31791C.1
gtctaaccacgcgtccgatagcaaaaacccctccgatggtgttgacgatgccactaaacatatatctgttcaagaagatttacaggatgtgtcagcttttgataacaagagacgtgcccaactatgatgatgctaagccactacaccttaatactgagcagcatgatgaaataaccagttcaagtggaagtgtctccgctgagggaaatgagccttcctttgaagagcggagcattcctggaaatgacctgtttgaaaaatcatctatttcaacatcagtcaatactttggtagatgagcaggttacaaatgataattatgaggttgatgaagttaaatctgaatctccaaattctggatcctttttctctgttcccggcattcccgccccattagtagtttctacagctgtacaagtgcttcctggaaaggttttggttcctgcagcttttgatcaagctcaggtcaaaactccttgtgcattgctagtttcaaaggtcattgagcctgatgatcaacctagtgatttatgtacacgtcgtgaatatgctcgctggttggtttctgctagcagtgctctttcaaggtggaaagttgtttctaccttctgcatatgtgaataacaaaatgtgttacatgtgtaatatttggcattacgtgtgcctttctggtaacttgttaggagcacagtttcaaaagtgtatcctgccatgtatatagacaatgctactgagcttgcatttgatgatgtcactcccgaggaccctgatttttcttccattcaaggcttggcagaagctggacttattgaaagcaggctttcaagacgtgatatanncagttgtttggtgaatggagatgatagcccattttacttctcccctgaaagtcctttatcacgtcaagatcttgtcagctggaaaatggccctgcagaaaagacagcttccggaagctgacagcaaggtgctgtaccaactnttctggttttatagacactgataagatacatcctaatgcatgccctgccttagtagctgatctgtctgctggggagcagggaataatagctcttgcatttggttatacaagattgttccagccagataaaccagtaacaaaagcccaagcagctatggctcttgctactggagatgcttncgaaatagttagtgaagagcttgcacgcattgaagcagaatctattgctganaatgctgttgctg

SEQ ID NO: 67306 - DNA, 517 bp, Glycine max
  Clone ID: PAT_MRT3847_31792C.1
ccggatttccttgttggtcccacgcgtcctctactcgtccggttggctaaaataatgattgtagatggttgttttctgttggaactccttatcaggcttggtgattttatatgtaacaatagtagtagttatgcaaatgaccctatactgaaaaatgaggagaagatggtgtctgttctgaatgatatcacattgcttgagaaccaaattccattcattgttctcaagaagttgtataggaaggtctttcccgatggcagtgacatcaacaactaccaccgggttgctgatatcgtttgcaaagcttttggttacactgaggtgaaaaaccctgtccacatacttcacttgatgcacttgtccacagtggaacagactcagcaagagggtaaacgcgtgaagcaagagctattgcgctgcgccacgaggcttcaagctgcacgagttacaattgaagctgcaaacaccactgctggtcatgagttggtggaattggttcaattttgagataagtttc

SEQ ID NO: 67307 - DNA, 303 bp, Glycine max
  unsure (1)..(303): unsure at all n locations
  Clone ID: PAT_MRT3847_31793C.1
nangtcgcangcacgcgtacgtaanctcggaattctgctcgaggnaccttccacacancatacgantngnnntgnnnntanctccgccgtaccatgnncggnagcacnnnccaaccagcnnnaccntancnncgacaacgcgtcnacancgccgtacngntgctancacngctanancgcgtatnccntnganatgtcgcgaanctccncgacancgnctnnggtgagtgcaanaacggttcanngaattnatncacannncangcatgccnnngnntncngcnnatcccccgtnnncaacnt

SEQ ID NO: 67308 - DNA, 1192 bp, Glycine max
  Clone ID: PAT_MRT3847_31794C.1
ggctcgagcaatcatgtgtgaaattatgaaacatcatccatcatgtccatggtgataaattggtgatagcagcttttccaaagggtttctacaaacccaacatgacaggctgttgcttccctgtgaccttccatcggtccggtagtcgcagggtcagcttcaggcttgttagaagttcctcttccggttcatctaaacatcggggaagagagagtcataaagggcctctggttgtttgctttggggagatgatgatcaatttggtccctacagtagcaagagtgtcccttgcagatgcaactgcctataagaaattcccttctggagccactgccaatgttgctgttggaatttgtagactaggaggctcagcagctttcattggcaaggtgggaaatgatgaatttggacatctgttatctgatattctgaaacaaaatggtgttgacaattctggcctgctctttgatgatcatgcaaggacagcgttgggattttatgctcttaagagtaatggagaacctgaattcatgttttaccgaaatccaagttctgatgtgctccttcgtcctgatgaaattgatatggacctcataaagaaggccacaatatttcattatggttcagtaagtttgattaaggaaccttgtaggtcagctcatcttgctgcaatgaatgctgctaaagtgtctggctgcttcctttcttatgccccaaatttggcattaatactatggccatcaaaggaggctgcaagaaggaacattatgaccattggtgaggtttcgcagggtatattgaggattaagcaaagacgcctcatgaaagaagacaccatgtcatttgcaagcagcaacttctcccgaagtgtgagtcaaatagaggagcaacaggttgaattaagtaaaataacccccatgaaccacagggaaatggggtgaactcattcatatgttttggggcgattttttttttcggtagtcctttggtaaccaaggaagtttgtagaaaaaaccatcgatgtcactagctgtaaaatgtgagtcaagatgtacagataagggcagatcccatgctactctgaagcatgaatgatcaattctgtcttgtgagtttttgtagctaaacaacacataaattctatgcatgaccaccaaccatttataccaatagggggagaaagagagaaaaa

SEQ ID NO: 67309 - DNA, 521 bp, Glycine max
  Clone ID: PAT_MRT3847_31795C.1
gcggccgctgcgacataagggggtattcattcttttattgtgttaataaaccacccacagatattaactcttacttcatagtaacttcccttttccttaagatactaccaaaacagcaaatcaaaaccaacccctaaagttagatctcctcctggctccttctgtatccacgcaaaccatcttagcactcttgatgaagaagaggaagctgtaaaacaaagatggatcctcctgacccaggaccacaagctcccctttcatcaagaatcctgcctaacagagaaggagccctttagataacaagtgtgcaaagcttgaaaaagagcaaagggcgcgtacctacataaggaggaccgtgtgtgacactgtttatttgcgtggccctactacaggccatttctgatgagaataagaagatgaataataacaacacaaaggcccggtgacgcccacgcataaaaagggtagactaaacctctctccttatgagaacctgcctcttttttttttttcaatcctag

SEQ ID NO: 67310 - DNA, 1265 bp, Glycine max
  Clone ID: PAT_MRT3847_31796C.1
ccacgccgtccgaacagcaacactttagtgagagagagaattcttcctccgtttaccgttcttccagtttgagagagagagagagagagagagagagagggtgagttggtgtgtggtttgtggaaataggaagagggtgtttttttgttgttgttgctttgaagtagtgggaacaaagagaaacaaaccccattatatcattgccacacttttctctccatttcaatactattgctgggatttggtgcaagaagatacaggattttgctcgatcctctgaagaatccctcacctttgagcctactatgacatggaaaggactttttaactggaaatcttttgtgtgatgctatgtcatcttgagacatggagagggttgcagagccgacggtacttcctcgaaccttgcctatcctggttgaggtatcgaactcgcgcacagctgctgctagagagtccggtcagagactaaatcgccaggaggtttcgggtgttggtgggatttcgctgagagaagtgaatcaattgtccagaacaagggatgtgcgtgttcctattacacatctggcctccctcagagaagtggctcagttgacgaatgcacggatatatttggtgcaagaagatacaggatttgatgctcgatcctctgaagaatccctcacctttgagcctactatggcatggaaaggaaatggctcttcaccagaagaagctaaagaattcgtgcccgatgttgagacattgaaggggagcaatgattcatttgaggatggaggtttgagtttatttgctggtgctagtcatccccctgacctgttgatacagatctaatgagactggtttgtgtaccgataggtcaaaacaaatctgaagctggatgcttaattaagaacttgcccacacagggccctttcctggaagatctctctgttcgtgttcctgcaaagaaaccaagtcatctgttctttgctctgaagaaagacttgttgaagaactaaccggtatagggaccttatcatttttgggtcctcggacatcacacaatactgagaactctattcttcttgtggatgctggggaaaaagaatgtgtttgtgatgcttctttgcctgctagtggcattgtcagtccacttagtagtattgatagtatctgggattggcactgctatgagcattgctaatacatgtgctagtacatatcggactgatgcagtgactattgatggcatgcttagcttagacaggacctgtggcagtgct

SEQ ID NO: 67311 - DNA, 301 bp, Glycine max
  Clone ID: PAT_MRT3847_31797C.1
aaaaccaccaaaaaaagaaattaatttttaatcttgggcaaggaactggggatatttgattatacaacctatttgggggaattaaaacaacattaaactagaaaaataaaactctaaaattttaccgttttttttggggagggacccaaaccctttttttttagcacgttaaaatcaatcacaattttgttaaatccaccattttttaatttttcaattattggtaaaggtctctttattggcacctttcatattaaaaaaaatggtagttggtttcatgcttttcctccccaattttttt

SEQ ID NO: 67312 - DNA, 362 bp, Glycine max
  Clone ID: PAT_MRT3847_31798C.1
acaacggggagcgttccaaagcagagaagccaacacccacgcgcgagagggagggagagagaaggaaagcccgggcgcgacggggaaggagccaagccaggagccgaatgccccggacgtggcaaagacacaaggggatcatttcacagcaaccatcattggtggaacgggctcccgcaccgacgcctaagaaccggtccggatatcaccagacacaaagccacttggccgcatttaccaccacgctgatggggccgcaaagcccgggtcaatgccacccaacgtgacagctgcagataacggtgcagctacagctggaacactttcagggcaactcttaccttggctggcccggcgacaaa

SEQ ID NO: 67313 - DNA, 385 bp, Glycine max
  Clone ID: PAT_MRT3847_31799C.1
tctacgcgtccgttaataattgaacaaaaaaaatagaatatttaaaaaaaaaacgaaaacaaatactgatgggtggagctttatattttttggggggtccggttctgatggtccttgtcttctgcctcattctttggggctgcctcccttttttttggtgtcccgtctgctcaatcccggggccttggctttcccgcgtgttgtctgggattccccttgttttcccctgcctcattttccttggggtcctttccccgttgggccggccggctgttttcgcccttggcccgtgccgtgggcccttcacgactgttgggccctctgctgggaggttgtgtcgcgccctgtgcttttctttttaacccgccgggtgcgtgtttttctc

SEQ ID NO: 67314 - DNA, 1061 bp, Glycine max
  Clone ID: PAT_MRT3847_3179C.1
ttttccaaactgtcgggaccgaaagatgttcctatgcctgagcggggcgaagccagaggaaactctggtggaggcccgcagcgatactgacgtgcaaatcgttcgtctgacttgggtataggggcgaaagactaatcgaaccgtctagtagctggttccctccgaagtggcatgctggtcattactcattacagtaaccgtaatttaattctagctaatttgctaaagtaccagcaaaatgtatcctacagtagatgaacatgatgaggtatatgcagctcatcatagacatccagggtatgttctaccagttgtggtgccaccaaattatggccctcctcaaattccatcctatgctcctccatacatcagcaacagtgttagtgtaaggggtcctgtgattaggacacagcgatggtcaactggtctgtgccgttgtactgatgatcctggaaactgtttggtcacttgcttctgcccctgtgttacatttggattgatagcagagatagtagataaaggcaatacaacttgcacttatgctggggctatttatgggaccctactagctctgagtgggcttgcatgcttgtattcttgctattataggtccaaactgagggtacaatatgacttaccagaggctccatgtatggactgtttagttcatttctgctgtgaaacatgtgctctatgtcaggagtatagggagcttaaaaaccgtggatttgacttgagcatagggtgggaagccaacatggaaagacaaaggcaaggagctatagtatcaccagtaatgtcacaatctatgacaagatgaaaagtgaaacctctttaggagcattttggtctaccctgagatcgagctgttggttggtgctgttaatttcaactccttgtggtgtgtgtctatatatatatatatatatatatatatatatatatatatatatatatatatatatattctgtttgctgcttcgtttgagttttgttttatcaggagttggtttgagtgtttttattattcaaaagaaatgaacatttgtgtcaaattatct

SEQ ID NO: 67315 - DNA, 305 bp, Glycine max
  Clone ID: PAT_MRT3847_317C.1
ggctcgagagtgaaggtgctttgtctataaatgaatccatttacacgtatctcgtcaaacgaagccttgaacttgaactatcgggtcttcttcttggctctctctgtttaggattttgttgacagaccgatatggaattgaatgtacctctgcaatccttgggctgatattacgcacaccatactctagtgcttttgggaagagtgacagtaacgtgacaacaagctgatcttctgtctcccaagataggaacttggcccgggttcggtggccattaaatctggatatgatattggattttccag

SEQ ID NO: 67316 - DNA, 157 bp, Glycine max
  Clone ID: PAT_MRT3847_31800C.1
agcaaaaatccaattggggaaggaaaggaaggtcaaaaagttactggtatcaatcggtggatgacagaccgatccctggtggcaatcgaaatggccctcaaaacacacatggttggattaatgaatgatgataccatacatccttacctccccatat

SEQ ID NO: 67317 - DNA, 464 bp, Glycine max
  Clone ID: PAT_MRT3847_31801C.1
tttagaagaacacacgacattaatgacagtgtcattatctgattttttgcaacctctaaagatacttctttggaagtcgacatcatgggacctatccttagacagacatgtcgaaggtcggttgttacaaccagaaggcacatctttatcgctgatgtcacccaagacatgatcgaacataccaaccctttgcagctttaaattttttgtttggataaaaaaaaattgttcctgttcagcgtccaaatggcccacgaaaccaatggcagatcaccgtgcacaatggtctgccatctgttgcagatccatggtttcaatacctgtgtgaaaataatttaatggcaggagatgaagtcatgttcttctttaggtttgataaacatgtctgggaggtcatatttaggaaacaagttatgtgggatgaagacctcccggtttgaatcaccatgcctaaagttcatgac

SEQ ID NO: 67318 - DNA, 285 bp, Glycine max
  unsure (1)..(285): unsure at all n locations
  Clone ID: PAT_MRT3847_31802C.1
ccantatantccattctctctgtgtatttccctacctctncccttcaagatgcagatcttcgtcaagaccctcaccggcaagaccatcacccttgaggtggnaagctctgacaccatcgacaangtcaangncaagatccaggacaaggaaggaatccccncggaccancaacgtntcatttncgccggnaagcnanttgagganggncgtacnctngntgactanaacatncagnaggngtgtactcttcacctngtcctccgtctcngtngtggcatncagat

SEQ ID NO: 67319 - DNA, 250 bp, Glycine max
  Clone ID: PAT_MRT3847_31803C.1
tccacgcgttcgatcgcaagcatatttaaagaatcccaggcgaggagaaagatgggggggttggagcacgatgtgtcttatttagctaacatattcccttagagacagacaattttggacggcggttcatagccaagactacggcaaggactaccagtagccggctcctgctctcttagttgatcctaccgagattacgttatggtctttttacttagcattgattgcattttttgtggtcacttttatg

SEQ ID NO: 67320 - DNA, 435 bp, Glycine max
  unsure (1)..(435): unsure at all n locations
  Clone ID: PAT_MRT3847_31804C.1
tctgtggaataatccgcaatatcctatcaactaatttcctgagttctgtgcacattgtacgatgtaccttcaagcaagagttaccatcaataaaatgcttagttccatccaatatacaaagtagttgttaaaaagggtaatattttttacaccccaatagtgcaaatactcaataatatccctcatttctttcagttttcttcctgtggtatcatatcacctattacatttatcatttctctctttgctatttctttctctatcagggtatagactnttatcagggtgtccacggaacattttccgttgaaaaagcacccacatatcctaaacgtaaaagccaagctacaagtcagttgctttntttttctaggtcaaacaaataaaaggagaaaaaaaaaagaacaaaggcagttaatttgaaaagaacaactt

SEQ ID NO: 67321 - DNA, 250 bp, Glycine max
  Clone ID: PAT_MRT3847_31805C.1
tttacgtgtagtcacccgcatcaccggtcgtcgcgcctttaaccgtaaaacacacgcccttgggtcctgatctctagactgttcctttgtcttggggccatctggctgactgtgactacaggcagcgctctcaacgctttgaacagcccacttacttagtgtacaattgcctctttcattataagactactacctgatcactctacgctgtgaatgaatacctcgtggcacatcaaaactccatctgtta

SEQ ID NO: 67322 - DNA, 303 bp, Glycine max
  Clone ID: PAT_MRT3847_31806C.1
gagagagagagagagagagagagagagagagagagagagagagagagagagagagagagagagagagagagagagagagagagagagagagagagagagagagaggactctcttcccttatcgtttattctaaacaaaactccacttatagtttcctagtcattatttgtatttacttttatagttatttgaataagaaagatgaagcgttataaaatttgtaattacttttataatttatttgtattcacctatacatatgacttttattggcttaagaaaaatatatggtgatgtgcaaaa

SEQ ID NO: 67323 - DNA, 788 bp, Glycine max
  Clone ID: PAT_MRT3847_31807C.1
cttcactttagagtttagagtttagagagagagagagagactcctttgcgtttcatttccttccaacttccacaccctttctctctcttctctgcgtccgcgcacttagcttccttcatttcaattcccaattcctctcttcttctgcgccaaaggcagcagcacaaggagatcattcattccctgtgtctgcgatggagttcgtgggaaaaaccgttaggaaagaggtgaagggggttgggtttatcactggaacagtgaaatcctacgacccttcctctggttttttcgagatcgtttacgatgatggtgattctgaggaattggagtcttcccaggtggcttctctacttcaatttcaaccggggagtgtcaaggccaagccccgggttggtcggaaacctaagaagcggcgccgccgcgttgagcagaagccggatgctgaagccagttcaggtaatgttggcgataatttggtggaggagggtagtgcttttaggggggatttggatggaaatgtttcttctgctagtggtggggatttggatttagggtgtgaggggattgatagaaccattgatgttgatgttgggaatggagggaattctattggcaatgttaatgggagtgtgaaggaaaacgggggtggagaggaaattggttttgaggatggtttgaacaagagtgtctctgctaatggtagttgtgtcaaggatgggcttgatttgaatgctaggcttaatctcaatgaggattttaatctgaatgatgcttgtagtttacctctt

SEQ ID NO: 67324 - DNA, 516 bp, Glycine max
  Clone ID: PAT_MRT3847_31808C.1
tttttcttgaacttcatctggggttttgtgtttttcttatacagggtattcattcatgaaaactccaaaaaaaaaacgtttaatttgattcatttcgttttggttattgcctgcttctatatggtgaattttggattaattttattgttggctctaattatttgttagttattggtggattatttggtttgaatttttttcctacacgtattcttgtgtttttctgtctcggatactcatccaacaaaaagtaaagtttgattggttcatttcattttggttaagtgggcaattttgctttggtgatatatagttgaatgcttttttggtgataatgtcatgtgggttgattttggttggttctattttcttcttagaaatatctttttcaattgatacattatttctcgattgtctttgtctttacgtgatccaaaatcgtgtttgtgttttcttttaatatatttaatcaatatatatgtttacaatttaaatttattgcgttcaatcctttga

SEQ ID NO: 67325 - DNA, 202 bp, Glycine max
  unsure (1)..(202): unsure at all n locations
  Clone ID: PAT_MRT3847_31809C.1
aaaaaatggttaacaactanaaactanaagatagtaaacccaattcttttattctttttntttcttccaaaagtgagtttgtcatgacatgtcttagtgttgacaaatttaattaatgccatgaaaattaatcataattgatgtccttaattccaaaaaatatgtgcttgaaacagcattatacaatcttttgttatcaatt

SEQ ID NO: 67326 - DNA, 656 bp, Glycine max
  Clone ID: PAT_MRT3847_3180C.1
agtgttagtgtaaggggccctgtgatcaggacaaatcgatggtcaaccaatttgtgccattgtactgaggatcctggaaactgtttggtcacttgcttctgcccctgtgttacatttggattgatagcagagatagtagataaaggcaatacaccttgcacttatgctggggctatttatgggacgctactggctcttagcgggctttcatgcttgtattcttgctattataggtccaaactgagggcacaatatgacttaccagaggctccatgtatggattgtttagttcatttctgctgtgaaacatgtgctctatgtcaggagtatagagagcttaaaaaccgtggatttgacttgagcatagggtgggaagccaacatggaaagacaaagacaaggagctatagtatcaccagtaatgtcccaatctatgacaagatgaaaagtgaaacctctttaggatccttttggtcactaccttgagatggagctgttggttaattggtgctgttaatttcaactccttgtggtgtatataatctgtttgatgcttggtttgagttttttttatcaggatttggtttgagtgtttttattattcaagagaaatgcacatttgtctaaaattatcgaatccgcagttatcaggcctta

SEQ ID NO: 67327 - DNA, 801 bp, Glycine max
  unsure (1)..(801): unsure at all n locations
  Clone ID: PAT_MRT3847_31810C.1
aataaaactgtaagtaaggttttttcaaccgcactcaaagtatgtgtcttctaacttttaagtatgtcgaatgcatttgatgtagcaacttttaaccatttcctatttgctgcaggatagtcattactaataatgctttttgctctagcaactttaaccattttctattttgaaagagtctcaattgttgcttatgaactaatgttgctgttcggaaatgtgattgcaggtatatagtttattaaataatgttgaagttgtatcaccatagatcgtcttatcaagtgtaaatctgcaccgacgattatgctgcttttgttcttttccctccttttttgggaatctccaactagctagttgtagtgctatagccaaaaatacaataaatttgatggagtgcacgagtaatgtgcatttctcctccatcttccactctctctatgttggtcacttggtcttggaactggatttccttacccaaatttcccttccaatttaggcaataaaatcttgtgtaaaacttggctttcttttgtgctgtgtctgaattgtccaagtggatgatggatccttcccactgaatcattttgttcacaattttgttttttgttatggatttacagtagatgatattttttcctgccaatattgctgtagttatggtatgagattgttgagggattgaatcatttgagtgtggatgtgtactattgaatagccttaaaatgcatattttgctgtagtgccnaaaaaaaaaaaaaaaaaaaaaaaaccacgcggccgctctagaggatccnagct

SEQ ID NO: 67328 - DNA, 1664 bp, Glycine max
  unsure (1)..(1664): unsure at all n locations
  Clone ID: PAT_MRT3847_31811C.1
ggccggaaggtgttttgagccccactcaaagtatgtgccttctaacttttaagtgtggcgtatgcttttggtgtancatcttttatccattcgctatttgctgcgggatagtcgttactaataatgctttttgctctagcagctttaaccattttctattttgaaagagtctcaattggtgcttatgaactaatgttgctgttcggaatgatgccgttgaactattgaagtcggtgcgggcccgagcttcttcccacttcctccgccgccaccgccaccattcttaacaccgatggcggatccgaaagcctactcaatagtagtgcttcttcacttcttccctcctccgccaccgccaccacaactaccaccacggatggcggcgacggcgacggcggaagcgaaaacctactggtgccacgagtgcgacatgagcgtgtccctgactctcccaccctcccctctcctctgccctcactgccacacccacttccttgaactcatggactccccaagcctctcccaagaaaacgacgccgaatcatccctcttcgatgtcgtttttcaagacgcactcttactcctcaaccctaaccctaaccctaaccctaagccacttccctccaaaccccttcccctcccctccctctacgtcaccccctccctcctctcctccctcgaccccaacggcgtcgttctctgcgccgtctgcaaagaccaaattaccctcaacgcccaagccaaacaattgccctgccaacacctctaccactccgattgcatcacgccgtggatagaactcaactcgtcgtgtccgctatgcaggtttcggttggaggaagaagaggaggaaggtggtgacgccgacgctgacgccgacgccgttatgacggagatcaggagggagatcattgcgaggctgacggagctgacggaggaggatttctacgggctcaggaccacgctcagccacattgcctcgcgccacgcgctcatcgaagagaaccagaatcatcgcgcgcagattggcgagcctcgcggcggcggcggtggaggtggcggcgattcggcttgctgataacgacgtttacaataaggtatatagtttattaaataatgttgaagttgtatcaccatagatcgtcttatcaagtgtaaatctgcaccgacgattatgctgcttttgttcttttccctccttttttgggaatctccaactagctagttgtagtgctatagccaaaaatacaataaatttgatggagtgcacgagtaatgtgcatttctcctccatcttccactctctctatgttggtcacttggtcttggaactggatttccttacccaaatttcccttccaatttaggcaataaaatcttgtgtaaaacttggctttcttttgtgctgtgtctgaattgtccaagtggatgatggatccttcccactgaatcattttgttcacaattttgttttttgttatggatttacagtagatgatattttttcctgccaatattgctgtagttatggtatgagattgttgagggattgaatcatttgagtgtggatgtgtactattgaatagccttaaaatgcatattttgttgtggtgtgtaagttttgttctgatctttactcatgtaatgaatgcagctggttaatt

SEQ ID NO: 67329 - DNA, 824 bp, Glycine max
  Clone ID: PAT_MRT3847_31812C.1
cttagacaagatgtggagtactttgatttgcatatatgtaacgagcacctcagagatcatcactagcgtctccagcgacagcctcgtaattcaagatgttcttagtgaaaagtatgcattttacttcctggtggtgggggctgctatatgggcttcttcatgggcagagatttcgtgttggatatggagcggggatcggcaatcaaccacgatgatactccagtatctggttttggaagcaagccaggaaggcagcgaaaaaaaaaaaaaaccatgctctattagtttgaagaaagtgggtctccgaatctcactgttgtttgtttctcaagaaaaagggtgtgtctaaaaatgggtagggatcagaaaagtgtggtagctatggttggccaggagagaaaaacagacaagaaaaatgggtctcttgggtttaggtccattttcatgcatgccgatggcaaagatttgtttcttatggttttaggtactattggggcagttggggaaggcttgaccacccctctagtgttgtatatcagtagccgcatgatgaataacattggaagttcctctaacatggatggaaacactttcatccatagcatcaataagggtcaatttttcatatctctctttatacacacaagaaattattatatagtcccatatcatcatataatcttaattaatctctatgtcatgtggaaattaattgaaaccatagatacgcggtgatctaaagctttcttttaacttttcatcacatggaaagaacttaacacgaaagagaagcttactgattactttgttagctttcttggctt

SEQ ID NO: 67330 - DNA, 364 bp, Glycine max
  Clone ID: PAT_MRT3847_31813C.1
tgatatcccaatttacagatggcttatagtggacaaaatacatcggctgtgctggatgcgactgatataattgtgaacttacacctgctatccacgcttaatgaaaatccagtactggacgacggcaaacataaatcattgtactccgacattggtttgattatcctcctgatgcaacctcatattggtaaaggttgacttgaacctggtctcgagtacgatatcaatatcagatcttttgcaaataatggcctctaattggcggctgattttgtgtttgagctttatcacgggaggctttttctcctgaagggtgtttttcaagaatgtcttgttaaaatttgtggttgaatatttatatgat

SEQ ID NO: 67331 - DNA, 261 bp, Glycine max
  unsure (1)..(261): unsure at all n locations
  Clone ID: PAT_MRT3847_31814C.1
caaccatgcgctccaagaatgaagcgctgcagaccgcccacgcgcgcgcagaagccgacctcgccaactttgaggcccgtgaagctgtgctgaagaagaaggatgtcgaacgtaaganagttctggcagagaagcncaaggccgagcgccagaaccgccagcagatgatgggcgagcgcgagaagaaccgacagcgcaantncaacgcgcaaggcggcagggagtgggnttttgaaaaagaggagggcttctcaggtactg

SEQ ID NO: 67332 - DNA, 1013 bp, Glycine max
  Clone ID: PAT_MRT3847_31815C.1
ccacgcgtccgcaaacaggaggtccttcccctcctcacatgacatgttccgcccgcctcaacaacacaataaacctctccacatgctattaagaattcccccaataaccctgaccctagctattctggtcccaatgagttttgccccaccacactttagcccacactgattcctataaattcatcagaatgtcgcaacaacttagttcaaggcccgtccgcaaaagctggttttggaagcaagccaagaaggcagcgaaaaaaaaaaaaaaccatgctctattagtttgaagaaagtgggtctccgaatctcactgttgtttgtttctcaagaaaaagggtgtgtctaaaaatgggtagggatcagaaaagtgtggtagctatggttggccaggagagaaaaacaaacaagaaaaatgggtctcttgggtttaggtccattttcatgcatgccgatggcaaagatttgtttcttatggttttaggtactattggggcagttggggaaggcttgaccacccctctagtgttgtatatcagtagccgcatgatgaataacattggaagttcctctaacatggatggaaacactttcatccatagcatcaataagaatgcagtgtcttggttatatttggctggtgcctcttttgcggtttgcttcctcgagggttattgttggacaagaacaagcgaaagacaagcggcgagaatgagatgcaggtatctgaaagcagtactcagacaagatgtagagtacttcgatttgcatatatgtaacgagcacctcagagatcatcactagcgtctccagcgacagcctcgtaattcaagatgttcttagtgaaaaggttccgaatttcttgatgaacatgtcattgttcgtcgggagctacatagcggcgtttgcaatgttgtggaggctggccattgtggggtttcctttcgtcgttcttctcgtgatcccgggtttaatttacggcaagaccttgattgggttgtctagtaaactca

SEQ ID NO: 67333 - DNA, 798 bp, Glycine max
  unsure (1)..(798): unsure at all n locations
  Clone ID: PAT_MRT3847_31816C.1
tcctccgcaccagtctcttcccgctccttccccccttctttctctgccctcccccccttctttctctcctctcgatctctcaagaaccagagagatcatagttagttgatttcaattctttctctgaaaaccaaaacaagaggaattaaagttcattcatttaaaaaagaaagtaaagataaaaataacatgcacaacaacatgagcactctctctttcttcatccttctttcaacactactaactgttggttacggtggtcgcgacttaggagataaaaacccgttcaccccgaaggcttacgtggcacgttactgggacaaacacgtccgcaacaacttgccaaagccatcgtttcttctctcaaaagcatccccaatgagcgcttccgacacggcgtcgttcgccaagctcgccgccaccaacaaactctccacgcggctgccggagttctgctccgccgcgcacctcctctgcttcccggaggtccgtcccagcctcgagaaacacaccgaagatgccggtttccaaacctacaacgacggccagaacttcaccaactacggcaccgacttcgccggcggaatcgacaccttcaaaaactactccaacgaaatctccaccaccccggtgaacgacttccgccgctacaaccgcggggcccccggccaccaagagcgattctcggcctacgccagcgattccaacgtcgccgaccagagcttcagnacctacggcaccaacgccgcccgtggctcctcgcgagttcaaaaactattccagcaactctcacgtacc

SEQ ID NO: 67334 - DNA, 146 bp, Glycine max
  Clone ID: PAT_MRT3847_31817C.1
tcttcctttcgttttggactatattattaccgagtatttgattttcgtacattgatatcgtgtaatatggactcaaaatacgcggttcagcgtaggaatgaacgaacaatttatgatgagaataaaagattagagagggggatatg

SEQ ID NO: 67335 - DNA, 314 bp, Glycine max
  Clone ID: PAT_MRT3847_31818C.1
ctacggaggcttttgaaaccatttttaaattgcaaataccattctgatccaagaatagatgctttacaaagttaacaacaccaaccaatttttaccaaaccagctcttaaaaacaacaggggccaacattttttttttcaccaatcacatgaaagagtccttcaaattgcagggatgtccaataacttaagtcccccaccacatttaacatttttattagagccccaataaaatgtgggggaaacttggatcatttcatgatgaaattgggcataacttcatttcagggcatggaacttaaacttcaaatttta

SEQ ID NO: 67336 - DNA, 239 bp, Glycine max
  unsure (1)..(239): unsure at all n locations
  Clone ID: PAT_MRT3847_31819C.1
gattgantcacttatgatgtgatgattaattactataaatatcacgagttctgaatataatatgtcatctttctaaattttttacaccagtggcaactagacttcgaaatccagtcatatctctttcttttatatatataaanaaaattgggggttgcaggaaatttgtacttaatcatctaactgtttgcatttcctcacctttttctcttctgaaccattgtgtttgtttgtngctg

SEQ ID NO: 67337 - DNA, 526 bp, Glycine max
  unsure (1)..(526): unsure at all n locations
  Clone ID: PAT_MRT3847_3181C.1
gggggcagattagaattggagattgatagaaacgctaggctatcgatctcgtgtgagtaggaaacacataatatctattctagttccatatcagctatgggttagaacttgaagcgaaattctacacgactgtttgttatcctgaaattgtcgattctttcctacatgatagggataaaaaaaaaataggttcaaaataaaatgccactttgaagctttatctacaatgtgcttgtgatagctggagatccagcattttctgaatgtttatgtgagaattacaaatgaacgtgtttcaaccaagatgataattacccaaggattgcccgaccaaatatcaaccaaaagcttaatcctgatatacctgagaacaatccacattcttaccacgcagaatattgacagctgtgcgtcatttgattcgaaagaaacttggaaagtgtatactagacaatataaatcgtttgagaaataaacgcatgtcgtcggtagcagatctcttacangatcaatttggattggccct

SEQ ID NO: 67338 - DNA, 343 bp, Glycine max
  Clone ID: PAT_MRT3847_31820C.1
gtatctatgttgttttaatcataaaaaaactaataatactgataacatgcatacatgaacttgaagcctctcaatgaagaaagaggttgtcccgaaatctgagggtaaatccttccttaatacatctatgcttattggtatgcttccctctttcaatatatatggatttactggtaatgcaaatgttttattttattgtcagccattcggatcataagcaagtgcaactatcactgtagaatcctgggaaacagtttcatgcatgcatgttatcagtattattagtttttctgctgttttaaaacatgacaatgtatatcagtatctatgttgttttaatcat

SEQ ID NO: 67339 - DNA, 440 bp, Glycine max
  Clone ID: PAT_MRT3847_31821C.1
ctgacacttgggccgcactgactgtgcctgcggaaaatgcaggggcgcgcacgaagaagacttcgttatccgcggtgggaaggaaatgggtgtcgtggaaaacacggtctgcacggagtggtagaacggctccctcatgctaaggaccaagctggttgctgaacgcctggggtggcaaaactgcgtgccgggctacaaagtacaagggcattaccttggggactgggctggacggcactacttctgatggttagccgcgacagggacttctttcttaagtggcatgcattgacaagggcacgctacaaaaggttgggaagacatggtcgaaactcatgaacgactggtgaacatgctcatttcaccatctgtggcgaggtagactatggagaatctatggaccctgctgatatgaggactcacgctacactccaatttga

SEQ ID NO: 67340 - DNA, 293 bp, Glycine max
  Clone ID: PAT_MRT3847_31822C.1
aaaaaaaaaaacccttttttggttaaattacccccaaaggggctttgggattgtttcccgaaaaatcctcctaacagaactggttttttgacccccccaaattgtttcccccaattggtttgcccccgaaaaaattgttaccggggggaaatagttcttctctgcacccggaaggggggtggggaaaacccccccaggaaaaaagcccccggacacccttttaattggggggggacttaaaacgggttgggggccaaaagcatacccctccctagccccccccttaaggaaaa

SEQ ID NO: 67341 - DNA, 425 bp, Glycine max
  Clone ID: PAT_MRT3847_31823C.1
tttccgcgtccggttcaaatacccctaatgggacaggcggaaattctgtcttctagtgcaagtgattccagaactgcaaaggcgagcaaaaattgcctgcctcaagctactgcaatgcatgtgggagctatagaaattatcattgctagccacacacgtcctgactgctacatagttggagcattgcttttggtggagacctatcataccaatgctgtaaatgcagttcgcagtatttatgttgcgcctttcataggcggaaggcccattcgggtgcaagcacaagctggtgacaatcttgcattagggcccccactctactatcatggttcagacttcgagggccgccaccaatggtgatgttgttcaaggaaaagatctcgcaatggtgaacgctatatgtcgcatgtgctgctgttggcttg

SEQ ID NO: 67342 - DNA, 195 bp, Glycine max
  Clone ID: PAT_MRT3847_31824C.1
aactcagctttcaacattttccttttcactttatgtgtgagcctactcgtttctcaatgagaagcacttatccctgcaaagcgcacttttgctctttggcgtcccttgctccttgttatcaccttctgctatgctacttctactgctgctgcaacaactcaagctttagtgaatgagaatctgccactgacaaac

SEQ ID NO: 67343 - DNA, 732 bp, Glycine max
  Clone ID: PAT_MRT3847_31825C.1
cataattccagtagagatgggcacggacaatgaagggacattcacaacgcaccaggtgagtggtggtgacccaaacaacaacaacaacaacagcaacattgttcatccattggaggtaggatcagatggtggaggcctcaccaactgggctgcgctggaccgtttagttgcatctcaactcaatggccaaaccgatgcctctaggcaactaggatgtgctttcaacgaccccaccatgtattgcaccagcgtcgaccatcatgatcttcatcatcaaatccccaccctccgatcctcatcaacgtccgctaacacacgaccttcccctgcacccgcattcatcaaccccccaacacaggacttcaccagcgagattgacctttggaacttcacccgatccacgtcctcactgttggcatcctccgaaccactgtgccacgtgtccaacacgtcagtgtagcgagatcaataaaataataatataaaaaaaaatatctcaagtcccccttttcctccatgttcgattgttaaatatagaaataattagcccctacttcatcacatatcatgtttaatatttaatattagttcttcttctctcaaaaatcagaggattattattacagactttaaatgtgataattctcctagtatacatttttactttaattagcttatttcgactcaaaaaaataatattccattgacaattgtctcttgtaaatcttaatt

SEQ ID NO: 67344 - DNA, 378 bp, Glycine max
  Clone ID: PAT_MRT3847_31826C.1
atccttttttttttttcttgttttgttttgctcaccgacggaaaaactcttctacaccaccggaataaactccatgagctgccctctacatgaaccgggagatacgctttcttgccggctccaataaagggcttgatgggcccagggggggcacgtgcgtggttggcggccggggcggacccggaccagtgagcttggctggcgggggtggaggcggtacggggcgcgtcagaaggggggatggcctccaaaaaccatcttgctaggaccggtcgccaagctcgagcggaagtggtgtcaccatttatgatccctcgatcaagacgacggggactgttgccctcgccaccgctgagacggacactttgacgaccttgg

SEQ ID NO: 67345 - DNA, 398 bp, Glycine max
  unsure (1)..(398): unsure at all n locations
  Clone ID: PAT_MRT3847_31827C.1
cattgcgtaatgaaggtagtacaaatctcttgctcttgactgttatccaagactctatgctaggctgaccttgaatgtcatgggtaggtcctaaagggcaaccttcaagaaaccctatatacatggccagatcaggatgaagttcagcatggacagtcatcgcctcccgaggtcacgaaagtaacaacgtacggcgagaatcaggtcacatatatgtctgacaaggttcgtaatgttatcctaactagttgaagcatctctaatgtatccaagctgggactgcataagatccacaacccatatccgaatgagccaaccatctccctacaccgaaaggtacaagcccttcacttcagctgnagattctattctgagacttttgtctagtctattcaccc

SEQ ID NO: 67346 - DNA, 190 bp, Glycine max
  unsure (1)..(190): unsure at all n locations
  Clone ID: PAT_MRT3847_31828C.1
ggggaaagcaacaaagatcttcatcttcatcgtcaccgtcctcgtcgttgtcggcatcgtctttggnttcagcctcatgcgccgtaaccaccaccataacaacgctgccaaatgctccgatgctgcctgcnacaacatttctcctcccctcagccccattactacgcttccagctgactccaacccctat

SEQ ID NO: 67347 - DNA, 614 bp, Glycine max
  Clone ID: PAT_MRT3847_31829C.1
taccaggtgctgtacacccccacaacagcctgatagtagggacaaacaaatggctgaatactacagtacctaacgcgccaaggctaaggcacttagtggagttttggaacaagccgttaaagttattgaagttgccattagtatttttggtattgcgcaacttattaaagcgtgcgcataatgatgatactgcgctgcagacgctgatggcggctgcgaggggtcacggtccaaagctggctgggcacgccccggctgcgttgtggcacccgctgattgctgcacagcattatgatacggctgctttgaatcatgagtttagtgctaatatggagctgccaatggcgtgtaacactaacaataatttaggtccacgcaacctaggcacctcgatgttcctgaaattttaggccattgggccctcgaacaataaccgtactacgctggaactacagaaaccaaagcgcaatcgctaacaaccacttaagcagcaacgaaagcagacatcaacaaggaaaatattactgcagataatggtttgggattggtatagaaagggtgtgcgcttaggggaggagcagatacaggcagatgaggtgcgagtaaaaggtacg

SEQ ID NO: 67348 - DNA, 1261 bp, Glycine max
  Clone ID: PAT_MRT3847_3182C.1
cccggcggacggctttcaccattattttcctttctctctcactcgaaacaaaacaaaacaacacaaccggaaaaccaaaccacctctccctgctcccgccgctgttttccgccgctgtcgccgtcgttcccacctcaccgtggcggcgcgcgcgtctccgatgggaaagtacatgaagaaagcgaagccgaaaggagaactcgcgctcgtcgaatccaccaccagcaacaccaccacctcctacatgggggtccgaacccgcgccaaaaccctagcgcttcagaaatcgcacgcgcagcagcacgagctcgccgccacctccgactcctacctccagctccggagccgtcgcctccagaagcctccgattttggtccactctccgaagcgccctaagcacccgaaccctaaatccccaatccccgaacctcccaggctcggactcgcttcggagcgcgacgctaccctcaaccacaacaaggacaatactttgcatgagaatgccgagcctcaggaagcgtcgttcggggaaaatgttttggattttgaaggtagagagagaagcactagggaatccacaccttgcagtttgataagggactcggatactgtcaggactccgggttcaactaccaggcctacttgttcagctgaagcttatcgaagaacagagcatgcagctagaaggcaaatcccaacctcccgtgaaatggatgaattctttgctgaaattgaagaggctcagcaaaaaaaattcattgagaagtacaactttgatcctgtgaatgagaagccgctctcagggcgctatgaatgggaaaagttgaaaccctagaagggtaatgtagtgttccatcaagacatctttgaagtagcaggcaggcagcagggttagaatttgttgaagcggtggtggcgttatttcacttttccatcaccttctatttacttgtaaagaaagtaggactcttaaaactgtgtagactaatggtctgtaactttacagaggttgttgattacacaacaatacaaatcaaaggcctttgtctaacagatcattttaaggaagggggcaagggaagaaggggctgtagcgcgtaggattagggatcagtcaaattaggtcagtatgaggtacaggaatttacctaggttttctcttgttcttgtattttactcatcttttgtctatacttgtactgatggaacttgaacaaacttttagaaataaagacccgattcccccacctaaatttctgtc

SEQ ID NO: 67349 - DNA, 1224 bp, Glycine max
  Clone ID: PAT_MRT3847_31830C.1
taggcttgaatactggaatgggaattggcttaataattgggacaggcttgaatactggaatgggaatggccttaataattgggactggcttgggtataggcttagttactgaaataggtagaggctttttcactattggaattggtttggggatgggcttgaacactggaataggaatgggcttaacaatgggaattggttttggtataggctttgttacgggaataggtagaggctttttcaccattggtgttggctttggaattggcttaacaactggaactggattaggtaaaggctttgttactggaataggttgaggctttttcacggttgggattggctttgggataggcttgaaaaatggaataggaaatggctttgggattggcttgaacaatggtataggaaatggcttggggataggtttgaacacaggaataggaattggcttaataattggaactggcacgggcacgggcttaattaccggaataggtagaggcttttttactattgtaaatggcttggggataggcttgaacactgggataggaactggctttacagttggagttgattttggtacaggcttaattactggaataggtagtggttttttcactattggagatggttttggaattggcttaacaattggaattggctttggtataggcttcttaatcaccggagtaggaataggtttctcggctaccgggcaaggctttggctttggctttggtttttccactatgggagatggctttggtataggcataacatctggaattggcttcttaaacactgggattgggaatactggaattggaattggatttggtataggcttaatatctggaatccactttggtataggcttttggaaaactgggataggcagaggatttggtataggtgtaacaattggaaccaattttggtagaggcttaaacaacggtattggaagtgtcttttcctctattggaaatggctttgtatgtaaaggcttgccatcaatgttcacctcagttccagctgtagagtcttcattagcagttacagcagcagaattggcaaaacaaaagcaaagaagaagcagcagaggcaccctttgaaaagtgtaactcttcctcattgtgcaaataccaaggccacactactcaccaaggtatggcaatgaaagttgaaaagtgaaatatctagatcaaggcttgagatgcc

SEQ ID NO: 67350 - DNA, 305 bp, Glycine max
  unsure (1)..(305): unsure at all n locations
  Clone ID: PAT_MRT3847_31831C.1
gggggggggggagggggggggaaaggggggggggggagggggggggggggggagtgggagggggggggaggggagagggggggggggggggggggggggggggggggggggggggggggggagggggtattnccgggggggaagggtggtgtgaaggacaatcaatatgagaaagtgggggcggcgcgtggggaaattgcgtctggtgtgggattgacgttcaacaatggactgggggataagggggggggggacgacgggggcacgatggcggaagagggactgggtagggttgaggaactata

SEQ ID NO: 67351 - DNA, 426 bp, Glycine max
  Clone ID: PAT_MRT3847_31832C.1
cccacttgttcggccggtaaagcttttccaaacaagagtggttttgttgataggcttgtgttggcttacacacaagaattctttgatggaaattttccagtggattcttgggtaccaatttttgtgaattgtctttatcctgtaagtcaattaccttcagaagctggcgttgtaaatgttacatgtggtactggacgaggtggtttacccaccagtgcttggattaggactggcgttggcaagcgctcctcagatgtcaacagatggtgttgcgcaggtcttggcaatggtaagaaaaatggtttgcttactagggttggtctttctccagttgcgttactggctgttgtttttggcgttaaaaatgaaatttggagatctaacgccatttacccttggcgggcctgacattgtgggaacggttag

SEQ ID NO: 67352 - DNA, 356 bp, Glycine max
  Clone ID: PAT_MRT3847_31833C.1
gacaaatctagtgcaactttgccattgataaagttagcagatagagattgtctcaagagaaactttaagccgatgtctaatgtttcgtgggtggctcctgacgacatggcgagtttatggtcacaacttcattatgtttagtgtcataatatggcaatgcaggaagcttatgttggcaatctcctacatgtgttacgagaattgtatttgcacagtccaaatgaagctccccaattgagaaggaaagctctctctcttattgaatggctgcaaaaagctgatgtgcctaccatagcacagatcgaatagttccattctatgcagatgatgatgaatgctcctgattcaaatgataa

SEQ ID NO: 67353 - DNA, 326 bp, Glycine max
  Clone ID: PAT_MRT3847_31834C.1
aaaaaaagaccgccccgctccggaaaattttacttattctctaattatttttttttatctctcttaaaagtgcttgtttattctaacttattcttacaacataaggttttttccacatcttaataactctttatttccaaacaattagattcaacataaaaacataaactacatcaatataaatttacattactgttcaaatacaacttgacttacatatacattgcatgtcctataattatattactataaatgaaacatttcattacctacaaatatcctcataatattgaatactataaacaaaaatttgtatgatttaaaat

SEQ ID NO: 67354 - DNA, 261 bp, Glycine max
  unsure (1)..(261): unsure at all n locations
  Clone ID: PAT_MRT3847_31835C.1
cattctacatccctggctctgttccgtcgatgnngatggcgtttagggtgcgaaacnctgacctccgcnttctcattcntcgctnnnctctngtgcnacaacttcngnaaaggcttcttcgaggagcgttcgatgacngatggggaaatcgttnggnanatcatttggaaaaaagatgagaacctggtgggnagtngaaccacacctntgcccattgcntgagncncancnacntnntttcanacagtnaggananagatt

SEQ ID NO: 67355 - DNA, 1152 bp, Glycine max
  Clone ID: PAT_MRT3847_31836C.1
caaaagtatatgaacgaatacaccctttggacaaagaaagcacgaagacagagagagagagagagagacacacactaagagagtgagagagagtctgagacccccccaccacccatatttcctcaacactaattattaaaagtattgaaaaaaagttaacgaatttggagaatttcgcgaaatggaattcgaggatcaagaggagcaggaggaggagctgtgtatgggtggtggagcgggctacgatccgacccagatgaagattccggttgcggcggagccggtgaggagcagcagcagcaacggcggtggctgcggaagggcgaggtacagggagtgtttaaagaaccacgccgtcggaatcggaggccacgcgctcgacggctgcggcgagttcatggcggcggggatggagggtacgctggacgcgctgaaatgcgccgcgtgcagctgccaccgcaacttccaccgcaaggaggcggattcctccgccgtggtctccctctccggcggggacccgtactttcttccccatcatcaccaccaccaccaccctccgccgccgcagttttcggggtactaccggcatccggcggggtaccttcacatggggggacaactccgttcggcggtgggggggacgctggcgttgccgtcgacgtccggcggcggaggaactcagagcacgcgtgaggaccaggaagacatttcgaacaaccctagtgcaggaggaacagggtccaagaaacggttcagaacaaagttcacagttgaacaaaaggacaaaatgcttgaacttgctgagaaactagggtggaggattcagaaacacgacgaggctgtggtccaagccttctgcgacgaaactggtgtcaagcgtcacgttctcaaggtttggatgcataacaacaagcacaccctcggtaagaagccctagctaggaagaacaacaaaaacataaagaaaagtttccatcttgctagctaccatcttcaccaaagccaaaattgtttggtttttagggtttctttctcttttttttctattaagggctgttaattttagtgtgtcaggatgtaggtaaggttaattattgctgctggactaattttaattttcatttcagtgccaaaaatgcagtctttcattagt

SEQ ID NO: 67356 - DNA, 102 bp, Glycine max
  Clone ID: PAT_MRT3847_31837C.1
gttcgtatgctcggtattctgctcgttgatctcgagggcagcagtaccagcagcttccttcgctattggaaccaccggttccctcggccaaagaggaagctc

SEQ ID NO: 67357 - DNA, 562 bp, Glycine max
  Clone ID: PAT_MRT3847_31838C.1
caacttgaagcccagcataggtggttgcgccctgcagaaatatgtgaaattcttcgtaattatcggatgtttcaaatcacatcatgaccacctaacaggccaccgtgcattagcctttttgcaattacaatttagaagctcagcatcgatggtaacgacctgcagaaattggtgaagaaaaacgtaattatcggatgtttggtatcacatcagaagcctcataacaggaccaccaagtggttcactttctactatgcccatggagaagaaaatgaaaattttcagaggcgaagctattggatgcttgaactggatatgatgcatatagtatttgtccactacttggatgttaagtgtaacaaaaccaatattggtggaaaaacatattctgatgagagaacatcaaattccccaaagagcaagcctttgtcatctggcaccggcagtgattatcatagtattcgtccattacgtacaggttaagtgagacaaaaaagcactatgacatactgaaggtgatgagatcccatcagattcccaaaaggtaacttcttcatcgtct

SEQ ID NO: 67358 - DNA, 196 bp, Glycine max
  Clone ID: PAT_MRT3847_31839C.1
gtcagatcttgaggctcccttgcgccctaagaggaagaaggttggggtggactatttcgatcagtagcgatagatcctggatatatttgggggcgctcacatcgccttcaccatgtttttacttacatacctaggggatgtaagatctgagaggaagtcctatcgtacgcgtcagaaggagcatgatgagaatgtg

SEQ ID NO: 67359 - DNA, 1267 bp, Glycine max
  Clone ID: PAT_MRT3847_3183C.1
ccacgcgtccgatcgcattaacatttgaattctctttccttttcttgatctctccgtccatcgtcatcgtcagacccagacaaattctctaagcagatcgaatcaaagctccgatatgaccactggcgaccttctcagcatcgaacctctcgaacttaagttcttatttgagctcaagaagcagatatcatgttctcttatattgtcaaataagaccgatagctatatagctttcaaggtgaaaacaaccaatcccaagaagtattgtgttcgtccaaacaccggagtagtcatgccacaatctgcatgtgatgttattgttaccatgcaagcgcaaaaggatgctccggctgatatgcaatgcaaggacaagtttcttcttcaaagcgtaaaagtagatgatggaaccaccgcaaaggatatcacagcagaaatgttcaacaaggaagtagggcacgtggttgaggagtgcaaattgagagtggtgtatgtctctcctacccaacccccgtctccagtcccagaagggtccgaggaagggtcatcacctcgaggttctgtttctgataatggaaatgctagtggtgctgattctgcagcggtagcaagagcatttgttgaacgacatgaagctcaagaaaaaatttcagaggctagagctctatctcaaggcggactgaagaaaagaaataatgcaattcaacaaaatagcaagctcccccaggaactggagctactgaagagggaaggcaacaaaagtcgtggtggagtctcatttgtcattgtcgtattaattggcttgcttggcataattatggggtatctcatgaagaagacctaagcatttctgcgattcaatctttcaccatagttttcgatcttagtttctttgttcctaccattcaagcaatcatgaggaaagttaaaatagatcaattcagcagatgttggtttttcttttttatttttgccgtttcttttcttttctttgggtggataacattttggaggtagaaaacattaggggaagttgtgggtctgtggttaagcatattgtgaactgactcatgctttcgttaactgcattctttttgtaacttaaagaggggaagcttcttgttttcttctttttgtggttcgtctagtgactacatggtaatgtcaagttgtcaaggacgaccacgaataacatcattcttcatggactctctctctatcgtcttttcatgtcaagaatgacctttagatgacagaatataactctgtt

SEQ ID NO: 67360 - DNA, 624 bp, Glycine max
  Clone ID: PAT_MRT3847_31840C.1
tccgggtcagcccacgcgtccgcggacgcgtgggcggacgcgtgggcggacgcgtgggcgctccttcctagttgtttcgtcgacgttgcagagcttgcttgaccccaaacccttcttcctttgttttctttccttttttccacaaccaatcaggtccatgctacttctttgtctgtatcttggaagtgagagtaaggctaggattatttttacttcgaaaggagaagcgttttagaagatagttatgcctaccgatggttaattcagtgccagatttttttagcctacttcaatatattttgttgaggatttgctattgaatcgtaataactgaagtttaaaagaagggttttgacttgtgagctttttagcggactgactactttggaatcatgcctgtttcaggacatgaagagaccggggtaaagtcctatgctgggaaatttagtggtttaattgcaggtgtgcctatcaagaaaaggaggtttcctacgattcagccttcttctgcacctgtgtctgaggaaccatattctctcactgaagaaaccgagttacaacgtaaagaaaattcaagcacttctcaaggcccaactttaccaaatgttgcaggtgccccaatcc

SEQ ID NO: 67361 - DNA, 786 bp, Glycine max
  unsure (1)..(786): unsure at all n locations
  Clone ID: PAT_MRT3847_31841C.1
gaaagtcaataaaatcggcaaaccctagtattattttcttctctatagatacacagagatcaaagagagagaaagagattcctttttatccctttctcgctccttcctagttgtttcgtcgacgttgcagagcttgcttgaccccaaacccttcttcctttgttttctttccttttttccacaaccaatcaggtccatgctacttctttgtctgtatcttggaagtgagagtaaggctaggattatttttacttcgaaaggagaagcgttttagaagatagttatgcctaccgatggttaattcagtgccagatttttttagcctacttcaatatattttgttgaggatttgctattgaatcgtaataactgaagtttaaaagaagggttttgacttgtgagctttttagcggactgactactttggaatcatgcctgtttcaggacatgaagaggtgtttatttcctttctgatttacagctaactacgattagagaaccatgccaatttgttcttttttggatattgattacttgatattctattgacagaccgnggtaaagtcctatgctgggaaatttagtggtttaattgcaggtgtgcctatcaagaaaggaggtttcctacgattcagccttcttctgcacctgtgtctgaggaaccatattctctcactgaagaaaaccgagtacaacgtanagaanattcaagcacttctcaaggaccaactttaccaaatgctggcagtgcacccaatcaagaaaagaaagttcccatatcttcag

SEQ ID NO: 67362 - DNA, 471 bp, Glycine max
  unsure (1)..(471): unsure at all n locations
  Clone ID: PAT_MRT3847_31842C.1
aattcgggccaccagcagatgcttatgtatgaaagatgtcgcgggagttaggcttgatggaaggccaaccactggcaacctctgtttttgccgtgggtttttcgatgttctgataatatgttcatcgcagtatacatatgttgacttgtatgtggggttttagtactctgttctgctgggttggttntgtttgttangttgccttttccagnctttntgnttgntggnatnctntttgnntgnntgngagggnngnnntatntnanacnttgngaatnatgnnnnnncctnnctncactcnctcntcnccccttccctcgcctcccatctccccccccccccccncnccccccngccgccccccgcccccccaccccccccccccccacnccccccccccgccccccgcccnccccccccccccccccnccnnccnccnccnggccccccccccccccccccccccccccc

SEQ ID NO: 67363 - DNA, 3264 bp, Glycine max
  Clone ID: PAT_MRT3847_31843C.1
ccacgcgtccgcgcagaatctcccttatttctctcttgcaaccagagcatgcacatcataaaccatgcgttttattacgcttttgtcccttccgtctttcttaattcacatgtcactgcccttcttagtcgtctgcagcaacaacaacaacgtttctgagttggccttgtcgtgtccatggctgtgtccaacggcgtcgaagctgtgttagagtttctaaggaagaatggattgtcggaagctgagtccgctctccgagaagacatcatcgagaacaccgacctcggaacctttgactacgagaagttcttcttccccatggtcccgccgccgccgccggtcagagtccgatctttctcccggccgtcggggctctccgccgccggcaactgctccatatccagctccgatgagttcgtcagcatcggtgttctcccacttctcgtgtttcttcttcagaattcataaatccatatggaatccattcctcgtctcagactcagaatgactctgaatcttccgtctgaaagattatctcaatttggcactgcacgtgattatcatgattttgaaatgcagaatgaaccatattggtataatgaaaaagatgatgactatttcatgactcctgttgaagttggccggatttctttgcgtgtcaaaggggagagttgtttgtcaaggatatatttttccccgtcgacggggagaaactgtgagtagctttttgttaaacttattttattggcaacaattccaagcacagaaatacaagtttggtgtacacaagaaagtaattaagtaataaactcatgcatgagcatgacaccaaaacacgatgaaaatatttttcagcaacaacaaattactatttttcccaaaacaatgagagccttaattataaattttcattgatagttctatttcattacaaaagattcttttacttaactcagttctgttagtttgtaggtaaacatttgttataatctatgttgtaactacctcattaatgttctctgccaccgtaactcgagccgaatcggctcgagtacggctgcgagaagacgacagaaggggggttagtagcatgatggtactaaaaagcaagaagcagcgattctgaatccactcctccaataatcacatccaacgtcaaacaaaacctccgcttcctaaagctatggaactaataattatcatacttactcatccttatgctatttcaaatcaaacagagaattgaaattctagcgcacaaagagatgtcggcaaggcaatgtaatctttataatgtgtagtgttaaataagcggcccggatgcatttatacttacaccgaatcacgaggcgacaacatcgacatggagggtctcatcaacggcttcatcaacgttgctctcggagctgatggtggcgatcgggaagaacaacaacacgggagagacgaccgtagtagaagctcctgggctgaagtcgtctcccaggatcaacaagatcaccctcttcctcatcaccaacacaaggaacaatatcgtcctcagtacgaggagccccaatctcaaagttcctacaaaccccagaaggtggatgaaggtgaagatggatggcagactgttggtagaaagccttcaaggcatccacataaggttcaaaaggacaactggaacagctataaacgacctgctgatgagcaagaatactctaatgaggttgaagttggtgctgatgtggagccctcagaagatgaacttgctgatctgtcaagagcttgtgaaaaactctgggctcttgatttaaatcgtttgatacctggcttacactatgaaattgactgtggagaagggaaaaaggtataccaaaaggaagatatggcacaggggagcttgtttacttgggttagcgatgatgtattcagaaagcctacatttgcccgttttctttcacttttagataattacaatccacatcaaggatgtaaggaagtagtcacatctgaagagagacaagagcaagcttctttcatagaagaaatcagtagaacagcaccaattaagtatcttcacaagtatcttgcatccaagcaaattgtatcagggaattaccaagatttcaaaagaatgattaccagtctgtggtttgacctttatggccgtggtggcacttctggttcctcttctgcttttgaacatgtttttgttggagaaaccaaacaatgtggtgaagtttctggctttcataactggctgcagttttaccttgaagaagcaaaggggagagttgattatcaaggatatatttttccccgtcgacggggagaaactcctgactctgaagctcagcttctgactattcagtttgaatggaatggtgtcctaaaatctgtatccagcactttggttggagtgagccctgaatttgaaattgctttgtataccctgtgtttctatgttggtagggaggataaccacattcagcttggtccatatggggttaatatcaagtgctatcgattgggtgatcgaattggatctgttttccccattgcagattcttgaattttcagtttccagcattggtagtagttgttccctatgaaatcgtttgttatgcatacttgagaacttgtaactcatgggtgtaaaggcaacaataccaattagatcaagtagtacaaggtagcacaatatttactgaattacatacatttggtggttcttttgtcttgtatgaagacagaaattcttgtggaactagtttacttaatttcttcattaagtccttaatgatatgctagtatgttgttattctgtctcatgctgtataatttttttgcctgttgatttacagtttgttttcagaatttcttcccatatccattccaactccatgttttttatttgcttacacccaatcatttcttcttcatttttggatcaccctcttcctcatcaccaacacaaggtctcatttcttcatctctattattctcaatccccccaaaacaaacatgtgtaatcttatcatctttttcattataggaggaacagtgccaagattatagttacagacacaggccccataagctcaatctcattcacttctcctctacctctaatgttaaatactataatactcttctcaataaaccgagatttaagtttggttgaatggttaaggaagaagccaagtaaaaaaaaaagtcacaggcttgatccttcttttaaacaaaactaacatttgccagatttctattaagggaaat

SEQ ID NO: 67364 - DNA, 810 bp, Glycine max
  Clone ID: PAT_MRT3847_31844C.1
aatttccggtcgaccgcacgcgtgacgccacgcgtcctgtaggtaaacatttgtggtattgtattttgtaactacctcatttttaaggttctgggccaccgtaacttgcagcctgactctgaagctcagcttctgactattcactttgaatggaatggtgtcctaaaatctgtatccagcactttggttggagtgagccctgaatttgaaattgctttgtataccctgtgtttctatgttggtagggaggataaccacattcagcttggtccatatggggttaatatcaagtgctatcgattgggtgatcgaattggatctgttttccccattgcagattcttgaattttcagtttccagcattggtagtagttgttccctatgaaatcgtttgttatgcatacttgagaacttgtaactcatgggtgtaaaggcaacaataccaattagatcaagtagtacaaggtagcacaatatttactgaattacatacatttggtggttcttctgtcttcatacaagacaaaaggatgagttgaaaatgaatggagaaaaaaagacgaagcggtgaagaagctgagcgaattgcaatatgaaattgaaagcggttccatggtggcataattggttagtggtaaaagcaggatcaagtcacagcagcctcatggtacgcaagaagcagactcaggattctgaatccactcctccaagaatcacatccaacgtcaaacaaaacctccgcttcctaaagctatggaagagctccagaatagaaattctagcactcctaggccttctaccagttaccgc

SEQ ID NO: 67365 - DNA, 1575 bp, Glycine max
  Clone ID: PAT_MRT3847_31845C.1
ccacgcgtccggacactgacccatatcgctgtgaaatgaaattgcaaagctaaacaaaccattttcatttaaaacggctcttctcttctcagtcactccaacttctaatcttttttctctttcactcactgtttctcttctcctccgcatctcgcagccgacaacgtaacggttcgcggtacccgttgctgccgccgccgatctttctcagcctccaccgccagatttacctcttctcctttcggattcgcatttctctttctccaccgcaacacactcaccttcagggatacaaaatgataggatcctttctgacctgggcccttgtgatggtttttggctatgcttatccagcttatgaatgctataaagtggttgaaaagaataagccggaaattgaacaacttcgcttttggtgccagtattggattttggtggctgttttgacagtatgtgagagagttggtgatacttttatatcatgggtcccaatgtacagtgaagctaagttggcatttttcatatttctgtggtatcctaaaactaagggaacaacatatgtgtatgactccttcttcagaccatatgttgcgaaacatgagacagaaattgatcgcaacttattggaactaaggacaagggcaggggatattgcagttttgtattggcaaagagctttcagttatggtcagactagaatatatgacattttgcaatttgttgctgcacaatcgactccagctcctcgacctgctcagcaaagacctggtgtgagggttcgtcaaccggcacctgcaaaaccagcagctgctgctgcagcagaacctcaagttgaggaacctccatctcctacctctagcacatcttcgagtctgctccagagggaggtagaagaggaattgggttcttctccacaagttcctaaagcacccccctcatctgtggcaagtttaagtaaccagaagactcctgtagcaggtttaagtactcagaagtctgctggagcaagtttgagtactcagaagtctactggagtaagtttgaatattcagaagtctactggagcaagtttgagtactcagaagtctaatgttgcacctgaaaccaccaaccattttgcacaagcagaggcagagccaaaacaaattgaagcagcaccatcttcatgcaaaagaaaatgggaatctcctcctacttctacaaaagagaccttaatggaagaaagcattcgagttacacgtggtagactaagaaaaacccgatcagcaggaactcgctagcaaatgaatattgtcaatttttagtctgaaataggggtaggtggacaatgatgggcattgaattgttgtaaaacttgatgtaaatctgtttttctaagtttccattccatcttcattttatatatttttttcacaaattttgtcttggcatagaagcatttgtagcctgatgccactttatgtggacttagatttcaagggggtgtttgcatcggctgctttgtatagctggttttcatgttagtgcaacagtattacccaacatttaaagggaaggcagaacttcatttaaaaa

SEQ ID NO: 67366 - DNA, 207 bp, Glycine max
  Clone ID: PAT_MRT3847_31846C.1
actcgacgcgtccgctagtcaaggagtttcatctctgcacgttgctttagaatagaaaaaaacggtgaacatttgctgaatcggcgctggatatttggggcgtccaacaatgacattcattgctctgaagtgcccctccattgaagtctgttgttgacatctacaaatgcaggattgcagcatggaacagcgaccacctcactatat

SEQ ID NO: 67367 - DNA, 853 bp, Glycine max
  Clone ID: PAT_MRT3847_31847C.1
tcttacggctgcgagaagacgacagaagggggacatggagggtctcatcaacggcttcatcaacgttgctctcggagctgatggtggcgatcgggaagaacaacaacacgggagagacgaccgtagtagaagctcctgggctgaagtcgtctcccaggatcaacaagatcaccctcttccctttttctatatccaggaacaatatcgtcctcagtacgaggagccccaatctcaaagttcctacaaaccccagaaggtggatgaaggtgaagatggatggcagactgttggtagaaagccttcaaggcatccacataaggtttatcttttaattttaataatcaatatgtcaaatgaaaaaactaatgtggctttttcagtgttttgtatcattttaaacagattgtatttttatgtttaatattgctgttacaggtatatcttctttgaaatctactatatgttaactttgttactgaatttgtgatctaatcagttctgaatgttttatgcttcatccctgtctgaatttgaatgatgaatcttatcaacttgatgtaggttcaaaaggacaactggaacagctataaacgacctgctgatgagcaagaatactctaatgaggttgaagttggtgctgatgtggagccctcagaagatgaacttgctgatctgtcaagagcttgtgaaaaactctgggctcttgatttaaatcgtttggtacctggcttacactatgaaattgactgtggagaagggaaaaaggtataccaaaaggaagatatggcacaggggaagcttgtttactttgggttagcgatgatgtattcagaaagcctacatttgcccgttt

SEQ ID NO: 67368 - DNA, 407 bp, Glycine max
  Clone ID: PAT_MRT3847_31848C.1
cccacgcgtccgaagaatattgttgtgcctctactctcgaagaagatctgtaagaatagggtgaagaagttcaagaggcctcatagtgacaggaaaatttctgtcaagacagtactatcgctgactataagtgtattgattccagttttagtagaaagcacatgggattcactttgatcccctatattgcttttcttacactattttaaacgactttctttcatgattgtcgtgttaatagttttggtgatttacttgtcatattctttgtcatatttactatgcttattgtttgtacttatgtttatgtttctatactgttttttatattttttactgattattttatttatctttccttttcttactattttttttttttttttgatatatttcatttttttttt

SEQ ID NO: 67369 - DNA, 215 bp, Glycine max
  Clone ID: PAT_MRT3847_31849C.1
ctcgaccgctcgagccgtgcagatcaaaacatctcttcagtttttggcattgagacgagagggtaatgcagtaagtggacatagtcatattttttgcagatttccattcattcagactatattcgttattaaaactactcatattccaggtagatgccaagaaacagagatcagcatttccaccaaacttcgtacattcacaggatggttcacac

SEQ ID NO: 67370 - DNA, 176 bp, Glycine max
  Clone ID: PAT_MRT3847_3184C.1
ggcagcttaatcgacaaattatttctcctatattcctcttcgttcctcctagccatcaacaaatgggtcagtgggatcactattattcataaccatcggcataagagtattcgtcatgatcaggatcaagattagaatcatcttcttacggagtatgatatgtataatatgggcac

SEQ ID NO: 67371 - DNA, 334 bp, Glycine max
  Clone ID: PAT_MRT3847_31850C.1
gtttacataccctatcctccaggcctgggactgtgtgcacatgtaccacaggaacggcttccagcttcaggttggcggctctgaccaatatggcaacatcatcgccggcatagacgctatcaactacgtccgggacaccatcctcgaccctgttgtccgcgaagccgtgtgggaccttgaaaaaccgcaggataactacatgaaggacccttatggtctgacagtccctctattaactacatcctcaggcgaaaagttcggcaaaagcgcggtcaacgccatctggctcagccccgaaatgacacccagtttcgacctgtacggcttttggatc

SEQ ID NO: 67372 - DNA, 519 bp, Glycine max
  Clone ID: PAT_MRT3847_31851C.1
gttacagaagaccagatcgaggaaatctactctaccggacaatcaaaggcttaaaccctggtcgaagcgaagcgcatgcgatgagggaagagagagaccaccaatgcaagtggatcgacttaagcatcgatttcgaaggcgacaacatgaagcatgaaaatagagccagccactttttatcgttaataatgttacaagcaacaacgataaaatacgctcttggatgcatgcccctatctcccacccatcgtcctgatcttggcttgaagtatccaagtagcgctaaaacgaaaaagcgaactattggaattcttgtcttgggcttagccctcttttacaccaactcaataacaagcgccgaacaaggatgaaagaaatcacattactaatcaaaatttattcattcaaccattcatattacgttatggcaatcctacacgccgtccgtgcaagcaggataccgcggtcaatgctgtaaacagacctagcatcatgccatcagagctcaattcaagcaga

SEQ ID NO: 67373 - DNA, 374 bp, Glycine max
  Clone ID: PAT_MRT3847_31852C.1
aggggaataatataggtcctaatttttattgaagggagctcatcatatttttttatggttcttataacaaacttcaatcacttttatgatacgacccacatgataccgatattttaaaaaggaaaggaatgattccaaggggaagggtttcaaatgatatccattacaccgtaatcccctaaacgacatgggaaagagaaaaaaaaaggcaaaaactactcccaaagaaaccacccattcagagccaccggcccatagattaaagcctagggttaacgtctcttttctaagaaagttgcccccagtcggtgacaaccacaggcttggcggtccttccggagctggatcccaccttttttattctcttgacgacg

SEQ ID NO: 67374 - DNA, 301 bp, Glycine max
  Clone ID: PAT_MRT3847_31853C.1
gggatcggggacggagggttagttgggggtggggaatgggagttggggagtactccccgcccccgccttgccctgttgacatccctactcacaagtggagagaatatttctctgattagattacagcctttcaaagccaataaccttacctttgtgccaaggctcaccctctttaggttaggtgaggcttgacataatggcccagttttacatttaaaatttatcatgaggtcttccctcatcagaacagaaaaaagtcctattctccttctttctgtaatctgaaattggatcattacct

SEQ ID NO: 67375 - DNA, 395 bp, Glycine max
  unsure (1)..(395): unsure at all n locations
  Clone ID: PAT_MRT3847_31854C.1
accaatcgtccaatttattgccaagcagcgggcatagtgcaggtgatactccaccacataagcaatctgcatacgatgaggcagctgaatatcaagctatatctgtcataatgcctgacctgccttttgagcaactggttactgaaattcacacgaggatccatgctacgtctgctaccatggataccaacattgacagcaacatgtcaggtgacattgctccaaccaaggatccaagcggcaagcttgatgacatagatcatgcgatcgatcaaccgaacattttgattaatcctctgcatgctgcacaggctcattctcaggatagctcgacatctgctcactaaactgcanactgtactgaaactgacatagtgcatgagctgctgcatgtc

SEQ ID NO: 67376 - DNA, 765 bp, Glycine max
  Clone ID: PAT_MRT3847_31855C.1
cccacgcgtccggtgccgaataaataacccaaaatcaaaagattactttttaattagcgggcaataaaatcgataatcattggcattaacaagaggttggtgactctctgttgttgtggtgcaagacaataatcttcaaaccaattcctcaaaacgcctaacgcacctttccatcaaaaccaagcttcagatccaaagcgtgcaaattcagatctgtttctttctctctttctcaatcaatcatccccagtcaaagttcttgtcttcagttcaatccaaccctaactatagagtagctatctaagagctctggagctggttcttcttttggactgatataaagataacctgtttttacatactgagtattggttggtccccacgtgatgattcaattatagaagcaggtcctgtgcctgatcagtggtccatgcactagctgtgttatgcgacgaagtttactaatgttgctggatttggtggcaagggatgatattaaacataagctggatggaagagtatatacatggatatagcttgatatgcaataggagatggtacagagtgaattggattctgagaatgttgagttcacagtgattgatgatgtgggtagtgaaagcctaggtcctggcattcgtagagaactttcattttcacgttggtgtgatgatgatggaaggatccatttggatcagcaattagataatgaaaatgctggtgtataaaatgactccgattttgagttaccgttttcctgaaaag

SEQ ID NO: 67377 - DNA, 451 bp, Glycine max
  Clone ID: PAT_MRT3847_31856C.1
agtaagaataagaaatctcgattcaaaatacgacatcattccgaaggaaaataccgatggtaacaaaaaaatacgaacttcatccatacaaatatctccgaaaaacatttttagctggttctcttgaccacattcatgtaggaccctgtctgcataccatccctccgaagtgctacagaatttaaaaaagcagtcactttggtcaaatccatggacaggtataagtccctactccctaccagcaaaattagtaattagtaattgcgttagcaaagaaagggaagcagggcaatgattcaatgcagaaagtagcactcgaatcagccatcaacaccattttcaactattctccgtttctgtacttcattgagggaagagaggaagacatgatggatgttgacttttgaggatcggaaattagttccactagaacataatgttgcacaaaatt

SEQ ID NO: 67378 - DNA, 299 bp, Glycine max
  Clone ID: PAT_MRT3847_31857C.1
ttccctcgagctcgacccgaatcaccttttattttacttatcgttctcccactatcttttgggatatatcatgtaggagagggggggtccacccataatttataatccattctcctattgaactctctctatatttacattaatattttttgccaatgctcattcttgccacttaccacaccattatctgtaaaacaagaattacatgtattattgatcaattacaccccaaaacttaattttcaatcattaaattactatttttcttttatatattcacattttttaaaaaattatca

SEQ ID NO: 67379 - DNA, 1013 bp, Glycine max
  Clone ID: PAT_MRT3847_31858C.1
gcacgagcaacagagagcactgagagaatttgaagcctgtgttctcctttggttgtttttcatgtcttctgatcctccctttttccacaaaataatttccaatgcttggaaaagcattgccattccaacatttgggtatgaaggtaacctccctttatccttacctagcattgccattccaacatttgggtatgaaggtaacctccctttatccttacctagtattataaccagaaccaggtccttaactttagcactgcctcagaaccatggttctgaggccttgccaatgtaccattttattaatgcaactgagacagaaaaactagactacaaccctaagaagagagcctcaaatctatcagcaaaaattgtttgtatgatctttgctgctttagctaatcagacaatgtctaccccccaaaatcaaccttcaattcttggacctgctatagtgattgcttttgtagcttcactttttgtgatgttggtgtcaaaaaatgataccataaagccttcctacctaaggcttgtagcaattatggagataactggttctctttcttttaccctcattttctggctaatgacaaaacctttcttctctggaaacttaaccttgtggattatcatgggagtgctggctatggcttgcaacatgctagccctctgcatacgattctctacatgaatcctatccgtaggagtcccaaaatctccaaactaagtaaaagatcgattgatctgttgcggttttaaaggttaatttccttgatgatatcataggtacaattgtggccacataccacaattgtccataatttatattagactaaagtatattttaggccttgataaatgatcaatttttgttttagatccctaataacgaaattttgttacatggatttcctgatatatcaaaacttttgtttcgaatcctttgtatcaattaaataatgacatgaacgtttatcaggaattcaatgcaatgaaaaaatttatcaggacta

SEQ ID NO: 67380 - DNA, 123 bp, Glycine max
  Clone ID: PAT_MRT3847_31859C.1
cttacgcttgggcacaggtcaatctacctgatgatgggttgcgatcgcggatgactttctcatcagtttgcatatcgttggatacttgttcatgaaactgcccgttctttcacagccttatct

SEQ ID NO: 67381 - DNA, 511 bp, Glycine max
  Clone ID: PAT_MRT3847_3185C.1
gcttatccatccatcagcactcagcagccgcagcaagtgagcaaagcaaaagtgatggaaagcagaactaatgctgactctttctggacctggaatgccaacaacgacaacaaccaaaaacaattctcagttaccaagttcctgggaaacaacaaaccccccaaacctcaaacatcagtgttgggtcctggcttcggagctggcatcggatgcggcgccggaataggtttgggtttggttggtggcttcggctacggaggctggcccttcaaccatatgcacctcgtttttggtctcggaatgggttgtggagttggtgtcggcttcggcttcggccaaggcattggatacgattttaatttccggacccgtaagtctagaaaatccaagaaaaatttctcagatccccaaaacacaattgttattcagatatgatcaattcataatattgtattgttgcatttttcattttttttcttcttctttttactctatgcttagtttcttcatt

SEQ ID NO: 67382 - DNA, 370 bp, Glycine max
  Clone ID: PAT_MRT3847_31860C.1
tgataattgtgatcattattcacgagttgtgctgattagtgaaataaagtcaactgctttcatttcaaacaaaaaaaaaaaaaaaaaaaaaaaaaaaaaaaaaaaaaaaaaaaaaaaaaaaaaaaaaaaaaaaaaaaaaataaacaaaaaaacaaaaaaaaatatgggcggcccaagactggggatcgtccaaaccatgaaataaattcagaaccggtaccaccaggcgtaccaattttccatataatgaatctaatgaaaactggaataaacaatggccaaactctgcaacctgggcaaaaatgttatcagttgaaaattcctcacaaaatacaacccgataacataaagtgccaaccctgggatgcct

SEQ ID NO: 67383 - DNA, 302 bp, Glycine max
  Clone ID: PAT_MRT3847_31861C.1
cttcgggagaggaaactagggctgttagttaaaaactttcgggaggtacaaatcctatactacacacaagggccgctgctttttctattgcgggcaagcaaccaggcagctggagggtgaaaacaccaagtcctccgttttagcggggaaggccatgatttctaccccgatttttttgccgagccttttagagtaaaacttcaaagcccgtggagaaatccacctaacttacaggtcgaaacctagcccttacacggggttcactatcttctgggggagtgtccccagcccaatattttgtt

SEQ ID NO: 67384 - DNA, 116 bp, Glycine max
  Clone ID: PAT_MRT3847_31862C.1
aagatacgaccacaaatggagcatgggacaattatgtttgcctttgacgaatgtagcctaactcatttaaacaaaagatcattcattactgggactaagatacgaccacacaagta

SEQ ID NO: 67385 - DNA, 313 bp, Glycine max
  Clone ID: PAT_MRT3847_31863C.1
cccccctttttttttttttttctacttaaaaaaaataccattcatcaaggggttgattataaaaacaccaacatataaaactaaccatacttataaccatataaacctatcatacatacactttccaacaatcaaactgaattcaaaaacattttatacaggaactctaatcattacattaccttggtagaaacacccacctataaaacaatcccatcatacccactaccaaacataagaatcacttcaataccccccttcccattatacaccacactacaaccttacttactcttcccccaaatttactcca

SEQ ID NO: 67386 - DNA, 378 bp, Glycine max
  Clone ID: PAT_MRT3847_31864C.1
ggtaaatcataaccccataagggcattacatcataggagtttctgagaactggccaaaaaaggaccaatacgtgactaaaaatccacaggcttatttcactttctgaatcttaactaagtaatccaaccctgacccaatggaaccagaagtatgttgcccaccaccttctttgcgacaataaaaaaagataaagctttattttcctcagtagccggggtgcttttcataagctggggagcattggctgactataacagctggaaacatttgtaaaccactggatttacctgttattataacgtgactacgccggacatgtgtatccacttcactaacggtctccgatacattgtccagacccctattgtgtaaaccag

SEQ ID NO: 67387 - DNA, 288 bp, Glycine max
  Clone ID: PAT_MRT3847_31865C.1
tgcagtccgcacacgggtgagaaaacgacagaagggggcagaaaaagggacgactaacatgagatggatggaaacccgtgctggcgctgggagtcatatacgagaatgctctgcgctatgggaaacgctcattgtcacattggacattttttttcttaggagagctaagcgcatagggatcgatgtgggggacgtggccatgcatccaagggacacgaaatgtgcgcacgctcaatctccctccaatgaacatggcaagataaccagccgacattcgagccaaaataa

SEQ ID NO: 67388 - DNA, 195 bp, Glycine max
  Clone ID: PAT_MRT3847_31866C.1
ggaaggggtccttatgaggagtcattgaggaagcctgaagcgtggtataataatactaaaaacagtagcagcaggaagcttataaaggggttgtggtcgtctgaggaagatgacaggtttatgaactacatgctaaaccatggtcacgggtggttggagtgatggggttggaaatgttgtgcttcaaaggtgtgg

SEQ ID NO: 67389 - DNA, 451 bp, Glycine max
  Clone ID: PAT_MRT3847_31867C.1
ggctcgagctttcattgctttattactcaatttctgtaagcttattagaagaattcttaccgtcaatacggttttatataacgaagtcgccatgaacctagtattccaaaagcttaagttggatggaagtacaaggatggttttatatccaacacgtcccctcatgcaattcatattgtgttgacattcaactttttatttgaagaatgggagcagcaaagatcaaattctacaccacttgacaacattgatatgcatgtgaatccatgctgtaatctggttcactttttaaagaagtgtttaaactgacttatttttttgtgtaaagacgagactatttaaaataccatataaggcaattgacttggaattttgcataaggcaaagactgttaacttatatttgtaccatagtctgacttctatgacatactttaaatggttatgtaaca

SEQ ID NO: 67390 - DNA, 230 bp, Glycine max
  Clone ID: PAT_MRT3847_31868C.1
aggccccagctgccaagccgaagcctgcgcccaaggctgcggcgaagccgaagccggctcctcggccggcgccaaaggctcgccctgcaaaggccgccaagacctccgccaaggacgctcccgcaaagaaggctgctgctccggcaaagaaggcaatagtcccaccaccggctaaaaaggctgtgcccgcaaaaaaggctgttccggcggcaattcctaaaaaggccgtt

SEQ ID NO: 67391 - DNA, 349 bp, Glycine max
  Clone ID: PAT_MRT3847_31869C.1
gacccacgcgttcgtcttgtgcggtcagtctccactcttcccttctccttcttcttctctttttactctctcgttcttcctcaaacaccaccaaaccaaccgccattcgcctgtccaaaaacctccgtgtacaaactccgatcctcttgctgcttggccccccagacccgaatccggccacttgcaatagtacccctattgcgcaatactgaccactcgcaactcccttctcgttctctgcaccttacttggtcttggcttaactctgctgctctgccccggcggctccaccgtcgcctttgtgtgacccctgcccgaggaagctccagggcgatgaactcgacaccgg

SEQ ID NO: 67392 - DNA, 178 bp, Glycine max
  Clone ID: PAT_MRT3847_3186C.1
tcggcagagcagagatctagcgtattctctcgctctttctttcactgtcacagaggcacatccgaggggcttcccatccatcggcgcctctgctgcccagcccctaaactttctcatctactgccgcactgtctggattggcggccttctcggctccctatgacgggcccagtgcatc

SEQ ID NO: 67393 - DNA, 1641 bp, Glycine max
  Clone ID: PAT_MRT3847_31870C.1
atttcctttctaagagcaatgggtagtccacgcgtccgtacggctgcgagaagacgacagaaggggaatcatataaataaataaacatagtataattaattgatcgtcgatggtagtagtatgttgagggggctgtttgtgtttggtggcacgtgctgcaggagattgacgttggcacgacagtccacgcagaaacagaaacagtggtgggatcatcttcatcatcatcttcgctccaaaaaccttcattgggcaggtctcatggagagtaatgggaactcggtgaaggatgctgagaaacaaatcacccgtgttttgttttgtggaccccgtttccctgcttctcatgaatatacaattgagtatttgcaaaatcattcacatatcaaggttgatgttctccctttagaagatgtgccaaaggatattgccaactatcatgtctgcatagtaaaaaacatgaggctagattcagaaataatttctcgtgcagttcagatgcagcttataatgcagtatggtgttgggctggaaggtgttgatattgatgctgcaacaaagcatggaatcaaagttgctaggataccaggtgatgtttcgggaaattcagcttcatgtgctgaaatggccatatatctaatgctgggtctcctccgtaagcaaaatgaactgcaagtttccatacaacaaaagaagcttggagagccaattaccgaaactttacttgggaaaactatattcattttgggctttgggaacattggaatggatttagcaaagcgattgcaaccctttggtgtaaaagttattgctacaaagcggagctgggcttcatatgcacaacatgctagcaaattaagcagaaatgatgctgaagatcttgttgatgtgaagggtagtcatgaagatatatatgagtttgcaaggaaggctgacattgttgtttgctgccttacattaaacagagaaacggctggtattttaaccaataagtttatatcttctatgaaaaaggtgtggtgaatgttgcctgtcttgtagactatgaggctgtgatcaacttgaatcaggtcatttaggagggttaggcactgatgttgcttggactgagccatttaaccctgatgatcagatatttaaatttaagaatgttatcatgactcctcatgttgcaggcgttacagagcattcttatagatccatggctaaggctgttggtgatgtcgttcttcaacttcatgccgggcttcctttgacagggatagagttagttaactgaattagtgccaacaattcattccagtatcttcaactaaatgacttttataattcaagatgaattttctgaggtgcaaaaacacttaatattttgtaaagaaaatttagatgaggcaatgcttatgtgttgcccatttgttattctatggttgtggtgaaccaattgttctttagtagcgggttgtgttacagtatgcgattttatgaattttctagttctattttgccactatttatatacacggacaaatatatatgtgtaggctgccatatttcctgtgatcataatgacataatgttagggggttaaaaaaaaaaaaaaaaaaaaaagcggccgctcgacggctccaagcaacgacgcga

SEQ ID NO: 67394 - DNA, 871 bp, Glycine max
  unsure (1)..(871): unsure at all n locations
  Clone ID: PAT_MRT3847_31871C.1
gcgtacggctgcgagaagacgacagaagggggaagtcgagtcgaagagttttgggagccaaatgggtcttctgagtatcataaggaaaatcaagcggaaagagaaggaaatgcgaattctaatggtcggattggacaattctgggaaaaccacaatcgttttaaagataaacggagaggactccagcgtcatcagtcccacgctcggcttcaacatcaaaaccataacttaccaaaagtatactctaaatatatgggatgttggggggcagaaaacaataagatcttactggagaaactactttgagcaaacagatggtttggtttgggtggttgacagttcagatctgagaaggttggatgattgcaaattcgagctcgataaccttctcaaggaagagaggctatctggagcatctttactgatattagcaaataaacaggacataaaaggtgcccttacacctgaagaaatagctaaggtgctgaacttggaagccatggataaatctcggcattggcagatagttggctgtagcgcatacactggtgagggtctgcttgagggatttgattggttggtccaggacatagcctccagaatctacatgcttgactgatgcttgtttgtgccatcttccatgaaatgtgtgccaacttacaagagaattctcaaacagtcaaacccaatatctgtctttggaagacattatggattccctgtctcactgatatgttccagattttttttttttaaatttttggtgggtgggggtgatggggggtgcctgtaaaatcatattggattttgaagtggcaagatattgaattacttgcgagttacttacctatcaaaccgggnnnnnnaaaaa

SEQ ID NO: 67395 - DNA, 377 bp, Glycine max
  Clone ID: PAT_MRT3847_31872C.1
atgaatagctgaatcattaggataatgccaaaagttttaggttataaaaaaagaaaagataagaacattattccactcaattgattgaaggaaacatgattttttatacagttgtagtttttttttaattaaaatatgattttgcattgctgtgttaaggaagatttatgatgattcctttccttataaaaagccttacatttcagttcatttacattttgtggtgctcctttttcattactgactgattacactgggagatcaggaaccgagatggcaggtgggtaaattgtatactccagcagatgctgttgctcaagggcttaaatctctttctttgaatgataccaagatccttgccagaaccattagtgact

SEQ ID NO: 67396 - DNA, 422 bp, Glycine max
  Clone ID: PAT_MRT3847_31873C.1
cccacgcgtccgcccacgcgtccgtacggctgcgagaagacgacagaagggggatcggggatggtagtagtatgttgagggggctgtttgtgtttggtggcacgtgctgcaggagattgacgttggcacgacagtccacgcagaaacagaaacagtggtgggatcatcttcatcatcatcttcgctccaaaaaccttcattgggcaggtctcatggagagtaatgggaactcggtgaaggatgctgagaaacaaatcacccgtgttttgttttgtggaccccgtttccctgcttctcatgaatatacaattgagtatttgcaaaatcattcacatatcaaggttgatgttctccctttagaagatgtgccaaaggatattgccaactatcatgtctgcatagtaaaaaacatgaggctagat

SEQ ID NO: 67397 - DNA, 1016 bp, Glycine max
  Clone ID: PAT_MRT3847_31874C.1
ttcagcttcatgtgctgaaatggccatatatctaatgctgggtctcctccgtaagcaaaatgaactgcaagtttccatacaacaaaagaagcttggagagccaattaccgaaactttacttgggaaaactatattcattttgggctttgggaacattggaatggatttagcaaagcgattgcaaccctttggtgtaaaagttattgctacaaagcggagctgggcttcatatgcacaacatgctagcaaattaagcagaaatgatgctgaagatcttgttgatgtgaagggtagtcatgaagatatatatgagtttgcaaggaaggctgacattgttgtttgctgcctaacattaaacagagaaacggttgggccttttgtaatccttcatttaattatttttggtgaacttccattctttttgttacttttagctactttggttccccatttgattttgacagtaagtttaaaataatggtagatccgtagatgctgatacagatgttgacaaatgggttggtataataaacaataagtttatatcttctatgaaaaagggtggccttctggtgaatgttgctagaggtggtcttgtagactatgaggctgtgatcaaccaccttgaatcaggtcatttaggagggttaggcactgatgttgcttggactgagccatttaaccctgatgatcagatatttaaatttaagaatgttatcatgactcctcatgttgcaggcgttacagagcattcttatagatccatggctaaggctgttggtgatgtcgttcttcaatttcatgccgggcttcctttgacagggatagagttagttaactgaattagtgccaacaattcattccagtatcttcaactaaatgacttttataattcaagatgaattttctgaggtgcaaaaacacttaatattttgtaaagaaaatttagatgaggcaatgcttatgtgttgcccatttgttattctatggttgtggtgaaccaattgttctttagt

SEQ ID NO: 67398 - DNA, 258 bp, Glycine max
  Clone ID: PAT_MRT3847_31875C.1
gtttgataaacccaaaccgccattggtggtttaattaggtttggaggtgggctccttcaactctcccaaggcctttcaaatcccgatctgccgtgacttttgacggtgacacggttgaaggaggagcagtcacttcacgtcgttgttggatttctgccgcatcacaccatacgaatccaaatctggcctgactttcacttgccaccgcggaggacgatagcgtgattgaaggagaagcgctcaccgccgtgccgctgt

SEQ ID NO: 67399 - DNA, 369 bp, Glycine max
  Clone ID: PAT_MRT3847_31876C.1
catacgcgtacgactctatttgtatctcccctgcgaatagggttatgtccagcactgactctcttctctgtctttactacacattacccttctcttgcgatcggaacactgataattaaccatgaaaccgtcactgatttaacctttgtcttctgcacggtgctgatctatgttgttgaatgggtttttcatattactgattgagaacggcttgtgcgaaggtgagtctcgaaagaatggcaactacgaatccttaagatacgttgggcgacgacgcactggacccatcacagctgatcgcctcagagcaactgaaggccatggcagccacggccacagcgccacccaagaaggaccaagacaaacccg

SEQ ID NO: 67400 - DNA, 816 bp, Glycine max
  unsure (1)..(816): unsure at all n locations
  Clone ID: PAT_MRT3847_31877C.1
acacaagacacacataattagcatagttattatggggagggttgagtactccccattgtttgagacaagaaggtgcagaggaaggttcatctacaggtcctttgcaatctcattatttgtgaccatatgctttatatggcattacagatttagcacataacaaagggtgaagatggaaactgggcatggcttggtatgcttgcttcagagctgtggtttggcttttactgggtccttactcaagcccttagatggaaccttgtgttcagacaggaggcatttggtgatataagtttgtttggacatatatgattttattattcttttctatcatttcatcacttggcacttcttttttctagtattttagatgctaatataactagttatgtcttttatttatttagtgaatcttttttcttgttttgcaaacaagatgtcgcgtctgtcaaccatctttgatatcatggtctatgctaatgttatcctctttgaccctattctcacatgccgtatttcatattgttttggttattgagggggatcaatggagtactgttgatgctcagtgggctcagctgattggacttataaggtccttgngagttctatcttttggttntacctttttttatagagtttttcactgataaaaaaagattaaggttatctcataagtgtatttccattgagagtacactacnaatactgtatgaaatggtttttgcagagtgtatgaaatggtttttattaacatatgtcatattttttgttttaaaaaaagcntataaaccaataattttttgtttgggggtc

SEQ ID NO: 67401 - DNA, 450 bp, Glycine max
  Clone ID: PAT_MRT3847_31878C.1
gatagtagccacttcacaaagggttggatacaataggtgacagagtttaatattttacatgatgtacgaaccaaaggttttttcggggctataatacatgtaaagaaatccatcctcatccttgaatgatctatacacagagtccatcatattagctgcgataatcacaaacacaaaaaatttaacttaactacaccaacaacaacattactgttgttcaccaaagggggttaaacacctctgagattttgccaatggatcaaaagcaaccacataagggaacttgataccatacttcaacttgaatcttaaggttttgggttaaagtgtgatgtcaaattcgctttgtggtttattcggtattggtgttaaatctccctggttgtacccctcgattgaacaataattacaaaatggtagatgaagaaagaaaccattgggtttaaaatg

SEQ ID NO: 67402 - DNA, 2526 bp, Glycine max
  Clone ID: PAT_MRT3847_31879C.1
ccacgcgtccgaaatgtgccaatgtgagccatcgcatcgtccgccaactcgtgcactttcaacccaatccaatcctcgcacacatgcatgctgtctctgccaaagttggggccaagtcataactacatttccattgttacgattctttctttccatcccaaccacttattaagcgtctgatccaatttctttctctcaccatggatcatcgcaaaccattgttacccacttcctctgacgatgctccaaatccacgcactcggaaggaccttgttctaatgatttgcggtttgtttttgctctcttcccttgttgcctttggagggtacagggcctccaacgcgccacatgctgacgtgtcatcgccagcatcgaacgatgaacaacctagtcccacatcggtgccttctccgaaatggtacccggtttcacggggtgtttcttctggggtgtcggagaagtcatcaagcatgttgtttgcggttaaagatggagcttcggaagcatttccttgggacaatagcatgctgtcgtggcagagaactgcttttcatttccaaccagagaaaaactggatgaacgatcctaacggtcctatgtactacaagggatggtatcacttcttctaccaatacaacccgaacggtgcagtttggggtgacatagtttggggacacgcagtgtcaagggacatgatccactggcttcaccttccactagcaatggtggctgatcaatggtatgacatgcaagggtgtgtggacaggctcagccacgatcttaccaaacggtgaaatcatcatgttatacacgggttccaccaacgagtcagtgcaggttcaaaaccttgcataccctgcagacccctctgaccctctccttgtggattggatcaaataccctggaaaccccgttttggtgccaccaccaggcattggtactaaggactttcgcgacccgacaaccgcgtggctcacctccgaagggaagtggcgaatcaccataggatccaagctcaacaaaacaggcattgcattggtttatgacactgaggacttcaagagctatgagctcaaggagggtttgcttcgcgctgtcgatggcaccggcatgtgggagtgtgtggacttcttccctgtgtccaagaagaatgagaatggattggatacatctgttaatggggatgaggtgaagcatgtgatgaaggtgagcctggatgatgatagacatgattactatgcaattgggacttatgatgagaagagtgtcttgttcacaccagatgatgctaagaatgatgttggtgttggattaaggtatgactacgggatattctatgcatccaagacgttttatgatcagaataaggagaggagacttttgtggggttggattggagagtctgacagtgaatatgctgatgtagccaaaggttgggcttcagttcagagtattcctagaactgtggagcttgataggaagactggcagcaacttgcttcagtggcctgttgctgaggtggagagtttgagattgagaagtgatgaattcaaaaatttgaaggctaaaccagggtcagtcgtgtcaatagatattgaaacagccacacagttggacattgttgccgagtttgagatagacaaggaaacccttgagaaaacacctgaatccaacgaggagtacacgtgtggcaacagtggtggatctaaacaacgtggtgccttaggaccttttggtcttttggttttggcagatgagggcctttttgagtatactcctcagtatttttatgtcattaaagggagcaatggaaatcttaagacttccttttgcgctgatcaatcaaggtcttctcaggcaaatgatgttcgcaagcaaatcgttggcagcgctgttccagtacttaaagatgaaaagttttccttgcggatactggtggaccattctattgttgaaagctttgctcaaggtggaaggacggttgtgacatctcgggtttatccaacaaaggcaatctatggagctgctaggttgttcttgttcaacaatgctactgaggccactgtgacagcctcactcaatgtttggcaaatgaattctgcatttatacgcccattccaccctgatcagaagaattaaaataaataattaaattggatataaaagacttgtagtcacaaaggatcggaaaacatcttggggtggcaatttgtactcatcaattgtttaccttcccataaacacacatagagttatgggttcttgctcaaagcccattccttcattttttgctcatttatgtttatgagaatgtttattataattttatcatatcatgtttaatgattcttacaagagaatctgtttttcaaagaaatatgatgcaaatgttatccgattcaattctgtggtaaaaatcttttacgttatttgttatattaatttttttagatgtatcttgaaagcaaatttaataaaaattgtttattgtaaattttttcttctaaataacacttttaatctttt

SEQ ID NO: 67403 - DNA, 425 bp, Glycine max
  Clone ID: PAT_MRT3847_3187C.1
gctgatcgcaatgttatcagctgcaaacaatctttagtctcccatttacacatggaaatcccagatcaatctgtctccttatcagatctagctcgcataggccattgagaaacacaagaaagacaccactcaaaacacaaatgatcaaaaccaagtgtaaatgggagactaaagattgcttgcagctgatcgcaatgttatcatttgctaatcatttgtttgagtgctgaactagattttatctcgttccacgtgtattggataaatatgttaaaacagaatataatagtttgacacatgcaatttgttttgcatgcaccacaaacaattatatcgtgcatgtccaagtaaaagtaagagacgtgatgagtagaattaattttaaaatctctcgtgtcattttttttttctggcacatgtgcaca

SEQ ID NO: 67404 - DNA, 288 bp, Glycine max
  Clone ID: PAT_MRT3847_31880C.1
ggttcaccggatcgaaggatctaacagtgagagggatagttttttctaacaacgggtcgcgtaaattggtgcttcagaggagaaggctgtactattccatatggttattcaatgagtattggactcgactctttatcatggaggtgcctatgtatggtctgcaggatatcggattcattggcagagctagattacggactgtctgatacaatcatatatccccttatgagctatgtcaaaccgagctattcaggctgcatgcatggtcaaggttctgggcaatgattt

SEQ ID NO: 67405 - DNA, 432 bp, Glycine max
  Clone ID: PAT_MRT3847_31881C.1
gacccacacgtacgacggcgacagaaggggagaactgaaaatgttgatgatgaacacaatgcaatagctgtggtggagtctgagcgagggaggaatcattcaaggagacatgatgatccaagaggaagatcaaaatcgcaattgcatccacaacgagatatgagtaacattcaatgttattattgtggtgagaatgatcatgtgcaagtgaggtgtaaacaaatgaaggaggatttgaaaaaattaagagatatgaacaaagatgacgccaactcccaaactaatgtagtaaaaagtgtggaagatgaagatgatgtgtttttggcaacaaatgatggggttgctaaaacaaaatggatgatggattctgctgtctcaaagcacatttgcagagatcgagatatgtttgatactttgaaaatcgatggggaa

SEQ ID NO: 67406 - DNA, 349 bp, Glycine max
  Clone ID: PAT_MRT3847_31882C.1
tttttgatcactataatttcatttttacgagaccgggactaacggggacgttgggtcaaatttacacaaatatcctaggcaacataagagactccgttaaagaccacaacgcatatgtgggctttcatagttccattcgcctcatttttccgcccacgagaccgaacctcgatcgcattcaacgataccgttacgaaccgacggctaaataacgtccacggtcaggtttccgaaacgacaacttggattacgctacgtttttaatggcgcgaactaacgcacggggtcgcagttaacggaagaacgtgactgcgctcacccttggcagtgattatgagcattttggggt

SEQ ID NO: 67407 - DNA, 515 bp, Glycine max
  unsure (1)..(515): unsure at all n locations
  Clone ID: PAT_MRT3847_31883C.1
gtaanccctcttttcttccttttttcttattttttgctttttttcaggcgaataatagagggcctaatttttattgaagggagctcatcatatttttttatgttgctaataacggactccgttcactttttgaacgaaccacctgattctcgtttttttaaaaaggaaaggaaggattcactggggaagggtttcaaagtgatatccctaaccccccagtcccctaaacgacatgggaaagacaaaaaaagggcgaacccgaccccgatggaaacgacccattactagccccccacacacagataaaagcctaaggtcaacgacggctatttaagagaggtgaccaccttcgggaacaaccacagggttggcggttcttccggatctggatcccaccttctttatctccttgacgacatccattcccttgacaaactgtccacaacacaacgtgctttgcgagaagccactccgtgttcagggtgcagatgaaaaactcatatccgttggttccg

SEQ ID NO: 67408 - DNA, 447 bp, Glycine max
  Clone ID: PAT_MRT3847_31884C.1
tttttgtaatactcaaaccttttctcttttttttttgccttttgctacaaaaatacttatttaactccatattaaaaaacaaaaggataaatacaaaaggttcaacattacagggatcatgaataaaaaaaaatacaattaaagacagaaatcgtcatatttgctgggtcaaaaaggaatttaggtctacgtttttttttcttctagccatattctgctgctatatattgatttagcatgtttctcgcaaatctaagtgtgtgtttggataaacattagtaaaattgattttaaatgaaattgattttgaagtgatatgatttatgtctgaatgttttattataaaaataagttagaaataaaattcaatacaaaattttgaatctaaggcaaatactactcaaaattgtttcaatccaaaatcaattatggacctagaaataattt

SEQ ID NO: 67409 - DNA, 689 bp, Glycine max
  unsure (1)..(689): unsure at all n locations
  Clone ID: PAT_MRT3847_31885C.1
aattcctatctaaaaaattatatatattaacttttttacataaaaatagttgttgcagtgtgtgatctgaatcccgatgaacaactaacgtgcttggttgggcgtaccttgccaaagaagcacaagctgcaggttctgcgcgtctagtgtaagaaaacgtggatataaatacgttacaaaacgctaattttcagtgaccaaagcacataataaggccattaccaaacagggaagaacgggaatcacgcccctgaaatgattatttccccagtgcctacaataatcgcaaatttaccgaatccacattctagctcccatgattctaaccttcgtagagtcataatctcactccttcacaagaaccgcaagaacccaaaacacgttcaatcaatacactgccacgccataaaaactagaacttcacaagacccttttgtagccttcgagcttcttcgcgtatattgcaaggtgaactacattgatcatgccatcaagctcttccgctgcacccagaacccaaatgtgtacctttacacttctctcattgatgggtttgtgtcatttggctcttacactgatgccatcaacttgntttgccaaatggttcggaagcacgttttggctgataactatgcagtcactgcgatgctgaaagcatgcgtgctttaacgtgctttgggaagtggaaa

SEQ ID NO: 67410 - DNA, 271 bp, Glycine max
  Clone ID: PAT_MRT3847_31886C.1
agcagtggatggggacattggtgcaaacccttgtgctgagggtggagaagatgagggagtcgatgacgcagctgttgagggtgctgacattgttgatacattcagacttcaggagcaacccggttttgataagaaacagtcgggtaccaacatgaataggtatatcaagaattggactcccgggctgggtggcaatgaaaccgagtgtggttgaagagacacaatcgagggagcagatgcatacctgctctctgagatgaaagataggcag

SEQ ID NO: 67411 - DNA, 215 bp, Glycine max
  Clone ID: PAT_MRT3847_31887C.1
actaggcgtccgtacatagtaaagccactaatgtcaatcgtgtcatttgtgaacttgctgcgatcatattaatcagggaacttaactaggatgacctcgcatatcggctcgtcagaaccgctcatagctcttgacataacaatgctctaacatcagatctctatgatgggccttacgtatgacgccaagctgaccatccagatggcatatgctta

SEQ ID NO: 67412 - DNA, 392 bp, Glycine max
  unsure (1)..(392): unsure at all n locations
  Clone ID: PAT_MRT3847_31888C.1
nncgtcgcatgcacgcgtacgtaagctcggaattcggctcgagagcagataaagaagcaaacggctctcgctgagctggtgaaacacaagcccaaggccacagaagatcagctgaagacggtgatgggtgacttcgcacaattcgtggacaagtgttgcaaggctgccgacaaggataactgcttcgccactgaggggccaaaccttgttgctagaagcaaagaagccttagcctaaacacatcacaaccatctcaggctaccctgagaaaaaaagacatgaagactcaggactcatctcttctgttggtgtaaaaccaacaccctaaggaacacaaatttctttgaacatttgacttcttttctctgtgccgcaattaataaaaaatagaa

SEQ ID NO: 67413 - DNA, 953 bp, Glycine max
  Clone ID: PAT_MRT3847_31889C.1
actgcaaagatcaagatatcttatacacgatattaaagtccatgacatccctacacatggtcatcttatctagctaaaaaataataatctatatattgacaacaaaaaaagcttccaaatatatggacaagataaaatatttttttgtggggtaatgtggttccctccaaataggaaaaatatggagaaagaaatctagggaaatgttttaacaagcatatcgatactgagagttctgaataatgacatgactgagttcatctttgaagcacactgaactctgtggcaaagtacatggcaatctatcaataatatcatagtgccttaattgagttcataattaaatacatgctgatcatcattataagcaaatgacattgaccttactagaaagaggtaaagcattcattctcggatgaatttgagtcgtcgcaaggggagtgattgtgtctaccttcataggtggttatcaccatacgacaatcctctgatagtcgttcaaccctcttcttcaccctacagttgttgtgggtgcaccggtaataacttctgcgatgtcccctcttatgacatcgtcctcgccgtatctcctccgtgtgtatccatcacaaactccaaagatatattttttaatctttaaattgacatcatactagttcattaatttactcaaatggagccaacatatggtgcatgtgctatgtttaacaaataactatgtcgcgcacttaagtatatcgtcaggatttgatccttagattcatttgcatgaaaaaaataatctgttaaagaagattaatttcttaaatgaatttcaatactttgaataattaatttctgatttcggctgcaggaactgggatcaccaaaaaaaatatactagatgggggactataaattgatgtgcatgacagatactgcgtagaagttattttggttatatttcaaaggat

SEQ ID NO: 67414 - DNA, 102 bp, Glycine max
  Clone ID: PAT_MRT3847_3188C.1
catgggcccattgcagaaggcgaatgagaaatcagaaccggagcgggaagtgggcctggaactgggccggaccaaatacaagtacacaacagtgactcacgg

SEQ ID NO: 67415 - DNA, 317 bp, Glycine max
  Clone ID: PAT_MRT3847_31890C.1
ggggggttcatttaaaaaaccccatttatgaagaagagcaaggaaaaacaaaatcatccccaaggtggtgtttaaaccccaagcaaaaaaaaggtgggggaaaccaacaaaaggggcgggtcccggtcgcttatccctcactttaagggtggaaaaaaagttggtctcaacccatccaaaaacctgattttaaagggcaaaaaaaacaaagttatttgaaagccctaaatcccccaaaaagggcaaattttgggtatcccttgaagggggcccacaattttgccaaccaaaaccccaaaatattgcggggggaaaaa

SEQ ID NO: 67416 - DNA, 454 bp, Glycine max
  Clone ID: PAT_MRT3847_31891C.1
gacactctcaaagcttgacgtccatgccccccttccttagcttcgaaattcggttcaagcggccgtcctcgattcgactatggtttttgggtcctactgggcgtctgctgtccttgctctgtcaatcgttttcctggcttaaaacataatggggttgttcagccggaaaaattacttggaggtggttggcaagactgtcttgctgactggtgcttccactggtttggcccgtggcgtggccaagaccttagcaaaaaaaggagaaaatatcgtgattgttgcgaggaaccaggctcgtctggctgaagcactcgctgttgtcagtgctgcagcgaaggatcccgccaaacagcgtttcaccaccatcttcgcggacgtgagcagcgctgaggagaatgtccgcatcgtggcagaaacaaccgcttggaacaatggcctggcccccgacatcgtc

SEQ ID NO: 67417 - DNA, 411 bp, Glycine max
  Clone ID: PAT_MRT3847_31892C.1
ggctcgaggtgcagggctttatgtgtctaagattaaaaccaaatcctcggtagagctcaccactgatagtgatcctctataccagggaattgatttctgctcgactgctgctggcgcccgagttgaggagctcaacatggatcttttcacgagatgtatggagccggatggggaaatgtctgtgggatgctgagatggactcaagaagcgtagatgatgctgtccttgttggtggatctaccagaactgccatggctaaacagcggctgcacgactattaattgggaaacgatctcttgcccgatcattaatcccgaacaggctgatgcctatggtgtcagtgatcaggccgcaactctaagagaggcgggctatgtaaaggttcacgatcttgtccttctggatgtcacc

SEQ ID NO: 67418 - DNA, 334 bp, Glycine max
  Clone ID: PAT_MRT3847_31893C.1
aaaaagggaatctggccaaaaatttaacttaaaaacgaatgtttttttacgggaaccaataacccccatgcttttaggggggggggttactccaattttactgattaaattggggccttttataaaatgacttgccaggggggggggttttatacccgaaaggccgcccttttcctttattttttttttcaaaggccaaaagaaaaaccctttaaatgttccaatttgggggccccccttcccctgttttttaacagcacaactttacttggggccttatagcgctggatacccaaaaaggaactgggcgcctaaaaccccaaacttttttttt

SEQ ID NO: 67419 - DNA, 523 bp, Glycine max
  unsure (1)..(523): unsure at all n locations
  Clone ID: PAT_MRT3847_31894C.1
atcctctagagcggccgnttttttttttttttttttttttttcgcgttttgatggtaaagatttcccaaaacatggggggtgaatcaaacccatggggggatggaaattgagatactgatgcaagttcttcccttctgtataaggtatattcatattttaaagatgttgacaataagttctttcaaaatggactatttgtccctatgatagaggtgttccagaaatgactgaaaaccagtaaatatcttcactaacgaatagatcgtgtggcatccgaaaatggaaagattagaacaaggtcttccctcccacgcctctttgtggaaaatcggccggcatcaatttgttagatacctgtgactcgaccggtgaaataatttctctcttcaaaaaagcatgtttcctttgaccatcgtaaaaagaaaagattttgctgccaattaacaagatattgaggaattgaccatacgttaaatcataattattgataccaggccttttccacataaaaaggaaattttt

SEQ ID NO: 67420 - DNA, 189 bp, Glycine max
  Clone ID: PAT_MRT3847_31895C.1
ctcctaaaggttctatgttggatcttaaggagtttcaacctcatcttgctcctctcaatacgaattttataccagcttttgactgtggatagaccttcgatacaatgatgtgcagggtcagattgagacaaagtggttctcatcacctcagtcagatcttgaaactcctaaatgttctatgcacgacat

SEQ ID NO: 67421 - DNA, 394 bp, Glycine max
  Clone ID: PAT_MRT3847_31896C.1
ccccgagttcaagatcttgctacatccactgatgtaggtatgctcacagaatcttgtcattatcataggtaacaccaggatgacactgtgttccgttcacggatacacacccttctttggcaccaaggagacactgtaccctctgtgtcgccttccaaatgtcgtaactcatcttatttctctcgccctcactggacgctttaccctactcataccagatgacacagctgcatttcttcatatgccaaaagaagggcaatgggctggttggcaaccgggcgctcttgccattgctctcaacactggtcatcatactcgggactacagctatggtagatccgatattctctctcacaggcttctatccactccacctgggaaccaaagaacaatc

SEQ ID NO: 67422 - DNA, 479 bp, Glycine max
  unsure (1)..(479): unsure at all n locations
  Clone ID: PAT_MRT3847_31897C.1
gcttagcagctggttcaanagaccggcaaaaatgcgctcatgaaagcgattgcaggacctatccagaaaaaaatccacagaaaccttgggagggaaaaaggcacggggaaactgactaccccccagggcactaaccgaagggctaaaagaatgcctgtaggtatagggggaggagctggtgcaaagaatgctatgccaaagaatatgccaaaagcggggatatcaatggggagagatcttgtcggagaactcgctaatgaaacttctaagaagactaaacgctacattaaatgcacagaagctttcttcatagcagttggaaacacggctgatgacaccatcaatcccgaggatttggcccacaaggtggagcagcatggagagattcaagaaaaagttgcactgaaagtatcacatgaggaattgcttacagatgggccaactgaagcgagtcctgcaacaactgtgtgggcagatgg

SEQ ID NO: 67423 - DNA, 577 bp, Glycine max
  unsure (1)..(577): unsure at all n locations
  Clone ID: PAT_MRT3847_31898C.1
gagcggccgcccncnanncgnncganaanaaactttaaaatttgaagccaaaaccgggnagaaaaacanggggaaggggggggaaaacagaaaggagacgacacaaagcacacaaggggaacaaaannaaaacccaggcaccaaagcaaaacgcccaggaaagaaanccaggaaccaacacaggcggccaagaaaggcacggccgacaaggaaaacaaagccaaagggaggganaggacgccacggcagccaaccacaggagcaaggaggccaagggcgaggaccggaggaacaagggaggcaggggacagcagcaagaggcaccccaccagggagaaaaagggggcggagcaaaaagaacagaggacaacccccccaagccacgganaaggcaggggggggggagccccatgggcaccaggaacagcaacaggaagagnaccctccccttccccaaaaggagttttggaatatggcacccgcaggccaagggaaccggaaccggggaaaacagcaccccgcagataagggggcacaagggtagcacaattcacaggggcaaacccgaagaagcaaa

SEQ ID NO: 67424 - DNA, 139 bp, Glycine max
  unsure (1)..(139): unsure at all n locations
  Clone ID: PAT_MRT3847_31899C.1
atcctaggctggctgtaantgagtcagttacattnnaanaaanctttggctctnatntgagctcatttgacaganacttcatncaaggaagnaagnngtagangnngcacctgcttcatgatgggtgcctcaggaaana

SEQ ID NO: 67425 - DNA, 376 bp, Glycine max
  Clone ID: PAT_MRT3847_3189C.1
gcaacacgaacgagttaactgccgatggtactagcactgcaataatttagcctggtgggatgattaagtctggactactaacattcgctattactgctaatcctatttctttgaagaaggggatggattgaactgcaaaggatctgttaaagtactcgaatgatagaaatgtacctgactaaagaactgagcatattcgagctctatgctcaatttctgctggaaacgacgattatgtaccgtaactctgattgcatgaagcatattgacgactagtgtgtcagatgggcagatatctaatgagtcttaaccatcattggaatcctgtgatgtaattgctgtagggatgaatgtatacataacgctttgaggacag

SEQ ID NO: 67426 - DNA, 210 bp, Glycine max
  Clone ID: PAT_MRT3847_318C.1
tagaagttctgccttgatagatgaatattctgatgatagggaagattttcacatagtcagaagctgaactagaggcataccagattggtcttgagaattatgtgagaaaaacagccttggcagttgaaccggcacatgatattgacttgtcttcctgtttcgggcaatgtgcgccgtgattaccgtgatagtgctcgggaatgttgagga

SEQ ID NO: 67427 - DNA, 225 bp, Glycine max
  Clone ID: PAT_MRT3847_31900C.1
gactgctgcaaaaaaaccacattaagatacggatgggaatagacgacaaaaggggtgggctgatagaacactagactgggataacggtttcgaaattcctagattggcttaggccccttgaattttaaaatagtgggacatcttacatcattgttcattaaaggagggggagtgcacccgaacccctagatggggcgagaacgagagagagaaatggggtctgct

SEQ ID NO: 67428 - DNA, 226 bp, Glycine max
  Clone ID: PAT_MRT3847_31901C.1
cacctttgttcactcttacttctcttagcggctagaggttttacgcgcagcttcttctagctttacggcagataggtaaggacaaggttcacatcagtattgtggtcattggccatgtcgactctgggaaatccactaccactggtcacctgatttacaagcttggaggcacggacaagcgcgctaatgagaggcttgagcaggccgcagccgtgacgtacaagag

SEQ ID NO: 67429 - DNA, 2684 bp, Glycine max
  Clone ID: PAT_MRT3847_31902C.1
ttgaggcaattttgtgcgtactaggaaaatatgataatgctgagaggactgaggagcgtgcagctgggtggtatcgtttgaccagggaaattcttaagttaccagatgcatcatcaaaggaaagttctaaagataaacagaagaacaaacgtcctcaactgcttattaaacttgtaatgagaaggttagagagttctttccgtagcttttctagacctgtgcttcatgcagcagctagagttgtacaggagatggggaaaagtcgggctgctgcctttgctttgggcatacaagatgttgaagaaggagcacatgtcaatacatttgctgaggctactgattataatgattcagatgaaagcacacatcccgaaagcattcgaagaacttcttcagtatctaatttaaccgctggcagagataccgtcgcgggtatgttggcttcattaatggaagtggtacggacaacagttgcctgtgaatgtgtttatgtacgagccatggtgatcaaggcattaatctggatgcaaggtccatttgactcatttgatgaactagaatttattattgcatcggaactttctgatccagcttggccagcagcactattgaatgatgtactactcactttgcatgctcgttttaaggcttctccagatatggctgttactcttcttgaaattgcaagaatatttgctaccaaagttccaggaaaggttgatgctgatgtgttacaactgctctggaagacttgtcttgttggagctggtcctgatggaaaacataaagctttagaagcagtcacaattgttcttgatctaccacctccacagccagggtcaatgcttggtcttacttcagtggacagggtgtctgcgtctgacccaaagtctgctcttgcattacaaagactagttcaagctgctgtatggtttcttggggaaaatgcaaattatgctgcttctgaatatggctcgagatctgctaccccgcctggtactgcattgatgatgttagatgctgacaaaatggttgctgctgctagttctcgtaatcctactctagcaggtgccttgacaaggctccagaggtgtgcattcaatggcagctgggagattcgaattattgctgctcaagctcttacaacaatggcaattagatctggtgaacctttcaggttacagatttatgagtttctgcacactttggggcaaggtggtcttcagtcacagttctctgatatgcatcttagtaatggagaagatcaaggagcaagtggtacaggccttggagttttattaagtcctatgataaaggttctggatgagatgtatagagcacaagatgatttgatcaaggaaatacgcaatcatgacaatgctaagaaagaatggactgatgatgaactgaagaaactatatgaaacccatgaaaggctgctagatcttgtttcattgttttgttatgttccaagaacaaagtatctacctttgggcccaataagtgccaaactcattgacatctatcgtacacgccacaatattagttcatctactggtttgagtgatccagctgttgccactggtatatctgatcttgtctatgaatcccaaccaccacctgctgagcctgatacacttgatgatgacctagtaaatgcttgggcagcaaaccttggtgatgatggcttatggggaaacaatgcaccagcaatgaatagggtaaatgaatttctggcaggtgctggaacagacgccccagaagttgatgaagagaatatgatctctaggccttcagttagctatgatgatatgtgggcaaaaacacttctagaatcttctgagctagaggaagatgatgcaaagtcattgggatcatcatctccagattcaacaggatcagttgaaacttcgatatcatcccactttggaggaatgagctacccttcgctgtttagttcccgaccacaaactacggataaggcaccagcaagccgaggctctatgtatgagggttatggttctccgataagagaagagcctccgtcatactcatcctctgtcatgcaaagacacgagtcatttgagaacccccttgcagggaatggattgcacagttttgggtctcaagatgatgagcgagcttcatctggaaatcctcaacatggaagtgcactttatgacttcacagcaggaggagacgatgaattgagtttaaccgcaggagaagaagtcgacattgagtacgaagtagatggctggttttatgttaagaagaaacgccctggtagggatggcaagatggctggactggttcctgttttatatgttagtcaatcttgaatcatgtacgtaagctattgtaacttccgattcttgcaaaaaggctttttttgctttattttatccagtgttgctttcattcaaagtttccatgttcccatgtagcatgccattctggctgttctccttcaaagtatcttgtatcctggtccctacctaattcgtctagttgtatgctatcaaagtatcatttaccatgctaattggttgcgagtgtctagtcattcatcatagtaggcctttcattctattatatttatattttacatacagctattggtgtacgagtgtttgtttttatacaaggaatttaatatatcaagtgaaagtttcacgtttttg

SEQ ID NO: 67430 - DNA, 561 bp, Glycine max
  Clone ID: PAT_MRT3847_31903C.1
tcgcaataagtggattactattgaaaggtggagattatattgaaacactttctggaattaagacagttgcttttgataaaacgggcacaataacaagaggagagttcactgtgacagatttttctgtttctgtagatgacattagcattgaaactttactgtactgggtttcaagtgttgagagtaaatcaagtcatcctatggcagctgcactagtggaatatggaatgttgaattctgtcaagccaatccctgaaaatgtggagaattttcaaaattttccaggggaaggagtttatggtataattaatgggaaggatatctatataggcaataggagaatcggtgctagagctggctctgaaagagttgattgtcgcacgcaatgtcaaagccatgaaatttctaccccgaagcaatactgtggaccaactctggttggagtcttcaggttagctgatacatgcagatcaggggcattggaggcaatagaagaactaaagttgctaggagtgagatcagtcatgctaactgaagatagctctcaggctgctatgtatg

SEQ ID NO: 67431 - DNA, 319 bp, Glycine max
  unsure (1)..(319): unsure at all n locations
  Clone ID: PAT_MRT3847_31904C.1
ggaaagaggtttctgacccgcataccaagcattggncaaagggtttgtggncagntcagccatctcgtgtgcaatcacactaatcatgccgtggaccccaacgtgggcgttcggggacttaaacggtttgcggttagggatatacgggggtggtggggcacggtacaggtgtacgcggaccaaacggggggcaacgtttgaaattttgtttggggtgggggggggggaggagggagggggtgtgtgtggggngggggggggggtgggggggtggtgggtggggggtggggtgggggggggnggtggggggtgggggggg

SEQ ID NO: 67432 - DNA, 934 bp, Glycine max
  Clone ID: PAT_MRT3847_31905C.1
taaattttacaaaccttaagaacactgaaacaacaaaccaatttccttccttctttctttccctggttcacactcatttccaaaacccaaacaaaaccttatatataaccatattaaccacttcttctgcttcacacaaacccaacaacaaaacacaaaccaaatagtttcccacaagcaacacacattacttcattttctttatttcttttgtttatacggttttttccttggaagagaattattcgaacctttaaaacataaacatgggaataagcacacgtacgctggagatcacagttatctcctgcgaaaacctccacggcgtaaaggacgacgcgtacgtggttgttcgggcggagtccttaaactgctgcaccaccagaagggtcaaagtcgacgacggcaccaaaaaacttctctcgtggaaccagaagttcttgttggacatgcccatgcatgcaaggtccataaccttcgaagtgcaatgtaacaggttcaagggctcccggccactcggggttgcccgaatcgccgcctccgatttcctcggtggcgcagccctgccggagaatcggttgcaggtgctgagttacgggctgagggactgggaagggaagaggaatggggtcattcatttctccgtgagggtggccgcatcgtcgaagacgacggaggaggagtgtttgaatatgaagcccgccgtggaactggtggtggcgagaaagggttgcggtgatcgaatcaatgtcggtggcaagaggtccaatgaagttgctgttggtgttccgttttggtggaactaccccaacattatttagagattagttaattaatttacattatttatttatttatttttgtataacggtcaaggagcctaaaagatcaattttaatttcaattatatataaaattttcatttttttaaaaa

SEQ ID NO: 67433 - DNA, 1981 bp, Glycine max
  Clone ID: PAT_MRT3847_31906C.1
aaaaaacattgcccttgttctttcaaagttaccaaacacaagtacacaacacaacagcaacatatggcgtctgaacaattggctcgcagagagggtcaaagatcatgcaggaaaagccatgggagatattggtggacgtgggaaagccagagagactcacgagctgggtgcacactttgaatccctggctgacaaagtaactgaccatgcagcagccaatgtagttggaaacaaagagagtcaaagagaagctcgtggtggtgttcgtgatgttgggaagttcgaaatgagaactgaagggggagaaaaaggaaacaaggatagaccagaactgaaaacacgaaccagagaggtaataggaagaacggagaaagaaagaggaagagaaagtggaggacaagtagtggcagagaaaggaagagaaacagaaactgcaaggggaagggttggtgctgaaaatgaaggtgcaagaacaaccgctgttataacttgcacgttggaaaaaggtggtggtactcagaaaccaataagagaagaagagagagagagtgaaagtgaaagatcagcgtgggaacagatttccaactacagtgatcaagccacacaaggtgtgaaggaaaagtacgagagagcaaagcaagcagcaagcgagacactgaacaccacaacacaaaccgcacaagagaaaagcgcacaggcaaagaatcttgcagcacaagcaaaggacgcaacgttagagaagggtcagcaaggctatgctgtgacaaaggacaccatttcaagtgcagcgaaaaccgcttcggagaaaactgcgccagtggcagagaaggccaaagactacactcttcaggctgcggagaaggccaagagtgcgggtggcacaacggcgagttacgtcggagagaaagcggtgcaggccaaggatgtcgccgtggagagtgggaagagtgcggctgggtatgctgccaaggtggctgctgatttgagggacaaggccaccgcggtggggtgggccgcggcccatttttcggcggaaaagacggtggaagggaccaaggccgccgcccatgttgtcgagggagcggccgggtatgccggacataaggccgcggagcttgcttcgatgtcggccggtgctgttaaagggctggctgcttctgctggtgagactgctaaggaatacaccgcaaagaagaaagaggaggcacagcgggaattggaggccaaaaaaccatctcaacctcaggaagctgaagagaggccatcagaaggaattggcgaaactgtgaggcagtatgcacaaaaaccaaagccaagtgaaagaaaccctcagaaggagggaaccggaagcatcgtgtttacagcaataggcgaaacagtaagcagtgccggtgagaaggtaaagaaaccgtttaaaaacactatgggaggagaaagtgaaggaggaggagggaaagaagaggggaagagtgtcattggtaaaagtttgaccagcattggtgagaagctgggtgatgcaaaacagagagaggagctgttagacaacgtcactggcaacatcaccgagggaggaggcgaggtgttgggagcagtaggtgaaaccgttgctgagattggacagaacatgatgaagccagcggagatagttcaggaacgcgctcacgttcgacaagcgggtggggtcttggatgccattggtgaaaccattgctgagattgctgaaacgactcgagtcatggtttctggagaggacgagagagtgctgaggcagagcgtggtgttggagactcgcgtaactggtcgtgccaagcatgaagaagggtcgcacggtgcttgagtctcttgagtgaacgctgtgttttttaaggtttatttctgttaatgtcatgtttagtctgtgtcaagtttcatgtttcgggtttgttgactttgttctatggaattgtaaccaataagaatctcctttttttgagattaaaaa

SEQ ID NO: 67434 - DNA, 249 bp, Glycine max
  Clone ID: PAT_MRT3847_31907C.1
tctcgagccgaatcggctcgagtacggctgcgagaagacgacagaagggatccataaaattgcttgaatctgttcaaggtccaatgccttaatggcctttttttacttatatcagtttaaatgaaccttttaaaagtctaaaatcaaccctacgcgtaactttattgctttcaaagaactacataggtctgagttcctcatcgcaattgaggatatgtaggagcaagagccacactcttgtcgacctcc

SEQ ID NO: 67435 - DNA, 2429 bp, Glycine max
  Clone ID: PAT_MRT3847_31908C.1
gtaccatcacacgttgcacttcccactaccctttttaccacatgtcctccctcatgcaaaccccacctcttccaaaccgccaacgttaacccttcccttctcctttttaatcacacttccattcccatgcacaccccacacacatcctactaaaaaacattgcccttgttctttcaaagttaccaaacacaagtacacaacacaacagcaacatatggcgtctgaacaattggctcgcagagagaacaccaccaccgagaaggagattcacgttgagaaacacagggttcccaagatggccacccacttcgagcaccttgcggagcaagctaaagaatctgacatcaccgctgggaaggatactccgcagggtagcatagaagccttgcaagctggagagagggtcaaagatcatgcaggaaaagccatgggagatattggtggacgtgggaaagccagagagactcacgagctgggtgcacactttgaatccctggctgacaaagtaactgaccatgcagcagccaatgtagttggaaacaaagagagtcaaagagaagctcgtggtggtgttcgtgatgttgggaagttcgaaatgagaactgaagggggagaaaaaggaaacaaggatagaccagaactgaaaacacgaaccagagaggtaataggaagaacggagaaagaaagaggaagagaaagtggaggacaagtagtggcagagaaaggaagagaaacagaaactgcaaggggaagggttggtgctgaaaatgaaggtgcaagaacaaccgctgttataacttgcacgttggaaaaaggtggtggtactcagaaaccaataagagaagaagagagagagagtgaaagtgaaagatcagcgtgggaacagatttccaactacagtgatcaagccacacaaggtgtgaaggaaaagtacgagagagcaaagcaagcagcaagcgagacactgaacaccacaacacaaaccgcacaagagaaaagcgcacaggcaaagaatcttgcagcacaagcaaaggacgcaacgttagagaagggtcagcaaggctatgctgtgacaaaggacaccatttcaagtgcagcgaaaaccgcttcggagaaaactgcgccagtggcagagaaggccaaagactacactcttcaggctgcggagaaggccaagagtgcgggtggcacaacggcgagttacgtcggagagaaagcggtgcaggccaaggatgtcgccgtggagagtgggaagagtgcggctgggtatgctgccaaggtggctgctgatttgagggacaaggccaccgcgcaagtgaaagaaaccctcagaaggagggaaccggaagcatcgtgtttacagcaataggcgaaacagtaagcagtgccggtgagaaggtatagaaaccgtttaaaaacactatgggaggagaaagtgaaggaggaggagggaaagaagaggggaagagtgtcattggtaaaagtttgaccagcattggtgagaagctgggtgatgcaaaacagagagaggagctgttagacaacgtcactggcaacatcaccgagggaggaggcgaggtgttgggagcagtaggtgaaaccgttgctgagattggacagaacatgatgaagccagcggagatagttcaggaacgcgctcacgttcgacaagcgggtggggtcttggatgccattggtgaaaccattgctgagattgctgaaacgactcgagtcatggtttctggagaggacgagagagtggtgaggcagagcgtggtgttggagactgtagaagtttgaccagcattggtgagaagctgggtgatgcaaaacagagagaggagctgttagacaacgtcactggcaacatcaccgagggaggaggcgaggtgttgggagcagtaggtgaaaccgttgctgagattggacagaacatgatgaagccagcggagatagttcaggaacgcgctcacgttcgacaagcgggtggggtcttggatgccattggtgaaaccattgctgagattgctgaaacgactcgagtcatggtttctggagaggacgagagagtgctgaggcagagcgtggtgttggagactcgcgtaactggtcgtgccaagcatgaagaagggtcgcacggtgcttgagtctcttgagtgaacgctgtgttttttaaggtttatttctgttaatgtcatgtttagtctgtgtcaagtttcatgtttcgggtttgttgactttgttctatggaattgtaaccaataagaatctcctttttttgagattatggaaaatagcaaaattgtgtttatgcctgtataatagtacgcaatgtgtgctttcatgtgatcgctgcatggaagcaaatatttaatttttgatgcactgtatgatcgctacaatattatctatcgagttatgttaactta

SEQ ID NO: 67436 - DNA, 220 bp, Glycine max
  Clone ID: PAT_MRT3847_31909C.1
ggaagtgcacaggttagttatgggttcaaggaaacgaaaaactgggactgttccatccatggcctgtcttcttcaagcgagaatagaagcgtaactggcccttcttgtttgtatccgacgtcacctgaactcttatcacacaaactttctcttcgtctatctcctaacttaacttctcctcctccttctttaacaacctacacaattggatttttgttct

SEQ ID NO: 67437 - DNA, 326 bp, Glycine max
  Clone ID: PAT_MRT3847_3190C.1
aattattataataattatataccagaatatacaaaaaaggcgctcataataaaagggtgttaaaaaatcacaaaataaaactactaacaaaaaaatccacaaaccttacacaataaaacaagaaattaatcacattaaccaaatttggcaaggacatcattcaaaaaaaacacagtaacaacttactacttaactgcttacaatcagcacttaatttaagctgcaagaaccaaattgccaatatcacaaaagagcttgaccaaaaattccttaaataaaccctccaatacctaagcttaccaccaataacagaatcaacatcaaaa

SEQ ID NO: 67438 - DNA, 341 bp, Glycine max
  Clone ID: PAT_MRT3847_31910C.1
cccacgcgttcgtttaaacatcattgtttcttcaaaattttggcaaagatttgtcttttggtttgagtgtcaaacataacctgtttcataggacagatcttctttgcacacgttactatggtgttgttgttttttttttttttttatggggattggagattttttttttggccggtattggagattctacagatgccactcttttgggttctgggtctgggtgctttacgaaaatggctggattgtttttttgcgggttaatctgaactaaatgctggatgcttggggggcgacttcatgggcctatatgacccggtaaaattgcctgtaaagtcgtcatg

SEQ ID NO: 67439 - DNA, 255 bp, Glycine max
  Clone ID: PAT_MRT3847_31911C.1
aggagcgggaacagatgagtgaagcagaggtgggggtgtttgtccagcgactccggggcctgatgaatgacatcgcagccttccctgcacccaccattgcggctatggatgggtttgccttgggcggaggcctagagcttgccctggcctgtgacctccgagtggcagcttcctcggcagtcatgggactgattgagaccacgcgagggctcctcccgggggcaagagggactcagaggctgccccgttgtctgg

SEQ ID NO: 67440 - DNA, 431 bp, Glycine max
  unsure (1)..(431): unsure at all n locations
  Clone ID: PAT_MRT3847_31912C.1
gatatgcaccctgtggggaaaaacaanacacacaataataaacaaaataaaaactttctcctcctccttcaatgtgacaattggtggtggttgttgccctttggtccgtttccccccaatgccaaaggttggtctttcgagaaggccttcaatcgctttatccccgtatccggcttttctccttggtgctggttcctgtcctgccgctttttctcaacaaaccaacatccatcaatgatgataacnaagccaattaactttgttagcctctcgctgtgtctgaaaactcttaaaagtttggccaagactttggagccacagtttggagactttgtgttggcaacgggttaattgggtttcttggactcagcatgtggaaaccgttggtgggggttggaggtggaggcattttcgttcccatgctcaatctg

SEQ ID NO: 67441 - DNA, 299 bp, Glycine max
  unsure (1)..(299): unsure at all n locations
  Clone ID: PAT_MRT3847_31913C.1
tcgatggggacaagnttntcacttcagaaccaactgaagtagttcaggcacgaaattacanttctcatggtacnanctttccagattncnccgagntctatnctatggaacncagtgtcttgcaaagganattcnaaattgncgttactgtgncanntcgataactcggtggatattctcacgaatgatattggtgttgttgtnggtgatggatgatgangggggagcctnaaggggttcaacatatntgttggtggtggaatgggaggaactcataggttggaaaccanttttcctcg

SEQ ID NO: 67442 - DNA, 498 bp, Glycine max
  Clone ID: PAT_MRT3847_31914C.1
caagaaccattcgggatagccgtggggttcaaagcaagtttcccttttatgtcgagtcgcattgcaatgactgcatcggattttgtctttcttggcttcatcaaggtctcgcaaagaacgaggtcgcatccctgaggcagtttttgaaaccattgcatggattattctactacaaaatccttccttccaagcatagtttcttgcccctgaaattcacagaggataatatggcagcattcttcaagtctcgggagcggtttctttcaaagaatgtcactttcaaattggattgaactgttggtcaagcccgttgagaaaattaaatactcgatccttgttaagatcgtccatacagctttttacatctgctgcacacactccattctacttgggcatcgcttatccattttgttgaatctgggttgtattacaacacagttcataatgttgggcttcatcttctccgtcatagaacatttgggtaacgtaatactatcc

SEQ ID NO: 67443 - DNA, 389 bp, Glycine max
  Clone ID: PAT_MRT3847_31915C.1
ttgttaccaccccgaccacgcgaccgaaaagggagcttgttctaaacagcacaacaattggagccggagtggcatctctgatcctcctcttgaactagacatagcgtggcggaacaaggaagagtggggaagagggtccaccaacagatgcaggggcatggccaataataggccacctcccatttgtcgcttgcgtcaaagacacctcataaaacatagggggactaggctgacaagaatggacccataatctcgatcaaagatggagccaaaaacgcaagggtagttagcaacagggaaatggataaagaatgccacaccacacacgacagagacgatccctccctccccgagcaaacctcactaacccatagtgctacaaccgatcc

SEQ ID NO: 67444 - DNA, 522 bp, Glycine max
  Clone ID: PAT_MRT3847_31916C.1
caggtcgcatagacatccagagaaaattattttgtagcatacaattgactggcggggtggctttgacaagtggcttaattgcagcagtagaagaaagagttttacatgccattcctccaaatgaagcaattgatacagtggagattcttggtgtccttgatttaggcagggatgcatggataagtcgggaggactggattcacaatggggtccacgttggaagtaacagaaaatacaaggattcatattatcttcaggctcaagctatgtgttatatgaattcttgaaaggctgatgagacactacaatggaatcaggggaaaaaaagatgtaaagaatgtttgaaggctatttgagtgctaattacatggattacaattccataatttccagctattttttttaggccataggacatagtcaattcaaatgggtttaaaccattgtttgggatcttaatttctatctatgtatgtcagatcatcttgaaactgagattatttgttcctgacaacgagaata

SEQ ID NO: 67445 - DNA, 451 bp, Glycine max
  unsure (1)..(451): unsure at all n locations
  Clone ID: PAT_MRT3847_31917C.1
atcaaaatttcaaaataaacttaaaatggcttaaacagatcgtgcaccctacaaagcaagtgcatatatattagtgacattagagtgcaaatgtgagcaagatccataccacagaaactgaggcaactatatcatacatcattattccagcatctgcaagggcaaggctagcacatgatatgacaactgggagatcacctgcaacacactcactaatactattacctgctataaaattaagattttgccaaaaggtttcaattacataggatcattcatcatcttccattataaaattcaaaggaatatttcagcctctcaaacaaatccactacgaaccagactaccataaatgaccacatcttgatatctacatttaaggtgtccataaaaaacttctaaattatagaaaattgaggcaagcatcatatgtacatgacatncattaata

SEQ ID NO: 67446 - DNA, 460 bp, Glycine max
  Clone ID: PAT_MRT3847_31918C.1
ccttcgtgagcgtagaacctacctgtgaacatacatggggtcgtacatgggattgctaatatgactacaaacgagactgggggggacatggaccaggtcgaaaaccgaggcgtcaaaggaggcatcgagttgacaattggttccacgtatgaagagaccgaagatgactacctgatgaagtacgtgaagactaaggaattagctgatcaattacccgcagaagtcatcgcatagcagagcgagccatagactgtgccatgggaactgcgggatgattggaggtaaagtaggaactgatctagcggtaacacaaagagacccactgggagatgtggcgggactgggggctggaaagctggacgcatggtacatccagtgagccatccagagagcgtgatgaaggtagcactgatggcaaccctggggttccgcaagaggtgcactgagacaagaacgcaca

SEQ ID NO: 67447 - DNA, 327 bp, Glycine max
  Clone ID: PAT_MRT3847_31919C.1
cccaggcttactgccactctttcaaatgacttttaccttatccattgcctacttacaaacaggacgcagatagaggatacacgggaccttaggctctcttatatccatccattcacacacttcctctatataacacatcactatacattttacatcactcattacactaactcaatccttagactatccaaattctacatccattgcacacatcttcatgcatctgctatctcctaacttatactattcccccatgcataatgttattccattatctccacacccttcctttccttcaccaacacccacaaactatcatctatgtac

SEQ ID NO: 67448 - DNA, 579 bp, Glycine max
  Clone ID: PAT_MRT3847_3191C.1
aaaaaaaaaaaatttttaaaaaatttttaaaaaaaaaaaaaaaaaaaaaaataaaaaaaaaaaaaaaaaaatttataaaaaaattaaaaaaaaaaaaaaaaaaaaaaaaaaaaaaaaaaaaaaataaaaaaaggggggggccctttttaaggatccaaattttactacccgttctttgaaagttaaaattttttttttggggcccccaaattaaaatccctggcccgcgttttaaaaacgcgggattggaaaaaaccttgggtttcccaaattaaatccctttgaaaaaattccccttttcccaagtggggtaaaaaccaaaaagccccgacccgatcccctttccaaaaagttgccaaccctaattggcaattggaacccccctttaaccggcccttaaaccccgggggttgggggggtaccccccagggggcccgtttattttgcaagccccttaggccccgttcttttggtttttttcctttcttttttggcaagtttcccgggtttcccccgaaaagtttaaaatggggggcccctttaagggtcccaattaaaggtttaacggcccctggcccc

SEQ ID NO: 67449 - DNA, 552 bp, Glycine max
  unsure (1)..(552): unsure at all n locations
  Clone ID: PAT_MRT3847_31920C.1
cctttgcgtccgcccacgcgtccgtacggctgcgagaagacgacagaaggggaggaactaggaactagaaccttcatcaaacaaatttgttagagaaagtgttcctcaattttgaagagcagagaaaacaacaaaggctaaaaggaagggaaaaaaaacaccaaatttgctaaacctttgtcactctactcactgcaactgcaacatcctctctttcccatggattaccttaaatctgcgcttccttctcaaataatgtcagaacgaggctccaatctggttgttatcaacccaggttctgcaaatgttaggattggcttggcttcacaggataccccttttaatattcctcattgcattgctcgccataccgaacaaattcctaactttactgttatagataagatgcttaatagtacagttacaactcaacagcacatcgatagggaaaaagcttatgatgttatntgaccgttattgaagataccatttctggacgaagaaggtcccagtaactcttntccccgtaggatggnacgtgttgatggacac

SEQ ID NO: 67450 - DNA, 2366 bp, Glycine max
  Clone ID: PAT_MRT3847_31921C.1
cccacacgtccgaccacgcgtgcgtacggctgctagaagacgacagaaggggaggaactaggaactagaaccttcatcaaacaaatttgttagaggtcgttcgattcacgcggcgtccattcgtcgcgcgaaaagaaggtctgagaggtcgcacctgatctccgattcgaccgtgcttggacttcggcttgaagtgttcctcaattttgaagagcagataaaccatcaaaggctaaaaggaagggaaaaaaaacaccaaatttgctaaacctttgtcactctactcactgcaactgcaacatcctctctttcccatggattaccttaaatctgcgcttccttctcaaataatgtcagaacgaggctccaatctggttgttatcaacccaggttctgcaaatgttaggattggcttggcttcacaggataccccttttaatattcctcattgcattgctcgccataccgaacaaattcctaactttactgttatagataagatgcttaatagtacagttacaactcaacagcacatcgatagggaaaaagcttatgatgttattgcaccgttattgaagataccatttctggacgaagaaggtcccagtaactctttcccccgtaagatgggacgtgttgatggacacaatcctcatattatcaggaaagatttgcccttcacctggactaatgtctatgaggaggccactaattcatctgtgtcattagagacttcaagtaaagatgagactgatgagtttttggatccaaaagaaggtacagattcaaaggaacctaatgcaagtgaaagaaaattcaaagagttcatttgtggtgaggaagcattaagaatatccccaactgaaccgtattgtttttgtcgtccaatccgcagaggacacttgaacatttcacaacattattccatgcagcaggtacttgacgatctacatactatttgggattggattttaatagagaaactgcacattcctcgcaatgaaagaaatatgtattctgctgttcttgtgatgccagaaacatttgacaatcgtgaaataaaagaaattctatctttagtactacgagaactctgctttggctcagcagtggtacaccaggaaggtcttgcagcagtttttggaaatggattatcaacagcatgtgttgtgaatattggtgctcaggtgacatcacttatatgcattgaggatggaggtgctctaccttcaactggaaagactttgccttttggtggtgaggatatatcaagggcctttctctggacccaaagacagcgccaaacttggccaccaattcactcagatgttttcggaaagcctatagatctgttagtgttaaatcaactgaaagagacatactgtgaagtcaaggagggggaatttgatgctgttgcagtagttcattcatatgagaacaaagtgccagctggacctcacaagacaaggcttagtgctcttaatgttcctcctatgggattgttctgtccaatgcttttaactcctgatgcgtatcctcctcctcctcgtacttggtttcatgactacgaggatatgcttgaagatacatggcatattgacttttcccggagggctgacatgtcagatactttctatcccaatgttaatggaggattaccaatgtgggaaagctatccagttttttcaactaagccaaaaaaagaagagaaagtcggccttgcagaggctattactaactgcattctctcaactggtcgcatagacatccagagaaaattattttgtagcatacaattgactggcggggtggctttgacaagtggcttaattgcagcagtagaagaaagagttttacatgccattcctccaaatgaagcaattgatacagtggaggttctacaatcaagggcaaatccgacgtttgtgtcttggaagggtggggcgattcttggtgtccttgatttaggcagggatgcatggataagtcgggaggactggattcacaatggggtccacgttggaagtaacagaaaatacaaggattcatattatcttcaggctcaagctatgtgttatatgaattcttgaaaggctgatgagacactacaatggaatcaggggaaaaaaagatgtaaagaatgtttgaaggctatttgagtgctaattacatggattacaattccataatttccagctattttttttaggccataggacatagtcaattcaaatgggtttaaaccattgtttgggatcttaatttctatctatgtatgtcagatcatcttgaaactgagattatttgttcctgacaacgagaataatgagatctgtaaatagtattttatgttaaaaaaaaaaaaa

SEQ ID NO: 67451 - DNA, 529 bp, Glycine max
  Clone ID: PAT_MRT3847_31922C.1
tttattgaggggaaaatgcttttttgtgggatatcacttacttatatttttttatgtataataagtttattaaattttgataataattattttaaaagttatatatatttcttttttaattagttgactatatatatttttacacataatgtatataatttaatctattagaattttatcatattggattgacttatagcatgcttgaggtgaccttaaggtgaaccaaaatggtatttttagtattacggagaggttgaaacaattcattgttgttttaaaaaaaccatatctttaatgtgttttaaagtggtccccaagattttgagagtatgtttagctccccgaatcttatattttttaatttaatacatgcaattgaatttgtacaaaattcatgttgaattatttagtataatttttattttttgtcatgttttagatattaatttttaaatttaaagtaattttatttttaaattaataaattaatatcaattgaaaattgatttgaaatattacaatacat

SEQ ID NO: 67452 - DNA, 342 bp, Glycine max
  Clone ID: PAT_MRT3847_31923C.1
accgcttgagaaaacaccacaaagggatactgctgccagaagacttctagaaggggatcataaggcgccttcatggagatcaactctatccgccaggggttttctttcataaagacctattctgaatcaaatcacggaattctacaatgaattgaataaattatcaataagagctaacgagagagagtattctgaaaatttgagcccaaaacacagttaagagttttgtgataagaccccttgttctgttcaaactttgactgagtccgatcaaaaagataaagaaaggtagccactgctctaattgagtatgactgttatattgcacgggatgagttttaa

SEQ ID NO: 67453 - DNA, 603 bp, Glycine max
  Clone ID: PAT_MRT3847_31924C.1
tatttaaatccgaaggacaagagcgctgaatatcttaaccgcacaattgcacatattccttcaaagctggagttggagaaagtatcaaattgaccaccagtgggtatctgtccttgaagattattgaatgctacactgaaaaaagacaagaaatgtaatcttctgagggaatcaggaatttccccagatagttggtttcctgagaggtctagtttctctaagttagtcaagtttgaaaactgaactggtatattgccagagaagttgttctttttcagatccagctgatgaaggactttgagtttcccaatctcaatagggatacttccattaaggtgattgcttccgagatatattgctggaggtaggcctgaaagctgattatattgcagtagggaaacattgtttgcattagcaaagacaggtaactcaaagtaagtcctttctactttatcatttgcctgttgagatgccagtgctgggagttctgtgagctctaccggaaatactcctgtaaggaggttaacagacaagtccatgtagaaaagctgaggaagtgtacccaaccaaagaggaattggaccactaatttgattaaaggac

SEQ ID NO: 67454 - DNA, 749 bp, Glycine max
  Clone ID: PAT_MRT3847_31925C.1
aaaaaagaaagaaagagggggggttttttcctattaaggaacaaacaaacaccaagggatgaatcatagccccggttccttttttatcatagccctaaaagagttgaatttaaagtacataaccaataaggaaaaaggaaaacttgaccatttgggtacagagttaaccaataagcaaaagagggccaatactaggaaacactatttgtatgatacaacagtcaaatcaggtatacagattgggggccttaaaacttaaaaggggggcatactatacatatcaccaatcaatccatcaatgataataatatcatccatcatcatcataagaatacaacaccaactctctcaaaattattactaggggactctaattttttttatgggggagaatcaaaaacatattaaaagacttataataatttatatatatttttaatcaactgacactcacttttttggtactaattcacttaatcaccactttgaaggttacattgattttaactatactaataagaatgatacttattatattagcgtaggcccatttatctgggcctaccgtggttgtatcaaaacccgctataaacaggcccaccctttataggaccaccatgcacttgatggaagccgaaaaaaccggacacgtgtccctgatgcatcatgatgtcaccaagagcagcagcataactaggacgtctcgctagcactgttggtagcattggtaggaggaggcgcgttcttgt

SEQ ID NO: 67455 - DNA, 663 bp, Glycine max
  Clone ID: PAT_MRT3847_31926C.1
attgattacaaaacatattaaacaaaaattaaatatgtatatgaatttacagttaacaaaatatattatttaaatatataaattttaccacaataaaatatgacagtagagtagaaatgcggatgcagcacgctttgttttggctagttcaaataaagacaacaagcagttaaactagtgttgtttccataagaagtctcgcgccacgcttcaatggggaactagtgtgtacacaagaaggatcattggaagagaaggcttccttaaccactaagttgttatccctggagatatgaagcagcaagaaccttagaggaagctttgccatatttcgaatgtcattcaccaaattgaaagcatcagactccactgtcctctatccaaagctagtttgagaccatgaaaaataacccagagttcctcaaagatcacatgaacattcccaagatgaatcataaacctatacatacaacgcccatagtgatgattcctagcaactccaccacatgtcgcaagatgatctctaatccgaattgcaccatcgatattgaccttgattctacctaagcttggtgaaccccaagaatggatagacgaatggtttatagagtcagggccaatgctaaaatcatcctttaaccccactgaagctttccaatacct

SEQ ID NO: 67456 - DNA, 686 bp, Glycine max
  Clone ID: PAT_MRT3847_31927C.1
cggccgctcgagccggcgggcgggatggaagagaattggctttctcttctctctctctctctctctctctctctccttctgccaaccaacttctgctccctttttctgcaatgggttgtgctggatcttcacaatccaagcctgatggggcagtaaaaaagatccggaaacctaagccttggaagcatcctcagcccataacaaagactcagcttacacaattacgtgatgagttttgggatacagctcctcactatggtggccggaaagagatttgggatgctcttcgagctgctgctgaggctgatctaactttagcacaagtaattgtggatagtgctggggtcattgtccagagttctgatttgacagtatgctatgatgaaagaggagcaaagtatgagctacccaagtacgttttgagcgagccaactaacctgattcgggacagttaataacagagaatataaatagaaagattcatgggcgaaaacattgtaaatcatgtatattggttatctcattgaattggtaacttgcatagggtagcaactcttttttcttttcacctttgaaatctatctgccgctatgtttcctcaatcaattaaacaaaaaaacgtttgttctgtatctgatgacactatccctcttctttggtaaatacaaaactccgttatctaaaaa

SEQ ID NO: 67457 - DNA, 259 bp, Glycine max
  Clone ID: PAT_MRT3847_31928C.1
cccacgcgtcctcccacgcgtccggaagattggaatataccttacggatggtggaatcaggaatcagttataattgcgtagtgcgggtgttgactaatatggaatacaaagatagtgagagagagaaaaatcttcgctttatgtcaatggcacgaatcattggtttttacagaagttagcaacgactccatatattaaaaatgtgattttattttgattcatattttgaaaaagtgtttttgtaattatactctcttat

SEQ ID NO: 67458 - DNA, 419 bp, Glycine max
  unsure (1)..(419): unsure at all n locations
  Clone ID: PAT_MRT3847_31929C.1
acagccgtccgcccacccgtccggaggaaatgggggtccattggaggtaaagtcccggaggaattgggggaaccagagttttaccaggatttaaacagcttgaccaaacaccaccttccaactggaccaggtttaataaaagtagagaaaaagggaaatgcctttaacataaaaccagataatgccactggtggccataattttggcaggggcaatccagcacccaaggatggggttcctgttccttcaactgaggggggtttaaattaaggcaaacttaacaggagtgccacctagaaatgggggaggggttccatgaaaatataaatatttaacttttttttaaaattggggggattccatgtgtggtttaaaattccattccaanattttttanttttatttttttatatatttat

SEQ ID NO: 67459 - DNA, 358 bp, Glycine max
  unsure (1)..(358): unsure at all n locations
  Clone ID: PAT_MRT3847_3192C.1
ggctagctttaaagttgcatgtgtggttgcgatgatgtacatggttgtggccatgagtgttacacccataacacaagccagaatcacgtgcagncaagtcgccaacaacatatctccatacctcagttatcttcgaancaacgaaaaaccagtcaacacctactacaacaaaataaaatcactcagcagggcgggaaaaaccaccagcaaccaccagacagcatacaattagctaaaaaaccttaccaataatataaaacagaatttgaataccggcaacgcagcctctctgcctggcaaatatagcatcaacatccgttacaagatcancacctgcaccaactacgcgaccatcaaa

SEQ ID NO: 67460 - DNA, 398 bp, Glycine max
  Clone ID: PAT_MRT3847_31930C.1
ggggaggtggcatcgagctcagcatcttatcacaggagttcgacatcgaaatcgccagtatcaacgtgcaggatcttagagtggaccgcttcaacgagacaaggtcaaagcgctgtatccttgtatactcgggcatccactacgacactatcgcacttgttccgtatggctcgccaacgtatgatccagaaaacgatatcaagcagttcgacgtagacgatgacgtcgtgctcgaggctgcacgacagctctgcggcgagctaaagaagaagaactactttacagacactcaaaaatttagtatcaaatgcaacacttgcgggtggaagggtgcgggcgagcaaggcgccacacagcacgctatggacaccggccacactgattttggtgaagcgagc

SEQ ID NO: 67461 - DNA, 806 bp, Glycine max
  Clone ID: PAT_MRT3847_31931C.1
cccgggtcgacccacgcgtccggggtccatgagagtgagttgggaagtaaaatgtgggaaagtgtggacccagcttaaaactttgtttgtcttcctcctgagtcctgagacgaagcaaagcattagaaatacaaagtgtaagtataataagcaaaggtcaatgtcatcactcatcaatcactaactccaccgccatgtcatactcgtttctatgatcccttttttagttaccaaaacacccttctgaggctcgaaatggatggtcggcgcgggggaggaggagggagcagaggagaagcggagctctggctttacacagcgaacaaggttttaagcgcacgtgacctgcacggggcccgctcatttgcgatccgggctcgagactccgacccgagatacgagcccactgagctccttttagcggtgattgataccctcatggccggcgaggcccggatcaacgaccaactggactggtacgctattttgcaagtcctccgttacactcagaacatcgactacatcgctgcccagtaccgccgcctcgccacccaactcgaccctcaccacaaccccttcgccttcgcctctcatgccttcacgctcgtcaacgacgcgtggtccgtactctccaacccaactaaaaagactttctacgacaaccaactcagactcctcactcaacccgctcctcctcctcaaccaccaccgccgccacctctcgcttctcctgccccggtggccttctttccgattcagccgccgcaaccgaacctaaacccgaaccaattccctcaaagggaaag

SEQ ID NO: 67462 - DNA, 244 bp, Glycine max
  unsure (1)..(244): unsure at all n locations
  Clone ID: PAT_MRT3847_31932C.1
ggntaattctncttttccgngaaatttcncgttnttactgttgaatcgataattcacaaatcgggggtctntgaaattcaantntgttgtacntgttggctgcnggggttagtctntgtggaggtnngggtgtnntcngangcagntcngattctcannttgctccaatggaggtnnaggnccanatagaaacaacangatcaancatatntggctnagcaagtagcatccattccaatggtga

SEQ ID NO: 67463 - DNA, 263 bp, Glycine max
  unsure (1)..(263): unsure at all n locations
  Clone ID: PAT_MRT3847_31933C.1
tctancacttaagtagtaatatttattngnntntgctagagaantanaagcatccatatnaatnccgctagatggtttnaaaaanttgttcgnccnttncccttttnntcacactgaacntcgttttnttctcacttgtatntgcatgcggttatacaccatgncctggnccaaacccaacagcnaaggtcaancccnaccctaaccntaaccgcagcncaagtggcngtgtcccgtgacggaatgaaataggtgtatgcgcc

SEQ ID NO: 67464 - DNA, 233 bp, Glycine max
  Clone ID: PAT_MRT3847_31934C.1
ggtattttttgattttttttttttttttttttttctctcccaaacataaggaaaataagttcgataaacattaggcgcatcacaaaatattgattgttcaactttttttgccaaaccaatttaacttttttaagtgaagcaacttggaattccgcgattttcaaattgggtgtaccaaaacccatagacagagcgttaactcatgaagttgattgtttgctgaaaagttccct

SEQ ID NO: 67465 - DNA, 443 bp, Glycine max
  Clone ID: PAT_MRT3847_31935C.1
ggctcgagccataaagcaatttatcggattttattctattcatttgcttatacgatttagggggggtacacatgctaacaattagttcgaaccaattcacgatcggtgtgtatatctaccaccgggcgaacgcgatgttccttccctaacaccatgtcaagtacctacttgtggaggaggacgatgagtctgtgacgcaggagcgcatcggttcctacaaaagcgcatggtggacggtagaatacgtggccaaatatcaataactgaagtggtctgaagagctgttacggtaagaaccagaccgttttcatccacctctttcatttgggcatgactggccacatgggtttccatatgcttctctacgagctggacattactgttgagtgggaaccccgcaaggacggagggcgcgtgaaactttatgtaccgttccgggaatt

SEQ ID NO: 67466 - DNA, 304 bp, Glycine max
  Clone ID: PAT_MRT3847_31936C.1
agtcaacacaatttacactattaatgtacacaaaaggggcaaatagtacaacatcatgaaaaacctgaggtcactgggcaaacctgtttaaaccttgtgcccttgcctcttgcatcagtggtgaactattcgttcattaggatatgcactgataggccctgatcaaaacttaggcctgagactaaaaaagaatacgataccatcaaaataaagatcacctgagaggtgagaaaaatttttgctcactggatggtgactacagaagacatgggcatctgaaaattctttcacgcgaaccgggcat

SEQ ID NO: 67467 - DNA, 301 bp, Glycine max
  Clone ID: PAT_MRT3847_31937C.1
catttttaacgaatatttttttatttttccccacacaagcccacaaccttcggggggtggtgtttaattttaatttttatttcttcggggccccaaaaaaaaaaaaccattttagtcccacactcaagcaccacaaataacacccccccttattgagataacccctcttttccttccacaaaaattgggggaaaacaaattctttttctggggcaactaaacccttgatacacacaaacccccctttcccccttataaaaaagaccccacctgctctccaaaggcccctgagacttataac

SEQ ID NO: 67468 - DNA, 497 bp, Glycine max
  Clone ID: PAT_MRT3847_31938C.1
ctaacccccctgggggccccgacccgaaatccccgtgtccccccacgcgcccgggtggtggcgctgaaaattcccggaggttcacgggcccttttagagacacaaggggtcggccatgggggccccaatcaaaatatggcatgaagcagaggcccacattgtcacgctcgaaaccacattgggtgaggtatccagaggcaagctgaccgaggccgaggccaatatgaatggtcagatgagtgatgtgacggaaactcttcgcgatggtcgcacccaaacattggataatgtgtttatacgaggctcacagatccgttttttggttcttccggatatgcttaagaacgctccgatgtttaaaaacatcggtcgtgcgcaacgcggtgcccaaggcatgggacggggcggtgcgccttcgcggacgcggcagtgcttttcgtggtgggtggtcggggcggcggacgaggccgtggcggatttggacgcggtggtagggg

SEQ ID NO: 67469 - DNA, 568 bp, Glycine max
  Clone ID: PAT_MRT3847_31939C.1
ggcagcgaaattgaagacagcaacaagaacgggtgctgttaaagtaaatcctttccaaggtcaaggaaagggtgacgaagacaatggacaaaaggatgtgggagccatgggaaatgggaagtacaccatgggcaaagattcgagtgagggaccagacagagagaaataccagggacctttttctgttcggacgccatcatacatgaaaggagaatacacaggggagtatggatgggacagtgctggcgtatcagccgacccggaaacatttgccaagaacagggatctagaggtgatccgtgggagatgggcaatgctaggagcactaggaaggacaccccacaggtgctatagaagggatgatagtggagttcaagagaaagtgaggctcaaaaatggagaccaaatattggcacaaagagggcgtgactagtgggggaacccaaaaccttgccaagcacaaagcatccgggaagagatgagcgctccaagatatcataatgggccccgttggaaaggagctgcaatcaaggggctagaaggggagggagagggcaatgacacctac

SEQ ID NO: 67470 - DNA, 1010 bp, Glycine max
  unsure (1)..(1010): unsure at all n locations
  Clone ID: PAT_MRT3847_3193C.1
gattgtttgaagggcaagaaatcagattctaatgggggggtatttgataatgtatggggcgttctagatgggagggagttgtgtgatactaatagggtgaagggtgtgagcgtccggtctaatggggacaagaaagttcagagcaaaggacttgttgatttggatatgctggacaatgggacggatgagcatattatcagaaacttgtgcagtcttaatactgagaggaatatactggaagagtttgatggggggaaaatattaactgtggatgcatctgatgcagagagcaacatgcctagattgtcggatggaagcaagtgctgtgataatgatgatgatgatgatagtgatgaagtcttgatattggatccatctggtgttgacaaagagatatttggtcgtaagaggaagagagagtctaagtcagaaatgctaagttggattactagcattgctaaaaatccttgtgattccacagtcggttcgattcctgaaaagtctaagtggaagttttacagtagtcaggagatctggaagcaggttttgttgtttcgagaagctgtctttctgaagaaagattttgagacaaccagtgaacagcttaattggcagggacagaaaatgcatccttctatgtatgatgatcgtgttggggcaatgtacaatcttagacagaggttgaaatgtgacaagagagttttattgggaaaaactacatctggaggagtctccttagcttcatctggaggaacacatgtggatttggagaggaccccaagttctcatgctgaagatcgtgctgagaaattgttacctgactccggtactgctcactcaagccttgatagatgtgccagagtgcacatccctttggggccaaaccatcaagctgaagtgccagaatggactgtcataacttatgaggttgattcaaagtggttggggacccaaatatggcctncaaaaaactgtaattncaaatgtcgtctttttgaagggaccccatt

SEQ ID NO: 67471 - DNA, 407 bp, Glycine max
  Clone ID: PAT_MRT3847_31940C.1
gtggattcctggtcgcacataggcaatgtctatgaaattgaacccgaacacaggttatgatgccatgcctccggaattttagtggggaagggtgtttcaatgtgccctaatgcgcgaaactgtcataaccgtcattaaactggatgaagttcatgtttcaaatggtggtaaggtaacccattatgcagagcaaatcatgacgtatggtgctataaaaacacaaaaaacatatgaggtaaatacgatcgttggatggagatgagaaaacccaatggacagatgagaagtgctacaagaatgatggtgcttataaaactaagtgcatagacggagatcgtcctatctatgatggtgccaagagcagcccatccacagaggaggttcctcgctactgatatggtgctaag

SEQ ID NO: 67472 - DNA, 303 bp, Glycine max
  Clone ID: PAT_MRT3847_31941C.1
gttggacccgggcccttccaaatgtcattaatgaaggggcgccaccgaaagtaaaaacaaaagtgaccccaaccatggttccaaggtgccaacctcccgcaatggtacaaacatacacatgtcttgaatacaaaagcaaaaaactggcaaaaaaacaaaatcaagggtaacgagagttatcttcccagggaagagcactctaaattctcctataaagagggaaatttgtgccaactggaggcataaacaaggcctaaaagcctccccagggcatatcccgggaccggtaccttttatatgaca

SEQ ID NO: 67473 - DNA, 1385 bp, Glycine max
  Clone ID: PAT_MRT3847_31942C.1
ccaatttatccctttatttcccatctagtgtagttttccgggtatgtgggtggaaatgctagtgactagtggttatgttggtgggtgtgctctagaatgtacattggcattggttttttagtacctaatacctatggatcacaaatttgaatttgggatgtactctgttctccacccatttctggtccgtcttatgtctctcacgtgccatgcagcgtagcaggaagcgtccggctgcgagaagacgacagaagggggcgcattgaacgaaaattagggtttgtagtgtagcaggaagaagcagcaatggcgccgaagataacacgcaaggttagcagaaaccccgaattgataaggggaatcggaaagtactcgaggtcgcagatgtaccacaagaggggcatttgggctatcaaggccaaaaacggtggcgttttacctcgccacgaccctaaacccaaacctgaaactcccgctgaaaaaccacccaaattttaccctgctgatgatatcaagaagccccttgtcaacaagcacaaacccaaaccagctaagctcagggctagcattactcccggaacagtgttgattcttcttgctggtagatttaagggaaagagggtagtgtttttgaagcagctaccttctgggttgcttcttgtaactggtcctttcaaggttaatggagttcctttgagacgtgtgaatcaggcctatgttattggcacatcaaccaaagtagatgtctctgctgttaatgtcaacagctttgatgacaaatactttgcgaaggaagcccagaggaagaagaagaagggagaaggggagttctttgaggcagagaaggaggaaaagagtgtgttgccccagcagaagaaagatgaccagaaaactgtggacgctgcattgttaaaagccattgagagtgtgccagacttgaagtcttatttgggtgccaggttttctctaaaggctggcgtgaaacctcatgagctagtcttctagaggaaagaagggtgttactcttgtttttgatatcctgtttgtttattgatgttggtccttatagttgcactcttataacattcttgttaacagacaaatgaagaacctaaaattttgttaggcaaattgtgacgcgtgctctttacattttgttgattgtgtgaattttagatattgtgtggacctttagcatgccaaatgaaaaaaaaattggaaacagatatacatgtggcaaggctggtgaatggtacttgtaaagaaccgtggtagtagtaaaatgggtatgaacaattatcatgcaaaattttctgaacttcccaaaaaaaaaaaaaaaaaaaaaaaaaaaaagcgcccgctctagaggatcccagcttacgtac

SEQ ID NO: 67474 - DNA, 321 bp, Glycine max
  Clone ID: PAT_MRT3847_31943C.1
ctcctaaggcctggaattacgcttgagctcgcctagagttgatgtccctctcagctgcgagcactctcatatgatctgcttcgagatcgtctttctgataaccagagatagctagtatcggatcatgggctgtagttctgaactgagagccccagatgatgatgaaggagatcagcttctgtcctatatagaacgaatagaaggcggacaagctcacctgatgcaagagaggccaactcagctcttacatccaacatgtaccgatccaggctgggagctgcctcgtgtacaggccctagttattatctgcatcagaatgaa

SEQ ID NO: 67475 - DNA, 1137 bp, Glycine max
  Clone ID: PAT_MRT3847_31944C.1
ggtccgtattcccgggtcgacccacgcgtccgcccagcgtccgcccacgcgtccgaaattagggtttgtagtgtagcaggaagaagcagcaatggcgccgaagataacacgtaaggttagcagaaaccctgaattgataaggggaatcggaaagtactcgaggtctcaaatgtaccacaagaggggcatttgggctatcaaggccaaaaacggtggcgttttacctcgccacggccctaaacccaagcctgaaactcccgctgaaaaaccacccaaattttaccctgctgacgatgtcaagaaaccccttgtcaacaagcacaaacccaaacccgcgaagctcagggctagcattactcccgggacagtgttgattcttcttgccggtagatttaagggaaagagggtcgtctttttgaagcagcttccttctgggttgcttcttgtaactgttgttgttgataattgctttcacttgactcttgcttttctgagatgtactatgtgctccgtccatttctggtctggcttatgtttgtcacttgccacttcaggtcctttcaagattaatggagttcctttgagacgtgtgaatcagtcctatgttattggcacttcaaccaaagcaaatgtctctgctgttaatgtcgaacagtttgatgacaaatactttacaaaggaagcccagaagaagaagaagggagagggcgaattctttgaggcagagaaggaggaaaagagtgtgttgccccagcagaagaaagatgaccagaaaactgttgactctgcattgataaaagccatcgggagtgttccagacttgaagacttatctgggtgccaggttttctttaaaggctggcgtgaaacctcatgagctagtcttctagaggaaaggggtgttattcttgtttgcatatcctggttgtttattgatttttgtcctaatagttgcacttttataacttgttaacagacaaattaagtacttaaaattttgttagggttaccaactgtgtctcggatattccttatgcaattttgctccttttcacattttgttgattgtatgaattttagatgtgtttggggctttcatcttgtcatggcaaatgaagtggtgcaaagtcattagtgg

SEQ ID NO: 67476 - DNA, 291 bp, Glycine max
  Clone ID: PAT_MRT3847_31945C.1
catggcagctatatgagttgtatgcactgcatgcccgagggttatttctaacgtataaggcttgaccctgaacgcgcatgctaaacagttctcacttctaccgatacaagcagtgcgacccggtaatatgaaggtatgtagaatgatgacgattctaaccagtcgcgctagagatgaccgcctatggcaccaggcgggcgagagcataaaaaacgcgcatgaggcgttcgcctatcataccaacagctcacacatcatagtccgcatgtacgaatatgttgatcttatcac

SEQ ID NO: 67477 - DNA, 662 bp, Glycine max
  Clone ID: PAT_MRT3847_31946C.1
agaagttgttgatgttcgatttgctacagattatactgggaagtttaaaggatttggacgtgcttttgaggggcttgtgttgacttatggttgctttactggtcctttcaagattaatggagttcctttgagacgtgtcaatcagtcgtatgttatgggcacatcaaccaaagtagatgtgtctgctgttaatgttgaccagttttatgacaaatactttgcaaaggaagcccagaagaagaagaagaagggagagggcgagttctttgaggcagaaaaggaggaaaagagtgtgttgccccagcagaagaaagatgaccagaaaactgttgactctgcattgataaaagccatcgggagtgttccagatttgaagacatatctgggtgctaggttttctttaaaggctggcgtgaaacctcatgagctagttttctacaggaaagaatggtgtttttcttgtttgcaaatcctgttatttttattgagtttggtcctaatagatgcacttttataacttccttgtcaacagacaaattaagtacttaaaaattttgttaggcaccaattgtgtctcggatattccttatgcaattttgctccttttcacgtctgaaaaaaaaaaaaaaaaaaaaaaaaaaaaaagcggccgctctagagga

SEQ ID NO: 67478 - DNA, 264 bp, Glycine max
  Clone ID: PAT_MRT3847_31947C.1
caacggtactgctgcgcgcacacgacaatccggtaccgcttccacaagcttacaccgtggtactgctgcgacaatatcacataatggtacggctgcgacaatccgatataatgggacccacttgcaatctcccatccatgctccagaatagacaccgagaaacacatcggacgtccttgattcggtgttctatccgttgagagagctcccatcggacatcctaaggctcgtgcagccctgccacgaacccgctcgcgaactgtt

SEQ ID NO: 67479 - DNA, 202 bp, Glycine max
  unsure (1)..(202): unsure at all n locations
  Clone ID: PAT_MRT3847_31948C.1
gacatatngcagaatcaatanaagggtttcntggcttcctgcgcatctattcatnctctacagnnttaanttanaagcannataaattccnacgaatcagtcatcttccgaaaccttngcagtagntgtgaagccgtaaaattgatannctcgatgtgagtaggantaaccnnnggttgaagaggntagnatganaacctna

SEQ ID NO: 67480 - DNA, 357 bp, Glycine max
  Clone ID: PAT_MRT3847_31949C.1
acctaataataaatttaataattaatctacctatatcttaatattcaattaattgcctcaactttagtaactgacatgattaaggctacacaggatatgtgacaaacttgagttggtatagtgttaccacttcagagtaacatgcattgatcatcaaataatatttttaagataaactctccttataaggaacttgtgagaggagacagttttgcattcacccttgaacaatcttaaaagaccaatggtaaagaaattacattcagaataactgaaaaccatcaccattttttttattcacgaaatggtgtgagatcaatgttgaaccgttgcttccctttgcttaccctagcaatg

SEQ ID NO: 67481 - DNA, 309 bp, Glycine max
  Clone ID: PAT_MRT3847_3194C.1
aactaaaaaactccgttgttgtgttcctattccaaacgctactgagtttatacagccatacacaggttgaaattctataggtgttgaccaacgactacaatggaccgggacataaaaacttgagacctactccctacaccaacccgggatatgctcatttccattggtttattgtcgaattgataacttattatgggcacaatagagcctttaaaaattcagtcaggtaaatagaacctgactacgacaaatggtaatgtggatcgtgcaaaagaatggcgatcgagaaaatgctgattccacctctat

SEQ ID NO: 67482 - DNA, 416 bp, Glycine max
  unsure (1)..(416): unsure at all n locations
  Clone ID: PAT_MRT3847_31950C.1
aaacaacacgagggggaaaattctgaattgagtgtgacaacacacctggcttgtgtttcttctgctggaactgttggacaaactgntgctgtccctttttaaatatgcgcggcaaaacaaataattnnttataaccacactacttctgttctaacttttgatggaagatgcaaagtcccacttgaatacactggaattattgatgcattcataaaaacttttcatcacgaaggattttgtgcattatacaaaggtctttttcccaactctttaaagatggtcccatccatagcaattgcattcctaacatataacgtttgtaaataacatttaatactttagatcacaatattccactaaaattttataaccacacatcttttcacactcgtgtgattttcattttttttcttttt

SEQ ID NO: 67483 - DNA, 326 bp, Glycine max
  Clone ID: PAT_MRT3847_31951C.1
ggctcgaggttttttgtccattgtatattgcctcatatatttgaaacagaattagacgaagggttgctggggaactggggcaattgaaacctttttttccatagcgtgatcagagagcatggcgaacatgaagacgcacaacgatggaaggttagtacaaaagggaggcccatgtcatagacggttatgaagatcatgccatagtcaagaacatgatgattgcaccctgtcaggccaaacataacatctgtgcttcgcaaaataagccggcaaatctcccgatcgccgtggaggatctccaggcaaccgatttcagttggtgagtc

SEQ ID NO: 67484 - DNA, 544 bp, Glycine max
  Clone ID: PAT_MRT3847_31952C.1
gtcgtcaggtacgccctttgtcgtcctttttttttttttttatttttttgtagttgctttgtctactttctatcgaaagtgcattcttacctaattcaaaggcaaaacctaaagttaacactaagaaaaataaaagcattattattaaaccaaatataccgttagcgtacgcacttacaacataagggtatactaatagtatttctaaatcaaataataagaataataaagcaaatatgaaaaatgatatactgaattcacttctattttgtcctaaaaatgaatgaaatccacactcgaaagcactgtctttttcttcgtatgggttatgtggggcaaagattaaatttacagctaataatattattgctaatataggtataaatataagaaaaaatgtttgacttgtcatttaagctttaaataatataagactaagaatactaactatattaaatcattctcctggtatatatataaataatataagtaaaagagttaaaacggaaatagtgctacttaacgcactgtatattgcaatatt

SEQ ID NO: 67485 - DNA, 203 bp, Glycine max
  unsure (1)..(203): unsure at all n locations
  Clone ID: PAT_MRT3847_31953C.1
ccaggaggatcaagacgtctttgtcacaattttatagttatagatcgatggctagngggtcttatcggcgtatggaactggtattgctgctaagacgctatagtcaattgggatcaatcgcaaagatgctcgagtggaagtagataatataattggaaggtgtagtggatttggggctgtgtgagagtccatgtattccccgg

SEQ ID NO: 67486 - DNA, 696 bp, Glycine max
  Clone ID: PAT_MRT3847_31954C.1
gtctatggtgctcttttaattcggcctcgagttggacactcctacccttttcctaaagtatatcaagaagtccccatactgcttggagagtggtggaatgctaatgttgtagaggttgagcacaatgcaacagaatcccaaacagcgccaatcccctcagctgcgtatacaattaacggtttacccggcgattcctataactgctctgaaaatcaaatgtatcagctcaaagtcaagcaaggaaaaacctacttgctacgcattatcaatgctgcactcaatgagcaacacttcttcaaaatagcaaatcacacattcacagtggtagccatcgatgctctctacacccaacactacaaaactgatgttgtagtgcttgctccaggccaaaccgttgatgtcctctttagcacaaatcaacatgtggattcttattacatggcattcactccataccattcggccccacaaatcccaatcaacaactcaacaacaagagggctggtaatttatgagggtgccacatcagtagaaaagcccatattgccaaatctaccggcccaaaccgacacaccaacggcccacaagttctacaccaacatcacagggttggctggtggaccccactgggtcccggtgccacgtcaggtggatgagcacatgttcatcacttttgggcttaactttgacctttgc

SEQ ID NO: 67487 - DNA, 511 bp, Glycine max
  unsure (1)..(511): unsure at all n locations
  Clone ID: PAT_MRT3847_31955C.1
gggggcaaaacttggttccttttgaaagaaccggtcaaaaaccttttttttcaggcccagctttaccccaaccaagaaacaagaatgcccaatttttaaaaggccgcccctttcaaaaatctaaaatggcccccccccgggttaaaaaaaccagccccggggcttttaatttccgaagcccttaataatttaattttcttccccctcatctccggctccaccagcagcctttttaaaagcagccctttggtttttttgcttcccccggccggggcgaccccccccaaaaggaccgggcnggggaaaatcaatgggcttctgggaatccccccttcccctgaacggggggggggtcaccccctggctcccaaccctggtgggcccctgcctggggaggaccctggcggggggggtgggcttggccctgccccacttgaaaacaagggttggggggcggcgctcgaaaaagctctcgccggggggggcccccccctaatccaccttgttctgg

SEQ ID NO: 67488 - DNA, 781 bp, Glycine max
  Clone ID: PAT_MRT3847_31956C.1
gtcgacccacgcgtccgatggggatacattgatatctttgatggcaacggcaaatgcagaagcatcctcattccaacaactacccatgaaatcccacattgctgtactacctagtccaggcattggccacgtcacacccctcctagagctctccaagctcctggtcacacaccaccagtgccacgttaccttcctcaacgtcaccaccgaatcttccgcagcccaaaacaacctccttcactccccaactctccctcccaacctccacgtcgtcgatctcccacccgttgacctctccaccatggtcaacgaccaaaccaccatcgtagcccgtctctctgtcaaccttcgagaaaccttgcgtcccctcaacacaatcctctcacaactgcccgataagccccaagccctaattattgacatgttcggaacccatgtttttgacaccattctcgaaaacattcccattttcacttttttcactgcctcagcacacttgctcgccttttccctctttctccctcagctggaccgtgacgtggcgggcgaattcgtggaccttccgaacccggttcaggtcccgggctgcaaacccatccgaacggaagacttgatggaccaagtaaggaaccggaaaatcgacgagtacaaatggtacctctatcacgtgagtcgcatgactatgtcaaccggtattttactcaacacgtggcaagatctagagcccgtcacgctaaaagcattgtcggagcactctttctaccgcagcataaacactcca

SEQ ID NO: 67489 - DNA, 788 bp, Glycine max
  unsure (1)..(788): unsure at all n locations
  Clone ID: PAT_MRT3847_31957C.1
ccggggcgacccacgcgtcacccatntcttacaacacctcccagaagttttcccaacggtggaagagaaagaaaagaaaacagaggacagcgaggagtgagagagaacaaaagacgaatccagagagagaggagaagaaaagaaagaaaaaggaagtggctgctaacaaggatatactgtgatgccgactctaagaattcatggatatgccttgcttgtttcatcttgtttcatcatcctcatagcagcctcacaaacagatccttcagaagtaaatgcactgatagacatcaagaaaagtttgattgatcccatgggcaatatgaggaactggaattcgggagatccgtgtatggcaaactgggcaggggtttggtgctctgatagggaggaggctaatggttacttccatgtccaaaagctctacttaatgactatgaatctctcgggaagtttagcaccccagcttggtcagctatctcatcttaagatactgtctttcatgcggaataatttgacaggcacaattccaaaggaaattggaaatattacatcattggaactcttgcttctaagcgggaataagttatctggtactttaccagatgagcttggcaaccttacgaatttagatagattccaagttgatgaaaaccaattgtcaggtcctattccagagtcatttgtcaaaatggtcaaagttaaacatctccacatgaaatacaactcgttcaacaatcaacttccatccaaagctttcaaagctgcccaatcttgtgcatttgctt

SEQ ID NO: 67490 - DNA, 367 bp, Glycine max
  unsure (1)..(367): unsure at all n locations
  Clone ID: PAT_MRT3847_31958C.1
cgtaaccctaactctctctcacctcnccacctcaaattccgaatacgacactctctacacactgaaacaaancctctcgtaccctaacaacgttctccatatctgaaatcccactctcgttagccgctatacttaattccacgtcacctacgaccaagacaaccaagtcactcgcgtagatctgagtaactctaacctatctggacatgtggtgcctgaacttgagaatctaaagcatctacantatctggangtagacaaaaacaacatgtcaaaaactatttctgcacgacttaggaacctgaatagtctcatgagcttagacttgtacaacagcaacatatcaagcaccatgccacctgcatta

SEQ ID NO: 67491 - DNA, 218 bp, Glycine max
  Clone ID: PAT_MRT3847_31959C.1
caccccttcgccggactcatatcttgaaccggcgaagcctttcagaggtggaaaccgagaactccggggacacggttgacgagacacggtggcaaacggtccagacccgatacccctcttttcaagtcgaagatccagacgatccactcgcagacgaccggtacgtttccgtcgcggggtcccgtcgcgagaacgtgccggatcgccaagaagcaagc

SEQ ID NO: 67492 - DNA, 351 bp, Glycine max
  Clone ID: PAT_MRT3847_3195C.1
taccactcttaccaaacactttgctcagacctaagcttttgcatcacttagactcctcaatgatctgttcatcatctaataccagttgcaaccgtgccactcccatcctaataacttcaatcactttcctcaatttcaaggctgtctttcacaccaaaaacaccaacatattacataaacctacatttctagcaacaatttaagatttcaattcattcactctttcccaccatttttcattaataatttaaaaactctttactacctatcataccattatgattcacaattttcaaatgatatactattcctacattattaatatattacatttccttgctactatattct

SEQ ID NO: 67493 - DNA, 408 bp, Glycine max
  Clone ID: PAT_MRT3847_31960C.1
atcgagaagctattgcccgcttgactctgctgaaactcataaaggttgtctatgagcaccatcctcgaccaaaacagctcatagtagagaatgacctccctcagaagctacagaacctcattgaagagcgcagggatggacaacggggcggccaacaagtgttggtcaaacaaatggccacctcattgctgaaagcgctgcacatcaatacagtattgtgatattggtggatcatatgttttcctctcaagttgtatatgcttgccctagaggagaaggtgccttttccttttgctctgctgtggtggtttctcatgagcaccagactcatctgttgtacctgatccctcttttttcgggagaaaggttttttaggtgcaggatgaaatggacgttctgtccttcagt

SEQ ID NO: 67494 - DNA, 577 bp, Glycine max
  Clone ID: PAT_MRT3847_31961C.1
gggaacccgaaaaaaaaacttttttttttaacaaaaaaaaccttatttcatttcattaaaaaggggaaaaaaaaccaattgggaaaatgaggaaagggtggagagctaacaaaggacattgaagcttttggttgttaacaaacaaaaagggggacattcctttttaaaaaaaaaacccaccatgggggtggaaaaattttggaacaggggtctacaagggaaaatttggttggggggtaacacgtggggggagctaaaccaccacgggtttgaaaatgggggccaaattcgaggatcatactttgaccgcccagtttttgaatccattaaaaacccccggccggggccttttttaaaatcgggggggggggctttgcttgaattcagggggtatatatgccccccccaagggggttgaaacccgcgcgaaggggggagaacttcggggggggggaggcccattccaagcacgactccttttttaaaaaaactgaagcggggaaaaaaaaaaaacctgcaaaaaaatctttgctgacccccaaaggttcggggttctccttttccaaaacccccataa

SEQ ID NO: 67495 - DNA, 485 bp, Glycine max
  Clone ID: PAT_MRT3847_31962C.1
cccacgcgtccggtgagaacaagacattgcacttgtcatcatcatcaagctctacatttctttatcatcagtcaacagacacgcatgcattcatttgttcagagcaagcagttttttatgaggaccgaataaaagattcaaatttctatgacgtctatcaaatcattgagatggctgatgagaaaaaagagtggattgtctgatgggggtaaatcaagtttcaagatgaaacatctgccttttctggcagttttgtgcacgataatgttattcattgtgtatagaaccacaaagtatcagtatcaccaagaagagattgacaaaaaatggagtttctggggacaaccaaaggtgtatccttcaacttatgggaagttgaaaggctcgccacgaggtataatacatgataattcagatttggagttaagaccattatggtcaagaagtagttcaagatcaaaggctgttactctaactctaactac

SEQ ID NO: 67496 - DNA, 938 bp, Glycine max
  unsure (1)..(938): unsure at all n locations
  Clone ID: PAT_MRT3847_31963C.1
ccacgcgtccgcgaaaattccaagtctgtatgcaaaggtagaaggagaggaattaaaaaagaaagaagaagaaggaaaagagggaatggcgagagtacgagacagagagcgaaagtgacggtgtgattagcaagtaaagacatggatggtgttaggaactgataaagctaccactctggcttagttagctaagtttggttttggttttggatgagaagaaaagtggaggaatcgacacgagtgagtgagaacaagacagtgcacttgtcatcagtcaacatacacgcatgcattcattcagttatgaggactgaataaaagattcaattttctatgacgtcgatcaaatcattgagatggctgatgagaaaaaagagtggattgtctgatgggggtaaatcaagtttcaagatgaaacagctgccttttctggcagttttgtgcacaataatgttattcattgtgtatagaactacaaagtatcagtatcaccaagaagagattgacaaaaaatggagtttctggggacaaccaaaggtggatccttcaatttatgagaagtatcaagtcattgagagaggtataatacatgataattctgatgtgtagtgaaggccattatggtcgaaagatgaaacagcttccttttctgtgagtactctgcccaaaactgactttcattgtgtattggtctacaaagtatcaagatcaccgatgcgaggttgcaaaagtatcttgtagcaaacttaacaattattttattgcattatgatggcaatattcatggatggagttaagcccgactggagtaggaagtaattacatattgttggtcggcatcaaacaaagtggtgggntgcaaaaaggtttctacatgcagatattggctctatatatgattatatctttctctgggacgacgatctaggtgtggagca

SEQ ID NO: 67497 - DNA, 433 bp, Glycine max
  Clone ID: PAT_MRT3847_31964C.1
cgctgttgtgcatatgatttggtaagatgatgatggctaaacctcaccaactcttgcctttctacgctacacttctcgacgcctgttctttctcaatctaaaacgaaaccacgcacttaccatcaccttaggcattcacacaatgacttcattcgaagcaagcttgtgtcttcctacgcttgttgtgctcaattgcacgaagccaatatccttttctccttcaccattcgccagcccactttcctcttcaactctctcatcagagcttattcttctgtcaaacttttctaccaatccctctgcatctttcgcacaaatggagcttgctcataaaccctgggatcgtcacaccttacccgtggcgctaaaatattgggctggcttatcggctatggggctcgggcaacaaggccatggagcaggactaggtaat

SEQ ID NO: 67498 - DNA, 586 bp, Glycine max
  unsure (1)..(586): unsure at all n locations
  Clone ID: PAT_MRT3847_31965C.1
nnnnnnnnnnnnnnnnnnnnnnnnnnnnnnnnnnnnnnnnnnnnnnnnnnnnnnnnnnnnnnnnnnnnnnnnnnnnnnnnnnnnnnnnnnnnnnnnnnnnnnnnnnnnnnnnnnnnnnnnnnnnnnncccacgcgtccgggtagaaggagaggaattaaaaaagaaagaagaagaaggaaaagagggaatggcgagagtacgagacagagagcgaaagtgacggtgtgattagcaagtaaagacatggatggtgttaggaactgataaagctaccactctggcttagttagctaagtttggttttggttttggatgagaagaaaagtggaggaatcgacacgagtgagtgagaacaagacagtgcacttgtcatcagtcaacatacacgcatgcattcattcagttgtgtttccgtgttccttggtgcttatattttatcaaattgcacaagcataatatctccttttgcacaaaatatagtaagtgttctggcggtctggttttacacattaatgaagttatgaggactgaataaaagattcaattttctatgacgtcgatcaaatcattgagatggctgatgag

SEQ ID NO: 67499 - DNA, 354 bp, Glycine max
  unsure (1)..(354): unsure at all n locations
  Clone ID: PAT_MRT3847_31966C.1
ctaccgccctcaatagtcgggattcatatgatggggggctttgactacatggaatgagacattgtagtcactcactaaaatctgactttagatgctattgcatgaagctatattaagggcacagcgacacaacataccatcctatattgaatatcaacacacactccaactgttgtatgatcaggacgacttattgtcaacattgacgtaaagttgccaaattctgcatgaccatataaacttgactgctgacagtatggacctatcatcatcacanactgatacacatgcagctgcaatgcagcatgattcttctcagacgagctatgcgtctacggagtccgatgacagggg

SEQ ID NO: 67500 - DNA, 837 bp, Glycine max
  unsure (1)..(837): unsure at all n locations
  Clone ID: PAT_MRT3847_31967C.1
cgaccccgcgtccggcaggtgggggctcgagcgggttgcgtttggttttggatgagaagaggaggaattgacacgagtgagtgagtgagaacaagacattgcacttgtcatcatcatcaagctctacatttctttatcatcagtcaacagacacgcatgcattcatttgttcagctgccaccgttctcggtatctcatgtgatcttcaaagtttgttgctttcagccttttcaagctgtccatttaagtttttgagagcaagcagttttttatgaggaccgaataaaagattcaaatttctatgacgtctatcaaatcattgagatggctgatgagaaaaaagagtggattgtctgatgggggtaaatcaagtttcaagatgaaacatctgccttttctggcagttttgtgcacgataatgttattcattgtgtatagaaccacaaagtatcagtatcaccaagaagagattgacaaaaaatggagtttctggggacaaccaaaggtgtatccttcaacttatgggaagttgaaaggcttgccacgaggtataatacatgataattcagatttggagttaagaccattatggtcaagaagtagttcaagatcaaaggctgtttactctaactctaacttactggcagttccagttggtattaaacaaaagcagaatgttgatgctatggtgcaaaagtttcttcaagaaaacttcacaattattttattccattatgatggcaatgtggatggatggtggaatcttgactggagtagcaggccatacacattattgctcgnaatcaacaaagtggtggtttgcaaaaaggtttctac

SEQ ID NO: 67501 - DNA, 390 bp, Glycine max
  unsure (1)..(390): unsure at all n locations
  Clone ID: PAT_MRT3847_31968C.1
gctcgagcaaaggaatacatnacttaaccatactttaaaaaacccacaaacgacaaaaaatcgtacatttatacaaaatcaaggcccacaaaaaataggctacacaaatacaaaaacttccattatacataaaaatcanattaatagaagcaccattgttttataacgctttcttaaaataagtaaagtttcccacaatttatttcttaacagatataaatggatcaatcaattagagctttgatggaaaatattaactgacaataatttgattcttaatgccatcatgataacagcaaaacttaccgtactcctagagaaatcgataaatcacatatatagccatcaaaaaatccttattatgattactactacacaatttcttatatt

SEQ ID NO: 67502 - DNA, 298 bp, Glycine max
  Clone ID: PAT_MRT3847_31969C.1
ctcatttttaaaaagttgcagttccacctggagaattgcatacgtggatataggaaggatacaagattactgcttccgtaacactattagatatcctaaacttaaagatgtggtagagctgttggatattctgattattccaggttctgacaatggcacttcgatacccaaaatatttgaaggcggcgtcctaattaaaaatggtattgaagtgttcaagcagacatatgtgatgctgttcttttcgagccttgacaacattggagatgagatatctcttttgaattccatcaacaac

SEQ ID NO: 67503 - DNA, 269 bp, Glycine max
  Clone ID: PAT_MRT3847_3196C.1
cacagtatgagcggacctgtatcatctaccctttaccttggatattcactactgatggccattgcattcatgtacgcaaaacgtcaccacaggctaacttatgctatcctacttcgtgcactacatggtcatatcaagtaagatacattgaggatcttgtggtcattgcatatgaactatgaaaaatgatgaaagatataacttgatcacattgcataatagggcaacagatgatcaatgaattgtctgatcttatattgcgatgggat

SEQ ID NO: 67504 - DNA, 360 bp, Glycine max
  Clone ID: PAT_MRT3847_31970C.1
gagcacgcttgaccacatattccttcccttgaaagttcccgtttgctcaacaacacttccaccgcaaccatgaaggccaccaccctcgctacttttgctctttccgccgtgagcgctctggcagcgcccaccaagaccttcgccaagcgtgccgccatcactgacggccccgacgtcggctatgccaccctgaacggtggcaccactggcggtgctggcggttccaccaccaccgtctccagcctggcccagttcaccgctgccgccgaggctgatggcgccgccgtcattgtcgtctccggcaacatctctggcgccgccaaggtccgcgtcggcagcgacaagaccatcatcggcaag

SEQ ID NO: 67505 - DNA, 259 bp, Glycine max
  unsure (1)..(259): unsure at all n locations
  Clone ID: PAT_MRT3847_31971C.1
ctaaaatcacacccactctcttttctcccttcacacggaaccgcgacgctgtcgagcgacacancgaagacgagctcctccagatggcgctgaaggagcaagcgcacgctgatgtcaactacggcggcaaatcctgctccaattcccgaaagccggtggcaaactacgtccagccgctgaagaaacccgctcctccgccgaaacagtcgcagggcaaaggcagagtcaccgacgacgacgacgattccgaaatcgagat

SEQ ID NO: 67506 - DNA, 488 bp, Glycine max
  Clone ID: PAT_MRT3847_31972C.1
aattcggctcgagacggctgcgagaagacgacagaaggggagtggacttttatttacaatttaattagtttaagcttttgctaaatgtgagtatttttagttttgctgaagctgaagcagttaaataaaattcggagagatgaattatgaaagcagggttgttttttctggtgttagtgttagaggaaagaaatttaaacagagcacgaagatgaagggtctcttcaagtccaagcctcgcactcctgcagatgtagtgcgccagaccagagatcttctgctctttgttgatcgcagccccgaaacccgcgaaagcaaacgtgaagagaagatgtccgagctatttaaaaatatcagggagctaaagtcaatcctgtatggaaatagtgaatctgaaccagtgtctgaagcctgtgcgcagttgactcaggagttctttaaggaggatacgttgcgactgcttatcaagtgtcttccaaaattgaatt

SEQ ID NO: 67507 - DNA, 282 bp, Glycine max
  Clone ID: PAT_MRT3847_31973C.1
ctggggggggggggaaatttaaaaaaaccctcctcgtcccttccagggggcttagtaaaattacaaatcccccaaatttaactttaacaaaaaaaagcctccacccccccctttttacatgggcctcaggggacacaacaaaaaaaaacccctgtttattccgccacgagcaattttttttatcttagtaaaaacgccaccaaatttcggcttaaatttccaccctccaacatccgaaggggcaaaaaaaagtggtgcatcccaatgggaggcgcccccttt

SEQ ID NO: 67508 - DNA, 285 bp, Glycine max
  Clone ID: PAT_MRT3847_31974C.1
aagtcccaaaagacgacctcgttacgcaggttctccacggcggcgggggacatggtggtggcggacattttcacggcagcggcggtggcttccgcggtggcggaggacattttggcggcttccatggcggcggcttccgtgccgcgccggcctttcacggcggcggcattcgctacggcggaatccaccactatggcggctatcatcgctacggaatctatcgcccgcactacggctatcgccacttccaccggcgctattattacggcggctactatccctact

SEQ ID NO: 67509 - DNA, 523 bp, Glycine max
  Clone ID: PAT_MRT3847_31975C.1
cagataaataaaattcggagagatgaattatgaaagcagggttgttttttctggtgttagtgttaggtcgaatcttaatcctgtagctgatcgttttgtatccatgcttgctcagtgtggattttatcctctcctccataattttccaacaaaatctcaaacataataaataaaaattacatttttattcacaaaaatatcgggattcatcttgttctcattttgcccccttttttcttctgctctcccgaatcagaaaccctaatcattgtttgggatttcagaggaaagaaatttaaacagagcacgaagatgaagggtctcttcaagtccaagcctcgcactcctgcagatgtagtgcgccagaccagagatcttctgctctttgttgatcgcagccccgaaacccgcgaaagcaaacgtgaagagaagatgtccgagctatttaaaaatatcagggagctaaagtcaatcctgtatggaaatagtgaatctgaaccagtgtctgaagcctgtgcgcagt

SEQ ID NO: 67510 - DNA, 2585 bp, Glycine max
  Clone ID: PAT_MRT3847_31976C.1
aacaagaatgcttaattttttctttaatcctatttattatctttgaaacttgtaattactcttgtagcaaaacgaataatggccttactttccaccttccacacactcactctcctcttcctctcacacgttaacgccaaagaaatcgtcatcaccgaagaggtttacacacgtgaccaccgcattcgacggccacaagcctcatttctcccctttcaatgttctccagctatcctttgcctccgatctcgtcttgctgtgttccgtcaactgcgttttctatacggtgcaatttgaaattacagaagaaggggttttggctaggctttatggcgatgggtctgtagggtcttctgaaggggacgtgggttatgttcggtccgataaacctaaaggctttgcttttgactggagacgaaatgtgtatgttgctgataattccaacgcgagcaataaggaaaataagaggcaagggtgtgaccacgattgataggggagcattttccgaaaattcaataacgaaagatgggcatggacttaatgcatcattttcaaatgattttgatctgactttcattcctgggctgtgtgatttgctcgagtcagatcacatgtatagatgggtgcgccagattaatttgatgggggagaattgaacccttaggtctaaatctggacttggtgaagttaagaattggaatctaggataagggatatcatgattacttggttctattcaatggaattgtggtgagaacttacaagatcccaaatacaaaatggctccaacccttgccactttaccgagacattgaagagatcataaagtagtatgggtaacctagcccagacttgctagttgcgtggcataatggcaatcacggacagcatttggcattgtgttcaatgaatactgatgggactcaatagatcgggcggatcagatgttgattgaatgttgaggatgaggatgaataaagtccctcaaagtctacatctgtgagcagtttgtttactaaattgagatgtctttaataatggggagattacaaaatccgataagtattttatcatattgtggggatttgattagtttagatggaggctcaaacaatggcagatgaacctgtaataaatgaagtgatagcataggaaagaggaatgtgtgttatgaaggtgatgtcatcaagttggctaacatgggctttgtagaggcacctaaagatatcaataaaatagttcatcaagaatcttttgtgtgtaaaattgtttattgcttagtgtaaaagggaaaatatttggaattaccatgcagtaatgttatggcacctaggaggcaaatcttttgtcatccagaataaatgaagtattccgaaaaacgtatgaaatacaagttggtaagataggtttttcatgtgacttcaccggctcctgcagtaaggtcgatgggatgttgtgatgtcacgaaaggttggactcaatagtcatgtatttgaaattgattttctcgatctttgagagcgaatcaagaaacgttggtttaaggtttataggattacagcaactgctgctacatgtgatcgatttgctcttatgcttagcattcttaggcgcaggccaggagatgaatcccaggaaactctgcgtacatctcaatttccaagcactcatgttaaggaaaaatggtcaaataaccctttatcttgcttgtttgtgctatgggcgcatagtatgctaatttccttcaaaggtcaacgtattgtgtctgaaatttatatattttgtaatggcccaatcaagtataacatagcagagaattgttgtatctttagtattattctctctcccctcccattctattacaagttccttgggggtgggggatgtggcagttaatgtatacagcttggctttatatgttactccattatgtattatatgtaggttttatcatttttttttgtctgattttcaagattgtttccgtgactaggttaataaaaacattgtctggattgttttatcttgttgttgaacttgattttagttatcctagtgagggaatccacaggcgatgggataatggttataggattacagcaactgctgctacatgggatcaatctgctcttatactgagcattcctaggcgcaggcccggagatgaaacccaggaaactctgcgtacatctcaatttccaagcacacatgttaaggaaaaatggtcaaaaaacctttaccttgcttgtttgtgctatgggcgcacagtatgctgatttcctttacgggccaaagtattttgtgtctgaaatttatatattttgtaatggcccaatcgcgtataacatagcagagaattgttgtatctttagtattattatccccacccatcctattacaagttccttgggggtgggggatgtggcagttaatgtatacagcttagctttatatgttactctaatatgtattatatgtaggttttatcaaattttttgtcggattttcaagattgtctccgtgacttgtctaataaaaacattttatggatagctttccttgtgaataaagagtccaataatttt

SEQ ID NO: 67511 - DNA, 351 bp, Glycine max
  unsure (1)..(351): unsure at all n locations
  Clone ID: PAT_MRT3847_31977C.1
cccacgcgtncgaccacgcgtncgntggtttttaattcaacgttttatgccagcgtcatcagcgtatgaaataggggcggaggattataaagaacaaaggaaaaaaaagggtcctcattctaacactcaaacacatacaggctaactgcctggatgctttatctctaaacaaacattggaagcttcgtaaccaaaaacattccctatcattttctatgcgcacttgtaattacaaaaaaaatgccattggtgaattctacacccgttgcacggaattaattacacgcgttgaatacaccccagagactgtccttacatacactaaaaggtcagtcgatactggatcacaac

SEQ ID NO: 67512 - DNA, 242 bp, Glycine max
  Clone ID: PAT_MRT3847_31978C.1
cgccttttgagttgaagcgtcgaacttatgtcttcaccttccaacaccatataccattgagcgtgggtgtctgcggtttcactgtctgtgttgttgacagtgcttttttgaacctacatgcgtatgggcctgggggttaaactgccagatgatgcttcttagggagcagcttgatgacagatatctgctcaagaggccgcaacgcagaggttagctttggaagccttaagattgctgctgta

SEQ ID NO: 67513 - DNA, 173 bp, Glycine max
  Clone ID: PAT_MRT3847_31979C.1
gtgaccatttggcccatcacatactcactaaataaagaaccggttgggtcggcttcattaactttattttattttctggtggtgccgggttccttggtcgaaattcccatctttttgggtgccccttaattccgccttccttggaaaaaccccgttggtcctaaacccttaac

SEQ ID NO: 67514 - DNA, 296 bp, Glycine max
  Clone ID: PAT_MRT3847_3197C.1
acgtccacgcgttcgtccactcgttctttttcgtttcgtttcaatggggagcgaatagcataagggcgaattctacctgcgggactacgtccgtcacaaaggcaagtttggtcactagttcctggagttcgagttccttccatacagtaagctccgctactccatcaacttcaactacaaaaactacaccatcattcgcaaggaggtttacctaatccccgccgttcttctcgagtgccgtcgcatcattacctacagcgagattattaatgaagatgataacaactgttccgaac

SEQ ID NO: 67515 - DNA, 515 bp, Glycine max
  Clone ID: PAT_MRT3847_31980C.1
ggaattcggcacgaggtcttaattagatgttgcaaattatgttgaagcttgagcacgttttggcataagtttgctagggacttcctttataacataccactttcctgattctagttttaacttgcacacttggtttagttctattgctaagttgagttgaagcataagaagatttactgagggcatgccattttttttaaattgacccacataatatgtacacccttttataaattggttttgactaatttaactcttgcttatttaggttcttgtccatacattgttgatccaggtactcaaaggatttgtgttgccgagcttagtgagtcagacagttggtttcctggaggacattgcctgaggatattgtctaggttctttatgtgatagacaagattatattgtagctttagacttaaaagctttagacaagattatattgtctaggatatcatcaataaccagattatattgagaattattgtctactataggttttctttttaaaaaaa

SEQ ID NO: 67516 - DNA, 655 bp, Glycine max
  Clone ID: PAT_MRT3847_31981C.1
gggatgctactgctgtatatgcatctatggacaaggctgagaaagaacttggttggaagcaaaatacggtatagaggaaatgtgcagggatttatggaattggacaagcaaaaatccatggggataccaggggaagcattaaattaaatttggtgctcgatcggttgtacttggagattgctggctatgctctctggcacatgccgagatcaatccatcgatactaaccatgtgtttgtttgcctctacgtccaaatgaaatgcttcaatgctgatattccataccccaatccccacccaaacctctcttgaatgtacacaacaaacagtgtagcggctaaagtgccaaatgcagtgttaaacgaccaccagttgaagtatgaaaattttagcactttttctttgggtctgaagtcatcgaattggtcagcaccaaaagttgacatgttgggcttcagcacgccactgccaatggctacattgtgtgtgcaatatgaagctgatttcagaccaaacatgagcatttgtaaaaagaagaggaaaaaactttagcaagagttattgagactttagacagtaacttgatcttcttctctctatacatgtatggatgtaattttgtgatcttaatgtattaaaaatggcattagccaag

SEQ ID NO: 67517 - DNA, 633 bp, Glycine max
  Clone ID: PAT_MRT3847_31982C.1
ccacgcgtccgctcgcgcacagtctctctctctcatccgaaggaatcgaaagccctctctctctctctctagggtttctgcgtccttcgcagtcaaattatgctcgcgaggtagggaatcggagctcggagctgcgccacgtggcttctccctcgaatgcgctacccttggatgtggattcttcgcggagccgcttcgaatcggcgaggaggtgggaggggatcgtgtgtggtggtccgcaggaaacactatttaatcttgtgcttcttgctggttgcttgtactgtgaggatgtgcatgcatagctgtggagaatcatttgcaaggtggttttaatactgtcactgagttcatggggtcttatattcacattgattcaatctctatcgatcttgccgattctattggcaagagagatgcaggcaaatgtgaacatttctcgatacgtggatatgtgtctgaaatgcgcaaaaaggactggaaaaattgttggccatttacagtacatgagtctgacaaacaaccatcatttctgccattagatgtaccaaaatatagatgtcggcattgtcagaactctgcacaagaaattgctgccaaggacatccagagagatgaccaaacaaactttga

SEQ ID NO: 67518 - DNA, 2934 bp, Glycine max
  Clone ID: PAT_MRT3847_31983C.1
ctctactacgtcaatgctcctccccacatgggtagcgcttacaccaccatcgctgccgatgccattgctcgcttccagcggctattggggaagagtgttatatttattactggcacggatgaacatggggagaaaattgcaactgctgccatggctcagggttccacccctcctgaccattgcggtctcatatctcgatcttacaagacgctttggaaagatttagatatttcttacgacaagttcattagaacaactgatagcaagcatgaagcaattgtgaaggaattttattcaagagtgcttgccaatggtgacatctaccgagctgattatgatcgggactttattgtgtaaactgtgaggaatataaggatgagaaggaacttcttgataataattgttgtccagttcacctaaagccttgtgtttcaaggaaagaggacaattacttttttgcactgtcaaaatatcagaaggcattggaggatactctttatagaaatccgaattttgtgcagccatctttccgtttaaatgaggttcaaagttggatcaaaagtggcttgagggacttttccatttcccgagcatcagttgagtggggcattcctgttcctgatgacaagacccagactatatatgtatggtttgatgctttactaggctatatatcagcactatctgatgatcaggaacaacctgatttacttaaaactgtttcttcaggttggccagcttcactgcacttgattggtaaggatattctacgcttccatgctgtttactggccagctatgctaatgtctgctggactaagccttcctaaaatggtatttggccatggattcttgacaaaggatggaatgaagatgggcaagtcactagggaatatacttgaaccaaacgatttggttaataaatttgggacagatgcagttagatacttcttcctcagagaggtggaatttggcaatgatggagactattcagaggaacgcttcatcaatattgtgaatgcacatcttgccaatacaattggaaatcttcttaatcggacactaggacttctgaaaaagaactgccaatcaattctggtggtggattccactacagctgctgaaggaaatgaattcaaggacaatgtagagaagctggttgataaagctcacattcactatgaaaatctctctctgtcatcagcttgtgaggctgctctgggcggtgagtgaccgacagttggattgtagtggaaaagatgaaatgagagaattattatgtgtctataataatagttattgaaagttgtgaggaaggaggaggatggtgtccccgatgtcaacggttctggtgacgggaggggcaggcttcatcggatcccacacggtgcttcagcttctgaagcagggcttcagggtttccatcatcgacaaccttgacaattccctcatcgaagccgttcacagggttcgccgcctggtcggtcctcatctttccaacaacctcaccttcttccacggagatctccgcaatgttcaggatttggaggcagtgttctcgaaaagcaagtttgatgcggtgatccactttgctgggctgaaaggtgtcggcgaaagcgttgcaaagccccggcgttattacgacaacaatctagtggggactataaacctttttgaagcaatggctaaatacaagtgtaaaaaaatggttatatcatcatcggcaactgtttatggggaagctgatagagtcccatgtgtggaggaggaggtgcatttgcaggccatgaatccgtatggaagaacaaagctgttcgtagaagaaatagccagagacatccagagggcggagacagaatggaggatcattctgcttcgatacttcaatccggttggtgcccacgagagtggacagattggggaagatccaaggggaatccccaataacctcatgccttacattcaccaagtcgccgttggcagattgcctcagctcaatgtttatggtcatgactatcccactaaagatggcaccccgatccgggactatatccatgtaatggacttggcagatggccacattgctgccctccgaaagctttttgcaacagaccacatcggttgtagtgcctacaatcttggaactgggcgtggcacatccgtgcttgaaatggttgctgcctttgaaaaagcttccggcaagaaaattccattaaaaatgtgtcccagaagacccggggatgctactgctgtatatgcatctacggacaaggctgagaaagaacttggttggaaggcaaaatacggtatagaggaaatgtgcagggatttgtggaattggacaagcaaaaatccatggggataccaggggaagcattaaatgaaattgggttgtacttggaggaggtcttcctccaccatatcatatcatctccactccagatataatatgtagatgtttcttttgctgtaggataaattgcaattgatacactacgtatgttggccttcctgttacaccagctatgagttggagaatatatgcccaacttggctattccagggaccaatttgatgcagcaacctgaaaagaccccgagtggggtgggcttaagggtggccaagtcatggctcaacctaaaccagtctttgccaggattgaaaaccaaactgaagtggaagacaaaggagtcgcagttggaaagactaagaaaagcaaagcgaagccgaaacagcctcaagaagtcgtcggagcctagatacccatttttgacattttccccttttctgaattgttaatgttttcaccaagttcagcttcatgtaaaactaattcttttgttaatttatgtacacgaatattttgatacatacatgcgcaagaaggtatttatgagcacgaggcatatgtgtatattaaaaaaacccccaaaaa

SEQ ID NO: 67519 - DNA, 4079 bp, Glycine max
  Clone ID: PAT_MRT3847_31984C.1
tttttgaaaaacacgaaaggtaactttaattaggtctggtcatttcacaaaacaaagaaactattctgcacgcaaaggttagcaaaagaacaatgaaaggattatcagcgcagatttaggcacttagggtatccgaataagttatttttctgctaacgtgtttcactggcaggtccaggtcgtgcatatctgtgggaaacattggcacttttgggggttggattggtttgggcacttgtcgtgctgattagaagagacatgaagcttgatgcactattgggaggagggcttttggttatttacttcatttctctattcctgaggctgattcagacacttggttctctccaatttcagcatatgttgttaggcttattcttcagcagatgataatgaattgtgaatttctcatcatattggtatagctattagccactgacatcactttctgtgcaggagctatattgtgcaaccatgataggtaggcctaaattagatagcgttagaacttccactgctatttgtacttagcttttcttggctaatgccatttttaatacattaagatcacaaaattacatccatacatgtttagagagaagaagatcaagttactgcctaaagtctcaataactcttgctaaagttttttcctcttctttttacaaatgctcatgtttggtctgaaatcagcttcatattgcacacacaatgtagccattggcagtggcgtgctgaagcccaacatgtcaacttttggtgctgaccaattcgatgacttcagacccaaagaaaaagtgctaaaattttcatacttcaactggtggtcgtttaacactgcatttggcactttagctacactgtttctttgggtggggattgtcgagcgtgcaaggtaaattgatgatgcacatatttccaaaataagaaatacaatttttccattcaaaatttatatacgcacatatgcctcgtgctcatacataccttcttgcatatgcatgtatctaaatatttgtgtacataaattagcaaaagaattagttttacaaatcagaaaaggggaaaatgtcaaaaatgggtatctaggctccggcaacttcttgaggttgtttcggcttcgctttgcttttcttagtctttctgactgcaacccctttgtcttccacttcagtttggttttcaatcctagcaaagactggtttaggttgagccatgacttggccacccttaagcccaccccacttggtgtctctccaggttgctgcatcaaattggtccctggaatagccaagttgggcatatattctccaactcaagcttggtgtaacaggaaatagtgcaattgcaataatcctcactgtctctaatataattacaaggtccttagcagctgcttcagcagcagtacccccttgcttaaagagagaccatggtgcacgttgatccatatacaaattcccaacattaccaatctccagtggagccagagattttggttacatacttcatttctctattcctgattcgtgggaaatcatttaaattaattctcatatatgactcatcaaagtggtcctttctacaatataaaaaattataatcagacaattatttaggccaacaacatacgtagtgtaaagaatcaatcaatcaattgtatcaacaaaagaaacatcaacatattatatctggagtggagatgatatgatatggtggaggaagacctcctccaagtacaacccaatttcatttaatgcttcccctggtatccccatggatttttgcttgtccaattccacaaatccctgcacatttcctctataccgtattttgccttccaaccaagttctttctcagccttgtccgtagatgcatatacagcagtagcatccccgggtcttctgggacacatttttaatggaattttcttgccggcaactttttcaaaggcagcactcacttaaagcacggatttcagacgcccagatcaagtgttataatcatcatactccgattggtggtcgtgtaaaactgcatttgacactttaaccgctacactgtttgttgtgtacatacaaaagaggtctgggtggggattggggtatggagtatcagcattgaagcatttcatttggacgtagaggaaaacaaacccatggttagtatcaatgaagggatctcggcttgggctttagaggaagagcagcaaccatcaagacaatcgtgtgggcaccaaattgaatttaatgtttcccctggtagccccacgattttttgcttgccctattcaataaaccccatcacttttcttctataccctattttgcttctaacgaatttctttctcagcattgtccatattcgcacatacatcggcatcattctcgatccttcttgaacatattttatattgaattgtcacgctgttagcttttgcaattgcaacaaccatttcaaacaaaagaccagatccaagcttacgcaactatttggtgaggtttattcgcccctttttttctgcaagtctttatccctgcaaaccctgtgccttcaacatcagtttttattttgaatcctatctaaaactgctttagattgagccatgattcggccacagaagcccagactcctggagatatgactccaggctggtggacgaaatctgttgatcggattcgatgagggaattgtcaaggttgtcgatgatggaagccgtaaagcgctagtttagaagctgaatcaccgtgtgggatccgatgaagcctgcccctcccgtcgccggagccgttgacatcgtggacactagcctaaacctatccaatcgtgcttcaagaactataataatagacacataataattatctcatttcatcttttccacaacaatccagctgtcgggcactccctagtcctccttcctcactaccttaaataactattattatagacacaaaataattctctgatttcatcttttccactacaatccaactgtcggtcgcctgcggaaaaggcccccaacctacctcatttacgcaaaatcggatttctataaagagtatcctccaatgccttctgatattttgacagtgcaaaaaagtaattgtcctctttccttgaaacacaaggctttaggtgaactggacaacaattattatcaagaagttccttctcatccttatattcctcacagtttacacaataaagtccatcataatcagctcggtagatgtcaccattggcaagcactcttgaataaaattccttcacaattgcttcatgcttgctatcagttgttctaatgaacttgtcgtaagaaatatctaaatctttccaaagcgtcttgtaagatcgagatatgagattgcaatggtcaggaggggtggaaccctgagccatggcagcagttgcaattttctccccatgttcatccgtgccagtaataaatataacactcttccccaatagccgctggaagcgagcaatggcatcggcagcgatggtggtgtaagcgctacccatgtggggaggagcattgacgtagtagagaggggtagtgaggacaaagtgttcggtactttggggagtgatatcggtggtggcgcatgtgcagaataaagctcctcgagaggggttttgacgaaaatgcaattggggtttcaacttcagggaagaagctctgtaacggagggaaaacagaggagggttgaggagacagagggtgttttgaatggagctgtttattctcactgccatggcttcttctcagttcagattctcaggtttcactgttttgctgttttgttcacacgtgtccttttgcctgcattataaccccactcgagccgaatttgtgcctgatatatgctgtccaatagagaatcgttcaccctattcattcaagtggaaatattacacaacattcatttcatagtttctaaatattttctaccttatattctgcagaaccttgttgtttgctaagtagggcctccagtaggagcttgtaataggcctcttcaataaagcaccatcctagatttccaccatacacctgaagaagcccggacgcgtggg

SEQ ID NO: 67520 - DNA, 488 bp, Glycine max
  Clone ID: PAT_MRT3847_31985C.1
agaccattcatgcaagtagtctcagacatgactcttctgagtgatttcggaccaggcttcattcccctcagcaaccaagcagacactattttcttcctttagtacatacacaattaacacaatcttttctttaagcattctccttgtgatgttgtgctcttgaacaagtcctcaggcaattgaaaaccaaaggaggattgccaaaaaaaaaaagagcaatgcaggactaattggttattgtataagcttccaggtggttatgactcataatttcaaagttcttacatttcatctatagcttatttttttcatattcatatgaatagatgtgttggtttggtttgttgataaactcttgtggagttttttttttttcttttttggacctgaacaacatattgagtttgttcttgcttgtgttctgttggggaacaatctcttcagtctgctccagaataataacatctcttagcaggtaggcaagttac

SEQ ID NO: 67521 - DNA, 513 bp, Glycine max
  unsure (1)..(513): unsure at all n locations
  Clone ID: PAT_MRT3847_31986C.1
ccacgcgtccggtgcgtgtgtcactgtcattctctcgggagaacaaaccacaaacccattccctttggactcttgcttgctaccaccattttccttcgatgctccctctctgctcccaaacgaaaagtacaattcttcctttccttttcgccagccccacttcacacgttctcaatgcctagccacccttttgatcaaaggcctaaaatgtctccattttttggtggggtaagccttccctctccctctagggtttgagtttgtgtggttttcttcaaatcattctcattttttggtcacttctccatagttcttaacatacccttttctttttgtcaacctctcatctcaattccctcctcaaaatcatattttcccccctcacacatcactagggggttgtttttggttcttcatgtttctcaaagtctcaagctaggagccacattgacctttgctttgtgtttttttctcctccaggccttgnttagcttctcttttcaaacatgggtt

SEQ ID NO: 67522 - DNA, 338 bp, Glycine max
  Clone ID: PAT_MRT3847_31987C.1
aaaagggaagaccacaaatacaagaagcagaggcgagggacaaccaacgagaacgggaaagagaagaaccagggaagggaggggaagccgacgggcgaggaggggcagaaaggcggagggaaacaagcggaggaacgggcggaccaaggccgaggacaacagccagaaggagggcacaagggaccggggacagggacgacagggagggacggagaaacatgaacaagacgcagaccggggaagagcaaggacgcagaagccgaggcgagggaaaccaaggagaacgagaaagggaagacccaggacaaggaggggaaaccggcggagcaggaggggga

SEQ ID NO: 67523 - DNA, 348 bp, Glycine max
  Clone ID: PAT_MRT3847_31988C.1
gaaggtatggttcgagaatctggaccacttttttgcttaaatttgaaagccatttggggggttcacattggtggtttacccttttcttttaactaagggaattaatgtccattagaccaccatattcctgtttgaaaatgccttagtcaaattttgcctttaaaggccctaaaagttgtttaatgttaagtactgaaggtgcttttttgctattttttcgaaggtagttgctcggccttgctgcttaaagtaatagggtggttgaatgcaatttggattcttttaaacaattggattatttgattttaatgtaacttttccccctcaagattaatgaaaatgtaattt

SEQ ID NO: 67524 - DNA, 1511 bp, Glycine max
  Clone ID: PAT_MRT3847_31989C.1
ggtccggaattcccgcgtcgacccacgcgtccgtgaagatggcgctgctcaaggtacacgcacccacacccacacccacatctgcctctgctcaactgcaatggcgctgcagtgtaagtgtggcacccaccactctggcgtttcccaattcctactccatttctgcggaaagaggaagaagagaatggaattggagggtgaaatgcagcagcagcagtgcggagattgagaaaggggctgcgagttttgggcccgggagcccagtgagagcaaccaacattctggtggttggagcgactggaaccctgggaaggcagattgtgcgacgggcactcgacgaaggctacgacgttaggtgtctggtcaggcccaggcccgctcctgccgacttccttcgcgattggggagcaacagttgtgaatgctgacctcagtaaaccagaaaccattcctgctaccttggtcggcatacacactgtcattgactgtgccactggccgtcccgaggagcccatcaaaaccgttgactgggaaggtaaagtggctcttatacaatgtgccaaggcaatgggaattcagaaatatgtcttctactccatccataactgtgacaaacatcccgaggttcccctcatggagatcaagttttgcactgagaagttcctccgagactctggcctcaatcacgtcattatccgcttatgcggtttcatgcagggccttatcggtcagtatgcagttcccatcctagaagaaaaatctgtttggggtactgatgcccccacccgaattgcttacatggatactcaggatatagctcgcttgacatttatagccatacgaaatgataaattaaatggtaaacttcttacatttgccggtcctcgtgcctggacaacccaagaggtgataaccttgtgcgagaggctagcaggccaagatgctaatgtcactacagttccagtctccattttaagactcactcgccagttgactcgcttttttgagtggacaaatgatgttgctgacagactcgcattttcagaggtccttaccagcgatactgtattttctgttccgatggcggagacatacagtcttcttggggttgattcaaaagacatagttacactcgagaagtatttgcaggactacttcactaacatattaaagaaattgaaggatctcaaggcccagtcaaagcagacagatattatcttctgaaagatgttttgaaattaaaaacttgttaacggatgtagatatctagaaatctcattaagatgctcccacgatgtatattgttttcttttttatatatatatatatatatatatatatatatatatataatttattttcgggtatagttgatgtgcctaagaatgatgaggctgtaccaacaaatttaaacatattatttatttacttgagtgggagaaaagtctccgatttgtgcatctgggacatatgagtattctatgatattttccatttttaatgaatgttaag

SEQ ID NO: 67525 - DNA, 351 bp, Glycine max
  Clone ID: PAT_MRT3847_3198C.1
ctcggaattcggctcgaggctactttgatgtatttgtgaatcaatttgtcaacattgataaagcacattgggttggtgcgagcagtacttatgaactggagcacggggttgtggattggctggtaaagatttggccattaaagccaataagagcatgcctgccatcaatctacttggacacaagactccgagatgacagggaatatggcgttaacatgtattacccacactcataatcccgcatccaatggtttgaagaaaaaccaaaagggccaggagcgcctgtctcttttgagagcatggcggggctaagtgaagagcaaactgttgaactggcttgttgtttgggag

SEQ ID NO: 67526 - DNA, 243 bp, Glycine max
  Clone ID: PAT_MRT3847_31990C.1
agacccccaaaaatgcagagcgccatcttctatgctctctttctctatcgtgactagagcacctcatagctacctgcagatgtcgctgcgtgcgtgctcgataatgaaagtaaccctcttgataatggtcgcacatatcgtaacttgtcagacatagcagcatttcgatggctaagagcagccccaacgggacatgaaagatgccctctcactgtggtgcaatctcgcaatgagctcgacaaa

SEQ ID NO: 67527 - DNA, 208 bp, Glycine max
  Clone ID: PAT_MRT3847_31991C.1
ctatcggcggccggcctttttttttttttttaaaaacaaaacttgaagactgaccttttattatggctatttaaaggcacatcgccacttacatattaacataggctgcttcggagggaggtaaatacataggccatagttttattattacacacaatatattttgatactatttcatataagatgggctcaccacacctttatatat

SEQ ID NO: 67528 - DNA, 418 bp, Glycine max
  Clone ID: PAT_MRT3847_31992C.1
cctcggtattctgctctaggcgctttttttttagagccactgccacgacggcactactgcaaggggtgtcggctgcaggacatggcttcaatcatcacgcaagacgtgtacaaccagatgctgcccaaccgcgacaacacgcagtgccccgccaacggcttctacacctacgacgccttcattcaggccgtcaacttcttcccaagagttcgataccagttccagcaccgacgaacttaacaagcacgagctcgccaccttctttggccaaacctcccactagactaccggtggcacgacaggtgctccctaccaacttcaatggggttactgcttcaaagaggatatcaacaaggccacaagttctccctactattgacgctgaccaaatcaattgacatggcttagccaactacca

SEQ ID NO: 67529 - DNA, 283 bp, Glycine max
  unsure (1)..(283): unsure at all n locations
  Clone ID: PAT_MRT3847_31993C.1
atcaatccttacaaaccctgtgatgcggatttccancgaatctaagaagaaccatggggatattcctacttatcacatgaggaaaaatagggacctgagagttagatccataactaagaaagagcaaccaagtcaggctgcaaccgcagttacaccaccggcgggggaacccaaaccacaggcagtctctactccttcaccaaaagtaagcgccgacttggcgaagagtgtggcattcantgagccagcacctgagagaatcaatggaagagtggccagaatt

SEQ ID NO: 67530 - DNA, 262 bp, Glycine max
  Clone ID: PAT_MRT3847_31994C.1
cgttattttatataaaacacacacacttcacacatcattacgacatttaaatgtgggggggtaatgatgtgagatgaggcagtcaccttcaagaccttcgccaccgttatcatcggggcgctttttttcgccgccgccgcctcctccgttcaggatttgcctccgccgccggcacccgaacccgatgcctaagcagccggatccgttttgagctcgatggccgtcattggagcttccgttgtgaatacattgctcgctatct

SEQ ID NO: 67531 - DNA, 2000 bp, Glycine max
  Clone ID: PAT_MRT3847_31995C.1
ggctcgagcaacaacccccaacacggagccattaccggtttcgactgcgccctctttctctttttttccccctttctttctatctcttcttctcttcactcaccctccgtacaacacatcatgtgagcgtttcgctggtttctaccctctcgtagctgtccatgctcccaaattctgcaaattgcaaccctcttttattatcacagtccctagtccaagtactcatatgccttatttcttgtacttgtcccccaacacaaaacatcacacaagtgctgatggtggtgtggcccttcttattatttcatcttacaacaaccactcattaccaatccctcaactattttagggttcagaaacccttagggttttcttgttcctcatagtggattgagtagtacctcttggtttgtttgttggagcctctcgttcagctgggttaattagctgagtgagagagttttttgcttcccaatttcaaaaatttaatggaggaatacactaataacaatcacttgagtgaaaacacaggtcctagtccaagtactccaaggccaaatttcttgtactcttcagctagtggtggaaaccataatcatcagcatcagcatcatagccatcaccaccaccatcaccaccagtttccaatcaacacctttcatcttcaatcgggtggatcagatcattgctttcagtctgatcaagtttcaccacacccttctgtcaaatccgaagccagcacttctcagcttcacgctccgattttccactaccctttaatgagaggaaatcttcacaacactatgcatcatcatcatcctcagcaacaacaaggagggagcccaactagctccactggtgaagttgaagccataaaagctaaaatcattgctcaccctcagtactctaatcttttagaagcctacatgtttaatttgtagataggagctccacccgaagtggtggcgcgtatggctgcggctaagcaagagtttgaggcacggcaaagatcttcagttggttcaagggaaacttcaaaagaccctgaacttgaccaattcatggaagcatactatgacatgcttgtgaagtatagagaggaattaacaaggcctattcaagaggctatggatttcatgcgaaggatagaaactcagctaaatatgctttgcaatggacccgtgcggatcttctctgatgataaatgtgaaggtgccggttcatcagaagaggatcaagacaacagtggaggagaaacagaacttcccgagattgatccccgagcagaagaccgtgaactcaaaaaccacttgctgaagaagtacagtggttacttaagtagccttaagcaagaactctccaagaagaaaaagaaagggaaacttcccaaagatgctaggcaaaagctacttaactggtgggaattacattacaaatggccatatccttcggaatcagagaaggtggcattggctgaatcaactggtttggaccaaaagcaaataaataactggttcataaaccagaggaagaggcattggaaaccatctgaagacatgcaatttatggtgatggatggcctgcatccgcagagtgcaactctctatatggatggtcactacatggcagatggtcactaccgtctaggaccatgacaaaagacaaggccaccttataaattattattatatatatttttaattgtaatttaaatgcaaggtatgtgtttcttattaacaaagagattgtgcccaaactggataacagtcaacgctctagctactagtttcaatattatcaagcatataccgtgaacattaattggttgtgcttgtgcagtgtgagtacttgagtagtttgccacagtgatgttgtacgttttattaaacaatgacggttgcttattatattttcataattagtagtattggtagagataatatttattcataagatgtgttacgtacatttggattttaatttctaagatgtgctaacct

SEQ ID NO: 67532 - DNA, 1000 bp, Glycine max
  Clone ID: PAT_MRT3847_31996C.1
cactgaattcattcatttcatttcaatcacaaggacttgggaaagaatttcagcttacataaacaaaagaataaaacaatgatcagaaattgacctcaaatgtatgaaatattatcatctagacatcatcaggactataaataataataaaaataaagaacagaaggcaattactgtattgatacaaattgcaccaactaatctttgggctaggcaaattcttatctgcaacaaagaatgaaagaataataataatgacaattttccctacctacaaagaataatactcttgtactctcgactctcccctgaccccttacctttcttgtgtctgtctgtatatcatactctgaaggaatgaattatgaagaaagaatcaccaatcaccaatcagatatcaaatcaacttggctgagaaaacgaggacgaggtacccgcagcagcatcaacaggcccccaagcagagacagtgtacaaaggttgctctaaccaactaagtgtaactcctgttgctccttccttctcttgtttcttcacactgtaactctcgcaagaatacatcttcaacagcatctggctctggctcaattctctttcagtaacacccatgcatctgaaccctccttgctccaccatcatcctcctccagttcccgaaactctcgtgcctctccaccctctcccttccttcgcaagcaacaatgttccttatctccttagcatacatctcttctattttcaccctcaccgcactctcttgcggaagcccactctcgtcaatggaatcaaacaatgccgagtagtatttcaacgagttacacacccttccctccaacctgttttcgttatgttctgcttcttgctctgccaccacgacaacgctgggatttgtgctgcggattagacccaagaagtccctcaaggctcctccgcttccgtcgtagagtgtcttgtgaagctgcaaaacgcagttcacagccaccgtttcgtgctccttcacg

SEQ ID NO: 67533 - DNA, 442 bp, Glycine max
  unsure (1)..(442): unsure at all n locations
  Clone ID: PAT_MRT3847_31997C.1
gccgcccgaggttgtcctttncaaacgagtcaaaccntaggagtgaaaaatcttacaaggggaagaacgggcggctcatgaacaagtaaactacgggccccatcaaggctaacaacatgggggcgacaaaccaggagaaaaaaaacccccgacggaggattcggcgaacccacggtaatggcaatccatatagcggtggagaagagaaccacaaccgaaaaggtggccacacaaggaccctccaatcctcagaaaccaactttcctcaaagaggagggaacaaaaaaactcatcaagggagtccagcaacattggagggcagcccccncaaaaccacatggaaaaacttggggaggtcaaacagcatttggccaccacccttggcgacgaagtaaagggcaacaccttgccaaccaaaccttccactacgtnccaaacgagg

SEQ ID NO: 67534 - DNA, 319 bp, Glycine max
  unsure (1)..(319): unsure at all n locations
  Clone ID: PAT_MRT3847_31998C.1
atgcngnnnagnngnatcggagattnggctngaggagtanaannnatgantnganggtnggaaangncccnggngtaanggcnttgccnntaganggcattgttgcnctgngcctacngacctctnnngngnnganntggnngncgnggatcnngaanngngatntcggttgctactgcgganncnngactcaacatnnntagtnatattcaangnaggantatgctntcngaggnnnacatnccnanggngagggacagatttanagntagnannacggannctcngagnactcannattnnatcanaggggttgcnc

SEQ ID NO: 67535 - DNA, 223 bp, Glycine max
  Clone ID: PAT_MRT3847_31999C.1
cttggacaatggaaacgaagcggatcattactttggctctaaggacaggaccgagacattaaaccctaggaacgatcgtgctctaatctaaacctactgagggtggacaaattcaaaataaagaaactctgtatccgaaaaggatgctagtagggaaccatcctctgaaatcctaaacccaacaacgatgcaaaacaatagggttttcctgcatgtccctacg

SEQ ID NO: 67536 - DNA, 445 bp, Glycine max
  Clone ID: PAT_MRT3847_3199C.1
ggttacaaagcacatactcaaggagctcaaggacttgccgaaagacccaccaacttgttgcatcgctggtccaacagctgaggacatgtcccattggcaagcaacaattatgggccctgatgatagtacttatactagaggagcatccctagctactattcactaacctgcggattatcctaaaaaaccttccaaggttgactataggactatacgtgttttatcacaaacatcaacaccaatggtcacatctgacacgatatccttaatgagcattggagccctgcactcaccatctaataaggtactgctttatatctgctcattgctgactgatccaaacactgatgatccacttggacacgtaatagctaacatgtacaaaactgaccgcaccaagtatgacgtcactgaacgcagctggacccacaaatatgccatgggc

SEQ ID NO: 67537 - DNA, 239 bp, Glycine max
  Clone ID: PAT_MRT3847_319C.1
tttttcataactaaacataccaactttgtttgttaaaaatgctccaaaatcctattgcatggggtattaacttcggtggcggggtaatcatacataatctcattaacaccaattttcttttctcatgattctaataattaatatataattaaatacattatcaactttatagataccattatatttactttttactaaattacttaaaacccaacaactatcataatttatcttaattc

SEQ ID NO: 67538 - DNA, 733 bp, Glycine max
  Clone ID: PAT_MRT3847_31C.1
ggggaagagcgtccgcccgaatccgcatcatcgcttccctcaatcttctttcttgttcaatccatccgttccaatcccaatccatccatcgcgttagggttttcacagttccagttcccttctcccgcaccgccattgccgcgcccttttatcctcgatcggcaactctctgcgtccaagcgatgcaacgcaccgtcgcaattccttcgtagtttcgcgaaacggcgtttttcttcggtggaggaaacttcggaactgagccgcgtcggagtccaatcttccgcgctcggaatttcaccgtcgtcgtttttctctctcagtgttcgcgtgtgtgcctgcacggtgctgccttttgctcgaacgatgtttccgtttcattctcaaggagctccgaaacacacttgcactcttctcgctgtgacctgtggcacaagttccgctgagcacaaactctcacatgctgagcgcacatatcctttccctgagttcgtttccgcggggcgtcttgaggttcaaactcttcgcagtccggagaaggaacagtttcggaaagttctggagtcgtatcaaccgaattttgtttacttgcaaggagaccagctagagaatggggaagtaggttcgctggtttgcagggagtggaattatccacttgtgaagatataacagagctctttggttccacattgccaacggctgtttatttagaaataccaaatggagaaaagtttgc

SEQ ID NO: 67539 - DNA, 136 bp, Glycine max
  Clone ID: PAT_MRT3847_32000C.1
gtttcattttgattgacttttgttttgtgcatacatgtcatttgaactgttacgttagtatttacttcgttgttgtcaatagtgtttgttgaagttccgaaatcgcgtagaatttttcatttaggaacgtcgtccc

SEQ ID NO: 67540 - DNA, 2299 bp, Glycine max
  Clone ID: PAT_MRT3847_32001C.1
gcgaaatttgtccactccccgttatcgtctcttcctcaaactctgaaccttccgtgcagcgcagagctttgctggcatacccaccgtgacgaaattaacccaacagcacacagcactttccccaaatcaaatcatcgaaaccctaactcgcgattcccgatcgaaaccctaactcgcgatggcgatcttgctgggcgaaattcttcaatcgctggagctgtggctgaagctgatcaagaacccgcagcctcagccctacgtgaaccctaatctggaccccgttttgctggtgcccggtgtcggaggctccatgctgcacgccgttgacgaatccgaaggaagccgagaacgcgtctgggttcgcttcctcaacgccgagtacacgctcaagaccaagctttggtcgcgttacgatccttccaccggaaaaaccgagtccatggatccaaattcaagaattattgttcctgaagataggcatggactccatgcaattgatattttggaccctgacttgatgttgggaagtgattctgtgtattatttccatgacatgatcgttgaaatgcgtaagtgggggtttgaagagggaaagacgctttttggttttggatatgattttcgccaaagcaacaggttgcaggaaacaatggatcggttggctgcaaagttagaatcaatttataatgctgcaggagggaagaaaataaacattataactcattctatgggcggtcttttggtgaaatgtttcatgtgcctgcaaagcgatatttttgagaaatatgttaagaattgggttgcaatttgtgcgccattccagggtgcaccaggaaccatcaattctacctttttaaatggaatgtcatttgtggaaggatgggaacaaaacttttatatttccaaatggagcatgcaccagttgctgattgaatgcccatcaatatatgaacttatgggttgtcctaattctcattggaaacatattcctgctctggaattgtggcgtgagagacatgattctgatgggaaatcacatattgttctggagtcatatccaccatgtgatagcatcaaggttttggagcaagctcttgtaaataacacagttaattataatggcgaggatttgcccctgcctttcaactttgagatcctgaaatgggcaaacaaaacatgggagattcataatggtgtcgatctgccctcgcccgtcaacttggagatcatttatgggaccagtcttgagacacctcatagtgtttgctttggaagtggggacaagcctgtcacagatctgcaacagttacgttatttccaggccaaatacgtatgtgttgatggagatggaacagttcctatagaatcagcaaaggctgatggtctcaatgcggaggcaagggttggcgtgcccggtgaacatcagcgtattcttcgcgagcctcacgtatttcggcttctcaagcactggctgaaggctggagaacccgatcccttttacaacccggtcaatgattatgtgattctacctactgcttttgaaatggagaggcataaagagaagggtgtagaagtagcatcccttaaagaggaatgggaaattatttccaaagtccaagatgaccaaagcagcacagcagataaagtgtgttccatatcagtttcacaagaaggagccaatcaatcttattctgaggctcatgctactgtcattgttcacccagacagcgagggtaaacaacacgttcaactgaatgctttggctgtttcagttgatgcctcatgaataacattctgttgaagcctttctgcgtgtttggaaaaatgttgggttcgacgtaacccaccttttttttccaatccagctgtatataactgttccgtttgctgctatggaacacgtgaacggagtttggagctgtgcaaacggcaaaccaaacactcacatgtattgttgattatggatgacatctcttgtatataatgatattcgtttgatgttgctgtgccatatccctcccgatttatgtatgatatgtgaagcgtatgtatcagttatgaaaatgaataccatcgttctgaaattcttgtatataatgatattcgtttgatgttgttgtggctgaatcatccatgaaaaatgatagatagttcatgtgaatcttatatataagtaatgcaaatgaaataccaacaaataaaaaaagaatgaacaagacaaagaagaaaacagcaagctattgtattttatttgagtaatgatatgagaacactttaaaaatgcatatcgattttctcc

SEQ ID NO: 67541 - DNA, 1212 bp, Glycine max
  Clone ID: PAT_MRT3847_32002C.1
cccacgcgtccgcccacgcgtccgcccacgcgtccggaagggttgtggggtttgagttccatttcgctcctttccatattccattttcatttccctcctctatttttttttggccagaacacgaaggaaggtggccggaagaagaatgaaggtgactggaacaaccttttgttacctcattcgaaggtggccagaatacgaacgaaggtgacggaacaacaaggagacaaacgattgacatggtgttgatggaccaaatgggtgcaaagattggcgcgactctctgacaaggattgtcccttgaatttcaacctaagttgcatttgggttgtttatatttgatccagaacatcaaagttgtggacaatcagtatgaatacaaacatcgcaccacggcatactttagtagatgttgtgggtgttgttgctgaagttattgaacgtaaaacagtgaatcctgcatatagagttatggtgaagttgagagataatagtgatgctgagatcatcatgacgctgtgggaggattatgttcttcaactagatgatgctattgaaaaaaaccattttgttagggagccgttggtgcttatgttaacattggcccggttcagagatgcccaagaaatgccgtaatggagtgtccaaaatatcaaaaatggttcaaagttgtatgtgaacgccgatattgccgaaatcaagaaattccgtaatagtttacgtgtgccattttatgttggtggagtaacagatgaagggagcggttcgtagtcctagtataccaactattcacaaagaaactcagaggcaaagttcttgcataatgctcagatggtcagcttaggtgacataagcagactgagagaggactgttattgtttgaccgttgctacggtggatgaagtcatgattgatacaccatgaagttatgatagttgtccctactgtactacaacatttgatccattaaaaataggggcagcctgccgttcgtgccagaaccaagttactcatatggttcccaagtaaaatgtataaattagttgtgaaaatggaacacaatggggagaaagctaactttcatttctgggatgtgacgtgtatcaaaatgtttggtaagacagccgaggaatgtcgacaagaactgattacgatatgtattgtaacatacactcatttatgaaataacaattcaagtcatattgcatttaa

SEQ ID NO: 67542 - DNA, 438 bp, Glycine max
  Clone ID: PAT_MRT3847_32003C.1
ctcattatggaaacaaatttgcttaaattgtctcttgaggatgtagaaactcctaaaggctccatgttggatcataaaatttatcaagctaaaattgcactttccaaaaacacagtaggaggaaccattctgcgaattgaactattggcaaattactagacagagggcaattttagagcatgagttgattagcaacgcactcatcgtattaaaggaatgattaaaatggtggccacagtagggaatcctgagaaaacagggatagcagtagcctgtgctatgaatagtttcattagggggcgtgccaattctgataattacaccatttgctgtcaagactgtgaaataaggaatcctgcttgcacaaaagccatgacctatgttatttaatccaacccgtgttctgatgcatggggttggaataacagaaacgacccg

SEQ ID NO: 67543 - DNA, 384 bp, Glycine max
  Clone ID: PAT_MRT3847_32004C.1
aacagaaattggtctcgtactacttttgccttccgtaccttaaccatgtgaagagaaagtgcctcttgggatatctctgtggcaacattaaggttacccttccttccacctttcacattggcaagcctcatctagcaatttcccttctgcacatgaaagccaaaaggttttgccgcttcctcaatcttgaagattatctcatccgcaggggattatgaggtgaatcttgattccctttgaaatccctgctctggatcaaacaagttttcaaggttcattcctttggacatggaaattaactccaatgccttcatggctggaggctgctcttcttttttatctgacacatggtgctcttcagaatttttaaagacagcttgaaca

SEQ ID NO: 67544 - DNA, 129 bp, Glycine max
  unsure (1)..(129): unsure at all n locations
  Clone ID: PAT_MRT3847_32005C.1
gtcgcanggagtaggnaaagctcngagttcnnntcgngnncgattctgtaaccacacnctnnnnttanncgtntntttcgagtgagtnacagaggganggcntacatcgnagctagagctnnncngnan

SEQ ID NO: 67545 - DNA, 454 bp, Glycine max
  Clone ID: PAT_MRT3847_32006C.1
attggcacttacaccagtgcacagaatgggaaagaactggaagaaaggaaatattacattcaaagcttttgatgcaaaacataagagtggaggtggtggtttcatcattgtggaaggtttccataatgttctcagaagtttgagcaccttagcggtacaagcttcattgtatggaatgagttctggcaagtgatttttgttgaagatatgcttttgtaactgcataatattttattttttagtttttaaaataagatttagtaaataaattggtttcctatattttaggagtaagtcagttttaatggattaacctagtcaataagtagttcctatctttaaggagcaagttagttttaatattctgttttactaattagtttatctttagctatttattgtatcgctgctgagaacaatttgaattagaatagaataattctatttcctccgc

SEQ ID NO: 67546 - DNA, 254 bp, Glycine max
  Clone ID: PAT_MRT3847_32007C.1
cttattatgatgctttttgattctgttcttcctctccccgaaaatcccatctttgtggggaaaagaagaaggcgcagtggattttatgtctttattgccattttttcctgttcctgattcaggatgggggcctcttactaaaaaatggggggagctgggaaaccaagggggactatggcatgtccacgcccatttggccttaacgccttgtgtttggaaaaggaaaaatttggttttttttcccaacaccatcc

SEQ ID NO: 67547 - DNA, 435 bp, Glycine max
  Clone ID: PAT_MRT3847_32008C.1
ctctgaaccagtctgcactcgctcacagtactcacagcactttctggcctcgttaaacgctatccaagctgaccgttggctaacttcaacactcccatcgactgcaagagatcgaactagggtgctaatcctccaacaggcaacatgaagttcttcaaatcgcaacgccattcaaagtcaggtagatatagcagaggtgatgccgccccaccagggactacacaatgttcaaagagacgcacttctgcagatactgttccgcaagcgagcacctgagtatcattgtgatcatgcacaagattatgagggcactgacgctggtaccttagagactaaaagtctggcttctatccccgattagctcaccgacaatgattgcctacagagtgactatcggtatagagatgaaggagctgatgcaccacgagaaacatg

SEQ ID NO: 67548 - DNA, 384 bp, Glycine max
  Clone ID: PAT_MRT3847_32009C.1
cggtttttgtggaacaaggcggatggggaaactgactttcccccagtggacttcccgaagtggtaaaataatgcctctttctataaggggaggagcaggtgcaaaaaatgctattatcatgaatatgccaaatgctgatctttcaatgtgaagaattttggatggcgatctccacacttaagtttataagatgacctccacctacattaaatgaacagtctctttcttaatagaattcggaaatttgcctgttgacaccatcaatattgaggcttatccccacaagctggtgctttttggacagattcaggaaaaagttgtatataaattttcacaagaggaaattcttacacattgaacaacataggtgcttgctgcaacaac

SEQ ID NO: 67549 - DNA, 192 bp, Glycine max
  Clone ID: PAT_MRT3847_3200C.1
tttacaaagacaaattcaagacgtcaatcctattaaacaataatagaggcatcctaaacccctcccgggaacaacaactacaaaaagtgacccagagaaaaccccgatcctgcccgtagcccactgaataaaaacacacatcacattactatgtgctgtcatacatgcattgcaatgagtggatattccaaa

SEQ ID NO: 67550 - DNA, 591 bp, Glycine max
  unsure (1)..(591): unsure at all n locations
  Clone ID: PAT_MRT3847_32010C.1
gagcggccgcnnnnnnnnnnnnttttttttttttctttttggacaacttcgcttcataactggaggaaaagagaattgaggttgcaccacataaactaaatacaatgtactagactaatgcataaattgccttgccttaacaaaggaacaaagaaaactaaacatatgaatcatgcttccagcaaacacagccattacaaccagagagtaaattgtatctaggaaatttatattcttaaactgacgggcacaggtccttactgatgcaatatcctccctcatgtgccggagttttacattgaatatgcttaaccattcatccatgtcttccacacaactggttgcagcatcaagcccttgcaacacctcatccatcaaaggttcactttctaaaagagcatgcacatttgctgcttccagagcctggagctccctcttcaacctttcagaaaattcctctgcttcaccaatacccatgacataagttcccaaaagagcctccatgtcctcttcctctgcctgcgagacaagttccttttcaacgttgactttcaattctgtgatttctgtctcagtcacaacagatgcagc

SEQ ID NO: 67551 - DNA, 1802 bp, Glycine max
  Clone ID: PAT_MRT3847_32011C.1
aaactaagatagttactcggagggaaaaagagaaagaaaaagcttgagagatggagaacttccctgtgatcaacttggagaatatcaatggtgaggagaggaaggctatcttggaccaaattgaagatgcttgccagaactggggattttttgaggtaccccacaaccacaaacttgcttacaaaagctgtcatactcatactcaaattaatacagtatatatatctatacatctgcaacttaaagttttcttaatcttgttcattaaaagttaaaactatgttaactatgctactttcctgattgtagttggtgaatcatggaataccccttgaacttttggatacggtggaaaggttaacaaaagagcattataggaaatgcatggagaagaggttcaaggaggcagtgtcaagcaaagggttaaaaaatgatgagagatggagaactttcccgagatcaacttggagaatctcaacggtgaggagaggaaggctacccttaaccagattgaagatgcttgccagaactggggattttttgagttggtgagtcatggaataccccttgaactattggatactgtggaaaggttaacaaaagagcattataggaaatgcatggagaagaggttcaaggaggcagtgtcaagcaaagggttagaagctgaagtgaaggacatggattgggaaagcacgttcttcttgcgccatctcccaacctccaacatctccgaaatccctgatctcagccaagagtatagggatgcaatgaaggaatttgcacagaaattggagaaactggcagaggagttgctagacctgttatgtgaaaatcttggattagaaaaagggtacttgaaaaatgcattttatggatcaagaggtccaaattttgggacaaaggtagcaaactaccctgcatgcccaaagccagagttggtgaagggtcttcgtgcacatacggatgcgggtgggattatccttctcttgcaagatgacaaggtcagtggccttcagcttctcaaaaatggccaatgggtggatgtgcctccaatgcgccattccattgttgttaaccttggtgaccaaattgaggtcattaccaatgggagatacaagagtgtggagcatcgtgtgattgcccaaacgaatgggaccagaatgtccgtagcctcattctacaaccctgccagtgacgctcttatctaccctgcaccagcattgttggagcaaaaggcagaggatacagaacaagtgtatccaaaatttgtatttgaggattacatgaagctctatgctacactcaagttccagcctaaggagcccagattcgaagccatgaaggccattggctcattttagactatttccaactccatcacaccttaacaggagctatacctatataatatactgccagaagaatttttattgatttggaaatttgaagaagaaaaaaaacagcaatgaggaaaccattatttgtattctaattattcaatttcttattacaacaggtgatttgattacttccgttttaataaataatgaattattctgataagaagcaattaaacattgtttttccataaaaaaaaaaaaaaaaaaaaaaaaaaaaaaaaaaaaaaaaaaaaaaaaaaaaaaaaaaaaaaataaaaaaaaaaaaaagggggggcccccattttggggctcttcccccccggaatttatttcgggccgggtccctgggggggtcccattttttttttttggggggctttttaaagttgggggtaaaaagggcatagattttttcctggg

SEQ ID NO: 67552 - DNA, 414 bp, Glycine max
  Clone ID: PAT_MRT3847_32012C.1
gactgacactcgcctctgaagaccatcatacacacacacaccactcactcaactgcgaacggaggagttgatctgaactgccacgaacattcaatcaaaaccataaccttctctaattaacttaatcacttttgggtttctttcagggctttttgactgcgttttgctacttgaagcgaaagcatatactagctctcttaggtcgatagtattcttttacttcaatatattttgctttttatatatacaatactctttcactggtcagctcatagactagaagtgtttcagcttcaaatggccattgacggtagttacagccttcattcttcgcttcagaggttcctacatcgttgcccgaagctccacagatttccgtcgcttgaattgctcgcacgaatgggctacttggtg

SEQ ID NO: 67553 - DNA, 150 bp, Glycine max
  unsure (1)..(150): unsure at all n locations
  Clone ID: PAT_MRT3847_32013C.1
cggatatctcgtctcttgcatcgatgaataacgtatcgaaattcttttctttgtgtcaatngcagaatcccttttaccatcnagtcgtttgatcttctttaacaccctaaactgttgggnccttttttctctctctttttaaacattttt

SEQ ID NO: 67554 - DNA, 2071 bp, Glycine max
  Clone ID: PAT_MRT3847_32014C.1
acgagtccccgtaagtcaaccgatggacgcatcacagcacctcgtctaattgcgggaattcagaagaaagaaaaagaaaagagagagacagagacatttgcgccttctttcttgcaatcgcgtttgaataaaaacaaaagaaattcctcttcttattctccctcgcgcgattcatttcattttctctttggaataacctgcagggttgcttccatttcaacatgtagagcgcgctctttgttgttttcatttctgacaagttctttttttttgttgcgttgcaaaatccttctcctcgaggcggcggcatggaaagcattgccgcgcagctgaagcgcggcatctcgcggcagttctcgtcggggtcgctgcggaggaacctctcgtggcagttcacgcgccaggcctcgctggatcctcgccggaacaaccagcgcttcagcttcggccgccagtcctcgctcgatccgattcgccgcagcccctgctccggcaacgccgagctcaccgtgccggagaacctggactccaccatgcagctcctcttcatggcctgccgcggcgacgtcaagggagttgaggatttgctcaacgaaggcatcgacgtcaacagcatcgacctcgacggccgcaccgccctccacgtcgccgcctgcgaaggccacgtcgaagtcgccaggctacttctcagccgcaaggccaacctcgacgctcgcgatcgctggggcagcacggcggcggccgatgccaaatattatggaaatacagaaatttattacatgttgaaggctcgtggagcaaaagtaccgaaaaccaggaagactccaatgactgttgcgaatcctcgtgaagttccggaatatgaactcaacccggtagaactacaggttcggaagagtgatggtatttcaaagggaacataccaagtagctaaatggaatggcacaaaggttgcagtgaagatacttgacaaggacagttattcagatcctgataccataaatgctttcaaacatgaactcacattattagaaagggtgcgacatccgaatgtggtccagtttgttggagctgtcacccagaatatacctatgatgattgtgcgtgagtaccattctaagggtgacctggcaagctatcttcaaaagaaagggcgtttgtctccatcaaaagttctacgctttgctcttgatattgccaggggcatgaactatcttcacgaatgcaaaccagatccggttattcactgtgatttaaagccaaaaaatattttgctggataatggagggcaattgaagatagctggatttggcactgtgagattttcgctaatctcacctgatgaagcaaagctggtacagccagagcctaacattgatctttcaagcttgtacgtggcaccggagatttacaaagatgaagtttttgatagaagtgtggatgcatattcttttggtctcattatatatgagatgatagagggtacacatcccttccatcccaagtcctcggaggaggcagttagactgatgtgcttggaagggaaaagaccagcattcaagatcaaaacaaaacattatcctccagagttgaaagagttgatcgaggaatgttgggatccaacacctgttgtgaggccaacattttctcaggtcattgcacggttggacaaaatcgttgcaaattgctcaaaacaaggatggtggaaagatacttttaaactcccttggaaataaataacaaagtacatactacgtggcaaggaagacatcaagttcagggttgcatcctcaaaaccaatttgtcagcttcatggtggtgtactgttaatagcccttgcaattaataattttggaattcgaataatattaacttgagcttggattaatttgagcgtgaaaatgaatttgcatggttcgtcctatgttcctgtctactagagggctggaacagctcctctctgtacaatgtaccataaaggagatataacatctcagaaattttcttataaaaatgtttttctataaacgtcttatggataaaaaaaaaaaaaaaaacgagactagttctc

SEQ ID NO: 67555 - DNA, 248 bp, Glycine max
  Clone ID: PAT_MRT3847_32015C.1
cacgcgtccgctttaaactttgcatacttccttctagcgcggatctgagctgtactagtgcttttctaatccacggttgcgtacagaaacggaggacagagcgttgaagggaatcaacagctacaggcaaacacggagcccggttcccctgagtcaagcttataaggcaacatgtctacgctgaggaaagtgcggaaaaaataaaaaaaatgccctgtgaaaacgtgaaacaatactacccctcatct

SEQ ID NO: 67556 - DNA, 469 bp, Glycine max
  Clone ID: PAT_MRT3847_32016C.1
acattttctcaggtcattgcacggttggacaaaatcgttgcaaattgctcaaaacaaggatggtggaaagatacttttaaactcccttggtaagatggctggacggatatccttataaaattttagtttctttggaggaattcaaaacggtgaagtgttataccttgaaatgataaaatcaaccatcccttgtggtttgggtctgtacctcgggccttttagttcgatttgagcaatgctagttgctaaaagactgatattactgttctacttgttgatgaaccttctttgctgtcttctaaacttggcattatcatgattcatttcaatgtgtgcaggaaataaataacaaagtacatgctacgtggcaaggaagacatcaagttcagggttgcatcctcaaaaccaatttgtcagcttcatggtggtgtactgttaatagcccttgcaattaaataatttggaattc

SEQ ID NO: 67557 - DNA, 147 bp, Glycine max
  Clone ID: PAT_MRT3847_32017C.1
taaacacagagttgtgcatatttactgagctagagtaacctaccaaatttcaaagagactgcctgcgcctttcatttctgtatgtgaatagcttgcaaagcaccacacatggtagtaattacgacatatctgcctccaggcgcaaca

SEQ ID NO: 67558 - DNA, 349 bp, Glycine max
  Clone ID: PAT_MRT3847_32018C.1
gtaagggcacccaaaggatccactttcaacgcctacatgatacaaacaccgtaacaactatgggtcacggtatgggactggtgaacatggatatactgccgatggtatatgggggcagcttcggaatggggggacggtgtacgtcaggcagtgcttatactgcaggtgggaggggggcttatgccatctctggcagatagtcacccgggggattaccaattccaaagaagatggcacccgtgatcaagagatctatgtcaaagggatgccagtcgcaagtcaggaaacttttctttccatgataaactttgatcaacatactggtcaagatctacttctcgtgcataag

SEQ ID NO: 67559 - DNA, 129 bp, Glycine max
  unsure (1)..(129): unsure at all n locations
  Clone ID: PAT_MRT3847_32019C.1
gtatgttcntntgngaaacattttnttttcatggatgataagtcaattttgttttaagattgancttacgtgtctnttgaaattgannatagcacatccttgatccttgagattttactattnaacctg

SEQ ID NO: 67560 - DNA, 226 bp, Glycine max
  Clone ID: PAT_MRT3847_3201C.1
tcttcttctaatctgcatgttatgttcaagttctgttcatcttttgaaatcatagataatattctgaaggaatgtgattttcttattcaggtatggttcccctttgttcctatttgacagtagaacaggagggacaatgatacctgttagagtttgttagctagttttctgttatctgttagtttccatcaacttaatttagtacttcagtttttgtttttcaaaa

SEQ ID NO: 67561 - DNA, 435 bp, Glycine max
  unsure (1)..(435): unsure at all n locations
  Clone ID: PAT_MRT3847_32020C.1
cactaagctagaattcatctcgagcggagccgattcgactacacaccacaaaagggcactaattataattttaaattttgaaagtgaaataatcccggactgacactaatattgtcatagactgggcacaaacttttaatatatacttcaattcttttatgtcaaactcgtatgccctctcatcattactattatgaaggattctttctaatagagagtcanccatactctcaagaatgagaaaccaggctcatttaactgatcttgacacacaggtctcccaattacgaactgaaaattcttcggtgataaagcaactcacggatgtcagccacaaatacaataatactgcattttacaacagaatacttaacactgatgttgcaacattaataacaaacgtcaagatctgttaagaaacagcaaaaataatta

SEQ ID NO: 67562 - DNA, 1414 bp, Glycine max
  Clone ID: PAT_MRT3847_32021C.1
gagcttggaagggttttggtgaataggctaagaaacaataaagaaccatacattgcccttcatttaagatatgagaaagacatgctatcctttactggctgcagtcacaatctcactgctgaggaggcggaggaacttagggttatgaggtatgaagtgaagcattggaaggaaaaagagattgatagtgtggatagaagattgcaaggggggtgccctatgtcacctagagaggcagctatttttctcaaggccatggggtacccttccactacaacaatctacattgttgcaggacctatttatggtgccaatagtttggaaggctttcaatctgagttccctaatgtcttttctcattctacccttgcaactgaggaggagctagaacccttcaagccatatcaaaaccgtctcgctgctttggattatatagttgcccttgaaagtgatgtctttgtgtatacctatgatggaaacatggccaaggcagtgcagggtcataggaggtttgaagggtttcagaaaaccatcaatcctgacagattgaattttgttaagctgattgatcaactggacgagggtgccatatcttgggaagcattcgcttctgaggttaagaatttgcattccaataggctaggcgcgccttatcttagacaagtaggagagtcaccaagaatggaggagaatttttatgccaatccctttcctggttgtgtatgcaacaagtctcaggagcaaatcacaagccagaaactagaccatcagtttggtattggagcacaaagatagtgtagtgtctttggttttgttacatattaggctaaacagtggagcttcatcatgcattatgacattgccttaaagttaaaggaagagctcattggggttgtgtggtgggaatgtgcttccttgttttccagcctggttgatgaggttgctgaagaatcaatggggcccttgtggggttctcatttcattcaaaatatgagtttcagtttaggcacacaaaaagggaaagaatagaaggttgtgtataatcaaaaggcccaatcaccatacaacaagttagattatactggtggggatattgaaattgataatactacccctttggatttgagagttaaactgttgaaaccatttgattcattgattctttttggaggaagattgccaaatggagcatgtttccaatttttggattgaacagttgttgttggttgatacataggaattttgtctatacgttcacaatatgatgccttgtttatatgtttatatttatgttgtacacgtctgcattgaattgctgacgagtgtagaaatattaataatttagttaattttatgaatatttttttattgttttcaaaatcttgtttgataagcaaaggaagaccaaaggccc

SEQ ID NO: 67563 - DNA, 119 bp, Glycine max
  unsure (1)..(119): unsure at all n locations
  Clone ID: PAT_MRT3847_32022C.1
cacaataaacaaactcttcaaattttctgtttcaataatttcaatggtcagcctacacatatatantttgtccgtgtatataaatagtggcaaaatagaactaggaaattctaaaaatc

SEQ ID NO: 67564 - DNA, 409 bp, Glycine max
  Clone ID: PAT_MRT3847_32023C.1
ggcttcctcactgatctcctccccagctgctaccaccgtcaaccgtgccggtgccggcttggttgctccattcaccggtctcaaatccatggctggcttccccacgaggaagaccaacaatgacattacctccattgctagcaacgggggaagagtacgatgcatgcaagtgtggccaccaattggcaagaagaagttcgagactctgtcctacttgccatacctcgatgatgcccaattggcgaaggaagtcgaataccgtgtgaagaaaagattgatgccttacttagaattcgaggttaagcacgattgcgtgtaccgtgagcacaacagatcacctagatgctataatagactctactagaccatgataaaactagctatgtttagctgcactgaggcttgtcaa

SEQ ID NO: 67565 - DNA, 298 bp, Glycine max
  Clone ID: PAT_MRT3847_32024C.1
aaggataaaactgtcctgtagaaagacgtatattaactgccgcggagctttggtatacaagcctatggacgcgattaccctctcccttccttgtttcctgatactgcagaacgtgccactttcgtgaaccttcgtcttaagagaggatgaatatgcatacctgaaaggaccggataacctcgcgtggaggaaggaatgggacacgccatggggcatggatgaaagttccaagactgaggtcagctcgcgaacccccaccgtttagggtggcggtgccttgccagcctcccacttgatg

SEQ ID NO: 67566 - DNA, 902 bp, Glycine max
  unsure (1)..(902): unsure at all n locations
  Clone ID: PAT_MRT3847_32025C.1
cccacgcgtccgaaaaacagaaaggattttgtgtccattgaatttagacgctagcgtactgaaacctagcccggacgtgttcctgttaagaaaatcggattgaatatcggcgacaggtccgaagattaagtgtaggtttcgtttttggctcaaacagaaacgcataccaacgcgcaaattgatcgctgctggaggcggcatgcactagcttccggggccttgcttgcagataggtcttcgtttttttgctgaagattctttgcaaaatggatttggtagccagttgcaaggaaaaattgcaacatttccgtataaaagagctcaaagatgtgctcactcatttgggactctcaaaacagggaaagaagcaggatcttgttgatagaatattagctatcctctcagaggaccaaggtatgatattgttctttctatgacatgctgacggaaagacttaacctttagttgtaaccagccgtattttagtaatgtttctgtttgggttttgacaaagcttaatatatctgcataatacagttattaaccaaactcttgaacatacatatgcctcaaatgttgttaattgttctatatgttttaatgtattaattttctttaatttaagttagatggaaatccttgcaaaatgcagtgattttttatttgcactttataataaactttccttttaatcctatgtgtttggactagtgtttttacagcaaatttccttttatggcttgacatacacacaaggtgggntgaattgggatacanaccatgtatcgaaatgtctattttccgaatcgtgaatcgaatcatattgtgaaattgtaagaatcacgatcattaaaaaaacagagaatatatatggatgtatggatggatggatggatatattt

SEQ ID NO: 67567 - DNA, 428 bp, Glycine max
  Clone ID: PAT_MRT3847_32026C.1
gtatgaacttggtatgtgccaaacaaatatacttgttcaaattaaagcataacccttgcatactttttccgaaatatggatacaaaaatggattttttataccataaaatataattttctgggggggggcttcgatctggaaatgataaacctgcatcggtgatcatgccttcaagcagggcttccatttttttacccgggaggggaccttgatctgtccctcctttattctccaccataaggagggggtgaatgccttggtgaagacctgtaccaccagtatttgttggctcgtggattggagaccgttggggactccaggggtttcggcaatattttggccggtgtcaattccgagctttggtccatgccgggcaaaaagcccgtttgttctagtgcttgggaagggaccatcacgtccatgcgga

SEQ ID NO: 67568 - DNA, 451 bp, Glycine max
  Clone ID: PAT_MRT3847_32027C.1
aaacccccaacccattctaaaatgccggggttcctataaaaaaaaggaatcctaccccttccataaacaacttaaccactaacatttctttaattacaaaggctaacccccaaaccccccaaaaaacctactggttaaaatttaaacattggcccaacccccttaaatacaaaaacaagaccctgaaaaaatcaataaaatttattttgttcaaaacctggtgaacttggggacggccttggtcccctaaaaaacggggtgtttggccaattcaccgggcaaaaaaatcctgaccggggtgtggatttcccttgaagggagggggggctttttgttgaaccgggcaaatttgaaaaattcctgaacaagcttctaaaaaatggccttgataaaactgttaattattcccagggccttgtttgaaataccaagggcgggggggccctgcttc

SEQ ID NO: 67569 - DNA, 155 bp, Glycine max
  unsure (1)..(155): unsure at all n locations
  Clone ID: PAT_MRT3847_32028C.1
ttntgccttnaatgtttcaaacggatttgagattctnaatctacaattgcatnatcctcttatttgacccttataaattgnctccttcgctcatcaaaaaaatcttattctctttcttttncaatgggcagctgcaataaatgagatccgtagaa

SEQ ID NO: 67570 - DNA, 222 bp, Glycine max
  Clone ID: PAT_MRT3847_32029C.1
cgcgcgttttcctggctgatctacattctcccatcttttctcactgctgaaaccaaatataggcggaaccagagcaagatccaaagggccggcttatctacgacggagacacaaaatcggactaaaacagaaaaaactgcttggcgagagaaagacgaaggatgaaagggagccgcgaggctgacagcgagcagaattaaaaacagtgaaaaagtaggacaa

SEQ ID NO: 67571 - DNA, 156 bp, Glycine max
  Clone ID: PAT_MRT3847_3202C.1
attttgctttcgcttgttatttggttatttgttttcatatacaaccaaaatttaagctagcgaaatgaagacgagctacgtttattctgtgtctgatactattatgtgcagggcttatcgtgccgccgttgacccactgactctgtccctggggct

SEQ ID NO: 67572 - DNA, 496 bp, Glycine max
  unsure (1)..(496): unsure at all n locations
  Clone ID: PAT_MRT3847_32030C.1
cattaatcaacatatgtcaatcatagtacttaatagtggatctccaaaaatgctatggcagtatagcagtagcagaatgatgacgactacttagatcccctatgttggtggtggctgaacgagctgagagggttgatggatcagtgggtgaagacattctcagtgcgggttgaaataaaaagaaggaaagggatgttgaaggaataatgaaggttgctggaagtggaacagttgcaggtggccggaacagtaatcagagcgccattggaatgccaccagaaaagctaccactcaaactggagtagggtttagagagggcggtagtaatgggcggaagnnngtggaggcaaggcaaaatgttgagactgaatgtggagggagtttccaaatcgtggtgttatgtttctccaatacgtgaaacactgcatttgatatccaaaaactgatcggcaatggtgttatgtttctccaatacgtgaaatactgcatttcatat

SEQ ID NO: 67573 - DNA, 500 bp, Glycine max
  Clone ID: PAT_MRT3847_32031C.1
gggttccacagatctgccttatatgtgacacatcttcataagtgataaagtgacccaccaattgtgatgtaaaatgatccatcagacaatgtaagagggcacttgtttgatgacttactatatgttcacttcatctcccctttctcttcatcttctcccttcactctcctgcaacaccacaatttttgaaaaaaaaaacgactttccaaaatgaagatgttcatctaaatataagatactcctcgagtcctttgggcaccattagataataagtgtagataaacttttcactgctgtaaggcagaaaaaatgttcatttttaatgctaaatcgccatagaatgaaaatgaattcatgattcgtcatctttggaaactgacctaaccctcaaattgtagttctgaaaacctgatttagaaatatcaagtccatgtcctgggattgagtctagagtttagatgctagcagactctgtttgggactttgagggtatgattcat

SEQ ID NO: 67574 - DNA, 291 bp, Glycine max
  Clone ID: PAT_MRT3847_32032C.1
aaaagaaaacaatatgtggattgccacacaactgagatatcggaatcgcctctacacgctaaacgctatataataatccgaaagctcctatatataacttaaaaagaagggcatagtataacgcccttatccattaatttatatcctaaatacacccgtatccacataactaattagcgaacaccaagccgaagcctctgttttcaggtgctccctcctacgtatatgctagcatcgtaacttgttttttgccatctaagtggccgccgcctgagaagcacaccacagtcc

SEQ ID NO: 67575 - DNA, 742 bp, Glycine max
  Clone ID: PAT_MRT3847_32033C.1
tccacatgctattattagtcaccattccaattactacttttggtccctttgtttgatacatgatcagcccctaaagccgtcatttaaacaagcattgatttatcttgaaagaaataagcactcccattctaacaatgtgtatacgccaactacttccttatcatattacaccaactacttcctcatcaggtagtagggacacaaggatatgctgctccagagtatgtcgaaacaggtcatctcaaaattcagagtgacatatggagtttcggtgtggtactttatgagattctcacaggaaggcgtgctttgaatagaaaccgtccaataggggaaaaaaagcttatagagtgggttaaaaactaccctgctaacagtagcagattcagcaccatcattgaccctcgtctcaagaaccaatattctcttggtgcagctcggaaagtagccaagttggcagatagctgcttgaagaagaatcctgaagatagaccatccatgagtcagatagtggaaagcttgaagcaagcattgcaggattcagaaaccaaaaacgcttagcgcaatatgacttctaaatcggtcccaagtggtaaatagatgcagcttgagaatgatttttgtaattagtttgattcatcaccacaaagccaagtcccctgtacggtcttcagtctacgttttgtttgtagaaacttttctataagtaccttgttaatggtaaaatttacacttatccatg

SEQ ID NO: 67576 - DNA, 1256 bp, Glycine max
  Clone ID: PAT_MRT3847_32034C.1
acgttaataattagtattctaaaataggggtttctccttgggagaatacttatacatcaacaatagaaaaaggtcaaaaacaagcaccagaagtaagcttagaatcttggattcccgtagaattatctacatatacatgcaaggtaagggcttcctattttctgtagcagtcaccaaaatacataatgctttctaattggtaaagaagctcctagcctccaaccctcaaattaactacaatccttagctttatatagccaagtaaacaagtgagcttgaagcagttaagcaatatattaatactgaaaattctgctctagcaacactatacaccaattaccagaattgagccaaaaagttttccagcataaatgaagttatcccagatcagattgttgaaccgaatcttctgtagaaattaaaaaatcagacatagcaacatccgagaatcaatgtttgaaatgctacaagaaaagctattgtacccatatgcacattctaattaatactgaagacacgggactgttagtaggggtcacaataccaactttcacttcctccccactccttactcattggtaactaagaaaaaagggcggcaaaggatacccacacccttcaaacctgatgatttcaaatagactatcataccagacacagcattatgggcagccaggccaattttggctgaaaatattctggttttctaaatttccatgaacatacactttgggctctttaaccagtaaaattggtggatagccaggtttcaggcggactcttgagaacccatcttcagtaaataggcacttgaatccattgatcgcaggatgttcatttataagaaaagtaaaatttctctgatgaaattcttgcaagctaatttgttcttctttagaatacctccatgggaactcactttcacaaaagcgagatattccattcatggcagaaaatgtatcaatttgcacccaccaatcatcagtatcattatgaaagacaattccatgcaaattttttaagccatgcccactattatagtttcagtatgatgtcatgaaactaatcttatttcatcatgcgtctgcactttttccgctcttgttcctgccgcgcgccgcagtccatgtagcagatgcaaaaaacaatcttcataatcatcatgagtatatgaacgttacgaggagtcgccctctcttaatattcaaatccagaattgaacttgtgtagctacagaaatgaatggtatagaagac

SEQ ID NO: 67577 - DNA, 120 bp, Glycine max
  Clone ID: PAT_MRT3847_32035C.1
cccacgcgctcgctgatcgcgactctattatcttagggggggtttagacacaaacttggcccagtacccataatcgttaacaggctcaccccttcattccgccacagcaaacgagcaggc

SEQ ID NO: 67578 - DNA, 138 bp, Glycine max
  unsure (1)..(138): unsure at all n locations
  Clone ID: PAT_MRT3847_32036C.1
ggtcaaaattctcttccgtntcaggattagnngtatcaccgttacagtgaagacattgggcacnnncaaagcgaatnctactctcgcggatncttggcgnatnnntcctcttgntttncaatctcttcgttacanctt

SEQ ID NO: 67579 - DNA, 259 bp, Glycine max
  Clone ID: PAT_MRT3847_32037C.1
gggtgtttgttggttacaaacacaatttgcactatcagaaaatgaacaatacaacccacaacgcctaccggtggtagagctaaccatacatcgaacgtaggctcatacgcttaaaggaagactaatcattctctgccagaatttattttggggggggggggcaatacataaactcatatttaaagaggggcactggcaaagggggggagcacaattatttagggggcccgaatattcacgaggacgagacaaacagcag

SEQ ID NO: 67580 - DNA, 241 bp, Glycine max
  Clone ID: PAT_MRT3847_32038C.1
gtgtggcaattcagatatagctatagtcgatgtcatatagtctcattgctggcaattatccaatacggattctgagtaccatgacagaaggtacatccgcacatacacatttcaacgtagaaaatggggctctttttagtactattaccatgatacggcttgcactcgttggtttaccatccaaagcatcagggtctctgataccattcacaagtgctccaaatgccctcttggctgatct

SEQ ID NO: 67581 - DNA, 399 bp, Glycine max
  Clone ID: PAT_MRT3847_32039C.1
acgagctgttaagacctttttaaggtaataatgatgagttctatttgttttattattttcgttaatatgaaacaccgattataattgaaatgacaatggactaattgtgtgtatgcaggaggtttactggaattgcctgtgagaataaaaaggtgggtttgattttgaggtctgcatgctttggttttgtcacaagcttttgtaaagttttttaaattatttgttgttttgtactttcaggcttcaagtttgcaatttgagtttatgagttattatcttgctgagctaagtttgttggagtattgttgtttgaagttcttaccttctttggtggctgcatctgttgtatttcttgccaggtttatcatttggcctgatctgcaaccttgggtacgtatt

SEQ ID NO: 67582 - DNA, 370 bp, Glycine max
  Clone ID: PAT_MRT3847_3203C.1
tttcggatagagggagatactgcgagcgagaccggttgtgagattatggatgcctattactctcatacaattgcaggcatctatacttgatccactgcttgcgaaaagaagtgtgcctttggcacccaggccaacaactcaagatgcacatttgctggctccaaatatggggagggttgaagacgtttttgccacacacctcacttttatggagggggctaaagaaccctctggtgaaaatatagctggtcacaacttaaggcatagaaaagtagatgatgaggactaccccaccgaaccagaatggacctagctcctaccagttccaaggttccgggtctcgggcctaaccccaggttcagtattcatt

SEQ ID NO: 67583 - DNA, 292 bp, Glycine max
  Clone ID: PAT_MRT3847_32040C.1
cttcgttaagacactcacctgcaagaccattatcttgtaggtttaaagcttgtacttcatcaattgcgtcaacgccatcatccagaacctggagggtatccaccgagaccatcatcgtctcatctatggctgaaagcagctcgaggaccgtcgctccctcacctacgtacacatccagaaggaactcaccattaccctcgctctccgtctacgtggtggcatgcagatcttggtgaacaccctcaccggcgggactattagcctagatgtcgcatgctccgacaccatcgac

SEQ ID NO: 67584 - DNA, 484 bp, Glycine max
  Clone ID: PAT_MRT3847_32041C.1
tcttatccaaaaaacaacaatgaaaacgagatatattaatacaacaccgattttcgttttcctaacgagaataaagaaaaggcgattactatagcaacaaactctttataaaagcacatcaaaggaaccataaacaacaacaacaacaacgtaggagaaagaaaagaaaagaaaaccatcgaggacgaaattacaacctagcacacagagatatatagcggaagcaaccaacagaagaaccttcaacagttcctccacacgtacaacaacgttggtataaaatcaccaattggatgcctaccataatggcgaaccaaaagaaccaatttaagttaacaaagccttggttttttccttgtggcctaaaacataaacaactctgcatccctaaccatggattcggaatccgcgttcgagttcgacgagtcagagctttacaactcggtccaagccaactcgttcgagttccagagatcgcttcaca

SEQ ID NO: 67585 - DNA, 297 bp, Glycine max
  Clone ID: PAT_MRT3847_32042C.1
atggcaagctctcacaatactgatataacggctaatacgcttagcccatctaccaactgggctataggctactgctagcgcttctgaaaatacggcatccgctgcataatctgccattcgaatgcactatcgcagctgcgatcctttaacacactcgaggatattctgcacgaacctctcgagaatgatgctctgccgatactgagaatttccacacctcttaagaatgagtcgtaatgatctgtgaagtgagtctgattttacaaaatttccatgtgatgtactagtatccacacc

SEQ ID NO: 67586 - DNA, 551 bp, Glycine max
  Clone ID: PAT_MRT3847_32043C.1
accttccaaagctctttctctaaggtttttctttttctttcttcattcacaattttttactcattcttgtcatgtttcctggctccataaaacgaaagaacaccaataaaaattgattttttaatccatagttctgtgtaatttaccatttactgtgatgctgtgacgaaatgcagtaaagggtgtcttcatttttgtgcagatcgagctttggaaaacttgaggaagcatttgagtaacaaccccttttcagatccctgaagggttgtgttcatttgtcgaaataataacaacttgcttggaacaagcataataagcatggcaagcgcgttgcagcttcagggggttcaagggaactacctttgtgtgagtgtgaggaggggcttgcatcattgcaagcctcaaattgggtttgcagcatttggtgctcctgtttgtgcaagaagagtttggggcaatagggtggcattcaatgtcactacttgcaaggcctcaacaacaagtgatgtgattgagaagagtgtgactgagaatagggtggtgagtattga

SEQ ID NO: 67587 - DNA, 334 bp, Glycine max
  Clone ID: PAT_MRT3847_32044C.1
cgggcgaagctcggaatacggctcgagcaggagccccccgagctgcttcagccgcccgagccgatcaagccgggggagattcaaaaacaatcacccgctgacaacccgcaacaggacgccgaaggggacaagcaggagcccagcgaccgggacgcagcgaaccacagccaggacgaggaggaggaggacgagacaccggcaagcaccgcagagaccaagaatgaggaagaagacagaagaggacgggctactagacgagaagggaagaacgcccaggagcgagaacgacccagaggaggaagcgacgtcaggcgccaagcgcaaagggacccaa

SEQ ID NO: 67588 - DNA, 397 bp, Glycine max
  Clone ID: PAT_MRT3847_32045C.1
gattcaaaatacaaataaacgctcgcgctccaagggcagatatgaaagttcaccactccgaccaactccttctttctctatttctactgcttgcatttcacgttcctcatatggctgttggcactgcggagcttacagctctgatggagttgaagtcccctctggatccagacggcaagatccttgggtcatggataagtgatggtgatccatgcaatggcttcttcgaaggggttgcgtgcaacgaccaccgtaaaggggccaacatctacttgcagggaaagggtctttctggttggatatcttcaacactggctgaactcaaatgcttgtcggctttatacttgcactacaacaacctttctggtgagatacccccacacatttccaatctcac

SEQ ID NO: 67589 - DNA, 407 bp, Glycine max
  unsure (1)..(407): unsure at all n locations
  Clone ID: PAT_MRT3847_32046C.1
tcgagtacttaaacggagaaggnnggataatgccttaagcactaaaccaacctccttgtccttttaactattgctgatatgcatacatatgcataatgcgaatatatatttttactccaatcaccgttttagtgaattaagattcttctctttctaggatgcacaccacgttctaggattaaacaattgaagaatttgaccagctagtcagctaccatagataccaaaatagtttcaataaacaagaattttccaaaggaagttctcattcaacaaggaatggtattatctccttcaaagcaatggtagacttacttattaagaagtctcaaacatcacacagaaaaaggggtgtgggcaacacaacaccttcatagcaccaactcatctttgtatgcgttgagaag

SEQ ID NO: 67590 - DNA, 492 bp, Glycine max
  Clone ID: PAT_MRT3847_32047C.1
cattctcttatccaatcgaaagattgttgacattggagaaacgctgtcgttgttcatggagcttcaaaccctagctcgagccgcgctcaagaagttggcgtttgatcatgttgttcatagtataaggcgtatgaaccaaaagcataagaacgaagctaagaacagagcgcttcagaatgtcttgtttgacttgcttcagaaagaggctgaagagccagccaagagggcactcgtgactctatgtgagcttcacaggagaaaagtgtggtttgatgagagaacagcaaatgcaatctgcactgcttccttccatccaacatctaggattatgatagcaactttatcatttctgcttgattatgagaagattcaagatgatgatgatgacagtgataattcagacagtgatgatgaaaagacagaatcacctcaagttgtccttagcagggagacagtttataaaggctagccaccaaggtacagcagcaagca

SEQ ID NO: 67591 - DNA, 374 bp, Glycine max
  unsure (1)..(374): unsure at all n locations
  Clone ID: PAT_MRT3847_32048C.1
caccttcgggctttttttaaggccgtcttattggtggttccggttaataccacccctggtgaacttgtggtgtgaaatttttaattaccccgaaattttaaccaggattttcgcccttcaggtatttttctttgcaggaaccttgattggttggaaaattaaaaccttccttccaaccggaattttgttgggactggaccattactaaacagagggaagaaaaagaactgctgcttgatgatgtggtgctagtccttcgctgaaatctgataactnctgtagttcttaatggtggagcaaggaagagagtgacagacggacaagactctctgagaatctgttcaaaggtgcgtctctgaaggtgacgaaacaaa

SEQ ID NO: 67592 - DNA, 373 bp, Glycine max
  Clone ID: PAT_MRT3847_32049C.1
attctgtggtaaaataactacagatggtaatgccataaccaatgccgtggatgtttaccgcaatccagcgtaagcagctaaacacagaactttatctttgaaatttttgtttttggtttagttagtaactgaaccttcactttgcagtgggtcgttgagggtaatcacagcaaataatgattcccaacttcgggtttttgatgcagagaattttgcttctcttggttgtttcaagtatgattggtctgttaatgtgagtgtcatcaactgataaatgttcctgttactatagtcttcaactcttcatctcttgcaacactttttggaaaatagcagttatattatgtttacatattggcctttgcagaacact

SEQ ID NO: 67593 - DNA, 669 bp, Glycine max
  unsure (1)..(669): unsure at all n locations
  Clone ID: PAT_MRT3847_3204C.1
ggacttaaaatttgcttctcttttccttccttcactgtttctttattctttttagagaaaatcaaaataacaatattatataaaatattgcacctttattttgaatgttcaatttctattgttttggtgcgaacttgaatgaattgaactcatagtttcatattcatttaccttctgatactttcgtttcattcttcaatgttgcatcggcgtggaaactagggcaaccatgtcgccggtgaggacaatgacggtggctgcggccgacgtcgcagtgtcatccgacggggaagccgagtactcgtttgccgtggcgtacaacggacctcccccggcctacgatctcccccgggcggtccctatcgccgccggaaagattccggcagcggttactttggcgcaggttccgttctccgacgcgctgtctctgccgatggtgcaaccactctcgaaggagctgaaaacgccgagttccgagcccgcggtttctccgacgtcgngtgatcgccttcgaccggagccacggaggcggctccgggagagtcacggatgtcgcgacctccggattcgcgttcgaagacgcccgcgccgccgctgcagcggaaggccaacgacgcgaagcagcgaaaaactcggtctcggacaatttaacaacacgaaggcactcga

SEQ ID NO: 67594 - DNA, 249 bp, Glycine max
  Clone ID: PAT_MRT3847_32050C.1
ggctcgaggtcatacgcagcgtgcgtcaaatatattgctaaatccacgtatcgatctgtggctattggatccattgaacctaagcctgctcctcctattcatctgagcagattcaactgcaacatatttgcggctggcataacttttgggcgatgcatctttcacgtatcaatttgatggcgcagccaaagaatctgtaccagcagcgaatggttgtgagtctcaagtcaattatcagccaggaaactc

SEQ ID NO: 67595 - DNA, 476 bp, Glycine max
  Clone ID: PAT_MRT3847_32051C.1
cttgtttgagtatttctgtctgaagtatttttttgttataatgatcaacaaccacgtcaatggggcgaatgacgtcgacatggaaaggaccgaaaacgaaagttttggtgaacttaaccagcgactgattgcgcttaaagcggagaagaacaacaaagagagtgccactttggcggtcaaagtgttggccttttttgtcaactgcgacaacctcagtgctgcccaggattttgtggaggcgttgaagaatttgcccgagtcggcctcaaacagcgattgggcccggtggttttattatttgggacgcatcgaagcgttgaagggcaccgacgccgagacgtacaaagcggcagagaaacattttgaggtcgcacttcgaaaggcaccacaaaacggcgccgtcggcttcaaacaggaagtgaacaaatgggtcgtgctggtcaaattgctcatcggcgaaatccccgagcgcagtc

SEQ ID NO: 67596 - DNA, 351 bp, Glycine max
  unsure (1)..(351): unsure at all n locations
  Clone ID: PAT_MRT3847_32052C.1
gagccngancaacctccngttattttggccancaagcacaaccagcagancccttacatccactttcgcaaggactggcagcgctatgtccgcgtgcacttcgatcaggccggcaagaagaagagcaggcgcaacgcccgtcaggctaaggccgctaccgtcgctcctcgcccggtcgacaagctgaggcccgtcgaccgttgccctaccaacaagtacaaccgccgtgttcgtgctggacgtggcttctccctggctgagctcaaggctgctggtatttcccgcaagcttgcgcgcaccatctgtatcttcgtcgacccccgccgccagaacctctccgaggagtccctg

SEQ ID NO: 67597 - DNA, 314 bp, Glycine max
  Clone ID: PAT_MRT3847_32053C.1
tggactcgtgggccgcgatcacaggttgccggaccgtataaccggaaacaaaagcagtcgttacttgatttcaagaatctctcaatttcttcctacttctttgtgtacgatttcttaagggaaagaaaatcactctctgtgctggtcacagacttcgtgaatcattttcttttccactcttagtttatttgctgaacactctcctatttgatataggatttcgtgtcagaatcaaactccttctgttcttttttcagatttctgtttaatatcaagaatcagctgtggtattccttggtcaatagctccccctc

SEQ ID NO: 67598 - DNA, 382 bp, Glycine max
  Clone ID: PAT_MRT3847_32054C.1
attaaaaaaaattttaaaaaaaaaaaaaaaaaaaaaaaaaaaaaaaaaaaaaaaaaaaaaaaaaaaaaggagaaggttttacggtttaaaaggattcaatcttcgttacttcgggacatgcaacatcggggcgtggccgttttaggggttccaatttttcttccccggccttgcaatttcatagtttttttttggggtcccctaattttatttcattggcctgggttttacacccttttccttggtaaacccttgcgtttacccaatttatccgctttgcattccttccccttttccccagttggtgtttaatggaaagggcccgccccgttggcctttcccaccatttgcgcagcttttttggcaattgggcccccccttt

SEQ ID NO: 67599 - DNA, 296 bp, Glycine max
  Clone ID: PAT_MRT3847_32055C.1
tgtggttgcgcgaagacaccacaaggggacaaggggagaattttaagcaaatgcgttcaaccccgccgaaatgcatgcaagacgtgtagccgctatattgagggacaaagataaaatagatgacgcggtaatgtggaaagaaaatcacagacgaaaacaatgggtatataacattgctgtaaaaaatgataacgggcaaacgcccacaaaaagacaagtatgaggtgcaatacataaaaatgaaacttaaaccggaggcattggaaaccatgtaactggaagccgacgattatcca

SEQ ID NO: 67600 - DNA, 390 bp, Glycine max
  Clone ID: PAT_MRT3847_32056C.1
atccttttataattctgatcgaaacaaatcggtgcgagaacatcaccagagcagagcatctttggaagtttgatttcattgttgtttggcaacttgtgtttttcccaccgaacccaatccaagagttatgggattggcctctgttgttcacattcacgctcctcctttcagatgctctgtacttcaccaccccatctcttccttttgctcaatgtaccattatcgtcctcctcgccgtttcccacttctgtgctccagacgaattggccatgacaattatgcctcagaagtaaagaggatcagtgctcaacaaaatgatgacataggcaaagttgagaaatctcccactcaggaatctctgggaaatgagggttacaattctttcggcag

SEQ ID NO: 67601 - DNA, 342 bp, Glycine max
  Clone ID: PAT_MRT3847_32057C.1
ggggggggccccggggggaaaacggaaaacctttggaggccggttaaaaagcccttaaagggggaaagaaaaagcccggggggagggaggggcaagcccaggggggggaaaggggaaacaagaggggaaccaagaactccgggggggtgaaaacgggggggaaacgggggggtggggcccaagggggggaacccgggaacagggggtccaaaggaaggaccgcccattccagggggcccgtgacccccccaagggaatccccaaggccccaccggggaatccgggggcccccctgtggacccccgaacctccccccggatgtacccaaaagtgtccccccag

SEQ ID NO: 67602 - DNA, 320 bp, Glycine max
  Clone ID: PAT_MRT3847_32058C.1
gggaccaactgggacagccttaaactttagggcgggcaaacaaatgacttttcataacacatcccttttcgggacaaaattagagggttttaacccatcagggaacacccatcatccatgtttttgctttgggcccacccccttttttacagttaaaaaaagggttaatacaaacatgttaaaaggccaggctttgaacaactttgggacactaatgggacattatttcccacaatttggcaaagttcaaacagttggggtgggcagactttttagaagagggatcttcttaaaaagttttggaaccaggccttttaaaa

SEQ ID NO: 67603 - DNA, 855 bp, Glycine max
  Clone ID: PAT_MRT3847_32059C.1
acaaatgggatattgcaattaccttttatgggctcctatgtctctgcctactctctgttatgtctttgtttctcctatttgcctacttcgtggcattccgctgttcccacagctttcaagcatatgggtccttccatttgcgtatgcatttcttgctacatatggctttagcttgtgtgagtatttgatttgtgggtccacagcaaagggttggtggaacttgcaaagaattaaattcatccataggaccacctcgtatctctttggtttcattgacaccatgaaaaagcaattaggactatcagccacaaattttgtcatcacggataaagtggttactaaggatgtccaaaagaggtatgagcaagagatcattgaatttggaggctcttcgatcatgttaaccatattagctacagtggcattgctaaatctttttggtctcctttggggaatgaagaggattatgatggatttaaatggaattcagctctagccaattgatgatgcagattacactgagttcattggtggttatgatcagtttaccagtgtatgaggcacttttcattcgtagtgataaaggttgcataccatcttcagttatgctcaagtccattgtcttggcctcattagcatgttgcctggcacctttcatttgctaatctagctatttaaatgtcagtacaatactgaaagtgtggctcattacttactagtgataagaatctttaatattagttcctagtatggcttcattgacttgaagctttaagtgtgcgcgctagttatctttatcaaagtactttggttccacgtatctaaacataaatctagcaactattagtttttgga

SEQ ID NO: 67604 - DNA, 813 bp, Glycine max
  Clone ID: PAT_MRT3847_3205C.1
gattaggacaaaactatgatactattcaatagattacgttttctaacgaaaatacagcatgtgtaacagttattacatgcgccgtgttttcatattgataaaacttcaacacttatcgtgtttttattggaaaacaacaaaactatctttggaacattacccaaatctttctccttttgactactagtattacattcaaatatatagtgagaatactcgtggacattacctaaatctttcgcctttggagtattacattcaaatatctaatgatagatacacggaggcactcagaaagcttactgagatctatgccttgttgaacgcacaaatttgggcagccatacttggactactacagtgtgaagttgagagtgtggaaagtgaagcaggattctgttctctttccactagccttaaaacactcagattcctgctggcatgcgaacgccaccgattccttcatgctctcaggtccacaaaccaaaactccgatattagatccatcgctttcatcatgaagcttgccaaatatatctttaaagttaggccttcccccgaaatgcacttcatggtcttcaagtgcattcctagcttcagctgaacttagatcaaggggttggatttctctgtgtgatatttgtggaatccctttcctcagccttctccatctcaaaatagctgccaccgaggcgctaaaagctaaagctaggacaaaagcagctatcagaagaagatccacaacccaagaaggagtcttttctttggccattttggagcgctttccagaggggattataatatggttgaaac

SEQ ID NO: 67605 - DNA, 216 bp, Glycine max
  Clone ID: PAT_MRT3847_32060C.1
cccatgcttacaatgaggacgcttctctgtccttttaagatcgtccaattccaaaggcgggtgacctgtgcataaacgggagcgggcaagacgctctcttcaaagagctccacggtcattttcaccgagctcactaacgcgcattagctcgccgcaacctaaaacgcctacttgcttgctataacagcaaccgctaatgttaccgcatataatagc

SEQ ID NO: 67606 - DNA, 498 bp, Glycine max
  Clone ID: PAT_MRT3847_32061C.1
caaaggccaaaaggggaacccctcgggcccggttccccatttaagccccccctaaccccccccgggccctggccccctaaaacaaatccctttctaacaaattggggaaaaggaaaacccttgggaggggatacccacctaaacccccccgggcccccaaaaaaagggggggttttggggcccccacccaaaaatccttgggccaaaaagggggaaaaaggggcccccggggaacccaaggggggccgatattcaaatccccaaaaattgggggacccttaatgggcctttttttcccccgggggctgggaaaaccccacccccccaaaaaccccgggattggcctttccgggggggagaccccaaccgggagggggtttaacccgggggccctcacagggccgggggcagtaagttccatcaattgggggggcaacccccgggggaatcccccccccctggggaaaattaacacaacaaccccctgctttggggggg

SEQ ID NO: 67607 - DNA, 371 bp, Glycine max
  Clone ID: PAT_MRT3847_32062C.1
gtttaacctttccggttggtttggccaaacctggggcaccttggcagtttagaaagttagcagatggtgattttctcaaaagaaactttaagcagatgtctaatgttttgtgggtggctcctgaggacaaggcgagtttatggcacaactcattatggttcgtgtataatctgggaatgcagaaagctatcttgtcatctcgtaatgtgtacgagattgtattgcacagtcagagaaagctcgcattgaaaaagaagctctctctcgtttgaatggctgcaaaagctgatgtgctccatacacagatgaagagtcattcatcagagatatgatgctctgttcaatgtatatgactctgtgacatgattgtg

SEQ ID NO: 67608 - DNA, 681 bp, Glycine max
  unsure (1)..(681): unsure at all n locations
  Clone ID: PAT_MRT3847_32063C.1
tcaatcagtagcatcncagatgctcagacttctgggaaaaaagaggttcggtttagatcttcttccttcagtgaaggtgctgtgtctgagacatcatttatagacatgcttaaaaagcctgttcttcctgaagtggtggcagactctcatgctgccagtggaatcgggaccgagtcattggatgcagcacaagcagggcgaagcgggaaaaagaaaggtaagaaaggaaaacagatagatccttctcttctgggtttcaaggtctccagtaaccggatcatgatgggtgagattcaacgccctgaagattaatggttaattgcatgtagattaggtgtaaaatttttgaattttttatttttgggggtaaagggatgaatggtgggtgtacagtccgctagaagcatagctagaatatctcaacacatctgtttattacaataggtgtaatagatttacatttttaaagcccgtttggcgttacaagtgtgtacagagatgagtgtatataaacgatgaggctatgcttgttatcatatggtggatggttcaacgattttggtggggatagaaatagaagagagaattaattgtatccatcgtggtttgttgagttaaattgatatttagtgtcttgatttcaaacaaggtatttaagtaaattttgttatacctttctac

SEQ ID NO: 67609 - DNA, 263 bp, Glycine max
  Clone ID: PAT_MRT3847_32064C.1
actagttctagatcgcgagctgccgcccttttttttttttttaaactctacaaagtacaaaccccaaatcacatactttcaaccatacatcatataacaacaacaacaacaatactagaactagaagtgggaaattcaagacttttttttccccatttcctttttttacaataacaggttttaaacctagaccgggggcatataacccaaaccccattattagcccgagaatagggcctcaatgagggtcttatttagtggct

SEQ ID NO: 67610 - DNA, 739 bp, Glycine max
  Clone ID: PAT_MRT3847_32065C.1
aaaaaatttttactttgcaatcccccgttcgttaactttgattcttttaaacggccccccttttttttttttttttttttttttttttttttttttttttttttttttttttttttttttttttttttttttttttttcttttttttttttttttttttatggttaaaaaaaaatcaagcataccttggatttgcatagtagtaggagctagcatagatacatgaaaatttaagttcgacttagtctcttttcttatcatcgccattatttaaaaaataaataaaaaatcaaacgttacatgaaaattgtgactctttaggcgtcgacattatttcctccttgctactagattgttgcataatgtcttggataagcaaactcaagtcaagatgagaagaccctccattttcaactgctctctttgccatctcactgagtttggttgccctttctcttctctctttgctttcttctccatcatcatccatcaccatgcatattgccctattaatatcttccttcttcaccaacacccctgttttctcttcctctccaaacttcatgggaacctctacccctacgctcacaccaatcttcaacactttagtaacaagcttctcattcaaaaattgatcagcaaatagaggcccaggtaatcattggcaatccagcacctatccccttcaagtgttggaattccaaccacaatgtgttaagattcctccaatgggctggggg

SEQ ID NO: 67611 - DNA, 339 bp, Glycine max
  unsure (1)..(339): unsure at all n locations
  Clone ID: PAT_MRT3847_32066C.1
ngtcgcaggcnacgcgtacgtaagctcggaattcggcncgaggntcnntctctctgangcgatcnanttcnantntngaattcatcaaancancggnnncnaggacaanggnngntggctagccgcgaattaatnnnnnncnaaaccagnnagnaaaancntccggaatgganagtgnagncngtnccntacnaccgtncanggnatnggctnggtgnatacanannanggaaagggacngngggcaannntatngaagnaatcggaaantnannnngncatncttnnganagatcanagacaaaatcnatanaanctgnngcangccggncnacatnc

SEQ ID NO: 67612 - DNA, 140 bp, Glycine max
  unsure (1)..(140): unsure at all n locations
  Clone ID: PAT_MRT3847_32067C.1
gtcccatattcacatgctattttaatttgcttacaatgtgcagagccaatgtctgactgtnccttataacaaaacatcatttactatggggggtaacaattgagatgtgaaccatcattttaaaccccttattatgttgg

SEQ ID NO: 67613 - DNA, 2073 bp, Glycine max
  Clone ID: PAT_MRT3847_32068C.1
cttagcttagccttctcctattctggacctctgtcccttcctcttgattagggttctaattatgttatgaaccttccatgcttttatttttcttttaaaaaaagaataaagaaaaccctacatatgggtttgtggggtatattcagtcttcaatatcatggctctctttgtattcttccacagctttcttgaactgcatccaaagagttcctttgcatgcatgccatggcactcttactcccaaatcttgttttgcggttcaataaagctgtgggaagatacagatagggtcaacaacggactagcttatctcaaactccagattcttctctaaatcttcctatccaattatatatagggataaaattattgcaaagtattttttttcctttttcttttgtgatttgacttaatttaaatcattttcagatttaaaccatcgacttttcagatatatctctatatgtgatcagaattctcagatgcagtattatgagagaataaacttgtaccaattgggtagatttgtgacgatgatgaggaagaggatatgatgattccccaacaatttggcttctttctggaattaaaccgatcagcaattccaggcttaaacgagaggggaacatatggtggtggttaatttgcacacgaagtgataatgcatcgtataggcatagccgtttgatttgaaaacacttttccttttaagtgttctagttagctagtcctgtctgtgctggagaaaaccaaaattgccatcatcgaaccacgcactcgatcctcttcatctcccaagggattcaatacaataccaggctagaagaaactccactcatcaccatctcaagcaactaattaacaagctagtactctttgagtgtttggcaattggcttagatttcttgtacttggaacaagatggaaagcactgtcacatttgagactgatctcaacctcaaggcaaccgagcttagattggggcttccaggaacagaagaaattgttgaaaaaccacttcctgcaagtgctagaattaccaacaaaaggcctttgtctgaaacctctgaggagtgtgcttcaaagggttctagtgctccacatgtggaaactgaagcagcccctcctgccaaggctaagatagtggggtggccaccaatcagatcctacagaaagaacagccttcaggagaatgatggtgctgggatttatgtgaaagtgagcatggatggagctccttacctcagaaagatagacttgaaggtctatggaggctacacacaactcctcaaagctctagaaaacatgttcaagttgaccataggtgagtattctgaaaaagaaggttataagggatctgactatgcacctacatatgaagacaaagatggtgactggatgttagttggagatgttccatgggacatgtttgtgacttcttgcaaaaggctaagaatcatgaaaggatcagaggcaaggggtttgggttgtgctgtatgagaaaaccaaaccactaaaaattactatgagcagagaattaaaaaaagtgttttgggggtgaagggaaaaacatgctgaaaagcttgtgttctcggatctgaagggttttgacttttgaaatcactctagtgtgtgcttttggcatacctttatatggagttatactctgaagcaggagaagatggaagatacggtgcagtttcgatcttcctcaagtttggcaacttttatggttattattttggcatctgtggttggatgctatgcttatgatgttgtttccactgatcctttttgaagtttcatgtgagaaatcttagagatttcaaatgaaactttgtgtagaggagagatagaaaattaaaggttatatgtaatattgtttaatccaagttttttggttgtgttgatacaagaatacaatgtaatatactaagtgttggtatttgcctgtgttattggatggactcaattaagtatgttattgcatttttcaaataactaggaactttttgttgttttagttttctttttctataaacataataattataattttaataatttctgtgt

SEQ ID NO: 67614 - DNA, 326 bp, Glycine max
  unsure (1)..(326): unsure at all n locations
  Clone ID: PAT_MRT3847_32069C.1
atttntttttttgtgttaaaaaaaaaaacaatattttattcaataatggatttcacttggaatacggattatcgcaaaaatggggggaacagttactattaactattccatacactgatccttatatctaggtggggataatcctgtggccaattgtaatctaaatcttatttactccaatataaaagaactgatttattactcaattcgttttggtaataaaattggttgaatgaaaccaaaagtaatgcagctgctatttttagtttgtgaggttcatgcttcattcttcattctggatggggggtgggttttcagttagttaa

SEQ ID NO: 67615 - DNA, 113 bp, Glycine max
  Clone ID: PAT_MRT3847_3206C.1
gcacctaaggggagacatcttcggatttcagcatttctactctccaaacattcgaattcgcattctcatcactctttcgccattccatggcttcgggatataacacatcggcg

SEQ ID NO: 67616 - DNA, 368 bp, Glycine max
  Clone ID: PAT_MRT3847_32070C.1
aaagcaatgttatttggggttgatccttttccgtactggacggcgccatggttgtcctatgtacatactttcccattgtgttgttcctaaccctagccattgacctctaacttgggacctcattgttctataccggcatgtacaacatcataatccggtgccatctaaggtttacccattcccgttcagaccatgaagttcatcatagattgtggccttgcctaccccaccttcttcataccggagatcattggcttcggtatccttaccggagcaaccatgttggtcctaggcgtaaccgggcttcattcaattagcttacagctcattcccttgtgtgttgtgagggggatccagcttgcacaagg

SEQ ID NO: 67617 - DNA, 152 bp, Glycine max
  Clone ID: PAT_MRT3847_32071C.1
ggtcggaatttggatcgagatctgtaagaagttatggcttcaagaatgagtggacagacaaataaaaggaaatgctagaggatgagagtggttatggatttatatctatcaattcattctatgtgaggtgctgattatagttggcttgtaga

SEQ ID NO: 67618 - DNA, 246 bp, Glycine max
  unsure (1)..(246): unsure at all n locations
  Clone ID: PAT_MRT3847_32072C.1
cgacccacgcctccggccanaaaacgacaaaaagaggattttttaccataaaccattcaatacctgctggagggttgaatcaaagtctgggctcttaccggcgataatcaagacactgcaatttcaattggtctttcttttaaacttctgagtgcaaatatgcaacaaataattataaattgccctctaaaagtttacttcacaaatctatttacttattccaaaaacaaaaaatctgtgaaatct

SEQ ID NO: 67619 - DNA, 186 bp, Glycine max
  unsure (1)..(186): unsure at all n locations
  Clone ID: PAT_MRT3847_32073C.1
cacaatcaatgatcatatagcatcgtgtgtcactctgttagtagcatcataatgcgcattctctgtatagtctnctctgactctcntctctctnttctccgcaatcgtgccttcgcgatgacgtggcgctgacgcgaagaactcatcagagacctcaactagttccccgacgctgacgtcaacatc

SEQ ID NO: 67620 - DNA, 288 bp, Glycine max
  Clone ID: PAT_MRT3847_32074C.1
agcttcatgaacgactaacatataaagaattccctttggatttcacattctggggggggagggcttacaacacaaaaatcttggggcaaaaaaaaaagggttggccaaatcattgcccacttgaacttcaagcaggtccaatttccgctccaacacatacaggtttttatttaaagaccccaacttgcttttcgtcgtagccttcaattatttgaaggacaaagggggggcgccgcttcatggataaaaaaaacgacaccgggatgggtcattctgcagagggggaaa

SEQ ID NO: 67621 - DNA, 448 bp, Glycine max
  Clone ID: PAT_MRT3847_32075C.1
acgagaatgtgataatatactcttagagtctggagtctatgagactcccaccaatttatatagtcactgaatcaatttttttataggaattaaaataaataaaaaataattcattcaaaggattaaaaccaaaaataaaatattttcatgaatcaaattgatattgaagtcttatttatttttagaagtgagttcaaataattttaaaattaatataaaaattatttgaacccttttccatgtaagtaagtctgaattgcttttaaattaaatttgaaaaccaaacattagaaacttacactcacctcaaacaaaacctcagaaattacatgctaattttcgataatttttattgttcaccgttcattttattaaatagtacatctatgattatttctactttgtgtaccggtatataaaaatattgcttgcgcatagtagaccttgc

SEQ ID NO: 67622 - DNA, 608 bp, Glycine max
  Clone ID: PAT_MRT3847_32076C.1
gacataagcttaatgagaaatatctagattttgtattgagactctagatcatggattatctataagaattcttgtattagacaagggccttacactctgaatatgacgtgtatcattcccaactgaaatggaagtctgctaactgtgtctaaactgaaatataacatgataatgtagctttcatctcttgtaaaattaactgaagatggaaaatacaatacaaagtagattgaggaatccaaacttaaaagaactcaaagtccagatatttacccccagacttcatgtcattattattacccaccatcctcttactactattgttgttgttgatgttgttgttgccaaccccaacagtatcaactggttcaaactttgccggtggatcaaattcaactggtcttggaacttcgggtggtgtgctgcacctaatcaatgcccagttcacgccttcaaagaaggggtgttgtttgatctcagtcgcgcctctcttcaccccgagacggtgctgcggctccttcaccagcaagccccggatcagatcacggctggcataacttgtggccggcgattcaggaaatctgagctgctggcccactacattgaac

SEQ ID NO: 67623 - DNA, 442 bp, Glycine max
  Clone ID: PAT_MRT3847_32077C.1
ccccaaccttcgttctatacttcaatcgatgcaatacaatctttagacgaccatcagaatgcgtctcacacacgcagccatcgctgccatcttggcattcaccgtcactgcaagccctgtgcccgagcaccctcaaccaagctctttctaccctgcagctgatccacccgcagagcacccaaagccaactacagttcatccggctgcagagcacccgaagccaacttcggagcacccgcctccagagcatgctaagccgacacctgagcaccccaagccaaccccggaacatcctaagccgacaccggagcatgctaagccaactcctgaacatcccataccgactactgagcattcaaagccaactcccgagcatgcaaagccgactactgagcatccaaagcccactactgagcaccctaagcctaccaccgaacaccct

SEQ ID NO: 67624 - DNA, 347 bp, Glycine max
  Clone ID: PAT_MRT3847_32078C.1
gggaaccccccctccacgacctgtctcgggtgttcgcgtgcgtcttcctcccaccggcgaaccatcaaccaatcctcccctcaacaacaacaacaacaccggcgtcaccgttcctttcaacccacgagaagcagagaccacaaccatggccgaatactggaaatccacgcccaaatactggtgcaaattctgccagacctacgtgcgcgacaccaagttcgagcgccagcagcacgaagcgaccggcaagcatcaatcggcgatccagcgctcgctgcgcgacctgcaccgcacgcgcgagcgcgaggaccgcgagcggcagcgcgccaaggacgaggtcgcgcgcc

SEQ ID NO: 67625 - DNA, 413 bp, Glycine max
  Clone ID: PAT_MRT3847_32079C.1
cttgtcgcaaacaaaatttacgcaaagggaatgggctgccaaaataactcacattcactcttgcaaaactaaggttttccaaagggtttgtgtttccaacttttaagacaaactaaaattctttacgcccctccaaaaagtgtcttgcgggatcactgttgcctaatgggccacgggaactaaaatgttttgaattggcacaacagggcacaattttgttctataactggaacctgatatcattagagcggttgcacctggcaacaccccattttctgctaacacttattttctggcgacctacaaactttaacttggccctgataaaatcctccttaacatgatagttgtccctgtccttgtctgggccacaaataaggatttgtccaataaccgctttattacaagtaccc

SEQ ID NO: 67626 - DNA, 201 bp, Glycine max
  Clone ID: PAT_MRT3847_3207C.1
ttcccatgcgtccgcggacgcgtggacggacgcgtgggtaaaaaggggtaataataatactaataatcataaatgtctcggccgtgcgggggaaagggatgattaataaagatgataaggccctaatgaaagacatctatctaggaagtaatgatgtataaatcagtccacaatacaccgttgataacacagctttctttg

SEQ ID NO: 67627 - DNA, 115 bp, Glycine max
  Clone ID: PAT_MRT3847_32080C.1
cctagctagcggccagcagcgtccaagaaagaactactagtgccttaacggatgtttgggggcatgaaaaacaaagaggcacacttagagaatctatacttgtgactataggcca

SEQ ID NO: 67628 - DNA, 197 bp, Glycine max
  Clone ID: PAT_MRT3847_32081C.1
attatttttctcttttatgttggaaactctcctttcacttaaggggaatgggtctaaaatatattaacactgcgtactcttatacaggaattaattgcttagaatcctcattgagagcaggatatccaaaactgtatcttgaagatgccaaaatttacatacaaggaaaagggggtcctccgtcctcccatccaact

SEQ ID NO: 67629 - DNA, 385 bp, Glycine max
  Clone ID: PAT_MRT3847_32082C.1
cttatatttcttttttttttttttttcttttttttttttttttatttttcaactttggggttttttttgtattttttttttgcttttttttttattatcttttgctcccttgtggggaggacaccatatctaatagggtggcccccacccaaaaaactattactatggggggccccacccccggggggtagtaaatttaaaatgggcaagagtggggggcataaaacagcgaagtcccccccaaatcccatgtgaaacccccctgaaagttcctgagaaggagagagatgcccctttggggatagagccgggggaaaggatcaaaaaaaaagatggatctttaccccaaccaacgttcatttagaggacatgtttggtttatttc

SEQ ID NO: 67630 - DNA, 139 bp, Glycine max
  Clone ID: PAT_MRT3847_32083C.1
ctcaagccgtgctacagcccattgatctgctgatgagggagctcgtggaaccatacgatggggatgccaccgacctctctccagaagagactgacagcatgacaggtggttatggtgagagtattaaccatgtcatcat

SEQ ID NO: 67631 - DNA, 234 bp, Glycine max
  Clone ID: PAT_MRT3847_32084C.1
ccccaaaacccgggttaagggaaaaagtccccttccctgattactcatttactcagggaactcacccttaataaaaatgacacctccttacgatttcaaagttttttttttttttaacataaaaattcaggcttcaataaaacccttgcaaaatgggacagccggaaactaattgtttcccaaagtcccaaacaagaaatccctttttagcatgacaggcccaatagcaacctt

SEQ ID NO: 67632 - DNA, 683 bp, Glycine max
  unsure (1)..(683): unsure at all n locations
  Clone ID: PAT_MRT3847_32085C.1
cacgcgtccgagagaactgagagaagagatgatttccaccatgagttgggatgagaacaacgatgaatttgagatccctctcactcaaacgacaacggcttttcacgcggctcttgcttccattgatgatgataataatcaacggccgtcgaaaaaacctaaacgcaaaacgagcgagggtggttgcgaaattgataactgctgcagcttggatttcattccttccaccataggttgtgtttctgcttgcagtgttcaaccgttgggagaagaggacagtgtttctccttcttcttctactgcgtctttgtcggagctgaaaacgaaggggaattatcttcgcaactcgatagagtcgaagctggtggtttcgagagccaacgcgcttaaccgtgcagatgcagactctgattcggagcttgatctgttgatgaatttgtgcgatgagttggaggaagtagatagttccgttcggtgtcccctgtgtgaggttgatatttcgaacttgaccgaggaacagcggcatcttcataccaacaattgtcttgacgacgttgcggtggttcctgatgataacgagaaaggtgctcaacaagtgcctaaagttgcttctgtgggtgattggctacacgggctcggcttanacaagtatgaagatgttttccttagggaagaagttgatt

SEQ ID NO: 67633 - DNA, 352 bp, Glycine max
  Clone ID: PAT_MRT3847_32086C.1
ccggcaatacccggccgcgacccacgcgcccgaaccaattttggctggcaataaacgtgggcaacgccttggataaatacgcgccctccctgattgagctacaagaggcaccttcgggcgagaaacctaagcgacatatgcgggaccagcggcctgaggtacggcgccatagcagagggagctagagaggagtcgcaagggccgctatagctggggggggcgccgcgagcttctggatcgagcagggcagagacaggagacagagaatgcatagagaagagccgcgggagatgagtcctgggcaggcaggagcaccagagacacattatacatgggtgcagcagccatgtag

SEQ ID NO: 67634 - DNA, 493 bp, Glycine max
  Clone ID: PAT_MRT3847_32087C.1
aaggtccatagtgaaaaaggaatccattactaatggaggctttgttaaagcatcaattccagcacaaactgcaattcctgaggtcacaactacgaggacaggaagaaaacctacatgcaactcgtgcctgccaccacctccaccaccgatgccaccatcaatcccttctaggcctatagcaaaagcgaataacactcaaagggccccagcatttgtgaaattatttcacacattaaagaatcaagaagggatgaaaagcacaacggggtcaggtaaacagcagagaccagtagctgtcaatgtacacagcagcattgttggagaaattcaaaaccgttctgctcatcttttagcaataagggcagacattgaaactaaaggagagtttattaatgaccttataaaaaaggtggtagaagcggcctacacagatatcgaagatgtcttaaattttgttaattggcttgatggtgaactctcatcattggctgat

SEQ ID NO: 67635 - DNA, 830 bp, Glycine max
  Clone ID: PAT_MRT3847_32088C.1
gccttccccaaccttccacagcctcatgttttgttcctttttcacttgttttctggcactagatccggagatctctccgtgctacacgccgtcgatctcaagcccccacatattggtgttggggttcaggatctggttcgacaccaccaccgttttccagatccgtgtttcagatcttattcttttttaactctatattttcttgatctgtgatctacgatttggcattgtatctcaactgattttgattttggatctgtttttaatcttgatctgatcccgtagtctgggtcttaaaaacacaaactttatggttatagtttcttgaattttatgattttggacttggtatgcattttgtgttgattggtgaatctaattatggtgttgtctatttgtgttatgttgtggagcaattaggtcgtcgatgccggagaattcgtcggcgacggcaagcatgtcggagaatgacggaagtgttgtcgaagactctgggagggagagtacagagaggaagaaaggaagacaaagattggatgaggaatggtgtacaataaaattttgcacctagattcatctgaaggctgtaaataatggtttatggaagagcatttactttgcttctccacgctagccgccgtcaattttgatgcatcgtataagaaatcaaatattaaggaagtgtattagattaagattttaaaagaaaattttcacagtttttttagattacatttaaattgatggaaaaacttataaaataaaacccactacccactagtacaaattttataatttaaaatttgattaaatagattttaacttaaaaa

SEQ ID NO: 67636 - DNA, 269 bp, Glycine max
  Clone ID: PAT_MRT3847_32089C.1
agagtaaggggatccattctgtacggagtataatgcgactgcctgccgcacagaagagatgtgcaacatgttgactgtcgtgcacagaatattcactatgcagtctccgtccattcgagatgcccttaaactacatgtttttcaaacatctgagtaacaaggtggggtaagccaacggtccatattcgctggagttgacttgacatatgaccactaggctagcacgccaactttactgcattgacagagggactgctttcactcgctct

SEQ ID NO: 67637 - DNA, 131 bp, Glycine max
  Clone ID: PAT_MRT3847_3208C.1
aattggcgctgtagtcatcttcacaggcatggttgtggtggatcctcctgattggctctcttgtcagcattgtcctcgcaatggcacaacccatttgaccctctcctccagaatcaccacgaccatcacca

SEQ ID NO: 67638 - DNA, 222 bp, Glycine max
  Clone ID: PAT_MRT3847_32090C.1
cttgacgcgtcattgacaatttaggatgttaaggaattaggttcgtcttcagcgtctgcattccatgatgacgcatttccatgtcaagtctatgttctgacctttcagaccagcttctacgttaagtgtccagcatgatgatgctcatgtgcttacgcagttgcgtcgctaaagtgaccatcacggcttaattcttggatattggtcgggtcatgctggttg

SEQ ID NO: 67639 - DNA, 465 bp, Glycine max
  Clone ID: PAT_MRT3847_32091C.1
cccacgcgtccgcaagaaccactcctacaacaacaagcttggtaatgaagctctcccacccatgaaaacccaggctggaacactccaacacccaccacaacctgcttcatcagactatgcttttcccatatttgtcattgttgtgctcagcatcttggccactgttctgttgctcctcagctacttcacttttctaaccaaatactgctcaaactggcgccaagttaacccaatgagatggatttccatccttcgagctcggcacgaagaggaccccttcatagcattctctcctgccatgtggaaccgagggcttgatgagtctatcatcagagaaatcccaacttttcagttcataaaaggagaagaaggtgaggaccaaagtgtatatggttgtgtggttagtttgactgaggtcaaggaacaggatgtgctaaaagttcttcccaattgcaaccatgcttt

SEQ ID NO: 67640 - DNA, 1009 bp, Glycine max
  Clone ID: PAT_MRT3847_32092C.1
gtagtctaactttgatatattgatatacattgcctgtgtattcttgaattgtgcagaatagtacgtattgtgatgcacttgtttataggtccactagcatctgaggagttcattgtctatgttaattaatgataaatttaacaattaagtttaacagattatgttcatgtttttgtgtctgcaacctttgccaccttccaagaggttaaggcttgaggcgcagagagttttgaaagaaagggtccaggatattgctgataagaaaggcatcaagctgcggttctgtaatctcaaggaatgtgaaagtcacattcacagcgttgatagcccatgtgcaaatatacgaatggagatagggtggccacttggcgttccatttgtccatcctcatgacttacctaacaaggcaaagctgggttttctagaagcatatgaacctggttggacagaagcccatcaaaactcagacaggcaccgcagcccatcaaaacccagacaggaatcagtccccctgatttccaacgtatgggcgacaatggatcaagttgtgaagatagccctatatagttctcagggggctctgaatctatctgtagctaggctttagagttttatacctgctgtctgtatatgcaacttttgaagctcttaggattatgagacgctaatccaatgaaaatgaatggtagactcagctctacaactgatggaggtgttgcttactagtatcaaccatatgtaaaatgaagactataagcctctcttggtcatgaacatgcacgagtcatggaggaatgcagtcactgtcacatggtctgcaacaagtttagttgtaacttttttgtccttaagttatgtcaagctggttgaaagtgtaaacaggatagcattttgtcacaatgttatgtgaagctgtagattgacgtgtttacttatgctgcgtaattataattgtgaaatcagaagcggttgataccattacactgattcaaaaaaggacggccagggc

SEQ ID NO: 67641 - DNA, 116 bp, Glycine max
  unsure (1)..(116): unsure at all n locations
  Clone ID: PAT_MRT3847_32093C.1
gggcaaacaccgtgtatttgggaggtccatgtttacagggctagtncnttnttgtccngaccggaagncatggcattgttgggctnctncntaaaacattccggtgtccatcngaa

SEQ ID NO: 67642 - DNA, 255 bp, Glycine max
  unsure (1)..(255): unsure at all n locations
  Clone ID: PAT_MRT3847_32094C.1
ttgttatggggtttggctgggatgatagatgaaatatttaaataggtgaggaagagtatgtgttgtgtattgtgttatttgagatatattggaggtttgagtggttgcatgagtgggggaatgtgggttattgaaggtttaatatagtgtttttttggtnatggaagatggtgagggggagggtgagtgttatatttggaggtggggaagttgtagngtgggatggatggttggatgggggtgtgggtgtgagtg

SEQ ID NO: 67643 - DNA, 296 bp, Glycine max
  Clone ID: PAT_MRT3847_32095C.1
acgcccacgcgtccggagaataacagatagagatccatccatcaattccaatggccgggcagcggtcctacttacagatcggcgagttcaaagaagccttcaccctcttctacaaggacggggatggttgtcttaccaccaacgaacttgggaccgtgatgcggtcacttggccagaacccaactgatgcagatctgcaagacatgataaatgaggttgatgctgatggcaatagtaccattgatttcccagaattcctgcatctcatggctcgcatgatgaaatacactgattca

SEQ ID NO: 67644 - DNA, 338 bp, Glycine max
  Clone ID: PAT_MRT3847_32096C.1
cacgtggtctttctccaagtcagtgagcctcattctcattcttgctacttcagaaactcgctgcccttttccaaagcgaagacgccactccgtttcatgactacttaatatgtcatatatgccataacgtatgtacagtatgcataaacatggttgtaatgcatggcgtgatattgtgtttattttcctgtcactagttttttgagtatgttcctgacatgctgtgttcagtactattgttaccctgctgaactattccaaaattgggaactgatctgtttctaagtcatcaaactttagtatacaaacatttcatgtatcagaattcaaattgtacc

SEQ ID NO: 67645 - DNA, 361 bp, Glycine max
  unsure (1)..(361): unsure at all n locations
  Clone ID: PAT_MRT3847_32097C.1
cggctggccagctatttatcttgggtgttatctgaaaaataccctctggtaatcgattaccatttgtgggtaatcgattacagggtttaaaaattgaaacaggatgtttagtagcttctggtaatcgattaccaattgtgtgtaatcgattacacagtgtgatatgctactggtaatcgattaccagttgtgtgtaatcgattacatagtgttacctgctactggtaatcgattaccatttatgtgtaatcgattacacagtgtaacttttagattccaatgtgcaaaggctgtgtaattcgtttttgggcactggtaatcgattacaaaactttgtnatcgattaccagagaggaaatcc

SEQ ID NO: 67646 - DNA, 421 bp, Glycine max
  Clone ID: PAT_MRT3847_32098C.1
taggcattggactccctctctaatttttttcaattaaaactatatttatttttaatggatggactgatctttcaaaggcagaggcactttaaataaatggcttattattattcataggctaaactgcgattcattcatgagaaatgaaccataacctttacttcacaatataaaagaatgcgcccataacaattaatatttcaaccgattcagtttaaagacatgtggatatctacttgggccatcctaaacgtaacaatttgcaccttaactgctatcgcactatagttcctactacgaaatggaccaatacattaattggtacttgagcacatgcgacagatttgaacactaaatccatgaagaggtcttatgtgaaacacatcaaccattgcattggcaaaatcagatttccagcttg

SEQ ID NO: 67647 - DNA, 229 bp, Glycine max
  Clone ID: PAT_MRT3847_32099C.1
gggggggttgccacctcacatcccaaaccgacggctatggcaggatcatactacgtttccaccctcttatgcttacttcttgctccagaggcacaccctcctctcatcatgactcgctttccacttcagatgcttcctgcctagcattcacgacctggaccaccactcgtgaattgagctgtcctccgtggctaacccatgccacgcgcttgcaagcactctttttttt

SEQ ID NO: 67648 - DNA, 437 bp, Glycine max
  Clone ID: PAT_MRT3847_3209C.1
aattcggctcgagaagagcatgagatggtagtatagggatccgttggcatttggcaatggcgggtctcccctttctcctctactttaaatcctgactatcaatttttgtctcaaactacaaaatacagatccccaacatcacaaatctcaataccagtttctccttaatttaataattataaatctctctcgaatcttccctgtttcagtttcagtctcagtctccctccccttccatgtacactgactcctcacccttcacttcactcactctcacgcgcttccctcaatcaataaatgcagaccagaacactaattaaatgatagagatatatattcaaagcttcttcttcttcattatgcgacgctgaagcatgttcttctccgtcgtggacacccacccctcgttctctgatatcgggccactgacatgggct

SEQ ID NO: 67649 - DNA, 431 bp, Glycine max
  unsure (1)..(431): unsure at all n locations
  Clone ID: PAT_MRT3847_320C.1
ataaaaggagattttacattactagaacaaactttacacatgaaatgttatatttcaaatattgctactcatgaagaaccatgtttcaacaaataaaactaaatttctaaacccttgccttgaggtatatgactaggggtgggacttcacaacaaaaacactcctccattttagggcttaactattttcaaaattgaaagagcatggattggtggcaacttggattggcagaagctctgccacaattccatcatctcttccgagtcctttgtcagtgcctcgtacattgaagttgcaatacttcgtgccgnatctcttgcctcaggaagtctatcattcagtaaattcgccgccacttcaatcagtttagccaaaccaaactgctccatttttttaagccccattttggagacacagttggagagagaaac

SEQ ID NO: 67650 - DNA, 829 bp, Glycine max
  Clone ID: PAT_MRT3847_32100C.1
tttcctttcgtccgcccacgcgtccgcccacgggtgggtcctctcgttactccgcgggggcgccgaattagggttttccaattcgcagagcaactcaacacaacgaaccaaaccaacaatgtcgcagccgcagcctcagtcgcagccgcaacacgggcaagcggcgctggagcaggtgcagtgcttcggtcgcaagaagacggcggtggccgtgacctactgcaagcgcgggcgcggcctcatcaagatcaacggctgccccatcgagctcgtcgagccggagatcctccgctttaaggccttcgagcccatcctcctgttgggaaagagccgcttcgccggcgtcgacatgcgcatccgcgtcaagggcggcggccacacctcccagatctacgccattcgccagagcatcgccaaggcgctcgtcgcgttctaccagaagtacgttgatgaacagagtaagaaggagatcaaggacattctggtgaggtacgatcgtaccttgctcgtcgcggatcccaggcgctgcgagcccaagaagtttggtgggcgtggcgcacgtgcgaggttccagaagtcttaccgttgaaggagaatggtggtgtttttgtgtttttttgtttttggttcggttcatgttttatgctgtggaaaaaatgaaaacttttgttggtggttttggtagttttataattttgatcgttttttttataatggttggattatggattcttgttttgattcaactttttctgtttaggtaatatgaaggtacggattattattgttataaattctagtttgaaatgttagggcattttcttgtgcc

SEQ ID NO: 67651 - DNA, 296 bp, Glycine max
  Clone ID: PAT_MRT3847_32101C.1
gttttattttctgatacaagcaatgaaggaaatcaggtatcactctttagtagtgtatgctctgcctatctgaaaaaaagcacaccttcttcaattgttgtaatgaagtgcgaagcgcagtgtttgttaaacaagttattgggactggtgtgtataaaacacacacctggcagggcgtctactgaacaagatcctagtttgggaaacgcatgaaagagactcaagaactgcttaaatagagatccctaaattgtaattccattggacgatgtttaacaacgtagacactggaaaaa

SEQ ID NO: 67652 - DNA, 946 bp, Glycine max
  Clone ID: PAT_MRT3847_32102C.1
aattcggctcgagtgcgagaagacgacagaagggggacacttatggtgtgtttgcggaccctgttgatccagaagagcttcctgattatcatgatgtgattgagcatcccatggactttgctactgtgaggaagaagttgggaaatggatcttatactaccttagaacaatttgagactgatgtctttttaatttgctcaaatgcaatgcaatacaatgcaccagagactatataccacaaacaggcacgatcaatacaagaacttggacggaagaagtttgagaagttaaggattggctttgaacgctctcagaatgagctgaaatcagaacaaaaagcaggatccaattatttggttaagaagcaaccaaagaagccactggcacgtgcctcacaagaacctcgcttaactgatttggttttggtatttttccttgctactatatgagatgtacaaacaactgcacatctgatggatatgggtgtcaatgcagggaatgctaattagtttgcttggaaacttgtctctgctttcatactttgccaagaagagagaaaaggaagccatggtagtgcagacgttgggtgtggtttcaacatacgtggtccttgttcagctggcattggctgaaaccatgccgttgccttactttttggctacttcagttgttgtcatctctggccttgttctgaatttcttgaattactttggtatactgaatgctggaatctggcgcttttgggaagatttcattacaattgggggtttatcagtgcttccccaagtaatagtgctttccttctctcaccctaggatcaatacattatcaatttataatggcataatatctgttcacacagttggatacactattcttttatcacaacttttactacttatctcacactgcctaatttacaatctggatgcagacggacgcgtgg

SEQ ID NO: 67653 - DNA, 107 bp, Glycine max
  Clone ID: PAT_MRT3847_32103C.1
ttttcacatattaacaatagtaacattcgctactaaaagaactattagacatattaccgcaatcaagttcttgaaagccttgattgcgggcatgctgggctgccaaa

SEQ ID NO: 67654 - DNA, 219 bp, Glycine max
  Clone ID: PAT_MRT3847_32104C.1
catttggaatcctgtttgcacaaaatctatgactaaatcacagaaaccaaacccgtgttttgatgcctggagagaggaattgctaaagcgaactggttttattgccatacattagagtcactggaaggaccgccaccccaatgacaagaagttcaagtctatatagaacggtttattccctctcaagaaaggggtccccagacctatagtattttaaat

SEQ ID NO: 67655 - DNA, 749 bp, Glycine max
  unsure (1)..(749): unsure at all n locations
  Clone ID: PAT_MRT3847_32105C.1
attcgagctctttacccggggatcctctagagtcgacctgcagcaacattgattaaaatggcctaaatggctaaatccaacctttggttgtttgatctagttgcaatatgggaaagggataaatgtgatgtgatgggtagggaatggagaaaaagaaaatagaaaaaaatatcttcatttgtgttttttcttgttgagaagaaatgttactacattagcaattgttatatcttttatcaactttcttatctttcttaccttcccatctgtcaacgttacatcatatatggttaacgaatatgactagaaaaacttgtcatttagtaacaaaaagttggcagccaattgtatagcaatcacatactgcatctattgctaaatcattaataccaataaccaaaatttgattggtgcggaaagctaaacattagcaattaacggtattatatcgacattagtattttttcttttagtaaaaaaatatgttactaaattatgaaatattatataactttaaatttgttcaaatatactctaacagatgcaacttattaaaatattctattaaaaagcacacatcgtgccactcatacttattttctaaaaaaggaatatattagcaatttacaacttagttaaatttttttaaaatatttnaaactaccttgttaaaatatttttctaaaaaatcgagataatattgaatttacatttaccctcacaaaatagttgaatcggcaatttcacta

SEQ ID NO: 67656 - DNA, 205 bp, Glycine max
  Clone ID: PAT_MRT3847_32106C.1
ttacccacccttacggataaaccaaccaaaaaaatccattgtaaatccaacaggtttgtcttgtggttggcccaagaattaatgggcttaattaatttttacttacaaggttattaaatccaattttgccccaaaaggcaccaccttggcaagggttttttccaattttgaccaaaccaaagggttaaattgaaaaagggacctt

SEQ ID NO: 67657 - DNA, 123 bp, Glycine max
  Clone ID: PAT_MRT3847_32107C.1
agaataatgaaagtcaaagtagatatgtttagttattaggggatcaccggtgtaaactgtgatgacagtttatcagaaaagtagatgtgtttcacttgctaagaaaagtatgtatccacctta

SEQ ID NO: 67658 - DNA, 405 bp, Glycine max
  Clone ID: PAT_MRT3847_32108C.1
ggctcgagggcaaactgtatttggtgacactggaaacacggatcttactgtgcaggctcttgggaggaaaaggagagggtgggatcgaccccctacaatataagggaatctgaccgggttggttttatcagaacgtagggcatctggctcaggctgggcttattgtgaggaagcgacccacgattcactctcggtcacatagacttcgaatgaaagaggccaataagagaggacagcactctgcatatggagagcgctctggtacaagggaggccatgcattcaactgaaagcctttgaatgatgagatagcgattgctgaaacgctgggttggaccctgcaggggagctagcaagatggactagcacatgtgtcatgacatgtacatgaaggtcaagggtaacg

SEQ ID NO: 67659 - DNA, 304 bp, Glycine max
  Clone ID: PAT_MRT3847_32109C.1
tcagaactctggttctgaggaagattcgcaggcgatgatggaacatcagagaaagacgactagaatgatttccaaccgatactctgctcgccgatctcccatgaagaaacaaagccacttccactatctcgtccccccagtggctcagcctagatgagagatccgacacatccctgcaaccggtcacatcaccacgcagcagtgcttaagcgttgaggctgaaaactcggtgcttacggctcacgtgggtgagttgagtcacatgttggagtctctgaactagatacttgacctggtgaatgcc

SEQ ID NO: 67660 - DNA, 653 bp, Glycine max
  Clone ID: PAT_MRT3847_3210C.1
cattgttttactgtcagtagctgagtccaaaaccattgatttaaaaaagaatatagaacagagaggaagagagacaaatgggtttgggaatgagaagagagtagaaacaaccgagagaaacacatagaaaaaggaggcatagccaacctattcaaaccatgatgcaaggctgtgaggttgatgccattggcataaactacacgatccacacacacaaatcggagcacccttttaaaatcttcagcaacaaatctgcacatcttgacactgaacaagatggtaaagagccagaagaggaagcagaagttgaacaaagttgcagtggagtaaggcatgtgctgaagaatgtgagtttccaagccaagccatgggagatcctagcaattgttgggccaagtggagctggcaaatcatcactgcttgagattcttgctggtaaacacagccctcaaagtggaactgtgtttctgaaccacaagcctgtagacaaagctcagttcaagaagctttcagggtatgttacacaaaaggacactttgtttcctttacttacagttgaagaaaccctcatgtttagtgcaaagctgaggctgaagctttctcaagagcaactttgctccagggtcaagtcactgattcaggagcttggactt

SEQ ID NO: 67661 - DNA, 187 bp, Glycine max
  Clone ID: PAT_MRT3847_32110C.1
agctgaatcgtcggcactgcttcgtggaaaagagagtactgatctgattagtctacaaccttagcggggaagaacatagattggttaatcctctctatcactgtgaatcataagatgccttagtgctcaagcaaaaagaactcgctaatacaaattggaaacccacaatctatgttgtcaatcatag

SEQ ID NO: 67662 - DNA, 189 bp, Glycine max
  Clone ID: PAT_MRT3847_32111C.1
taaagaatgggcaacgtgtcaattccagcctcgcacaacggtgttctccatactcattttccgagcgtccaaactctcacgtggcacccctacaccttcaacgctcagaacttctcactctgcagaaactgagttacatggacctcatgacactaaggcaggatcgcttaatgtcaaagtaatctaaga

SEQ ID NO: 67663 - DNA, 355 bp, Glycine max
  Clone ID: PAT_MRT3847_32112C.1
tactggttggttagttaccttgttagaaaataatatcctttctaagagtcattaaaatgatagaagaaaattaaaggacctttttgttataaaatggtcaatttttgacacctagctagaaaaagaaaatgattcgaatggtgagttgtgaaaggctggcttacttggatcaatctcggtgctcataagttccagcacaatgtttcttgttcctatcctatcattgatggcatccaaatgcttcaagatagtctctttgaaatcctatttgattttattcctcactatcaccaccgctctgactttgaattgtactggtttctctgcatgcactgtcagtgtggtctttatcaaa

SEQ ID NO: 67664 - DNA, 463 bp, Glycine max
  Clone ID: PAT_MRT3847_32113C.1
cggacgcgtgggtagccatgttcgatccaatatccagcactggtgtcttgagaggatgagtagcgagaggaaagtgaagcaaagaacgatgagtaccaacagaagaagagagtaatggagttccctgattagtttccaaaatcaacaatacaaaaccacacaaatttcattcatatgttatcaaagccaagtgatgtacctattggaaggtgttgagggatgccaaaatggagcctctaatccagacactgtacttcctctttggtggtgccaccaccttaattttcatgctgcttggtgctaatgttgtgatctccttgctcatcctatcagcaatgccacggaacattgttgagccatcaccacaatgttaccatagaggtccttcttgatgtcagtatttccaaaatgattttctaaagcattggcagatgcaagaaagtctaccaaactcttcaacagc

SEQ ID NO: 67665 - DNA, 1904 bp, Glycine max
  Clone ID: PAT_MRT3847_32114C.1
gacccacccgtccgcccacgcgtccggccaagcatgctactactatactagtgttatgcatatccctcggtaatggatcaacggttgagatcgaattccaccccttgatccaacggtggaaaggtaaccgcgttcacgaagccaacccatgaatccatcatcatcttcttagacccttacacaaccctgacctctctcaaaatccagattcaacccttctctctctctcacttacaagcgtaatcaacgaacttgcctctttctgttttttattttttattttttcgtattttcggtattagaaaaggaaataataacgagagagctctagaggcgcttgcgtaacggtaattgcgaaagaagatgcaaccaacatcgaacggctctgactcgaaagcgacggagcagcggacgccgccgcctcagccagtggccgtgccgccgcagtggatgccgatgcaatacccggcggcggcgatggtaatgcagcaccacatgatgccgcctcagcattacgcgccgccgcagccctacatggcctaccaccagtaccagcagcaggtgccgcaagcgcaccacctgggatccagcgccgagaacaagaccgtttgggtcggcgatttgcatcactggatggacgaaaattatctccaccgctgttttgcttccaccggcgagatttcctccattaaggttattcgcaataagcagactggtctatcagagggttatggatttgtggaattctattcacatggcacagctgataaagttttgcagaattatgctgggatattgatgcctaacaccgagcaaccgttccgcctgaactgggcaacatttagcacaggagacaagcgttcagataatgttcctgatctttctatttttgtaggagatttagctgcagatgttacagatagcatgttgcatgaaacttttactaatagatacccatctgttaaagctgcaaaagttgtttttgatgccaatactggccgttcaaagggttatggtttcgtcaggtttggagacgataatgagagatcccaggccatgactgagatgaatggtgtttactgttctagcgcgtcaagtgagcagtacagtaggagtacttaagcacccactctcccagtatggtgagatagtcaccgtcaaaataactgttggaaaaggatgtggttttgtacaatttgcaaacagaaataatgctgaagaggcattgcagaagctaaatgggacaacgattggcaagcaaatggttcgtctttcatggggccgcagtccagcaaataagcagtttagagcagattttggcaatgcttggagtggggcgtattatggagggcctgtttatgatggttatggatatgctttgccaccaccttatgacccaagcatatatgctgctgctgcttatggggcttaccctatttatggaggataccaacagcaagtaagctgagtgcaggagtagcactcacaagtcaaaacaacagatcgtgcttgaactagcaaattaacttgtaacttgcttggtctgttgaattcttgaagaatccctcctaattgtggagtggagttgaattttgataacctgaggtagcactgtaggaattcaattaatcattcgtttagactcctaggagtaatcagaatttaaacttgtttgttggaataatttaaatatgcttaagtttgccctcttgcttgcattttaattgtttttggcgcttcacattgtaaccttcatttttacggcttgtttggttggaggagagggaggagaaacagaagaagatggaaatgattaaatgtgttttgtatatagaattaggaaggagagaattaaaaagttagtgaatcccacaaaaatttctttactttatttctgacaaaaa

SEQ ID NO: 67666 - DNA, 893 bp, Glycine max
  Clone ID: PAT_MRT3847_32115C.1
ggctcgaggtttgacttattatatttggaaaattatatcaaacccgaaaccgattcggttttccgctggacagacaaagatcgctctcatctctgttcaaatttcaatttcaaacttagtattactccaaatttcaatctctccccattttcacttctaattttcaattcccacttatttcggaatcacgctcactcactctagactagtattaccccaaatttcaattcccactcatccacctagggttttctttcccacttcgaagctatgctcaatttcaattcttctctcgctccgcgtttcggcgaacgaatgacgccgttctggtgagctttggattcgtttcctttcgttccccaacgcggattcgttgctctcgtttctcacgcgattgttggaggagtcgtatcgtgttgcgtttgttgaccgaggaggttcaattagggtttctcgaattcggttttgtgatggggatttaggttttgacgaacgttggtgttgttgtttttgtggagtggggaatttgtgaagctaagagggatgttttactcacagtttattttggccaagaaagggccacttgggactatatggatagctgcgcatttggagaggaagctccggaagaaccaggtggcagataccgacattggcgtctccgtagattccattcttttccctgaagtaccaattgcactccgtttgtccagccatcttctacttggtgtggtgaggatatattctagaaaggtgaattacctttttgatgactgcagtgaagccttgcttaagattaagcaagcttttcgttccacagcagttgatttgccacctgaagagtccactgcaccttaccattccatcaccttacctgagacttttgatcttga

SEQ ID NO: 67667 - DNA, 662 bp, Glycine max
  Clone ID: PAT_MRT3847_32116C.1
ttttggacaattttgcaaacagaaataatgctgaagagggcattgcagaaggtaaatgggccaacgattggcaaacaaatggtttgtctttcatggggccgcaatccagcaaataagcaggttaagagcagatttcggcaatgcttggagtggggcgtattatggagggcctgtttatgatggttatggatatgctttgccaccatctcacgacccaagcatatatgctgctgcttatggggcttaccctatttatggaggacaccaacagcaagtaagctgagtgcaggaacaacatggtgcttcaacgagcaacttaacttgtaacttgcttggtctgttgaattctgaagaatccctcctaattgtggagtggagttgaattttgataaccggaggtagcactgtaggaatccaattaatcattcgtttagactcgtaggagtaatcaggattaaacttgtttgttgaaataatttaactatgcttaagtttgccctcttgcttgcattttaattgttttattttggcgcttcacattgtaaccttcacttttacggcttgtttggttggaggagcgggaggagaaacagtagaaatggaaatgattaaatatgttttgtatgatagaaatagaaaggtcgtaattaaaaagttagtgg

SEQ ID NO: 67668 - DNA, 366 bp, Glycine max
  unsure (1)..(366): unsure at all n locations
  Clone ID: PAT_MRT3847_32117C.1
caaaatcctccttctnccnnnnagaaaaacagaaccaagggtaatttaaatatttaacattcaatcttctaacaacatacactaacaacaagtggccaattcaggggcatggggcctaacaccaacactggaagcaccctatttgtaccccacaccttaacgactcccgaaatgtaaccacccaacataaacttcagaacctggaagcgcctaatgctcgaactgactcataatcggaaccaaagttaccgaatccttagtaaataatgaagccaacgttggttctcatggcacccgcatctacccctattgtggtcttctcgcaatcgaccgactcgtgggccggacacctgggctcgacccggg

SEQ ID NO: 67669 - DNA, 245 bp, Glycine max
  unsure (1)..(245): unsure at all n locations
  Clone ID: PAT_MRT3847_32118C.1
ctcttgcatccaacccttggaattaagcacgttatttcttagggttgattgcataaaaattataattaaacaagatgggaagcgatggtgtgaggaaaccgagattcctatgccttcatgggtttcgaacaagcggagaaatattgaatacacagttacataagtggccacaaacggtgtntgacaacgtcgatctcgtgtatgtggatgctccttnccttcgcaaggcagatngatgtagaggc

SEQ ID NO: 67670 - DNA, 345 bp, Glycine max
  Clone ID: PAT_MRT3847_32119C.1
cgaatctgcaccatttcaaaatcagcaacaaacatccatacgggggggaaatataaagaaggagacggagaaagacaatgagatttccgtcaaatgaccaggaacctaccctcttgtgctgatcgaaaatacccaccaaaacaggttccacctaacaacatttacctcgttccagacatgaatacccaacccatctaacaaaccgtgtgtcaatgacacgattacatacgctttaatctcatcaataaactccttaacatgcacatgaatcacactcccttgaatgcccatcatcaatacgctttcaacctatacctttccttccatgttttaaaaaaactcaac

SEQ ID NO: 67671 - DNA, 513 bp, Glycine max
  Clone ID: PAT_MRT3847_3211C.1
catccacttcagttacagattgagctggttgtgttgtagcatatccagtttgttatggaggagcatgatagtttatcagaacacaatatcattgtgagggaggaattgaaacttgaaagtaaagaatcgaaaatctcgtattcaagttatgagccccccaataaaggaaaactaaacttacaccaatacacaatgtagaagcaaaaaatagtgcacttaatgtacctcattcccttttgtgggagcaaacctgttctgcagtgccactggacattgtgattttgtgatacaaaaatacaacagagttattttcacatgccccagcacttgataaaacttcaattacaatttacattttattcttcaataaaattgatctcttttctctttcacaattttctgtttaaaccattgccaaatgttcaaactccaacctaagggtgccctcaaaatctgagagttaaatggacatcacaccatcatgttactcatcaatatgttcatctttcataa

SEQ ID NO: 67672 - DNA, 528 bp, Glycine max
  unsure (1)..(528): unsure at all n locations
  Clone ID: PAT_MRT3847_32120C.1
cccacgcgtccgctacttcccactttttttaagcttcactttcactgtttctgtttgttagggttgcagttcacacttcacttcattttttcagtgcttgtagggttttgtttgtgggacgaggaattagctatagtaattgaatataataatctaatgatattgttggtatcttatctctcaggctctcgctcacacgtgtttcttaactaatggcttcaccactctataatcatttaggatttcttgaaaacaaaaggaatgatcttccactgatgcatatatagttaattaaatatataagagtgatgttattatttacattttcatgctatatactttgaagtcatcgcaaacggtacgttgctataattatatgggtgtttgcaaatnncanaaaattctaaaatatatgtatccagagactagaggacttgatacttgcaacaagcatctacactatgtttttccttttaacttatgagcacttgctgctgtgtgcattgggaaaacacgtgaaagagtgta

SEQ ID NO: 67673 - DNA, 208 bp, Glycine max
  Clone ID: PAT_MRT3847_32121C.1
ccaccaccaaattatcctcatccaaacaaggcacaatttccatgtccctaaccccacccccgtacgacctccagtccttcaaattccccatccgccagctcccttccccgatctcaaacccctccccgccgcccaagttccggaaggtcctccgggactctggcgacagcggcgaggtggtgcaggacccgtggccttacggccctcc

SEQ ID NO: 67674 - DNA, 280 bp, Glycine max
  Clone ID: PAT_MRT3847_32122C.1
ttttttattagcaaccttatccgattcataaagattatagcatagagacgatactttcatactcttattcaaagaacttgtacaacaaataagacgcttaacactgctccaaatggaacttgactttattccacgatgaatactagaacctgaaataaaataaaagctttcaatacttggttggtggtggaggactcacgtaatgataaggagctggggcagacgacattggtggtggaggtgatttgtagtagtaaggaggatgagaagtgggagatgg

SEQ ID NO: 67675 - DNA, 1599 bp, Glycine max
  Clone ID: PAT_MRT3847_32123C.1
aagacccccctcacccatttcaaataagaactgaaaaccctcacccaccctaaacccccttcttccaaattcccaatttcttctgccgttcgatttcagactcttcattcgggatttgccatagcgattccttggttctcattcattcgttgcgtgctcgttcggctgttctcgtcgttccagtgaagagttccgtttcagtcatacaaccttgcatgagaattgatggcgccaatcctgcagagctctcagccatgggtcgagaaataccggccaaagcaagtgaaagatgttgcccaccaagatgaagttgttcgagtactaacaaacacccttgaaactggaagttgcccccacatgctcttctatggtcctcctggcacgggaaaaactagtactgcccttgctatcacccatcagctttatggtcctgagctatataagtctagggtgctggagttgaatgcatgtgactatagggggattaataattgttcgtgctgctgttgctgttgttactaatcagggtaaaagtggttatccttggccacaatttaaattcattgttctagacgaggcagattcaatgactgaagatgctcagaatgccctgaggcgtacaatggaaacttactctaaagttacaaggttcttttttatatgcaactatgttagcaggattatagaaccacttgcttcaaggtgtgcaaaattcaggttcaaaccattatcagaagaaatcatgagcagccggatattatacatcggctgcgagaagacgacagaaggggatgctgaggctctttcaaccctgagttctatttctcatggagatcttcgtcgggcaatcacatacttgcagtctgcagctcgcttatttggatcttcaatttcttcagagaatctgatttctgtgtctggggttgttccggcaaaggttgtggaggaacttcttaaagcttgcaaaagtggtaattttgatttggcaaacaaggaagtcaacaatttcattgcagagggatatccagcttctcagatgcttactcagttatttgagtccattgttgaagaaaatgacttatctgatgagcaaaaagcaagaatatcaaagaagctgggtgaagctgataagtgcttagttgacggtgctgatgaatacttacaacttcttgatgtggtcagcaatacgattaaagcttttaacagcttgccagaagcatttgcttacgaatgttagatattggataaatgtaaagaaaaagaatcacgtgtaattcggtatcacaaaatcagatttgattacgtttttaacttgctttatgtagaagtggattttgaaggattcatccagcttgggtaattgtactcaagtaaatggcctcgtaacaagcaatgggataactggcataggacattcctgcgtacaaaattgacgcttcttcggattaagtgaagagtatataacggaacgaacaattttactgtttttgcactcatatataaagcagttaagcactcctttcatctcaattccattgtttcatcccagaaggaattcaatgcaattttccaatttaaattcacccgcaattcattctc

SEQ ID NO: 67676 - DNA, 357 bp, Glycine max
  Clone ID: PAT_MRT3847_32124C.1
ctcgcaccgagccaacggtgttgaatccatatcaactgaggtgtggatccttattgtaaccaatgccactcttaatcagagtccagccaggaccttgaccggctaatacccgcaacaccaggaacgataccacagatgccctcatctcaaacgcaaaatctgagtacacctgatcaggcaccggcaatgcctaccttatgctaacgccctacgtgcttatcacatcagctggctttattttcgcaaacatggcacatgccaaccatctgttggcacgtggcggaaagccaccgatcaatactacagaaactggtaccccaaactcgatctttgcctcgttaccacccaaatcctgga

SEQ ID NO: 67677 - DNA, 1538 bp, Glycine max
  Clone ID: PAT_MRT3847_32125C.1
agggatttccttcgtgtccggcccgagccttcccctttccgcattcagttttgagttcacccatcacagttttcttcttcttcttcttcttgtgcatggcaactgaaccgagtgagagcacacaaaggaacacccttgtcgttagaaagccatgttttggcctcccaacaggttgcccacgcgtccgcccacgcgtccgcccacgcgtccgctgacgcgtgggcttcaacttggattaccaccctaactaccctgattctgatcagattccttactttgaggatggtgattctgtgacatacaataatgagaaggaggggatcattgagtgcttgaaaaggaatgtgggtggtgatttagatagtgaggtttcttctctccctgattggataccaaccaaagtgatggccaccacttggcttgctgatgcacttgagtatgaactgtgggtgggatgtgatggttcctctgcttatagcatctattattctgatcttccctggcctatcggcaaggttctcttttggaagaaagcttattgggtaaagcagaaacatgggataagtgaagagaatgtagaagtaaaggaagaagagatttatgggagagcaaactctgcatatgatgctctgtcgacttggttaggggaacaaaactacctttttgaaaacaggccatcgagcttggatgctatttttcttgcacatgcattagttgttcttcaagctttacctgaatcatcaattttgcggaccaattttttggaacatgccaatttagtgagatatgtgcaacgatgtaagacagaacttatagtagctggtacttctgcttccaatgatccatattttcatgcagacccatcatcatcagcttctagaggtcgttcaacttcaagttcaaagcccaagactaaacccaaaaggcagccgccaacaaaggaggagaaaaccttgagaagaagggctaaatattttgtggtagcacagctagttgctgttgttcttttcgtcagtgtcttgtctggatatagaaataatgctgctgacatggagttagacaatgacgacttgggctatgaatgaaaatacattcatttgtttatcttctcaatgacaaagcctaggctgactgcatgttgaagatgcatccccgtttcttgtgtatgatccaaatatagaagcacggaaaattatcattcacttcaaaatttcctatcataggatccattttgataattttttaagagtagtagctttacattttcattggaatatggtgcaggttttttacttgtggtaaatgaaccttggtttgagaggatctatgggtctgttagccttgtgcatgtaaattttgggaggggtatgtttacaattatcttgtgctgttgtgcatactgtcagatggagatgccaaatatatcagtccttttatgagagacaagcctacgaaggataagtaagaaataaaattaatttgaaatggatgtatttcattttcatgtaccaagaaagatcacatttaatttcttcacg

SEQ ID NO: 67678 - DNA, 487 bp, Glycine max
  Clone ID: PAT_MRT3847_32126C.1
gtctaattcggctccaggtgcatggcaactgaaccgaatgagagtacacaaaggaacacccttgtcgttagaaagccatgttttggcctcccaacgggttgccctcaatgcttatctgcttacatttttctcaaactctctcaatttcccttcaacttggactaccaccctaactaccctgattctgatcagattccttactttgaggttggtgattctgtgacatataataatgagaaggagggtatcattgagtgcttgaaaaggaatgtggatgatgatttagatactggggtttcttctctccctgattggataacaaccaaagtgatgctcaccacttggcttgctgatgcacttgagtatgaactgtgggtgggatgtgacggttcctctgcttataacatctattattctgatcttccctggcctataggtaagatcctcttttggaagaaagcctattgggtaaaccaaaaacctggga

SEQ ID NO: 67679 - DNA, 1178 bp, Glycine max
  Clone ID: PAT_MRT3847_32127C.1
ttttttttttttttttttttgggatggaggtgcattagattaaattaaagcagagccatttttacaaaaaaaaaaaaaagagctcatgttataaatttgcttaccccttttttgctcagtatggtgagacaaaacactacataataaacaaacaaacagagagcagaatactatgaccagggatctatgacaaattaacaaggtgttgtatttttgtttgcaattatatacaattatggcagacaattgttctatatgttcatgataaataagagagcagatatcaagagtcaactacttacataaaacagtaaaatgagccattaggtgaaaatgatgtactatggctttggtatatcaagcctcaaaatttggtttatccaagagaaagttcagttcaagctgcagcctcaggcaatacttaaacctgatggcttgttcactactggtgttgttgctggaggcagcaatttctcgatgtcctttgctccaactttagcaaactctttgacaagcatgttcatatatccggataaagaatccttgaatcgctgtgagcagcttctgtctccctcgtcaacatcctgaacccctcctttgaccaaacacccaacttgagcaccttccatgtatgccttacatgccaccagaatatcgctagctcgactgcagaaatgccccttaacaaagtcctcaaaattctttggaggctttcgtatcatatacatcatggtcctcaatgatagaatgaatgtgtcctcattatactgaaaagacatcttttcaccatttgctgaaccactcatgtgtgcatatccaggttcattaaagtaaggcttagtattcagtattagaccttgtatagagaccagaacctggagaattgttgaaacgcctggaagccacttctcatttttgctgccggaccaggtgttaagtagactaaggcatactttgccacaagcatacagatttgggttgagccgaagacctccagagtggtagtggactttcggcggtacattgggataggcacttggaaagaaaacatcaaaaaagaaaaggccatcatgataaggagtcccttctgctccaataatcacagcccttaaaagatccatccttgactcaaaaactcggacaaatattgaagctggcaaatccttctccaaaatcca

SEQ ID NO: 67680 - DNA, 322 bp, Glycine max
  unsure (1)..(322): unsure at all n locations
  Clone ID: PAT_MRT3847_32128C.1
atacgnaaacncggcggtgcggcacaaggtctttaccactacccgccatgctcattttttctatcttcgaacggaaagaaatggggtggtttttgttagcactcggacctacacttaatatctgtcttgagatctaacatttccttatgcctgcaaatctgtctcacatattgcacttgggtatcagtctcaccagatcaaacctcctttttcatcaatagtggtgacactcttacagaaatgtctaatgagaggatttaatagtctaagcatacacttatggctcgacccaacctaatcaaggttgtcaatgatctactat

SEQ ID NO: 67681 - DNA, 2268 bp, Glycine max
  unsure (1)..(2268): unsure at all n locations
  Clone ID: PAT_MRT3847_32129C.1
gaacatacgataaggtcaccaaatagaatgctgaaccagatgaaatgatgtacaagtcccctgtcttcaatctatttggtgaacatatgacaaggtcatagacttcacattattacctcaattcctgctcaaagtcatgggaaacaaaactacccttttgcttttgctctttgttctttgccatggagtggccacaacaacaatggccttccatgatgatgagggtggtgataaaaagtcaccaaaaagtttgtttttgatgagcaactccacgagggttttcaagactgatgcaggggaaatgcgtgtgctgaaaagccatggtggtaggatattttataggcacatgcacattggcttcatctctatggaaccaaagtccttgtttgttcctcagtacctcgactccaatctcatcatattcatccgtcgaggggaagcaaagctgggattcatatatgatgatgaactagcggaaaggagattgaagacaggggacttgtacatgattccatctggttcagcattctatttggtgaacataggagaaggtcagagacttcacgttatctgcagcattgacccctctacaagcttgggattagagaccttccagtccttctatattgggggaggagccaattcgcactcggtgctttctggattcgaacctgccatcattgaaaatgcatttaatgaatcaagtaatgttgaagagaaaattgtctagaactaaatagaaagggctgtaatgcttcttatagaattggcatggctaatacttctgtcgtaaattaccacaactagctgcaggatgtcaaagagcaacagataacgaaaatgatgcaagaccaagaggaggatgaggaggagacacttagaaggcggtcatagaggaagcgcttggattacattttatttgcatgctgaaagagataagggaaaaaaaacaacgtgaagtaggaggaaactgttcaacggttctctatgacttgggaccagggaagtatggctcggaagctgtttatgtccctcgtgtccctggtaccgcttctgcagaacgaagctggatacgttgatttgcttttgtacacgatgaagatatcggtaattgaatcttgcatgtcatcaatatgcaaaaagaatgtcatcaggtccatgttgcagttgtcaaattttcgaatagagttaaatgtgggttccatgctgtatttgtgacagagaaacaagggcgtgattgttgtgcaaagagatttctctttctgtcaagctgcatcatccgatgtacccttagatttctttgacttagacacttctgcgaggaataaccagcctcactttctggcaattgctgtgtcccttctgagggccttgatggggccggagctttcggcggcgttcggagtgagcgaggacacgttggagcgcgctgttgatgctcagcatgaggctgtgatactgccatcagcatgggctgcaccaccggaaaatgcagggaagctgaagatggaagaagagccaaatgctattagaagctttgccaatgatgtggttatggatgttttttaatttgaacacttgatttggaataggggttatttggtagtgctagtgcctagtggaattctgtgttgagttttttgttctttatatttagttgagatgtgtgttgtgttcttgagttgtgaataaaaatctactttctttgtgcaagaagatgatggatacttgatttgttttgcacatgatgaaaataccggaaaatcatttgtgcatgtcatcaatgcaaaaacaatgtcagcagatcctgttgcagttgtcgaattgccgcatagagttccatatggtttccatgccttctttgtgacagaggaacaactgcaagagcagggtaaactgtgataattttggcagcctcactgtaccgtcctgcctcagtctttgtatacaacaaataatcgattgtaccatatatatccagtatctcattaaaccaatgtttttaaaaccggattggtagttgagtcaatggaggtattggttgaataacagtgattgaatcaataatgattcaatattatttttgtttttaaaatagttaaaaagagattttattatataaaaaaaatatcaaatcagattgtctggtttgctatcgggtttgttttgttttaaaanaaaaaaaaaaaaaaaaaaaaaaaaaaaaaaaaaaaaaaaaaaaaacagtggttgactcactactgattatatgttacaaaaaccaaactg

SEQ ID NO: 67682 - DNA, 134 bp, Glycine max
  Clone ID: PAT_MRT3847_3212C.1
caaatcatcttttcggatcagctaccgatcattgccttggcgcaggtctttgtcaatgatgaaagccactgaacttaagactcgaatcaaaacgatttatcatctcccggcaagaggagccgattttgtctatt

SEQ ID NO: 67683 - DNA, 395 bp, Glycine max
  Clone ID: PAT_MRT3847_32130C.1
ttttctttttttattttttttttttttttactttgtttttttttttgggtagggggtttttttttttgagaacaattcattaatttatttatccccctttcaaattcgggaataggggttacaactggggggggtcaaattccttaagattccggtttcttctccttaacaaaggggttttttcttttacggggggtggggtttgcaatcccaattgttcctccttttttgccaacacaacaaattggggggtttttggttgcattaaaaaaacactttttgctattactgttagaaaaatttttatggcctccgtgtcaaacccataagggtttccgaattttaaaggttatgcctttcctggtgcctacaaattatttttcaactaagcttct

SEQ ID NO: 67684 - DNA, 383 bp, Glycine max
  Clone ID: PAT_MRT3847_32131C.1
gtgggttctgccttgccccccttttttttctttttttttgatcactgccacttgcattccatggggatatttaaatctcccaaacctacggagaaaggaccaaaaagggcccccaaattattcttggatcgatacagcactctttaaaaaaaaaaaactgcgccaaagtaccgcggcccccccccccatacttacaaggaatatcttgatttaaaaaaaaacccaccattgggcaactcccaggaacttacagttcaaaattccaggccccagccttgggattcgatttttggtccttaacatacaatggtgacaagcccttcgatagtccaagcgggaaacgggatccaccttggcccctgtccattgttttcgaacaacca

SEQ ID NO: 67685 - DNA, 892 bp, Glycine max
  Clone ID: PAT_MRT3847_32132C.1
ggaaatggcgagttttgagtttttgcaagtgtcccaacattccacgaacaccactttttactgcctttgatttatgacttgacctgttcactacttcacttgtccgtccggtgccttttccacttccttctccaaccctctttcctttacacagaaacatagagcgttacggttacattacatagattgtcattaaaaaaccaaaaaattcaggacttgttgaatcctaagccttttttgaactgagaatggagttttcagtactaccacttttgtattctcttgtgtttcttctctcaaacccaacatgggtgtgtgggaatggagagttgagagcactgatggatatgaaggccagtttggacccagagagcctctatctaccctcttggagtatcaatggtgacccatgtgatggatcttttgaaggagtagcatgcaatgagaagggtcaggtggcaaacatttctctgcagggaaagggtctctttgggaagctttcagcagccattgctggcctaaagcacttgactggactctacttgcattataactctttgtatggagagataccaagagagattgcaaacttgactgagcttgttgatttgtatttgaatgtgaataatctgtccggggaaatccctcgtaagatcgccagcatggagaacttgcaagttttgcagctttgttataatcagttgacaggaagcattcctacacagcttggtgctttggaaaagctgagtagttgttgcttttgcagtctaacaatttaactggtgccatccctgctaatctaggtgaattgggtatgctggtgaggctagatttgagctctaataatctctttggttccatttccactagcctagctgatgctccttcactg

SEQ ID NO: 67686 - DNA, 388 bp, Glycine max
  Clone ID: PAT_MRT3847_32133C.1
gaggggcaaaatcaaaaaaataatcaaaaaaacccggggggggaaaaaaataaacagacttaaattaaaaaaaacaatgggaaaagggggggttaaaaacccaggacccccaaaaagggaggggggcaaaaaaaaaaaaaaaattttcccacaactataaaagaaaaaaaaaacgggttttaaaaggacccaatttttgggcccttttttcgggttcgggggccttttttaggccccccccgaaggggcgttggggggggcctcaaaaaaaaaccttaaaaaaagcttggaaggccctcttttaatggggccccttaaaaagggcaaaagggggcttccccctcacaaggggcaaaaaggacccctgaaccggggggggattacccac

SEQ ID NO: 67687 - DNA, 461 bp, Glycine max
  Clone ID: PAT_MRT3847_32134C.1
gggaacaagtataaagaaatgagtacgatttctaagattttcaattcatttttttgccctgggtttctttgatacatcaaaatatgacagattgctacaaggaatcattatggccacttgaccaggctaacacatggtatacagacaataacgggctttctaagtataaacatataaaatacctaaaagctaaatggtgtttacatgaccaataagagcccatcaaattaattacattgtcaaaattatccaatgagcacagtaacttctgaataccataccacgtcaagattcaatcaccaagtaggcaaagcggctgtcttatgctaagctccagtttaagttcaggaaattgctccaaatcatgggatgcacttaaaattgtcagtgcagcaatgcgcgcatcttgtaaaatatttccatcaacttccaatctggcaacaggaaactcaggaagatgt

SEQ ID NO: 67688 - DNA, 300 bp, Glycine max
  Clone ID: PAT_MRT3847_32135C.1
aaacattgctatgcctttttaattgggcgcttaaaacaaaacctggatcaacaaacaggggcctcccagtgtaaagaatgaagccctccaccttatgaatgccacttatccaacaatttttttcaacatatgctctccccctagatcacaaaggcaaccccaagggttttaaacccagggattcgggaaaaaaaaatcatttacgtttaaaaacctggggccaacttaggggcttaaacccaagcttttgaaaccacaggtgtactagggtgggccaaaagggtctccaaagggcctttt

SEQ ID NO: 67689 - DNA, 317 bp, Glycine max
  unsure (1)..(317): unsure at all n locations
  Clone ID: PAT_MRT3847_32136C.1
aacnnagaggaagnngggaaataagagngagnagatanagaatagnngnannaannagnagnnagagaggaaggaanaagnanagnaanggnggagaggnanangaggactaggagcganaagganagngagggcnnggcaaggagnggagnaaagaaggagaaggggnaagnaaggagngaaaangcngaannggaagnagacnnnggnagggaaagaggagnaaaagggatananacacnngacnaagnaaagananaaaggngaggagnagagaagnaagnggnaagaganaanangagaagcaaanggnagcc

SEQ ID NO: 67690 - DNA, 660 bp, Glycine max
  Clone ID: PAT_MRT3847_32137C.1
tcgtatgatttccggcaagattacagtgagattggaagattctactctgaactccatttttttcttaccgtttcggcttctccttccacgaggaaaacatagtgtctccctcctcagatctaaaatctactctctttttcccttcacacggaactgtgacgatgtcgagcgacagcgacgaagacgagcttctccagatggcgctgaaggatcaagcgcagcgagatgtcaactacggcaaatcctcctccaattcccggaagcctgtcgccaactacgttcagcagcccaagaaacccgctcctccgccgaaacagtcgctgggcaaaggcagagtcgccgccgacgacgatgattccgaaatcgagatgctcagcatctccagcggcgacgaggacaacgtccaatatccggttgctgcctccaggaacaaaggcgccacggctgccgcagccggaagaccggtgcgcgaagacgatcgcacctgggatggcgaggagcctagtcgctggaagcacgttgacgaggctgagcttgctcgtaaggttcgtgaaatgagggaaacaagatccgcacctgcacctcaaaaatttgtgggctccaaatttgaaaaaaaaggtcctgcagtgggtaggaaaggggcttacctacctgcagtca

SEQ ID NO: 67691 - DNA, 455 bp, Glycine max
  Clone ID: PAT_MRT3847_32138C.1
cacccccctgttaaacattgttatagccatttctttggtggctgaagacaaaaacaagggcaacaaacaggggcttcccaggattaaattgaaccttaatccgtaagaaaaacactaattcatcattaattttgatctttttatcaacacatagataacacaggctaactcctgggttatgaacatggggtttagggaaaaaaaaatcatatacattaaagagcccggggctaactaaggggggtataccccagcattgttaaccacagggttgaccgggtggcccaagaaggcctcccctgggccgtttcctgtgactttagctaggccaaagaatcctggcatcattaacatgggcagggctttctttcttgaacttcttgactttgagcaccgcaaaagtgtctgggacattttcttggcccatagggtcaaagtactggcccccagggaag

SEQ ID NO: 67692 - DNA, 631 bp, Glycine max
  Clone ID: PAT_MRT3847_32139C.1
ccaacggcgaataaaactacaaaaacaaaaacaaaagcccacatgcatgccaattcctcctcgttacttttacctgcaaaagtgccaagtccttgcatcagttctctattgttttggcctcaaagttcagatcatgctttccttttcatttaagaatatctcagaatttgagtacactgctaatgtccagatggaattggagtaaaatgtggataacaaacactttaaatagaagttactgacatttgttgttccaaaaaagagagaaataattttggtgttgtttgcatatattcaaagaaccagttacttttcaaatgcaaatgtctcagaaacataaaatgtcctatgactctagcaggttcaccagtgagcctgtgcaaaatctggggtcatgttgcttcctgcaaagtgggaacctagactactactcatcctctgataacagtagccatgcaacctacccttctgtttgtactttcgaacaatattgcaccctggaatcttctacaaacaacaatttaccttccctaaattcttcatctactgtcagtttctcacctaacaatagcccagtctcaaagctgcaatcaaaatcaaacgtgttgagttcgcagaattctcttgaact

SEQ ID NO: 67693 - DNA, 348 bp, Glycine max
  unsure (1)..(348): unsure at all n locations
  Clone ID: PAT_MRT3847_3213C.1
tgaggttgatgaattccatgatgctgattggagtgatctcactgaagcccaattggaagaacttgttctgagcaatttggacaccattttcaagagtgcagtaaaaaaaattgttgcatgtggctacattgaagacgttgctacaaaggccatcttaaggtctggcatttgttatggatgtaaagatgctgtgtctaatgtagttgacaagggtttagcattcttagaaatggccaagagattgatcctcacgagagcactattttgaagatttagtgcagctagagaagtatattttggctgaattggtctgtgttctcgagaggttangccattgttcagtaccgg

SEQ ID NO: 67694 - DNA, 2345 bp, Glycine max
  unsure (1)..(2345): unsure at all n locations
  Clone ID: PAT_MRT3847_32140C.1
tatcatagcaaaatacagaatacatagtgctgcntgcttcttgttctactttgatgagatcgagcttgctggtactggcattattaacataaatctagtgtttctttttttattttattttataacaaactacagagtaacttgactatgaattctgcgtaagaagattatgatgatacataaactaactaaaagtctgaaataacaaaaatgaaccagttgccattggatcatcacctccaagcacaagaggtaataagaacttgattcatccaaccaagacacagagccccatctctctcctctagagtgtaatgtcctcggtagcttcgctgaagattttttattgaacaagtaataaacgagttcagtggatatggtgcgaatccagccatagtaaaacgcgatctccacttcttcagaagctcgtgacgttccactctttcctccccttcacatgctattaagttgacaacttctcgagccaaacaatgctgctccacattaatcctttctttgtgctccctcggcagagcaacatcaattgattcaaaaatagccaagtagtagttcattgtctcaacgaaacgggggaagaatgggaggttgttggtatgtgattcttgctcaacaagtgtcacaatcttaggagacaagcactttgccaatctcaccaaccggtcacgatggtttcgactatccacacattcatctggaacatggtgcaacatcatggcaaagttcacagcaatagcttcaccaggttgaagtgcaagatctttgagttcaacctcagtgggagcagctcgtatagcatggaactcaaagggtacattatatgattgtgcaagccttgataaccttgctccaacaatttcaaggcctccttccctggcataagctgaagtggagtcatcaaaacctgttattctaatcttggggggtgctccaggtctgccagcaacagcttggattaggcttacccactgaattccctggttaatctgaaaatcaataatgtggacttcactttcctccttcatgacttcagcaatagctccatttgctgacatgtaaccaaatttgagatatggacagatttcataaagtagatgcatgtgtgaaaggagttcactaccagtaggctctttacatttcaagactttgtagattgtgcttcctgaagaggcaagccttgcaacaagagcctccaacatgtatgctcccaatcgttggattggattgccggagacggagaccattttacgcaactctgacatcaaccattcagttgtctccatatcatttcctgccactgcttttgcacatgtacaaagcatctcttttaaatcccctctagatatcatttccatcattctcttccacctttctgcctctttcaaaaatgaatcagattcttctggaattatggtatcataagtatccagaatatctgtatcatgtcccaacatagcactttcaagctctcttatcttgtgcctcagctcatcatcgttaagtgtcaagaaagatttgttttctagcgattcatcaacaatttcaagcgaattctgtgaactcaacacatttggttttgactgcagctttgagactgggctattgttaggtgagaaactgacagtagatggagagtttagggaagggaaattgttgtttgtagaagattccagggtgcaatattgttcgaaaatacaaacagaagggtaggttgcatggctaccattatcagaggatgagtagtagtctaggttcccactttgcaggaagcaacatgaccccagattttgcgcaggctcaatgctgaacctgctagagtcataggacattttatgtttctgagacatttgcatttgaaaagtaactggtgctttgaatatatgcaaataacaccaaaatgtttgtctggtataaacactcctgaattttctgatttctctctttttttgaacaacaaacaacaggtacttctatttaaggtccgtgatcgttgtccacattttactccaattccagctggacatgagcagtgttctcaaaatctaagatattcttaaatgaaaaggaaagcatgatctgaactttgaagccaaaacaatagagaactgatgcaaggacttagcacttttgcaggtaaaagcaacgaggaattggcatgcatgtgggcttttgtttttgtggttttattattcaaggttggcggttaagaccaaatccaaggcgaactagtgcaagaacttggatcttatctcagttaaacaatgcatgagtcttttgccccccatgaaaactacttttttttttctaagaagattcgaaagcatccg

SEQ ID NO: 67695 - DNA, 422 bp, Glycine max
  unsure (1)..(422): unsure at all n locations
  Clone ID: PAT_MRT3847_32141C.1
tttttctgcttcttgtttatctctaatctccatttctgcaatcttgtcaatgattcttgtttggtctttcctacaggacatccccaattgttttgccatttcccattgggctatggcatctgcatgcaggtttgtggaagcttcctcctcaatttggattgtcctcccctgttgaggttgtgtgtcgggatcttttgaatcttgctcgatggatccacctgtatgggctgctggaatggtgatacctgtttctgtctccgatgccatccatgtttgcccatgagctgcattgcactcctcaatgcatgactcattccttgtaagcagggcccatntctttgtgtacccttttttccttgagtaaactngaaaggcgctagtaggcttttttttctggtcgtgttgctggcccttttgcttgt

SEQ ID NO: 67696 - DNA, 285 bp, Glycine max
  unsure (1)..(285): unsure at all n locations
  Clone ID: PAT_MRT3847_32142C.1
cataatatctacaaactttaaaatgattaatttttgtcgactttcacttcctgttttttttatccagactcaancctaaatcttatttaagagattcaacattataaccaataactctgttggttacactgtcaccttataatcattaaacgcttactatattcttatatgtttattttatccttgcctgtcgtactgtggntttgaaaagcacatgcagtgggcacgccttggtcacagcctcattggagaaattagcataatcactgatacaccgcgttgatt

SEQ ID NO: 67697 - DNA, 246 bp, Glycine max
  Clone ID: PAT_MRT3847_32143C.1
gggaaggatcccatttcaaatagcattttgttaagcagggggtagaaaaaaattttacataaacaacaggaaagcatgggtttgacttgtcacttaacccaacatccaagtttttttatgttgaatatgaaccaatagggtactggctccaacaaaaaaattttttcaccaaaacactttagtctttacatccaaggctccaaatacacgtaaaggttttttttgaacgactataaaacatattac

SEQ ID NO: 67698 - DNA, 260 bp, Glycine max
  Clone ID: PAT_MRT3847_32144C.1
aaaaaaaattaaaaatataaagaaaaaaaaaaaaaataaagaagaggaaagatgaaaaaagatacaaaataaaaagggcgggcgttcaaaagagatacaggcttctatatccgggcataaaactccttcgctggcctatcgtgtcacaccatttcatttatatggccctcgtattacaacaccgggacggggaaaaccttgatggaaccaaaataaactgccgtgaacacaataatgtttgccccattggccgttatcac

SEQ ID NO: 67699 - DNA, 765 bp, Glycine max
  Clone ID: PAT_MRT3847_32145C.1
atgacgaagaagcgcagcgaacgctggctttgtagcgaagcggaagccgaagccaccgggtggcgtaaggccgtgcgatgaggcgacacatgcatgcagccaattctccaaatatgaaccatttaaccagcactgcgcgttcgcgccgttcgctgttgttgtttgctgcttcgacagttttcctacgattcggcaataaaattgccgatgcaagggaagcaaaaggcacgcccaagccagataacctgctgtccccagatgctgccctgaagcggctgctgatgggaaacgatcgttatgtccagggtacatcgcgagccgacgatttcaggcgcgagcgttcggctttggtcgaaggccaaaatccatatgcggcggttttgagctgcgccgactctcgcgtggcgcccgaacttgtgttcgacagcgggctcggtgatctgtttgtctgccgcgtcgccggcaacttcgctaatgatgatacgctcgccagtatggaatatgcggtcgcagtactgaacacgccgctaatcctcgtactaggccacgatcattgcggcgcgatagacgctacgatcaagtcgctccatcaagataagccgccgccagggcacatttcatccctggtgaccgcacttgctcccgcggtgaacgcatctctagggcaagccggcgatatatccgcccacgcaacccgaaaaaatgtgatcgacaatgtgaacaaactcagatcgacgggcccgattctgacggctgcagttgagc

SEQ ID NO: 67700 - DNA, 413 bp, Glycine max
  Clone ID: PAT_MRT3847_32146C.1
ggctgtctataaaaaaacaccaggtgaattattaagacaatcctcgagttgccaattgctacggcttatcaaattgtgacctgataaaggaacctgtatgacgtcagcagagctatgtaatgaaactcacctattcgataacccccattttttttattctatgttagaggcgtgaaaaactatcccttctttggaattcaaagctcactggaggcggacatatatcgcatgatgggctaaactgcattaattcttcaggagtcaaagtcagctcccatgggtggttgactagactgtccaccaaagtgcccggccaaatcggctataattcttaatccgatctaagatgctttttcataaacgccgtggtaaccacactctggggttatcaagcgaacccataaatagccctg

SEQ ID NO: 67701 - DNA, 401 bp, Glycine max
  unsure (1)..(401): unsure at all n locations
  Clone ID: PAT_MRT3847_32147C.1
ctctgcggtccgacggcgtccctgcgtccagcaggtgtacatacacctcgctcgtggtcctcgctcgtggtctgttgggaacaccgctacgtatcgatcccagggtatttttcggctgtttgattcacactcgcgtccagaactcaaaagctttctctgctttgtgtctcggctgtgtcgcgcaaaaacgccgttttccgagttgtcgcatcgtcgagggcatctggaggcgaagtacttccgcactgccaccgtgtccgcgagtcatcgggtgtatgcacacctcagaaccgtctcccatcgtcgccttctttgtgtatgccaaggagcagaactgttttcagntgttgtctcttcgttccgctttgtctcccttttctcgactgtcgtggcatcccgtc

SEQ ID NO: 67702 - DNA, 190 bp, Glycine max
  Clone ID: PAT_MRT3847_32148C.1
cccacgcgtccgcccacgcgtccgcccacgcgtccggtcattttgatgagaatatgatttcacggagcaatccataatgatgagacaccttgtttttagcattgaaatctagttgaggcttcgatcttaagttattttgttttgtttttttttttttgctcagcattaagttattttgtattacttattg

SEQ ID NO: 67703 - DNA, 329 bp, Glycine max
  Clone ID: PAT_MRT3847_32149C.1
ttgacgcgtgggttctcacactagacttctatgtttaactttgataggatcgctgagtatttcttatcccccaaccttaaattgtcaaagtgatcttcgtggaatattaatagttcgcgtaaattgatagcaccacttcaaatgcttctccaactagatctttctcataacagcattcgtggaggcattccccagtggctacaggagaagctctggcactcttggaaaaacattcggtatatggacctcaggttcaacaagttgcaaggagatctgccaattccacccgacggaaatcactactttttagtctcaaaaaatgagctgac

SEQ ID NO: 67704 - DNA, 136 bp, Glycine max
  Clone ID: PAT_MRT3847_3214C.1
tgcgcataagaagggctgcgcctccctcagtagtgaaccccgcccggaggggaaggctactcacgatcctgacaagctgaagaggcctccacgtgctttctttggtttcatggaagaaatgtggaaggtgtacaac

SEQ ID NO: 67705 - DNA, 385 bp, Glycine max
  Clone ID: PAT_MRT3847_32150C.1
tacggctgcgagaagacgacagaagggatatggatgaatttgatgttgttgtctctcaatctctcataattacatctttgcttatttaactttcattggaatgtggatgtacgtcattagtttgtttgctcaagtgacttgtactcttgagttgatctccaagtccgcccaatcagaaattgcatgttctacacgtttggtggggttgccgtaagcgacgagtaaaattgaataaacatttgattaactatgtttccaaataaaaaaaaataagaagtaaaggcattcatgtgacctcatcttatcattcttaaaagttgtctttcttgagaaaaaaatgagttatgaagaacaagagtcatttgacttaatctggcaattaaaa

SEQ ID NO: 67706 - DNA, 142 bp, Glycine max
  unsure (1)..(142): unsure at all n locations
  Clone ID: PAT_MRT3847_32151C.1
tcgacccacgcgtcccggaccgtggcggtccgtgggcggtgcgagagacacagaggggataatttattggtgttnggacngattgacatggacattcttgtctgaggctgagcagcgccacaaaacacacattgaccctgat

SEQ ID NO: 67707 - DNA, 784 bp, Glycine max
  unsure (1)..(784): unsure at all n locations
  Clone ID: PAT_MRT3847_32152C.1
tatgnnacgtncgcatgccacccgcgtaccgtaagccttggnatcctnctagnnagcggcccgccctcttttttntttttttttntttttttacataaaatgaaatgctattatttatttgttatgattcttttcatttgtgtgggtatacaaattcaataataaataacttgtataagacagctagaaggaatcaaagtgttcattttagtgtctaaatgtctatgcatccttggcaggcacccaaagccaattgcattacagccattacttggttgatggaaaactttctcaagaattgtacgttctcatactcaaatacacgttgtttttaatgcttcaggcatgggatcgggaacttcacttttccatggttgatggagactttaagaagtttgagggcaaatggtctgtcaaatctggaacaaggtaggacctatacccctgatagccaatacttgctaagcagccttgcataatatttcccagctattttgattttacttctggactcattggacatcttaaggttgcttcaattcaaaccgctgtatttatctttagtacatcacttgtgatacaagggaagttcttatatgattcagttgaatagcttcatatcaatgtattttgaacttaaactcctgactatattctacttttgtataggccacaatgcaattgtatgaaagaaaatgaagttatacacattttgccgttgacctcgaaaatttatagtttattcttcaactctgnttcttgcagatctttatcgactaattta

SEQ ID NO: 67708 - DNA, 441 bp, Glycine max
  Clone ID: PAT_MRT3847_32153C.1
actcggaaatggggctatcaaaattccataacgtatttttttataaagaggggaaatggataaaaagccattaagtttgcaatatcttgaactttgtgaaagttcaaatgaaaggatcaggaattaggaatatttaacacaacaagcatccttcattctatagttctgttgtaatcagcctttttttttttggtcgtcgtcgttaagaagttacattatcccatgttatatcatctgaattttggttaatacaaccgcccagtaaatctcctaaaattgaatggatgtgtaatgcttttgtcaattgacatcttatagtaaaaataatgtccttttaattatgacctttactttaatggaacaaaagcatgactgtgtggaattaaagatctacaccaataaaatggtttttttaagaatccttcataaaatggtattaac

SEQ ID NO: 67709 - DNA, 483 bp, Glycine max
  Clone ID: PAT_MRT3847_32154C.1
ctttcttttttttttttttttttttttttttttttttttttttttttttttttggttttttgggtttttttttgttttttgggggaaaaacaaaaaaaaccttatctataaaaaatgatgccaccattttaaagaggtgtcccctccttagcagacaccttggaagggaaaaaaaacccctactttttctcaaaggccaaaaagaaaacttttgaaacggcaaaaaaaaggcggttttttaaagcaaaaatctcacaacactcctctcggggtccctttttctcccccctaagttgaaccagggtttggttttccctatcccggggaaggtctagagggggggctacccataaaaaaaggtgttctaccttttttcctttaaagtgtttgtccaacacgggagattatccactgcccctttccttttgtgtgtgcgaaacaaagacaggtttatcccaccctcctttttgaggccccccttgc

SEQ ID NO: 67710 - DNA, 623 bp, Glycine max
  Clone ID: PAT_MRT3847_32155C.1
ccacgcgtccgcacacggtgacctctcgcagttcatgcagggaacgcccccaacaacacttacttccacaaagccatgaacttccggttccaaaacctcttgggcgccccctacagagggggcaacgtggtcatttccagcaacaccgtgctactctccccggtcggtaaccgcgtagccgtcaccgacctcctcaagtccgaaaccaccacgctccccctccagtcctcctctaacgtcacccgcatcaccgtctcccccgacgccaccttcctcctcgccatcgacgaccgcaaccgctgcctcttcatcaacctccgccgacgcgccctccttcaccgcatcaccttcaagcaccgcgtcgccgcctcgaagttcagccccgacggcgccctcatcgctgtcgccgccgggaagctcgtccagatctggcgttcgccggcgtttcgccgcgagtacttcccctttgagctcgttcggacctttgcggacttcgacgcgaagggcacctccctcgattggagccccgattcgaagtatcttatcgccgggtccaaagatttgaccgcgagaatcttgtgcttgaaaaaattgaacagtggggggggtaagaaaagaccttt

SEQ ID NO: 67711 - DNA, 483 bp, Glycine max
  Clone ID: PAT_MRT3847_32156C.1
cgaggcgtcattgatgaaggaaacgtacgttctccagttgcgcctggtgtctgtactgggttctgtcaacacagggaggcacagaatccatgatgtggaccatccacgactctgtttctaacctctatagttgcatggcaggaactaggctgagaattaccttttctcctagtatgccattgcttgagtgagggtaaatgctgcatttcataatgcaaggcctgagaacacctgctgtacctggggtgaatgatctgcccatcacgaggaacatgattgattggaggcgatgactatacgagcggacacactgccacgaagtctgggtatgtggaaacacttgagaccgccatgatcaaatcgacatctataggaagtcccaaccggtcgggctgctcagatggcatgaatgtatcagccgctaaaccttgcgctctgaggcattctccacgagctgtgtaggggtctagatgatcgacagga

SEQ ID NO: 67712 - DNA, 452 bp, Glycine max
  Clone ID: PAT_MRT3847_32157C.1
aacaaaaaaaaaaagcgcttaaactcgaatgtttttttgcaaaaaaaaaaaaaaaaaaaaaagtggttaaaattgaatcccacaagcggcaaaaaaaaaaaaaaaagttgggttttaaaatcaaaaaaccaccccaaactggggggggttggactgaacgggggggaggatttcccagcggcagggctcgaggtttttggaaacggggcaataaccggggagcgtgaccttttcgttggagggggccacggagccaaacttaaaaattgaaacgggggtgttcgagggccggggaacctccacggggccgtttattcctggggcctcagggaggggttttgttgagtttgccccgttcgacttttttttagggtgggcttgggttttattcccctttcgccaccacagtaaacccaggctttcctttcctttcctttggtttgggggggggc

SEQ ID NO: 67713 - DNA, 407 bp, Glycine max
  Clone ID: PAT_MRT3847_32158C.1
cactgagcatggtctagctatgtcgatcgaactgtccaaggtcctgtcactatgtaggaaggctaacaagcctatggcggctggccgcagcgtttgggtgcggtgtggtatgtggctcgtggctcacacaaacttagcttacacatcaacagggggcctagctgcgggccttaaatatgggtttaggttaacgggctaggcacgacgacgtggtgaaacgttgccgtttgcgtaacgcggcaaagtcagcagtatttgacgtaaaggcaacaaatatacgatttcaaaattggtggtgagaaacaacattggtagttacataaaataagcaaacgataaggtactacgttgtttgggtaataattaccccgcggccgatagccggaaaccaaaggaaccatatgatg

SEQ ID NO: 67714 - DNA, 557 bp, Glycine max
  Clone ID: PAT_MRT3847_32159C.1
agaatttcatgcatttttctggagttttgttcctagaatatccacaccaccatcagctttggaagaatggactacatatagcagaaatattcctcgtgtttgaagaagtgacctgcggctgttcagcatttctcactcatcgactccatcctgccatcacccctcaagacgacgttaggatattggaggacgcaataaaacatcgcagctcctgccatgagcgagcgaaaagcttgcagcccacaacagcatcaacgaaaaaaacttctaccaaaatccagcctccgcacgccaacaaccacatgcagccagcctactggccaaaggtgttttcgccgctgtaagtgatgtagaggaagccatccacatctttctgttcttcgtaaatgtttgacatcaaagcagcggtgggtgggagcacattgttgatgaagatgaagatggccttttcggggctcaacttgatgcgcttccggatcacgtacacgaactgaccaactgtcagatcggccggcacgagatacttcttctgtcaatatcccggatgtcgctgcggt

SEQ ID NO: 67715 - DNA, 3389 bp, Glycine max
  Clone ID: PAT_MRT3847_3215C.1
tttttttttttttttttttttttttttttttttttttttttttttttttttttttttttttttttttttttttttttttttttttgaagagagccacaaatattatattaatatcggatttgattcaaataatgaaagcattattctgaagagccacaaatactatatttaaataataatccatgcgataagtatcaaatcatataacaactgaattctacgaattcatactaactacggaataccaaaacaaaactggggagccaacactacaggaaagtttagaaaataaatattaaactttaagtatctgctagagttgccaccctactcatcatcagcaaatttggtctttttccctgtgccttccgcagcaaggttgggtctatttccccgaccccttccaccaccaccccttccaccaaatcgaccaccaccacttccaccaaatcgaccgccaccaccacttccaccaaatcgaccgccaccacccctagcaccaaatcgaccaccgccaccacccctagcaccaaatcgccaccaccaccactcctaccaccagcacctctacccccagaaccctgattatctctaggtttggcttcatccactgtcaaggtataacctccaagttcagtttcatggagttctagagctttgcccatgctatcagcatcaccaaaatccacataagcaaaccccttaacagcaccagactcgtaatctttaggaattgacaccctggtaatgtccccacaagatccaaaatgttcttgcaaactccctcttatctcatcttccccaagggatgtatcgaaaccccttacaaatattgtttgagactggcctctttcacttttctgggatgagttgttccagttgctgctgttgggggtatatgcacccctttcccgagctaaatcaagccggagttcacgattaaacaattgttgtccattcaacccaagagcattttgggcagcctctgctgttgcaaactcaacatgtccaaatcctttaaacttcccagtatcatctgtagcaaaacgaacatcaacaacttctccagcatccttgaagaaatcttccacgtcagctcgttcaacactaaatggcaagttcccaacaaatagtgtctttgaagcgccaatttcttctttggtgtaactggggtcttaggcgctttcttttcagacgaggcagcatcaaccatctccacatccctgtctcttttctgaggagttttggagggttcctcctcactttcatcctcactgtcttcttcggaactatcactgctttcttttggatttttcacagtctttttcttttgtggctcttcactttcatcagaactatcatcatcaatatccatcttccccttatcttcatcagagctgctatcatcagaatcagagctgtcaaccttcttctttgcaagagcagaaggctttgacacatcagttacggcgggttttgcatcattgtcttcatcagagctttcacttgattcatcatctgagctttccactttcaacgctggagcaactggcaatgtaggcagcttagcagttgtaggttttttcttacttttgtcttcatcagagctgctatcagaatcagagctatcactgtcagagctttcacttggctgagttttctttgtagaagcatgtccatttttgcctgcagcaggggccaccttggtttttggtgcctcatcctcatcagagttatcatcagaagattcagaagagcttgaactggcagctggcttgcctttcttagctagagtacttagagtaccatttttggcagattgatttttttgaaggaacggcaacttttgctgcaggtttctcatcttcagaatcggatgaagaatcatctgaactaatttcctctctcctctttaactcttctgcaaaggattctacccgccgctcgatgggaattgcgcttcaaggcgtctcgtagggctaatccgcctcacgagggtcaccaacggcacgtgcctttggggggccgaggccccctactgctggtcggcaaacggacggcgggcgcacgcgtcgcttctagcccggattctgacttagaggcgttcagtcataatccaacgcacggtagcttcgcgccactggcttttcaaccaagcgcgatgaccaattgtgcgaatcaacggttcctctcgtactaggttgaattactattgcgacactgtcatcagtaagctaaagctaagctttttctttttggtcagagcagagccattcttagcaggtaccttttttgaaagtacagatttgggtgcaggtttctcctcttcagattccgaagaatcatctgaactactttccttcttcttttgcaccttggcctccttcttttgcttctgagcaacctcctctatcttctgttttttggcactcacttgcttctcaatttcatcttgagcttgtcgcttgcctcccttcttggcagacttggatggcggaaccacagctggagcagcgtcaaccttgatagctgatttcttgcttgacttgcccatcttaggttagaggaatggaagaagaaaggagagaggataaagaagaagaaactggtaacggaggaggaggctctgcaaaaccctacctttcgataaattagggttttgtttggaaaacaacagagtccctttctgtcgtcttctcgcagtcgtcggacatactacgcccaccaacggcacgtgccttggggggccgaggccccctactgctggtcggcaaacggacggcgggcgcacgcgtcgcttctagcccggattctgacttagaggcgttcagtcataatccaacgcacggtagcttcgcgccactggcttttcaaccaagcgcgatgaccaattgtgcgaatcaacggttcctctcgtactaggttgaattactattgcgacactgtcatcagtagggtaaaactaacctgtctcacgacggtctaaacccagctcacgttccctattggtgggtgaacaatccaacacttggtgaattctgcttcacaatgataggaagagccgacatcgaaggatcaaaaagcaacgtcgctatgaacgcttggctgccacaagccagttatccctgtggtaacttttctgacacctctagcttcaaattccgaaggactaaaggatcgataggccacgctttcacggttcgtattcgtactggaaatcagaatcaaacgagcttttacccttttgttccacacgagatttctgttctcgttgagctcatcttaggacacctgcgttatcttttaacagatgtgccgccccagccaaactccccacctgacaatgtcttccgcccggatcgaccggccgaagccgaccggacgcgtgg

SEQ ID NO: 67716 - DNA, 429 bp, Glycine max
  Clone ID: PAT_MRT3847_32160C.1
aagcaaatcaatttggagcacttcctcccagccattcttttctgaaattcaggtttcagtagaccatggcaaactctttgaaggggtagaatgcaacagaatgttctaaaatctaccaacacctacctgacaaattgagaacctagcacccagtgtgtttagtaaaataaaagcaggaacttaacaggatgtctcagttctacgttggcatggttatatacaccaaaaaagtaaaatgtttaccactcttatctacagatatccattttggccaaagcataacacaattaaaaagccatgatgccagttaagcactctgaaagaaatgatatttcagtgacttccattgctgcctttcttctcggatgaaactccacaaccaaaggtagggtctgggaagtgcagcttgtagaatgaaatacgaacatg

SEQ ID NO: 67717 - DNA, 624 bp, Glycine max
  Clone ID: PAT_MRT3847_32161C.1
agttgtgctatcacaccggtgcaaactagcgaggatggccgacgagactttcgagcaggttacttctggagcttctcttaccttccctcagcaggcttctgctttgcgtaagaacggcttcgttctcctcaagggcttcccttgcaagattgtcgatatgtcgacctccaagactggaaagcacggtcacgctaagatctccatcactggtgttgatattttcactggtaagaagtatgaggatgtcactccttctacccacaacatggatgttccccacgttagccgtcttgattaccagttgatcgacatctggtgaaggcgagaaggcccctgtttctctcctcactgaggctggtgagaccaaggatgacctcaaccttcctgacgatgctgagttggccggcgagatccgcgctgccttcgacgagggaaaggacatcattgtttccgttctcgccgctatgggcatcgagcagatcatctcctggaaagtcgatactaaggcttaaatggctatttcgctctgagcttatggtgggaaccgccgacgggccactggaccacgagcacgctctctttgttcctcaaaattataaatatccaggttgtttatttttcgat

SEQ ID NO: 67718 - DNA, 485 bp, Glycine max
  Clone ID: PAT_MRT3847_32162C.1
caccccaaatagggccataatgataaaattaaacattttttaatgatccatacaacctaaaaaacaaataagggcaaacaagcttgcccaattaatattttaacgaaccaaaacaatacaacttttttaaaaacatgtccgggccctagctttaacaacgatttaaacccccaacaaaaaaacaccacctccggtaatacataaaaaaaacttttttaaccctctgcaatttgccaaaaaaatgcttacataggcagacaatcaatttcatgtaaagggcttatctaaacatttttttgatgacgaaagatttctcatgaccctaatttgattatctcaggagggactttggaaaccaggagggacagttttttgacaagccttaaggatcaccctgagcgtcacaggttctttaaagttgatcccaagcacattgtttttaattgcggtgcttaggcaaagggcattttccaaatccgccaaac

SEQ ID NO: 67719 - DNA, 401 bp, Glycine max
  Clone ID: PAT_MRT3847_32163C.1
gattcatgttttttattttttgtttattttttttttttgacccacttttggcaataaaagtttattaaaagttacactttacttgggggccaaaaaaaagaaaatggagacacaaaaaagatactggcgaaacccaaaaaaaccccgacccaaaaacgagacgggggaaacaaacttataccaaaacccagtccagaaatcctccaaaaaaacggggacaaaaaccccgcgaaggggaccaccacaacccaaaggagagaaccccggcccgggggatgcccaaagcccaaaaagggaggttggggtaaaaaaaatgggccaaccacccgaaaaaaaaatgataagaaaaacaccccccagttccccaaaatgatcctaaggggaagcgccccccttatttt

SEQ ID NO: 67720 - DNA, 379 bp, Glycine max
  Clone ID: PAT_MRT3847_32164C.1
ggagaaagttgaacatcctcaaatttgctggcactgccacaaacaagagatattgatagttggtatgggaaaacatgttttaaggattgataccacaaaagttggaaatggtgaagcctttgtggtagatgatcctctgagatgtcctgtggataagctcattgatggggttcagctggtaggcacacatgacggggaggtgactgatttgtcgatgtgccaatggatgaccaatcaattggtatctgcgtcacaagatggcacgataaagatctgggaagatcgcaagacccaaccacttgcgattttgagaccacatgatgggaatccggttttttctgctacattttttactgctcctcaccagcctgatcatatt

SEQ ID NO: 67721 - DNA, 181 bp, Glycine max
  unsure (1)..(181): unsure at all n locations
  Clone ID: PAT_MRT3847_32165C.1
ccagaagtctgagtgcctaccnnngtatgtttaattanaaacatatctagtttnnttttttttnnatttacccttnnnacttttgcggcgagaaggtatnnctataggagagagtgtgggtgactctgactgtcatacagtttatcgaggtgttataccaaattctgtttcattgacgaat

SEQ ID NO: 67722 - DNA, 252 bp, Glycine max
  Clone ID: PAT_MRT3847_32166C.1
attcgtgtctccctggggaaaaccaaaggagcctttcatttatataaaggttcggaacgggacaacggggaagggggacactgaattgggtataaaacataactttttgattggcatcatataccaaacttatgtagatggttgaaaacgtcttaccaagtttaacctttacccggggcttggccttttttgggaaataaattggcttgttttcccaccgaagccgatgctttggccccttcccgggtcctt

SEQ ID NO: 67723 - DNA, 392 bp, Glycine max
  Clone ID: PAT_MRT3847_32167C.1
ggttgaggaatcaaagaatcacaaccacaatcaccccttgactttgctgagtccaatatcggatcgcaaaatcgtgtaccctcatggcaccaattcccccgtgttgtggaacttgttggaatttcgggtcattgagttgtgcaaatcatataccaccaatatctcatctgcagcagtgagcaaagttgttttctttcccaattccccttggattggtgctcaagattctgtggcttgctgcatctttttggagggcaagttggggttcatgaaacatggggatgagaaatggacccttgttgattacaagaacttcttctacgatgatgttattgtgttccagggtcaattttatgttactgatgatcggggtaccattttatggattgata

SEQ ID NO: 67724 - DNA, 330 bp, Glycine max
  Clone ID: PAT_MRT3847_32168C.1
aaagagtactttgtatctgtcattatgtctaagccagaaagtaaacccaccaaccaaaaaacgagatgtatagggatatacaccaaagcccaaatttccaggcagggggcggacaaaacgcgagagcacgttagaaaaaagagaaaaaaaaaagggggactcaaacaaaaaccagaacaggtggggaacgcaaagaacacccgggggggggccggggctacaaaacttgaacaaaaagaccgtcgcttggcccaacctaggaacagggaaaggaagacttggcccacgggccgccatcagcaaaaagtttgggacaaaaaaaacaaaggg

SEQ ID NO: 67725 - DNA, 524 bp, Glycine max
  Clone ID: PAT_MRT3847_32169C.1
ccttctcgtccgcacaaccacaaccttaaccttgcaaggttgtggattgctttgcttgcggtctcaaccaccgtagttcattgcaaaactgcctcccaagatgtttcagcccttaatgtgatgtatacaagcttaaattccccttcaaagctgagtggctggaaatcaagtggaggtgatccgtgtggcgactcctgggaaggaatcaaatgctcaggatcttctgtcacagaaataaatttatctgacctgggcctttccggatcaatgggctaccagttgtccagcttaaaatcagttaccgactttgatttgagcaacaacaacttcaagggtgatataccatatcaacttcctccaaatgctcgttatatagatctttctaagaacgacttcactggaagtataccttattcattctctgagatggatgacctcaactacctaaatcttgcacataatcagctcaaaaaccagttgggcgatatgtttgggaagctcagtaaactcaaacaactggatgt

SEQ ID NO: 67726 - DNA, 551 bp, Glycine max
  Clone ID: PAT_MRT3847_3216C.1
cttggggggggggggggggaatgcaaagaaaaagtacacaaggtagtggccgaggaggaaaaagagacagattcgacgaaggatagttagggggaaagggtaaagggtgtttataagagtctcggaggcaccccacacgtacacttagcaatgggccatgtacagtgatgtaaaacagctttcagctacatcaaagctgatgtgaacaagattaatatggcttggtcacaaaagaagcgaaactggttagaggcaaagaagcgagtgcgtacggataatacaatggtacaaccccaattaaagtggcggtagttactatttgatgcttagcatgctcgacccaattaatttagatttgcaaataaatggttggagctttatgacaatggtgacgggaactaaagccattactatagctacgcctgccactactggttactgcgggtgggctacgatgcgagggggggcagagaaattgccataaagcaataacagagaaaaggtacaaaggagatgagagcgatttcgggaggcttacaaatacgagttag

SEQ ID NO: 67727 - DNA, 278 bp, Glycine max
  Clone ID: PAT_MRT3847_32170C.1
ggctcgaggtgagactttgagctcactactttgttttcagggcaacccataattgccacaacaggacttttatctcataaactgctatctagcactccagcacagagatgagcttcaaatcctagggattttcgggtatgactactggctgtagatacttagaatggcggaagaatggtaataccaaaagggccgtactcaatatacgatggggttatcttcccgatatagaagacacacccagtgctaactgagtggacaacgtagttatttctact

SEQ ID NO: 67728 - DNA, 601 bp, Glycine max
  Clone ID: PAT_MRT3847_32171C.1
gacgcggcagcctgttttcacggttcattctgatcaacccgcgagctgaatcgtaccggtctactcatctttcggcatttacccctccacattatcctatggctccggagtactgtttacgccattgtacggacactcactcatcagggtccgacagtcccatcacgatgctcactttatcactgtacactcgcgcaccggcatcgatcctggctctaatcccttttccgcctacgtgtatactcgttacatgcttcgcgctgtgttccgcatcccatgtcaggtcttccatggctggtcgttccatttcgcacactgcatccgatcatagttcgtttctctgtctgatattgttatccgttcagagttccactcaacgtctcttcattatcatcccccgtaaaccatcgcggcctctaatgcggttacctggctcggattaatccgccttcgtcttaaatgccaaccttctactcttcgcgaatcgtaccccgacggcgatcagtgcaccgtcaaaggaccgggaaagatcaggtctaacccttgggacctcgtacggttcgtcgatcagtgcctggctggacgcagtcactccgctgct

SEQ ID NO: 67729 - DNA, 170 bp, Glycine max
  Clone ID: PAT_MRT3847_32172C.1
gctcttacaaatcaacaagactgtcagtggcaatatattattgcgaagtttcaaagttgggggttctcaaccatgtttttttttagtccacattccatcccatctgatatttttataattttgtgcagatatagtttaattaagagcccatgggttacggaacataacta

SEQ ID NO: 67730 - DNA, 431 bp, Glycine max
  unsure (1)..(431): unsure at all n locations
  Clone ID: PAT_MRT3847_32173C.1
ctgatgatgctaccaatttctgggattacgcttcccagaacccggagagtgtgcatcagttcatggtcttgttcggcgaccgcggtattccagatggctatcgaaagatgcacggttacattggccatacccacaagctcctgaacaagaacggcgactgggtctacatgcagttacatttcaagtcgaaacagggcactggtttcattactcaagaagactcgttcaactacggaccagattactcgaccaaggacttgtaccaggccatcgacaagggcgatttccctggctgggatgtttgcgtccagaccatgacagccaaggaggccgaagagttgtgggagaagcaaaagatcaacgtgtttgatctgacgcacgtatggncacagggccagttccctcttcgcaaggtcggagagttctttcta

SEQ ID NO: 67731 - DNA, 119 bp, Glycine max
  Clone ID: PAT_MRT3847_32174C.1
tccatggattcaagtgctcctccttcttctgcatcaggatctggatctgcatatgaatggcaaagtccaactctcatgtccacctgatttgcaatttgcgcctctccgaggaggcagtc

SEQ ID NO: 67732 - DNA, 439 bp, Glycine max
  Clone ID: PAT_MRT3847_32175C.1
caacaacaccaacaccaacaccaacctttttcataccttaattcttgagtttgagcatgtctttcagtttcactgaccttctttctactaacaacaacaatagcttgaacatggatgatgatccctttggacttgaatttgctaataatttcaagtcagcttcactgcctctctctccttcttcaatctacccttcttcttatgctgagttccctcctggttttgtcccaacttcacagtcattgaattcacaccactttttttcttctcaaattgttcctgcatcttacacaactgagcaatcttctagcatgagctacaacatgagaaacacttcaactgagggtcaacaaggaaacaaggaggaagagagaaactactctgacctctctttcctaacaaaaacaaaccacgtgcctctctttcaatcttccacaac

SEQ ID NO: 67733 - DNA, 460 bp, Glycine max
  Clone ID: PAT_MRT3847_32176C.1
agagcttagctcacgttgacagtgacttacgatggcagcttgtgtttatgctcacccacgatggagagtccctggtctattctactcagagggactggtcttcttcaaaacaacggcgatcaagataaaattgacagcttgtagggtaagaaacttggtttgaattattaggcatcctggcgtggtacatgtcaaacattgacgccaactttggaggatgtgttcaatgaggctgcaaaactaggtgaataacaaagggctctaattgcggttgatgaacatgatgagtactttcaacggaactgtttcaagacgcacatgtgcttgcaagtgccattttctgattcagacacacacagccgccttgatgaataggtccatgggaggcggattctctcatacgcattacttgatgaagctagcactgttgtcactgaacatggatgcgatgcaatacact

SEQ ID NO: 67734 - DNA, 297 bp, Glycine max
  unsure (1)..(297): unsure at all n locations
  Clone ID: PAT_MRT3847_32177C.1
aaactttaaagaattcccgattatgccgtattgccatgcgttttctttntgtctttagctcttcacatttgcgtcacagattgtattacccaaatatgcgatcgacttttgtctcctttaatatgttgacacttttaccactggttagtagttcattaatnttggatgttacacttatccacatggatctgtaattgaatattatagtatatacatattcttttcctccagcttgggctaagtcccatcacattcacacataaagtttgtcacttccacttcccttcctgtgatcct

SEQ ID NO: 67735 - DNA, 183 bp, Glycine max
  unsure (1)..(183): unsure at all n locations
  Clone ID: PAT_MRT3847_32178C.1
cccacgcgnncggcnncnncnacancacatccanccnnncgggcccnccngaaccngncggcagccanacccacnncnncggccgnaggcacgnncccaccgncnaaaaaaccgagcaaagcaacaaaacggcgncangcccgggaaggagcangcaaagggaacccnagaaaaaggagggac

SEQ ID NO: 67736 - DNA, 2030 bp, Glycine max
  Clone ID: PAT_MRT3847_32179C.1
ggctcgagcaagggctcaagatggaatcttgaagtacattctgaagattatggaggtttgtaaggcccaaggttttgtctatggcattattccagagaagggaacgccagtgactggagcatctgataatcttcgtgaatggtggaaggacaaagtccggtttgatcgaaatggtcctgctgccataaccaagtatcaagctgataacgctattccggggaagaatgatggatgcaatccgatcggtccaacaccacacaccttgcaagagctgcaagacacaaccttgggttctctcttgtcagcactcatgcagcactgtgatcctcctcagaggcgttatccattggagaagggcgttcctccaccatggtggcctaatggtaatgaagagtggtggccccaaataggtttgcctaaagatcaaggtcctccaccttacaagaaacctcatgacctgaagaaggcatggaaagttggtgttctgactgcagttatcaagcacatgtctcctgatatcgcaaaaattcgcaagctcgtgaggcaatccaaatgccttcaagataagatgacagccaaggaaagtgcaacctggcttgcaataatcaatcaagaggaggccttggcgcgtgagctttacccggattattgccctccattagcagcctcttctggaggtagtggatctatggtaatcaatgattgcaatgagtatgatgttgaagggggtgacgatgagccaaactttgacgtcgaagatcgcaaacctgagaatcttcatgcaccgaatcttgggatggacagaatgatgggaagactgccttctttcccaatcaagggagaggctgttacaaatttggatttcattcggaagaggaagatctctggtgacttcaacatgataatggatcagaaaatttacacatgcgaacaacctcagtgcccttacagtgaaattcaccatggttttgctgacagaaattctagggacaaccatcgattgagttgtccttatagaggcagtgcttcaacagattatggaggttcaaattttcatgttaatgaggcaaagccggtcatattcccccaacagtcctttgttcaaccaaaacctactactactccgtctgttgttaacttggttccatctgttattgatctaaccggactcggagttccagaagatggcaagaaaatgatcactgaccttatgtcaatctatgatacaaatgttcaaagcaacaaaaatctaagttccagtaaccatgtatctgcagaaaatccaaaccttcctcagccaggcattcagcagcaacatgacaacttctttcgcagtcaaggaatcagtatggaaggaaacttctttgaagaagccaacatgtccaacaacaatcatcacatgtttgcaagggaggaaggtcaatttgaccggttcaaagctttgaatgcaccaccctttgagaccaatcacaacaacaacaacttccatttgatgtttggttccccttgtgatttggcatcctttgatttcaaggaggatatgcaaggaggagtagtagggatggatgctcttcagaaacagcctgatatctctatttggtaccagtgaaaatgacagcttaaagcttgaaacctcctcatcatcttcatctatcatggactcttttattttccttctaaaagggttggcacccccctaatcatgtgaagttcctttggccgaaaaagggtttcactgcaattttcttcacatgtaatcctgtaggcccagtagaactaaataatattttaagcttggcaggtctagtatgtgttatatacataataataataatatataataaaaacttgcatgttacccattatatgtagctttgtgaattgtgattgtgtgtttctatatcagtgtagccatcttgttgttacttaaatattattactcttatgtaagactgtgacataaataagatttgatgaagttctcttctaaattttagttaagaggttaaaaaataaaattgttgttggat

SEQ ID NO: 67737 - DNA, 1769 bp, Glycine max
  Clone ID: PAT_MRT3847_3217C.1
aaaaagaaatcagaccctgggtttattacaatttttctctttttcatttattttagggttccggttaaaaattaccacggaaatcactacagggggcttaaaaaatacttgcccatgttgcccgttaacaagcataaaaccactctccaaaaagcgccatgacaaaaattacaaagccagaacaaaatgaaaaatatccaagagatagaagaaggctaggtatatgaacataaataagctaagggcatgagcatataggaataataataatgatattgcatcatcaatccttgtttggatgccacaattaactacaaggcaaccacggtttcgcctttagtattagtagtaacttgagacccagaattaggctttgccgcaacttgtttctttgatgatgccacacgacacttatcttttctctcatcatgcttcatctgctgttcacggcattctgaactgcagaaagcactatcacctctgcaataattttcaattaatgctgaccttgtacatgaagatgtcacggccgggtactaaacggcgtttgcagagaaagcaaacgcgcaagaagccaggggtatcctcggaatattgccttctatggtggtttctgggtgaaaccatggcccaaaccctgttctgatctaaaccgttgagcccaacaggaggcccatctcctcctggtcccttcacggagttgttcggatcatcgtccaaggacgtgttcagatcgaaggttatttccgacatgcttgttgttctcttcataattggaggacgaggtctcttccccaacaacatctttttcttctaattctctttttgattcaccaaggtttgatgatgacgatgatgctactctgctactactagagtctagagtagcgttttgtggtcagaatccgggctagaagcgacgcgtgcgcccgccgtccgtttgccgaccagcagtagggggcctcggccccccaaaggcacgtgccgttggtgaccctcgtgaggcggattagccctacgagacgccttgaagcgcaattcccatcgagcggcgggtagaatcctttgcagacgacttaaatacgcgacggggtattgtaagtggcagagtggccttgctgccacgatccactgagattcagcccttgtcgctttctagggtttctcgctctctgtttctcatctggattgtttttctctgggctgtggattccgtttgttcaatgcgcatcgtttcttcgcctttgcttgcttgcaggaagaagaagaagaagctgctgctgctcttggattctaccttctggaaggaacaaaaacaaacggcatttttaattatattttttgaaattttgaatcactttgcgatgaattttattggattttttttttgggatgtagctgaatggttttgtttgaaattttgatttaatttttcttttaaaatcaccttcagtgttgtgtgtgttttagagttttttttgggaggtatgtcgatcctatagttgattctgattagtgtccgtactttttgttaactggataatgttgcagtaaacatgaacaagaatcggcttacgactatggtttgattttatctgttttgttgatttcactgattggtgaaaactttgaattgatgagaaaatagcagggaaccagtttttacttgatgctggttttatatgtagcataatcgtcaaggggcgatgttgtgcttgaataagttggatcctgtgcttgaatgcatgtcaattacattttgcgaacta

SEQ ID NO: 67738 - DNA, 856 bp, Glycine max
  Clone ID: PAT_MRT3847_32180C.1
gcctgcgagtccgggaagggaaaggaagaaggagatgggtcgtcttgccacattatcagaagaacccatcaacgaccaagacatcaactacaacaagagaaacagctcctcaggctcaaaaaaatggccaaactggaactggatcaagacccacttcttccacaagaagcccgacctcaagattctcctcagcgtcctcgcatgccctctcttccccgtccctctccacacccaaccggacccaccacccctcaaccagctttcctcctccgctcagtatattatccagcacttcaccgccgccaccggctgccggaagctggaggggacggtcaagaacgtctttgccaccgggaaggtggaaatgtgggccgtggatgaggtcggaaacaccggagtctccgagagaggctgctttgtcatatggcagatgctccccgacaagtggcagattgagcttgctgtcgctggtcacaaggttgtcgccggtagtgatggcaccgtcgcctggcgccacactccttggctcggggcccatgccgcaaaaggcggcatccgccctcttcgacgggctgttcagggactggaccctttggcagtgtctgctgtattctctgcagcacaatacatgggagagaaacaaatctcaggcatcgattgtttcgttctaaagctgtcacctgatcagaaggacctcgttgaccgaagtgacaacactgctgagatgatcaagcacgttgcatttggctacttcagccagagaaatggtctattggtgcaccttgaggactcttaccttactagaatccaatcccctgggacacaccccacgtactgggagaccacaatgtcaacg

SEQ ID NO: 67739 - DNA, 257 bp, Glycine max
  Clone ID: PAT_MRT3847_32181C.1
gttctagccaagtcattgctcaatactaccaactgattcggcttggttttgagggatatagagacgtgtcggaaaactgcatggacaacatgctggtgctgagagagggactcgagaagacagggccgataccagttgtgtgcaaaagccagtggtgtgccctgagtgggctttgacactgaaaggtccacgaccgactttgtacgagattccggatctcaagacttcctgaggcgctttgggtgggatagagccag

SEQ ID NO: 67740 - DNA, 316 bp, Glycine max
  unsure (1)..(316): unsure at all n locations
  Clone ID: PAT_MRT3847_32182C.1
gaaggtttgggcggctgttttttgtattttgcccagattgtcttctctctccctctggtgatgtgttttactctttagctttctctcttctctgtcctttgggcttttctatactctagactccgtcggccaaggctcaacagcatgacaaacgatagacatggtgggcctggcacatagctgctgatcgcacgctttaatccatcttaattnccatgtttatacttcgccgcgtcntatcatccactttctcttttcaaatgctgactcgccatgcttttccttcatggcgctggacgccaagctggccttcctt

SEQ ID NO: 67741 - DNA, 136 bp, Glycine max
  Clone ID: PAT_MRT3847_32183C.1
catttattgttttaacttccacagcgaaccattcaggcgccaattcgctctttgtcgcaccaccggtttccttccttctgcctattgttgcttcatttgcacaacaccctcacacatacggctactactcaggtca

SEQ ID NO: 67742 - DNA, 320 bp, Glycine max
  unsure (1)..(320): unsure at all n locations
  Clone ID: PAT_MRT3847_32184C.1
gaagcagtccgatcatacacatcataggtacctaataccttgtagatgagagcgataactcacgaacttcaactgtccaattagagaacctctaccgcacgatctataggctcgctgagaaagaggtggaccaataccaagtctccgctttctaaaaggggtggtngaaacacaccgagatcggcgctcaagaaagcccaggccaaaggggatactgaaggggatccatttactgtcaaaacatgcattggatagagcaagttaaagaaccaggatcccttcctaatgtgggataacgtgtgagtatgatccaccagcag

SEQ ID NO: 67743 - DNA, 248 bp, Glycine max
  unsure (1)..(248): unsure at all n locations
  Clone ID: PAT_MRT3847_32185C.1
aaacccacggcaggagggagngcaacacgaaaacccagccacccgccccgnnccagnnccnagccgcaaggggacgangcccacgggcgacacacacaccncgcncacacncgggacagccnaggcggaaccaagcaanccaacgaagcacgcccaaccaaccnaggcgggaggaaacgangcccacggggacaccacgggancacgcgcgcaagacgaccacaccgacacccaaacagccaaggaga

SEQ ID NO: 67744 - DNA, 275 bp, Glycine max
  Clone ID: PAT_MRT3847_32186C.1
ggatgataacaaaaacatcgacgacgagatcgaagagatcgagcttgagataaagcgccttaccacgcgcctcgacgcgctccgtctcgagaaggcgaagcgggggaagcgcgtggtgatgggcagagtcgtccccgcgaagttcatggagccgcgcccaagcgccgtcgtttcaagaaaacccgaagaaacgccgaagacaaaagttagggttagtagtagtagtaacaatgataataatgcgtggccgcgacggatgagtcttggaccgaatg

SEQ ID NO: 67745 - DNA, 907 bp, Glycine max
  Clone ID: PAT_MRT3847_32187C.1
cccactgcttccgaaaatataataaatataagtttgattcctcaatatcaatgttagggtctgcaatttcaagttttcagcactgcggcgcactcttctccacgcgtccggcggcgcagtcatcttcattcattcgttgggaatgatagcttgcaggtctctcatcggagtggagcgagttctcaagtttaccaatacttatgtggcatcaaggtcttattgctttcagggtcagagcgcttatcattgcttaagctgcaattttatgatgagtggtagaaagaagaaaatatgtcttgaagaccatagcatcaaacagaagaaaatgaattatatctggagaccaattgccaccaatgctagttcttgtgacgaaagcttgatgaaggatgcacttgttgagtccgaagatggatgcaaagttcaagaaactggctgtagcacatctagcactatttcaaatgaacatctcacaaagatagctgctgaagctatgagtgaaattgctgaatcagatactagtccaagccagttgctggataatgttgaaaacagagtgctagaaggagattcatctgtctccaccgaaaagcattcaatttccgtgctggttggtgcttctctatttcgttttattaaaggaaaagggggatccgtttacgtattgagatgataccaacccaatatttgttcatttcatgtgttacacgctagcgattaccatatatcttttagttggtcgtttttcattacgttttggtttcatgcagtgttggctgttcaatctacattaaatgttactataatgctagaattaatcagtttgttatcagttatcagatgacaggacttcattaaaagatggaaggatttggggggttaaaatcataatgccctactttaaaag

SEQ ID NO: 67746 - DNA, 400 bp, Glycine max
  Clone ID: PAT_MRT3847_32188C.1
gccagatcatgtcacctttgttggggtcctatcagcttgtagtcatgtaggtttagttgatgaaggatttgagcatttcaaatcaatgggtgaagtatatgaactagctcctcgaatagagcacttctcttgtatggtagacctccttgggcgggcaggtgatgttaagaagctggaggaattcatcaaaacaatgccaatgaatcctaatgcccttatttggagaacaattttaggagcatgttgtcgagctaatagccgaaatacagagctagggcgtagggctgccaagatgcttattgagttagagtcgctgaacgcagtgaactatgtgcttctttctaacatgcatgctgctggtgggaagtgggaagatgtggaagaggctcggttggcaatg

SEQ ID NO: 67747 - DNA, 529 bp, Glycine max
  Clone ID: PAT_MRT3847_32189C.1
cattgctcgagtgttatactactaaagatgcagagcttcgggaaaactttgaccggttagaccatatcccttgaggtggagtgctgctacaccatggatcacgtgaacgctaagattcacgacataggaggggatgccacctgaccagcatagactgatgttagccggtaaacagctagaggatggtcgaacccttgcggactacaacatccacaaggaaatcgctctacacctggtgcttcgcctcatgggtggcatgcaaatctttgtcaagactttgactgggagaccataaccctcgaggtcgaatcctcggacaccattgatgatgtcatggacacaatccagcactaggatggtatcactccagatcaccacaggttgatattcgctggtgaacaactcgaggacggcagaacccgtgctgatgacaatatacagaacgagtctgccttacacttggatcttaggttaatacgtggcatgcactattgtcgtctagactgtgacaggaaagaccatctccttg

SEQ ID NO: 67748 - DNA, 327 bp, Glycine max
  Clone ID: PAT_MRT3847_3218C.1
attttttttttttaaaacaacatttgcaattttgcatgtgatataaactggaaaaaaagggggtttctaaaaacaagcaattggggtaattataataaacaaaaggggtaaaaacccgaaaagcaaacaaaaaaaaaagttaactacaaaaactaaatgcagggaaataaaaaacaggtactaaaccctaatcctaaccagggcaaaagagcaaaggaatcataaataaataaaaaggcataggaaataacaaaaaaacaataataccaactacaaataaaaaaatttaaataaaagaaaaaacaaactttctcaaataaccaatgg

SEQ ID NO: 67749 - DNA, 298 bp, Glycine max
  Clone ID: PAT_MRT3847_32190C.1
aggaatgcggccgctatagaacacccgggagacgttaccctattttatattgggtaatcaaatatgattaaccatccatggcacagagaagcacgtgatttcattataggatcccatggctataagtaccatatagcatcatatctctacgccgtgcaggatgacagaccaaagtcctttccccactgggagcgagcgtgcctattcatagaccatctaaaacttttgagataaccccttgagaggggtgtcctttaagacccacgaaaactgaagaagccctaggagctgaacctca

SEQ ID NO: 67750 - DNA, 223 bp, Glycine max
  Clone ID: PAT_MRT3847_32191C.1
tcgagaagacgacagaaggggtacatactttacgcttaatcgactatttttattgttagaatatatgaaaatatccattatccaatattatcttgatcatcttagatcatctcatagtattagtttccctatttccttattttatgatttgtttcctatttagttagaattatgattagcataaaattagggttagtgctctaggtttgtttgatgaacatat

SEQ ID NO: 67751 - DNA, 184 bp, Glycine max
  Clone ID: PAT_MRT3847_32192C.1
cccactcgttctacaaattctatcaaggtagccatatcttggtattcaaattcccaactgggatggtgtctttttccctgaggggagaagactgaaaaaatggatcacaatgccgattctcaacccactgaccttattaccattacccgttttctgcttaacgaaccatctaatcacccaaaat

SEQ ID NO: 67752 - DNA, 544 bp, Glycine max
  unsure (1)..(544): unsure at all n locations
  Clone ID: PAT_MRT3847_32193C.1
tcgatctatcgctacgaatgtgccagatgccgtgcactgagtgtgccgtaaaacacagcaaggatctttcgtgcagggttcctccaccagcctggtgttcctcatgcgctatcctcctgcacatgtttctcaaaaacttaaattgtgagtcaagcggagtcctctgccatagtattccaactattcgcgtctanatcggccattaagagagaagccaacctaaacgtagtaaaaaattacaatgtcactccgctcgtcactactgttcaaacgagtcttcaggttactatctatgtcacagaagacaagccagccacagaacaaaacggaagggggttgccacgaatgagctgcgctaaggacagtggcgcgttaaaattaaccccgccagctgctccacaaggggggtctccgtggttgttggtacttaacaataccgagattgatccgctgtggtgcaatgcggatgcgaaccaatgaagcaaacataacctaggcacgtaggggcatatttagccagcaagcccgagcgtatgaagtgcct

SEQ ID NO: 67753 - DNA, 503 bp, Glycine max
  Clone ID: PAT_MRT3847_32194C.1
tgtatgctccttttgccaagacactttccaattcaacagctgttaccacactgtcatcaaccttgaaccacctgctttggaaattcttcacatagcacacataatgacccgaaaaagcagcattcatgatatccaggtgaacaactaccccatatagcctgtatataggcaaatcactagtcccactcatgaaaggtgccaagtccagtatttcaggaaaccgaataggtttattgagcttcccaaattttccggactgaaatctctttaatgcaatagtaagaacattaggtgcctccaaaactgtcattttcttcttggccttctcataagatttacacctgacacatcggtacttgttttctccatccagagtctcagcacttgtaaactgtcagatccatcatcctttcttgacgctcagatttccctccacatttcatgcatttgatctgccaatacattatcagctttatgttccttgcccatcttacttgcactag

SEQ ID NO: 67754 - DNA, 761 bp, Glycine max
  Clone ID: PAT_MRT3847_32195C.1
atttcagattggttgatttagaggttgtggcgttggttgattgggacgccgaattggcggtggctcgggttgaggaatggagggagaaggagtactctgagaagtggttgagtgagtttgagaccaagttcgcgttccccgttagtttcccaactgggtttaagttcgagagggtttaaagagaggttgaagaattggcagaggcttccttacgccaagccttacgagaggaaagaggttgttcgggtgaggacgtgtggaggaatcgaacggtacgagaagagggctgtggctgttcttcatgagctgttgagtttgactgtggagaagatggtcgaggttgatcagctggctcattttcggagggactttggtgtcgaagttaatgtgcgtgaattgctgctgaggcaccctggtatattttacttatctactaaagggaagactctaactgtttttcttagggaagcttataggaaaggggggttggttgagccaaatcccgtgtatgagacgcgtaggaatatgttggatcttgtgttgttagggtgtaggaaaaccaaactattgttagattgtgatgagtctaataaggaagagagtaatgttgtagcctgtgaagtaaatgaggaaggtgaaagacaaggagattgggtgattcctttcttggagaaatgtgaggagaatagatccccttgatcaattggagaaattgttaacatggtattgggcttattgagttcattgccttctactttaaa

SEQ ID NO: 67755 - DNA, 126 bp, Glycine max
  Clone ID: PAT_MRT3847_32196C.1
aggaggagaccccattctataccggcacattcgaagaacccgtatacatggaatctagacaaaataggaaggagtcgaaccccccaaagctggtttcaagccaaccccatggcttccatgactttt

SEQ ID NO: 67756 - DNA, 383 bp, Glycine max
  Clone ID: PAT_MRT3847_32197C.1
ccctctgacttcgtgcgcggacgcgtggacggacacatgggctcgtttcgatacatcgaaccagtcacactgcataaaattgagagaaaactctgaaaacatgttggacaatgaggacctacttacacgaagacagagcttctctcggactccatcagatcaatgaaaacgataatggaatgctgcgagaagctgaggggaatgtgttttgcataaccaatagcacaccattctacaacacccttgtttctgagggtggtaggctctttattccttcaacaagatttgaaccttcaaaactgaagggtggtctatttgaagatcaaataaacaaacattcgaattttaattctaaaacctacattctattccattgtgacttt

SEQ ID NO: 67757 - DNA, 270 bp, Glycine max
  unsure (1)..(270): unsure at all n locations
  Clone ID: PAT_MRT3847_32198C.1
ccccacgcgcangtaagtacggaatccggnncgngnggacatgntnaaatcangggagaatttcaggatttcnactantnccaagntnccngncngggnnaaatccganagcngnngtnatanncctannngaattggnnangtctcgtgnctggttgngganncantnnaggtngcctaaatagggntcngagaagnnngagttnttcctngaangngactngggacgngantgnctnnngcngnatgaacctatntcnatccnagcac

SEQ ID NO: 67758 - DNA, 345 bp, Glycine max
  Clone ID: PAT_MRT3847_32199C.1
ggctcgagcctcgactctgtggatcatcgcacctcatgctggaagatgctgatgaccttcaagatggtgttcggcatgaccaacccgcttgcggcgaagctctctgacaccgtcatcatcctcataggctccatgcatcacacgttatgagatagaccagggccatactgcggtaagtttcagcatacatcaacttgatgcacgccgcaccgttgcagcctactccattcggggtgtgcgtaccatgcagcatgttatacatcatggtgtcggcatccacagctacgataggacactgactgggcataccacagctcctcaatgatgtacgctccgacaccgtcg

SEQ ID NO: 67759 - DNA, 252 bp, Glycine max
  unsure (1)..(252): unsure at all n locations
  Clone ID: PAT_MRT3847_3219C.1
gtcgcgttgtgttgcgtcgtgtcgtgcgctgttcctctgtctgtcgtttttgttttcagaccaaaccctagctccgcatcgcaaccatgtcgaccaagcaaggtggaaaagctaagcctttgaagaaacccaagtctggtnaaaanggtttgccgngtttgcattggnnacnttncggaggaaaaggnagagganaaggcgctnaaggagtttaaaccnngggcncaacaaggggagttttttggtttnctt

SEQ ID NO: 67760 - DNA, 341 bp, Glycine max
  Clone ID: PAT_MRT3847_321C.1
aattcggctcgaggcacaaacagatgattgtgagtggcaactacataatgatgcactagtcgtaactcattcatcgttcccggaccagttcaagaacttgttctactgtgcgatactacgcactccgtgacttgttatcctgcgcatctcttaccgagatcctgcccttcgcatcttcacgttccaccagctcatgggtgaagaatcaggagttgtgacacctgttgctaagaggactgcctccacatggctgactaaagtggtggaccataccaacactaacaggcagcaggaaatgatgggaattgtctcgcttctgtaactggcaagcagggcactca

SEQ ID NO: 67761 - DNA, 617 bp, Glycine max
  Clone ID: PAT_MRT3847_32200C.1
gtgaacgcaatcatccgcacattcggatcgcggcacagcgcttcccccgccggcgccgcgccgggcatcacctgcagcaggcccttgggcaagcccgcctcttcaaacagccgggcaatgagaaaacccccactgaccggggtctgcgggtcaggcttgagcaccactgcattgcctgccgccagcgccggggccactgagcgcagtgacagcaccagcggaaagttgaacggtgaaatcaccccgaccacgccgtggggctggcgccgtgcataggacagtcggccggctgcactgggcagcaccaccccgtgaggttgggacaacagccccgccgcctgatgcagcagcacaatcgcttcacgcacttcgtgctcgcccttgaacaacgcgcccccggtttcccgggcgacgtacagcgccagctcggcgaaggaccgctgggccaggtccggcgccttgcgaaacacctcggcacgctcccgtgggcccaacgcaaccgaggccggctgcgccagcgccgcactgcggcaggcgatggggatggcggccgggttggccatggcgcagcgcatcaggggttcgccggatggcgggttcatcacggtcattacaga

SEQ ID NO: 67762 - DNA, 433 bp, Glycine max
  Clone ID: PAT_MRT3847_32201C.1
gcccgggggctcagcagggtgagggggtggaatgctgaccagtctccatgctgttcgcaaagctggtccttatggcatcatcctaggatcagagagaaagacaagagaggagccgcgtgtgtcagggccagagatcgagctgcaggctcaccttaagggagccatccaagactccacactcaatggaactcactaaggctggcatcggaaagggtgccattaatgcctccgaagaggagcatatcatcctcaagtagagccgtccagtggaagaagctccaagctgtacgagctaatccacatgctcaccacagatcacaggactgtgggcaagaattacgcagagaagatattagaggagcagtgcctcagagagggtcgtctatcgggagcagcggactactccaaagagaaaggatcctgcgggaatgag

SEQ ID NO: 67763 - DNA, 1733 bp, Glycine max
  Clone ID: PAT_MRT3847_32202C.1
ggctcgagtgaaaatctgaggaacatttgtctctcatcaatggctgccacgagaccggtgcagtgtttgttacgaagggtttgcaggggaagtaggacttttggggttgccacagaagttaatgcttcttcttcatcttcttctcagaaaatcatcgacaaggaatatgaacacagtgcccacaattaccatccccttccgattgtattttctcaagcaaagggaacctctgtttgggatccagagggaaacaaatatcttgattttctatctggttactctgctgttaatcagggacactgccatcctaaaattctcaaagcattacaagaacaagcacaaaggctgactgtgagctctcgagccttctacaatgatcgctttccagtctttgctgagtatgtgacaaacatgtttggttatgatatggtacttcctatgaatactggtgctgaaggtgtggaaacagcactgaaattagcacgaaagtggggttatgaaaagaaaagaattcccaaagacgaggctattattgtctcatgttgtggctgcttccatggtcgtacactaggtgtcatatctttgagctgtgacaatgaagctacccgtggttttggtcctttattacctggcaatcttaaagttgattttggtgatgcagaagcccttgaacaaatttttaaagaaaaaggagagcacatagctgcatttattttagaacctgtccaaggtgaagctggggtgatatttcctccagatggttatttaaaagctgttagagatctttgctccaaatataatgtcttgatgattgctgatgaaattcaaactgggttagcaagaacggggaagatgctggcttgtgagtgggaagaagttcgcccagatgttctgatactagggaaagcattgggtggaggagttataccagttagtgcagttcttgcagacaaagatgtgatgctttgtatacaacctggacagcatggaagtacctttggtggaaatccaatggccagtgcagttgcaattgcctctctagaagtactaaaaaatgagagactcgttgagagatctgcccaaatgggagaggagcttactggtcagctgcttaagattcagcagcaatacccagactatgtgaaggaggtacggggaagaggattgttcattggagtggagtttaacagcaaaaaattgttcccagtatcaggctatgagctatgcaaaaaattgaagtatagaggagtccttgccaagccaacacatgatgcaattatccgctttactcccccactttgcataagtgtggatgagatccaacaaggttccaaggcactggctgatgttctggaaattgatctaccaaagttgcagaagacaaagccaatagatgctgctccagttgccactagtgcatgcgatcgttgtggtagagtcttgtattaaccataaaaagacacgtatgaattgcatgtgcctttagttttccttggaaaaaaatatatcacatgaagaatgttactccttatacatgaacagctggaaactatgttccaatattccatatatcatcataatataagttcatgatatatgtgataggtagctgtataaataaatatataggagttagaggactcattgtataactttcaatggttaatttgcgagataagatatatgattttattatggctagaacaaagttctctagacttgccattccatct

SEQ ID NO: 67764 - DNA, 173 bp, Glycine max
  Clone ID: PAT_MRT3847_32203C.1
gggaagagataacaatcactttgatgttttattatagaatacagttttgaaactaatatgctgaatactcttaggagccttagctttttactaagaccagatttagggtatggtcctattgggttagtagtgcgggcgattggcacaacccataattaagtttgaacacacaa

SEQ ID NO: 67765 - DNA, 245 bp, Glycine max
  Clone ID: PAT_MRT3847_32204C.1
acgcatgcacgcgctcggaagctgggtagtgcggtcgaggctcactcgcacgggaacggggacggagacagcaccattgatgcctaccgcggctgggttgaacggctcaaacgctcctgccaacatgtcgcaggcagctgaactattagagggcctctggttacctcgaccgggaattctgatgaagagacggagattgaacaagctataactggccagataggtaatgtgccaagcaagactgc

SEQ ID NO: 67766 - DNA, 273 bp, Glycine max
  Clone ID: PAT_MRT3847_32205C.1
tggcgaaaaagaatttaggagactatgcggactttcttagttctgaatcgtcgtactttttacagaagcgaccgatcatgagtccttccaaaacacgtaagatggatgctatgtccaaaaacacccacggaaagtttgaaaatgttagactgtgctgaacgccgagcaggaccagtcacacacaaaggtgtggggtgctacctactcataaaagcgtacggatcacactcctacccagagaccaacactcttggccacccattaaaggtttaa

SEQ ID NO: 67767 - DNA, 348 bp, Glycine max
  Clone ID: PAT_MRT3847_32206C.1
ctcttacccccttgtgttctatagctctgactatctttattatgcttgggacacaaccataggtcataccaggtggggaagctgaatacctcatatctttaattgcctctcaatttatgtaaaaaaatccatgccatggaagacatgtatcagaatgcctaaacactgggttgacgaaaaacaaggagaaaaaataacccacttgcctcagtcgaaattgctaatggttgctaagtagattatcacaagatacaggaaggggctctgacaagctcactctgagttaactaatcactaatgaaggtaaatatctataacgttcacaatagctgtagcggctgttatgtt

SEQ ID NO: 67768 - DNA, 2540 bp, Glycine max
  Clone ID: PAT_MRT3847_32207C.1
ggcaggttttagacgggagtgggtattcgaagaggatgggaaagcgaacatgaggggatagggcatggaagacgatcgtcaatgttcaatcttaccacactgtttgcacatcacgggaaaacagggatagaattggttgagaaggttaaggtttaaggggaagatcatgatatcatcaaaggatccaaagaagttcaggtcgagtaacgcaaggaagtgttaattaaggaataaagtgggtaaactgcaaataaaatgagcaagcctaacagaaaaaggtttggcacataagaaaagtttagcttgtggctgcatgagtccttacaaggatttggttgaatgtagatgtctatactttctatgcagcaatgaagacttcaatcagccctacattaaagggaaagccaatagctgaaaggatcatgtatacgctattcactgcttcctattgagagcaagggtcaggagtatgaactgacaagccaggctacattccacctaagctaggtccagaataaataattgtcccaaaaaatttcaaatagtatacttactacagagatatgaccagaaaaatttttgggaggtatgatcccaatttcattgctggtagcctggatgaagcataccttgatataactgaagtttgcagagaaaggaatgtcaaaagtgaagaagtaagttggcgcgtgctttggattaattttacaacgaaagacctttaatgtattagatttcttgattttgtaaatttggaatacgtagattgcccaagaactcagagctggggtttatgaagagactggtctcacatgcagtgctggagtggcaccaaatcgcttacttgctaaggttctgggttctatctcccaaacattttccccatagctatgttatcagcccgtttgttgaaggagaagctttaaagcaccttatcattttacatttaagatactaacccctttagtagagatgaaatgattgtttcatcttcctgggaaatttcatgctatggctttataatattgacattttactctcatataggtttgttcagacataaacaagccaaatggacagtatgttttgccaaatgaccgtatggctgttatgacctttgtatcctcccttcctatcagaaagattgggggcattggtaaggtcactgaacatattttgaagggagtttttggaattaacacatgtgagcagatgctggagaagagtagctacatttgtgcatttttctctcagtcaacagcagattttttttgctctgtaggtttaggtcttgggcagacagattctccccaagtaagatttcggaaaagtattagtagtgaaagaacattttctgccaccaaggatgaagtgctgttgcataaaaaattggaggagcttgctgaaatgctatcagctgacatgcaaaaagagggtctgtctgggcgaacattgactcttaaactaaaaactgcttcttttgaggttcgaactagagctgtgacattacagaagtacatcagctcaagtgaggatattttgaagcatgctaaaaagttgctacaagctgaacttcctatttcagtaagattgataggccttcgagtatcacagttcaatggagacaagtgtagtgctaagtctgatcctacacagaagaccattaccaatttcattacttcgggagatgtcaatagaaattgtagttcttttccagatgttgcagatcatgactttgtcagtaatgcagaaactgatatgtccattgacagtaggcagacaggtcaacttgattggagagatccttttgacggtaattatttgtcagatgtagactaccaaagctgcactgtccagaaaagtgatggtgtagaggaggtgcaaacatctagtaatgatgctacaagttctcactacagtggacttacagaagtactgggatcaacttcttacctggggcaggttgaaggcataaatgtgaagaatggatctaatctcctggaggatgagagacttgattcttgctgtcaggagaagacaatgttgtggctgaatgactacaaatgttcactttgtggaatagaactgcctccaagttttgttgaggaaagattggagcactctgattttcatcttgccgaaaagcttcaaaaggaagaatctagtatccaccaaaaatctgttccgagtcaaagtaagggtcagaaggatggagtcactagacaaagcaaatccaagaagcaaaagttgtcgcagaaagaaggcagttatacacccattgattatttttttgttaaaaagtaatcaaagctgtcaatttattataatgtacagaataactcaatttgttagttattgtataatatgcatgttatttttccttgtaacatgtataaaataataaattcatttacttgtaatttaagttgtaaaatgaaaccttgtaatttaggttgtatttaatattttcattcacgtgacatgtcccgtaagtaataatattattcgtacaatagtttatacaattgcaatattatttt

SEQ ID NO: 67769 - DNA, 721 bp, Glycine max
  Clone ID: PAT_MRT3847_32208C.1
accaaaaccactagcgtctggggaattgaattttccataaaatgggggaagctgagctttgagaaaatacacaaattatacaaactttcaacactacgcaaatacaagtacaaatcttgtaagatctcaagattgaataaaaggttactgcttcggtagcagaaagttgaagcgaatctcctctcgccctcaacctccttgcctctcgaaacaaatacgaatactttctcaattacatacaaaaagcaggggaaaaacgtttcaaaacttgaatgcaacaactgcttgctgactggggctcatagactaagttataaaatagcaacctcagctcggcgattctctaccagggaaactgcccacaaaaaaaggttaccaaatgaaatccagcagggctgtaaaatctttcagtttggcattcagcactgaatcaattaggacatataactgaaagatgaacaaggaatcaccataatcatgatgactttgtagtaaattaagaattcaatgtttgaacaatctaacagtttggatcatattcttgaaatcggctcttgaaatcttcaacaatttccttttcttcatctttgctatgtttgcgattcctccaatcagcattatctggcatattaagcaacccagcaagaacctgatgcatgtttactactgttaactctatctgataaatacaaatgattccgatcttataacaaaagcatgc

SEQ ID NO: 67770 - DNA, 271 bp, Glycine max
  Clone ID: PAT_MRT3847_32209C.1
ctttatcatggacgctgtggttcattgctggcattttcttatgctcttaaaccatgagttcggggttctctttgttctagctaatgacaactattttcactttgtgttagcagtaggtgcaagccggtcaagttgaagcatatgactaaggaagcgtttaaatcgaagtcctttttgagctgaaccatgattgagcttatactacaacccaccgacagtctcaataccaccctttaagctcaccttgttctttcgtataataatccatcat

SEQ ID NO: 67771 - DNA, 385 bp, Glycine max
  unsure (1)..(385): unsure at all n locations
  Clone ID: PAT_MRT3847_3220C.1
ggggtacaaaaaatatctgcctttacttgttttggttaggatgaaatgtgaaaatgcatgtgttgatattatttgcttcattgctttagcacttatccaatgggttatggttctggtgaaaagctctgtgattgttcaatgggtttctagaatgaatgttctatggaattatcattcaacccaatgaccagtttagttagtgattctcatttttatggctcttgccctgaagtcaagttgcttcttgcaattgaagaaacctgaagctggtttcaatgtttgtttttcatctaagaaagctataatctccgtgaaacgacacactcccgtggctgctatcangaccatggaaacagtgggactctctgcaacattcaccacgttg

SEQ ID NO: 67772 - DNA, 481 bp, Glycine max
  Clone ID: PAT_MRT3847_32210C.1
aaaaaaccccaggaatggctagctaaacttggtgatcatcatcaaggtggggggcccaagcccaaaagttttttttttttttacaatcacattttttgatactccaacaactggatgcggttttgctttttcaggtgttcataaaaccttttgatgaaatcctcagcctgatcattaacatggccatttccatttccacccttttggtcttcatttttttcatccccaaaggagtagttggagatcctcaccgaaaagggtgattattattaaaggagggggctttttttttctcccggggcaaaatcagatgctttaattttatcaaacctaaggttgaaagggttttcaggggttattttattaggccccaaaaccacaggcctattattaggctttttaacaacctttggggtgtttatgcaagggaaattgaaaagatgcttcctttttggcccatggaaaaaaacaagatttggac

SEQ ID NO: 67773 - DNA, 612 bp, Glycine max
  Clone ID: PAT_MRT3847_32211C.1
tccataaaatggtggaagctgagctttgagaaaatacacaaattgtacaaacttttaacacaacgcaactgcaagtacaaatcttgtaagatctcaagattgaataaaaaaggttactgcttcacgagcagaagttgaagcgaatctcctctcgccctcaacctccttgcctctcgaaacaaatacaaatatcttcttaattacgtacaaaaagcaggtgaaaatcgtttcaaaacttgaatgcaacagctgcttgctgactgatgctcatagcctaagttataaaatggcaacctcggcttggtgattctttgcctgaaaataaggtgcatgtaacatctgacaaaaaaaatagcaacgcaggttttgagacacaagctacaggaagtataagaaaggaaagtgaagcttaccacagaagctgctgacaaaaaaaggttaccaaatgaaatccagcagggctgtaaaatctttcagtttggcattcagcactgaatcaattagggcatataaccgaaagatgaacaaggaatcaccataatcatgatgactttctagtaaattaagaattcactgtacgaacaatctaacagtttggatcatattcttgaa

SEQ ID NO: 67774 - DNA, 292 bp, Glycine max
  unsure (1)..(292): unsure at all n locations
  Clone ID: PAT_MRT3847_32212C.1
catttatccatttncatttnctctctnanttttcaagaatcgtaagctcatgggaaagtcttanaccaactgtgagtgcngattaccagaaggncgtngagaaggcgaagaagaagctcagaggcttcatcgctgagaagagatgcgctcctctaatgctccgtttggcatggcactctgctggaacctttgacaagggcacgaagaccggtggacccttcgggaaccatcaagcacnctgccgaactggctcacagcgctaanaacggtcttgacatcgtgttaggctttt

SEQ ID NO: 67775 - DNA, 1312 bp, Glycine max
  Clone ID: PAT_MRT3847_32213C.1
ggctaagccgatgagggggaggaagaatatcatcaaggtcatatagagccagaagggcttcagatcgttttatgcctacttctcaaaagcagggatcatgcaaggtccgatcatatatatttgggcgagatgacagcaacagcaggagttcaatattgatctcagaggattctttagatacgattcaaacggagagtcaaccaccaaaagcggcttctgccaagtttcaaagaaatacgcagaacaaaaacaccaccatgaattctgcatctaaggagtcaaatgtgtcgcttttggatatattaaggaagtcttcacatcatgcagatcacagtttccagaatgccaacgttcaaccaaagacatcaatatttgatgcattcaagttaatgaagaagccaaccaaggcggaggcaagagtttgataagttttgaaaaagtctgagggtcactctgaaaaaggtgaatcaattgatcccgcagttattttcagataaaaaatatacgaaaaaaatatataatgatgaagaaacttgtgtaaagcaagccagacaatccctctattttaaaactgaggaaaaagctaaattcttttctccaggtgaggacgaaaatagcagggaagttttcagtctaataaagaaatttaatgtgcccgatatcaagagaaaaggaaaaactacttccatctttgctatgccgagcattggacagaacataaatatatcatcaaagtcatcttttgttggccgggcttcagatcattttatgcccacttctcgaaagcagggatcatgtaaggtccgatcatatatatttgggcgagatgacagcaacagcaggagttcaatattgatgtcagaggattcttcagatacgattcaaacggagagtcaaccaccaaaagcggcttctgccaagtttcaaagaaatatgcagaacaaaaacaccaccttgaattctgcatctaaagagtctagtgtgtcacttttggatatattaaggaagtctttacatcatgcagatcacagttttcagaatgtcaacgttcaaccaaagacatcaatatttgatgcattcaagttagtgaagaagccaaccaaggcggaggcaagagtttgattgaagttttggtcatatttgtatgcttaaaccttaaaccttcatcaattatcatctaatttattttgatccttgaaataatctgaaaaaaagagatatctttttcttctgtatgtgaagtaagagtcaagtaacattgttgtttgtatataaaaaactgtgtcaattcttgaacgattttattgtcatt

SEQ ID NO: 67776 - DNA, 403 bp, Glycine max
  Clone ID: PAT_MRT3847_32214C.1
ggaccaaagggaaaacccacccaagaactttgatataaatcatcctaggaaaaaacagaaaaattaaacagggggggatccatttgcctaagggggaataaaaagtataaaatttcaagccgggaataattaaaggaaaaaaaaacaaaaaacagaggtaacatttttgaaaaccaaattaggactacccttatggacccaaaccaaaccctcacggaaaaaaaaattcaaaaaactagggccgaaaaattctgtttaagttggggaaaggggcaggaaatttgtggatgcaaaaaacccaagggttcctaaaaggcttggggactcggcgcatggggccccaaaccacactgttgcccttgaagccagaaccaaatgcgaggtgccaaaaacgggctccttt

SEQ ID NO: 67777 - DNA, 257 bp, Glycine max
  Clone ID: PAT_MRT3847_32215C.1
cgaattccagttcgacccacgcgtacgcttagtttcacttcttggaggagtcaaatgctgaactgctttgtaaggtttgagtgtctagtgattggatcagtataggtggatctggttcatagagttcttcaaggattcaagtgaccattcaatgctattgggatctatctactcgatgaagctgtctatgtccctatctgcaccttatagcaatatggggcattcttgtgtatacactagctttgatgtagtcttct

SEQ ID NO: 67778 - DNA, 1368 bp, Glycine max
  Clone ID: PAT_MRT3847_32216C.1
gaatactgacattagaacctgattcactagtatttaccataagaagcattatggttttgtggatgatatgcagttgatatcaccccaaaataataaaatgacacaatcaaatgaaatgaatatcacgggtcatgcggtgaatacatgtccacttgaattccatagatgtcatcttgacttcaatatagaagtcggtgggaaaaatgtcagaaaatttcaagatttctctcaactatcatacatatttgaatgaaaattgagttattgatgcaaggcgtcttccttgtacttgatatgggtaggagtaggacaatggcatagaaattcactacaacttccagattataagaaaactggtttagagggagtattaggaaaggtcaaaggttcaaggtgaaacctcaaagtaaattaggatggcttatagtattttgttggtacaaatggcatctttgtaacaactccttcattagactttcctcgaataataatctttactttggtgcctgccttgtgcaatcctgatttcacatatccaatggctatgttcttcttgaggcaaggactgaatccgccacttgaaacttccccaatgttgtttcctccttcatcttgaatctcactgtggcttctgggaggagggccagaagaaaagaaaccaacacgcctgatcttaggaccttcttcaagctgttttagtataacatcagcccctagaaaacccccttcagctctccttctcttccctatggcccatgtcagtcctgcctcaataggtgtaatgtgctgttccaagtcattgccatataaacacaatccagcttcaaggcgtagactatctcgagcacctaatcctgtcaatcttatcttcccttcagatttttcaagaattgccttggcaagatccactgcactctctgagggaattgatatctcaaatccatcttccccagtataccctgtccgtgtgagaaagcactgcacaccattgatgtccaacacttggaaacccccaaagtacatcttgcttaaatctgcttttgtcaggtgttgaagaaccggagcagcaagaggaccctgcagagcaagaagagatctctcatcatggatgtgccatgacacatcaccacctttggccttgaatgccttcatatgctcctcaatatgagccagatctttatccctgcatccagcattcacaaccaagtatatgtgatcatccttcaccttggtaatcactgaatcatcaattgcccctcctttttcatttgtgaagacagtcaacgaaccagttccaggggcaagcccagcaacatctgcaatgacaagcttttcaaggaatgggacagagtcctttcccttgaggct

SEQ ID NO: 67779 - DNA, 613 bp, Glycine max
  Clone ID: PAT_MRT3847_32217C.1
gaaatgaatatcgcaggtcatgcagtgaatacatgtccacttttaattccatagatttcatcttgacttcaatatagaagttggtgggaacaatgtgagaaaatttcaagatttatctcaactatcatacgtgtttggatgaaaattgagttattaatgcaaggcgttctccttgtacttgatgtgggtaggacaatggcatagaaatccattacaacttccagattataagaaaactggttaagggggagtattgggaaaggtcaaaggtgaaacctcaaagtaaattaggacggcttatagtattttgttggtacaaatggcatctttgtaacaactccttcattagactttcctcgaataataatctttactttggtgcctgctttgtgcaatcctgatttcacatatccaatggctatgttcttcttgaggcaaggactgaatccgccacttgtgacttccccaatgttgttccctccttcatcttgaatctcactgtggcttctgggaggagggccagaagaaaagaaaccaacacgcctgatcttagggccttcttcaagctgttttagtataacatcagcacctagaaaacccccttctgctctcc

SEQ ID NO: 67780 - DNA, 335 bp, Glycine max
  Clone ID: PAT_MRT3847_32218C.1
gaacacccgggaccaaccacgcgcccttcctcgcgaccgaaaggacacacacaagcaggaccccacaaaaaaaaccccgggggggccacaaacacacccagaaagcgaagccgcaaatgcaaagaaggagaccaaccacccgccccaaagcaccggccgaaaacgccaccccaaaggcagcagcagcaaccgacgaaggagcaacaaaaaaccctcaccggaaaaaaaacccaaacctctgaggcaacaaaaaaacaaatcaaaagaaaggaaaaacggcgaaggcccaggaaaacagccccgaaagcaaaggcgaaggaaccgccccaaggaaa

SEQ ID NO: 67781 - DNA, 251 bp, Glycine max
  Clone ID: PAT_MRT3847_32219C.1
ctcagcctctccgtaacgacacgaccgaaaactacatacactccgctgcgacgaccagcgacacctgcgaaccgcgtttgacgggctgcaacgacacgagcgccacgctccactttctttttcgccgctgagcctttaccaccctctccaataccccagcaagtcgactgcggccatgcctaccacgccgcctccgctcgaccgagcagagatcttcagcacggcagacgcagcggaccgcaaggaccctg

SEQ ID NO: 67782 - DNA, 217 bp, Glycine max
  Clone ID: PAT_MRT3847_3221C.1
ctggaggatcgctcacttgtagggctagatgaggttatttcaccaagttcatttagctactgaactgcactcttacactgttggattggaggaaacggatttaatgcttgcatctgtagtggtacaccatgcaagaccgacatagctattgatgtgtcttctaggcaattgtagattgctcgccagacaagagatgtagaatgatgtatcatgagcc

SEQ ID NO: 67783 - DNA, 2202 bp, Glycine max
  Clone ID: PAT_MRT3847_32220C.1
aattcggctcgaggttctgcataccgcattttccccaagacccagaaatatgggttatctgagcaaagcttccaaaaccctaaggcaatcgaattacctatcgttgttgtgcaattccaatttcaatttcaatccattaacgaacagaataacccatgaacgtttttctgtgacgcgtgcactgttgtgttcccagacacgccaaaacagcaccacgagagagaaaagcaccatagatttgagccaatatccaaaagagctcgttagaaacttctcaatcattgcacacgttgatcatggcaagtccacactcgctgatcggcttctagaactcactggaaccattaagaaaggccacggccaaccccagtatcttgataaactgcaggtggagagagaaagaggaatcacagttaaagcccagacagcaacaatgttttataagcacggtgtaaatggtgatgattgcagtgatggaaaggagtcacctaagttcttgctgaatcttattgacactcctgggcatgttgactttagttatgaggtgtccaggtcactggcagcttgtcagggtgtgcttttggttgttgatgctgctcagggagtccaagcacaaactgttgctaacttttaccttgcctttgagtctaacctagcaattgtgcctgttataaagcccgagattgaccatgcacaagattgaccagccaactgctgatcctgattgcgctaaagcccaattgaaatcatatggtgttctctggtctttatccagctgatggatctgattttgaagctctaaatcatgcaatagagaggctgacatgcaatgatgctagtgtctctattactaaagaaactagcactgctctaggtctggggttcaggttgggtttttaggccttctgcacatggattttttcatcaacggcttgaacaggagtatggagctcatgttatatcaactgttcctactgtgccttatatatttgagtttcatgatggaagcaagttagaagttcagaatcccgcttcattaccctctaatcctaagcataaagtgacagcctgttgggaacctacagtattagctactataatcattcctagtgagtatgtgggacctgttattacccttgtctctgagcgtaggggtcagcagttggagtactcattcatcgacagtcaacgggtattcatgaagtaccgcctgcctttgagagaaattgttgttgacttttataatgaattgaagagcataacatcaggctatgcatcatttgattatgaggactcagattatcaacaagctgatatggtgaaactggatattctcttgaatggacaacctgttgatgcaatggctaccatagttcatagcgcaaaagcatatcgtgttgggcgtgaactgacagagaaattgaagggcgtcttagacaggccaatgttcgaggtaaacatatctgccgccattgggtcaaaaatcatagcaagagagacgatttccgctatgaggaaaaatgttcttgccaagtgttatggtggtgatattactcgaaaaaggaagctattggagaagcaaaaggaaggaaagaagcgaatgaaacgtgttggttctgttgatataccacaagaagcatttcacgaactattaaaggtttcttagctgacatgtttgaagatatttgtggattacacaatgattagatgttttggaaacgacgccagccatatgttctattcaaagtgctttagaatgaggctgggaagaataaagccggtgccggttgattaatgcttgccatggactcctatacaccttgaatgctttgtcgaggtcttgtgtggatctgcacctgttacagtcctgctgcagcatatattaatcaaataaaccttacaaacattttgtagcagtaattttcaactgtagctgtagccatgttcttgatacggtacaataatcttgtctttttgatgtttttttatttatttatttaaatttgagaaggtatatagtttgaagggaatgatcctctccagtgacattatcacgggatgagagatcttatcccttcactaaattttattaatataatacatttgtattataaaatgaaggtttaaaagaattaatgatgacatttaacacttgagaatctcaaaaaaaaaaaaaaaaaaaaaaaaaaaaaaaaaaaaaaa

SEQ ID NO: 67784 - DNA, 448 bp, Glycine max
  unsure (1)..(448): unsure at all n locations
  Clone ID: PAT_MRT3847_32221C.1
attggcttggaacctttgggctgatttatgtgcttgcatggtcgtgagaagatgatagaagggggcgcccctcccttcccgcgtaataataataatcgaagacgaacaactactaagtgctagagaagaagaatgacaatacggagaagttatcaatcttaccgacgttcntcttcttccttatatccgaaaggataatccttaccgacgacgagttcaaaatcccgtccgaagaggagacgaaagccgtaagggaagtagtctctaaaactactaacctctatctaaaagaagacgtttcgaaaacaccttcggtgggcccggcgttagcgggaataagtctaaagtaagcgaaagaagacggcgctgcgctcgatcatgacgatgatgatgaacgaagtaccacctgggcggaaaacgacggcttcgcggaaagtcgaagtcccaa

SEQ ID NO: 67785 - DNA, 371 bp, Glycine max
  Clone ID: PAT_MRT3847_32222C.1
gtgtcttcttttattttgggaaattgtttgaacaggttgtccatttttaatgttggaaaggaacaacttttccaaacaacatgcgaaaaagaaacctcaagggtcaaaaatgggcagcctaaccagggagcgaccccaaaataacggaccggcgcttggtggccgcccaacattccctaaagggggcgggataaaaacatggcttgaatcattggaactcgctgttaacatgtggaaaatgttatgcgctccaaagttcacacacaaataaaaccggagacataaaggggaaaaccgggggtgcccaacgggtcaagtaagacacactgattgcggtgcactctatgtcccctttccaagcgggaaacctg

SEQ ID NO: 67786 - DNA, 263 bp, Glycine max
  Clone ID: PAT_MRT3847_32223C.1
ctccaatgtagtacgaggaaataaacatgcaacttttttctgcctccaatcgccatggccaccaccacccaatggagttccctttctctctctcttctccttctctccatcgccctcttccaaaccctaacccccaattcctcgccgtcgagccctcctcccatctacatcgtgcgtcttcagccactacgctgccgccgatcgtcaccgcgcctacctcgaatctgcactctgtccaagacgctggcggtggatcccgcggc

SEQ ID NO: 67787 - DNA, 455 bp, Glycine max
  Clone ID: PAT_MRT3847_32224C.1
gctcggaattcggctcgagaaaaaaaaaaaaaaaaaaaaaaaaaataataataaaaaacaaaaaataaaaaaaaaataaggggaattttaaaaaaataaaaaatgtatatacccatgctagacgcttatgcctaatgtgctttacaaatcgggggtttttggcatgaacattaatgcctgcaagggctggtatgattgtcttaagtccaacctggggtcgaaaggaaccatctaaatgctcgttggtggtgctgttgatattaagcttaccattagatggtaattctgtgttgaaagagatgcgttccctatacccgactgcttattatggatgctatatcggctttggcgcaggatgatgctcggggtgttttcaccactactactgtgatcttcattgtcgatcttttgatacaatcatacccgttcattggtgaatgtttgctttctcctct

SEQ ID NO: 67788 - DNA, 353 bp, Glycine max
  Clone ID: PAT_MRT3847_32225C.1
cctctagagcggccgccctttttttttttccgtattctgaacccccgaaggttgtggttgggttgtcaaatactcatcctagctctgaaaaaaacacaaaaggggcggccgtccgcgcagccgtctgctaggcgtcgccttcgttgcgagctgacgccccgcgcccgcggggggggagaggtatattttttttgttcgaggccggcgagcggggcccctgcgctgtgtgccgccgacaccccccacgactcgtgaatgatgggcagcgggcgtcatgggaatgggcctccgcgggatgacaatcggcccaagtgggggccgccactctttctgtttttttatgccctttggct

SEQ ID NO: 67789 - DNA, 193 bp, Glycine max
  Clone ID: PAT_MRT3847_32226C.1
acgcgtccaaacacctgttagagtactatttaacggacatgcgtaaaaaaactgcttatagattgtgggtcaggaaaagactactcttctaatcatactaaaacttattttttgagcatttatagggacatacattctcttatctatatgaggatgcaatcacttctttccatcaccaagtaattggattttg

SEQ ID NO: 67790 - DNA, 407 bp, Glycine max
  unsure (1)..(407): unsure at all n locations
  Clone ID: PAT_MRT3847_32227C.1
anaccattcaattagttttcaccacacacgcganggcangagcatanatataacacgggggcacggcaaaacagacaacgccaggggccaggcgaacggagccgactacgggccctgcataccgccgacgaaaactgcctaccaccgtactgggcgcagaggatgcctcggctgctgctgcgggtgcctcttcagacgaatcaccaagctgatgctaaccgtgaacatcatcattggcatcggcgagatccttttgtggctcatagtccgacccaacgtggagaaatgccacgtgaccgaggccaccctgacgcagatgaactacacccccaacaacacgctgcactacgaccgcgccctgaacataacgtgaacgaaaccccaacaagaggctcggaatctactac

SEQ ID NO: 67791 - DNA, 328 bp, Glycine max
  Clone ID: PAT_MRT3847_32228C.1
agatagattagagggtataacggacatacagtagatggtaagtttcagaagacatggaatacgcccttcactgaaaaaagcctgaccattgtgagactgcctcacaccctctgcataagaatgtgaagcccatggattaagagtaggcattaaggggcagacaaaatcaaagatcgacttgcaacaatgcaagaattaaatattataaatgataaatccgtgatcagcatatatggagagtggatagaaccagcagagtcatttacggttgctattattcgagtttttgggacggttaggaacacacttgctactactccctttagag

SEQ ID NO: 67792 - DNA, 273 bp, Glycine max
  Clone ID: PAT_MRT3847_32229C.1
cggaggcaaccgcgccggagcccggggcccgaaaaacggggtgtctatcgaaaacccggcacgcgggctcacgaagaggcagacacgcaccaaagatgcagcgggcggacccaagaagagtcagagaacgaacagaaggcccaaaaaacggccctgggggaacaaagagaaaccgaggaggagtgcaggacgaaagaagaacggacagcccgacagcgcgcgctgagagaacaagcgaaccgcgaagcaagacagacagggacaaagggagaa

SEQ ID NO: 67793 - DNA, 456 bp, Glycine max
  Clone ID: PAT_MRT3847_3222C.1
aattcgagcggccgctttttttattgtatattaaatatatttattggatcgctataattacggatattgttataatatgagaaggataaaataaaagctgatataataaattagcactagaaaaatactaaatatatactaactttttctttcatatcattttttatctctatttttatttttcatcgtattatttgttacatttataatttttatcttctttatctagtttttctttttgttcatacgtcccaaaaatagaattgtgtatatcattactcttaatactttataaaactgtgaaggatttttttttcagacatacttttaataaaaataattcatttatttaaaatacatatgtacgaatctataattctacataatagctaaactcgtcttacatataataacttaaaattatgcaaattcataacttaatcttatatacctact

SEQ ID NO: 67794 - DNA, 270 bp, Glycine max
  Clone ID: PAT_MRT3847_32230C.1
ttagaattcggcgtcgagttaaattttttttttgtgagtatgtttatgaattacagggggtgggccccttgttgtgcaacggtaccctttcgatacaaaaatttgagattaagtccttgagtgatcattgcattacaataatgtgtgacataaaaggtgtaattcaaggactcttaattttttcaaaaagattggtgccttttgaggaaagagcctcaaatgccctttttgccaaaaagaggttggaaagtttctatggattgaagtttg

SEQ ID NO: 67795 - DNA, 487 bp, Glycine max
  unsure (1)..(487): unsure at all n locations
  Clone ID: PAT_MRT3847_32231C.1
cttcaagaacacatggagcattgaatatactgtaactgttccagctcaatgccacccttggcattctctttgccaaccaagtcaattatgctgccaacaaggtgaaagcattgaattaatggtttagtgagagtggtgctggtcaaaatcaaaattgatggcctgatcagagttattcttcatatagattctgccagagtgccagggattgaagttatgaaccccaatattggtcaatgctggcgaatagcaagtgaatttattgtggaagattagtccatggaatgaggttacaatggacatgtgatgtctacttgttttggctgcaaaactaagctcttacatatggttagatgtgaatcatgtgatggtcaaggtccttgttcggaatgctttgtttaacctaaaggaaacctttctattgngtctaggatataactctttaaatatggtatgcaattccattgtccatgataaactgggggac

SEQ ID NO: 67796 - DNA, 461 bp, Glycine max
  unsure (1)..(461): unsure at all n locations
  Clone ID: PAT_MRT3847_32232C.1
ccaggnnttcatctgccatcatcaatggcctcagnaagaccttnctccaatggtcttgctgaggcgattgcacaggctaagactgcaccaaggtacgtccccaatgcagaccgcaagatctcgtgcaaacaacgcctgagggacaatgtgccagccataagcttggcgtgctatcacacaaagaccataagaggcaaaatgttcctgcagattgccgagagaacatagctgactacggactacgagaccaatgtggatcatattacaacacaggtaaccaacaagctgatttctgtcctaaatgcctcaaactgcaccaacacacatgtgtttgtcttggacgctgaccacactactctatataataggcaggattcagctaactatgaatcgggagaggaaccacacaatacgacggcgtttaagaactgggtgcttgatggccaggcgttcccactgcc

SEQ ID NO: 67797 - DNA, 399 bp, Glycine max
  Clone ID: PAT_MRT3847_32233C.1
ttttttttttttttttttaatttttttttttttttttttttttcctttgtgattttgggacatattctactcgaccaaacaatggaaaaaagcacacaaaacacaagccgatagatacgccacagcacgcaaaccaaaaaaatgacaaagacctactcccaacactcaaaaccaaagcaaaacagggacagcctccgcaccccaaagagcgaactagaacaaaagaaaaaccacactctcactggccggggcccgggtttgcctctacccttgcaacgcctaaatattaacaggaaccaggaccccccaaaaaataagaggaacaagtccctttccaacacaaatgagaagggggcggaatcaccaccaccaaaataaacttggagccgttgtccccac

SEQ ID NO: 67798 - DNA, 588 bp, Glycine max
  unsure (1)..(588): unsure at all n locations
  Clone ID: PAT_MRT3847_32235C.1
attgattgtttgcagatggaccccttaacggaaccactaagtgcaccatttgcaagcagcaagtgcaccagaaatgcctaagtacctgccacacctgtgcttactctaaaggtgttatttccatgttgagatctttttgcatttgctaccatacatattatttttggtacactaattaaatgtgttctatcatgaaagtgcatgactaaatttctgatgtgttctatatggcaaggagtttgtgcaaatggtgtggaaagcaagttcttgataccaagttttaccaaacaaagcaatgtgtagtggatactttgtgttgaattgcgtgctgtaatcttcttttaaatgcattaatagcattacctttctttctatttgtctaagttgatcctattgctaacaatgtaactgaagctgtataaagaagaaatacagtgaaggattttctgttatctgtcttttgcaatgtactcttgcatgtttattctaaatcaaaaacatatgccatggcgtgaaaaaaannnnnnnnnnnnnnnnnnnnnnnnnnnnnnnnnnnnnnnnaaaaaaaaaaaaaaaaaaaaaaaggaa

SEQ ID NO: 67799 - DNA, 736 bp, Glycine max
  Clone ID: PAT_MRT3847_32236C.1
ttacggctggaattggacgagtgaacgggacgactgaagcgaaagggtcatagggtactgttgtggttagagattcgaattttgattatcgaatcgcaaaattctgaatcaatcaatcagtaattagagccattaacgactgcaatggtctgcgagaagtgtgagaagaaattatcgaaggtgatagtaccagacaaatggaaagaaggggccagcaatactaccgagggtggtggccgcaagatcaacgagaacaagcttctctccaagaaaaacagatggaccccttacggaaacactaagtgcaccatttgcaagcagcaagtgcaccagaatgctaagtactgccacacctgtgcttactctaaaggagtttgtgcaatgtgtggaaagcaagttcttgataccaagttttacaaacaaagcaatgtgtagtggatacttgtgttgtattgcgtgctgtatcttcttttagatgcataatagcattacctttctttctatttgtctagttgatcctattgctaacaatgtaactgaagctgtataaagaagaaatacagtgagggattttctgtttgctaactatgtgaagctgtaaagaacaaatacagcgagggattttcagatatctggcttttgtaatatacttacatggttattctagatccaaaacatattctatggcgtgaaaactccggttccccatctaacaacaggaagaaacgcgtggaca

SEQ ID NO: 67800 - DNA, 145 bp, Glycine max
  Clone ID: PAT_MRT3847_32237C.1
ttagtagggggcgcgccctccttttttttttttttatatgaagacagcatttcatcgatagagaggaataaagagacatgcatttgaatactatgctgagacacctgggctagggaaaagaaaaccccactactcattagtatcc

SEQ ID NO: 67801 - DNA, 250 bp, Glycine max
  Clone ID: PAT_MRT3847_32238C.1
ggatccagagtggcttagagctggagcccaaatattgtacgaaggttgtctttactatacgggaaacctaaaccttggccatgcacaaagcatcctgggagtgctgggcttccaagatatcctaagggaacttgctgaacggtccctcctcaatgtgcttgatggcgaggaagagggcaacaacctctaacctgagtggcacttctttcacccaccgagcgtaattgagaaccccgacaaatttcctgag

SEQ ID NO: 67802 - DNA, 607 bp, Glycine max
  Clone ID: PAT_MRT3847_32239C.1
cacccgtacttgcaaccagcagcaacaatcagctcggttgaggttagaacacaacacactttctctctctttgtctctctctctagaatcacgatcatgaagtacagcaacaacagcaccaccaatttctgcgccgcgttgttttttgttctcatattccattagtgtcagtgtcactgtctctattccgcttcactttcccttcttcttcttccactctttccaaccgacacaaaaatggaaacggtggccgccgcttttttcttcgccgccgtggttctgtcggcggttggcgggtcgccggtgactctgacgctggaaagagcgttcccttcgaatgatggggtggaattgagtgagctcagagcgagggacagcctcagacatcgtagaatgttgcagtctactaactacgttgtagatttccctgtcaaaggcaccttcgatccctcacaagtcgggctttactatacaaaggtgaaattgggtactcctccaaaggaattctatgtgcagattgacacttggcagtgatggtctctgggttagttgtggggccggccacggttgtcctcagacaaatgggctttcaattcaactcaattac

SEQ ID NO: 67803 - DNA, 835 bp, Glycine max
  Clone ID: PAT_MRT3847_3223C.1
tagtcccccatgagaaggttactgctgaggtttgatgataagcattgaaaaaggacatggtgggacatcggatgccagcttcttgtagggttgtttttcttcatgctggatttggtggcaaatgattttttgtttatataaaaaaaattgtcgttagacaggttcactgtaggaggaatgattggttgatccggcttttgctctgttgccttctatttcaactgccgtcgaaagggaaagaagaataatgaaacaggcatatgcttcgctcaagaggctgaagataattgtaatcaggacatagtagagtatatacatcaattgcattcatgattgttattctaacccatcagcattcattgtagcattctttaatgtagggcctttttcctcactagaactgatttcactgatgtcttatcaaactcttttgaaagactggagtatagcagatctcagtaaagagaatattgttcattgttcactgatgtcttgtcaaactcttttgaaagactggagtatataaatcatagcagatctcactaaagagaatattgttcattgcagatagtaaatagaatcagtaaatagaatcttgctctgcaagagatgtttctgctggttttgccgttgtcttggtgaaaactgaagcatatggggaagggggaatttcctggggtgtcatgaaccagttgaaagttattttcgctttcgtgtccacccgagttccaaagtgtatatgcatcaatttgacattctgattccaaagtgcagcaaatatgaattggaattgtagtttgttttattatttaaaaaaaaaaaaaaaaaacctcgt

SEQ ID NO: 67804 - DNA, 508 bp, Glycine max
  unsure (1)..(508): unsure at all n locations
  Clone ID: PAT_MRT3847_32240C.1
ctagagcggccgcccggggtttgggggggtttttttttttttttttttggggggttttttttttttttttttttttttttttttttattggggggngggcccccggaaaggcaaatatttttacccgcccaaagaaagaaaaaccttttgtttttggaagatcatagcccgggtcagacgccattaaaattttccttggcccaaacaaaaaatttctaattacgggcccacccctgaaaatatcacccctaataggggcatattgcccgaaccggcccaaaatttacaaacccgggggaattatacattttccccagcccctctttgcaactcacggggggcaacagccaacctttttggggccaatcgttcttccagggctcgggcccctctttctcggctccggggtgccccatttggggcccaacccgggaaaggctctctttcccgactggggccttggccctctttggaaggctcatatcttccgcagagccttcggtgaaat

SEQ ID NO: 67805 - DNA, 491 bp, Glycine max
  Clone ID: PAT_MRT3847_32241C.1
gtagctgattgtatgggctccaacaagagaaaaagcaattgaacgcatgaaaagggcacttgatgacactattatcacaggagttcctactacaattgattatcataaacttatccttgacatagaggatttcagaaatggaaaggttgatactgcttttattccaaaacacgaggaagagttggcaatggtaagaacccaatataaccttgaaaatattaatgtccctaacaatggatttaaaaattactttcgttgttgaagctgaccaattttggtaggaaaactcacttgaacttgcatgtagaatcatacactgaatccttcaatactacctatcatgattgattgtatagtgttgaaatctcctgttccagctgatagaccttgtccaggattttgagacaattatggaaagctgcttttagaagtttttggctcatcaaatcagggtttggattggatacaaaaatgtagtgttacagtctagt

SEQ ID NO: 67806 - DNA, 110 bp, Glycine max
  unsure (1)..(110): unsure at all n locations
  Clone ID: PAT_MRT3847_32242C.1
gnnaagctgaaccaaagangcnaagcnccagcgcctccatncataccaagcgccntaacgactactaggtgcttcatatagcnntggtggatatggagatacttacgatg

SEQ ID NO: 67807 - DNA, 2073 bp, Glycine max
  Clone ID: PAT_MRT3847_32243C.1
gatccatataacaaacccagtctattaggataaggttaagtttttattactgtatctagcatcgagctcttaatacaagatcctctaaaccaaccattgtgacaactatgacttccgaaaaaaatgcaaggacctattcttaattccttgcaataatatttgggatgaaatcaaacatgaattaattgattttacaatataattatgtgaagaaaaggaatgtacgagactaattatcaaaatttcattaaaacattcacttcgaggcactgacaacacggcgattacaaaaagcaattctgacatcacacaatcatattcatcaggcagttgaaccagctagttcgttcaccctgttagcgagtaccatcttctgcggaggcattgccaactcttcctcgtgttttggaataaaagcagtatcaacctttccatttctgaaatcctctatgtcaaggataagtttatgataatcaattgtagtaggaactcctgtgataatagtgtcatcaagtgcccttttcatgcgttcaattgctttttctcttgttggagcccatacaatcagctttccaagaagggagtcatagcttggaggaaccacataatcaggataaacatggctatccattctaacaaatggacctccagatggcaagtatgctgtaattctacctggccctggtctaaatcccttaaaagcatcttctgcattgatacggcattcaatagaatgtcctctgaggacaatatcctcctgtttgtatcgaagtttttctcccatagctacacgaatttgctcttctatcaaatctgttgaggaaatcatttctgtcacaggatgctcaacctggatacgtgtgttcatctccataaagtaaaaggaacctctttcatccaaaagaaactcaatcgttccaacacctatgtaaccaatagatgcagcagcagcaactgctgcatctcccattgcctttcgcaactcaggggtcagggcaggagatggtgcttcttcaagcagtttctgattacgcctctgaatgctgcaatcacgttctccaaagtgaacaacattaccatatttatctgcaagaacctggaactcaatgtgccttgggttttgaatgtacttctccaaataaaccccgtcattgccaaatgcagcagctgcctcactcttagcttgctgtaacaacttcacaaactcatcaggttctttagcaagacgcatgccacgtcctccaccaccagctgttgccttgatcatcacagggaaaccaatctcatttgccagcctaatagcttcttctgtgctctgtaaaaggccatcacttcctggaacggtgggaacacctgctttcttcattgtctctctggcagttgctttgtcacccataacccgaatactgtcagggttgggcccaataaagttgattccatgttccctgcacatttcaacaaacacagcattctccgcaagaaaaccatagccaggatgcaacatcgtgcatctgcggctaatagcagccgacagaacattcgggatcagcaagtacgactggctactcggcgcttcgccgatgcatacagcttcatcagccagtttgacatgaagggcgtccttatcaatggtggagtacacagccacacacggaatccccaattcatgagcggttcgaataacgcgaaccgcaatctcgcctctattcgcgatcaggatcttgtcaccgctgcaagtcgcgtggagagcaccacagtgacgcgtttggcgctgtttgcgaacgtggctaacttgaccgacttgcctaggaaacctcactttgtttgctccagctaaaaaactgcattgcgaactcttagttcctgctttccccgcaaataaagctgcgacgggaacagaaggcgagctaatggacttgcacgctgaaagtgtgacttccatttcccaacagaatgaaagaaagggtgatggatggagcgtatggggaatgaaatgatggcaagagaaagagaaggtcttttgatgcggatgtcgatggaaacgagggaggtgcgaaattgcggacgcgtggg

SEQ ID NO: 67808 - DNA, 2477 bp, Glycine max
  Clone ID: PAT_MRT3847_32244C.1
agactgtaacactacatttttgtatccaatccaacccttgatttgatgagccaaaaacttctaaaagcagctttccataattgtctcaaaatcctggacaaggtctatcagctggaacaggagatttcaaccctaaacaatcaatcatgataggtagtaatgaaggattcagggtattatttcaccagccaggtccagttgggtttcccacccaaaatgggtcagcttcaccacggaaagtaatttttaaatccatggtaagggccattaatattttcaaggttatcttgggtcctgcggccgcccttttttttttttttttttttttagcgacgccaattggacgccaattgatccatataataaaacctatttttttaacaagttcatcattcataggataaggttaagtttttattagtgtatctagcaacgagctcttaatacaagaattacaaacaagccttgggacaaagatcctctaaaccgtttagacaactaactttggaaaaaaatgcaaggagttattccttattccttgcactaatatttgggatgaaattaattgatattacaatataattatgtgaagaaataggaatgtacgagactaattatcaaaatttcaataaaacattgacttcaaggcactaacgacacggtgattacaacaaagcaattctggcatcacacaatcatattcatcaggcagttgaaccagctagttcattcaccctgttagcgagtaccatcttctgcggtggcattgccaactcttcctcgtgttttggaataaaagcagtatcaaccttgccatttctgaaatcctctatgtcaaggataagtttatgataatcaattgtagtaggaactcctgtgataatagtatcatcaagtgcccttttcatgcgttcaattgctttttctctagttggagcccatacaatcagctttccaagaagggaatcatagcttggaggaaccacataatcaggataaacatggctatccattctaacaaatggacctccggatggcaagtatgcagtaattctacctggccctggtctaaatcccttaaaagcatcttctgcattgatacggcattcaatagaatgtcctctgaggacaatatcctcctgtttgtatcgaagtttttctcccatagctacacgaatttgctcttctatcaaatccgttgaggaaatcatttctgtcaccggatgctcaacctggatacgagtgttcatctccataaagtaaaaggaacctctttcatccaaaaggaactcaaccgttccaacacctatgtaaccaatagatgcagcagctgcaactgctgcatctcccattgcctttcgcaactcaggggtcagggcaggagatggctgcttcttcaagcagtttctggttgcgcctctgaatgctgcaatcacgttctccaaagtgaacaacattaccatatttatctgcaagaacctggaactcaatgtgccttgggttttgaatgtacttctccaaataaaccccatcattgccaaatgcagcagctgcctcactcttagcttgctgtaaaaacttcacaaactcatcaggttctttagcaagacgcatgccacgtcctccaccaccagctgttgccttgatcatcacagggaaaccaatctcatttgccagtctgatagcttcttctgtgctctgtaaaaggccatcacttcctggaacggtgggaacacctgctttcttcattgtctctctggcagttgctttgtcacccataacccgaatactgtcagggttaggcccaataaagttgattccatgttctctgcacatttcaacaaacactgcattctccgcaagaaaaccatagccaggatgcaacatggtgcatctgcggctaatagcagctgacagaacattcgggatcagcaagtaggactggctactcggcgcttccccgatgcaaacggcttcatcagccaatttgacatgaagcgcgtccttgtcgatggtggagtacacagccacacaaggaatccccaattcatgagcggttcgaataacgcggacggcaatctcgcctctgttcgcgatcaggatcttgtcaccgctgcaagtcgcgtggagagcaccgcagtgacgcgtttggcgctgtttgcgaaggtggctaacttgacctacttgcctaggaaacctcactttgctcgctcccgctaagaaactgcattgcgagctcttaattcctgcattccccgcaaacaaacctgcgacgggaacagaaggcgagctaacggacttgcaggctgaaagtgtgacttccatttcccaacacaagggaaatgctgtgttttgtgttcggatgggaatggagtgagttctacgacgggaggcggagacaattaaaaatagagaaataaataagggaagcagcgattttacccttggcctagcgctgaaaatcttttgatgcgggt

SEQ ID NO: 67809 - DNA, 249 bp, Glycine max
  Clone ID: PAT_MRT3847_32245C.1
ggctcgagattcgaggcgtgagcgcacgatgtagggttggccgctgatccccgggtctttgacattggagcatgacgatggtgcccattccacgcccacgcgagcagtgcgagcagactcactcgaacttgtacgagctccaacagtgaaattatcatcatgagcagctgcacctgcctggggcaggagcactacgaccacttcttctatgctagagcatgacctcaaccacaaatccgtggccctcaa

SEQ ID NO: 67810 - DNA, 150 bp, Glycine max
  Clone ID: PAT_MRT3847_32246C.1
gcgccctttttttttttttttttttaaactgagcctaaactcttataccctaaaaatggggtcaattgagacacactcttaagaatacctaaatatataactttggtaaattgggccaatcatgggggtgttccgtaactaactcctcca

SEQ ID NO: 67811 - DNA, 246 bp, Glycine max
  Clone ID: PAT_MRT3847_32247C.1
gcagcataagcatttcagaaggtagcacaagagagaagaagaaaggtcgcattgggaccaattctttcatccccttcttcagagagccaagtagcattggagactttcaaagggggatcaacaattactggcattaaggccttccaatcctcttaagcgatccaaaattccaccttatgtccctccaagagctaccttgtgatctggaggatcagagatttgtttagcatgcttcaagtgctcaag

SEQ ID NO: 67812 - DNA, 626 bp, Glycine max
  Clone ID: PAT_MRT3847_32248C.1
cggctcgagcggctcgagcggctcgatacggctgcgagaagacgacagaagggggatcgcagtgggtatagtagatgaagggaaagggacagcagccagcttcgggactcacggaaccttctaggctatatataaaaaaaaaatattgcacgctcctccgggctcctggcatttcaaattcaaggcctctttccaatcttcaaagcagctactgcggcagctccattttccaattgaagttagcagagcagccatctgtgtgtgaaggggacatgatggatgattcccaaaagcatagaatcctgatggtctcagattttttctatcccaactttggaggtgtggagaatcacatatattatctctcacagtgtttgctcaagttaggccacaaggtggtggttgcaactcatgcttatggaaatcgatctggggtccgatatatgaccggtggtctgaaagtctactatattccatggagtccatttgttatgcagaatacattaccgaccttctatgggttactaccaattattagaactattcttattcgagaaagaattacagtggtgcatgggcatcaagccttttcaacattttgtcatgaagctcttatgcatgcaaga

SEQ ID NO: 67813 - DNA, 314 bp, Glycine max
  Clone ID: PAT_MRT3847_32249C.1
gctctgaatgcggctcgagggaacagctagcagtagaaacaactttacaagtcaagttaattaagaagatcattaatggcttttcttgcaaccttagctgctgatcaaccagctgcgctcaatggccttgctggaactaccctacttggaactaacgctctctatcaagccctctggccacactgacaaatacaaaaactgtatgagtggtgcacgggtagcaaagaatgggacaagagtgtgacttgatttgaggatctgtgcaacactactgtgcagtgagacttgtattgatcaaatgcacctttacccta

SEQ ID NO: 67814 - DNA, 929 bp, Glycine max
  Clone ID: PAT_MRT3847_3224C.1
cggccgctacctcggcgggcggtcaattgacccaaagtatcatcttttgaaaacataacaaaagaaattctaaatggcctcaactcaacccaacaatgtctactttccaaatttccctcctccatcaccgtcacaccccttcaatcctccaccaccaccccctcactcattttctcctcctcctccaccatttgcaacaccaccaccaccacttcgtccaatttctcctccacccccaaaggtgctcccaccaccgccacctcgtcctgttcttccttctccgccgccacctcgtcctgttcgtccttctccgccgccacctcgtcctattcgtccttctccaccgccaccacctcgtcccgttcgtcctcctcccctcccccctgcccctcttccaccttcaccctctccaaacaaccccacaatcgtaatagtcgtggttgcctcattgggtggcctcttgttgctctcaatgctcgcttttgctctattctgctgcattcagaggaggaagaagaagacacaagaaaccgaagtcattcactttgatgagcacaaaacggtaaaggaaaccatcgtgcctggtcctttcggacggaacacagttgtggtaacggttgaagatgatgtgcatattgacgaagaaatcaagaagaagaacgagaaaggtggtcacggtctgcatgcaaaatcctcttcgcctgaagcagatcaaggtacttctagcagcattgttgaagttgcagctactcctcctccgcctgaaaatcatgatgatcatcatcaccagcctgaaaacaagctctgatcgaaacaagtataaatatatgtactttcaaacggagaattgcacatccttgtacaaagactcccaacgaggatcgtataatttcacgtaacttcagtgaataaatgaatatccttaattc

SEQ ID NO: 67815 - DNA, 209 bp, Glycine max
  unsure (1)..(209): unsure at all n locations
  Clone ID: PAT_MRT3847_32250C.1
gtccgccacggcgataacgttaaagctncngngaaattncgaggctccgaagaaggaatnaaccntaattntgggggnaggggatttgtattattgtcangcctccaaagccnncgtttngacttgggcaaancttcttggctnggncagcttgtacaacttggctatancttagctgtggttcattcccccaaagggggcccaaacca

SEQ ID NO: 67816 - DNA, 435 bp, Glycine max
  unsure (1)..(435): unsure at all n locations
  Clone ID: PAT_MRT3847_32251C.1
actcgagccgattcggctcgagtgttactgcaaatactgtaactgttgctattttgggacatgttggaggagagtgagccattattggggtgattttttttttttttgttcaaaaagcaaagcttttgcttctgagggaaaaagttgcgcaagatggatgctttatgcaacaagggtgaaaattttcaaaagaaaaaagatggggttccttcttcttctagtgattcaactcacgaatgttcttctccttctcttggctggcctattcggaaggctacactctccaaatgccccaaatcaaatgaaaaagaaaatgaacctgtttctcacttggaagaatcaaaaattaccactgtcagttccaaaatgtcaggaattgatgcaatgaangaaaggtttgcaaaattactgcttggggaaaatatgtcaggatct

SEQ ID NO: 67817 - DNA, 547 bp, Glycine max
  Clone ID: PAT_MRT3847_32252C.1
gcttgatcataatgagtctacatctcctagaacagcttgcattctcttctaaataacagactgattaatatgttgtcctacaagtgtagttcttggggatcatgcatgaattggcttaccacactcacagcataagcagtgtctggtctagtatgggacaagtagatgaactttcccactggtgtctggtactgtgacttctctactgttggccttaatccccacttccaatcttgtggttctgctcaatgggaactttgaatgtcttacacccttatttgcttgtttctttgagaagatcaagtaaaaactttctttgggtgataaaggtaccttgtttggaatacgcaacctctatcctaagaaaatacttaagctttcccaattctttcatttcaaactaggttcccaacttctccctcataaccttctttttattctaatcattacttgcaatgatcatatcctccacatagagtaagagtgtgaaatttccatcatgcgagtgttttatgaaaaaggtatgatcatttgtagatgtgtggta

SEQ ID NO: 67818 - DNA, 496 bp, Glycine max
  Clone ID: PAT_MRT3847_32253C.1
ggaaaaaccgggccgaccccacgcgtacgcccacgcgtccgctcgagaatatgacccgtcctaaaatttacgaaacataattatttattatttatgatatataatgagaggaacataaacgaacaatcagatgctgctagtcatttggataataaacaacattaggatttaggcatatcacatgatcgctttacttataatttagggatatcagctcaataccacatgattcaagtaatattaccaaaatcaaagccttatcctacaagatgcggtcagctacatgggtcatgacgtcattcggcaagtttagaaaccaaagtgtagcaaacgggaaaaaagtacacttctccttacagaggtatcccatatgacacaataactctgaaatagtatagtataccatagtcttaatcagcggaatatacaatttcttacatgacaaaaggacagccactgatcccagacaatattggcaagtaaaataaagggacaa

SEQ ID NO: 67819 - DNA, 467 bp, Glycine max
  unsure (1)..(467): unsure at all n locations
  Clone ID: PAT_MRT3847_32254C.1
ggtttgatgctcattatatttttccttttctctccaataaaaaatggtgaactctccttgccttttggagctcacatttacttcactttcccttttctttttctcgccaaatccatattcacttttttctattcctacatcttcacgagtgaatttggcaagaagaaaatggaagcaactttttcagaactggtatctgggtccaacccaataataacacatctggcgtaacaccatggggatgaaggagattctaatgccactcatctccgttgaaaagcaacactggagcgaatagcagaggccatcagaaggaactcactaccaatcatggaacaaggttggttcttggattctcagcgaagaaattgtggaaggttaattggttggtataggacctcaggtacctctttaatcgcgacccttcaactcctaaattcccagcctcttcatcgtctaacggntca

SEQ ID NO: 67820 - DNA, 490 bp, Glycine max
  Clone ID: PAT_MRT3847_32255C.1
aaaaaaaacccggggggaattttggatttggcaaaaaaaattacccaatcccggccgcccataaaaaaggaggggggccctttccacctaaaaagcgggggaaaacttgggcccagggccggacccaggcccccccaaaaaaaaaaaatttaacatttttcccaccaaaaaccaaagattttaatttttaaaaagaaaaaaagggataccccgccctttttatggaaaggaaccccaaccccccaaacctgggctggattttggggggggggggggcccccaccttgaaaaaccaaaaaccggtggaaggaacccctgggcctggaagggaagggccccgaatccaacccgggggaaaaggcccccaaaacctccccccaaaaagggccccccccaaaaaaaccgggggtcaccccaccaaggcccttggggaaaataaaagcccccccaaacccccagcgggtggacccccccccgggggggggggggg

SEQ ID NO: 67821 - DNA, 472 bp, Glycine max
  unsure (1)..(472): unsure at all n locations
  Clone ID: PAT_MRT3847_32256C.1
ttttnnggggggggttttttttttcttttttttttttttttttttttttttttttttttttttggggggggaattaccaaaggacaatatttttacccgggttttaccccgcaaaccggaaaacaaaggcttcaataaaacaacttatccgttaaatttttaaaaatggggttctgggggactaaatgactttggaaaaataattttaggaaacaagataaatggtttttgttccacaaaactacattaaactttggaaaaagcaatggttgttcttaaaaaaatttattggaaaaaattcaggggttcccttcactaggggggtttgttttcccacacttaaacggggtatcatatgaataaaccctggcgggggataaactgggtgagaccacatttcctttataagggagccccactttggaattcggggtttttggccaaagcccaaattcaagcaaatctccttttt

SEQ ID NO: 67822 - DNA, 468 bp, Glycine max
  Clone ID: PAT_MRT3847_32257C.1
ggaatttacctgctacatcgttggagtgccgccttcttgggggggggggggggggggggggggggggggagatcacggcgtcagaggagaaagcgcgaagctacaggtaaccgcaagctagttaacaggacactagaaaacctcacatggtgtaaccctcaaagtgcctgcgttaccataaatgggggaacggcttttttgactcgattggagggactggatgccttaaaagtattaaccccgcttggctttgccttacttgtaaacggcaaaagtactagacttaatagactaagttgactagctggaagtgcacttaagggtacgtgtgtgactggcgtgctagttccaagcgaaatcttagttggcagactgttactaaagtttaaacccgtaaacaaggggttggtacccgacttggcggtattacgtcacggcttaaacggtgtactacgggggcattagcca

SEQ ID NO: 67823 - DNA, 180 bp, Glycine max
  unsure (1)..(180): unsure at all n locations
  Clone ID: PAT_MRT3847_32258C.1
tagaccggcgatcacaggttgccgtnactaanancggaaacaaaagcctcgttacttggttncaagaatttctacaattnncttcngatttctttgtgtacgatttcttaaggnaaagaccatcacgtcnctgtgctggncacaganttcgtgaatcattnnctnctccactctnntnnc

SEQ ID NO: 67824 - DNA, 1113 bp, Glycine max
  Clone ID: PAT_MRT3847_32259C.1
tcgcagccatgttagcttctaacttaccatcactggctttgctgaccaatcctgctcgagatatcaatgctatagtgccacccatttccagcaaatcgaatgcaatttcagcaccttctttggtaaccccaggacaattattgaagcctggaccaattatagtttcttcggctcagccttcacaagcacctcataaggatgttgaagttgttcaggtatcatcaacatcatctcctgagccatctgtaccagtctatatagagaaaatttgatttacccgttagaacttagaaccattagcaattacatttacaaaaggaaatgaaggtgcatatcatgagacttaaaaacccttacaagcctctccctatcatagcatcacttactaaagagcgtatgttgctcttagatactctatgatttctgcactttcaaacatttctatcccagtgtttggatcttccaaaaaaggtgcctggaaagttccagttttctgataaagtatatgtctctttgggctacccctagcacaactgacaagcaagtgtggcagctccaattccacaagtacttcacgtacaagtttgcagaaaggagacccctcatatgcccataatttaagaggctttggagggaacttcgctggagtataagtagtcccctttgaaatacgactaagcataccaagaccagccgttagtgtcgttaaaaatccaagtgataaagataaaggaacgtttccatcgccatatttgtcaaccaaataccgaattatgtcatctgattcatacattgaagcgcctgtgtttgggtcaaccatgtaggggaactgcagtttgccacccatctctagaaccttttgacggaaatttgggccatttcttggacaaggatagaaaagaacatcaagatccaaaatggcaacaatttctctaacctttcggcaaaatggacagctctcaaattcatatatttcaataggcttctctgggcgagggcctaattttgctgtttcttttatggtaacgccattaagttccaaagcatattcgtctgtaggaatttcatccttagaaacaattgaaaaagaatacccagaaacgaaaactccag

SEQ ID NO: 67825 - DNA, 266 bp, Glycine max
  Clone ID: PAT_MRT3847_3225C.1
cccacgcgtccgctaggattgtcagtgacttgagtcttatctgttgtggtaatccacattcgaaaagaaggtggggcgatcatctgctttcatagcttctacactcttggaagatgggggtgttccaaaagcagcatattcttctaccctctttggatgaggccatccatgttattacctggggtgtttaagataagacagaaggggggacagaagttgggtgagtatatggtcagttacctaatatattttaacaggttttaaga

SEQ ID NO: 67826 - DNA, 1503 bp, Glycine max
  Clone ID: PAT_MRT3847_32260C.1
aaccacctcaaaccattgctaaatattgaggcacttgattccactatttgaaatttctatatagagaaaatttgatttacccgttagaacttagaaccattagcaattacatttacaaaaggaaatgaaggtgcatatcatgagacttaaaaacccttacaagcctctccctatcatagcatcacttactaaagagcgtatgttgctcttagatactctatgatttctgcactttcaaacatttctatcccagtgtttggatcttccaaaaaaggtgcctggaaagttccagttttctgataaagtatatgtctctttgggctacccctagcacaactgacaagcaagtgtggcagctccaattccacaagtacttcacgtacaagtttgcagaaaggagacccctcatatgcccataatttaagaggctttggagggaacttcgctggagtataagtagtcccctttgaaatacgactaagcataccaagaccagccgttagtgtcgttaaaaatccaagtgataaagataaaggaacgtttccatcgcctacataacagacaaaacactaaaataaggaaatatctaaactttccttcttttatgtttgtaagtgaccaaatgcacatttccgaaatgtataggcagtaattgtttctctcctaactatcttaaaatttcttttaagcaaacttactctaaacgaagactgattttgattgtgatcgattattacgattaaccgattattaaaataatataattttctccatatatgtaattatattttatagattgaaatgcaacaggaaaaaagactacatggcataagcggctcgagcccctgttagagccattagcaattacatttacttaaaaaccctcacaagcctcttcctatcataggcatcacttactgaagagcgtatgttgctcttagatactctatgatttctgcactttcaaacatttctatcccagtgtttggatcttccaaaaaaggtgcctggaaagttccagttttctgatatagtatatttctctttgggctacccctagcacaacagacaagcaagtgtggcagctcaaattccacaagtacttcacgtacaagtttgcagataaaagacccctcatatttcctcctgctgtcgtgggatcatcaacttctatccattcagaaacatcagcaccttctctggtaatcccaggtcgattattgcagcctggaccaagtatagtttcttcagctcagccttcacaagcacctcataaggatgtgaagtggttcaggtattttcgacatcatcttctgacccatctgggccagttcttgctgaaactcacccaccaatattgccattgccagtaacttcccgacccagccaggggggtgcgcccccagtcccaaaattcccagaggattttgattttatggcaatgaatgagaagttcaaaaaggatgaagtatggggtcatcttggtaaaagtaagtctcattc

SEQ ID NO: 67827 - DNA, 846 bp, Glycine max
  Clone ID: PAT_MRT3847_32261C.1
gcaaccgaaatttttatccacctcaaaccattgctgaatattgaggcacttgattccactatttgaaatttctatatagagaaaatttgatgtaaccctgttagaaccattagcaattacatttacttaaaaaccctcacaagcctcttcctatcataggcatcacttactgaagagcgtatgttgctcttagatactctatgatttctgcactttcaaacatttctatcccagtgtttggatcttccaaaaaaggtgcctggaaagttccagttttctgatatagtatatttctctttgggctacccctagcacaactcatatgcccataatttaagtggctttggagggaacttcgctggagtataagtagtcccctttgaaatacgactaagcataccaagaccagcagttagggtcgttaaaaatccaagtgataaagatagaggaacgtttccatcaccatatttgtcaaccaaataccgaattatgtcatctgattcatacattgaagcgcctgtgtttgggtcaaccatgtaggggaactgcagtttgccacccatctctagaaccttttgacggaaatttgggccatttcttggacaaggatagaaaagaacatcaaggtccaaaatggcaacaatttctctaacctgtatggagtccaatattagcccgcaacaaagaatgtcactaagacaagtttgttattatgcctaatattctatccaacagataaatggaaaggaaaatacagcccttaatcttgatagtggagacccggattagagttcatcctttgtcaagtgagctaccatgctaacctccacactcaaattccaagaa

SEQ ID NO: 67828 - DNA, 364 bp, Glycine max
  unsure (1)..(364): unsure at all n locations
  Clone ID: PAT_MRT3847_32262C.1
gtggtggacgtgagtaatgaaaaaggagtggtagaactgagaagatacaagaaggatcatccctttgcacaattatctggatcagataatattattgcgttcacaacaagaaggtatagaaaccagcctctgatagttcgtggacctggagctggtgcccaagtcacagctggtggaatattcaacgacattttacgacttgccacttatcttggtgctccatcatagatgcaaccatgtattctctcctttgcttattctcttgtaacttttaattaaataaaccactataataaataattagaattttaaataagcattacatttaaattaaagttagtttaaccnnnnannaaaaaaaaaa

SEQ ID NO: 67829 - DNA, 2126 bp, Glycine max
  Clone ID: PAT_MRT3847_32263C.1
acacgcgtccccaataagcgccttatcatgtctcccgccctcaccactctgtcaccgccgttatctctttccgttacttcggcggcgcgtcgtccacggctgacagcgatggtgaagactgagaaaaagcaaagccttggcttcggcagcgataagaaggaaacaaagtggcactgcgtggagggttgtggttcctgctgtaagcttcaaaagggtccatcttttccctctcccgaagaaattttcgacgacccttctgacgttcagttgtacaaaagcttgataggtcctgatggatggtgtattcattatgagaagagtactcggaaatgctccatttaccctgagcgtccatatttttgccgtgtagagccagaggtatttaaatctttgtttggagttaaagagaagaattttcacaaggaggcctgcagtttctgcagggacacaattaagtctatttatggtcccaattcaaaggagcttcataatcaaaggagcttcataatttcaacagctcaataaggaactcttctagttagattttgtgggatttggattcttaattgctcaaggtttttagcatctcctctgctggtgggagttttcttgcttataacttctgaaatatgatttcttgatctaatgcaagtgctcaaagtagaactagaacctagcaacactgggaaaaaatagctatggatttgcgggttattattgtacgctcttttttggaaattattgattatttattgccatatatcttattttgggataaatgaagaaaccaaatttgtaaaatcaattttattcagtgactgataaaacaacaacaaccaagccttttcccactaggtggagttgactacatgaatcagacaatgccataatgttccattgtatctctaaatcttttttaattcttttgcttatggtttttcttagtctccctctgcctctagtgactaggctatcctccatctgatctactctccttactaaggcttataagatcatcctcacacatgctcaaccctctaaggcaagaatctaccatcttttttacaacaggtgctaccctaactttttacccaatgcattcatttgtaatcctatcttttccagtatgtccactcatgtaatgccagcactctcatctctactacattgaatttgttctcttggttttttgctgaccaacatctagttccataggacatcactggtgttatggttatgttgaaaactttcctttaagcttgagtgataactttttattacaataaacactcgaagcacttctctatttctttcatcctgcttgaatcctccatatttagtggcttccatattaaaaagatgtaacgactagagttcatttaataagaagttgaaaatcttgatccatggaagcaacttctttgtataaaacttactgagtacaaacagaagttgttccctgtaattttaagatgccgaaattttgactgaaagtggattatatactaaatggaatatttgtaacagctggtttttcactgccttacatattgtctgggatgggaggaattctccacacaatgcatgtgcttatgcttttcaagcactgtgctatggatctctactcttatcgaagcacagctactatgttagtgtttttagactggcacaaacagaaacttccattcaaaattgaatattactttcacatgttcctcctagataactatgttcatgaaatgcttgctttgattatcatggtcaagctctcccatgccaggttttttgcttctcctctggtcacacagaagcagtagcagctggttcacaattcaaagcatcatctgcggttgtgattgctaaattctgtgcacttggaaatatgagcttagatggatggttaataaaatagacgtttcaacttatttgaatgggctaactcgagcattctattgcttatagaataggccctaccctaggatcgatacatcatggatgctatatttctttaccatgacaattttttgatttttctttttttggtacatgtttataatacgtctgtattatctatacttacatgcatagtacctattcaatgatcacccacctttttgcatggaaaa

SEQ ID NO: 67830 - DNA, 1791 bp, Glycine max
  Clone ID: PAT_MRT3847_32264C.1
catgaaccatactcaatccattaaagtagagacccctgtttaaacgtaataaattgttcaaacttgaagaatgaaaaatcattttcaagggcattatgtagttattagagctgtaggcgcaataatgatgaatgaaattgaaaagggtcccaaataattttatttaaacagaaccctacttagcaacccacatttttaaccacctcaaaccattgctaaatattgaggcacttgattccactatttgaaatttctatatagagaaaatttgatttacccgttagaacttaaaaccattagcaattacatttacaaaaggaaatgaaggggcatatcatgagacttaaaaacccttacaagcctctccctatcatagcatcacttactaaagagcgtatgttgctcttaaatactctatgatttctgcactttcaaacatttctatcccagtgtttggatcttccaaaaaaggggcctggaaagttccagttttctgataaagaatatgtctctttgggctacccctagcacaactgacaagcaagtgtggcagctccaattccacaagtacttcacgtacaagtttgcaaaaaggagacccctcatatgcccataatttaagaggctttggagggaacttcgctggagtataagtagtcccctttgaaatacgactaagcataccaagaccagccttaaaaatccttaaaattcggcaaaataaacagctgcatatggttcaacatggcatataatcaaagaacaaaccagctcttggaattagcaaattctgtagtgtggcatgtaaaaagccaaaagtctaatgtaaaggtacgaaggcaaaacagaaagctagttatctaactttgctttgggaaaagaagaaggaataaggaagtatttagtccatgcatgaatgcaaagagaataaattagtgtcagagaaaataaagtacctctcaaattcatatatctcaataggcttctctgggcgagggcctaattttgctgtttcttttatggtaacgccattaagttccaaagcatattcatctggaggaatttcatccttagaaacaattgaaaaagaatacccagaaacgaaaactccggtagcaaagcgaaagagcaaaggaagcaaagctccaaatacttcactggtcttgtcaggtctgattgcaaagcgtttaggctcagggggcttgaagttggggggaggtgcaattgtcactgacgaagcattagaagttggttcttcttgttgggtgctcacagaaaaagtggaagagatttctgacatgcccctaatgcaaaagcttcttctgggtattcttcttttgggcaaagaaacagacccacgaactgggaattgggagagactcaaagctccagccatagtcatgactctgtaaaaagggacacagacacaagttcctccaaggattcatacattgaagggcatgtgtttgggtcaaccatgtagaggaactgcagtttgccacccatctctagaaccttttgacggaaatttgggccatttcttggacacggatagaaaagaacatcaaggtccaaataggcaacaatttctctaacctgtatggagtccaatattagcccgcaacaaagaatgtcactaagacaagtttgttattatgcgtaatattctatccaacagaccaatcccaaggcaaatatagcaattcctcttgatagtggagagccggattagagttaatcctttgtcaagtgagctaccatgcttaccttcaccctccgcttccgaggatc

SEQ ID NO: 67831 - DNA, 794 bp, Glycine max
  unsure (1)..(794): unsure at all n locations
  Clone ID: PAT_MRT3847_32265C.1
gggatttaggtgacacgcgtccccaataagcgccttatcatgtctcccgccctcaccactctgtcaccgccgttatctctttccgttacttcggcggcgcgtcgtccacggctgacagcgatggtgaagactgagaaaaagcaaagcctcggcttcggcagcgataagaaggaaacaaagtggcactgcgtggagggttgtggttcctgctgtaagcttcaaaagggtccatcttttccctctcccgaagaaattttcgacgacccttctgacgttcagttgtacaaaagcttgataggtcctgatggatggtgtattcattatgagaagagtactcggaaatgctccatttaccctgagcgtccatatttttgccgtgtagagccagaggtatttaaatctttgtttggagttaaagagaagaattttcacaaggaggcctgcagtttctgcagggacacaattaagtctatttatggtcccaattcaaaggagcttcataatttcaacagctcaataaggaactcttctagttagattttgtgggatttggattcttaattgctcaaggttttttgcttctcctctggtcacacagaagcagtagcagctggttcacaattcaaagcatcatctgcggnttgtgattgctaaattctgtgcacttggaaatatgagcttagatggatggttaataaaatagacgtttcaccttatttgaatgggctaatttgaacattctattgcttatagaataggccctaccctaaggtcgatacataatggatgctata

SEQ ID NO: 67832 - DNA, 646 bp, Glycine max
  Clone ID: PAT_MRT3847_32266C.1
atcccatcactccaattgaaacctgaaacctgaaacctgaaaccgaatagatttagtggccttgggaatttattttaaaaggtacgatcaaagaatgaaactcataccctaatagtacataataatctctcatttacatcccgtcactccagttgaaagaaactcgaaaccgattagattagaggcttcaaacaagaggccccaaaacccaaaccctattctggttcacttgcgattatggcgtctgagagcgcttctcgatcgagttccgcggccgattcgtacattgggagcttgataagcttgacctctaagagtgagatcagatacgaaggcatactctacaacatcaacaccgaagagtccagtattggcctcagaaacgtgcgatcttttggaacagaaggaaggaaaaaggatggcccacaaatccctccaggtgacaaggtttatgagtatatacttttccgtgggactgacatcaaggatttacagggtaaatcttcttcacctgtccagcctactccacaagtcaacaatgacccagctattattcaggctcactatccttaccttatctgcaatatgactcatttggcttcttcacaaagggggtctttgactgagcctagctctcataccacac

SEQ ID NO: 67833 - DNA, 488 bp, Glycine max
  Clone ID: PAT_MRT3847_32267C.1
ttgactcgctctcttccaacgtgcatggtaatgcttcacagaatggaaggactagagactctgaacaaatcaagtttgatactgagacgtttggcgattttgtgaggcaccgtggtggtcgtgggggccgtggtggacgtacccgaggtggttattatggaagaggagggtatggctataatggacgagggaggggacgtggcatgcccagtcgcaatttgtagttggcagttaatgtttagttatggacatggtggagaacaaaagcctaggtagcctcctctaaaagcatcgtaattatgttaagagataatgcttcattgttgtgttgcctgttattgttatatgtttgtttcacagaattaggtcattttttttcctgttatgttaccctcttgttactcccctaccaaagtcacttggtttggtggaaagatgtttgtacaccgttttattttagcatatatcaacaggcagaagtttagact

SEQ ID NO: 67834 - DNA, 1985 bp, Glycine max
  Clone ID: PAT_MRT3847_32268C.1
cttcccgggtacccacggcgtcgtatcagcccagttcaaagaaacttgacaccgattagattaggggcttcgaacaaggagccccgaaacccaaaccctaatctgattcgctttcgattatggcgtctgagagcgcttctcgatcgagttccgcggccgattcgtacattgggagcttgataagcttgacctctaagagtgagatcagatacgaaggtattctctacaacatcaacaccgaagagtccagtattggcctcagaaacgtgcggtcttttggaacagaaggaaggaaaaaggatggcccacaaatccctcccagtgacaaggtttatgagtatatacttttccgtgggactgacatcaaggatttacaggttaaatcttctccacctgtccagcctactccacaagtcaacaatgacccagctattattcagtctcactatcctttcccggtgaccacatctacaagtttgccttctgctgtaagtgggtctttgactgatcctagctctcataccacacaacttggacttcccgggtcaaattttcaagggcccttacctttgtatcaacctggagggaacataggatcgtggggagcttctccacctgctcctaatgcaaatggtggtcggcttgctatgccaccaatgtattggcaaggatattatggtgccccaaatgggcttcctcaattacaccaacaatctttgcttcaaccgccacctggtttatcaatgccttcatctatgcagcagtcaatgcagtatatgaaaaattcaattaatgcttttgcagggtttgcacccagtcacaaaattcactgaggattttgatttcacagcaatgaatgagaagttcaaaaaggatgaagtatggggtcatcttggtaaaagtaagtctcattcaaaagaaaaagatggggaagaaaatgcctttgatgaagattaccaagatgaagacaatgacgatgtatcaaactttgaggttaagcctatttacaacaaggatgacttctttgattcgctctcatccaacgtgcatggtaatacttcacagaatggaaggaccagatactctgaacaaatcaagattgatactgagacgtttggtgattttgtgaggcaccgtggtggtcgtgggggccgtggccctggccgtggtggacgtacccgaggtggttattatggaagaggaggagggtacggctataatggacgagggaggggacgtggcatgcccagtcgcactttgtaggtggcagttaatgtttagtcatggacatggtggagaacaagagcctaggtagcctcccctaaaagcatcgtaactatgttagagataatgcttcattgttgtgttgcctgttatatgttttgcttcgcagaataagtaggacacttttttcctgttatgctaccctcttgttactcctctaccaaagtcacttggtttggtgtaaagatgtttgtacaccattttatatcagcatatatcaccaggcagaagtttagacgaaaaaaaaaaaaaaaaaaaaaaaaaaaaaaaaaaaaaaaaaaaaaaaaaaaaaaaaaaaaaaaaaaaaaaaaaaaaaaaaaaaaaaaaaaaaaaaaaaaaaaaaaaaaaaaaaaaaaaaaaaaaaaaaaaaaaaggggggggggtttaaaagaaccaaaattaacaaacgggggaaggaaaggaaaaaatttttataagggggcccaaaaataaaatcaaggggccggggtttaaaaaggggggaaggggaaaaaccggggggtacccaaaaaaaagggcttggaaaaaaacccccttttgacaagggggggaaaaaaaaaaaaggcccgaccggagggcctttcaaaaaaggggggaaccttaaaggggaaagggaaccccccctgaagggggaaaaaaaggggggggggggggggggtacccccaggggggaccctaactttggcgaggccctaaggccc

SEQ ID NO: 67835 - DNA, 455 bp, Glycine max
  unsure (1)..(455): unsure at all n locations
  Clone ID: PAT_MRT3847_32269C.1
attccgttccaggaaggtttcccgtcatcactgtatgacgtcctccttctttggggggggggggggggggaataccaaggagcatgaaagggggggaggaaggtaattgcggggtaaaagaggatagcgacatagggagtggcaactgacccgaaataaaacgaggatgagtaggtgaggttgttaggggtggtggtggtaaacaacccgataatccctcacgagcgaggttcacgtagacatggtatatgtggttgggctggctgtggcctggggtttttaaagaataatagagaagctaagaattatgagcctgctgttaccaatatggttacgagatagacacgtattaacaaatgtaaggtttagcagcattctaacnaggaggttaagccatggaaataggctaatagatacacgttttggtggctgtagcatttagagagcaataagat

SEQ ID NO: 67836 - DNA, 369 bp, Glycine max
  Clone ID: PAT_MRT3847_3226C.1
tagctatctcgatcgcactgtccaaggtcctgtcactgatcaaacataagtcaacctgctgctagaaggggaggatgccccggcgatgggcttgggtgtgcgaggctaggctatggaggtggtggtgcaggttgtaggtaatccgggaaaaggtaacgttattaaacacacaggatagacataagatttgcgcaaggcctgctctgaaaaccaaatgaccaacctcaggaaaagaaccgataccaaacccccaaatgagggccactatcaggtgagacgctcccaacgcgagttgtaacatctagtaagagatcgcacgctaccggtctaggccacggcctagcacaaaaccccaggaatttctaccag

SEQ ID NO: 67837 - DNA, 101 bp, Glycine max
  Clone ID: PAT_MRT3847_32270C.1
agttctcagtctcacggtctccgtcgtgtattactccaaagttacggtgctgacggatagaacacgagctatgcagccgtcatgcacactctgctgcgatc

SEQ ID NO: 67838 - DNA, 557 bp, Glycine max
  Clone ID: PAT_MRT3847_32271C.1
tccggtccgtcaccgtacaacctcgcggaatgggttattagtggagaacgagcaccggaaggtacagcacgaggagccacaccagtttaaccggccaaactctgtattactagccgcgcagtcgaggtgggtagagcctaaccccaaacacaggaggcacggataaaaccctacactgtaaatgtgttcagtatacattgcgcattcttatagagagccggcaacggcacagaggtgtgttgaccaactgatacacactttgaatgggtatgcagctacacaggcaaaagcaataacgtagaataaagggaacgaaggccaagggactgctggaatgccatacccagatagtagcacgtcgaaaccacaggaatggctacaaggggagccactagtacacaggctgctgctaatggagaatatgtataggcttatgatgacaaggacaggtaggtagggggggggtgggtgctacggcgggcgaagggcaggggcttggggattaagaacagggacactgacggcgggcaggcctgagagttgcgcgagcgatagga

SEQ ID NO: 67839 - DNA, 1302 bp, Glycine max
  Clone ID: PAT_MRT3847_32272C.1
acggctgcgagaagacgacagaagggggcacaaggtgggtgggaaaacaccgacaacccaaacaaacactcacagcagcaagcacgcgacaaactttaaacgggttttctttgaccgtccgcaaccttctactaaaatcctccttcacttcaatctttttccactttccaccgaatccaagtcaagtctagaatttccaacgaaccgaacaaaggaaaatcccctcttagatccaatccaaattaatatttgtacatctagtcaagacccaagtccaacgcgtggtcgatcgaatttctcatttggggttctcttttttatttttgatcagctcattaggggttctcaatggatgcttcatcttcctcgtcgagtcaacctgaattcgattacttgttcaagcttctcttgattggggattctggggttggcaaaagcaccctgcttttgagcttcacctccgataccttcgaggatctttctcccagcatcggtgtagatttcaaatttggatatgttacaattggagggaaaaagttaaaacttgctatttgggacacagctgggcaggaaaggtttagaacacttactagttcatattacagaggagcacaaggaataattatggtatatgatgtaacaaggcgggaaacctttacaaatctatctgatatatgggctaaagaaattgacttatactcaacaaatcaagattgcatcaagatgcttgttggaaacaaagttgataaggaaagtgaaagggttgtcagcaaaaaggaaggaatagactttgctagggaatatggttgtctgtatactgaatgcagtgcaaaaaccagagtcaatgttacacagtgttttgatgagcttgtgatgaagattttggagacaccaagcctcttggctgagggctcatctggtgtgaaaaagaacatcttcaagcagaaacccccactgtctgatgcatcaagtagtggctgctgctcatggtaatttacatgtttaaggggatttcatcttccactccttggtatggtccggatttcaagtgcaattaaatttcattacatgtatcagaaatatttttattacaacctatatatctagattaaattattgctctcaagaattttcttaacgtttagagatctccattttatttgtggtgtgagcaagtaatcagctcgggatacgtagttcatactgcccttgcatatgaaaagcgtgtgtctatatttatgctttgatattttaacaagaacatgggtatgatttacataatggggaaacaaatttctctac

SEQ ID NO: 67840 - DNA, 201 bp, Glycine max
  Clone ID: PAT_MRT3847_32273C.1
tcggctcgaggattgtttcgatgatgggtggtcgatgttacagttcatatcagtataatgctgaggcagcacagatgaacgtccacacaccactattcacactgcactctgaaatctcaatatcaagtctccaacccaaccaaactccattgctctcaccaaaccatgaaaaactcacaagagaagaaacatgtcgcagtg

SEQ ID NO: 67841 - DNA, 334 bp, Glycine max
  Clone ID: PAT_MRT3847_32274C.1
tttttggatgtaacaatgaacaacattggggtacggtataacatacattacctgggactattatatagaatacacaaaatttaaaaagggggtgaagatgaacagacataagaaacatgtgacccctactgtctattatcataaaataccctacaacaagtgaggtggcaaccattttgtgcatgggtatatcaatgtgatggttagcgatgctactgtaaaaagaatatgtaaagggctctccaaaaactttcaatatgaaatcgcgaaaacgttctgaatatagccttcgatcaacagcacatattgatgttggatcatattgcaatgattt

SEQ ID NO: 67842 - DNA, 375 bp, Glycine max
  Clone ID: PAT_MRT3847_32275C.1
ctgcagtttcgactcagagcgtccctttcacttctcagcagcttctgctcaggctcagaaacgaaaaagggttcggtgttctgttcgcgaggagaccaaagtcgaggggaagccttttaagaagtttgaaaagaaatccccaaagaataaaccgaaattcaagttattcggttaaactaagttggatctggtggttttaacatttgttaatgtggccaattggacccccagattgttatggcacttggttctcctttttgatggtttggacattttggtggattcaagttatttaaggtcgtcttatgttattatcttaaaaccatgtgtggaatggttttggtattaacattatctcctattttgcgtttcttg

SEQ ID NO: 67843 - DNA, 503 bp, Glycine max
  Clone ID: PAT_MRT3847_32276C.1
ccacaatgcctcctgaagccctggaaatcacaaggaagtttatgaacaaacctgtgaggattcttgtaaaacgtgatgagcttaccttggaggggatcaagcaattttttgtcaatgtagacaaggaggattggaagctggagacactatgtgatctttatgaaacattggcaatcacccagagcgttatctttgtgaacaccagacgcaaagtagattggctgacagacaaaatgcggagtcgtgatcacacagtttcagccactcatggagatatggaccaaaacacaagggatatcatcatgcgggaattccgttctgggtcgtcccgtgttcttattaccacagatcttttggcccgtggtattgatgtccagcaagtctcacttgttataaattatgacctgccaactcagccagagaactatctccatcgaattggtcgtatcagcggaatgcgttgttgcaattttgttgcttgcttgtttgtatgtcttactaaa

SEQ ID NO: 67844 - DNA, 158 bp, Glycine max
  Clone ID: PAT_MRT3847_32277C.1
gcccctttttatctacccttactttggatcggtgcgatccgcttcaaaaaattaaaagggttccttccaacctggaaaccttcttttgaatgggtttcccaaccctggccttcttaaacctaaaccttgtggttgaataaggaggggtttttattgtt

SEQ ID NO: 67845 - DNA, 325 bp, Glycine max
  Clone ID: PAT_MRT3847_32278C.1
actccaaaatatccatgtttccaaattacagaaatagggaatatttcttgtcacattgaaataaaaacttgcctaaacaaaatggaacttattattttactataaaagatcccttgttaaatattacaaatcatacttctttattcaaatttgctgatactaaattatctataattcttatgggttcaaacatttgtgtgaaaccatggtttattttgttagtccttgaaagagaattttatgttttacaggaggcagcttctttttgactggttggtcctctgacaatgcttaccaatctatttgtctaatcgttttaaatttt

SEQ ID NO: 67846 - DNA, 1308 bp, Glycine max
  Clone ID: PAT_MRT3847_32279C.1
gggggatgacaatgaaaataaatccagtatatttccaacgtaacgttaaaaaagtttcaaatttacagaagcacctcacggatattaaaacagaacgcacagaaaagcggcaatctacaatctttagtaagacatacaaacaagcaagcaacaaaattgcaacaacgcattccgctgatacgatttggggttaagttaaagtctggctagagaaatgccctcattgccctgggccatgataaacaaaataatgacggcggcctccatgataaaaagcataccaatgatgggaagaccaaatcaaatgagatcagctacattggctggcaactcctcaatctgcacattataaaacttttggatgtcaaatagcatcctttcatcatctcctgtcacaaaattgatagcaacaccctttctcccaaaccgtccactacgaccaattcgatggagatagttctctggctgagttggcaggtcataatttataacaagtgagacttgctggacatcaataccacgggccaaaagatctgtggtaataagaacacgggacgacccagaacggaattcccgcatgatgatatcccttgtgttttggtccatatctccatgagtggctgaaactgtgtgatcacgactccgcattttgtctgtcagccaatctactttgcgtctggtgttcacaaagataacgctctgggtgattgccaatgtttcataaagatcacatagtgtctccagcttccaatcctccttgtctacattgacaaaaaattgcttgatcccctccaaggtaagctcatcacgttttacaagaatcctcacaggtttgttcataaacttccttgtgatttccagggcttcaggaggcattgtggcagagaaaaccccaacctggatcttaggtggcagcagctgaaaaatatcatagatctgatccttgaaacctcgagagagcatctcatctgcctcatccaatacaaacatcctgatgttatcagggcgcaaagattgtctgcacagcatgtcaaatacacgaccaggagtaccaacaacaacatgaaccccacttgagaggatgcgttgatcttcacgaacaatggtcccaccaacacaaacatggaccttgacaccaagatagtcccccagtgctcgcatgaccttttcaatttgttgtgcaagttcacgagtgggagcaagaaccagtgcctggcattcaactaagctataatcaagctgctgcaaaactccagaacaaaaggtggcagtttttccagttccagattgtgcttgctaaataacatc

SEQ ID NO: 67847 - DNA, 219 bp, Glycine max
  Clone ID: PAT_MRT3847_3227C.1
gatcatggcggcagcttgttgtctctgcatcaaagcggtctatctgccgatccggggacttcgcctcacccgacgcttttaccaaactacaaaacagccatccagctaaatccgtggcacaacgcgtactacatgttcatccaccacaacttacctatgaaccccaactactgcatgcgcagctctttttctgcaccgatcgcatgtgttaacctactt

SEQ ID NO: 67848 - DNA, 1755 bp, Glycine max
  Clone ID: PAT_MRT3847_32280C.1
aacggggtgataatgaaaataaatccagtatatttccaacgtaacgttaaacaagtttcaaatttacagaaccacctcacggatattaaaacaaaacacagagaaagagaaagcagcaatctacaatctttagtaataagacaaacaaacaagcaagcaacaaaattgcaacaacgcattctgctagacccaaaattagagagaagaatggcaaattcaaatcaccggtttggggttaagttcaagtcttgctagagaaaggccctgggccgtgaaaaataaaataatgacagcggcctccataacaaaaagcataccaatgatgggaagaccaaatcaaatgagatcggctacattggctggcagctcctcaatctgcacattataaaacttttggatgtcaaacagcatcctttcatcatccccagtcacaaaattgatagcaacaccctttctcccaaaccgtccactacgaccaattcgatggagatagttctctggctgagttggcagatcataatttataacaagtgagacttgttggacatcaataccacgggccaaaagatctgtggtaataagaacacgggaggacccagaacggaattcccgcatgatgatatcccttgtgttttggtccatatctccatgagtggctgaaactgtgtgatcacgactccgcattttgtctgtcagccaatctaccttgcgtctggtgttcacaaagataacactctgggtgattgccaaagtttcataaagatcacatagtgtctcgagcttccagtcctccttgtctacattgacaaaaaattgcttgatcccctccaaggtaagctcatcacgttttactagaatcctcacaggtttgttcataaacttccttgtgatttccagggcttcaggaggcattgtggcagagaaaaccccaacctggatcttaggtggcagcagctgaaaaatatcatagatctgatccttgaaacctcgagagagcatctcatctgcctcatccaatacaaacatcctgatgttatcagagcgcaatgattgcctgcgcagcatgtcaaatacacgtccaggagtaccaacaacaacatgaaccccacttgagaggatgcgttgatcttcacgaacactggtcccaccaacacaagcatgaaccttgacaccaagatagtcccctagtgctcgcatgaccttttcaatttgttgtgcaagttcacgagtgggagcaagaaccagtgcctggcattctactaagctgtaatcaagctgctgcaaaactccagaacaaaaggtagcagtttttccagttccagattgtgcttgctgaataacatcaagccccttgcagaaaggaacaatccccctttgttgaattgcagagggcttctcaaaaccatatgcataaatacccctcagaaggttctcctgcaatcccatagcatcaaagctttcacaaacttcgtcataagaagtaaaaaaatcttgcccatcagttccaagtaactcattcatcttagcatcatattgacgagcatcaaattgtgatccttctggcgccaacccagccatgatagcaaacttcgggaaagatggaggaagttcgaattatcaaacaatgaaaaatagtgagtttgtgagagggggttgtggggttagggttttcgaaactcgaagggttgtggcggtggctatgagatgacgacgtaacagagctcgagccgattcggctcgagctcgagccgaatt

SEQ ID NO: 67849 - DNA, 785 bp, Glycine max
  Clone ID: PAT_MRT3847_32281C.1
cgcggttaattgattctagagatttcggtttgacgttcaactttcggtgcagcaaaacgcggtttcatattgaatttcgccatcaacaccacgatagcattggaaaaaattgtttaaggtgtgttttggtttcagactttctcatatcatcggctcgaggcaaaatttaccgtgcgagagagttggattcatgcgctgggaactactaccaaatcatgagtgtgcctaattcctcctgtaatatccatgaaaaggaggagcaaggagacgatgagaagggcaagcttgtatcattaggacaaatgaatagtttaagtgtgaaagaggatagtagaacatcaaagaacattagttctgaaggtgaaagaagaacaccagaaatcatgggaagatgtgcatcctggtgggcaaccttcacattttttgtgtgtttgtgttcattaaaattcagcaaaccacttctccaaccacaaggacccaattcactatggcttgccatattaggaatgttcagttttactgtgtttgtatctgctgcttctgttatggttgttgttgaagcacagttcactcgtatgcagataactgttatgctcagtgccttcttggctctgctgttagcttaattagacagttttcatatgtgtacttatgtttcctttagccatggcggaaaaagttgttgtaatctttttatttacataatttcattcgcataacaataaaacgatgtttgggtatgtgctatcgacgattcaatagacagaacatattcatggaggaaa

SEQ ID NO: 67850 - DNA, 308 bp, Glycine max
  Clone ID: PAT_MRT3847_32282C.1
cgacccacgcgtgcgcgactcgtgggcggactcgtgggcggactcttggtgttgctggcgcggtacgcccacggcgtgagtcagtactgaaagtacgggctgctgctggaggactagacggagcaccccatcatgttcgccacagtcctcgagcgcctgcgcaacgacttctaccgctgcccccaggccttcctgcacgagctggagtggctgttcgacacggtgcggcggcagcagcggtacgcctgaaaccatgtgttggcggagtccatgctgacccggctgctgatggccgtgaaggacattct

SEQ ID NO: 67851 - DNA, 332 bp, Glycine max
  Clone ID: PAT_MRT3847_32283C.1
tgatcttacctcagcaccatcaatactataggctggcccatgagaagcttcgagaacgaccgccaatacaccctatcatcgtcacagagccattccatagacgtgtgcggtgaaggccctatcgctacagatcgagaacctagccatgtccggaggaaggcttctacctccggcttggaaaccggcgagactgccgtcgacggctcccgccgctatggcgccgaaagacgaaccctacgaaagcatcgtgctgcgacatacagcggagcttctaaccgcactacattgtacacttagaagctacatgacgatactgagcgtctcgctaatga

SEQ ID NO: 67852 - DNA, 309 bp, Glycine max
  Clone ID: PAT_MRT3847_32284C.1
tgacaatctcgcatatgtgatactagaattgtattagcaccgtggggaagaagctacccaactgagaacgaaagctctctctcctatgagatgtctgcaaaaagctgatgtgcctaccatagcacatatcgaagagttacattcaatgcagaagatgataaatgctgctgattgaaaagataatattgatacacggttgagcatatgatgaaactgtatacatagagcaagtaaagctgttgcaaacaaaatggataaatgatgataagctcaggtaggctaacacacaagaattcattgatggaaatt

SEQ ID NO: 67853 - DNA, 286 bp, Glycine max
  Clone ID: PAT_MRT3847_32285C.1
ggctcgagctcgtgccgctttgttattttattgagagtagagaagagtagaagatgaggttcattattgaaattaaccggacttggttcagaaggcaccaatggccaatcatgaaggaagaacagatgaggcgacgatgaccttaacatactccatatacaagtccataagacttgaactggctgaatggctggacacgaccactttattctagggctgtttggagacaacaatacagcggagtgcacgactaccatcgcagccttctgacataaggatggagctg

SEQ ID NO: 67854 - DNA, 335 bp, Glycine max
  Clone ID: PAT_MRT3847_32286C.1
gcggaattttattgattttggtgggtggatattgggggggttttctggccctttggtaatactaatcgtgcattgtttttgtaacaaactgatcagaccaggctatttattcagtgcttcatatgataaatcgatgataagagcttaaaggggatcgaccatttgacatctagttctgaggtaacgcatctacgtatcctattttgcatgcttaggtgatactttcaggtgctgctatttttaaaatgcgaaccaaagaaagctcgacacgaattgtctgtagcatgtacatatgcaggctgatgtactaagacactgttgtagctcgagcatgc

SEQ ID NO: 67855 - DNA, 317 bp, Glycine max
  unsure (1)..(317): unsure at all n locations
  Clone ID: PAT_MRT3847_32287C.1
tttccgctcttaccaaggagagacnccaaacacccggatactgcttcgctggcggttcctgaggaccacccgagcccactggccacgaactcaacatagccaactgcgacgacccggccgccgacgaccgccaattcgacgagggcgacggaggaaccacaaacgggtccatgcacctccaaaagacggttgcctcttgcgaaggagaggggccacttacttcgaacggctgcacctgggggaccggccctccaaccacgacatcgacgaggtccacgcgatgcaccatgatgatggaggagcctgactcaaccgaa

SEQ ID NO: 67856 - DNA, 499 bp, Glycine max
  Clone ID: PAT_MRT3847_32288C.1
tttttgcaagtgtaatttactcttttcattatcatagtgttcctctactgaaaaaaataaaattaaaaaacatgatatgagatgtgtgattcagttctgcatacctaaatgttatgcagctcacattattctaaagctcataacaataacagtaagttggaaaaggagagatccaaaaattattggggacagctaaacaacaaaattctcttacaaacaaaaattggtgaaatcagcccaattgttcacaccacctatataacaaccttgttagaactatcagcagtgactttttcaatagaacgaaacggcctcagctagcaagcactctgaaactaaccataagccaatggaccttggacaatattccctattcaattaggccttatttataaattccatcagctccaagggaatcttatcaggtgtaggaaaccattatgcacggatagtccatcctcgctgagcaagagcatcaaccacttgactggcagcttct

SEQ ID NO: 67857 - DNA, 511 bp, Glycine max
  Clone ID: PAT_MRT3847_32289C.1
taggtaacttttttctttcatgtctctccgatctgcactctttcaaaatgagccaaatcccacgtgtccgcgaactctctctctgtctcatcttcgaattcgaagcaaacacaaaccctaactttcgagttctctcggttcgtccattgcactgagccacagagcaattccgtccactcgaagcaactacgtcgcactcgcgccctggtctcttcatctttgattctcaggtgcttttttttgctacattttcagtgaccaggccgattttcacaacattggtttcttctctttgctctcttcgacctgcactttctcttccaaaatgaaccaaactgccattgccaactttgaaaaggcaataggctgttactctccatcggttcaggagcttattgttattgatgatgtgctcttcgccatggttggcgttgaaggacgttacatcttaataaaacaatttgtggaaagagtgatgaattactttcctgggtgatcccgcaatggattt

SEQ ID NO: 67858 - DNA, 375 bp, Glycine max
  Clone ID: PAT_MRT3847_3228C.1
gtctatcgataaaaccggcttggggatgtaactgaaaaaacaaaatcttaaaacatgatcactgtccgtccagggtcattatggttgggattaccgtttccgagatgatctatacaaaatatttggacgctggacgaatgcactgtccacactaggattgaactgatgacgagcttgactctttagacgaatgcgtaaccttccattgtgttctggattttctcctcgccataattaaatacccaattgctccatcacgaaaggtatttacaaaacatccctttcgaggaatgtgcattgtcatatctctgttcgaagggcccacctttagaagaatccaatggcatgctcgttggacattatatgaaaagcttt

SEQ ID NO: 67859 - DNA, 321 bp, Glycine max
  unsure (1)..(321): unsure at all n locations
  Clone ID: PAT_MRT3847_32290C.1
gaatgattcagcttctccagtgagtataccttctccaccgataaatgatgatggtcgcgactcgggcttgcataatgggaaggacacatctgatggcatgatgttttcacatcatagcaccactgagacttgtgactggttcaagaagcagacctactatgatgggggcatgcgttcttncctttntaaaaatcntcnccatccctctaaatggcaangaaagtgcccccttactnaaatgctgggaaagggaatcgtgtgcttcacatggctacaaagatacctgatgagaatttcactctgcgtctnccttattatgac

SEQ ID NO: 67860 - DNA, 253 bp, Glycine max
  Clone ID: PAT_MRT3847_32291C.1
gacgagaacaaagtgagcaacttcccttctttcagagtcattcaaaatgaacgaacttaaaaaacaatgcagtttcaaggtgtttaagcatggtagtcccgagggttcacccattgtctaaataaaggtgcacacgatctaaacaagtcctacttgttaccaagtaacacacattaaggtcgcttgtatgatgatcacactctactcattaatattataccatcttagaactaggagatcacatgtccaagga

SEQ ID NO: 67861 - DNA, 215 bp, Glycine max
  Clone ID: PAT_MRT3847_32292C.1
agagaagaaactaactagtaagttcttgtcagagctttattcaaacaggacctaaagtatagactccatagaggaagcacaagttaagttaatcatatatggagtctatactttaggtcctgtttgaataaatttctcacaagcactaacgagagaagaaactaactagtaaaaaatgaaattaacttctcccatactagcttctctaaaagctc

SEQ ID NO: 67862 - DNA, 1817 bp, Glycine max
  Clone ID: PAT_MRT3847_32293C.1
aactcagctcgagccttcccaataaagtatattctcttctctgccgtccaagctagtcgttctctctgtctcgtttatattttttggtttattatattcttctgtttgcacgaagcacactatgggttggaaaggaggtctcaaaaacgtggtcacaatgtttactttcatggtggccttggttgttgttcaacatgtgaagtgtggggactcagctcgcatgttacttcagcacggtggcttcgttcaacgaagtggcaccaacttcgttctgagtaacaggcatttctacttcaacggattcaacgcgtactggttaatgtacatggcatctgacccagccacaaggcccaaggtcactgccgttttgcaacaagcttctagccatggcttaactgttgctagaacttgggctttcagtgatggaggttatagagcccttcaggtttctcctggttcctacgacgagaaagtattcaggggattggactttgtagtatcagaagcgggaaaatatggggtgcgtttgatactgagcttggtgaacaactggaaagattttggtggcaaaaatcagtacgtacagtgggtgaaggaacatggacagtacgtgaacagtgaagatgatttcttttcacatcctattgctaagcaacattacaaaaaccatattaaggctgtgttgacaagaaaaaacacaataactggggtggcatataaggacgatcctgccatatttgcgtgggaacttatcaatgaaccccgttcccaacacgacaactccggaaaagttattcagcaatgggtgattgagatggctgcctacgtcaaatccatcgacaacaatcatttgttagaaataggactcgaagggttctatggtgaaacaatgccagagaaaaaacaattcaatcctgggtaccaacttattggcactgatttcatttctaacaacctagttcaccaagttgattttgctaccatgcatctctaccctgaacaatggttgccaggctcaaacgaagctgctcaggttgcatttgttgacaaatggttacaaacacacattcaagatgccaaaaatgttctggggaagcctattgttgttggtgagtttggcaagtcttcgaagtcatatagtgtggttgaaagggacaattacctgagcaaaatgtataatgccatatacagtagtgctagtagtgggggaccctgtgctggtgggcttttttggcagctcatggctaaaggaatggatggtttacgtgatggttatgaagtcatctttgaggagagtccttcaactaccagaattatagatcaacaatcccacaaaatgtcaagtattgcttagtagataagcattaatttcgcctacctcatgtaaatatacatgtaacaaacttattttgttgcttatatattccccaaaacaagcactatatattcataggaaaatacagcgtgttgtgaacaaattaatcaaatgtaatatatatattaactcaatacatgatcaggcaaaaaagcaaaatagtggttgcaacttgcaagtgggtgataacactgcattataccacaaatgcataggagcaataattttggtctggaaataaatgggagatatatggagagtgaatccagaagatatcaagggaaggtgtctgatgctttttactgaaaaagtttttaggaggaagatgatgttgttaaggactgcgatggttccaaaagtcctagacggaattttattccatagaaaaatgttgaagtaataatactttgaactataatgaaactcaaaattatatttattt

SEQ ID NO: 67863 - DNA, 235 bp, Glycine max
  Clone ID: PAT_MRT3847_32294C.1
gtaagctccggaattcggctcgagggccctcacgtcacacgattcaaagacacctactttgtgaccggcatcgtcagctggggagaggggtgtgcaaggaaagggaaatacggcatctacacgaaggtcacggccttcctcaaatggattgacaggtccatgaaagccagggtggggcccacctctgagaccccaaggttaacccatccaccctattaaagcagtccttctccag

SEQ ID NO: 67864 - DNA, 312 bp, Glycine max
  Clone ID: PAT_MRT3847_32295C.1
gataccatagaagaagcacattggagaagcattatcactacgagcagcaacaactactctcagctgaaatggcctcttcagtgatggcatctgtggccctcaaacctgcccctttcactgttgagaagtcctcagtgagaggccttccctctctctcaaggaactcttcttcattcagagttgtggccagtggcaagaagattaagactgacaaaccttatggcattaatggtggcatggctttgaaggaatgaactgattcatctggcaagaaaaggaaaggaaagggtgtttaccagtctgtagacaaat

SEQ ID NO: 67865 - DNA, 401 bp, Glycine max
  Clone ID: PAT_MRT3847_32296C.1
aaagtcatatattttgttgagagagattgtgtgacatgtgagacagcgaggggggcatacaataagggcgaccaaaggaatgtggatgaggagagacatactctgggcaaagcgaagcctgaccgtgctacaacgaacgtgaagctgaccactcagggagcgtgatagcactagaatagtgaaccgtgaagcatatgaaacggcaccggagactataacatgaatgatacggagctgccgtgaccaatatgaaacatcctgcactggaacaaggctgaaagagtaaaccaaagacgactcatacgataagacagaggataggggcacgaggaagacatgagccggagatcgaacacagcatgtgcagcacggggaacaaaatgacgcgaacaacacttgca

SEQ ID NO: 67866 - DNA, 678 bp, Glycine max
  unsure (1)..(678): unsure at all n locations
  Clone ID: PAT_MRT3847_32297C.1
ttttgtggttttttttttttttaaacctataatttatatcatccatatttttaatataaatcggttcatgcggtgattcacactagttgagctagtgactcggtaattcaatacttcgatgaccggtctatttcttttatcatagggggcaacttcctcccggtgggggaattgaagatgcacaaacacggggacagaatatcaggaacagaattgataaccggcaatttacataccacctcatacaatactcggaaacgctggtttcattccttgcgtgctttacggttaagccatccttaaaagggtctgtaaagatctttgttttctggcccccatgtctcctctggttttcttaaagtttcctccccgggttggcttctggggctttaaatccctttttgttggcncaaattgtcctggcctggctttttttgtagggggactcccgggcctggcgaaaaaacctcctttcccttccttttttggcgttccccccctggtatgtgtccccccccccgcggggcggctccgctgcttgttgactggctgccttgttggatcccccttgggcggggggttgctccgcccttcctttggaccctccttctggggggggtggccccccgaaactttttttgggcggtccccctcgtggaggttttctttggggcaccc

SEQ ID NO: 67867 - DNA, 432 bp, Glycine max
  Clone ID: PAT_MRT3847_32298C.1
cccacgcgtccgattataaatcgcaagcagaacaatctaaaagatccaaaactaaaaaacacatacagtggcgacctcttataatattccatagtttaacctggctggcctttctatgggctcctactttacttcggcgggcctgcgacaatctagtcctcacctaactacaccttccttgcatcgcatgcccctttctttaccccgcttaatctcgtagaaccccgcccctatctcccttgctggcattggcgcaccctggcctttccccagctcgcttcctgtcgaggagcccccctctttgccgctttggaaactacctgcaaggctacatgtacactggctcgcgccctgtttcccccccttatggccgattggtttgcctttttcccacggccttacccttttcctttctagctctatatccccggc

SEQ ID NO: 67868 - DNA, 373 bp, Glycine max
  unsure (1)..(373): unsure at all n locations
  Clone ID: PAT_MRT3847_32299C.1
ggaacatatatacatatattggatgtnanttgtggggtcagatctcaatgccgaagggaaaaaagcaacattaattttatacatatacgatccttagatgtattctcaagctttttccctttaaaccaagctgtctcattcttcactcttcaaaaacctaattaagcactaaactatccaagtgcatgtgcaacaagcttaaactcttgcgcctgcttgaaattcaaccatgactaatcccaaactttggcttcataaaccttcttttggccacaaacttttgtctacaaagtgatggtgtccaaggtaccagaaaccactttctgtttcccatgtaccacctttttaaacctcataagggcattttgttttt

SEQ ID NO: 67869 - DNA, 252 bp, Glycine max
  Clone ID: PAT_MRT3847_3229C.1
aaaacggctcgagaccaaatcagaatacagagaagctggttaaaacgacaatggcaacaaaaaggtcgagagaaagggaggcaaagaaagagcaccagagatagcaaaagagaaaactaatctgggaaaacacagaactcaaagccgacaacaaagagtgaaacacacaaacctcgaagaacaggagaaacaaaaacatgaacggagaggagaaaatagcaaaaaacgaggacacaaacataaaaaataaaa

SEQ ID NO: 67870 - DNA, 423 bp, Glycine max
  Clone ID: PAT_MRT3847_322C.1
gtgttgctcttgttaaccatagttacatggatgtatggtatagaacaatcagtgttattgcttctatcatctattccggaacattgctcaatatagaactgattagagagagagagaaaaaaaagcatgtatgctttttattgatttattgttacgtgaaatcaggtgaggaagtcaatgtgtcgcatcaagcatgtacttactgagagagcaattgaagaaccagatcccaggaggtctgctgagatgaaaagaatgataaatgttctttgatgacttaaaattgacctgttcttgtgatgacattactgggtatgttgttagaataggacatctacatttgcggatgtaaggttcgctaacttgaagcattgtccaaaaatattgtttatgaaggagtttacccgtgaatgatttttgctt

SEQ ID NO: 67871 - DNA, 406 bp, Glycine max
  unsure (1)..(406): unsure at all n locations
  Clone ID: PAT_MRT3847_32300C.1
caactttagataattctcctggtttaaaactagatgaaagcctctttgaagtacccatgttgcattgcaaaacaaagtcaaatattttttatgttgtacttggtaaattatgaaatgcaagaaaaatttaaatagtggccctaaatggttttaaggttcctcgatgaaatcatgaaactgaaaagcaatgaagcagctggggcttcaatgaatggcttgaagtctctgggtaagagaattgctaggaactcactctttaatatactattttgaacacgctctctcttattgtaaaaaaattgtgggtctcatatcatatttaatgattctctntcatgattttgtagtttttaaaaattctaattaattagaaaaaatgtttttgaaagaatgtgttagagagtgt

SEQ ID NO: 67872 - DNA, 110 bp, Glycine max
  Clone ID: PAT_MRT3847_32301C.1
ctcggcttgcggtacgagctcacgccataccttaacagtcaccaactgggttgtctcactctctctccctgcgcacacaaatggtgttagcgttcttggccaatctctcc

SEQ ID NO: 67873 - DNA, 487 bp, Glycine max
  Clone ID: PAT_MRT3847_32302C.1
attctttttttcgccttttagaacaaatttagaccaactctactgagcacacaggcagaaaggggacggccaagggggggggaaatgaacactcacacctaaaatcaacataaaaaaacccacatccctttccacaaccaaaggaggatcacaacgcttaatacccataaatggaggaaggaatatctcgccacaagaagtaaagatccatgcaccaccattcttacattggtattctgaaaaaattgcacaccccttacttccctatgcacagctctcatcttaaatccaagaaccaacttccattgcacaacaaccatgcatgtagaaaaaaacaaggaacaaatatgaccaacgcacaccgataaagacttttgtttgaaaagatacctacgataccttgtccactgaaaaaatgaacccatctcaggaagaaatcatcacacatacgccaactaaaaatctgccccttaacatcacattatac

SEQ ID NO: 67874 - DNA, 252 bp, Glycine max
  Clone ID: PAT_MRT3847_32303C.1
gcaagatgaccaaccacgtcatactggacatgtttcaaattagactatcttatggtgttgatgcaaacctctgacaccatggggtgcaaattaggggtatttggtcatgcaacatcctgtgctcaatgctccacagtctgcgatgaccctagccacgatagacagtcccgtctgctacacctagaatgacatgctcgtcgatatcaggcactcaagctcactccacttcacagcatcattcatcacattata

SEQ ID NO: 67875 - DNA, 469 bp, Glycine max
  unsure (1)..(469): unsure at all n locations
  Clone ID: PAT_MRT3847_32304C.1
agagagcgaaggggcaaacacaattttttttatcttcttttttattttttgtagagagagagagagagaaaatgttggggatcttcagcagttcagtggtgtcgccgccggaggagctggtggccgctggcagcagaacgccgtcgccgaagacgacggcggagaagctgctgaaccggttcgtggagagcaaggcgtcggcggtgtcgctgcaggtgggggaacacgtgcagttggcttacacacaccacaacgaatcaccgtggcatcccagatcatttgctgttaaggatgagatattctgcttgtttgagggggctctatacaatttgggcagcctgagacaacagtatggactggccaagtcagccaatgaagtgattntggtgattgaggcttacaaagctgtgctgtcatagtgtgtgacaagtccacttctaccctttttgtggcttctgatcaagctggc

SEQ ID NO: 67876 - DNA, 601 bp, Glycine max
  unsure (1)..(601): unsure at all n locations
  Clone ID: PAT_MRT3847_32305C.1
acgagattctcttcaatttctctcttccatggcgaatgagaaggaccgtttttaccagccctttcattacaaccaccaccatgatcagcaactcaaccactcatcatcaagctttccattattctttagggacaacaacaacaactctgcaccaattggctcacaattaaactttcaagggtttgatgatcataataataacccttcttctgatcatcatcacaccactttcactgactgcttacatggttccatggattacaacaccctctctagagcctttgacatgtcttgttcatcttctgaagtgatctcctccaatattgttgaaaaccccaagaagcctagtgcaggaggagactctgtgggggtcagggggaaccaacaatcaacacctaattcatctgtctcttcgccatccaatgaagctgaagcaatcatagaagaagactcaaccaagagccagaaagataagcagccaaaagcgtgtgaagctgatggagatgaaaagcctaagaaagagaacaaaccccaaaagaaagagaaaaagccaagggagcctcngttttgccttctgacctaaagtgagatcgatcatctt

SEQ ID NO: 67877 - DNA, 254 bp, Glycine max
  Clone ID: PAT_MRT3847_32306C.1
ccacctcgaatgcaataaaagccagacttgcatgattgagacttccccgccacatgcaagacctgacccttttttctctcaaatctacctaaagtatcgcaaaactttgccaatcgcccatttcacgactaatgcccttactcctaatatcgcactcctgtattggaccgatggacagtaatattggtaatggagaatcataaataagtaatcatttaatcagcattcagtagtccatatcaaggaaactccga

SEQ ID NO: 67878 - DNA, 1184 bp, Glycine max
  Clone ID: PAT_MRT3847_32307C.1
gagagagagagagagagagagagagagagagagagagagagagagagagagagagagagagagagagagagagagagagagagaggagagagagaactagtctcagtttttttttttttttttcaaaccaaaagcatatcttttattacattagaaagcgcaactgtacaagagaaacagagaaaatcctagctaatgaacaccatgataaactctactaccagtcacattcttctcatagttatcattaaaggtatttacatggccccgcatgcaagccttaccgtcacaagcacataaacacattactccattaatacatcacacggtactttatttgaaaatgaatcttttactctgtgcctgcaaggactgctgacccttccaccttgaagaatgcaccccagatttcctcttcctcagcaggtattgcagtaatcttattctttggattctcatagcatctcaatcctccaactgctgtagagtagaaacacccttgagggaaagaagcaagtgacttgccacaagaacctttaagcaaatctgcatcatcagcaaatgctacatatccatcagctgtgattccccaataaagaggaaccttaccagcttgatcagaagccacaaaaagggtagaagtggacttgtcaaaaactatgaaagcaaagctcccactgagatggcatacaacacgattggcagggtatggtgctcgatcacgtaaagctttgtaagcctcaatcaccaaaaccacttcattggctgacttggccagtccatactgttgtctcaggctgcccaaattgtctagagccccctcaaacaagcagaatatctcatccttaacagcaaatgatctgggatgccacggtgactcgttgtggtgcgtgtaagccaactgcacgtgttctcccacctgcagcgacaccgccgacgccttgttctccacgaaccggttcagcagcttccccgccgtcgtcttcggcgacggcgttctgctgccggcagccaccagctcctccggcggcgacaccacggaactgctgaagatccccaacatttttttctctctcgctctacaaaaaaacaaaaaagttgtgtttgccccttcgcccttctgtttcgcaagaaagtacacgcgacgactgagaatccccttctgtcgtcttctcgcagccgta

SEQ ID NO: 67879 - DNA, 1102 bp, Glycine max
  Clone ID: PAT_MRT3847_32308C.1
cttcctttttttttttttttttttttttttttttttttttagaaaatctcaagccaaaagcatatatattttattgtattagaaagcgcaactgtacatgagaaacacaaaatcctagctaatgaacaccataataaactctatcaccagtcgcactcttgtcatagtcatcattaacattatttacatgatccttcatgcatgccttaccgtcacaagcacataaatgcattactccattaatgcatcacacggtactctatttgaaaatggatcttctactttgtagctgcaaggacagttgatccttccaccttgaaaaatgcaccccagatttcctcttcctcagcagggactgcagtaatcttattctttggattctcatagcatctcaatcctccaactgctgtagagtagaaacatccttgagggaaagaagcaagcgactttccacaagaacctttaagcaaatctgcatcatcagcaaatgctacgtaaccatcagctgtgattccccaatagagaggaaccttgccagcttgatcagaagccacaaaaagggtagaagtggacttgtcaaacactatgaaagcaaagctcccactgagatggcatacaacacgattggcagggtagggtgctcgatcacgtaaagctttgtaagcctcaatcaccaaaatcacttcattggctgacttggccagtccatactgttgtctcaggctgcccaaattgtctagagccccctcaaacaagcagaatatctcatccttaacagcaaatgatctgggatgccacggtgattcgttgtggtgtgtgtaagccaactgcacgtgttcccccacctgcagcgacaccgccgacgcctcgctctccacgaaccggttcagcagcttccccgccgtcgtcttcggcgacggcgttctgctgccagcggccaccagctcctccggcggcgacaccactgaactgctgaagatccccaacattttttctctctctctctctacaaaaaataaaaaagaagataaaaaaaaattgtgtttgccccttcgctctctcggtttcgcaagaaagtacacccgacggagaatgggatagg

SEQ ID NO: 67880 - DNA, 788 bp, Glycine max
  Clone ID: PAT_MRT3847_32309C.1
gaccgaaacaacacaccagaaggtcgctggtcattcacagattttgggaacttatttttgaaatggaagacaatggaattaagcagcagtcaagtgcttcagcagcaggggtttatgaattacctggagaacctgctattgtaattaatggggtgcctgacataatccctggtggctgcaccattgctcccggtaatgcttcaagcaaggttgaaatgcatgcgccttcaggtttgggtgaatggtttgaagggagggatgtccaaaagtggtttatgggaagatatttctcaggtatggtaactgatttcgacaaagattctgggtggtacagggttcactatgaagatggtgactcagaagatcttgattggcaagagttggaagaggtgcttcttcctttggacgttacagttccgctcaaggcattggcacggaggattgtcagaaaagacaagaaatctgttcctaaatctgttaagaaggaagctgctcattcacaaaatctccaaatcaaaagaagtacaacaaaaggaaagtagatcatagatgaaattttagtggtttgtagatatcaattgcatagcatggtgaacagttctgaaaacgctcaactgaaagagcaattaatttattttttttgttatagcagtggggactgtttgttttgtagttagggaattgatcccaaggagaattccaaagcttgttgtagtgatgattgaaaattgttttacctggtgaattacattactataatggcaacaacaagattttctccgaattct

SEQ ID NO: 67881 - DNA, 632 bp, Glycine max
  unsure (1)..(632): unsure at all n locations
  Clone ID: PAT_MRT3847_3230C.1
cacgcgtccgcataaacataacatttgcctctgtctctaaggtccctaatgtggacgaacttggccaagcgagcttcctcaaccctaaggaataacttccgtgtttcttcttttatctccgagattttgtaagccccaaacatgtaaaacatttcagggtttccctgaagtcggggtgagtcagtccaagtttgtgtttcacgagggtttttcttgttcttcttcttggtcgtggtcttggatggtgctgggcagaggtcatgctagcgttgcggaggctattgagtcgacggacaccgaagatgactacgatgaggttcagaaattgttggaggaaatggcgaaggcagaacacaaagtggacagcagcagctacaagtacaagttgctgaagaggaggcagatagaatcggagacggaggcgtgggcagaagcagcaagagagtacgggngaactgttggaggacatgcgtgacaagaagcttgctcccaattttgccgacatgaagtcactctttctgggttgggtttgagcccctaagaaatgcaattctcgctgatcaagacctttgcaggataagcaagtgcangatgagccatgctccttatttcaatgacttgcccgctgacat

SEQ ID NO: 67882 - DNA, 330 bp, Glycine max
  Clone ID: PAT_MRT3847_32310C.1
tttcctgccaataggcgcgcttacactgctggctcttcatttataggatatggtgtgaataaagacctggaatctgaagcacccacttatcatgaaggtgcttcagtgtgaggcttaccaaaagggtagaggatagcttgttaccctcagctcaactactattcaaaattgaacacactgtgagtgtcacttaactactacactggaattcttggtatgccaggagtgactgcatttgcaagtctacttgaaggctgatctcttcagaaaggaaaaaaagtttttgcttcggctgcctctggcacaatttggtcaactttgtagggcaat

SEQ ID NO: 67883 - DNA, 178 bp, Glycine max
  Clone ID: PAT_MRT3847_32311C.1
gctaatcagtcgggatatcattgaagatcatataaaacaaggatctattacccaaaccctggaactaaacccctcactctatctatccagaaaggctttatgttatagaaccttcgcttacatttctaaaacctgtgggtcacataaacaacacgctcatactttacctgctgcacta

SEQ ID NO: 67884 - DNA, 367 bp, Glycine max
  Clone ID: PAT_MRT3847_32312C.1
attgaacaaaaaatgacattttggaataaagagctcagtggcatacaaattatttttattttttaatacataatgccagacagtagggaacaaaaattgttttttgggatttaaacctttgttttaaaaattaaatggctggcggtacttgaaggggcattttgacagccacaacatttttgtcacctttgtaaaagattaggtggtccaaaaatgaaccaaactgctcttaataattccagcattttttacacttgtaacccacaagacgagatatgttaatccagattttgttctttccttgaattatgcattcaccactatatggtatatttacaaatttgttctttctttcaatgagggaaga

SEQ ID NO: 67885 - DNA, 1422 bp, Glycine max
  Clone ID: PAT_MRT3847_32313C.1
gctcgagtggggtgatgcccctcctcaagcttcttatagaagcttcttcccctgctgctcagggggcttctgccgatgctctggttaacatcacaaccaatcaagacagggttgttactttcattgtggagtcccatgctgtccccatcattgttcaggttctcggtgattcccctatgagggttcgtgtctctgttgccaatttggtctctgctatggccgagcaacatgagcttgctcgcgaggagttcgtcagggccaatgtgactaggccccttgtgtccttgttgtccatggatatgggtactgtcctcgctgaccccatggccggtcgcgccagcattcattcgcttgttctcaatttgtccaatgtcggggaggcgaattcggatgggagtagccgcggctccagccaccagcgaagagatagagaggttgaaagcccggagttgaggaatgaggtcaaaatcagttgtgctaaggctctttggaaactctccaaagggtgtctttcaagttgcaggaagattaccgagactaaaggtttgctttgtcttgctaagattattgagtccgagagtggggaattgcagctcaattgtcttatggctgtcatggagattgctgccgtggcagagtcgaatgctgatcttagaagagctgcttttaagcgaactgcaccggcagccaaggcggttttggatcagcttttgagggtggttcaggaggagagtgacccggcattgcggattcctgctataaaggcaattggttccttggccagaaacttctctgggaaggttccgcaggttattggtcctttagttgctcagcttggtaacagagatgttgatgtggccagtgaggctgctattgctttggggaagtttgtgtgcccggacaactacaactgcattgaccattctaaggcaatacttgagcttgatgggattcctaagctaatgagcctgctgcagataaatgatcgccaacaagttcatggccttaaattactttgttaccttgccttaaatgttggtaacagtagggtccttgagcaagaacgtgccttgaataccctagagagatttgctcgtcctgttcaagcacaacatcctgatttgaaggacctttttgcaaaggccttacaccacctcactctttatcagccaggagctcaattgcacagacagcccttggggctgtaagtgccacttattgcattaatcaaaataatgatccttgtaattcttttgaatggaaaagtaagagtgtattgttacttagaaattgatttattacattgtgaaaatgtcaaaatttcaatttaatagcctctgttatttgtgatattgactcactggtcaaaaagattatacgtaaggctggctgtctcaccaagatgagtaaatttgcggatat

SEQ ID NO: 67886 - DNA, 216 bp, Glycine max
  Clone ID: PAT_MRT3847_32314C.1
gacattcacgagtacctgtttaatgaatgtaggtttagcctatcccggttccatttttagacggagcaaattaatgaatgtaggtttagcctaaaacgaattacattttaagacggacagattaaaaagttagcagcgagttacaaatatttagggtggttgcttagatagctttgttatctgtttaccatgttgtaaaaaatgatactatctacc

SEQ ID NO: 67887 - DNA, 631 bp, Glycine max
  Clone ID: PAT_MRT3847_32315C.1
gcacctgtgaagagagagtcgctcgcgatctagaactagtcgttggtgaaggagaaaagccgaaggcagtgataataggaggtagcatagcagggatatcaagtgcacatgctctcaccttagctggttgggatgtacttgtgcttgagaaaaccacctcacctccaactggaagccccactggtgcaggtcttggactcaattctttgtcccaacaaatcatccactcttggcttccaccacaccaaaaacaactccttcacaacaccactttaacactcaccattgatcagaaccatgcaactgatagtgagaagaagtttagctggacattgacaagagatgagagttttaacttcagagcagcacattgggctgatctccatggccttctgtacaatgcactgccaccaaatgtatttttgtggggtcacctttttctctcagtccatgttgctgatgataagggttcagtcatagtaaaggctaaagtactagaaactggcaagattatagagatagtaggggattttcttgttgcggcagatggttgtctctcttccctccgccagaaatatctccccgattttaaactcagatattctggctattgtgcttggagaggggttct

SEQ ID NO: 67888 - DNA, 629 bp, Glycine max
  Clone ID: PAT_MRT3847_32316C.1
aaaacagccattgaaattcacgattgcattaatttcctgcattttaatgtgtacacagtttctattctacacatttaatttctgttgcaaaagaatcggtttgacaacgcaaatcttttgctgtcatccgaaatctgagtcgatcattctccaacctcttacatgcatcaaaattaactcttgcaaccaaagtccaatccgtcacaacctccttttggtaatctgcttcttttttttggcacgttgaaaggacgtcctgcaaagttgtggtacgctccaagaaggatgtgagtgttttttctcattttcagacattgccatgtacttcttccaatcctcaagcaaaattttaagatcattgactttgctttctaaaccaacacaacaattggcatgcattgttgagaccctgttgaaatcctctgcaagctgacaaaaccctccaaaataactagtgctaaggagcctcatcttcagcttcattctggaaactaaggggtgcattttgatattgttgagcacagactgctcatgatgcccggggtagacattcctagagtagaaccagaacttatagaaccaaatagttcggttatttgatctcacatatttaaaccctccatttggaa

SEQ ID NO: 67889 - DNA, 217 bp, Glycine max
  Clone ID: PAT_MRT3847_32317C.1
agcacagagggggctagtggtaaggctaagaacgtgttaggggatgaaccttgtccgttcaagatatgaccgtcaacaaggcattacagatacctggtacaaaaaaattattgggcgaaggagagaatttgttacccaaattcttttttttgttaagattttgcatcttcagatctattttatattctaataatggtctaaagcgttctcttggcat

SEQ ID NO: 67890 - DNA, 392 bp, Glycine max
  Clone ID: PAT_MRT3847_32318C.1
cggacgcgtgggatgaaatgcatcaacttgtcattttttgacattgcgacatgcatgccatgtaaacatatatcatttccctagcaaggcgacatgcattagcatatgcaaaatccgcaccaactctaaccataactgttttgtcgatttcctctaactgaatgaaaaattatactccaaattatttgcactgttaatatcaaaataacggtgttcatatttataggtgttgagccatttgacattgatctgaaggagcagaaggtgacagtgaaaggaaatgtggagccatatgaagttctgcaagccggtgccaaatcttgtaagaagacttcattctgggtggatgaagctccacaatctaaaaaccagccttttgaaagtgcacctgt

SEQ ID NO: 67891 - DNA, 628 bp, Glycine max
  Clone ID: PAT_MRT3847_32319C.1
ggctcgttaaacctagccaaagtagtaattcatcttgcttttcctttttacctgaaaaaccctgttccaagccatggctcactccccttttcttttgttgccaaatcttcaaggcttttggccttctttgcttgctatgatcacttgctttatcattatgatcaaagccctaagaaacaacttcattgagaactattccaacaagcaaaaaccaaaactacccccaggcccgaaaccatggcctatagttggaaaccttcccgaaatgcttgcaaacaaacctgcccataagtggatacacaatctcatgaaagaaatgaacaccgaaattgcgtgtatccgcttaggaaacgcctatgttatccctgtgacatgccccaccattgcgagggagttcttgagaaaacaagatgcaacttttgcatcaaggtcacaaagtgtgtccactgatctcattagtaatggatattcaaccaccatttttgggccctttggagcccaatggaagaaaatgaagaaatttttaaccaatgatttgctttccccgcacaaacacctatggctgcatggccaaaggactgaagaagcagacaaccttatgtttcacgtctacaacaagtgcaaaaat

SEQ ID NO: 67892 - DNA, 354 bp, Glycine max
  Clone ID: PAT_MRT3847_3231C.1
ggctcgagggtcaggcggggctacccgctgagtttaagcatatcaataagcgaaggaaaaagaactacacttaagtacaaacagaaacatggtatactatcggtgtaacattcgagttatttcattgtgcaattcaagatgacattcatttgtattttgttgaatgtaaatacttttcttcaataaaaggaattcatgaagaaaaaaaaaaaaaaaaaaaaaaaaaaaaaaaaaaaaaaaaaaaaaatggggaggtttaaatcactttgaaatttgctccttagcgattgacacaggaccggtaccttatggtttaatacatcatattatggagcgtcgtatggacgttgggac

SEQ ID NO: 67893 - DNA, 305 bp, Glycine max
  Clone ID: PAT_MRT3847_32320C.1
acggtcctcaatattcgtgctgactatcaacaccatcatttaccatcgtctatgggctgctcttatcaactctttgatctttcatccatatggagaaggagcagaacccgcacggctgcaacccgaaattcaccaccagacgcaagtggtgcgtgcactaagattgtacacctacacctctttggggcctcagagccacctaacgttacgttgttgaacatggctgacaaatatagccacagtgtaaccttgcgtctaacaagtgacaaaccgctgattgtgagcaagtgctaaatggccaaaca

SEQ ID NO: 67894 - DNA, 431 bp, Glycine max
  Clone ID: PAT_MRT3847_32321C.1
ggaaaaaaaaaggggcaaaaaaagctaaggttaaaaacaaattacccttttggtgaaggaccttttttttatttaaaaatttttctggggtctaacatgtttttttggggacaggcccccttttttggacaaaaaattttcccaaaggcaaaatactttttttttgggaatcccaaaattttgatctccttaggaggacaagggaaccgtttttaccttgtttttccccgggggctttttacccctaaaaggcccttttaaaaggggtaaccgaccttttttttttttttgaagaaaaaagcaactggctggctgcccaatgcccataacacgaaggggtttggggggggtcctttctacggggcccctttttgaggggcttgcctttttgaggggcgggtgtttctggtgggggcaatttcgggggattc

SEQ ID NO: 67895 - DNA, 703 bp, Glycine max
  Clone ID: PAT_MRT3847_32322C.1
cccacgcgtccgattaaagtttgtgctctccgtttaccgtttctccttggttcagtacccccgcagttcccttctcttcgactcggatcggagtaaaactctcctctgtcttcaatcttctgtttcactctctctaaaaccctaacactccgaaatgcccgaaccggaatctcagaacggacacgaaccagcgcccgaaccagaaccggagccgcagccgcagccagaaacgaaaccagagccaaccgagcaaacgcaaccacatttggaaccgaaatcggaatccgtgcccgaactagaaccaaatccgcagccagaatctgagccagtgccaacagagcaaacgcaagcaccattggagccgaaatcgggatcagaagctgatcccgtggtaaacgacgcagatctcagagaaacgacaatccattccaatgaggcgaacgcgaatccttctcccactccgaagctccgaaaagacgaaggaagccgaacgttcaccatgagagaattgctgaatggattgaaaactggttccgaaccggagaaagaagatgccaactccccctacagcccagaacaacagcaacaccaggcagaccagaacaacgctgcaatggatttgataaatagcgttgtaggtgttgacgatgaaagccgttcccgacagaggattcttacattcgctggcaggagatatgctact

SEQ ID NO: 67896 - DNA, 254 bp, Glycine max
  unsure (1)..(254): unsure at all n locations
  Clone ID: PAT_MRT3847_32323C.1
canagncttcaatgagctacttgctagtggnngtnaaaagatttctgcagtggctggtggtngtncagcggttgctgttgctgctgcaccagcgggaggtgctggtnncggtgctgcacctgctgccgaagcacaggaanaaaagnaagtannaganaaggnggaatctgatgatgatanccgttcagtttgttcgactaaaaggtctgaagtgttntttgtgtntttacattggagttctatttagtattttc

SEQ ID NO: 67897 - DNA, 378 bp, Glycine max
  unsure (1)..(378): unsure at all n locations
  Clone ID: PAT_MRT3847_32324C.1
acaggaaagagnaanagcgaaggacagccaacacaccacagacaacagcacacngaccacagcaaaaaggacacaaaanagagggccaagacaaanaaacgaaaaacggccgccaaagcttttctccagaggggtgaancnngaaaanaagaagaaaacaagaagacagacccccaaagaacgggagaagaggcaaaaaaacaagaaggaaccaannagcggcccagnaggaacggcgncggaaccagnggnaancaggcaaacgccgaagaggacccgaggcagcaanaacaacanccgaggcacagagaaancgcggcgcaacacgccnaagagnaccggcaccaacagcancaaggcnagcaaacaagncagcaa

SEQ ID NO: 67898 - DNA, 272 bp, Glycine max
  unsure (1)..(272): unsure at all n locations
  Clone ID: PAT_MRT3847_32325C.1
aatgaaaacccaaagtgcttctctcctctgtctttttctctctcttgctatccttttggctagtngcactgctgcaagtgcaacttccaagaagcgcagtgccaagccaccatgnttcaacattcaacagaagcctttttccttccagttntctntttggaattggttcttcngcttaccaggcagaaggagcngcaagtgtanangggagaggaccaagcanatgggaganatacacnagngaggatantgaaaagntttggggtcatagc

SEQ ID NO: 67899 - DNA, 552 bp, Glycine max
  Clone ID: PAT_MRT3847_32326C.1
ggctcgaggtgagatcaatcctgttttaaatcccagagctgccggccctgaaggatcattgatagcaatgcctggttcgaatcaaggtagcaacaatttgactctgaaaggatggccactcacaggcttggagcaactacgttctggtctactccagcaacagaaacctcctttcatacagtctcctcagcaatttcatcaacttccaatgttgacaccacaacatcagcaacagttaatgctagcacaacaaaatttggcatctccatctgccagtgatgatagtagaagaatcagaatgctgctgaataataggaatatgggtgtaactaaggatggtctttcaaaccctgttggtgatatagtatcaaatgttggatcacctcttccagcaggtggccccgcttttcacgcagtgatacagatatgctaatgaagttgaaactggcgcaattacaacatcagcaacagcagaatgccaatccaccacagcaggcactgcaacagcatactctttcgaatcagcaatctcagacatcaaatcatagcatg

SEQ ID NO: 67900 - DNA, 492 bp, Glycine max
  Clone ID: PAT_MRT3847_32327C.1
ctttgggttgggtgggggtttttttttttttttttttttttttttttttttttttttttttttttttttttttttaggaaaacaagaagctttttaactttaattttttttttggggcaacagatacctactttaacaatacaaacaggaggccggacttgggggggggatacaaagggattaaatgggatggaacagctacaaagcattttccagggggtagataccccaacagccatttattcaccaacaaaggggtttttacttttaacaacacgctccctttacttcccccaaaacatggggaagattcactttccaaggttaccctttacggaaaatttgccaaaaccacacaggggggacaccaaaacctacctattttggacattcattctttgggggattcttggttatgcgggggaaccagcttggtcacatgaggccaacaaaaccaaagtctttgggactgacagttcaagacgaaacttt

SEQ ID NO: 67901 - DNA, 303 bp, Glycine max
  Clone ID: PAT_MRT3847_32328C.1
gcctttcgtctttttttttttttttttttttttttttttttttttttttttttttatttttttttggtttgcttattttttcttttttttttttttccttttcattcttatttacaggggggggggaggggaaaaaaagagaaaactgttccccccaagcacacgacaaaagagggcttgaaacacacggggaacctaacaggggccagcgggtggcgcactatattcggaagcccccgtactgagaacgggaaaaaaacgctggggccgcagaacgataacccttcaacgttcccagaaaat

SEQ ID NO: 67902 - DNA, 516 bp, Glycine max
  Clone ID: PAT_MRT3847_32329C.1
ggctcgagctgctacaagcttagcagaactggagaaaatttttgaaattgcaattgggggatcagaagatgaaaagatatctgctgctgccattctttgcggggcatccctaattcgtggatggaatatacaggaacacactgtacatttcattctgaggttgttatctccaccagttcctgcagaaaacactgaaggaaacaactatttgattaattatgctccaatactgaatgtactctttgttggaattgcatctgttgattgtgttcaaatattttcgctccatggcttggttccacagcttgcatgttcattgatgccaatctgtgaagtttttgggtcatgtgtaccaaatatctcatggacactaacatcaggggaagaaatatctgcccatgctgtgttttcaaatgcatttattcttcttttaaagctatggagatttaaccgacctcctcttgaatatggaattggagatgtacccactgttggttctcaattaaactcccgata

SEQ ID NO: 67903 - DNA, 467 bp, Glycine max
  Clone ID: PAT_MRT3847_3232C.1
gctctttttgcatttgcttattaagggaaatacaggaagaaaaaaatgaatgatttttttcctttttaaattttcagcagccgaataattaagttattggaatttaattttaaaggtaattatgaagatgcaagaaaatctttttcagattgttagacaaagacaccaccattaaagcgttgcatttatttagttattttcttttcttctcattttaccctttttattatcactgctttatttattttttttaaaatataattcgatttggaactgtatagatgtttttgaagtactttgaaattttgaaaatatatgaatatgcttgtcatttaataacaaaaaaggtattttttatctgattttttcaatgtcattattttattgctcctatcttaaaaaaaatgtttagttattctgcattcatttgtataagtactgcaattgactctttaaaaaagtatggg

SEQ ID NO: 67904 - DNA, 118 bp, Glycine max
  Clone ID: PAT_MRT3847_32330C.1
ggctcgagctcgctgcactgattcttgattaatgtctctggcgaccaaattgaaagaattcattcagggttgatggggaatatgaatgatgttgctaggctatcatagatatccacca

SEQ ID NO: 67905 - DNA, 479 bp, Glycine max
  Clone ID: PAT_MRT3847_32331C.1
tacggtggaagacgacagaaggggtggaggcagattggtgtggcgttgaccgtgaagtgagcagtaagaatatggacaaaccttcacagctgatactccttgagagtcacttccctcttgagggaggtcaattttctcaggaaaatgggaatccttgagagcagaagtacaagtggctctaagcaagcttgtgtatggggattgagatatctgattgcctctctccatggaagaattctttgatttgaaagtaggcatctttgctaagatcctcacgggcttcaagcttaatcttctggttatgactctctggagtttgttaccagcatcacttgcacttttccaattctggtcatcacttccataattagattcataaaactttcttgttgatttttggcccttgacagctgcaaacttgattgatcttgaggacttcagttccctctttggttcagtccttccagataactttctgg

SEQ ID NO: 67906 - DNA, 296 bp, Glycine max
  Clone ID: PAT_MRT3847_32332C.1
agcaaaaagttgaacggttagctttaacccaaccaattcacaattttttgggttttacactaataagcataattggttttttatggggatgcttttaagatcagtaccacccaaacaaaaaaagaggaatataaggatttctggtccaagggggggaaaaaagatgaatttccaactgcatggcttgctaggaaggtgggggttttagtgggttcctttggggacaaccaaattggggtgtgaaaactgaaaaaaaattattggtgatttttttgggcagcacccgtttgtttcga

SEQ ID NO: 67907 - DNA, 158 bp, Glycine max
  unsure (1)..(158): unsure at all n locations
  Clone ID: PAT_MRT3847_32333C.1
naagtcgcnnncacgcntacgtaagctcggnaattnggctcgaganctgataccccaaggtnnanncaantgggggttagtgcctntnccctatgaaaaatntccctctncnntttgtgcgctttnttatntncaactgtcttaanaatctcctgcnn

SEQ ID NO: 67908 - DNA, 713 bp, Glycine max
  unsure (1)..(713): unsure at all n locations
  Clone ID: PAT_MRT3847_32334C.1
ggagttgtgtgtatgtgagataagctgccatgtcgatcttgtccgttccgtcaccaacacagcgttgttccatttcgatttctcggctgccattgccattgccattgccgtttcaattgcaagtaagaagaagagcaaaagggggaaaagtggtaatgagcatggaggcaggtattggagtgatgggcaccaagttgggtatgatgagctatttcgaatccgacggagaggttgttcctgtcactgtcgtgggtttcaaagaaggcaacatcgtcacccagatcaaaactgaggccaccgatggatacgacgccgtccaggttggttaccgaagggtcagagaccgcaaattgaccaaacccgaaatgggtcatctccataaggtcggcgccattcccatgcgccatcttcaggagttccgtcttcaagccatcgatggcttcgaccttaatcagcgccttctttttgatgaaactttcaaggagggtgatcttgttgatgtctctggcaccaccattggcaagggtttccaaggtggaatcaagcgtcataacttcaaaaggggtccaatgacacatggttccaagagtcaccgacaactaggatcaattgggtgctggaccacgcctgntcgtgtttacaaggggaaagagatgcctgntangatgggagggaccaagaggaagatcagaaagcttaagattgtcaaaatt

SEQ ID NO: 67909 - DNA, 493 bp, Glycine max
  unsure (1)..(493): unsure at all n locations
  Clone ID: PAT_MRT3847_32335C.1
ttccaggaaggtttcccgtcatcactgtatgacgtcctccttctttgggggggggggggggagtataacgtcaataaatagtataggatagcaaaagaggataaccattatttaataggatataagtataggtatcatacgtaatatgtaatattgtgacggttgaacatcgaggagcaataaggaagaaaagcgtgaaaacgagtgtgacattgactgaaaacgggaaaggtacagaaggatagtaaataccgcggcggtggcaagtggcacataacgtagtggtaattccggtattagtgagtggtgtacattgtacgtgccacccaagcgaacgtgttaaaaagtaaggttagaggcccaatggttggaagtcgaggagtgctaattgtacacgtgcnagcggcaaacctcccgaaaagggtggcgtatacataaaattaaacattaagcataagagcccaacaccaactatacgccgcgagacgacaag

SEQ ID NO: 67910 - DNA, 1404 bp, Glycine max
  Clone ID: PAT_MRT3847_32336C.1
tgcaaaatctaatttggctaattgattgaaagttttggtttacttgtacttcattctctgtattttgatttccctacctctggcgataaatataaccgcggtgtgggaaatcaaaaattgtatcgagtaagatgatactgaagtcatagtaataatgtgctgtataactcaatgaatgtagtgggttgaaagaagcaatagtagtatacataaacttgcaactaaaaggctaaaaggaaggcacaacaaatacacagacaagttaagagaaaagatatgctaattctttggaatgttcttgccgacaatcttggctggagttatccttagaagattgcctggcttaccagggacagcacctttgatcatgaccacattaagatctttatcaatttttacaatcttaagctttcttatcttcctcttggttcctcccatccggccaggcatcttttttcccttgtacacacgaccaggtgtggttccagcaccaattgatcctagttgtctgtgactcttggaaccatgggtcattggaccccttttgaagttatgacgcttgattccaccttggaaacccttgccaatggtggtgccagagacatcaacaagatcaccctccttgaaaatttcatcaaaaacaaggcgctggttaaggtcgaagccatcgatggcttgaagacggaactcctgaagatggcgcatgggaatggcgccgaccttctggagatgaccgatttcgggtttggtcaatttgcgatctctgacccttcggtaaccaacctggacggcgtcgtatccatcggtggcctcagttttgatctgggtgacgatgttgccttctttgaaacccacgacagtgacaggaacaacctctccgtcggattcgaaatagctcatcatacccaacttggtgcccatcactccaatgcctgcctccatgctcattaccactttccctttccctcttcttctcacttgagccgtgaaagaacatggcaatggctgccgagaaattgaaattgaaattgaacaacggtacgttggtgagggaatagaaaagatcgacatggctggcattggagtgatgggcaccaagttgggtatgatgagctatttcgaatccgacggagaggttgttcctgtcactgtcgtgggtttcaaagaaggcaacatcgtcacccagatcaaaactgaggccaccgatggatacgacgccgtccaggttggttaccgaagggtcagagatcgcaaattgaccaaacccgaaatcggtcatctccagaaggtcggcgccattcccatgcgccatcttcaggagtttcgtcttcaagccgtcgatggcttcgaccttaaccagcgccttctttttgatgaaattatcaaggagggtgatcttgttga

SEQ ID NO: 67911 - DNA, 223 bp, Glycine max
  Clone ID: PAT_MRT3847_32337C.1
ggctcgaggcgaggccaagcacctcgagttacacgagtattcgtgcacctgcaagcgccccgtcgacacgtgtgacgagtacaagacaaagaacgagtgcaagtggcagaacaaggactttgacccgcacacgtgctcgtgtgtcgacaaggtctgcgacgaatacaaggtcaaggcggaatgcaaagccaagcacctcgactttgaccacgaaaattgctgc

SEQ ID NO: 67912 - DNA, 434 bp, Glycine max
  Clone ID: PAT_MRT3847_32338C.1
atctcagggaggatgggaacttgatgaatctgtacaagaagcagcttgtatggaatcccttgaagaagcacgagtattgggaatcattgaggggggtattttcttcatcagattttttttttcttttctgtttccaaaagatttggttatacattgaaacttaaatgtagttttgttattcatatgcagagtgaactacgacaatggaatttcattagctaaacatatggcatatactatgaaggacacatgttccccatgtttgtcaaggaacaacttgatacatggcccgagaaaaatctaccgagaagaatatgggtatgtttgggccctactcttattttacacatgtacgttacttgatttttaaaaacacgtaatttgcaaattttcctaatattatttttaggggcacttttgtagatgactgttgc

SEQ ID NO: 67913 - DNA, 394 bp, Glycine max
  Clone ID: PAT_MRT3847_32339C.1
aataaaagaataatagaatatcttcctcatgttaatgctgagttcttcgcagccatcttttcatcgtgtaagggcaaaaagataaactcaaatatattacttacaatgcaagatataagataaaatgaatacaataaacatgtacatatatagcagggtgaaaaatgctgtcgacttctttctaagccaaatggttatttgaacaatgcccttattcagagatatgaccgtttgcttcttcttccctcttttcttcagagacagtcttagcaatggtaaagctgggctgatttgttgaagacagaagcctagcccacattctatcagtaattatcactttattctgtccctcagtgattctataaaagggtatgtacgtttgtcttccattgac

SEQ ID NO: 67914 - DNA, 332 bp, Glycine max
  Clone ID: PAT_MRT3847_3233C.1
cacaggcgtccgccacatttcctggatatctaagtaatcaaatttccttatttaacccctaaattccaagcaggagggtttagaagaagcaccaccaccacttcaaccaccacaggggcgatgattggcctggcagggttgataataggaggggggggaggcaccacaggcattttgggcaccttggggaacttggtgctgcggttgccgtggctaatcccttgcatgagaagcaggtggccaagaaggacccatagcttgctaacaggcacagggttaaataggagattgcggcagcatttccttgtggggtggggggtgttgttttttat

SEQ ID NO: 67915 - DNA, 446 bp, Glycine max
  Clone ID: PAT_MRT3847_32340C.1
agaaaatgccagagtctttttattaaaaccaagactatgtgcccaggtcaaagccatcataggaagctggtggtggctgcaccatggacttggatctggacttagaaacttgatggactttggatcacataccctataggctgcacccgcatgtgacctttttaggattccacgtgctgtgaccgaccttactctgccctttgggctttttctgatggagaagacccgaagcttccagcttctgccttgtctgatggccacacgatctcgtcttgtgattcaaattcaagagcagcaaagccagtggagaatgatgacaacaaaaaacttttgccaccacttgttcctatttcaccagtggaaaatttggatggatcttgtgtaatcaaggaaaggatgacacaagcacttcactacttcaaagagtagactgacttgaatgttct

SEQ ID NO: 67916 - DNA, 2075 bp, Glycine max
  Clone ID: PAT_MRT3847_32341C.1
ccacgcgtccggtaaacctaaggaaggatttgatgcagtcaagcagaggcagtcccaagaacaggcaagaagaaaaaagatgtcaagggctcaagatggaatcttgaagtacatgctgaagatgatggaggtttgtaaggcccaaggttttgtctatgggataattcctgagaagggaaagcctgtgactggggcatctgataatcttcgtgaatggtggaaggataaagttcggtttgatcgtaatggcccagctgccatagccaagtatcaagctgataacgctattccggggaagaatgatggatgcaatccaatcggtccaacaccacacactttgcaagagctgcaggacacaaccttgggttctctcttgtcggcactcatgcagcactgtgatccccctcagaggcggtttccgttggagaagggcgtttgtccaccatggtggcctactgggaatgaagagtggtggccccaaataggtttgccgaaagatcaaggtcctcctccttacaagaaacctcatgacttgaagaaggcatggaaagtgggtgttctgactgcagttatcaagcacatgtctcctgatatcgccaaaatttgcaagctcgtgaggcagtccaaatgccttcaagataagatgacagccaaggaaagtgcaacctggcttgcaatcatcaatcaagaggaggacttggcacgcgagctttaccctgattattgcccctcattaactacttctggaggaagtggatctatggtcatcaatgattgcaatgaatacgatgttgaagggggtgatgatgagccaaactttgatgtggaagaccggaaacctgagaatcttcatgcatctaatcttgggatggacagaatgaggggaagactgccagttcagcagccttctttcccaatcaagggagaggttgttacaaattttgatttcattcgtaagaggaagatctctggtgactttaacatgataatggatcagaagatttacacatgtgaacaacctcagtgcccttacagtgaaactcgccatggttttgctgacagaaattccagggacaatcatcaattgagttgtccttatagaggtgctgcttcagattatggggcttcaaattttcaggttaacgaggtaaagccggtcatattcccccagtcctttgttcagccaaaacctactactcagtctgttaacttggttccatctgttattgatctaaccggactcggagttccagaagatggccagaaaatgatcagtgaccttatgtcaatctatgatacaaattttcaaagcaacaagaacctaagttccagtaaccatgtagctgcagaaaatcccagccttcctcagccaggcattcggcagcaacaggacaacttctttcgcagtcaaggaatcactatggaaggaaacttctatgaagaagccaacatgcccaacaatcatcacatgtttgcaagagaggaaagtcaatttgaccggttcaaagctttgaatgcaccaccctttgagagcaatcacaacaataacttccatttgatgtttgggtccccttgtgatttggcatcctttgatttcaaggaggatatgcaaggaggaggagggatggatgctcttcagaaacaggcagatatctctatttggtatcagtgaaaatgacagcttaaagctggaaacctcatcatcattatcatctatcatggactctttattttccttccaaaagggttggcacccctgatcatgtgaagttcctttggccaaaaaaggtttcactgcaattttcttcacatgtaatcctgtaggcctagtagaactaaatattttaagcttggcaggtctagtatgtgttatatacataacaatatataataaaaacttgcatgttaccattatatgtagctttgtgattgtgtgtttctatatcagtgtagccatcttgttacttaaatatttttcttatgttagactgtgatataaataagatttgaatttctcttctaaattttatttagagggtaaaataaaattgttggatagatgaatggttttgtcc

SEQ ID NO: 67917 - DNA, 232 bp, Glycine max
  Clone ID: PAT_MRT3847_32342C.1
atttgttattatcttctcacataaacaagtgctttcactagagttgcttgaagagtaactttaaaatattttctgtctttatgcttcatttttttaaagttatactaactaactcatctttgtctatcatattaaaaaaaaaaaaaaaaaaaaaaaaaaaaaaagggggggcccccgtaaagggggccgttgaaccggggatttatttcgggccgggcactggggggggaac

SEQ ID NO: 67918 - DNA, 450 bp, Glycine max
  Clone ID: PAT_MRT3847_32343C.1
ggcgggcaatcatatcttgggcatgtttgacaagagaatcactgcttttgctgaagacaagtttcgaagagatgggattgatgtgaaaacaggatccatggttgttaaggtatctgagaaagaaatttccactaaagaactgaaaaatggagagattaagacaattccgtatggaatggctgtctggtcaactggtattggcactcgtccatttattaaagattttatggcacaaattggtcaggctagcaggcgtgccctagctacagacgaatggttgagagttgaggggtgcaacaatgtctacgcgctcggtgactgtgccacaataaaccagcgaaaagtcatggaagatattgtggcgatctttaagaaagctgacaaagacaattctggaacacttacggtcatacaatttcaagaggtcatgaaagatatctgtgaaagata

SEQ ID NO: 67919 - DNA, 347 bp, Glycine max
  Clone ID: PAT_MRT3847_32344C.1
ctgggattccggttcgggaaaggacacccacttttaaattccaaccttcacactaacctttggcacaaacacacacccattttcttcattcttattcttcacaacttttgcttcctgagcacaaatttgtagccctgttggggaagaggccccaaccccggattggaaaaatctccgaattattggtcttcggggactgtgccaccaaactttttgattccctcggaagaagccctataaacccggttgacatgatgaacctggagatgccatcaccaaagggtcttaaaagctatgaccctggtggtggaagtctaagaattgggggggcccttggtaaaaaatca

SEQ ID NO: 67920 - DNA, 163 bp, Glycine max
  Clone ID: PAT_MRT3847_32345C.1
tggggcgcaccttagtctgtcgatctcgctccttgggtccagtctcatcgctctcctaggcacctcagttctcagtgttccttactgatttgtggttcaaacgctaggactagggtgcatcccgtctgttcctaaatagtttttttcgactggggtgcaccga

SEQ ID NO: 67921 - DNA, 358 bp, Glycine max
  Clone ID: PAT_MRT3847_32346C.1
gttgtggtggcctgacaagtctcgaaagatgaagattgactaacttaaagcatatggcatatctgttgaaacatttctaactgctattgctacaattccaaattacaaagggcttacaatagtgcgatcctactcacctgaccattatgagggtggagcatggaacacaggcggatcgtgcactgggaaggctaaccctcttgcacctggtgaactggtggaaaatgtgcacacgaatataatgcatgttcaacacgcgaccggctctaaccgtgcagtgcaaaaggcaacaaatggaacaaaccagaccctaatggatatccctgcagccttccaatacaggcatgctggtcatccc

SEQ ID NO: 67922 - DNA, 1021 bp, Glycine max
  Clone ID: PAT_MRT3847_32347C.1
ggtgaccaagccagcatttccaatcaagtaatcgagatagtgctccaactagctaatagagtgaaatatatcaacaaattaaaatcgaaccccaccaatccaaagctatcatacccttgcatgttcacgagcttccttttgattggtttgtgcagctgctaattattaaaatgacgagaacgaggataaagataaagaaaatcgacaacataacggcgaggcaggtaacattttctaagaggaggcgagggctattcaagaaagctgaagagctttctgtgctatgcgatgctgaggttggtctcattgttttctcatctaccgggaagctctttgattatagcagctccaggtacgtgtacggacgacgactggtatattataacacaccactcttgagtttttgacttttctctcagtattttgtatacacatactagtagacgtatacattgttgggaaacctaggggataaaaactggggtataaacatgtgtaaagcacgttcttaattccgttgctttcaattaatattaatatgtctgtatggttctttctatcctaattcctagccagtagtgccagtggtttatgtacggagtgagtatctggaagtctgttagagagagagagagagagagtgtgtgtgaaaactgagaggagaaggacggggattagatgtaatctcatgatgggtttggagcagaaacctcgtttcactcgcttatggttctaattttatggaaatttaatagtaggctattgaagtttccatgaaaggttgtgttgggagagaaaaaagaaaatgaagcattagttaaatagtaattcctaagcgatcgttttaactattttttttgtaaatattcgtggtgaaagagtcttgccccgttttgagcgttattaagattttttttcttaaaactgtaccaatattttttttaattaagaaaaaaactgcaccactatatatatgtttttgttggatttgtttataagtgagaagtgtataaaaagtaaa

SEQ ID NO: 67923 - DNA, 281 bp, Glycine max
  Clone ID: PAT_MRT3847_32348C.1
gtgtgggtggggtttttaaaaagcgcatttaccattattataggaaccagttttttcggtttcaacaagctcgcaaataaaaaaaaaaaaaaaaaatcggaaatacgcgcttatttaatttcatcgtttctaaaaggggtgtccattgccaaaaagggaagaaaacaaaagggtggcactacatgatgatcctagatccaaggcttgcataacataaacaacagcgactttttaaaggtgttcattttctcagctttgaacaaaaaaatgttgcttgacat

SEQ ID NO: 67924 - DNA, 328 bp, Glycine max
  Clone ID: PAT_MRT3847_32349C.1
gtcgtcgcgtctctggtattgggttaagttggttctctgcttcttatgtctgggcctcttggctctcgttgctttcaaatgggttgtcccactcttcacaaaaaaggtgattattcctataataaattgggagacgaacacgttcagttctccagtgttagctgttctggtgtttgcttctatatcgctattccctaccctaattctgccatcctcgccttctatgtgggtggcttggttgacagttgttaatggcttagaattcttgctgatcatctctgcaacagcaccaggagtatcacttcctttcttgatctctacaatcttc

SEQ ID NO: 67925 - DNA, 253 bp, Glycine max
  Clone ID: PAT_MRT3847_3234C.1
taacagtacatttgaacacccatcaaaggcgactcgagctgacgggcttgccttattgtgggaacgacgagggtctcagccccagtccgacgatggatcccttggactgttcaaccgtccactaaaggacaagtctcttcaaaccatggcgattgagagcgctgcttgctcgaacaagaaatgggatccttgagaccgacacatcggcatagacgagaactccatcaaggctggcgacaaggtatcggggtgg

SEQ ID NO: 67926 - DNA, 965 bp, Glycine max
  Clone ID: PAT_MRT3847_32350C.1
agaataaaaagctttgctatttggttcatttcaatgttagtacttagtagttactacattagaagccgcaacggtaacagtctttcactggcccacaataaagggttaaaaaaaagtacctggctgtacagtgtaagatcaaggagtgactccagcgccagctccgaaggacaagccataataatgccatatacattatgcaccagtgctaaatcaaaactattcagccaaaccagaaaaagaaaaagatcattgagtttatttaaaaaaaataaaaataaaaatgtagtaataattgggcgggctaggcttcaagagccaaaggagttaggagaagatagtagggagcccataaggcatccaagggacaagggcggttggcgtcgaggcgggcccagggcttgcccttgccactccaatgcaggaggctgaccgggcccggatgcaagtctctgcaaagcccgcggaagttatccccgccgaggccgtgttggttccacctgtgatccacggggactatgtttcccgcgaaaacgagcaaaaacggaggcaacgatccgagttcgtagatccgcattctcttctggagctccatccactcctggatcttggtggtatagtccccggcacgccagcgttgcaagtgaatgaccatgacgccggtgttgaagtagcagggggtgcggccggcgaaggtgagggagagggaggggttggaccagaaggatggggtgaagtaggcgctgaagttggcgttgcagtattcgggggcggcgaggacggtgttgttgttgtctccgaggggggtggcggcgagttttgcgatgtcgtcgacgagaacgaggtcggagtccaggtagacgattttgaggacgcaggaggggaggaggttggcgaggtagttgcgggcgtagttgagggggcagtccagggcggagcggatggaggtggagatgaggcctggt

SEQ ID NO: 67927 - DNA, 213 bp, Glycine max
  Clone ID: PAT_MRT3847_32351C.1
cccccccagaaccgccgggacgtccccccccgccggttttagggaaaaaacccccaaagcagagggggggggaaccccaaaccccccgaaacagggaggcccaacgggacgccggcggcgacaagcacgaaccggacaagaccggcgagcgggcggaaaaagaacgccccccaggacagaccgaggccgggaacggcaacaaaagcaacccaa

SEQ ID NO: 67928 - DNA, 267 bp, Glycine max
  Clone ID: PAT_MRT3847_32352C.1
aaaaaacgtacggtctaacattgtcttttgtgcaaagaacccaacacataatctttaaggcgcaatacatacactgactaactaatacactcagcaacatacaacaacgctctaaaagggcagactcccattgaggatccaggttctcatacgcgcacattcgtcgtgaacgctttcttatggggacaccgagcttcaatgatcgggctttcgttaaacaacatcagcacggataatgcctggactataccagctttaataccttat

SEQ ID NO: 67929 - DNA, 427 bp, Glycine max
  Clone ID: PAT_MRT3847_32353C.1
ctcattggggggggggtatccacatacccatccagatctctctatctttgtctcccaaaaaaataattaacctactcaagattaaatcgcacttgaacaagtgatctatcaagaaaacgatgatccaaagggcaaggacgcaatacagcttaatctcgagggtacagagttgcaagtgctcaggcctggttacgaagagaccttaccaaacaggtccattctgttaaaacgctataaggagcgagctcatctagaagcctgtgagaaagcagagcatacgcacggtcaacaagcattctaatgggtctgctatcacaagtgaggaccaagacaacctatggccacctgcataagcacaagtagcgggaaggcgcaccgggtcgatcatataggaagaatactctacaacaaaagaaagaggcacagg

SEQ ID NO: 67930 - DNA, 356 bp, Glycine max
  Clone ID: PAT_MRT3847_32354C.1
cgtatagcagagctatgacctcggaattcggctcgaggagccgcatatataatcggagcattcgatgcttgagctcgcagagcgggaagagatcttgggaaagggggtctcaatgatccaatgaagaatgaatcctattggaagatccctgggatgctatagctacttgtacgaggcgctcaacctacaggaactgttcatgacatatcataaagggctggtgcgcgatacgggacttaactcggatcaacaaccgaaggccattaatgaaataaacgatagggagtgcggatgactggtatatcgatttctaaaactctactctgttctatccgatcgctctcttgggctattga

SEQ ID NO: 67931 - DNA, 315 bp, Glycine max
  unsure (1)..(315): unsure at all n locations
  Clone ID: PAT_MRT3847_32355C.1
cgtaagnctcggnaattcggcttcgaggctgcagtcacgagactttgtctaagctatcaacttttcataatgataaatgctatcccttcttgattcttgatgccttagaccatgcgatacaattgaccttttaataaagatttgtttagcgtattgcgtttagccaacaatatagaattttttttttttttcgtatcccggactattaacacccataaaatatcgaaagtcccaacaaattttatttagttgcacattaatactaaaataaattactacacttcataaaaaacaaaacgaggctctactagtgaa

SEQ ID NO: 67932 - DNA, 172 bp, Glycine max
  unsure (1)..(172): unsure at all n locations
  Clone ID: PAT_MRT3847_32356C.1
ttgcctgagatatcaggtcaacaattaggtaatcnagttgttaagnacatngatgcacancanntgnaatctnncagtttcaccggctncgantttctnaccattgtgannctgcgctngcgttnaacnngganacnagcggnagacanaggntttgcncatcaangtgtnc

SEQ ID NO: 67933 - DNA, 178 bp, Glycine max
  Clone ID: PAT_MRT3847_32357C.1
gattctacccgccgctcgatgagaattgcgcttcaaggcgtctcgtagggctaatccgcctcacgagggtcaccaacggcacgtgcctttggagggcagaggcccctactgatggtcggcaacggacggcgggagcaagcgtcgattctagcccggattcggacttagaggagttcag

SEQ ID NO: 67934 - DNA, 1366 bp, Glycine max
  Clone ID: PAT_MRT3847_32358C.1
agatggagatgttcattttgcaaagttgtatagaagatctggagcagaagaacttggctttgttaactgaatgtgaaaagcatgttgaggcatcaaaattttcttacaaagttatttctgagttggagactgaaaactttatgcaactgatggaagaagagtttttgttacatgaaattagaaagcttaaaatggctattcatcaagtgtgtggggctcttcagattgatccatatggtgtgcacgacaaaggaatcaagcaagaggaaatgccaatattgcatattttagacaacattgagggcttgaaaagttcttatgtgaaaagccaagaggagaagcagaagctccttgtagagaattctgtcctcctaacttcacttgagcaaaatcgatctgatagagaaaaaatggagtcagagaaaaagatcatggagcaagagtttgagagcatgagacagaagaatgcaatgttgcagaaagagaaggttgaacttctagagaagaacaggcaactgaggactgaagtagccaatggagaagaaagagacaatgcatcaaagtacaaattggcaaccctgcatgcggagttgatagatttgcagacaaaaaatcaagtgtttcaggaagaaaatagtatgatgcttgaggagaaaaattcactgcttaggagtgttttggacctcaaagatgcaatgtccgtggctgaagatgaaaacagtgtaatactccatgaggtactggctctaagcaacctcaacttggtttatgagagctttctcacccagaaagtcatcgaacaaaaagctctttctgaacatctcagcagcaatcttagccgtttaaacagtgacctcaatcaggaacttggtgtgttaaggaagaagtttgagctgaaagaagaagagagtgtttatctgaatgaggctactaagaggatggataaagagctgcgggaaatcaaaaatgcaaattgtcgtttaagtcatcaagttgaaaattcagagaatcttctcaagaagaaagacatagagcttctagaaacggagactaggctgaaggctgcagagaaattgaatggggagttttgtagatatattgaggagatgaagatggataaaaaagaatcaagattgaccagagaaaacctagacaggcagattcttgaactatcagaaaatggcatgaatcagaaaagagaaattgaacaccttaatgaagaaaatagaagctttcagtccgtgatgagatcattacttcatgaagttgagcaacacaaggctagagaacaagcactgaatacagagttgcaggacaaaacaaatgaatgccaacattgtgaggctgaggcagcttcgttcctatt

SEQ ID NO: 67935 - DNA, 389 bp, Glycine max
  Clone ID: PAT_MRT3847_32359C.1
ttcatcctgacggggctccagagaagggtccagtgaattggcaaccaaatcaccaccctattggcatcactgatggaaagcaagatggcaagcacgatgacaacgcaggatcaaatgcaagtgcaagtgcaacagagggtggtgccaaggttggtgaccacgaacgaaatgacggacaccatgttggtggacacgtaggaagacggaagatgtacactagggaaaccttaagtggtgccagatgtgcaagctcaaagggctgcacaaaacgctgacttctaccctgacgaggtcgatagggaagaaggaggtgctcacagaggtgaacagaaagctgaagtgtatgttgcagtgtctacaacaacgaatacaaaaactacttccaagga

SEQ ID NO: 67936 - DNA, 446 bp, Glycine max
  unsure (1)..(446): unsure at all n locations
  Clone ID: PAT_MRT3847_3235C.1
ttgatccattccactttcaagttgataacttgagagtaacgaggacttcataaagtttgagtgattcttgcgagtcttcttaaatattactcaatcagatgggctcgatttcaacctcttattccaaataattgctgagtattaaatcataggacaatttgagaagtactagaaccataaataaatatgtgtaagatagtaacaaggtggtatccagtctttttcacataactatgtaagatagtaactatatacaaattgacaatattaattaatttcctgtattgtgagagggtaaaatatacactaaattggttcaccactaattgagatactttctctatagacaaatttatgcacaaataatttatttttgaatggctcaggacttctgaaggtgacagaagatcgaaagcccctanatagtcttgatgaaatcaaaggag

SEQ ID NO: 67937 - DNA, 165 bp, Glycine max
  Clone ID: PAT_MRT3847_32360C.1
tagtaaaagacttccactaatgcattactttcattatatgcgatgctattggcttctccatattacaaggaatagaccgaacaatacatgaccataatgtcaaatttattttaggtgacatagatactcccttcattgtagcaaggctaaaactgaagctatgcc

SEQ ID NO: 67938 - DNA, 254 bp, Glycine max
  Clone ID: PAT_MRT3847_32361C.1
gcacccactcagccggcagccagatggccccgcaaggcctccagggatggcccctagccacaggccctggctgaggtctctgggtcggtcagtgacatgtaggtaggaagcactgaaaatagtgttcccagagcactttgcaactccctgggtaagagggacgacacctctggtttttcaatacagttacatggaacttttctgtaatgggtacaatgaagaagtttctaaaagcacacacaaagcacattggg

SEQ ID NO: 67939 - DNA, 523 bp, Glycine max
  Clone ID: PAT_MRT3847_32362C.1
aaacaccatcttctttgctctatctctctttatcgccttcaccacctcatacctacctgcagccattgctgtttccgcactcgatgatgaaagtaaccctcttgatattggtggcacatattatattttgtcagacataacagcatttgttggaataagagcagccccaacgggaaatgaaagatgccctcttactggggtgcactctgccattgagctctacaaacggattgcaacaatcatcttgttctcatttcgaattcgtattatcgccgaatgcaatcctttgagacttaagttcgatttattggcagttataatgctgtgcgtatgaattcctacacgatggtctgttgtggatgaacttccacaaggtcctgatgtcaaaattgctgctaacacaaatgcacagtatggctggcatacaatcgacagagcttctgatgatcaatccaatagctattatcttgtgtactgttcacactattctgatgatgacaattgtagtgatattgtgactatc

SEQ ID NO: 67940 - DNA, 553 bp, Glycine max
  Clone ID: PAT_MRT3847_32363C.1
gagcctggggtgtctaatggcttggagagaccgcaattaacatttagcattatgaatttatctctacatgaccaactgtaactccactgtataatggctacgtttgggcaacaccctacaacacttgtgagacggaaaaaagcttcccagtgacacaccttttgttataaaaaaagaacatatttatgatgccccgttgatgacgttggttggcaacaccctgttctcggaacccatctgcaaccaaccatcccccaattttgtttactctggctggggggctctcaatgctaagaaccacactggggtgactaacctttacgggtgtcaatgcatgacctgttaacaacgtgatacacaactcgactgagagctgaatatgagcgtcctaactcggtgatataaagcatgtgacccaagtggaggtctttgaccgggtcttatctgtcatagatatcaaagaatgtctcatcggcagcgttcgtaaaaggtcaacctacatgtttgagttcaatcgccgggtgatctgactttgcctcaattgttacacttg

SEQ ID NO: 67941 - DNA, 447 bp, Glycine max
  Clone ID: PAT_MRT3847_32364C.1
tttattcgtccgcccacgcgtccgcccacgcgggcggatcaatcaatcttctctgggttcaaaaacattccaataatggagtctttgtctttttctttgcactcaaacctccattcccttactttgctgcaacattccaatcaaaacaagaagcgccgcaaaatcacacaccaaaactccttagctctcactccctggacttcccatacccaacaccgcctctactcttccaacgggctgctcgcgctccgccgcaacagcaaccctaccgcctcccttcaagtccgcgccgacgcagaccgagttctcgccgccactgccaaaggccgaactcgctggagccgcgccattctcgcaaatacgttcggccggtggaggaagcagaggcagaggcaccacaagaaggtcaagaactgctccgccaacaaatgtatgaaagaagaacca

SEQ ID NO: 67942 - DNA, 564 bp, Glycine max
  Clone ID: PAT_MRT3847_32365C.1
gcacgaggttgtttacaaaataactatatgccgcttatatagtaggagagactattttccacgccaactaatcacatgtgcatccataagactgtaactaactaaacgatccataaccaaccaaactatggtaatatcactgccattgacgctgcatgtgcacaggattatctttaattttttaatgttttttaactagcacattttaatttttatgcctgctatcaattcattcaattgcttttgtatgttaaaggattatctttactttttaatgttttttaacctgcacattttgtgtaaatctctctagattattttgactcttgttgaattttgtaaacccatatgtagaccactttgatttttattttaaacaagcatggtttgtaaagcttatttacatatagtgatgtaactaatatgaacttctataaatttttgctgtgtttattgtttagaactgtatccttaagacacttgtaaattgtgtacttggactactttatcacgcagtctgttggataatatctagtttttgacgtatgatcatttgttttagtt

SEQ ID NO: 67943 - DNA, 689 bp, Glycine max
  Clone ID: PAT_MRT3847_32366C.1
ggctcgagatttattttatcctggatgggcatggtctttggccacttggattcttggtgtaccttattcccttgttgaagctgttatatggtcttgtgttgtatactacactgttggatttgcccctgctcctggaagatttttccgctacatgcttttgctatttatgcttcaccaaatggcattaggtctcttccggtttatggctgctcttgcacgcgatatggtcattgctaatacatttggaacagctgcattgatgattatcttcttgctgggaggatttattatcccaaaaggtatgattaagccatggtggatttggggttactggttgtcacctcttacctatggtcaaagagcaatttcagtcaatgaatttactgccacaagatggatgcagcattcggcttttgggagcaacacagttggccttaatattctcaagggattcgatataccagctgaggattactggtattgggttggtttgggagttttaacactctacgctcttattttcaactgcttggtcactttgggcttgtcctatctgaatccacttcaaaaagcacgtgccattctttttggtgatgaagacgattcaaaagagagttctaataaaaatggatctaaatctagtggtgatgatggaaaagccaagggaatgagtcttccttttgagccta

SEQ ID NO: 67944 - DNA, 104 bp, Glycine max
  Clone ID: PAT_MRT3847_32367C.1
tgcaaggttttgggtgcgacatttgatgattggccataggatgaaatagatcctatgatgaaaacttggggcaatgccacgcgttaattcaacctatagaagct

SEQ ID NO: 67945 - DNA, 130 bp, Glycine max
  Clone ID: PAT_MRT3847_32368C.1
acgctgtatgctattgcatgctatgggttgctgatgacccgttcatggagtccacttcgctcgccaatctactagtgtccaacaacaccgttcaagcagagctaatgaggagcgagcatgtgtaccgtca

SEQ ID NO: 67946 - DNA, 440 bp, Glycine max
  Clone ID: PAT_MRT3847_32369C.1
ccattcatccatacaaaatcatcaagtcacaaatataaactacaaaaaaaaaagtgttaaatctccctcaaccaacactatattatcaataggccacaatgaaatagttttgacatttgatatacaaactacactgcgatcatcaatgaaacagggctagcagaacaattgggatctaaagtaaactcagacattcaaatcaagtcacaaatataaactccaaaaaaagaaaggttaaatctccttcaacaaacacaatatattattaataggtcacactgaaatagttttgacataaaagtaatatttatggaactcttgtgctaatatctttttaggtaatatctaaaggcaagataattcgatttaggtaccacagaaccattggttcatcaagtttaaaaaaaaaaaggtttctgttgtcaaatgtaatagttttt

SEQ ID NO: 67947 - DNA, 279 bp, Glycine max
  Clone ID: PAT_MRT3847_3236C.1
ttttttttttttttttttttttttttgttcctttgtttttctttattatttcctcttctttgttttttttttttagggcaaatccctcccacgtgccactaatccatcttgttgcctgactaataaagtgtccaatgggtgtatttgtggggagccctggaccacacctcatttttgacctataaagccggggccaattgccctctcccatagggaaaggggggggatcgtgacaaccctccacccgtacgaaccccgctcgcacgtgtggctcccaat

SEQ ID NO: 67948 - DNA, 1784 bp, Glycine max
  Clone ID: PAT_MRT3847_32370C.1
ggaatgccaatttggaatcaggattttcacatgcttgttgccaaccctagaaagcagaagttattcatcccaagtaaaggatgctctaggatttggcagatttgactattggtacaggagaggttgatttaggatctcttaaagacactgttccaacagacagaattgtggttttacaaggaggttggggattcgtaggaaagcgctcctgctggggaggtattacgccgggctaccctatgaagcatacgttgaggatgacagagatgatttaactgaggagggaggccttttatgctgttattgctttctctgagatttggcatctttccaattgttgttcccgatggttaggaagaattagagtttgtagctgaaacttcgttggagttacttttaaatctttctcatgtatcagtggcaattgtggaatttgagttgattgtagtccgtaagttcaatttaatcgcgattccaggttgaacacttcgtgtgtcaaaactagtgtctgaacatttaattaacatatttgtacttctgttggatagaccttgagatttccaaattccaaaaggtttaggtctatttctggttggtgttaattctgatataacgcgatcagtattcttggattctctgggtgaactatctgttactctggtggatgctcgaaagctttcttatattttttacggcaagacagatccttatgttattcttagccttggaaatcaagttatacgcagcaaaaagaacagtcaaactactgtaattggaccccctggaatgccaatttggaatcaggattttcatatgcttgtttccaaccctagaaagcagaagttattcatccaagtaaaggacgttctaggatttgcagatttgactattggtacaggagaggttgatttaggatctctcaaagacactgttccaacagacagaattgtggttttacaaggaggttggggatttttaggaaagcgctcttctggggagatattacttcggctaacatataaagcatacgtggaggatgaggaagatgataaaactgaggtgtatgccatttatactgacatttctgatgatgagttgtctgattcagaagcaaatggtactaatgggaaggatgaaagagattctgcgtatgaaacagataaggagtcatttatggatgttttggcagcattaattgttagcgaagaatttcaggggatagtagcatctgaaacagggtttagcaaagttttggatagtggctcaaatgctggacctagagtgtcaaaatctcaagttcccaatgttgaaccaattccttctagttctgataattccgaaggtttggagggtcagctttactttggcttgctgtgattactagcatatcactactaattgctctcaacgttgggggatccagtctcttcaatccctaaggttggacagtagatataattagatcaattttcttttatccgctatttacagtgttcgtatattcgtgagtgcttctgatggagaaaagcatctaccggcggcgcatatttttggcttcattttgtgagagctacaaattttatttcagcttaaatgtgtgtattacttgtctatatccaagcattttcttatacccggcaataatataataacaggcttctcattttactggccggagatttttttttctctttttttagataaaccttgtcataccaaatatttacaatacatggtgaagatgacgaaaatttcttattttattaaaaaaaaaaaaaaaaaaa

SEQ ID NO: 67949 - DNA, 520 bp, Glycine max
  Clone ID: PAT_MRT3847_32371C.1
cccctaaccttttttttttttttcccgggccccaaccaactttaggacaaagaaaacttctaaatttaatgagaccaaccactaaaaaaagggaggtggaactccacctttttttctttccaaaataaaaaattgtaaaaaataaaatccaaaaggcaccattttttcccaaaaaagaagagaagtccacgaaggaacaacagctgttttagctggcctcccaagaaaaaaaggaaaaccccccccttctcttttttcctttccttccctcttttttccccccccttttctttcttcctttaaaaacagatcccctttttcttttgaaccaggtcctaactccttcgtttcctcacccggggactaaaaacctccccccctaaaaaagaaaaaaaaaacgaaaacccttcccgattaaaaaggaaacaaaccaaatttttttattttacgggttccccgtgattgtacccccaaaaaagaaaaataccccttgacaaacttattaaccccggtttgcaaa

SEQ ID NO: 67950 - DNA, 843 bp, Glycine max
  Clone ID: PAT_MRT3847_32372C.1
tatataacataatataattctttacttctttggtacaatctgccatggctaatggcctaacagcaatggcagcttatcctcaagaaaatctacaacaaggcttttatggtatcacttatcactacacctggttacaatctctcaacataaagctgtgctactcttgtggtggtaagcaaggccaatgaaatagtaaaacagaaagcatatggagaatgtgaacacaaattagcaaaacttgtaagacacttatgtaaatatacagttcaaaaaagggtgaagaaaaggaaaaaatgaattacattcacgagtgccagattccactcaacatgctgcggaaccggtttgtggatagcttcttgacttgttgcttggcatcagaagaaacttcggcatccgcaagtttttctatgttttttgcatatccggaactaacaatctttttacctcccactaccccctcttcgttaaggacatcaatatagagattaagatcaagaactttttattattccccttcccctcctctagcaactgcaactgcaggataagggctatgttatgatcatcctgcacaatcctctttctaggtcttatcaccataacagagccagcctgtgccgccatttcgattacccggacctcaaatgactttgcaaagataaccttaacaggctccggcccagcatcccccattgctttcttggcctcctccgatgttccacacagcctaaacgccaccttcaatgcccggacgcgtggctgaatcgaaacctcgccatttcgaacataatatatcaattgatccacaaagccataactcatcaaaacaccaacagaact

SEQ ID NO: 67951 - DNA, 757 bp, Glycine max
  Clone ID: PAT_MRT3847_32373C.1
cttcaccatgtattgtaaatatttggtatgacaaggtttatctaaaaaagagaaaatctcaggccagtaaaataagaaacctgttattctattttattatagccgggtataaagaaaatgcttgcatatagacaagtaatacagatttaagctgaaataaaatttgtggctctctcaaaatgaagccaaaaatatgcgccgccggtagatgcttttctccatcagaagcactcacgaatatacaaacactataatagtgaatgaaagaaaaatgatctaatgatatctacagcccaacttaagctgaaaaaggatcaattccaagcagcagaacaccaccttacggattgaagagactggatcccccaacattgagagcaattagtagtgatatgctagtaatcacagcaagccaaagtaaagctgaccctccaaaaccttcggaattatcagaactagaaggaattggttcaacattgggaacttgagattttgacactctaggtccagcatttgagccactatccaaaactttgctaaaccctgtttcaaatgctactatcccctgaaattcttcgctaacaattaatgctggcaaaacatccataaatgactctttatctgtttcatacgcagaatctctttcatccttctcattagtaccatttacttctgaatcagacaactcatcattagaaacgtcagtataaatggcatacacctcagttttatcatcttcctcatcctccacatatgc

SEQ ID NO: 67952 - DNA, 999 bp, Glycine max
  Clone ID: PAT_MRT3847_32374C.1
ctcttacgttatattaaaagctatttaaagtgttcccctcactcaatattatttatgtgttaggagaggccatttgccttttcaattttcatattaattcgatatttgtaatggctagcgagagaattctcaagccatcaaagtggttctcaaacaaaactctaagaattagtcttcatcgccgaagatcaagatcctcctccaataactcattatctagtaattctccaagtccaagatcccccatgtcaaacaatggagagatcactgggctaatggaggcttttcgtcactttgataatgatggagatgggaaaatctcggcctatgagctaaggtcatattttgggtccattggggatcacatgtctcatgaggaggctgaaggggtcatccatgacctagattccgatggggacaacttgttggacttcaaggatttcaccaagctcatgaagcgagatgttggtgatgatcatgatgatgagggggatctaagaagggcttttgagatgtttgtgtgggagaaagaagggagtggttgcatcaccccgaaagggttgcaaaggatgttgcatcgccttggtgatgacaaatcctatgatgagtgtgtgaccatgattgatgcctttgacattgatcacaacggggtccttgatttcgatgagttttaccaaatgatggcctaatcaatattggtcccttatttcatatgtagtatatgcatgtgtcttgtgtatacggttcatatggatgcttccatacttgaagttttatatgttaattcatatgtagtatgcatgtttcttatgtgagaaatatttgtggataacattccgtttaatgtaggttttttgttttcaatccaaaccggatccaattgcggagtttaatggatgcttcagtacttgaacttttatgtaaatatgtacatggaggccagtggaactagtacttgttgtattttcaaataaagcacggtttaattgaggtttctta

SEQ ID NO: 67953 - DNA, 312 bp, Glycine max
  Clone ID: PAT_MRT3847_32375C.1
ccaaggaagagaaacggccacgttgcaaaataagcgccaaacccaaaacgcgcagcacacaggcccctatggagataaatcttgggttcgccagaagtctaaaattgtgtgaggcacatcatgaagagaagggacaagcatacgtggcaagtaggaattaacccatcccccatggagtggactggtttggacaatataatacctgagaaagggcaaccaatattgtgtgtggcgaatatgctagttctgatggtgtgattaccaagcctgtcataagcaagatggctaaaatgataaacatgtcttgtggtg

SEQ ID NO: 67954 - DNA, 193 bp, Glycine max
  Clone ID: PAT_MRT3847_32376C.1
ccctcgcgtgcgtttacgcgtccggactctatatgttagggtaatgtactacctcattggaccaacgctcatagcaaaggagggcatgcccaacttgcatggataaaaatttgtgttccaccattcactaacaatgacttgttcgattatcctgaaacgctgaaataatgacaggagattcttgatttattct

SEQ ID NO: 67955 - DNA, 696 bp, Glycine max
  Clone ID: PAT_MRT3847_32377C.1
gatcttactgctgtgcatgatatattgttaaaaacaggttataaagatgaagaaggtgcagaaaatgagctttcattccaagaatggacacaacaagtacaagatatcttgaacacaaaaaagtttggggatattgcattcagagacaaggatttcaaaaatgcaattgagtattattctaagttggtggttatgatgtctgttccttctgctactgtgtttgcaaggagagccttctcctacttgatgaacgatcaagcagaactggcattaagggatgccatgcaagcacaggtatgcataccggattggccaactgcattctacctgcaggctcttgctctctcaaagctgggaatggaaactgatgcacatgacatgcttaatgatggggctgcctttgaagctaagaggtctaacagctggcgcggttaaaattcctaatttgcagttctttgctcactaaactagcagagtggcataaaagaatatgctatttttttgccataatttgtacttgctagaataggaatatgtagagtgctagtttaaggggcaagaaaaagaactctgctataagatggttctcaaggaatattacagtatagattttcctatacaattgaatcctgtagaatgaattttctccatatgaaaataacaatgtgtttggatggggagttttgagggaaattc

SEQ ID NO: 67956 - DNA, 433 bp, Glycine max
  unsure (1)..(433): unsure at all n locations
  Clone ID: PAT_MRT3847_32378C.1
tggtagtgtagaacatggaggagggttgtctcgtgggaaattcggagctgaggggaatgggaaagttattgggcctgagcaagcggcgaaattgtcgcanaatgcagtggcacgtattttgttgggtgttgggtttgaaggtgccatggaaggttctgttgaggacttctctgaagtattgagcggacggatatgtaaaataggaacaaatttgagggtgcttgctgatagttacaagaaacagtgctcggccattgagcttctgaagatgttgcttaaaacagtggggtttaataattttgcgccattagtggatgtggttaaagatggctccaagaataatgtacatcagagtcagcaacaagttcatggaatgcagccacagctacagcaacaacagagttcccttcggttacctcaacaagttcaaatg

SEQ ID NO: 67957 - DNA, 900 bp, Glycine max
  unsure (1)..(900): unsure at all n locations
  Clone ID: PAT_MRT3847_32379C.1
cttctacagagagagggttgagtgccgcacgactctctcggggaaagaaaaaaaaaaaaaaaataatttctcatcctatctagcaaaaaacaccaaataaccattcctatatattttcctttctcttctttccactcactatatgtaaatactctataattcctttaacacaaaacacaatggacatcaacacaacctttgccacacactctccaagaatacaaataataagaatcacctcacaacacaaattaacacttcccactttgtaattctcaatcttccttgtaaaatcatcttaggtcgatcttctataccatccacgctcaattagaccatgcgaaatattatcacactttatcgtagattctttatacctacccttctaatttttgtcactctcctcgccttctccctcattatgttgttcatttacaaacattataagctccgaaaacacatgatgtacatgtctcaaatcaacgctggattccacgaattcaacactatgagagatccttacaagtcataccacatataaagttgtgctccgcacattgcatgcatggtttatgatattgttaattctaccattctcattatcaaaaccaatgttattcgtagccatgtcgatttgttggaaaatctggttattggtgatgctgttgtagtgttgtgttgtttattaggttggaatatgtattgaaatcggggaagggaaacttgttcagacttaagaactttttattagaattttatgtgtttcttttacggtgaaaatgcgttttaagtggtgatggtatatgtagaattgataaataaactctaagacgnaaatgtggttggtaaccctctatattataaggagagtttaggtgtaagaggtgtcaagcgtatttc

SEQ ID NO: 67958 - DNA, 1524 bp, Glycine max
  unsure (1)..(1524): unsure at all n locations
  Clone ID: PAT_MRT3847_3237C.1
cggtccggattcgaattggatcggcgttgagtttcttcttctgttgcgttgtgtgtgagtgtgggcacggtaagatgcagaccattgctaggcgcttagggcagcaatcgctgaggccatcgacgtcgctcaagtccatctatccaatttccgatcaccattatggaatggatcacgagcgttacgtttctaccctcgccaccaagggagttggtcacctcgttcgtaagggcactggtggacgatcctccgtcagtggcattattgctacagtatttggggcaactggattcttaggtcgttatgttgtccaacaacttgctaaaatgggatctcaagtcctagttcctttccgaggctctgaagataatccccgtcatctcaaattgatgggggatttgggacagattgtacccatgaaatacaatccaagggatgaaagttcagtaaaagctgtgatggctaaggccaatgttgttatcaaccttattggaagggattatgagacaagaaactacagctttgaagaagtgcactatcacatggctgagcaactagcaaagatttccaaagagcatggtggtatcctgagatttattcaagtttcttgtttaggtgcatctccttcatctccatctaggatgctcagaactaaatcagctgctgaggaaatgattttaagggaactacctgaggccacaatcttgaaacctgctgtaatgattggtacagaggatcggattttgaatccatgggctcattttgctaaaaagtatggctttcttccgttgtttggagatgggagcacaaagatccaacctgtttatgttattgatgttgctgctgcactcacttcactcttgaaggatgatggcactagcatgggaaaaatttatgaactgggtggtccagagatctttactgtgcatgaattggcagacgttatgtttgatacaattcgagaatggcctcgatatgtgaaggtgcctttccccattgcaaaggcattggcaacaccaagagaaatattactaaacaaggtcccctttccactacctgttcctgagatattaaatctggataagatccaggctttgactacagataccgttgtttcagaaaatgctttgactttcaatgatcttggaattgttcctcacaagctgaagggataccctattgagtttcttatctcatataggaaaggaggcccacaatttggttctactatcagtgaaagggtcactccagattcttggccgtaagattctttggatgtttgatcctgaatcatttttctgtcttgcttgtactaccaccatttaatttcactatttaaaaaaatctgaaatgcttttatatcttcctttcataatctgtagaatatgtgatcatggttgatgatgataataaaatccagatacttgttgatttccgaaaaaaaacgtctttggatcaaattcaatgtcattctatgcgatataaaaaaatgacacatttccaaaaaatgtgttctctttnnnc

SEQ ID NO: 67959 - DNA, 116 bp, Glycine max
  Clone ID: PAT_MRT3847_32380C.1
cattatccattttctaggtattccgatattcggacgcatcaacttgccatgaaagtccaaagatagccactacccgtgtcccagctggaataagagaaagacttgcctcactgagt

SEQ ID NO: 67960 - DNA, 316 bp, Glycine max
  Clone ID: PAT_MRT3847_32381C.1
cttgttcccaaccactactacttactcacagcagatgtcaattgcatcgatgcgcatggctaccatcggtagcatcaaggcccgccagatcttctacagaagtggcaatccaactgtcgtggaggatttgacttgctccgacggcacttttgacagagctgctgtgccaagtggcgcatacactgggattgatgaggccctcgaattgagagaaggaagatctgactacctcggcaagggtggatgataggctgctggcaacgcgaacaccgccatcggccccgacttgattggcggaggccccactgagcaaact

SEQ ID NO: 67961 - DNA, 651 bp, Glycine max
  Clone ID: PAT_MRT3847_32382C.1
gagaaatggaataggaaaaccagatctctaatattttaaatttcataccaatgattcattgctcgtattagtacaccattggcagtaaaatgtatggataagatactcctatgccaataactagaacagtaccaatattaaaaatctgacagattgtccaaccatgaatatctcaattctgcttgcttgagttctaaactactaatcttcatctgaactactatcttcagaagtttttcccatgtcatctgatacatttttatcaggcattttgtcccaatcctttagttttgaacttgtcagcatatagttatctcgtaatggagcccaagcaggttgttcatcttctacccgatcagtgctttccttggcctttgtagtggtgccaattgcaggcaatgatggtttccctaactctgaaaagaaggcttgtttcgtccgttttcgtatctcttttgcatctttagtccttgaggggtccagccccctctgagcagtttgtgccttattgacagcattgaacagcttgaccactccttttgtagcaacacttattaaaaacttttcatgtgaatccaagtaagtagcaggtttgacatgccccttttctgccaacatctgcttttcctttttggcctctcccttgacctt

SEQ ID NO: 67962 - DNA, 518 bp, Glycine max
  unsure (1)..(518): unsure at all n locations
  Clone ID: PAT_MRT3847_32383C.1
tagaacggaccttgtaggaatacatcttnggatcntgtcgatgtgtggttatggcccaaagtcctacctcatcggtcancttgnngtggaattaggagaaagctgtagcgtattattcgcgggcccaatccaattggagaaaccgggcaccctcaactaacattannagaacttttcatacctggcggagtncttcaactggaggtacctgcagaacaaggtgcgagcanccttatnnaatggaaaaatnntcaattcaatgaagaatttggttcattcctacancgtacccacgtcatgggcatttcctgcttttctaaatgttatatagaaatttgtatgttacctaaattgaaaagtggtgaatattataccatannatgtgactattcnncaccaaaaagttttcttattttagttcaaaaccaatcaatatgtaaaaatccagaacaaagtaaattgcccgagaaattcgcgccaggaacccatacacttttaanttnntaaaagaaaaagtt

SEQ ID NO: 67963 - DNA, 777 bp, Glycine max
  unsure (1)..(777): unsure at all n locations
  Clone ID: PAT_MRT3847_32384C.1
ttgcatgcctgcagcagaagtttaaatacatgaaattgaaaccatatagctatgaaacattagaagttactcttgcaatattacatatgaataaggaaaattctttttttctgaagttccatggacatcaaaacacaccacagcacacatataatcacttgatataaagcagatgtacatataaatgcatttaagaaagaaaaaaatgaagttccaaaaataaaacaggagtagaaaacaagattggaagtacctggaaattagaaagttgttcttttgtcagcttcgatgttaagcttagtacaaccacggcattgttaagctcttgcaacttactaacggaagcctctgccctgttcttgccaacatcattttctgaaaacacaaaattactagacaaatcccataactccacattttcttcatcgtgcaaggttacagatttcaccccagcaagaatgagattcttcgctgcaagtagtaaactttattagaatacagaaaaacaacatagcttacaaaatggtttaaattgcattatgtatttatatactctcttaactaattagagaatagcacataagcaagaaccttcagcaaggttgcccaacgatatgcagcaatgacttttaaccagttgataggtatatgtatacggtgaaataacatccaaactcccaagttaacgatataaagcttgaaatacagaacatgagcaactagtaatcattttcagcatggacaacaannatacagaatatgaattgtacaagtctg

SEQ ID NO: 67964 - DNA, 437 bp, Glycine max
  Clone ID: PAT_MRT3847_32385C.1
cccacgcgtccgggcttctggtgctaccaatatgtaagtaacgaattgccttcacagtgatgaccgatgagaggtagataatggattttactttactgcccctgtagagagattaatcactgtctggttttgaagctttggtcattggtggaccttgcgaatgttgccaaaatttcaattaagtgtttgtttcaattacttggaaaagtggattctaaaagcatccacttggtgcactgtaaggtgaagctttgttaatattggccgtgcaattagggtttcatttcaactttataaatacaaattcaattcagtgttatgtattataattttattaaggaagggaataatggatagctctggaatgtttttgaagtaattttttgaaaaatggagattttatcatccatagactatggaatctggaagatagaagt

SEQ ID NO: 67965 - DNA, 427 bp, Glycine max
  Clone ID: PAT_MRT3847_32386C.1
accacgcgaaaaaacaaaccgttagccaacacatccatttgggctaacaacagctgttcagcactcaattatgcagttgtgatactgcacagaagcatcttaaggctgtactccctacgaccgttggcactgtaatatgtggctctaacactaccggtaccgctaacattgctcctcacatgatcagagatggccttgctcgcactaagtcatccgatccatgataagatctccttgaattgtaccttacaagaaattttactgctgacactggagagcacgctgggaaatcatcttctatcccatacacatatgctcggatccatgagcctgaggagctacacaacttagggtcattgcttggtgacgtacaatgctcctttcctgagattctagcaaataatcacgaacacgtggacgaggactt

SEQ ID NO: 67966 - DNA, 199 bp, Glycine max
  Clone ID: PAT_MRT3847_32387C.1
ggggcgaccacgcgtcctcccacgcttttctaaatctctctcattggctttttagcaacacgactccattttgggcgggggatacttggacgacgacgacgactattctcatttggactattagtaccaacattacgaccactaataaatcgtgccctttccctccaccgttatctctttcaccgtttcctttcccggt

SEQ ID NO: 67967 - DNA, 126 bp, Glycine max
  Clone ID: PAT_MRT3847_32388C.1
ccacggttcgaacgtggcgttcatgtggtggtcctacaacatcatcaccatcttcggtgaaaccattaccgggatgaagtgcaaaggcattttcccggcaggggcagtggggaagtcgatgtccgc

SEQ ID NO: 67968 - DNA, 366 bp, Glycine max
  Clone ID: PAT_MRT3847_32389C.1
caactgctatgtaacttgttatttgcctgcaataccatctctgctataagtggaattttggcccccatcctgctgttggaatttgtgtgcaaattaccattttttgtctggttatttccacatgtgaatattactcagaatcacagcaagcatagcattttgtatcttattgttaaattgtgctggtgtattcaagggaaaatttcttggtttattattgacaaaactggaataaacattagaagtgactggtgagatttcacagctgctttaaaaaatgactgcctggtttgggtctgtttcacagcaaaagttataactgatagagacagtggaagatcaaggggatttggatttgtcaacttc

SEQ ID NO: 67969 - DNA, 601 bp, Glycine max
  unsure (1)..(601): unsure at all n locations
  Clone ID: PAT_MRT3847_3238C.1
ttcttcttctgttgcgttgtgtgtgagtgtgggcacggtaagatgcagaccattgctaggcgcttagggcagcaatcgctgaggccatcgacgtcgctcaagtccatctatccaatttccgatcaccattatggaatggatcacgagcgttacgtttctaccctcgccaccaagggagttggtcacctcgttcgtaagggcactggtggacgatcctccgtcagtggcattattgctacagtatttggggcaactggattcttaggtcgttatgttgtccaacaacttggtatgtatgtttctgggatttataattgttttagaaaaatgttatcagaatgttaattttttttttcctgtaaataaaatattttggaatgaattctgttacagcttttacttttcccccctaactgtattgtgttgattgtttttggtgatgttgtttcccttgtctagctaaaatgggatctcaagtcctagttcctttccgaggctctgaagataatccccgtcatctcaaattgatgggggatntgggacagattgtacccatgaaatacaatccaagggatgaaagttcagtaaaagctgtgatggc

SEQ ID NO: 67970 - DNA, 523 bp, Glycine max
  Clone ID: PAT_MRT3847_32390C.1
gggggttttaattttttttttttttttttttttttttttttttttttttttttttttttttttttttttttttcaaccccccaaagggggggggttaatttataaagggaatttacccacccgggttaaaatccccaaaaaattgatgggaaaccctggggtgaaaaaccttaggaaacaggggggggtttaaccaaaatttgaaccaagcttttttttttgccctcttttctgtgcggggaacaagagggttccaaaaaatggacgctttttattcaattccgggtttgggtcctggcccctttcaaaataaagggtttaaaaaaagggggctaaatccccccggagaaaatttcctcgccaaaaacccttgcgccattttaaaaatggggtagggccgcccaaaccccaaaactggagggccctaaatcccgccccaaggaaaaaattttttccgggtttgggaatcctaaaaaaaaatccttttaaaaaaaaaaaggggggggagaataaaataaaaccc

SEQ ID NO: 67971 - DNA, 181 bp, Glycine max
  Clone ID: PAT_MRT3847_32391C.1
cacactcaaggccagcgtagaccaaaaatgaaaggaaacaacccttatttgattgtggttctcgtacaagccatatatgctgctatgttccttctctcaaaagtgcattcgatcatggcatgaacaatttcatcttgtctctatagacaggcagtagcaaaccatcttcctcaccctttca

SEQ ID NO: 67972 - DNA, 339 bp, Glycine max
  Clone ID: PAT_MRT3847_32392C.1
accaaaccccgccaaggagggggttctaaaaaaaacacaagggggtgggcaccccccccaagaaaggaaaaaaaaagggcccccccccttttaaaacccgggggaaaaaaatgggggggggggaaaaaaaaacaaaaaccctaaaaaaaaaattgccccccatccccccaccagggggggcaacatttggggcaaaaaaaagcgcctttggggataacaagaaagaaaccccaagtctttttacgggcaaaataggggaacccccccccgggggaaaaaaaaaaccccagcccgaacaggagggacttatcaaagaacagcgcccccaaatgcaaaggg

SEQ ID NO: 67973 - DNA, 295 bp, Glycine max
  unsure (1)..(295): unsure at all n locations
  Clone ID: PAT_MRT3847_32393C.1
cncnngcacacntacgtaagctcggaattcggctcgannccaacgagatgctgggatgctgagatgacacctgcttccttcttctcgggtctgctggctcctcttnctctctgagtcaggtcttctgcaaaccagtgtacagggaagaccaatttccatgtagcaatgttttcacactttctagaactttcagtcaagtaagtagtttttnatggactgttctactcaccatggggcaagggaccaaaaaagcaggcatactttaacttctctagaaaagtataaatgatttttn

SEQ ID NO: 67974 - DNA, 536 bp, Glycine max
  Clone ID: PAT_MRT3847_32394C.1
tagctcggaattcggtcgagctgccgggaagagacttagagtaattgagttggtcctccttccaactatttgagttgattttcttttctccagtgccaattccgggcacgtctcttcattaataaattctactatatatatgaagaagtggccactgctgctgaatcagttattccttcaatcatgtctgtctcttcttgcttttgccattctccattgacattcaaggctatgaaaccttgtggttctgttgggaaggggcacaattttgctttccctatcagaagtaatgctgctgagctctgtaagggacgcattgtgagaagttgagtcaacttaagcggagattggaatttcatgggaggatccagatttattgtgaaaccaacagctacaagattgctacttcattatccacaaaggggtcaaatgaaagtgtcatgcttcataggagctcaacttgctagcactgcatttacagcatgaacaatagcagtgctcccattgtacacacttatggtgctagctccaaaatc

SEQ ID NO: 67975 - DNA, 1589 bp, Glycine max
  Clone ID: PAT_MRT3847_32395C.1
ttttcttctttccttcacattttctctctcaccattctcttcttcttctccctttcttagattctcccttttttctctttaccctccgccatggctgaggataagatttttgtactctgctgctagctgttgctttgtttgaatttattttagccacataacacgttgtgttccgatcagttcttactttcaacattttcaattgaagagatgtcttcctctgtcaccaatggcgatgattctctcactggccacatcatatctacaactattggaggcaaaaatggggaacccaaacagactattagttacatggctgaacgggttgtaggaactggatcatttggaattgttttccaggcaaaatgtttggaaactggggaagcagtggccattaaaaaggttttacaagacagaagatacaagaatcgtgaactacagttaatgcgtgttttggatcatccaaatgtcatctctctgaagcattgtttcttttcaactacaagtacagatgagctttttcttaatttggtgatggaatatgttccagagtccatgtatagagtcattaagcactataccaatgctaatcaaagaatgccaatcatctatgtaaaactttacatgtaccagattttcaggggattggcttatatccacactgttcccaaagtttgccacagagacttgaagcctcaaaatatactggtggatcctcttacacaccaagtgaagctatgtgattttggaagtgcaaaagttctagtaaaaggtgaagctaatatatcatacatatgttcacgattctatcgcgctccagaacttatatttggcgccacagagtatacaagttcaattgatatttggtcagctggctgtgtccttgctgaacttcttttgggccagccattattccctggcgaaaatgcagtagaccagcttgtacatattataaaggtgcttggcacacccactcgagaggaagtacgctgtatgaatcccaattacaatgactttaggtttccacagataaaagcacacccatggcacaagatattccacaaaaagatgcctccagaagcaatttgttcgtccggcaggatcatgatgataagcttagagggggcatagtgtatactagttgataagttaaacaaaagtggcgccattatttttgtctaatttagcatgttctgtggcctgaccagtgtagtttcaagctgaacctggactgagacttggggtgctggatggctgcagttgatccatcaaaatatgtataccttttgattctctgttgctactgatggatcttatttcctcaggcaaaatagcctttgtttattgtaaacgtctacatgtcatatagtagttaagtatacttggcctgaaatggtcagaacttagattgcttctgtaaggggaaaaccaaagccttagctggaaggaggggagggtccacacagagttttgatgcggggttgttgggttcggtttcctcttattaatgtaatgtgcctgatttgtaatgttgttgaccagttcctttccttgtgaaatgtaattgtgctatcttatctgttttcttt

SEQ ID NO: 67976 - DNA, 1629 bp, Glycine max
  Clone ID: PAT_MRT3847_32396C.1
aagattttcttctctcccttctctctctcaccattctcttcttcttcttcttcttagattccttctctctctctctctctcccctccgccatggctgaggataaggagatgtctacctctgtcatcgatgggaatgattccctaactggacacatcatatctacaactattggaggcataaatgcggaaccaaacagactattagttacatggcagaacgggttgtaggaactggatcatttggaattgttttccaggcaaaatgcttggaaactggggaagcagtggctattaaaaaggttttacaggacagaagatacaagaatcgcgaactacagttaatgcgtgttttggatcatccaaatagtctatgtatagagtcattaagcactataccaatgctaatcaaagaatgccaatcatctatgtaaaactttatatgtaccagattttcagggggctggcttatatacacactgtgcccaaagtttgccacagagacttgaagcctcaaaatatattggtggatcctcttacacaccaagtgaagctatgtgattttggaagtgcaaaagttctagtaaaaggtgaagctaatatatcatacatatgttcacgattctatcgtgctccagaacttatatttggtgccacagagtatacaagttcaattgatatttggtcagctggctgtgtccttgctgagcttcttttgggccagccattattccctggcgaaaatgcagtagaccagctcgtacatattataaaggtgcttggcacacccactcgagaggaagtacgctgtatgaatcccaattacaatgactttaggtttccacagataaaagcacacccatggcacaagatattccacaaaaagatgcctccagaagcaattgatcttgcatcccggcttttgcaatactccccaagtctccgatgcactgcgcttgaagcatgtgcacatcctttctttgatgaacttcgagaaccccatgctcgcctgccaaatggtcgtccatttcctcctctatttaacttcaaacaggaattatctgaagcatctccagtgcttgttaacaaattgatacctgaccacgtgaagcggcaaatagggctgcaatttgttcctccagcaggatcatgatgatgagctttaggggggctttagtgtatactagttgatgagttaaacaaaagtgacaccgttatttttgtctaaattagcatgttctgtggcctgaccagtgtagtttcaagctgaacctagactgagacttggggtgctggatgcctgcagttgagatccatcagcatatgcatactttttgattctctgttgctactggtggatcttatttcctcaggctaaatagcctttgtttattgtaaacgtcaacatgtcatatagtagtaaagtatatttggcctgaaatggcagaacttagattgcttctgtgaggggaaaacaaaagccttagatggaaggagggaaggagggtccacatgagttttgatggtggggttgttgggtttggtttcctcttgttaatgtaattggcgatttgtaatgttgttgaccagttccttgtgaaatgtaatgtgctatcctatctgtttttcttt

SEQ ID NO: 67977 - DNA, 589 bp, Glycine max
  Clone ID: PAT_MRT3847_32397C.1
aaagaaaattttattttatagcacattacatttcacaaggaactggtcaacaacattacaaatcgccaattacattaacaagaggaaaccaaacccaacaaccccaccatcaaaactcatgtggaccctccttccctccttccctccttccatctaaggcttttgttttcccctcacagaagcaatctaagttctgccatttcaggccaaatatactttactactatatgacatgttgacgtttacaataaacaaaggctatttagcctgaggaaataagatccaccagtagcaacagagaatcaaaaagtatgcatatgctgatggatctcaactgcaggcatccagcaccccaagtctcagtctaggttcagcttgaaactacactggtcaggccacagaacatgctaatttagacaaaaataacggtgtcacttttgtttaacttatcaactagtatacactaaagcccccctaaagctcatcatcatgatcctgctggaggaacaaattgcagccctatttgccgcttcacgtggtcaggtattaatttgttaacaagcactggagatgcttcagataattcctg

SEQ ID NO: 67978 - DNA, 1013 bp, Glycine max
  Clone ID: PAT_MRT3847_32398C.1
gtacaaaaggtatccaagatatagagtggttaacacatatgacacatcaatttccaaataaactctacttatccgtagatgcttttggagagaaaataaagattaatggatggaaagaggatgctaaactcaatttatttgattatgttgccaaaattgagcatttacctttgggtggtgtgatttataccgatatttcgaaagatgggaaactttctggacctaattttgatttgacaggtcgtctcgcactttatacatcgttgcctgtaattgcttcaggagatgttaaagatggacgcgtcgtaaagggtatccagttccagtcattaagagatatcggtaatccagttgatttggctctttattataatgaagccggtgcagatgaactagtctttcttgatatttcgaagacggaagcaggacatgatcttatgatagaagtgatagaagcaacggcaaaacaattatttatccctttaacagtaggaggagggattcaaaatttagatgatattacgcaactattaaatcacggagcagataaaatatcactcaattcaagcgctttaaaacatccagaattaattcgacaagcaagcgagaaatttggtcgtcaatgtatttgtattgctattgatagcttttatgataaagacagaaaggattatttctgtactacgcacggtggtaaaaaattaactgatgtcagggtatatgattgggtacaagaagtagagcttttaggtgctggggaattgcttataactagcatgcatcatgatggaatgaaacaaggttttgatattgaacatttagcaaaaattaaacaattagttaatattccgattattgcctctgggggtggaggaaatgcacaacattttgttgaactatttcaacaaacagatgtttcggcaggtttagcggcaagtattttacatgatcaagaaactacagtggcagaaattaaagataaaatgcgtgaaggaggtatccttgtgagatga

SEQ ID NO: 67979 - DNA, 555 bp, Glycine max
  Clone ID: PAT_MRT3847_32399C.1
gatgcagcagcagcagcagctgcctccaatgaagaaacttgcaacggatggccctgggggtgtggtagcaatgaactccatgttagttgacatgcaaggttcaacaggtggatattcctccatgatgggggtttcttcaatgtcaatggctcgtcaaatatccatcgacaacgtgccggggagggaggttggagatcaacaaaggaaggtgtcgtccactcttgctcaggcttggaaggatgacattgatacaggaaatttggtgtcatcagtggttgaattatttggcgaaagtgtgttgccgtttgttgtttcaaaccctgaagcatgtatgtttttgtagcactagttgcactgtgtaggtatttgttttttgcatgtgaaagtgcatgcaataaggtggcatgtctcatgtgacttgctgcagaatataaattaccataggctagaatagaaattaaccttgtatttaaatttctttgatattagtaacacgtctgggattttgtctttagattatttatttagcagtgatgattctattatcctttctct

SEQ ID NO: 67980 - DNA, 166 bp, Glycine max
  Clone ID: PAT_MRT3847_3239C.1
tgatggaaaggaaatcaaagttgttgctgaccgcaaccctgccaaccttccttggaaggacttggggatagactaggtgattgaaggaacctgggtgtttgaagacatagactgtgcacggaaactcgttcaagcgggagctgagagcgggctctatgctggtgct

SEQ ID NO: 67981 - DNA, 1060 bp, Glycine max
  unsure (1)..(1060): unsure at all n locations
  Clone ID: PAT_MRT3847_323C.1
tcttgttaaccatagttacatcgatgtagggtatataacaatgagtggtattgcttctatcatctattccgtaacattgctcaatatataactgattatagagagagataaaaaaaagcatgtatgctttttattgatttattgttacgtcaaatctccgagaagcgagcaagcccgggaggaatgtgaaagggccggagaaaaaaaagaacaccaggcacaaaaaaaaacaaaacaaaaacacacccacgcgtccgtacggctgcgagaagacgacagaaggggaggtacgttaaacataaaaacaaaagcactctcctcttcctcctttcccccgaaaaacccttaaaccccgaccttcatatttgcagtgctagtctgtttatttcttcagctatgtttttgtcaagaacacttggacgaacactatttgctgcagctgccagatcaaaacaatatgccactacagcagctgctgctactggcagagaaggacacaacccccttcaggagttctttgaggcagacaggagccctgatgatgacaaacctgttgtttatggtcggagttggaaggcgtctgaactgcgtctgaagtcttgggacgaccttcataagttgtggtatgtgttgttaaaggaaaagaacatgttgatgactcaacgtcaaatgcttaatgcacagaacctgcgttttcctaacccggagcgcatccctaaggtgaggaagtcaatgtgtcgcatcaagcatgtacttactgagagagcaattgaagaaccagatcccaggaggtctgctgagatgaaaagaatgataaatgctctttgatgacttaaaattgacctgttcttgtgatgacattactgggtatgttgttagaataggacatctacatttgcggatgtaaggttcgctaacttgaagcattgtccaaaaatattgtttatgaaggagtttacccgtgaatgatttttgttccgtcttaatgaattgtccgtccggagggtttacgaaggagtttacctgtgaatgatttcaatttcttgataaagnnttaagt

SEQ ID NO: 67982 - DNA, 799 bp, Glycine max
  Clone ID: PAT_MRT3847_32400C.1
ctgtcatcacatggacttgtctttctcttactctgacggggtccttccttttcttcttctccttcatattttctctctcaccattctcttcttcttctccctttcttagattctccctcttttctctctgccctccgccatgactgaggataaggagatgtcttcctctgtcaccaatggcgatgattccctcactggtcacatcatatctacaactattggaggcaaaaatggggaacccaaacagactattagttacatggcagaacgggttgtaggaactggatcatttggaattgttttccaggcaaaatgcttggaaactggggaagcagtggctattaaaaaggttttacaggacagaagatacaagaatcgcgaactacagttaatgcgtgttttggatcatccaaatgtgatctctttgaagcattgtttcttttcaactacaagtacagatgagctttttcttaatttggtgatggaatatgttccagagtctatgtatagagtcattaagcactataccaatgctaatcaaagaatgccaatcatctatgtaaaactttatatgtaccagattttcagggggctggcttatatacacactgtgcccaaagtttgccacagagacttgaagcctcaaaatatattggtggatcctcttacacaccaagtgaagctatgtgattttggaagtgcagaagttctagtaaaaggtgaagctaatatatcatacatatgttcacgattctatcgtgctcccagacttatattttgtgccccagagtatacaagt

SEQ ID NO: 67983 - DNA, 148 bp, Glycine max
  Clone ID: PAT_MRT3847_32401C.1
aagaatattataaatgcataaatctttaagaatattgttatgcgtggccaactaatatcttcggacaaagacaataataaaatacctttcttttcatggttgatatattgtgttgcgcccctatgatgaattattacccacttacgtt

SEQ ID NO: 67984 - DNA, 464 bp, Glycine max
  unsure (1)..(464): unsure at all n locations
  Clone ID: PAT_MRT3847_32402C.1
agaccgtaacgtcgcattcgtagcgaaccaanaattaactgtcgacagctcactctcgtcggccgcccttcgtctttttttttttgttacagattcccttcctaccattaattcaactaatgggcaaaggctaatagttttctgtggccaatcatcatggcaacaaaccaaattaatacagccgacattagtggctcaaaatgacattggtcgtgtcaaataaagaggcgtggacccaaaaacacaattgatgacctctatttatatttgacaagaaggaaactatgcaaggttccatacgaacgaagtttgcacgaactgctgacacataactcggagatgcctatcaacccgtctgtgtacaaagctggaggacttgctctaattctgtcattgccgggggtgttttctatgcatgcaagaggcgaggaccgaccaaatgcagatcctatctaaaaggtaac

SEQ ID NO: 67985 - DNA, 394 bp, Glycine max
  Clone ID: PAT_MRT3847_32403C.1
aattgccgggtcgacgtgctctctagtcggcgggcgaccttcaattttttttgggtctttcgtttttgtttacagttttcttttgattgaacgttttgcgggggcaatactgttgaatgctccacaaagaaaatttacaggcaaattctaagacgccccaatttggcgcccacaatcctttgtgaaaaaggcaaattcctgcaatacgcaaaccttgcttatacaaaggacaaacctggggcggtaggggttattattgcgctgtaaaggataagcctcacattgaggaagagggggctaaaagaagctaggttgaccaaatgggtcatactattgacaatcgtgttttaaagttgcgtatccgccctgaatattgtcttggcttgcatgggag

SEQ ID NO: 67986 - DNA, 1749 bp, Glycine max
  Clone ID: PAT_MRT3847_32404C.1
accaggaaaatctggcttttaggctgccgggcttcctgctgacgggcaactccctgtcccccatttattcacccgcgggcgcctgcttgtcttcgtggcactagctgccctgtcggtattggtgcctgcatccgttccttttagaagagcattggttagcttgtcagcagactcgggagtccatcccttagttccttatttcacattttttgttgctgatgaggtggcaccgaatttaaataatttagctgttttatttgccttgatgcgccttgtgcggagccttctgcaaaattctcagatacacatagaactttatttacatcaattgatgccgcctatcattacttgcattgttgcaaaaaggataggaaacagactctctgatgagcactgggagcttaggaacttcagtgctaatcttgttacttcaatatgccaaagatttgggcatatttatcacaatctgcagccacgtgtgatgaagacatttcttcattctttcttggaccctacaaaagctttgcctcaacactatggtgcaattaaagggatagaagctcttggatcaagactgattcgcttgcttatacttccaaatctcgagccatatttgcatcttcttgagccagaaatgcaacctgagaagcaagaaaatgaaatgaagaggcatgaagcttggcaagtttatggggctttgttgggtgcagcaggacaatgcgtgcatgaaaaggtcaaaacgtttggcaatttgttctctcctccaactcaggttacttcaagaggcagtggaaaatctgtgattgcgatgccaggcaaacgaaaagccagcaccgttaatctgatgcagcagcagcagctacctccaatgaagaaacttgtaacagacggcactggaggcgcggtaccaatgaactccatgtcagttgacatgcaaggttcaacaggtggatattcttccatgatgggggtttcttccatgtcaatggctcgtcaaatatccaatgacaacgtgcctgggagggatattggagatcaacaaaggaaggtgtcctccactcttgctcaggcttggaaggatgatattgatgcaggaaatttggtgtcatcagtggttgaattatttggggaaagtgtgttgccgtttgttccaaaccctgaagcatatatgtttttgtagcactagttgcactgtaggtatttgtttttgcatgtgaaagtgcatgcaataaggtggcatgtttcatgtgacttgctgcagaatataaattaccataggctaaaatagaaattaacctgtatttaaatttctctgatatttaaactcatgggaataccagtaacacttctgggattttgtctttagatgatttatttagcagtgatgattctattatcaaatccctgtgtccaggggcatcaatgactgtgcaatagtacttggtggtttcaaacttccacaaggcaatatcaattgtgattcctctttcacgctcagccttaagcttatcaagcacccaggcatacttgaaagacctcttgttcatctcagcagcttccttctcaaatctctcaataacacgcttgtcaatgcttccaagcttgtagatcaggtggccagtggtagtggacttcccagagtcaacatggccaataaccacaatactgatgtgaaccttttccttacccatcttccttaaatctagaagaagctgcgctaaaaccctagccgcaagagaagctcgagcc

SEQ ID NO: 67987 - DNA, 1881 bp, Glycine max
  Clone ID: PAT_MRT3847_32405C.1
tgctggaatcacatggacttgtctttctcttgctgggtcctccattaaaattttcttctctcccttctctctctcaccattctcttcttcttcttcttagattccttctctctctctctctctcccctccgccatggctgaggataaggagatgtctacctctgtcatcaatgggaatgattccctaactggacacatcatatctacaactattggaggcaaaaatggggaacccaaacagactattagttacatggcagaacgggttgtaggaactggatcatttggaattgttttccaggcaaaatgcttggaaactggggaggcagtggcaattaaaaaggttttacaagacagaagatacaagaatcgtgaactacagttaatgcgtgtgatggatcatccaaatgtgatctctttgaagcattgtttcttttccactacaagtactgatgaactttttcttaatttggtgatggagtatgttccagagtccatgtatagagtcttaaagcactacagcaatgctaatcaaagaatgcctatcatctacgttaaactttatatgtaccagattttcagggggttggcttatatccacactgttcccaaagtttgccacagagatttgaagcctcaaaatatactggtggatcctcttacacaccaagtgaagctatgtgactttggaagtgcaaaagttctagtcaaaggtgaagctaatatatcatacatatgttcacggttctatcgagcaccagaactcatatttggggccacagagtatacaagttcaattgatatttggtcagctggctgtgtccttgctgaacttcttttgggccagccattattccctggcgaaaatgcagtagaccagcttgtacatattataaaggtgcttggcacgcccactcgagaggaagtacgctgtatgaatcccaattacaatgactttaggtttcctcagataaaagcacacccatggcacaagatattccacaaaaagatgcctccggaagctattgatcttgcatcccggctgttgcaatactccccaagtctccggtgcactgcacttgaagcatgtgcacatcctttctttgatgaacttcgtgaacccaacgctcgcctgccaaatggtcgcccatttccccctctatttaacttcaaacaggaattatctggagcatctcccgagcttgttaataagttgatacctgaccatgtgaagcggcaaatggggctacaatttatgcatctgggaggatcgtgatgataagcttgggggggggggggggggcataatgtatactagctgataagttaaacaaaagtggcaccattatttttgtctaaataccatgttctgtgatgctggatggctgcagttgatccgtcagtatatgtattaccttttgattctcttttgccaactggtggatccttatttccccaggtaaatatagccttgtttattgtaaacgtctacaatgtcatatagtaagtatatttgacttgaaatggtcagatcagaactcagaatgcttctgtaatggggaaaactaaagccttggctggaaggaggggagggtcgagaagagtttttttgatggtgggggttgttggttgggttttgtttcctcatgttaatatgtgcctcatttacaatgttgcacaatgctcagcagttcctttccttgtgaaatgtaatgtgctatctatctgtttttcttcaatgccgttttctattgtttccacatttcagttttcatttcttgaatttgaattctcaagttccagcactttttggtactaagtacttacagtgctcgtaatttcttatgtagacattatatacgattttgaaaaaaatgttga

SEQ ID NO: 67988 - DNA, 411 bp, Glycine max
  Clone ID: PAT_MRT3847_32406C.1
ccttcacattttctctctcaccattctcttcttcttctccctttcttagattctcccttttttctctttaccctacgccatggctgaggataagatttttgcactctgctgctagctgttgctttgtttgaatttattttagccacataacacgttgtgttccgatcagttcttactttcaacattttcaattgaagagatgtcttcctctgtcaccaatggcgatgattctctcactggccacatcatatctacaactattggaggcaaaaatggggaacccaaacagactattagttacatggctgaacgggttgtaggaactggatcatttggaattgttttccaggcaaaatgcttggaaactggggaagcagtggccattaaaaaggttttacaagacagaagata

SEQ ID NO: 67989 - DNA, 1744 bp, Glycine max
  Clone ID: PAT_MRT3847_32407C.1
gtaatcacatggacttgtctttctcttaccattttcttctttccttcacattttctctctcactattctcttcttcttctccctttcttagattctcccttttttctctttaccctccgccatggctgaggataaggagatgtcttcctctgtcaccaatggcgatgattctctcactggccacatcatatctacaactattggaggcaaaaatggggaacccaaacagactattagttacatggctgaacgggttgtaggaactggatcatttggaattgttttccaggcaaaatgtttggaaactggggaagcagtggccattaaaaaggttttacaagacagaagatacaagaatcgtgaactacagttaatgcgtgttttggatcatccaaatgtcatctctctgaagcattgtttcttttcaactacaagtacagatgagctttttcttaatttggtgatggaatatgttccagagtccatgtatagagtcattaagcactatactaatgctaatcaaagaatgccaatcatctatgtaaaactttacatgtaccagattttcaggggattggcttatatccacactgttcccaaagtttgccacagagacttgaagcctcaaaatatactggtggatcctcttacacaccaagtgaagctatgtgattttggaagtgcaaaagttctagtaaaaggtgaagctaatatatcatacatatgttcacgattctatcgcgctccagaacttatatttggcgccacagagtatacaagttcaattgatatttggtcagctggctgtgtccttgctgaacttcttttgggccagccattatttcctggcgaaatgcagtagaccagcttggtcatattataaaggtgcttggcacacccactcgagaggaagtacgctgtatgaatcccaattacaatgactttaggtttccacagataaaagcacacccatggcacaagatattccacaaaaagatgcctccagaagcaattgatcttgcatcccggcttttgcaatactccccaagtctccgatgcactgcgcttgaagcatgtgcacatcctttctttgatgaacttcgagaacccaatgctcgcctgccaaatggtcgtccatttcctcctttatttaacttcaagcaggaattatccgaagcttctccagagcttgtgaacaaagtgatacctgaccacatgaagcggcaaatagggctgcaatttgttcgtccggcaggatcatgatgataagcttagagggggcatagtgtatactagttgataagttaaacaaaagtggcgccattatttttgtctaatttagcatgttctgtggcctgaccagtgtagtttcaagctgaacctggactgagacttggggtgctggatggctgcagttgatccatcaaaatatgtataccttttgattctctgttgctactgatggatcttatttcctcaggcaaaatagcctttgtttattgtaaacgtctacatgtcatatagtagttaagtatacttggcctgaaatggtcagaacttagattgcttctgtaaggggaaaaccaaagccttagctggaaggaggggagggtccacacagagttttgatgcggggttgttgggttcggtttcctcttattaatgtaatgtgcctgatttgtaatgttgttgaccagttcctttccttgtgaaatgtaattgtgctatcttatctgttttcttt

SEQ ID NO: 67990 - DNA, 1979 bp, Glycine max
  Clone ID: PAT_MRT3847_32408C.1
ccttaactcattttgagacgaattccgccgacgtgaaaatgataaaagcaaaaaaaaaaaaaaaacatgaaactcaatcaagtacgaggtcttcctaaggggcaaagctagtcaaggaaattgggaaaagtccaaaaaaaagaaaaaagaagacagaggaaagaaaggagagctggaatcacatggacttgtctttctctttctgggtctccattaaatttttcttctctcccttctttctctctctctctctctctgaccattctcttcttcttctttttcttctcctctctctctctcccctccgccatggctgaggataaggagatgtctacctctgtcatcaatgggaatgattccctaactggtcacatcatatctacaactattggaggcaaaaatggggaacccaaacagactattagctacatggcagaacgggttgtaggaactggatcatttggaatcgttttccaggcaaaatgcttggaaactggggaggcagtggcaattaaaaaggttttacaagacagaagatacaagaatcgtgaactgcagttaatgcgtgtgatggatcatccaaatgtgatctctttgaagcattgtttcttttcaactacaagtacagatgaactttttctcaatttggtgatggagtatgttccagagtccatgtatagagtcttaaagcactatagcaatgctaatcaaagaatgccaatcatctacgtaaaactttatatgtaccagattttcagggggttggcttacatccacactggtcccaaagtttgccacagagatttgaagcctcaaaatatactggtggatcctcttacacaccaagtgaagctatgtgattttggaagtgcaaaagttctagtcgaaggtgaagctaatatatcatacatatgttcacgattctatcgagcaccagaacttatatttggggccacagagtataccagttcgattgatatttggtcagctggctgtgttcttgctgaacttcttttgggccagccattattccctggcgaaaatgcagtagaccagcttgtacatattataaaggtgcttggcacacccacccgagaggaagtacgctgtatgaatcccaattacaatgactttaggtttccacagataaaagcacacccatggcacaagatattccacaaaaagatgcctccagaagctattgatcttgcatcccggcttttgcaatactccccaagtctccggtgcactgcgcttgaagcatgtgcacatcctttctttgatgaacttcgtgaacctaatgctcgcttgccaaatggtcgtccatttccccctctatttaacttcaaacaggaattatctggagcatcttccgagcttgttaataagttgatacctgaccatgtgaagcggcaaatggggatacagtttatgcatctgggaggatcgtgacgataaagcttaggggacatagtgtatactagctgataagttaaaaaaaagtggcaccattattttttgtcttaataccatgttctgtgacctggcgaatgtagtttcaagctgaaccgagactgagattcgcgatgccggatggccgcagttgatccgtcagtatatgtaccttttgattcccttgtgctaactggtggatctttatttccccaggcatatatagccttgtttattgtaaacgtctacaatgtcatagtaatatttgacctgaaatggtcacacagatcagaactcagaatgcttctgtttggggaaaactaaagccttggctggaaggaggggagggtcgagaagagtttttttgatggtggggtttgttggttggcttttgtttccttcttgttaatatgtgcctcatttgcaatgttgcacaatgcacaccagttcctttccttgtgaaatgtaatgtggtatctatctgtttttcttcaacgccgttttctaatctgttttaatttcttgaa

SEQ ID NO: 67991 - DNA, 414 bp, Glycine max
  Clone ID: PAT_MRT3847_32409C.1
gtgtgggccttcctgatcgtctctatgactaacagtgtctgtctctggcatcagtatagcatagtcatgggtctccttcccggattcatgaatgacgaacccctgcgcccgcactctcccctgttgttatacttaatcagcacctgctgcagtgggttcgaaaacgaccatatcccgccctagcgtgaaccattctccacccccaccaccgatcagttgttcagggtttcaggactcccatggcactttactatataccacggtctcacttactcgcacttacactcgtgagattacttgccacagggctattgaacccataatgcgcactgaagctgattgggggcatccccctgggctgggcaccgtccaacgaccctgatcttctatgagtggttcgactgacagcatacc

SEQ ID NO: 67992 - DNA, 380 bp, Glycine max
  unsure (1)..(380): unsure at all n locations
  Clone ID: PAT_MRT3847_3240C.1
aggcgtgcagagacgagtgagggcacaccgaacaagaaagcatacgctcggttgtgagaagtacctcggcaggcgtgatcgagagggatgcataacagttggcatgtgggagaagagagngaaatacgctattgaggagcattggaagcacgtggctcctagctaactcactgggatacttgattggagaccgcattgtgaagatcatcgtggactatgccagatctggacatgatgatccgacccatgacgcgattccatctgtgcatggtatgtaagagctgcgaacatggatcaagagctgactcatagaattagaataagcgctgagacagtgcagatggcggtggcgagtatgatgctaatagtgtatatgttaa

SEQ ID NO: 67993 - DNA, 319 bp, Glycine max
  Clone ID: PAT_MRT3847_32410C.1
agacgacgtagaactcgctgccgctaacgaccctttcatcaccaccgaccacatgaaacacctgttataacacaacagtttttctgttctctggaaccctttctatgccaccgtgaattattaaaacacccctctcttaggagactatccagccactatttttgcacacagaaaccctgaacaatcccttgggggtccacttgcacctcacatcattgttgagtcaaccggagggttcaccgataatgacaaggcccccgaacacttgaacgttggggttaaaaagttattatttctgcccccaggaaggatgccccca

SEQ ID NO: 67994 - DNA, 447 bp, Glycine max
  Clone ID: PAT_MRT3847_32411C.1
tacgaaaaaataaacccaaagcctttttcacagggggggggtgtttttaaaaaaaacaaagttcctttcccttccctgtggcccaggtttgcccaaatcccctgatttcctaaaattgccataaagggacccctgggaaaacaaaaggcaaatttccaacctttttttttgggaagagtcaacccccatttttttttttcaccaaaaatttgggttgtggcccccataatcccgtttcctactcgccctagttttttaaaacaaccccaattttgatggaccagggcctggagttcaaaacaggggggttttttgaggccccatcagaaggttgggagttccctttggaggtccccaaagttgcctttgagttagccttggtttttaccaaaggggtttcctgggcctttttaaatttttttttttttccgccccatgccttagggg

SEQ ID NO: 67995 - DNA, 142 bp, Glycine max
  Clone ID: PAT_MRT3847_32412C.1
ggctcgagctctctatccttttatccatttgccgcactttctcccaatctcacgggccccagacgctatattattgacaaccccgctcaaactatacactacctttctgtaccaatactgtacacaacttttcctatcaacc

SEQ ID NO: 67996 - DNA, 286 bp, Glycine max
  Clone ID: PAT_MRT3847_32413C.1
ggcagtccatacctcacaccacatctatccaaacaatcaataacaatggcttatgcaaggcatgctcctacggatgtcttcctgcttgccacttccatcaaactgttcccaacgaacatagatacagcagattgtattggttcatgtacatctttctatataccaccgtgcctctcacgtgattgtcgttctgtctctatatgactaattactggtttctgcatacatccatctggacttacatccgtcgctaacatcatcgattaacatccctccttatgtcaat

SEQ ID NO: 67997 - DNA, 579 bp, Glycine max
  Clone ID: PAT_MRT3847_32414C.1
ggctcgagcaagagagggaagcagctgctctacttgagtggagagtgagtcttgacaaccaaagccaagcttctttgtcatcatggtccagtggtgtaagtccttgcacgtggaaaggaatcgtttgtgatgaatccaactctgtgaccgctataaatgtggcaaatcttgggctaaaaggtactcttcacagtctcaaattttcatcttttcccaagctgctaactctggatattagtaacaacagttttaatggaatcattcctcagcaaatttctaacttgtctagagtttctcagttgaaaatggatgctaatctttttagtggttcaatccccatttccatgatgaagttggctagcttgtctttgctagacttaacaggcaataaactttctggtaccattccatcaattagaaacttgacaaatttagaacatcttaagctcgcaaacaatagtctctctggtcccatcccaccctacataggagagtttgtgaatttgaagttcttgattttgaaagtatagaattccggatcaattcttcaatattggaatttgacaagctcgctttttt

SEQ ID NO: 67998 - DNA, 346 bp, Glycine max
  unsure (1)..(346): unsure at all n locations
  Clone ID: PAT_MRT3847_32415C.1
atgctgatttttttgatcatccattaaaagcttgnaaagcccattgcaactctagggannttgtcactattaanatcgccctttcacatccctttaaaagattatatgtagctatatctcatactaactatggtttaattacactattatcaacatataatgtctcttttcttcaaatattcaaatatagtgatactaaacctcaaaaaatttattatttatcaccattgaaagtaacattcatatttaaacttgttgacatgctctaacacttaaacaactacatttttaattccacacttcacatagttctaagaaactatcaaagaaatatattctattacat

SEQ ID NO: 67999 - DNA, 440 bp, Glycine max
  Clone ID: PAT_MRT3847_32416C.1
caaacagcgattgaattgtttgtactgccataagacagtgtctgaaattgggatacctacaatgacaaaagtcgacagaaacacgtaacatccactcagaccttgcaatttgtggctccgaatataaatgtacaatttcttttccttactaattacgacggtccaaagggcatggaatctgcgcacaaggattataacgactgaacaggtcgtggggatgacccatatatgcacaaatactaagcgtatatatgcaccgccgattgccgggatcaacgtgtattcactggtacttagaaggtgatcagactacgactcagatggttcatcagtccggacatgggaggaagtaaatacaatccaatgtgcgtttggtgagatactttgcgatacagattgagcccggacgactggaaatcatgacgatgttgctgatatta

SEQ ID NO: 68000 - DNA, 441 bp, Glycine max
  Clone ID: PAT_MRT3847_32417C.1
aagcaattgtaaggattccctttttttgtttttatgtttttatttctttttttttttttttttttttttttttttttttttttttttttttttttttttttttttttttttttttttatacaaattccctgttttcttcctctgttcatggccaattaaccttttctctttagtcaatgcagaaaaaactaaacaccattgtaactcaaagtatgaattcagatgtaccaaagaagttaagcaggcagaaaaaatttctgttgttttgttgtttctgcattaactagagggaaaaaaagttagttggccatgagcagaggaaggaaatagggcattttggggtatcttgtcaacatgtaacacaagccccagtaactagtacaggtttttgtatacctttataatttatcatgtataccaacagggttctcccttttgttt

SEQ ID NO: 68001 - DNA, 478 bp, Glycine max
  Clone ID: PAT_MRT3847_32418C.1
gaaccgtcaccttgatcgtggacttcgtacattctggtagaggcggaagtagctcggatagtagcgataatatcaagcaagatgagtgagcttgtgttacagataagagcagagctggaggagatatgtacttaagactcattagattccataaacattacttgcatcggcatccgctgatgttgccatagattctgtatctgtggaccctgctagcattattgaacagatcgaactttagatttcccatgtcaaagatgaagcttttggcagagaagagatacttgaaactgctgagaaatgggtgccaacgtgcgatgaatagtcgcggcttgacgagtaccacagggcatgatcatcgatacattgctccagacatggtgctgctcttactcttaagcaagctgaggaagctggtgcccttggttagcacaattgcaggcaccggacagggcctgacttaataaactactgcatg

SEQ ID NO: 68002 - DNA, 697 bp, Glycine max
  unsure (1)..(697): unsure at all n locations
  Clone ID: PAT_MRT3847_32419C.1
tgtcaggttattccgtaaatctatatttggggcagcagatgagattgaattgaagtttatgaacaggagaaaccatgaagatttgaatcttttcatcctaatcttaaatctagaaattagaaagttatcaacacaggtatgttcattcttgccaaggagaagatatctttagacaacttcatgtaattattttcactgagctttatgtaaaacaactaacataatacaaatatagcatttcatgaatgcttacatatctcatgtcacaatcttcctcctccttacagatttaaatttggaacaagaatccagaagtttgccagacttgacataactacaatttctcatacataagtttttattgcttttcctttctaaaagctggatttaagagtcattgagttaagggctggtacttcacagcttgagcttttagtacttttagttatcaacaatgtcaatgaagtttaattgttctttgtgtccttcaaacatgtaaagatacattttaataataataacattccataacctatttatttgtctattntaatatttcacgtttgaaaatagctttganaagcccaagcaatacctaagtgagccanattctctaccttgggttgattntttttttaatggaattaatactggccanatccattacacagaagctcttcacaactcgtgtttcatt

SEQ ID NO: 68003 - DNA, 300 bp, Glycine max
  Clone ID: PAT_MRT3847_3241C.1
tggggacgcggattctccaccggctgagcatgttgcggaagtttatggtgctggagatgcgcctgaagattttgattctttgccgaaacagggctctcggatttatcttaagggaaatgataatcaaaaggggccggtatggcctggagagaatgtcttaaggatgtcagttccagcgcataagggatgcttgattattgtccgaaggggctggattttaaagacaatcacagacgacactaatgggcgaatgaaaattcttgacggtgcacctgtaatctcacaacgagcagtcatggt

SEQ ID NO: 68004 - DNA, 367 bp, Glycine max
  Clone ID: PAT_MRT3847_32420C.1
tcccactcgtcctctcgcaagctttatttaagaatcccaggcgaggagaaagatggggggtaaggagcaggatgtgtcctttttagcgaacaagttccccgagagacagccaattggtacggcggctcatagccaagacgactgcaaggactaccaggagccggcgccggctcctctggttgacccgactgagtttacgtcatggacgttttacagagcatggatagcactgtttgtgttcacttttctgtttctttacatcactgtcttaacctttatggaattcgcgggtgctatgtataaaattattaccattggtaattcaatgaatttcttgttccttcgtttgctttactttttccttttt

SEQ ID NO: 68005 - DNA, 411 bp, Glycine max
  Clone ID: PAT_MRT3847_32421C.1
gttgttgttggatatgaatgaattctgagttcaagagactcacaacatgaagcatatacggtcgaaattggaagagatgagggtatgaatgattacaaaggacgagaaggagaacgtagcgttgctgttgatcggaagcgattcactgaaaagcaataaccttgttctttcacaaggaccataatataccaacatcatcgtcgatctgcttccctcgctaacactgactactaggaatctgaaacagatgtaaaattatctgatgttagtgttcaataatgtgatgacacatattggatcatatgggtttgcaatttgagaggtaatgaatggttttgcgtaattaatgatgatgtcatgcaagtatgatttcaacctctgtggattaagtagtcaagtgccttactatga

SEQ ID NO: 68006 - DNA, 331 bp, Glycine max
  Clone ID: PAT_MRT3847_32422C.1
gtttttgttaacctcacacttaacgaagtcctgaattttttgtaggaaaaacaaaaatcataccctttacgtgcataacattttggaactgatcttaaaagaaaaagggcccacacagttttacaccgccccaaaatgggtacttgtaagaaaattacgacccctggccctgctattttaaagggcataatttctaaaaaaaaaggggttaatttccctctttacatttcattttttgtataggactaattcaaaatcaccacggacaaactttagtgaaagcccaatttggtttgtctccacgcccaaatatacggggggggtgatcagc

SEQ ID NO: 68007 - DNA, 353 bp, Glycine max
  Clone ID: PAT_MRT3847_32423C.1
gggagatggagaaagacaactttcggggaaaacagaattctattgttaactgagctttggagtttttagcatgatgggtaatgcagcaacacgagtgcttttaaaagcgatcttataggctatcatatttaggttttgcaaagttagaattttggaatttaatatctgtgcccaaatattatcgttaaaagttaaatttttagattagctttttataaagtttctagtaattaacttctgatttagttgtgcaaatttgaagttagagatagctttgtgcctttgtcttcatgtatcgtttgtaatgaaattccttggcactaatgaaacgcctttttcaaaaaaaaaaaaaa

SEQ ID NO: 68008 - DNA, 509 bp, Glycine max
  Clone ID: PAT_MRT3847_32424C.1
cctggggaaaaatcattattttctttattacccttccaggtttacaacccgggaaattttaaaatttaaaaaaaggatttggataattttttaaaaaaaaatacctttctaaaattaaaacaggcccccgcccctagttccgtttttttactttcacaggggcccgagtttttgggggaaaaacccccaaaagaaggggctatatataacctctagtaaatgggaccggcccctaaggaattttgttcatcccacgcgcaaaaggacaaaattcggggccctccaaacccccacccccgggaaacaaacacccagcccataaaatcttttcggggcaccttgaaaagacctcaaatagaaaccccagaagctggaaccaactgtttggaggggacctagggatggggcgcaggcccagagacaaaattttgattttcacccccccccaaccaattgcttttaggcggacggggctccttctttattcgcaccccacttttgggcagcct

SEQ ID NO: 68009 - DNA, 329 bp, Glycine max
  Clone ID: PAT_MRT3847_32425C.1
tccgttaggatgcaacaacagaacgggaggggattcacaagtgtattcagtgagtgcttcgagatcacccgataactgaacagcaccatcttctttgctctccttctcttttgtcccttcaccacccgcagggcaagcttgagccagcgactcatttcgtcctctataatgatggttcgcctctttacaacgctggcatctattacatcttgtccggcataagatcatttggtgcatacaaaacacccccacagggaagtgctgcatgccctctcagtgtgatgtactctcccaatgacctcgactttgggattgtgaacaaccatctc

SEQ ID NO: 68010 - DNA, 1286 bp, Glycine max
  Clone ID: PAT_MRT3847_32426C.1
ggagttccaaagaaaatggcataattgtggccaattccaaaacaattattccggaataatagatacaaaattggcaaaaacaagaaaagaaagtagtggggggaagtaggtatggggaatgatgtaatttaaccaaaaatctctgaagcaaaaggatcacgacactataataaaggaataaataagaaaacataaaataaaataaaaagactctaatgcagttgcaaaccaattccctctagatgccgctatctataagaaaatgccgttgtcactcaattcccaacaaaatgaatcactttactgaactttcactgattgacgagtcacttttgctcctcctccattctgataactccttggcacagcttctccattgctacggcccccaccgttattattgcctccgcgaggccggccagagaactcacttcgcttctcaaaactatcattcctgtttccatagccaccaccaccacggccgccactgaagttgccacggcccctgaagttatcatttctatcattcctgtaaccgccccttcccgatgaatacctccccctatcattattagctcgcctttcttcaattgaaagtctacggccatccaaggtaacgggaggagaggcctcaagtgcactttgcattgaagtagccgattcaaattcccctaaaccaaaactaattcctgttgttaagccaattcctgttattaagcctgttccaaagataattcccgttgttaaaccaattccaattattaaacctgtgccaaaaccaattcccattattaagcctatcccaaaaccatttatagtgaaaaagcccatcccgactgttgagtcggaggaatttctaaaaccaaagcctttcttcaaaaagcctattattcctaagctaccacttcaccccaaattcaagaaaccacttctaccaccattgccaattcacaagccaattccaactccataagagtataatactctatctcaaactataaagttatcggttccatttctaaatgcctttataagtacagctacatcgtatctcaaaataaacttcgtactcctctcgtgtactgtaatggaaaataagtagttcatgctctctgttcaatgaagttctcggtgtgatcgtttgtagatcgattatattaatgtaatagattgtaccagttattccttttctctttttttttttaccaattattcctttttgcttaaataatgtttttaaatagtatttccggtttatattttatgaaaaaaaaaaaaaaaaggag

SEQ ID NO: 68011 - DNA, 225 bp, Glycine max
  Clone ID: PAT_MRT3847_32427C.1
ccctttcgaccgatcaattgtggattaaagtttgaatgctagcactgtatcctcaacacaggcttggagcacaaattgctccattacaaccccatctaacacgcacctcagttttgtccacctgaatctatctacattgtcgatgaacagaacgaagggcatttactctatcactagatgctttgtgataacatgttcagcaagtcactcacagacagtagagat

SEQ ID NO: 68012 - DNA, 956 bp, Glycine max
  Clone ID: PAT_MRT3847_32428C.1
ggcaactccctcattccatggctcaaaaacctctccactgcttcatcttcagcatcttctcccaagcttccccacctctacctccacagtggctccatcagtgctcctgtcacacctcctctgagctctccaacctccagaacgccacgaatcaatgtcgagtgggacgagcagtctgcgcggccggggtggaccagacagcagcactactcattccttccatcttctagtcctcccagccccggtcgccaggttgttgaccctgaatggtttgctgggatcaaacttccccatgttagtccaacctcaccaacattcagcttggtctcctcaaacccttttgccttcaaggaagatggcttgcccggaagcggttcgcgaatgtggactcctgctcagagtggaacatgctctcctgctattccacctggctctgatcaaaatgctgacattcctatgtctgaagctgtttcagatgaatttgcatttggaagcaacatgttggggcttgtcaagccttgggaaggagaaaggatccatgaggaatttggatcagatgatcttgaactcacacttggtaactcaaagaccagatgaagtcacaaataggaatgaaagtaattgaatgtgattatgtaaacattgacttttgttggttttgatcagtagatatgttagaaggtaagtgaggtggtgagtgcaagcagttgttttcttttatctttttaattatttttattttggtgactttcccttttcattctatagttctccagtaatatacatgcttatttagatgtggagtggatttgcaacccattcatttcatcgttgtacgtgttgttaaaccttaattattggaaacatcagtatacattgtatggattggcttggtttgccactgacagaactccacagattgcaacctaactcaatggcaaaaaccccttgtgtcc

SEQ ID NO: 68013 - DNA, 227 bp, Glycine max
  Clone ID: PAT_MRT3847_32429C.1
tcctctagagcggacaacatttattgaattattttttatttttttttttttccccaaaacgtctttcttttaacagaggggggttaattctatgagaaggcattccatgacccaccatccccaccaaatttttatccacacaaaatgactacacaagctttttacactttccctataaatcagtttattgctacactattttttatttaaattaccccctcgaccat

SEQ ID NO: 68014 - DNA, 349 bp, Glycine max
  unsure (1)..(349): unsure at all n locations
  Clone ID: PAT_MRT3847_3242C.1
cggntaangnancnggacgtangctcgganttcggctcgcatggcctaggcgcnttngtgncgtgggnncntnggtnngccnagtggcgggcntgttgcgtnntgnggttgggatgggntgncgcnanctccnggtggtcnggtggggacncgnncttncgtgtggtgtgnngtggtggttccagntngcngtggntgcgtggcncggttgcggnnncgnagnngcanntnnggcgcgcnntctngntgtagngngnttnccnttgcncancgngggncnntngngnnnnnggtcggaangggngtgcatgncttgcgnngtccgtggaggntgttggntctnccgnnn

SEQ ID NO: 68015 - DNA, 520 bp, Glycine max
  Clone ID: PAT_MRT3847_32430C.1
tacggctgcgagaagacgacagaagggcagaatgctgacattcctatgtctgatgccgtttcggatgaatttgcatttggaagcaacgtgttggggcttgtcaagccttgggaaggagaaaggatccatgaggaatttggatcagatgatcttgaactcacacttgatgaagtcacaaatatgaattgaatgtgataatgtaaacattgacttttgttggttttgatcagtagatatgttagaaggtaagtgaggtggtgagtgcaggcagttgttttcttttatccttttatttatttttattttggtgactttcccttttcattctatagttctccagtaatatacatgcttatttagatgtggagtggatttgcaacccattcatttcatcgttgtacgtgttgttaaaccttaattattggaaacatcagtatacattgtatggattggcttggtttgccactgacagaactccacagattgcaacctaactcaatggcaaaaaccccttgtgtcc

SEQ ID NO: 68016 - DNA, 417 bp, Glycine max
  Clone ID: PAT_MRT3847_32431C.1
tctcatgctcccggccgtcatggcacgcggattcgagcggccgcccgggcaggtgttcggcttcatgcaaacctcattgttcttggtatacatggcttgcatgtgctatggattctttctcatgctcgggactgtgggtttccgcgcagccctattttttgtccgtcacatataccggtcaatcaagtgcgagtaggatgctggtgggatggtcttctgttttacagaatcctttacagatctggtattcaagaagaccatgtaggatggtaggatgtcttgagaagaagcatgaattatcttacgcccgaaattttaaaaactttttgccattttcatttacagctcaacagtttatatcgattagtataattagagctttctcaattcataattttataccttcccacacaatta

SEQ ID NO: 68017 - DNA, 314 bp, Glycine max
  Clone ID: PAT_MRT3847_32432C.1
agcggacgcgtgggaaaacagctcttgattagattatatagtttcaggcaagaatagttaaaggaggcaaaaggtgaggagtacaaacggatgaatgctcacattcgatttaatggctattccgcaggactcctcgattgtcagtgaagtcaaatttggtgcattgcttgtcatcagcactgtcagggaactccactagagtaaccatgtgatcacctcaggaacaaaaccccacgctgcaaatgtagctactgtcgaaataagcttgaaggaatagttcgtctaaaaggtttctgatctggatctgctcatgg

SEQ ID NO: 68018 - DNA, 283 bp, Glycine max
  unsure (1)..(283): unsure at all n locations
  Clone ID: PAT_MRT3847_32433C.1
aagcaaaggggcccaccacagganaaggacacgcaaaacacacccacnggagcacaagagacaaaaccggacaagaagaccccgaaagccaccaggccggcggaaagcaggaatttctctttgaaaaggcggggacnagncnggggaaacanccccacaaaaaacaccaacaacgggggggagaggggagcaaaaaacaccgggnagcaagaggagaagggacaaaacacacacaccgcaaggcacaaaaggcaggccccaagaaaaccaagggacgggaagg

SEQ ID NO: 68019 - DNA, 657 bp, Glycine max
  Clone ID: PAT_MRT3847_32434C.1
ccacgcgtccgccagaagtcaattacaccacgaggattgaggagcttccagctgctgaaaacacatgagtgtcagccatagccttccgtggaactgtgatgacttttcatcagcaacatccttgctcacacccatatcaggaaaagaagaaaatatcacattattctctctctctctctctctctcacacacacacacactacgtatgaaatccccgtagccagaatcgtctcccttccaaccagacaacaaacgccaccctcacactctcaattattctcacattttgatttgtttatatattattcccttttcaagactctcaatatcatatcttctacttgaagcaaaggttctcgaaatccagtttaattagttgaattactctctctctccatccatcttcgttttcacacaaaatattagatttttgttcaatgggtatgccgtgttcgatttgaaatccaggatattaacatttttatgaacaaattgtcagaaattgaagcatttcctaagaaaaagaatgttttttgttttgttttgataagcataagaaaaaaaaaatgttccttgagttttgcttaatcatttccttttcttgctggtgtgagttccagagaatgcgagcttagtgcctagagctttgtaactttg

SEQ ID NO: 68020 - DNA, 434 bp, Glycine max
  Clone ID: PAT_MRT3847_32435C.1
cggtgcttattgagatgactgaatacgggccgggattcccgggtcgacccacgcgtccgattatttgagaaaaatggggtgttacaagatagaaatagtgcaggaccccaaagattaataaaagtataatcaaaaagatttttcatagacgatgagagaactggaggaagggagtctgtgagacttcctaatacaagtgattactagatctgaagaatatttattaatgttgggaagattagagagtctcaacacatgttttcatggtatcaacactagggagaccaaacgtagaatgcctgatgcgttaagaaacaaaattacgagatggtgtattaacaacagatcaacaacagtggagtgctaagagtgaggtgattgtacgacaaagggttttacgacaatattggggggaagggaggattgaaaacttt

SEQ ID NO: 68021 - DNA, 740 bp, Glycine max
  Clone ID: PAT_MRT3847_32436C.1
cccacgcgtccgtacggctgcgagaagacgacagaagggggggcgcggtcttacactaagtaagaaacaccaacgaaactaagcccatcgttcttctttttccttttttttcccactttctttcattttcccacggaacctttttctttttccttttccatttgtcttcccttcgcctttattattatttttttcactcttcttccttttaaaatcctcgcggcacaaatcaatgcaaacggaaaacgcagaatcgcaactcacgagagtcacatctacgccatgaacaaatcgcagtcgaagaactccaagtcctcgactcagttcgactcgccgctcagcttctactccccgatgcacggggacggtaccgagtcgccggagtaccggtcgccggaaaactggccggagaagcgcgacaactccatggccatcgtgaccgccggcaagctcaagcagttcacgccggagaagcgcgcagagcaccggaagccgccggaaaatccgccgtcgacggcggtgatggtgttcaacgcctcgtcggcggaggaggctcagaggccggcggcgaaggcggctccggtgatcggaggagaacggagatcgaggtcggcggcgacggaggagacggttagcaaggcggcgctagggttccggctgagcgaggttgtggtgtgtctgatttcgttttctgttatggccgcagttaagacgcaaggttggagtggtgattatttgat

SEQ ID NO: 68022 - DNA, 518 bp, Glycine max
  Clone ID: PAT_MRT3847_32437C.1
ttcactcttataaataaataaattgtccagaaagcttatctctaaaacaagaaaaatggaaagaagctatgttttattacaactctaattgctttgccaaatgtttattcttttgttccatttgagttgaaggaacagctaatcgcttgctcacccctaccaagatcatgatctctagttaatttcacttcttgtccatcccgagtgtgtgcttcacactatccacagcaccttgagccctgtccttctctcgatcccccctcggtcggggtctcccggcagtttcacccctggtccgtcccgcgggtggccctctcgcgttccacgccgccttggccctggctcttccccccgaagctgtttcctttgtggattggacaaattcttcggccttaacctgagtctggccttgggtttggcctgcattgaagttttgctgggcacttgacatgtttgcttgatttgataaagaaaaaaattatgagagtaatagatgtaagctcgtgctatactcgtgc

SEQ ID NO: 68023 - DNA, 468 bp, Glycine max
  Clone ID: PAT_MRT3847_32438C.1
cttacccttccctgcaacacaatcgatgcctacaaaatatagtaacattggtagttccaccataaccgtgtcagaggctctaagagctagtggcattactacacctcaacctaatgcacaaaccctgtctggtgcaggtgttgccactggacctgcacttcctcagcaccttgctgtgcatccctactcccaacctactcttcctctggggcattttgctaacatgattagctatccattcttgcctcagagctatacctatatgccatcagcttttcagcagacttttgctggaaataacacatatccccaatctctggcagcagtgcttccacagtataaaaataatgtttctgccagcagtttgcctcagtctgctgctattcctcctggatatggctttggcagttcaacaagcattcctggaggaaatttttctctgaatccacctgctgctcctactgggac

SEQ ID NO: 68024 - DNA, 118 bp, Glycine max
  Clone ID: PAT_MRT3847_32439C.1
cttgaagtagatctcacgcggacactctatagcatgcacgataacttactcgtaccttcgggatcatatcattcctaaaatgtctcctacattcaattcaatggccagtatactacaa

SEQ ID NO: 68025 - DNA, 506 bp, Glycine max
  Clone ID: PAT_MRT3847_3243C.1
ctcggaattcagctcgaggtctctttctgtgtctctatctatcgttttctcaagataatgggcaaatcaccatgcgactcgagtcatgatccataagtgagaaagggaccatggatcatggtcgatgacttgttcttgataaactatcttgctgatcacggtgagtgtgtttggaattctccagccgaagcttgtggtctcaaacgaacatgaaagagctgtcgactccgtttgctaaactacctttgtcctgatgttagatgaggatacattacaccctgagaacagcttttgatcatagaacttcatacatagtggggctatacgtggtccaaaattgcaaaggatcttccatgaagaactgactgtgtgattaagtgcttctggagacctaggatccagaagcccatttagcaagctgagactctacaacgacatgggaattcatcagaaaataagaactatgagcatcatgccagcaatagcactagccaggtgtccaccat

SEQ ID NO: 68026 - DNA, 858 bp, Glycine max
  Clone ID: PAT_MRT3847_32440C.1
cttacttaccacacacacctcctaaaccaaaattatccaaaaccatgtccagcttcactcatgccaccacactcctccatgcccacatcaaaaccaagcacaaaaaaccctccaccaccaccaccaccaccaccccattaccccataaccattcccccaacagaaggaagctgatttcaacctttctagccacttcaacagcagcactactagtgcatggagtcaccagcaccccacaagcactggcccagagctggggcacgcactccttcatcaaggagcacttcttcgagccggggctctccccggaagacgcggtggcgaggataaagcagactgcggaggggctgcacagcattcgggaggcgctggagaccatgtcttggaggtatatcatgttctacatacgcatcaagcaggcctatcttgaccaggacttgaggactgccttcaccaccttgcctgagagtagacgcaaggagtatgtcaaaactgctaatgagttggtgtctaactttggtgagtttgataggcatattcggacgccaaaggtatatgaatcatacctatactacgagaagacattgaagtcaatagatcaacttgtggccatactagcatagcacaaggaggaagctgcagggtataacggtcttaatttgcaattcttatttttgtggtataaagcctcttgttacgttttttttccttccattttaattccgaattgaaatagaaggtattatagcacgaagttcaagcatatattatgtacatgtttgtatgcaacttcaaattcatgaacacaaagaaggttctaaaatgagaagcttcaatctcaaacatgctctgctagct

SEQ ID NO: 68027 - DNA, 354 bp, Glycine max
  Clone ID: PAT_MRT3847_32441C.1
tttgcttcactatcactaaacactcgcagacgagacagcaaagggagagtgctcaccagttgcaagacacacaaccgccccttgaggcctccacaggaaaacagaacgaggtgcatcgactgcacaaataatcgcttaacagcattaatgaaaaaccggggaaaatcaccccttgagacagacagcaacaatatgccccaagcacataaggcgcacccacgctcccctgtatagtgctagtaaaagacaacgcggagaaaaagcatcactcctaaggaggacaacgacaagaccacagagttgcatacatacaccctcccgccccaagttagagccatgacggtccaaaaacat

SEQ ID NO: 68028 - DNA, 327 bp, Glycine max
  Clone ID: PAT_MRT3847_32442C.1
tagcctggattctttaaaaccggccgcctttttttttttttttcacgtaattaaccattattaattcttttaccttaaaactggattaaagccccaaccgacccttactttactgggaaaattaagggacccaaaatggccacctccaaccggaaattctttttttcggaccccaattaccaggaaatttgtttcacccgtttaaaatataaggaattttggatttccaaagattaaaccattatttatcacatcaacccttaaatccttggttgtccctccttcctttagccttctaaaacttccttcctttggttcaaacataag

SEQ ID NO: 68029 - DNA, 698 bp, Glycine max
  Clone ID: PAT_MRT3847_32443C.1
ccacgcgtccgttccgacgaaactaatgtcccaaataaggaaaccaaagttcctgtcgccacgaaatctccaccccctcactccccttcttcctttagttcggactcagacgacgcacacgtgcttttgcattccgaatcagaaaccgaagacgcagaaaaagaagagttccaattgttcactcacgcgcgttatgactacgctcactcggctcgttaccccccgttttctccgccgcgtggctattccggctcgaagccgccgtctccgccgcctccttccggctccgcctgggatttccttaacttcttcgagccgtacgagaagtaccacgtgccttattttcctggcggcggtgacgctgacgtggccgagaatgaaaaggggaaggttgagaaacgtgacgggtctaaatctaaggaggaaaatggagaagcgaagaaaaagaagggtgattcgaaggagaagaaggtggtttctgagaaagcggaagttgtattagtttcagagcaatgtagtgactctgcgaaaggtttctctgaggcagtgaaagagattcagattctgtttgagaaagcgtcggagtcggggaaccccgttttggagatgctggacgctgggaaactccgttaccatcgaaaatttgacctcaacccgggtaagtatggtggtgcatgtgtttttttctgttatttatc

SEQ ID NO: 68030 - DNA, 750 bp, Glycine max
  unsure (1)..(750): unsure at all n locations
  Clone ID: PAT_MRT3847_32444C.1
accgttatttgcagttaaaactggtccatcagtgtcttcagctgcactggggaagatgaatctgactgtgaaagcaatatcagagggtggatttgagtccctttacaagcaaacattcacaacctatccaaacgagaagctcaagaagagctttgcttgttacctttcaacatcaacaggtcctgttgcaggaaccctttacctgtccaatattcatgtagcgttttgcagcgatcgccctttgtgtttcactgcaccctctggccaagaaacttggacatactacaaggtacttatttatccaaaataccttatcaaagcttagttcatttttgcagagaaaaagaggggaatagtaaattaaatgaagggtaaaacgtgttttagttccctcaagatttgatcaaaataggttttagttcatatgttttaaaaattgtggttttggtcctcatatttctaaaatgtgaaatatttcgtctttggtatcatacttttagcatatttgaataccctgtaaaatcatgatgactacctcaaaaccacagcctcaccatggtttttccaaaacaacaatgtgttgcttcagtcactctgatttcaaaattgattttggcccatctcaccgtcactccaaacatgctattcattttgatttgatcatggacaaaattcatcacattttaaaaaatctaaggattaaanattacaatttaaaaatgtaagaactaaaactaattntgatcaaat

SEQ ID NO: 68031 - DNA, 261 bp, Glycine max
  Clone ID: PAT_MRT3847_32445C.1
ctgagcctacttcttgaagaccagagccattcatatcttcatttttctatgcttacaatgtgaaaataatttcaaacgagctcatgttataaacgtgacgggcccatataatttcctgtttctgcgctgcatagctctttaccgaatactctcttttttaaatcacatgcatgttactcttctgaaaatgtctttcggtaatataatctccccatgtcatgtaacacattggtttcgcacatatctgattatacataaagc

SEQ ID NO: 68032 - DNA, 329 bp, Glycine max
  Clone ID: PAT_MRT3847_32446C.1
tggatggaacctttgggctgatttatgtgcttgcatggtcgtgagaagatgatagaagcgcgaagaaagaaagtgagaaaataagaagcagggagaagaacggagagaacggaggaaaaggtaaaagtcgagtagaagaagacaggcacgattgagatccggccgaagaagtattgctcctcccataacggagttatcaggtatttctccaccaccagtacctgtgacggtattactaatatcgtccttcctaaaatacggtctgtataggaccatccgcctgcctgggtgcccgctttacccgcggtcagcgcgtcgacaaaagtgcg

SEQ ID NO: 68033 - DNA, 193 bp, Glycine max
  Clone ID: PAT_MRT3847_32447C.1
cctttctcactctcaaatcaatactctgatcccgttatcttaacagactagcgcggtaaacccatccaacataactttatcgctaccatcaatacactcacatcatattctctatttgctttcaatcataccgctacttaccttcaacagttcaatttcaaccatcgatacatatcttttttcaacccaacca

SEQ ID NO: 68034 - DNA, 255 bp, Glycine max
  unsure (1)..(255): unsure at all n locations
  Clone ID: PAT_MRT3847_32448C.1
tctatgtgagatttaattcacacgtccttgaatcacaatccagtgtggtcatactcctacagtggcggcggcaacaacaaccaanaatattccttccccgttcttccttaccatatctctcctcacataacctaccattttcaccgccatatcattacttctttcaaccctaacaatttattaaagtcccttaaattatcaccctaccgtttctttttcctcacctcttcctactacaacactcttcaccttttt

SEQ ID NO: 68035 - DNA, 228 bp, Glycine max
  Clone ID: PAT_MRT3847_32449C.1
ccgcccttcttttttttttttttttttttagaagagaataatgattgctttttctataaatagcttaatataatcatcactccataccagaaatagcatcctgattctgactcttggacccaactctacccctactcacatagctaaaggcctatcctcttggtggtgggacacacaatcccccaagtccaacgacttcacgaccaaataattcattccccttaattg

SEQ ID NO: 68036 - DNA, 537 bp, Glycine max
  Clone ID: PAT_MRT3847_3244C.1
gttctagcaggtcttggtttcaaacgcgaaacttacatttacttggctggttctcatatttatgggggaaactcaagaatggaacccttcaccagcctttatcccaatgtgatcacaaaggaaaccctgcttacatacaatgaactggaacctttcaggaatttttcttctcagttggctgctttggatttcattgcatgtgcaagtgctgatgtatttgctatgactgactctggtagccaactttcatcattggtatctggattcagaacctactatggtggtgatcatgctcctacattgcggccaaacaagacgaggctagccgcaattttgagggagaatgacaccataagatggaacaggtttgaagtcagagtaaataagatgattcgggaatctcagaaggctggcattaggagttatggccgaagcatttatagaaatcccaggtgccctgagtgcatgtgcaaacaccattagctctagtccttgcattagcagaccagaacacttgttaacataaaacacttttca

SEQ ID NO: 68037 - DNA, 255 bp, Glycine max
  Clone ID: PAT_MRT3847_32450C.1
gattgataagccccactttgaattatttgaagatttttattccgcattcatcttgaaaaactaacgagcagcctgcaatatggcacttatcctcttgtcctttttacatacatagcatatcctttgtagttctaagaatatagtgttttgggggacaactagttgcacactgtcgacgcgaatcctaattgtactaaagaatcccttatgttctacgagggctgaacccttggcctatgatgtattaatgaccat

SEQ ID NO: 68038 - DNA, 344 bp, Glycine max
  Clone ID: PAT_MRT3847_32451C.1
cctttcatcattcctcataatcgcacgctttctcttattctttctctctttttacacgctaatcttcgttttccacaccttcttctgccttggtttactttccagttccacccaaagcagccaaccaaccaacaaacaacacaagtcgctaactaatttcgatcctttttttttcttcttattcttgtttttaccacttatgtctatgtaactacttttattgatatgtgtgtttttgttgttgtgtcttggaattttcagtgtatccaaaggtgaaggtaagacacgacgacgacgacgctgaacttggtctcaaagctttcctctctctatatctgaaacca

SEQ ID NO: 68039 - DNA, 217 bp, Glycine max
  Clone ID: PAT_MRT3847_32452C.1
gaagcccgcggagtccctgcagttcgagctggactcgctggaccacaaccttgcgaataacggggctggggacatcattggaaccatcacccacctctcgggcgtggatgccactgcgtgtcaaccctacatcgaggtgtttgggctccagatgttccgtgagtgcgaactcatccatggaaggtggggcatgctcgccactctcggatgtctcacg

SEQ ID NO: 68040 - DNA, 430 bp, Glycine max
  Clone ID: PAT_MRT3847_32453C.1
aaaaagggcaaacatcagggacttttattacccaagagtttaaactttttccccgggtaaaacataacagacgtttttttttacaagcaacagggggccattcactcacgggggctttctaaaattaaaattaaaaataataaaaaaatttctccaaaaaacagggggggggcgggggcaaaccctaggaccccccaaaaaaaaaaataatttttcccgggagaaatccatgaaccttaaccaaccaaacgccccccccttgttcgttttggcagccttttttgaacacaaaccaaacgggggggttccactaccctgggccccattaccaccacactttcttggaaaaaaaaaaaaggtttttgaaccaaaatccaaaaggttttccctccttatcaaactttggggggcgaaccggaaaaaagggggg

SEQ ID NO: 68041 - DNA, 1048 bp, Glycine max
  unsure (1)..(1048): unsure at all n locations
  Clone ID: PAT_MRT3847_32454C.1
gtacagtggaccccactattccccaggtgcaacgcgggaagaagggaacggaaaggaatcaatcaatcactcctttgactcatcattcattccttcctttctcttcctcctttcatcattcctcataatcgcacgctttctcttattctttctctctttttacacgctaatcttcgttttccacaccttcttctgccttggtttactttcccgtcccccccccaccttccgaccaggtaacagacttctcagtgtatccaaaggtgaaggtaagacacgacgacgacgacgctgaacttggtctcaaagctttcctctctctatatctgaaaccatctccttctccagtgatggaccagaaagttgtctctacggcatccattgtcaaagcaccaaagtgttatgtgcctgtaactattccaagagtacttgtaactgaagaagattctggagacttcagttcggtatctgattcctcaggagctacaggatccgagaaggatgatagtaccgatgaaaataaagtaaatattagagccagttcgatcccacgccctcgtgctgtcatttctagtcctgaaaatgacatgatgatcgggaatagaaacaagaatggagatggaagactttctgcttcaaagaatggcggtgtgttagaaaatagacatgcacactgtaaagttaaatcacatgacgttactgatattcctccagacacaagaaagcagagggagccagggtctaaggataaagctgatcctgtaggaaagaaaaaggtccataaaggcagcgtaaaattcgaaaatgcaccctggaaattttagttctggagaaatctaggaacatgactagttaccagtttttggccatcaaaatgtgatatgatcttaatctaggnnnaggtccccctccccccccccccccccccaaagaaaaagagagaataaaatggtgcatgctttgatgtaaccactccggcatgcttaatactacctcaccaatattttcaatgttcacttgatggatggatgtatgaactgctttgtaa

SEQ ID NO: 68042 - DNA, 793 bp, Glycine max
  unsure (1)..(793): unsure at all n locations
  Clone ID: PAT_MRT3847_32455C.1
cccacgcgtccgcccacgcgtccggcgttgttgattagagacgatggtggtggaatggatccagaagcaatgcgtcaatgcatgagttttggattttcaaacaagtcaaaaattgcaattggacagtatggaaatggcttcaagactggtagtatgagactgggtgcagatgtcattgtcttcagccgccaccagaataatatgaaattgactcaaagcattggacttctgtcttatacatacttgatgcaaacacagcaagacagagttgtagtccccatggtgaattataagtttgatacatcaactggatacttggaaagactaaatgacggagagcattttaggtcgaatttgtccatactgttgcactggtctccatatctatcagaagaagaacttctgaaacaatttgatgacattggaaatcatggtactaaaattattatcttcaatttatggttcaatgatgatggcaatttggagctagactttaattctgatccggaggatattcatattgtcggggatatcaagaagattgacacacattctgcctcaaagatagtaaatgagggacacattgctaaccgttttcattattctttacatgcttacttgtccatattgtacttgcggataccagaaagttttagaatgatattgcgagggcaagtgtgaagctacataacattgcagatgatctcaaatatactgaatttgtcttgtatagaccacagtgtggtagttctaaagagggagtatctgtaacaacattggattgtaangnagc

SEQ ID NO: 68043 - DNA, 294 bp, Glycine max
  Clone ID: PAT_MRT3847_32456C.1
tcggttcaacacagcaacgtttatagacagagcattatggatgttggagctgacccacatgcctctgagaatgtgcttcggtggggaaggcaccgatgatgaccttgtatggcgcacagaccttaagccccacgcttcatgggactactcaattgcagcggtacacgctcattcatcctgggaagaccaagctcaagccttcacctgtctctacgcaaccttagttggagtatacgacggacaaggtggtcctgaagctagcggtttgatcaccaaccatatattctccttgct

SEQ ID NO: 68044 - DNA, 190 bp, Glycine max
  Clone ID: PAT_MRT3847_32457C.1
ggaactgaacctcttcataagtgaacactcatcaagtgatgatgagtcttcaaaaccatgctgtgatctctgcatgtgcacagaatcaatgccacctcaatgccattgtgctgatataacgttgaattcatgtgattcagcttgtgactactgtgattgctcacactccatgtccggcctgtgtcgttgc

SEQ ID NO: 68045 - DNA, 482 bp, Glycine max
  Clone ID: PAT_MRT3847_32458C.1
cgactctagagaactatgctgataggaccggactagggaaaaactatcccacaccggaggaacggaaacacccctttaacaagcaagctcaagctacgcacctttgagtttcccggggtgaggtgcgaagctagttcccgagtaataaagcaagagggcaatcaagcacgcgattgtaggtacgctaagtttatatcttatataggataagcagattggtgtggaactagatcctctgcacttactactcgtcatcatgggtccataaccattctcctaccaatttatgtggttgatatcttgatcactggcataatgcaactgcaattataagattcattttcgagggtcattgcattctttttttgtgggggtggttggacttttcatggaccctttctactctaccgcaatcgaagagttgagaatccctatgtacacttcgggacactgaacctaatgtatttggacgaataacgaaa

SEQ ID NO: 68046 - DNA, 684 bp, Glycine max
  Clone ID: PAT_MRT3847_32459C.1
gctcctgaagtgatgttgggccttcaatatgatgaaaagattgatatatggtctctcggctgtatcttggcagagttatgctctggtgaagtgctatttccaaatgatgcagttgtgatgattctagcacgcatgattggaatgtttggttctattgatatggagatgttggtaaaagggcaagaaacgcacaagtacttcaccaaagaatatgatatttattacgtaaacgaggagactgatcaactggagtacataattccagaagagtcatcattggagcagcacctacaggtcactgatactacgtttatcgactttgtcagatacttacttagcatcaaccccaaaagaaggcctactgcaagacaagcactgaggcatccatggctttcctatgtttactagttctttctctggtggagagttcagtaattctattggagttatcctcatcaatcgtgatctctaaagcttattttccccatatagcaaagcttgcaatcacaattttggtttgtttataaactacaccaagtgaattcactgtctcatgctgtataatttttttgcctgttgatttacagtttgttctttgtacagaatttcttcccattatttttttgccttccatgaattgggaggttatcataataacattttaatgtcaccccatttggttct

SEQ ID NO: 68047 - DNA, 188 bp, Glycine max
  Clone ID: PAT_MRT3847_3245C.1
tgaatacatttattgaaacgcctgaaaatgccgaaagtggtgttgaacccgtgtgggcacaaacagaacgcctccagaaagcaaaagagatctgaaatcattgcaagtaaatgggatgagtatttgatcaaatgcattcaagtgatccctctaaaagggcaattaccaatgaagtatttcagataaaa

SEQ ID NO: 68048 - DNA, 1784 bp, Glycine max
  Clone ID: PAT_MRT3847_32460C.1
gggcaaggctgagaaacacactgttgcctgtagttgtgaagttccattttgcaaaagcagtccaggttcaggaggttcttgcagtttggatcctacaaacttcggataccctaatttgaaggaaatccatctgaatggttttcctttgaaggttgttggggacattaactcttttgactctacttcagagctaactgtgaatcaaagttttgactactacactaaaaatgacagcagtaaggagtacaacggtccatatgacttaactatcaaagttaatcaaaaagatctaccaaatggacttgacacctataaagcacgagatggtggagaattagctgaagagtgccaagatcctgagattactgcagatggagaggatactactgatgatgagctcttaaagtatactcaagaggaagaatacgaagtatttgatctgagaattatacattgaaagtataggactggattcgaagaaaacaaggaactgcccattgtgctaaatacagtcttggctggaaggtattatgtaacagaatatcttggttcagctgccttcagtagggttgttcaggcacatgatcttcagacaggaatagatgtttgcttgaagatcattaaaaacgacaaagacttttttgatcaaagcttagatgaaatcaagcttctgaaacttgtcaataagcatgacccagcagataaacaccacattttgcgcctttatgattatttctaccatcaggagcatttattcattgtaactgaacttctgcaagcaaacttgtacgaatttcagaagttcaagcaagaatctggaggggaagaatattttacgttgaacagattgcagctcattactcgccaatgtttggaagcattgcaatacttgcatagcttgggaattgttcactgtgacctgaagccagagaacattctaatcaaaagttacagaagatgtgagataaaggttattgatctaggaagcagttgcttccaaacagacaatttgtgtctatatgtacaatcccgatcctatagagctcctgaagtgatgttgggccttcaatatgatgaaaagattgatatatggtctctcggctgtatcttggcagagttatgctctggtgaagtgctatttccaaatgatgcagttgtgatgattctagcacgcatgattggaatgcttggctctattgatatggagatgttggtgaaagggcaagaaacgcacaagtacttcaccaaagaatatgatatttattatgtaaatgaggagacggatcaactggagtacataattccagaagagtcatcattggagcagcacctacaggtcactgatactatgtttatcgacttcgtcagatacttacttagcatcaacccgaaaagaaggcctagtgcgagacaagcactaaggcatccatggctttcctatgtttactagtcctttctattggaattatcctcatcattcgcggtctcttctgcttattttccacatatagcaaagcttgcaatcacaattttggtttgtttacaagctgcaccaagtgaattcactgtctcatgctgtatattttttatgcctgctgatttatagtttgttttttgttgtacagaatttcttcccattctttttttttttgccttccatgaattgggaggttatcagaataacattttcatgtcaccccatttggttctaacatcatgtcacataatacaggggttccatgaattcactggatttgaattaatatagtttcattacaaaaaca

SEQ ID NO: 68049 - DNA, 242 bp, Glycine max
  unsure (1)..(242): unsure at all n locations
  Clone ID: PAT_MRT3847_32461C.1
gcgnncggggacncaaccatatacgccttcattttcttgtaatagggaaggcgtgctctgtgcggagatcacatgaaaatcgcctcgctgacatactaactgtagctgctgtagcgccgccatttactgctcctgctactgaagctgatagatgtacccaaacttgatctacactgatgggaaccaccaccaagacctgtgacatcggagctggacaagctaagactcagttagattagttt

SEQ ID NO: 68050 - DNA, 388 bp, Glycine max
  Clone ID: PAT_MRT3847_32462C.1
ttaactcgcacaagcaaccatttacagatataaaatcctaagggtatagggaacatattattaagctggtaactattttgaacaccatgtgaaggagttaaaagaccagtgttattaatgttgatggagaaacgtttaagctgaatacttcagtcatagcatacgacttacttttattattattctgtgtttctatttgttttatttttatgtgtttatacattttttgcttatttccttatctttttattctttattgtttttttatgttgaaattgatttactttacacttttgttaccaatattttttgttttatatgtatttatctttgtttctttatttttttttttattatttttatatttttttttttttctttttttttt

SEQ ID NO: 68051 - DNA, 284 bp, Glycine max
  Clone ID: PAT_MRT3847_32463C.1
cacgcgtccgtccactcgtccaatcttatacttttatttcatcactctcttcaatcctttcttggtctccaaagaattcaatggtgacacttttccaaacatcttttcaatttcatcccaaattacccatgattgatctcgaatcaatacattctaacctgctacccatactaaccagcttaaactctccagaaaacttacacatgacaatgtcaactccttaactatactacagatggtaaaaaatacattcccaaaatcttcaactgaaaactatctcattc

SEQ ID NO: 68052 - DNA, 124 bp, Glycine max
  Clone ID: PAT_MRT3847_32464C.1
atgaattttctggttttgtgacaaagtatgagaaaaagggatttctaggtgattccattgctcactcaggagaagcgattgagtgtgtgattgaacaatagatagaaaataagaatcttttgct

SEQ ID NO: 68053 - DNA, 538 bp, Glycine max
  Clone ID: PAT_MRT3847_32465C.1
atttgctacactaggcactctttcaagcttgaaagtcctctcattggtttctcttggactctgggggaacttacctgaaagcattgctcaattgtcttcattggaaatacttaacattagctcaaatcacttcaatggagccatcccttctcagctttcacttctgaggaaccttcagtcagtggtgcttgatgataacaacttcaatggtgaaatttccaactgggtaggctcactacaaggtttggctgtgcttagcatgaggaacaactggcttagtggaagccttccaacttcattgaatgctcttcataccttgagggtgttagatctatcaaataatcagttatctggggaacttccccatcttaagaatttggcaaaccttcaagttcttaacttggaaaacaacacatttggacctcattttccttctctccccaccaagttggtttcccttgtgcttaggaataacagcttcaggttaagtgtcccttctaatttaagttctttctatctgctccaaaggctagacctt

SEQ ID NO: 68054 - DNA, 334 bp, Glycine max
  Clone ID: PAT_MRT3847_32466C.1
gcagcaagagtgaaaagcgaacagaatggctcccaagggtgtaatcttattggctgtgctatgcttctcagcactgacactgagtcgctgtcttgcggaagatcatcgacttgttatgaacttctacaaagaatcatgctctcaggctgaagacatcatcgaagaacaagtcaagctgctttacaagcgccacacgaacactgctttctcctggctcagacacatcttccatgactgtgctgttcacagttgagatgcttcactggtgctggactccacatgaaggagcttgtctgataaggtaacagatagaaactttgggttgagaaatttc

SEQ ID NO: 68055 - DNA, 299 bp, Glycine max
  unsure (1)..(299): unsure at all n locations
  Clone ID: PAT_MRT3847_32467C.1
cttattccangatctatttacattacctgcataactaactcgagcagtattactaaagagggcggatgagaaggaagattttgggttgcgtctacacttgtgctatcctgaaaaccctggaacttatattgatatcattctagtttgatcttatgattctaatcacttgcttcagaaaccctatcggcacgaccctgttagttcttaagcttgaatatcactcttttatggaatccaagtgaaccgtgtaccttttgcggtcgatagctaacaggaatcttgtgtgtcatctgcaaaca

SEQ ID NO: 68056 - DNA, 115 bp, Glycine max
  Clone ID: PAT_MRT3847_32468C.1
tcctttgatgcgtacattctgtattcatagtgacgaacttctgaagagatggcaaatcatccttcgacacactctcattattacagcgataggtaatatgatactctcactggtc

SEQ ID NO: 68057 - DNA, 378 bp, Glycine max
  Clone ID: PAT_MRT3847_32469C.1
gcgaacaaaatggtggtgtttttttttttttttttttttttttttttgaaaaaaaaaacaaccttttttttgggaaaaaaaaacccatgggttgggcggctattctttagggggggggcccccaaaagaaggtttttgggttttttcccacccctaaagccgaaggttttttcgttttaaacttttaacaaattggccttgggtttaccccttacatttccaggttccccccttgttattgcccgaatggttacaaatttttttggaggcggggggtgttttccccccgggccttaaaacggtgcgtggggggggccaaatttcaaagcaaccgccaacccctgggttttttggggggcctcaggcccccaccttggg

SEQ ID NO: 68058 - DNA, 153 bp, Glycine max
  unsure (1)..(153): unsure at all n locations
  Clone ID: PAT_MRT3847_3246C.1
gtcctgcatgtntctttttgggannntgganatgtagnantttgtatacntggaaggncagantatgtctgtgtctgtggtactatttcactagnttctgncagacatnncgttncangcanaagatcgtaacttatngtgctgtaatacatg

SEQ ID NO: 68059 - DNA, 248 bp, Glycine max
  unsure (1)..(248): unsure at all n locations
  Clone ID: PAT_MRT3847_32470C.1
ggnaaggaagagaagagaagagaaggagaaggagnanggnttggtanttggttacttagttngtntnantaacgacggcgcactacacgatccccacaatcnagagggtacaagggcgatgncgagtacnattacctctnaaactnggtcgngccnggantttctggggtggggatccaaaccngctttcgggttnancagnnacgagttcaattggagtccnaantccccccatnagggggaanttc

SEQ ID NO: 68060 - DNA, 196 bp, Glycine max
  Clone ID: PAT_MRT3847_32471C.1
ggagaaaacgcaacacattagacgagtacatttctaccattcagaacgacgcgtgccctttcgaactcttctagagccacctaaccatttaccgtccaataattacattatcatcattagtaatatgcactttgcctctaaacgcatccatgccttccccttcagttcgtagactcacaatggccgcactatccaa

SEQ ID NO: 68061 - DNA, 255 bp, Glycine max
  Clone ID: PAT_MRT3847_32472C.1
ataaccagctagacccacgcgtccgcacgaacgtcctcacactccttttggtttatgatctattataaatcacataggatgcgacatttatattgccggaccctaattctcactcactgataatccacatcttatttactcaatactctaagcttaagctagactcacaaaacgcacatcatacttacctgactgaccatctacttaaatatcgattcatctatatatgataacatacatgactcactatatata

SEQ ID NO: 68062 - DNA, 371 bp, Glycine max
  Clone ID: PAT_MRT3847_32473C.1
gttccagggtgtaaaaactaacacactctcaggaattgggacccaacggtcataaacacccgttaaggccaggtctattacggggatcaagagactgatcctcattcatggaaacccatgcaccataatgctgccccgcacaagaaaacttgctattatttgtccaactagaggggactgtgacaggcaggatttcaaatccatagtcaacctactggccaaaagtgaggtgatgactctactctaggaccttcaaaaagtcaaatggcccctccacaaattggtttctttgcataccgcaaaacgaagagagaagtcctcttttgcttccactcccgggggcgcccccgctgagcaaatttccttacaat

SEQ ID NO: 68063 - DNA, 456 bp, Glycine max
  Clone ID: PAT_MRT3847_32474C.1
aatcgcgtccgtgtcaactctaggacttaaggggcttcttcttatcaggtgcagccgtattttcaactgcacctactacagtcataatccaagggctgaaaaaatctcaacatatttatttgaatattacaacataaaaccaataaataaaggtaaggatactctgcaatttttaatccagaagatagatgtctcagaatttcattatcctgggtgttcaaaagatattcaacaaacaatagctgttcaaatgataacctcatccttaaggtaaatttggccacttgctgtagaaaactattacctttctgaatatttgtcacgactcatgagtattactgggaagcctttacaattgttctcattatgaatgtttctagaatacttctggtcgtttgaaaaatcttaaataatgttattacttgaataaaccagtttctctaaagagaagccaag

SEQ ID NO: 68064 - DNA, 161 bp, Glycine max
  Clone ID: PAT_MRT3847_32475C.1
ggctcgagattattgcgttacaagtggtttcttgtacatagtgataaaaaggctgctgattggggtgaacattcttcagatcctgccacactgtagtgcctaagtttggtaaagtctaaaatacctgttgccaaaagtttccactgttcttcaaagtgttt

SEQ ID NO: 68065 - DNA, 740 bp, Glycine max
  unsure (1)..(740): unsure at all n locations
  Clone ID: PAT_MRT3847_32476C.1
cagnnngtcctcaataaattggcnnagagtantnnnaagatcnnngnattccttaaagacaaacgtttagagaatgttaatcgagctcannnnactcttgccnacaagagaagtcatnnnatcaaagctgtagctgattatggtatctatcataataaaaaggtgccggtggagttnnnagcgctactcttcacggataaaatggctgcatttgaagcatgtaccggctcagtggaaggtgagaagatagtttcaaagaattcgtggcctcatattaccttgtggactgccgaaggtgttgcagccaaggatgccaacatgttaccacagttgcttgcagaggggaaagcaaatcggattgacttcaatcctcccatcaatatatctggcacactcgacttttattgagttgaattccttttgctactcatctttctaaaataaaaccaactgaaattaaggtggtcatgtgcttttatttgttcaacaaaatcataccctttgctggcatacaagttggatccgatatttagtgaagatagatgatggagaaaaattttgtaggagcgagcattttctcctgaagaactgtgtacatatatatataggctttttagaaagccgagtatggtttctggagtctcattgccgaattttcagcatgagggctttcatctgtgtggtagactggtagttcatttcttgtttatttgcttcaatgttacgctctctttttactt

SEQ ID NO: 68066 - DNA, 289 bp, Glycine max
  Clone ID: PAT_MRT3847_32477C.1
gaacagagtctcctctctacaccttcgctgcgctgcagctcacaactgcaacttcgcacagatatacatatatattactctatggtcacacatagttaattgtatatattactactacgtagctggcttttaataggtcgtatgtaggagtaatcgatgaattcctgcatatatcgatgaagccgatttatgagattgatgttcctgtaatacgactattaccaggaaaagcgcgaagcgaaagcagcagcacctactgctcgagaagccatactgaggaataatgatg

SEQ ID NO: 68067 - DNA, 371 bp, Glycine max
  Clone ID: PAT_MRT3847_32478C.1
ttcaccgacataaacggtatacgcatatttatatatgaatattgtaaagaaaaccatttcctaatatgattcgaagtgctcctgtctgtaacaattgcactgagcatatatatataatattaaaaccatttcacactgggcattccttgcctaattccacgcctttctccttctcttcagcaccttctattccttgtccattgttattgatctctttaccgataactgggtacacttcacacgttcccaacgggttcaccacgacaacgtttttcattgcctctattgcatgctcctcctttgtaacaacttccttattgtggttttaccattccggtaaattgcatagagcagcatctgaagtagtccca

SEQ ID NO: 68068 - DNA, 802 bp, Glycine max
  unsure (1)..(802): unsure at all n locations
  Clone ID: PAT_MRT3847_32479C.1
cttttttttttttttttggatgaacantacttgacatcatttggaaatatcttatatattttgtgccgaaaacaatctcagattcaaagtgactaatcttccagatataaaaatcaaacttagttatctaccattgtgttgttgtttgatcctctcttattgtttgattcgtcaaaacaactgattggttcagcatatttcttaacatcttttcaacttttcactgcacttagctaccttaatcatatttaaattagccactcacctttttattttacantagcgnaggccaagtggctaattttacaacaagctagctcacctatttaatctctctcacncttatagttaaatcccgtcatcttaggggaatgaagtagacccaagccgggcntcncccctaataggctccgaacctgtgaagttgtaggccctgtcntantccattgcgtggagcccagcccaattgactcggttgtcggtccctgaaccaggcccatagttagcatactctccgtggtacggggtgtcctggccttggtccccagaccactctttccacccccttggggtccttttttggtcaatgtaggactcttgggggtcggtgcgggaattgaccctccgtggccttccgggtagctcttggccctaccaggattgggggccaggtttgggggggcttggatttgaccgttttgggttggattgccagggccttcttcggggagtctctgggctgggcgggggtggccggggatttgccccagctttggcttccttgggtgaaggagggaagatt

SEQ ID NO: 68069 - DNA, 411 bp, Glycine max
  Clone ID: PAT_MRT3847_3247C.1
caaagccataaaaaaaggtttccaaaggcgggttcattttcatcggggggtttaaatccaaaatcaaaactgggcccaccttttatggggaggctggtttttcccttatattgtctgaaaataaaaaaaccttaattccatgaaacactgggacattaatacaaatttaatcatcctaacaaaacatgtttttcaaaatccctagtgaaaggggcattcttcattaataaaaagttacatggtcctaggttgttataaaaagactcggggaaaaacttggagggagttaataaaaataaaaaagtttttaaggatcataaacatgtgtatttttaaaaacactgtgttgtttattaaaaagcatcttttacttttttgtggtccaactttggggtctgggaatgaaaggcc

SEQ ID NO: 68070 - DNA, 258 bp, Glycine max
  Clone ID: PAT_MRT3847_32480C.1
aagacgaaactccttggatcgagattatgcaatgtccatgatttccatgtctgcagggatctcctaaatgcttctttcacgttcatcgtcatgtttacccttcctccttcctggaagtagatgcccctgcaaaatgttaaggagtttgtttagaagtgttactttcgattatagaagacttttttatttttatttacattatttaacgcaacatatgtaaaatcatttcaaaaaagtgaagtacattttctaaaaaga

SEQ ID NO: 68071 - DNA, 508 bp, Glycine max
  Clone ID: PAT_MRT3847_32481C.1
aatgggtatctcaagggacaactggcacaagcgccgcaagactggcggtaaaaggaagccttaccacaaaaagagaaagtatgaacttggccgtcctgccgctaacaccaagatcggccctcgccgtatccacactgtgagagtccgcggtggtaacaaaaaatatcgtgctctgaggttggatgcaggcaacttttcatggggatcagagtgttgcacacgtaaaactagaatcattgatgtggtgtacaatgcttctaacaatgaactggttcgaaccaaaacccttgtgaagaattgcattctcctggttgacagcactcctttcagacaatggtttgaggcccataatgctttgccactaggacgcaagaagggaaccaaacttacccctgaagaggaagaaatcctgaacaagaaacgatccacgaaaacacagatgaaatgtgaggagatgaaaaagacagcaaaattaacccactttctggagaacatttcccctcaagca

SEQ ID NO: 68072 - DNA, 462 bp, Glycine max
  unsure (1)..(462): unsure at all n locations
  Clone ID: PAT_MRT3847_32482C.1
gcccattatatgggaagcttttgcaagactagttataccatcaaactgcttttgacacactatacagtgcagacagaaaagcatgacgatgngtctactcgngcgaatacccatntagacagagccgtatcctctacctctgtaatgcacgcattaccatatgcaatgcgtgtaattctatattgcacctcctcaaccaattaccattaaaaaaaaaagggtcatgtgaaaagactctgataacatttaagaaccatatacctattattacaaaatgaccatatcctgctccagatagacagataattctattgactgattatattatcaaaaacgtgatcaaaatatgctagggactccttcatcttacaaggatatacttattaatgcaaagactggcttgaacaatggaccaccgaatatgccgattaatactcacactaattatatactctgcttgat

SEQ ID NO: 68073 - DNA, 394 bp, Glycine max
  Clone ID: PAT_MRT3847_32483C.1
gtggtcagccactttcaggtcctgatattggtggatttgctggaaatgcaacacctagactttttggaaggtggatgggtgtaggttccttgtttcctttttgccgagggcattctgaagctggcaccactgaccatgaaccctggtcttttttattttgctcatacaaggggcactccagtttcaacccctactttctttgctgatccaaaagatcccagtctgaggaaacttgaaaattcttttttgcttggtccagtcttagtgtatgcaagcaccttacgtagacaggggttggataagttggagattactttgcctaaggggatatggtcgaaatttgatttcaacgatgcacatccggatttgccagctttatacttaaaaggtggct

SEQ ID NO: 68074 - DNA, 284 bp, Glycine max
  Clone ID: PAT_MRT3847_32484C.1
cgctgccacgaacaatactgccagccactccaggtcggaccgccatatctcataccttgcctgcactgccccatcactcttcgtcacctccgccttcctcttccaaatctggtccgcataatctcccagatccgcaaccgggcccacggggagcaactaatccatgaccagcgacgcccacagactgttcatcagctacgccagcctcagcgcgaacccattgagcgcaaagtccgtcctgattggcgcggtcccattatccgcgctccatagatgctcgggat

SEQ ID NO: 68075 - DNA, 354 bp, Glycine max
  Clone ID: PAT_MRT3847_32485C.1
gttttcatcatctgtgacttcgccaactgaaatgggggatgttttggagattctgtctaccactacagagcttgctcaactgccagtaccacctgtagaggaacaggttgagcgtaagttaattaatcacctgaggttgtcctttgaaaaccccagggttacagatccgaatgctaaagctaatgcttggcttacggcccatttctctaggctattgggtggcgtgaaccttgcatcggaccagattgacgtgctatatttctgcaactagactgcttcaggctatggtagatgctacatcgaacaccggttgtctgagcctgaccttacttgctatggatgacactcaaatgc

SEQ ID NO: 68076 - DNA, 2101 bp, Glycine max
  Clone ID: PAT_MRT3847_32486C.1
ccacgcgtccggttaaagacttcattcccaatggtgttgatggtatatggaatgatatgaatgaaccagctatctttaaggttctaacaaaaacaatgcctgagagcaatgttcatagaggagatagtgaacttggaggttgtcagaatcattttttctatcacaatgtctatggtcttctgatggcaagatcaacttatgaaggcatgaaactagctaatgaaaagaagcgtccttttgttcttacgagagctggattttctggcagccaaaggtatgctgcaacatggactggagataatctttctacatgggagcatcttcacatgagtatctccatggtacttcagctgggacttagtggtcagccactttcaggtcctgatattggtggatttgctggaaatgcaacacctagactttttggaaggtggatgggtgtaggttccttgtttcctttttgccgagggcattctgaagctggcaccactgaccatgaaccctggtcttttggggaagagtgtgaagaagtttgccgattggcattgaagaggcgctaccgtctgatcccacttatttacactcttttttattttgctcatacaaggggcactccagtttcaacccctactttctttgctgatccaaaagatcccagtctgaggaaacttgaaaattcttttttgcttggtccagtcttagtgtatgcaagcaccttacgtagacaggggttggataagttggagattactttgcctaaggggatatggttgaattttgatttcaacgatgcacatccggatttgccagctttatacttaaaaggtggctcgattattcccgtgggcctccctcatcagcatgttggagaggctaatccttcagatgacttgactctttttgtggctttagatgaacatgggaaagctgaaggtgttctatttgaggatgatggtgatggatatgaattcactaaaggcagttatttattaacacattatgtggctgaacttaaatcatcagttgttacagtgagtgtccacaaaactgatggatcatgggaaagacctaaacgccgcttgcatattcaattattgctgggtgggggtgcaatgcttgatacatggggaactgatggagaagttctgcaactaattttgccttcggaagatgaggtgttgaagctagtatctactagtgagaagaattacaaggaccgtttggaaaatgcaactccaattcctgatgtagaagaggtttctggacccaagggaacagagctttcaagaactcccattgaactgaaaaatggtgagtggaatcttaaagttgttccctggattgggggtagaatcatgtccatgacacacattccttcaggaacacaatggctccatagtaggattgagataaatgggtatgaggagtatagtggtatggagtatcgttctgctgggtgttctgaggaatattctgtcattgatcgagaaccagggcttgtggtgttagagggtgatattggtgggggattggttcttaaacgtcatatctatgttccaaagaatgttcccaatgccatccagatagactctagtataatagcacgaagtgttggagctggttctggagggttctcaaggttggtttgcttaagagttcacccaacatttagtgttttgcatccatcagaatcttttgtttcatttacttcaatggatggatcgaagcatgaagtctttcctgatggtatggagcaattctttgaaggagacctcattcctaatggcgaatggaggctggttgataaatgtcttggcttggcactggtgaaccgatttagtgttagtgaggtattcaagtgtcttgttcactgggattgtggcactgtcaacctggagctttggtcccagagtaggcctgtttcagagcaatcccctctcagaatttcccatcagtacgaggttataggaatttcataataatttaactgatcatcaatgtatctagaatgttcgaaacagtgtagtgctgttacaaaacctgcacctaaaatctatgcataaaaatttcagtgttgtttccaaaaaggaaaaaaacaaag

SEQ ID NO: 68077 - DNA, 302 bp, Glycine max
  Clone ID: PAT_MRT3847_32487C.1
aaaataactatcagcaatcattgaaactgaaaaattacttttttttttctgtttacattttgttgtttcggctccttatctaaaatagacggccccacaaacatatttttccaaatcatttaaaaagtcattcattacaaattcttcttcatattggctttcttgtacaaagaaatatctttataataaaccattccaacacttttatacaacttcttattaacatctactgcattaatttccccttacaaaaatttcaaccatcctcaacttaatcaaacactctctgtcaaacacataat

SEQ ID NO: 68078 - DNA, 246 bp, Glycine max
  Clone ID: PAT_MRT3847_32488C.1
gtacacatatgagtattgtttaatattacaattgtctacattgtcagcgaaccatagtttcttatttgagattgaatacaacaattaatacagtttggattaatcgttgtaagtgaaaacatacatgcagcaaaaagtagcattgtattgctgaaaatatagaattgagtcagtgttttatacagtaccacattaaattattgtctcctcgaccccgactccccaacatgtccccatacctgtacc

SEQ ID NO: 68079 - DNA, 158 bp, Glycine max
  unsure (1)..(158): unsure at all n locations
  Clone ID: PAT_MRT3847_32489C.1
anagnagagananagtngcatgnacgcgtangtaagcncggaattaggatcgagnggaaaagnttgtngcagcaaaatgtcnnaaattcatgaannnannantaaatcangnactagccanaatngaaganggaaaacnntnnaggnccttnnacaca

SEQ ID NO: 68080 - DNA, 366 bp, Glycine max
  unsure (1)..(366): unsure at all n locations
  Clone ID: PAT_MRT3847_3248C.1
aacacatatgacatatatagttacaggtatgaaatatacgtttatgaagaatgcaagctcagctccaagcgtgtcatactacgagtacgagtacatcgtaattggtggggggacggcggggtgccctttagcagcgacactgtccgaaaaacacaaggttttggtgcttgaacgaggtccttcaccttatggcaaccccaacatcaccaatttggatgcttttggcgctgcactctctgacacctgccctaactctccctctcaacgcttcatctcccaagacggagtcatcaactccagagctcgnnncttaggtggcggaagctgtttgaacgccgggttctacactcgcgctagcccttacta

SEQ ID NO: 68081 - DNA, 532 bp, Glycine max
  Clone ID: PAT_MRT3847_32490C.1
tcttttttggtgaagagaagactgagttagtaaacacgctcgctcggtcttcttttccaatggcgatttccgatgagcctgaaactgtagccactgctctcaaccactcttccctgcgccgccgtcccaccgccgctggcctcttcaattcgcccgagacgaccaccgacagttccggtgatgacttggccaaggattccggttccgacgactccatcagcagcgacgccgccaattcgcaaccgcaacaaaaacaagacactgatttctccgtcctcaaattcgcctaccgtccttccgtccccgctcatcgcaaagtgaagagtcacgcgggcctcttcaacctctgtatagtagtccttgttgctgtgaatagccgactcatcattgagaatttaatgaagtatggttggttgatcaaatctggcttttggtttagctcaaagtcattgagagactggcccctcttcatgtgtttgtaatgagtgtaatgaattccctaaagaattaactatgtactatgtaattattt

SEQ ID NO: 68082 - DNA, 775 bp, Glycine max
  unsure (1)..(775): unsure at all n locations
  Clone ID: PAT_MRT3847_32491C.1
cggaattcccgggtccgtccgggcgtccgagaagagaagactgagttagaaaacacgctcggtcttcttctccaatggcgatttccgatgagcctgaaagtgtagccactgctctcaaccactcttccctgcgccgccgtccctccgccacctccaccgccggcctcttcaattcgcctgagacaaccaccgacagttccggtgatgacttggccaaggattctggttccgacgactccatcaacagcgacgccgccgccgtcaattcccaacagcaaaacgaaaaacaagacactgatttctccgtcctcaaattcgcctaccgtccttccgtccccgctcaccgcaaagtgaaggaaagtccgctcagctccgacactattttccgtcagagtcacgcgggcctcttcaacctttgtatagtagtccttgttgctgtgaatagccgactcatcattgagaatttaatgaagtatggttggttgatcaaatctggcttttggtttagttcaaagtcattgagagactggcccctcttcatgtgttgtctttctcttgtggtatttcctttcgctgcatttatagaagttggagttggcacagcagaagtgtatacccgaaccaggtgttgttgttgttgtacttcatataatcattacctcagcttcgcttttctatccagttttagtaattctcaggtgtgattctgcttttctatcaggtgtcacgttaatgctatttgcttgtggtgtatnnntaaaattggtgtcttatg

SEQ ID NO: 68083 - DNA, 384 bp, Glycine max
  Clone ID: PAT_MRT3847_32492C.1
aaccgccaagaggaggcggaaaaatctgaagcctgatgttagtcagtgagagtattcggcattcgcaagacttttggtaaacttcacctacaactctattatacttcaatgaatagagagaaacggaggtgcatgccattttgcaagaactctctaagcacttgttattctcggcggatgtcggcataaactggaatttggtggtttatttatttattttctttaatatgtggagaggacatcatcttcaatgaattgaagggctttcaggattgtatataaaaatcaatgaggttggaagtggcagaactttggcaaaatttattagaacttgaggttaagtaaaggtttttttcttgacgatttggtattcataacaacaaa

SEQ ID NO: 68084 - DNA, 160 bp, Glycine max
  Clone ID: PAT_MRT3847_32493C.1
gcttcaccgaatccaaggatctaacagtgatagggataattttttctacctacagtattcgtaaattggtgcttcggatgagaatgctgacacattcccatatgttacatcaacgattataggactccatgcttaatcatacatcagcctatgtattctc

SEQ ID NO: 68085 - DNA, 460 bp, Glycine max
  Clone ID: PAT_MRT3847_32494C.1
aaccactagaggaacatgaaatgaatcattgtctaaacttatcaagcactgcgcaattacacaggagtgatggctcatggacacgcgaaattgaatatctacctctagcaaaaaggctatggttaacaagaatctttccaggatgaacccccttgataggccacttattttaatgcagaatgtaaagaacggttacagccaggacgggcgggcacccaacttgcgcttgcactcatcatcacctgcatggcaatgttgatatgcaccatacggcgcaaacctactgtgtaaggagtaacatgcaataacctgccagtcatgctagcatagttactgagagaccagcatgttccaaacttttcaaatgcatgactatcctcatgcaggtcactaactgcacatgttccagtcctggactcaccatcaatgattcttgatatggatgacatctaagatgcac

SEQ ID NO: 68086 - DNA, 281 bp, Glycine max
  Clone ID: PAT_MRT3847_32495C.1
gatactgcatacttttccggctttcaaaggaggggggacaatctcacggcatccaaacttgcgtaacggggattaaaaatcaatacatatccccccttgttttttaaaattccattaccctgcaaccaactcggggggtttaaaacaaaacaagatttgggtctgcacattaagcttttattgtaaaattatacgcccaaatctaaaatacgctggtcttccttgtatgaaagaacattggtacccacgcataaaggtcatgcaaaaggggtctctttaaa

SEQ ID NO: 68087 - DNA, 388 bp, Glycine max
  Clone ID: PAT_MRT3847_32496C.1
aactgaacctaattcctggattattcctggtgataagcctagaagttttaaattgaaagagttggttgccaaggggaaaacactttatgttagtggaaaaagaaaattaagacagaagattgttgctgatgttgtcgaggcattaattggtgccttcctcagcactggtggtgaaaaggctgcattgttgtttatggattgggttggtattaaagtgagttttaataaaataccgtctgacagacacttcgacctccacccggagaagctggttaatgtcagttttctagaatcgtaattaaattactcattccatgaccgtccccttttagtggaagcctgtgacccatggtctatacactgctgcctgaagtttcttgaagttttc

SEQ ID NO: 68088 - DNA, 431 bp, Glycine max
  Clone ID: PAT_MRT3847_32497C.1
cccttagttaaatccggaattcggtccaaaaaaaaactgttttaagccgtaaaacttttgatcaaaggttgtaagtaatttttttttaaaagtaaaaacataacggtttagttccttttaacattaaaaacataaaaaatgatgaattcttagaaatgaactaaatttacacaatttttaaaaaattgcgttcaactttatcaatatgaaagtataacaactttgactgcgtttgaccaaaggtacagaaactaaaacaacatttttaatattaaaaaaaaatgattacatttcacataatttgaatagttttatctcattattttccgttgagtcatgctcgagtcacttgacattctttttaataattgaatttcaatactacgaaagtatgctttgtttgtgttttgatatatcaattcatcactact

SEQ ID NO: 68089 - DNA, 486 bp, Glycine max
  Clone ID: PAT_MRT3847_32498C.1
accggtgccagcagaccaccgaacgggggacgcaccattagcacgtgggccatactagcgctagatacacatatcgtgagctccctcaaacgctgatgctagctcttgatacttggctttcacatctaaactgttatcaatgtgctttgtgtgcatgaccgtccttagattcatagctcaaccctctttaatacctgagccgctagttacttactgtacccaaataggctaatacctcaactcctaaagctttaacacagcatcctacaaagaaccccaactggtgccagtgaaactaccagatgatcttggcggagcgctactgagggtggaactggtacaaaagcctgtgtcactaacctagaaaccacatagttgtggctccagtcagagcaggctttctctgttatatggagagcacctggagatgactgcatctggagagcttctctagccaacactgtagctgaagtctccacattgggc

SEQ ID NO: 68090 - DNA, 396 bp, Glycine max
  Clone ID: PAT_MRT3847_32499C.1
accaggcgtccgcacaccgtaaagccaccatttacgctggtgccatttgtggtctaaacgaggatcctaatcatcagcgagcctaccgcatgctgacatagctaatggactcgacaaaacggccactagctctggggagaacaatgctctgacttttgatctccgtggaggaactgtcgaagtctctctctctcaccatccaggagggtaaatactaggtcaaggccactgctcatgatactcactcgcgaagcgactattttgacaacagaatggataaccattatgatcatgaattcatgaggaaaaacatgatcgaaattagtggaaatgccagagctccgatgaggttgagaacagcatgtgagccgccaaagaagactctttctttcactg

SEQ ID NO: 68091 - DNA, 471 bp, Glycine max
  unsure (1)..(471): unsure at all n locations
  Clone ID: PAT_MRT3847_3249C.1
aacggtggcgcctaactaaatttcaattgcactctacattgaatcttgttagagaagagagacggtcaagcacttcactcacatttctagggttccattttgatctttgcgatgcagaagaagctaggattcccaatctctaaagcctcgaccaatttagattgttgtacggttccatttcggcaacttcgaagccattatctttgttccttcctcggattcaacttggaagttaggagtttcaccaacctgaagctcactgcaactttcacgaacgaagattctgtcaaaaatttgtatcgcaatttgacaatgcttggctgatttcttcatgtgcaaagaactcaatgacgccacatgaaaaagaggaataatcgccgatttaaatgatgccggaaaaaacgatgttttggctgctagggttcttccattctaaatcgatccgnattcatatatgtcttctcctgctct

SEQ ID NO: 68092 - DNA, 358 bp, Glycine max
  Clone ID: PAT_MRT3847_324C.1
gtcaaggtaaggtaagaaaaaaaacaagacaacatgggactccaacattttactacgtgcgttttgttagctctttgcattctaagccaaggtttggcaaagggtgctcatggctttgcttgcaactggggaacgcgtttaacacatccccttccacctcaaataaccgtgaaactcatgaaggacaatggattcaagcaagtgaagctctttgaggctgatcccgcagcactcaaggctttaggaaattctggcattcaggtcatggttggcataccaaatgacctcttagcaacccttgcttccaatgtcgatgctgccattgcatgggtcaacccaaaacgtgtcctcttacata

SEQ ID NO: 68093 - DNA, 389 bp, Glycine max
  Clone ID: PAT_MRT3847_32500C.1
tttttggttttttttttttttttttttttgcccctttcaacccgaagttaaaaaatgtgtacaaattgaagagtaagtacaactgtacaaggattaaaaaacttttttatagttcaaggactaaattacagaatataaaactttgggactaaaatcaaaattcaacaaatctaaattacacaatatagagactaaaacatattaccctaattaatctattcaacgaaagttggtgtttaaatggaaattctgatcaataaatctaaatggaaatgatttgtgttttgcactcctttcctgaaacttggaacatccaatcagtcaccacgcaaaatctagggctcatccttgcattcgcacaactgcacgccaaggcatgcgtcagaaat

SEQ ID NO: 68094 - DNA, 357 bp, Glycine max
  Clone ID: PAT_MRT3847_32501C.1
tttaaacatacgtttttactttaaaaatgtaaaaagcaagaaaaaaaattctaccttaattaaacctgaactgcaaaactgcaactcttattgagcggcaatctaactacctctatactccattatctacactgtttgtgcagatcactaaagatgtcttgtatgcgttgttttctaatttaatgaacatgatttgccttggcgaaacccaaataaacccaattttaagcaaaaaccatttctctctgctaatgaaaaattgaagaggccggcaccgttcccatttggcctccctttcccaaccttaccgacatttgggccgccccccgccccggcccaattaaatccggtgggggg

SEQ ID NO: 68095 - DNA, 376 bp, Glycine max
  Clone ID: PAT_MRT3847_32502C.1
aagctgcaagcacaaaaggcactaagcgagaatacccgagcttgtcacacctgccagaaggaatcagacacactcctaaaatgcacacgatgcggcattagttggtactgcaataaggcttgtcaagagattggttggaaagataagggtcataaggacgaatgtcggttgctgaagaacgaaactctgaagcaaatccttctctttgactggaaacactttaaggacttcgtgcaattcccactttctgcttgagggctgctcacgggtgaaggaggttcaaagggttgttagaagcggagcttcttgtatttttttcaacattatgaagctttgtcatggactatcagattaggtatagttgatttatccgccg

SEQ ID NO: 68096 - DNA, 452 bp, Glycine max
  Clone ID: PAT_MRT3847_32503C.1
ttttttttttttttttttttttttttttttttttttttttttttttttttttttttttttttttttctttttatttatgttttatttttctttaaaaaaacccaaaaacctagaaaggggacggggcaacccagggaacctttacaacaaaaaaaaaaagggggccccgtttcctaaaaaggggacacccccgagagggaaaagggggcccaaaaacttgaaaagaatcatttttggcccctaaagggggggaaaaaaacctgaaaaaaaaaaaatgccaaggcaccggggggcccccttggacaggccccccccaaaatgggggcccgaaaagttccccaatgggtgacaacactcccggatttgggaaccaccccattttcccccgggggggacaaaaggggtttaggaaacccacccaaagaggcagttttttatcccccaattttgag

SEQ ID NO: 68097 - DNA, 245 bp, Glycine max
  Clone ID: PAT_MRT3847_32504C.1
agtaataataatatcctcctttaagttaaaagtagattaatgatattgtctcgtaagattagctagtcgacccatgagtgtctttaggataatgatacgagacactttgaatctgctaagacgtactattgcttcaatatactcttgtctggccttaaattctacgaactcgcccagtacatacttgttgtcgttaagctgacacctatagacaatctcctttgtcagtgaaaaactatgatttg

SEQ ID NO: 68098 - DNA, 564 bp, Glycine max
  Clone ID: PAT_MRT3847_32505C.1
acgacagaagggggttgcaatcggacgctgtccgggggcaaaatgaagtttgcaaaagcatccccactctttctttttgcattcagtttgcggtcgactattagatttgatcttgtaattcgtgtactgcgagtcggacggaaaatcaaacatgctcttagttacttttttttcttttttaatttaattttgatgtgattgtaatgtctttggtgaaatgcttagatggttattcatttttattccttgctaatgccaaccttttttttttcccacttgatgagacaggttcatctacagtctcatgggatttggaatattggcgttatgcattactttcttgggttgcactgcagttcaaatgatgaatggttgctgcttgagcctctactctatactcgaggtggtgctgcttcttctggaagcttgtctggtgggattcattgcactcgatagccgattgggaaaaggatattgcatttgatccaactgcgcaacttgactagctgcaagctttcattggagataatatagatacctgcacatgggttcggattgctgagc

SEQ ID NO: 68099 - DNA, 217 bp, Glycine max
  unsure (1)..(217): unsure at all n locations
  Clone ID: PAT_MRT3847_32506C.1
gtacgacctcgcaggttatctcggtccggnnaattcccgcggtcgacccacgcgtccgcaatgatggaatttagtttctaaggatgtgaatttgtagagaaggaaacaagagtattttgtgatccacttcatctttggtgaaaattctcttttatgtttatgtctctgatgaatgtatggattttcatgaagagataactcagataagtttccatct

SEQ ID NO: 68100 - DNA, 491 bp, Glycine max
  Clone ID: PAT_MRT3847_32507C.1
gaatggttctatttgttgtgtgtctctttctcctttcatcttggtatcgggttgcccggaacagcatatgccaggaggcagcatttatggctcagtggtgcaaacgaagtagacagcaaaactttttcaagagctattcttgccaagagtgctcatatacagacagtggtgtgtattcctgtgttggagggcgtcgttgagttgggcacaaccgataagatcgaagaagacctaaatttcatccaacacataaagagcttcttcatagatcagcagcctcctcctcccacggcaaagcctgcactgtcagagcactccacctccaatctcacttcttcataccctcttgttattgttcctgtcactgctgccgccaccgccaataatgttctcatccaaaacgacatgaacattgttgataaaggagaagctattatattgaataataataataataataccgaagcagaattattagcagaccctaacag

SEQ ID NO: 68101 - DNA, 261 bp, Glycine max
  Clone ID: PAT_MRT3847_32508C.1
ctcccggcacgttccacttcctctcccgcggacgcttcctcttccccactcccctttctctttttcctcttcctcttcccctctccacaatgcgacggtgccgccaaattgatgcaccttcggcggtgcctcggtgacatgcatctgttcaggtatttttcttcctttgcatctttttcttgttgcttccctcccaaacccgttaagctacttttgggatctcgagggttcttatgcaagatccattgtgctacactggag

SEQ ID NO: 68102 - DNA, 286 bp, Glycine max
  unsure (1)..(286): unsure at all n locations
  Clone ID: PAT_MRT3847_32509C.1
aacctctttcttcgctggttcagtagctgaggagatgttccattggcaagtaacaataatgggtcctgctgatagtccttatgctggaggtggattcctagtcactattaacttccctccggattatcctttcaagcctcctaaaggtgcctttaggactaatgtgtttcacccgaacatcaatagcaatggnagcatttgtcttgatatcctgaaggagcagnggagncctgcactcaccatctctaaaggactgctttctatctgctcattgctgactgatcca

SEQ ID NO: 68103 - DNA, 273 bp, Glycine max
  Clone ID: PAT_MRT3847_3250C.1
acgagtttactttcagtcttccattatctgaattttaggaaactggagatagttttttatatgccatacaacaaatagtactgttcttgttatggtagtgtgtagtttattatatacttattttgaaatttgaaatgttggacaaacaatcataagtcattatataaataaggcaataataagattatgtattggatgatttggccaaatgaaaaactgcttcttcctcgaagtgattttctggaatagtgactaaaaaggtgcgaattttgt

SEQ ID NO: 68104 - DNA, 294 bp, Glycine max
  Clone ID: PAT_MRT3847_32510C.1
ggaaaaagaccccccaagggattttatttaaaaaatagccaaaaaaaaaaaagggcccaaactttgaaatctaggggataataatgggaaaggtttatagggaacctgaaacccaataaaaaccggaaacccaagccttaaacccatggacatttaacactacaattcccgcggggggacattgaaaaccccaaatcattgggaataaaagggggtttaacaatgctttaggaaacaccccttagaaacctgggttccaaaaaggcctcaaaaaatccaagcccctcctaaaaa

SEQ ID NO: 68105 - DNA, 198 bp, Glycine max
  Clone ID: PAT_MRT3847_32511C.1
ccagggttaggctttaaataagggcacatttcccctacaaactaaacatccgggaaagggctaatttttcattacattttttatggccctactaaactttttggccacatcgaagattccccatttttttgatgataacagataataaaaacgggatttggggggctccataatacattccagcttcgcctttaaaat

SEQ ID NO: 68106 - DNA, 316 bp, Glycine max
  unsure (1)..(316): unsure at all n locations
  Clone ID: PAT_MRT3847_32512C.1
gctgaacttgatagctaccctggccttatatccccatcatagcctcccncatttggcgggcattttaaaccggccaccggttccttaccaactttccgtggcccattttcatcatccgcatcctcattctcctcctttcccttgcccgttttgtccgtgcctattttaacaaacaaggtctcctcaccctctacctcttctgtattgctcttctcatcgccctcctcctcctccttctcgtcttcgcattcgtcgtcaccagacccgattgagcctattatgtcccctgaagaggctacaaagagtacaggcttca

SEQ ID NO: 68107 - DNA, 812 bp, Glycine max
  Clone ID: PAT_MRT3847_32513C.1
ttttttttttttttttttttttttttttttttttggaggatttttagaagtccaaatttattgaagacaacaatacaaaatagatgtgacaatcacttctcgtagggctatttataccattattgggtgcgaaaaagcatcattcatagcccacagcattgcactcaactagtacacactaaaactacaccctaaacaaaagtaatacgcaaagttgaggtagcatctaggagcagttttgcgctggacagttagatagcagacactgaagatttagaaccgattttgaagggaaagatgatgcaagttaacagcttgtcgttatgatccttaaaattcagcttcacattataggtgcctggtggggtaaccggaggcaataattcggtgtgaacgagcacaaagttgcctgcaggtactgggcatggtgcttcctcacagagatcatggagaaatgtagcaggttgtgcttctattccagcataagaaatttcatataacaagtccccgctttgaattggttcaggagtataagctgggatcttaaaggtgaatggcactcctctctccacggggtcaggcaatatttccactccactcaccttcacagcatagtctgcattcttttcacagtacttgaaagtgggagctggagcatgagattgagcttgagcacgaaacgcagaaagaagcaaagtgatgggcgataggcataaaaggaagtaaagagcggaagcagagttagacgccatggttatggatgtggaatgcgccacctttggcccccttctgtcgtcttactcgcagccgta

SEQ ID NO: 68108 - DNA, 427 bp, Glycine max
  Clone ID: PAT_MRT3847_32514C.1
gtaaagttctttaagcacattcaatttcctaagtgaaaaagtataaactaggaggggattgtggaggtttctcgattgtaatggagaagtaacattgttagtaaatgtatggttcaagatttttggggtgcccagaggttgaccaataatttagagaatcacagaaatttatcttcaaccccacctacctgctggctgacctgcatcccacaaaacataagatcaggtttgatggttgaatctttaagctgttgtttggaattggacaaataaaatgatgatgtcttgactttaggattggatatggatgggctttttgcctttttcaacatttattgatgctttcacgttggttattctttatgaattgggatttgggaccctcatcatttttctgaattttctttctcagttaccaacaatgaac

SEQ ID NO: 68109 - DNA, 459 bp, Glycine max
  Clone ID: PAT_MRT3847_32515C.1
aaaagggggaaaagattttttctttaaaaaaaaaaaaaagaacccccttttttggggggaagggggaaaaaaatattttaaaaaaaaaaaaaaaaagggcctttaaaccccagagtccaaaaacaaagggggggggggccccccccaaaacaaaaaaaaaattggaaacccccctaaaaggggggtccccttttaccccccccccgagggggagggaaaaaaaaccagggggtccccctaaaaaatttggaaacggcgggggggaaacacttttaaattggttccccaaaaaaaaaagacccttgggggggggggggggaccctcctcggggcgaagatttcctctacaaggggggaaaaaatacggccctccccccccagagggagggggctccctggggagggagcacaacaaatttttgtatcccccagagaggctaaacacaaaggggggggggc

SEQ ID NO: 68110 - DNA, 510 bp, Glycine max
  Clone ID: PAT_MRT3847_32516C.1
aaataaatcaatgatgaacatttacaatgacataccggttatattccagttacaacgaacaacgaacatgatcataatacataatgaatgacgaggcatctgcagcgagttttctatttctcctgtatatatgtacttgcctatcagtttctcctttttagtgccatttatcacacaaccgaaacctggattttgcgataaacttgctcaccaggctcggcaaatcagcagttagcaactgacgttcctcgctcaagcttgcttctagatatcggagctggtttactataggacgaaatggtcgatcatatggtttatgacatcggcaccttcgctatgcataacgggatctttgacctgaatcacactatgtgctgcagatcttactttgctgttgtggaagctgacatccaaccttttccacgacacaagcttcagacctcttaaaagccgttcttctaacatgcagctgtccacaatcggaacatcagtacattgattcattgtttc

SEQ ID NO: 68111 - DNA, 1300 bp, Glycine max
  Clone ID: PAT_MRT3847_32517C.1
gcgtaagataaagcagttctctctataggaatgttttggttagacttgcacaacatcctgatggtgagttgccaccatcttcaattttttatgcttcctttggtatacaattatttggataataataaggaaacataacttttttctaaaagtgagagtaaccttgcttatgaatatattaacatttaatttaataaatgcctagagaccttacatttctttctttttaaatttttctattatatattcttcagatgaaatctcggcaccagcttgtgaggtgttcgaccaccattccatgctttcttccccaagaaaatcctgcttggaaatattctttgtatcgaccatacacttcatactccccactttcactgcgagagtttatcttgtattctgttctgatcaccgtctctgggcctgggtcttatcaatgcgtgccccatggtatcaacctcccacttgtgagttttccccatttccgagcatcagttgtaggaaaaaagtgccaagttgttagatttaccctcgagtattgaacattttcaagatgtcggggcgggactatcgtagcttctttactgcttcaaatatttcctttggcacctgtgaaatctgccctttcagccaatttggatggagataatggtaggattttctctgcaatttgttttcctctgtaatttcaaatcaatggaacttccatttaatgtttggatttgcaccttgatctgtttcatcattaatagaaccgccagataaaactcggtcatcctcatcagtcaacagcctggcactctcttcattgcttgggattaaatgtttttgttttccacaatcattgaccacaggcattagctttcagctcctgtgtcctagttgagatggtttccacaatcattgaccaaggctggtgcggccggttcctgttgccgcgttgacatggatgtgcttcctgtcctcccccatgggtcgggctgaaaacatttgatgcatagacaatgatgttcttccaatcctccatatgaatctatattcttctggagatcttctaacttgttttctgcaatagctaagcaatcagagagttgatgtcctcttgttccacaaaaaaaacacaacatattaacctgtgtggtagtatctgttgcatttgttggtatgatttgtttgatggcaccaaatctccttccaaacattgaagccgttggctctaaatttctgaatcctggggaagatgaaaggggtttgaacaaatacattgatttatgatcattatttcccttatcttccttaagat

SEQ ID NO: 68112 - DNA, 591 bp, Glycine max
  Clone ID: PAT_MRT3847_32518C.1
ttctcatattttccttcggcatgcccatgccctagatgagcaaaaccacaagctgatatctttggtaatgaagattatcttgagcgcgtttatgtgacctgcgtagcttatgccccattttctcggaatgcctttatttgagatgaatcaaacgagatgccatggagtaggctccttcgccacgatatataacatcgagtacattcgctacattgtgatccaggaatgatcttcatcagttggtgttgtgccggctggtgacaatggtcctaacataggtaaacgacgatactatgaacccggctcgtggataaatagccacctgtgcctccgactgatgtcatccatgccgagaacaatctctaattggagggcgcaaagctgcggttttagcaggctctaatggagcatatcgccttagggactttggaggtatgacccaagctacataccctatgcaatacatgccggatcgatggattacccccagagacagatatatgaatatgatccctacaaatcattactatgctgctattccggagacaccctcaagacatccaattcacatgatcccagctccggaattgc

SEQ ID NO: 68113 - DNA, 928 bp, Glycine max
  Clone ID: PAT_MRT3847_32519C.1
ctattatatattcttcagatgaaatctcggcaccagcttgtgaggtgttggaccaccattccatgatttcttcctcaagaaaatcatgattggatatatactgactttcgaccatacacttgatactccccactttcactgagagagattttcttgtattctgctctgaacactgtctctgggactgggtctttcaagatgtcggtgcgggacaattgaagcttttttactgcttcaaatatttcctttggcacctgtgaaatctgcctttcagccaatttggatggagataatgtaggattttctctgaatttgttttcctctgaactcaaaccacggtatttcttgaatgatgcattgcaccctaccttatgggttataatttcatttgatttccacttcaaattaatattttgacctgctcgttgatctgtttcatcattaatagaaccgccagataaaactcggtcatcctcatcagtcaacagcctggcactctcttcattgcttgggattaaatgtttttgttttccacaatcattgaccaaggcattagctttcagttcatgtttcctagttgagattgaagtgggacatgaaattgcccaatggttgggctgaaagcatttgatgcatagacaagaatgttcttccagtcctccatatgaatctatattcttctggagatcttctagcttgttttctgcaatagccgagcaatcagagagttgatgtccttttgttccacaaaacaagcacaacatatttacctgtgtggtagtatctgttgcatttgttggtatgatatgtttgatggcactaaatctccttgcaaacattgaagccattggctctaaatttctgagccctggggaagatgaaaggggtttgaacatatacattgatttatgatcattatttcccttat

SEQ ID NO: 68114 - DNA, 152 bp, Glycine max
  Clone ID: PAT_MRT3847_3251C.1
atccaacagggaaagacccatgaaatacactggattggtagccaaattattacatgccccagtttcagcagcccaaaaaatacatataaaaggggggtgatttggcaaaatacaatcaataaagtttaaaaaagaggaagcggccccgtggg

SEQ ID NO: 68115 - DNA, 464 bp, Glycine max
  Clone ID: PAT_MRT3847_32520C.1
aaaaaaaaagggaaaaaattacttaaaaaacccaaagggggcccccaaatacattacaagggggggccccctttttttggatttgggagaaaaccccccatggggtttttttttaaaaaaaaccaaaaaaaaaaaggggcccaacccttaaaatttaggggaaaaattttggaaaggtttttaggggaccgggaacccaataaaaacggggaaccctagccttaaacctatgggccttcaacactacaattactacgggggggcattgaaaaccccggagtcgggggaaaaaaaagggggttcaaatttttttaaaaaaaccccctttgaaactggggcccaaaaaaaggtcccccaaaaaaaaaaaaagcctctccttgaaaaaccggtttaggaacatcggattaaaaaaactctttttcaacgttttttggaacgaccggggggggtctaaaccccggggg

SEQ ID NO: 68116 - DNA, 785 bp, Glycine max
  Clone ID: PAT_MRT3847_32521C.1
gttcttcagagcatcttcatcaatcaagatatccacatgtattatgaagaaactgacaaaccagctctagcccgtacttcaaacttgaatgaggaacttggccaagttgacacaatactttctgataaaactggaactctgaccatgaactcaatggagttcatcaaatgttctgttgctggggtagcatatggccgcggtgtgacagaagttgagcaagccatgggtaaaagtaatggtttacctatttttcatgagcatattaatggattagaatcaaaattaaatgaaatcagggactctcctgatagaaaagaacctatcaaaggttttaactttacagatgaaaggataatgaatggaaactgggttaatgagccttatgcagatgttatacagaatttttttcgcttattggcaatttgtcatactgccatacctgaagtggatgaagaaacaggaaaagtctcatatgaagctgaatctccagatgaagcagcatttgtaattgctgcaagagaagttggttttaaattctacaaaaggactcagacttgtttgtcaatatatgagttggatccagcttctggcaatgaagttgaaaggtcgtacaagcttaattgctttgtctttttctttagttgaatcctgatattttgactgctgcatgtttccttgctaatctatttacttaattttaggattcattctcattgagaaagggacatgcaattacctagtaacttgtcatgtgatgctaatgcttgtagttaattttcaataca

SEQ ID NO: 68117 - DNA, 351 bp, Glycine max
  Clone ID: PAT_MRT3847_32522C.1
ttttttttttttttttttttttttttttttttttttttttttttttttttttttttttttttttattgagccattactcactcttttaatggtggcaagcttcaggcaaaccctcccggatgtctctggacccccacctcctttatcactgaacggtcatttacgggccttaacagaagaacccggctgtagaccccgcacccacaaagggcataatttatcccctaaaggcccccccaagaccctcgctcatttaaggccacacctagccctcacagccagacccccaaaacccccccggtaaaatggataaccccccccgaccaaaaattctaaaaacctggggtaccg

SEQ ID NO: 68118 - DNA, 313 bp, Glycine max
  Clone ID: PAT_MRT3847_32523C.1
gagtgtgtttgaaatcaatgagagagatcgtgggagccctgcttattttaaattgggccagaaaactggcaattcctttgggaatttaagcccctttaaaaacaagtggatttttggttgtttgcaaaaaaaggggggggaaaaaacttggaatttggggtttgttcccaaaaaaaaaccccaaaaaaggggaattggttagggagattttcaagttttcctttggggggaccggggccattttaaagggggggttttatccccgccctttgaggcactctttttttttgaaacagggggaatcccctttttt

SEQ ID NO: 68119 - DNA, 208 bp, Glycine max
  Clone ID: PAT_MRT3847_32524C.1
aggggagcccaatctattcttcatgttcatcatgcctggagctgttatggttttggttttggcttcttccatcttgaactcttctcatcgtggcgagtgacacgactctgaggaccaatgatgtcgattatgacgcttctacggctcaccaagagcgtggttaacctgtccaatacgttcttcgcataatcgctttacacaaagctct

SEQ ID NO: 68120 - DNA, 372 bp, Glycine max
  Clone ID: PAT_MRT3847_32525C.1
gcccttcctgagggactgctgtgaacacaccgaaaacgaccagaaaggccgagcacctggcttaagcggatgacccaccggccccttaaccttagcggatctggccagggcccccatgaagattgaaaagaattccagaacattaattagcctcggttctttaaccacagggaagttattgaaccctgtgggccaacttcaagaaaaactcaatccaccaggagggggacatgggttgtccgataataagaacttgaaaaacggggacccccaaggacaaaactttccccccccgagtcaggttggaacccttatgcggaccgcccattgagggcttccaccgggattgagcgggaccgcgtaccccggacc

SEQ ID NO: 68121 - DNA, 532 bp, Glycine max
  Clone ID: PAT_MRT3847_32526C.1
ttcacgcgtccgatgaagcactggatattttaatgccctttcaatgtcctaggaagaattattcacctcacgctgttcatcagaagatggttgttgatgtggccaagcatgattttcctgaattaaacagtgatagaagttccattttgcttcagtcaatgtcaaatatgatgaacgtggagcaacagaaattagtagggatgagacctgtaaatgagagtaagtttgaagggaacagtggctgtgaagataaaagtttggaatcaggaaaaaatgtttcatcatttttacacaatttagtaatggataataatggtgtcaatgatttagcatgcccgtcagaaaatgttggagtagatccagtatccttctcttcaggctttcttgatgcagctgtttgtgtgagcgataagtttcagtatgtagacataaacgaaaaaggagtgttgaatgtgcccagaccttcagatgcaaacttccaaataaaaagtgagaagtcaaagtttcagactgaaccttgttacaaggatac

SEQ ID NO: 68122 - DNA, 558 bp, Glycine max
  Clone ID: PAT_MRT3847_32527C.1
aaaacaaaatggtcgagtagaatcattaactaactaagaagtaaaatataaatatatccatattccaggtacaatcccaagttgcaacttttcaactgcatatttgtaactataaattcctaactaaacgtcaattttcaagttatcagtgcggtctgatttctttcaaccatcatttgtgacaaacaataacattgagaaaactgcattgaccttaaaagtaacaacttggtaacgggatcaggttccctttaggatgccagtcaacagcttagctccctgtttttttagcattagcttctgatagcaaaggttcaagttctcctttccgatacagcttcagtgtatctgtacagccgccaatgtgcttgccgccttgtgcaactgtgggccttgaggacccatttcgtctaattcgaagaccaatgggtcgacgccgagctttttgaacaagattttgacctcagaagaataggagcaccatgttttggaataaagcaccactgggttctcggctacagtcttccggctcgagctcgagccgaattccgagcttac

SEQ ID NO: 68123 - DNA, 709 bp, Glycine max
  Clone ID: PAT_MRT3847_32528C.1
tacggctgcgagaagacgacagaagggtattcattagacactagtcactacgaacatctcaaaatgggtcattcaggttaaaagcctaataacaaataattattgttattgacttgtttaattttccaaataacaaattgcagcaagtaacaactactgcctgccacagttcttcaaaactatgttgtcaatcgtggccgtcgcggccgctattgcggcgaagtggagcggcgcgtcccccatccgcgactgggatggacatagcagcgcggttcaacgtcgcggttggcgcagccgctatcacggcgaagcggcgcgggatctggaccggatttttgcgccgctacattgaagccgtggaaattttgaaaaccctagcgtgatgttgatctgcacacctgcgaggctgcaacactcggcgatgctacgacaccgacgagcgccgccacgagcgccaccatgagcgttgccacctcctccacgcccaggagcatgctgtgagtcttcaacactattcgtacctttctttcccaaagtgagtggtgttgtgtggagcttgtaggttggtgtgaagtcgacaagaaattagctggctgctattgtgtatgcccccgagctaggttgaaaacatagggataagaaaggaaaaatagaaaagtaaagaaccccattttttaggtatatatgtaagtagggggagcatagagat

SEQ ID NO: 68124 - DNA, 298 bp, Glycine max
  unsure (1)..(298): unsure at all n locations
  Clone ID: PAT_MRT3847_32529C.1
atggtttgtttttttggcaatgcaagagaagttcgactcaagtcattacgaattgatcatatctcttcctttcctttatcgtttcatttagaatatatggtcaccgngactctgtcactcctttctcttatgccggttcctgtccgtacaattgtttcatttgcatagacctcttgctctgtctctttcactctttcttactcctgctcggccaggcagaggttgtcttttttatantatatctgttatttttgtattttttctctgcggttccaaaacttacggtgacatgcggtgc

SEQ ID NO: 68125 - DNA, 358 bp, Glycine max
  Clone ID: PAT_MRT3847_3252C.1
ctccgcctcctcaccaccaccactccttcaccgcggcgccgagcctcaccttgctggcgcctacaccatcgccgcccactacctcgcgtgagctgccaccatgcgttccaacagcatctcatccatctcctcttcctcctctgcctgggactgcgacgactccatgcagatcttcgtcaagaacatcgccggcgagactttccctctaactgtaccgtcggatacctcgatagaaacgctcaagagcctccttgccctgcgcaccgacctggcctcctcagacctgcgtctcgtgcatgccggcaagcatctgacgttggctgactcgaccctgaccgactacaacatcacccgagac

SEQ ID NO: 68126 - DNA, 810 bp, Glycine max
  Clone ID: PAT_MRT3847_32530C.1
agctaactaagaagtaaaatataaatatatccatattccaggtacaatcccaagttgcaacttttcaactgcatatttgtaactataaattcctaactaaacgtcaattttcaagttatcagtgcggtctgatttctttcaaccatcatttgtgacaaacaataacattgagaaaactgcattgaccttaaaagtaacaacttggtaacgggatcaggttccctttaggatgccagtcaacagcttagctccctgtttttttagcattagcttttgatagcaaaggttcaagttctcctttccgatacagcttcagtgtatctgtacagccgccaatgtgcttgccgccaataaatacatttggcacagtgtgttgccctgtgatcctttccaataccttgtgcaactgtgggccttgaggacccatttcgtctaattcgaagaccaatgggtcgacgccgagctttttgaacaagattttgacctcagaagaataggagcaccatgttttggaataaagcaccactgggttctcggctacagtcttcttgatggtgtcttcgaggcgagacccgaaagaggaagtggctcgaactacggtggtgggagtacgctttggcgttgttgggatgcgagaaatggggactgagtgagtgaaaaagagtttcttcatacaacaacaagataactttggacaaggtttcaagtttgagagaggaatagcgttacccaatgccaatgccatactattacttcttcccccttctgtcgtcttctcgcagccgtcggacgcgtgggcggacgcgtggg

SEQ ID NO: 68127 - DNA, 417 bp, Glycine max
  Clone ID: PAT_MRT3847_32531C.1
acggctgcgagaagacgacagaagggcaacactttgccatctacatacaacccaccaccattgagctcttgttattgtccatcattatctacttagatgcatgacatggatgatgaggatgaggaggaagatgataataacaataataacaacaacaatgatgatgatgatggtcatggtggtggtgatgttcaacaacaaacagttacatatgattatcctagaataatagaagaaagaagtcgcataacaaaaagataacaaccaccaacaaattaagtgtaataagatgaaagactatgcacgtatctaaaagaactcgttgtgagacaccatctcactattaatatttaaaaaaaaaaactatgttcatcacattttttaaaaatttaaatattttggttacatatttttttt

SEQ ID NO: 68128 - DNA, 265 bp, Glycine max
  Clone ID: PAT_MRT3847_32532C.1
tctcgagccgaatcggctcgaggccatataatttttatttatttattataatgtccgggaacatccacaagattgaggagaccctccatgtaggcaggcacaagaaataggaccccaaaggagtacaccatagtgagcactaaggtgtacacaaaggattacgaccatggtgagcacataggtgaaccccctggagtacgacaccatgggacgcacaacgagggacttgagttataagatccaggacaagatccctggtgctggc

SEQ ID NO: 68129 - DNA, 504 bp, Glycine max
  Clone ID: PAT_MRT3847_32533C.1
agaaaatgataaaaaattataatggaatatgcattactccaaaataaatcataagattcaatgtttactccatcccaataaaggctttcaatagtttgtcatttgtgtagttcactacttaaagaattaagacattcttacatgaatatgttaaaatccataagaattgatagagagccaaatactgttgtctcacaaaatgagtattagaattcactttattctatgatgattgcattagaatgcttcccccacccactcaactaacaaaagaaaacaaaaacaaggtgggcatcaaacataatgggagaaaaacaagttatgaaataatacagtacaaagatacagaagtgatagaaaggtgactttacttatagccattgttaacctttataatataataatgttcaaaatccacaaaatgcattttctgctcctaatcggagcttacaatgtcaagaaataaaaccatagagactgcaattctaacacattagcaagacc

SEQ ID NO: 68130 - DNA, 162 bp, Glycine max
  Clone ID: PAT_MRT3847_32534C.1
ataccactctatgtcaattattggttcatggtatctgctaattggtggtttacatgggacatctattatggtgatacctggtggttagtccctcaagaggacacaattgcacgtagattaatgcatctctactcagaaatattgctcgcaagtaaggatgtt

SEQ ID NO: 68131 - DNA, 358 bp, Glycine max
  Clone ID: PAT_MRT3847_32535C.1
gtctcattacagtagataatcaaccagatcaagaattgatgcatggtgaacttaatcttattttcggtaactctttatttttctcttctactatgtctgaaatgaaaaaaatacctatcctttggtaatattctcttgcaactgtcttaagcctcaaatggttatcggtccacctactgattctagttattattattatgatgtgtccctggtgaaaaaagcatttgatcaatcaaacaaattaactaactaacttataaattaaatcactaacttgaaatatcactcgttcaggactttaaggtacaatgtttacctttccctctcattttccatgatacaagatttgattaacaca

SEQ ID NO: 68132 - DNA, 478 bp, Glycine max
  Clone ID: PAT_MRT3847_32536C.1
tccgggaattttgaatccttgtaaataagaagctggtaacaagtttctaaggcgaagaaagaaaaatgatgatccaatgtgaaaggtcttcatcggttttgaaatcattgctccaaatcgtatctccatgtaaacgagatttgggtagctttcgcagactttggcaacattctgagtccactttctgtgttatagacgacaggaaccttctgaggccgagtctcaactccaaaaccggtcttcacgttctggacctcattgactgcggttcgctcgaaccggatcgaaccctgtacaacacgctcttaaagaggtgcacccaattggggaagctcaaagaaggaaaactagtgcacttccacgttctcaactccaacttcaaacatgaccttgttattcagaactcccttctcttcatgtacgcccgctgtggcagtttggaaggcgcgcgccgcctgttcgacgaaatgccgcacgg

SEQ ID NO: 68133 - DNA, 313 bp, Glycine max
  Clone ID: PAT_MRT3847_32537C.1
ctgccttggtgtgggtgtgtgtgtttgtgtttgtcgttgttttttcttctcttgccttgcttggttcgatgcgtctggtttggacttctgtactgcatgccagcttgtcatgctttccgctgtgttgaattcttttttgctctactctactctagataggttgggtgtccattctcctgtcctcacttgccttgccttgcttgactttgctgtaccatacactacgctccgttccatctctcatcttgtgaaaggtagggttgttatgtttcctggcatttgttgtggtgcttcctctcctctcttctctcct

SEQ ID NO: 68134 - DNA, 659 bp, Glycine max
  unsure (1)..(659): unsure at all n locations
  Clone ID: PAT_MRT3847_32538C.1
gccttaaaaaagagaaggacatcatcacggaagtgagagattcgaagacctcgtacaacatgaaaaggcagccactgccaactttttgcttgatcaggatgaggactttaattttctttttcatcttttataaaattaataaaatatgagaaaagaaagggtcttgctaatcaatttcctttaggaattaaaggagaatgtatttaatgtataaatcatagaagagcataagaaaattatgaaaaatgcaattttacgcatctcaataaaaaactttttactcttaatttcttaaccaatgttgttaggaaaatggttagcatttgccaaaaagattttcccaaaagataaggggaggggacatagaaccgtattgttagagtcctctttaaagcaacaagcactccatctcaggcccattttacacaatgaatatccgtttgattatattttagtcaaagttggtntgtaagttttacgaatatgatttaattatctaaatgcgaacatttaaattaaaaaaaaacagatcttatgcaggtggtccagacttcagatcgtaagtagaaaggctgtcatggtgttgttttggtgaaagatacttcttcagaaatagagcccctatcctggatcggctttattcgacgtactccctcttt

SEQ ID NO: 68135 - DNA, 907 bp, Glycine max
  Clone ID: PAT_MRT3847_32539C.1
aattctatcagtgattaaatagcagaatcatttaagagtagctctaagaagaatcgaaaaaaaatacgatggttgtgtgcttccttgttgccatcttggctctgacatcctctgttgtctctgcctatgaccctagtcctcttcaagatttttgtgtggcagccaaagaaaaagatggtgtatttgtgaacggaaaattttgcaaagaccctaagcttgtcaaacctgaagatttcttcctacatgtggaacccgggaacactgacaacccaaataatgcacaagttactcctgtgtctgttgatcaacttccagggcttaacacgcttggcatatctttggctcgcatagattttgcaccaaagggtataaaccctccccacactcaccctcgagccaccgaaatccttttagtccttgaaggtactctctatgttggatttgtcacttccaatcaagatggaaatcgtctctttaccaaagtgttgaacaagggtgatgtgtttgtgttcccaattggtctcattcatttccaactcaatgtgggatatggcaatgctgttgccattgctgctcttggcagtcaaaatgcaggaactatcactattgcaaatgctttgtttaaagccaatccacctatttctcctgaggttctcaccaaagcttttcaagtggatcagaaaataattgatgagcttcagaagaaatcatggtacaacacgaactagtttcagaacatggaagatcatttcacatcagttattgaatccttatgactttgatcaatgtttcaatcaccctatgcaatagaactacaaataactactatataatgtaataaataaaatgtatgtggccgggttattttagagtaaatttaatatatataagttaatatgttattttc

SEQ ID NO: 68136 - DNA, 401 bp, Glycine max
  unsure (1)..(401): unsure at all n locations
  Clone ID: PAT_MRT3847_3253C.1
ccccccttttttttttttttttttggtnctgggaaaaaaatactaatggggcataaaagtcaaaactttactttttgaagaaggaggaactaatcataactttggctgagcgtcaaactcatactcgaaatattaggacaaatcacaactcgggtcatgttttgaaagaaatatcgcaaccaatcaaaatagatgaaaggaaaaattgggcttttggttcatcattaatttaatttatgaatttaatcattggaatatcaaattcgaaactcgagataaactaaatgatcaaatttataattttgcctaaatcgaattaaggtaagatagttgtgaatccctaagttgaataaagcaaacttaatccacaatgaattaaatggggtaaaaaaaatgaatta

SEQ ID NO: 68137 - DNA, 683 bp, Glycine max
  Clone ID: PAT_MRT3847_32540C.1
aaacaagggcacacaagccaagtcctgcaaaacggcgtcggatttgttatctatctcgaaggagatcggctcgcggaagaacgttgagtcccttttgttcaaggggaagaaggtggcggagaacaccaacatggacaagttggagttgtttgggggagagttaattaaggaacaagagagaagaaaaaccagcattttaccaacggtggtgttgaagaacaacaatgcctcaccttcccccagcagaacttcctctgccactaccttgtccactttgtcttcgactagttaaaacaagaagcaaacaagggagatccaaagttagatttttcattgtggggtttgaatttttatgcgagttttttttttttaagtttgtggtgttggggtagctgccgcttgggaccaaattgagactgagctgtgcagagccgaatccttaagtactactactactattactacttacattatatttttttatttttttatttttctttagttttttttggtatatatattacatgtatgtaatgatagtgatttgtgtataaggttattgtcacggcatgattttttattaaggttagagctgtgcttgatttgtgagagagaattgtactgttcggtaagaacatcatagttaaatagtgttgtgactgaatgcagaacactaattctgg

SEQ ID NO: 68138 - DNA, 640 bp, Glycine max
  Clone ID: PAT_MRT3847_32541C.1
aaatggatagcgatcgtaacggttatatctaaaacattaacttccaatactaccttgacgctgctatgcagcttcctttgtgtgttcatatactcaactcgacatatatatgttttatttatttataaagatacaaaagctaaggcaaaatcatatcacggatcttaggtatgaaagcatataagatcaaacatagtttcttggcaatcagctttattcatggcattattcccactttagaggcttgaccacctcccatgtgaagtctgggtcatctcttccaaagtggccataagcagcagtcttcaagaacctgccacttgcacccctcttaaggtccaagttaatggaaattatccctggcctgaaatcaaatttttccttgacaagcttgagaatgtccttgtcaggaatctttccagtgccaaaagtgtcaacaaacactgataatggctcaggaacaccaattgcatatgatatctgcacaatgcaccttctggcaagtccattggccacaatgctcttggcagcctgtctagcaatgtaggctccactcctgtccaccttggcaggggccttccctgagaaggccccaccaccatgagctcccccaccaccatatgtgtcgacaatgattttg

SEQ ID NO: 68139 - DNA, 428 bp, Glycine max
  unsure (1)..(428): unsure at all n locations
  Clone ID: PAT_MRT3847_32542C.1
cnccccacacaccaaaaaaatatgttttttttttccctgcacggacccttgaaaacttaatagccgagcccataaagttcggaaagaaactaagctaaaaaatttaaaaggttaagataaaaccccccatgaaacacatagtacctaaaaaaaaaaaaaaggggctccgggactagttaatttacatttaatatatttttacaaccccaaaatttctttggaaatatctaaaaaaaaaaaactagccaagacccaggagagaaattggggggaataaaatacagtgcagtcctccacaccaccataggcctcataaacaaaataactttgcctaaacccgggcttagcaaccgaataaaaaaacagggacttttttttccttgaatccacaccccactcacagtccgaactctggggttgaggctttt

SEQ ID NO: 68140 - DNA, 501 bp, Glycine max
  Clone ID: PAT_MRT3847_32543C.1
gcatcaaaaaacgcttgatattaacattggtcacaatttggtatatatttcccagccccaaaacatcaaggatcaccacaactccgcaaaaacagttaaaatccttgatttacatttataatcggtcacgctaattcacactaagtacgaaatttagccacaagaatgtagatataaattacaagaacaaatgcttccgtagatttaaaaaactgacgaaaaaaccccagattttgatataagcctaaggtttcttcttccaatatattagaaaacacaaaaagcagacagaaatgcaacttcaataatttggttacaaaaactaaaaacacatattaggcaaaagaaaatacgataaataattgcataaagcaagaacagggaaccatcagaaaccagaattttatccccaaatgctataaaagcagtacggtccgcatcatggttagggttaagaaacccccatcacatggcccttctgtcgtctcggacgcgtgggtc

SEQ ID NO: 68141 - DNA, 389 bp, Glycine max
  Clone ID: PAT_MRT3847_32544C.1
ggcccaaaatttctttgaaaaaaaaaaaaaaggttccgtttctgggaccaagccttgggggcctggactggctttttttgaaaccggggggaggggaaaacaaaagaaaaaaacccttttttccccctggccaaaaggttttataaaaaaaattacaacccttttccccccccttttttgggggggggtttttttttgggaaagggttcccaaagatgggggtaccttttagggtcaccctaagttgttaacaacgccttcatgggggggggggcggattttttaaccaatgctgggggggggcaaagccaaaatttgggcttcttttatggggggggctggtggttgaacccaaaagccaaggtttccccaccccacccccccacggg

SEQ ID NO: 68142 - DNA, 352 bp, Glycine max
  Clone ID: PAT_MRT3847_32545C.1
acggctcgagcagagataggacaagcccgtttaaaacacggaacctgaacaaaagctcagggggcgctggagaaacaacggccaaggagcaggacggcgcaagatagagaagaaaacccgcatccatgatacatcccccggaacacccaccgccccagactgcgccactgacgatgacctcatcacacaaggagcaggagccgaatggcccggagatacaataagctcatgcacacagaacaggagaggggaaacggcaaccaaaagggggtacaacaccagggacactaaaagaactggaaatagagcaaaaccactactggccaatccaagaaaaagccccaagaaaaac

SEQ ID NO: 68143 - DNA, 410 bp, Glycine max
  Clone ID: PAT_MRT3847_32546C.1
aaaaaagggccctttaaaatccccggggcttgttcccaaaaaaaattggggcgggtttatcatccatggaaaaacggggattacttcctgaatttacattaaaggcctttaaaccttaaaaagggttttggccattgaatcttcaatttttgcctgacaataaaaggagcccttttacaaggttttaccaacataaaccctcccacctaaaaccttttaagggttacaacttagttaaaaagggttgccaatggttttccaagggttggaaacatagagggggtccaacacttttcacttgggggggaaagccccaaaaatagttccatgggccggatctgcaaggggaccaaaaagggtgcgaataggacccgggcccgggtaaatgggctggaaccatgcccccataa

SEQ ID NO: 68144 - DNA, 862 bp, Glycine max
  Clone ID: PAT_MRT3847_32547C.1
tacggctgcgagaagacgacagaagggggaggcatttgaaaaagaaaagccttccatagcctcccaaaaaatgaagagcactaccttgttcgctctctttctactttgtgccctcacttcatcatacctaccttcagccaccgctgatgtggtgctggacatggatggtaatcctcttggaaacggttggcaaaatgaatatttcatgttgccagttacaagaggaagcggtggtggaatagcactagctgcaactggaaatgaaagatgccctgtaactgtcgtgcaatctcacattgagcgcgataaggggtatgcggcaacttttagagctccattccacctcccttttatcgcagaaggccttcctttgacgatttcattcgataactttgaagtgttaccgcggtgtgtccccactcctctttggtgggctattgtggatggtctagctgaaggacccgctgttaaaattgagtatagagatatagtagaaggttggtttaaaattcagaaagcttaccctctcggctataagcttttgttctgtccagtgcctcttgaggatagcacatgtggggatattgggatttatactgatgataagggattcaggcgtttggtggtgactaagaacaaaccattggtggttcagtttcagaaatttgatccactggccaagaataatcttgtgcttcctgccagtgagtgagagacaattagtgcatgactaaatcaatgctttggttgtaattaataaattattttctcactaaataatataatcaaagcttattatccttcatttgcgaatgttttaatgggggggggcgggtatatatatagacatttttatttatta

SEQ ID NO: 68145 - DNA, 212 bp, Glycine max
  Clone ID: PAT_MRT3847_32548C.1
caaaagtatttgcagttctatcatcaaatgaagcttcagtttgcaaaattttgcaagaaaaggaaaaagaggttctgcacaaggggctaccaaatgtgcaaaacagaaaggttagttttgggaacatatttgggtgtggtgatgttgattttttttttcaactaatttacaaataatgttaatttgttagttaattgagagaatttgaatcc

SEQ ID NO: 68146 - DNA, 1203 bp, Glycine max
  Clone ID: PAT_MRT3847_32549C.1
ccacgcgtccgggcaaattttatacttgagtgagttgagtcttactttgatattattcgtcgagtttcattttatttctaacttattgaaatgcatttacaataaaacaatttcaacatttcactttatggtaatctattcttacaccaaactttatggtaatttattcaatcactgtatattaaatgtaaatagttttctctatctttgtaaatgagcaataaacttaaatgatttacaaaaatatctttgtatatacatatttttaacttgcatagacttactaagaaataatttcacatactataataaagtttataatttaaattaaaaaattatcattttttaaagaaattaagaactaaagtggggcctaaggtggttgcctcactcacctagtggcttccatggccctgctacctcaatatgcttctaatatgccatgtctataatgtgtcatatatccataggcttgaatttctaataatagtggtgtaataatctctttccgatttccagattcccccatctatcacactgcgttcgactcctataactggatggcatagtattgagatccattcttccaccgccatgttactgttgtacaaaaacacgttgagcaacttgatagaccagaaaatttctctacatccattaaccctttcaattgaagaatctgcttctgctgccaaagaagccgatgatgaattaaaggttgtttggtagatatgaaaaagcgagcattgaatgatagactaattgcggaaaaaggcttcttggatgcagatggacttcaagcatctctcgtgtttgggccttcaagcaaccatgggaggttaatttcttcccagggatttctgattctatcactaggtcgtcggctatcatcaattcaatatgagatttggagggttgccaaagcaattcgtagagctgctggtgctgcactcagtggagaattcacctaaaaactaatgggaaaaagtcatacagaggagaatggagatggatgaaatcttgtacttgagttacctgtaaatattagcgtttcttttaacacgagcagagtagttagttaattagttagcttatctgcatattgtggtacataattgtacattaagttttctaaaaggagatggatagatattccagccgtttgaagaaatgtacacggtgacagcagattttgtgcttctt

SEQ ID NO: 68147 - DNA, 212 bp, Glycine max
  Clone ID: PAT_MRT3847_3254C.1
ggaactttcttctgaggctatacgcttccaacccaccagggagtgcatctaccactggatcatcgactgggagcaagattaggcattctggtgtccctccatacgctcaagaatcccacaggctgcaatgaggtgagacttgtctgaactaggagtactcaccacccatagacaatgtagtacctcaaagacagccaattgtgattcatgag

SEQ ID NO: 68148 - DNA, 496 bp, Glycine max
  Clone ID: PAT_MRT3847_32550C.1
aagagatgtacaccatctcagcttgcattgtcctgggttcatcaccaaggaaaagatgtgtgccctattcctggaaccaccaaacttgagaacttcaatcagaacattggggctttgtctgtcaaactaacaccagaagaaatggcggaacttgagtcccttgctgctctagatgctgtcaagggtgatagatatgcggatgatggtttatctacgtggaaggactctgaaactccaccactttcttcttggaaagctgcatgatgaagtgcattgcttaatgcttatacatgtgatccttaaatatttgatggtgctactttaagaaacagattagtccgagggacatgccttcggattcaaaaggaatatggctatataagcctttatagtttctagcagttgatgtgtctttattagtggtttgaactttgaactctatatgtgtacgtataatatcaaaataaatgatggttatggcctgacttttacttaa

SEQ ID NO: 68149 - DNA, 269 bp, Glycine max
  unsure (1)..(269): unsure at all n locations
  Clone ID: PAT_MRT3847_32551C.1
ggaagacccgggtcgacctacgcacccgttgatacaaccgcagccaaaaccaagggaaaggggaccattgaagggacaaaggacggcacgaccaacgaaaaggacgacaccagggaccccaccagcaccgaaagngacaagcgcgacaagaaaaacanccaacgccggcacaaccagaaaagcggacccccagaaagcaaagccaagacccaaccaggagagccccccaaaacccaccgaagcaccccagccggcccaaaagaaacaag

SEQ ID NO: 68150 - DNA, 342 bp, Glycine max
  Clone ID: PAT_MRT3847_32552C.1
ccacgcgtccgcgccagcgggcgtatgcttggctcaaagatagcgcctgcatgtgtaattatgaactaattcagactgtgcagctgcgaatggctcaataattcagttatagctcgtttgatggtatatactactcacataaccggagtaattctacagctaatacgcgccccaagccccgacttcaggcaggaatgcatttattagataatagggcaacacatgctatgcctgttgctatgatgattcatgagtactcgtcggatcgtacggtgtttgtgccggcgacgcatcattcaaaggtctgccttttcaacttgtcgatcgtatgctagtgcccta

SEQ ID NO: 68151 - DNA, 860 bp, Glycine max
  Clone ID: PAT_MRT3847_32553C.1
acgaggttggttggaatatggccaggtccaccactcctccgacgatcaaaccggaaaattacggccacagtccggttcactacgccgtcgctttgggcgaccacaccaccctctccagaatcacctcctcactccctcgtctccccgatccctctctcgcccgctccgacgccctctccctcccgcgcgccgacctcgccgtcctcttcctccgtcgccgcgatcacacgcacgacgtcccctccggttcgctcctcgtcctcaaccgcgacgaccgcaaaatcttcgacgccttcgagaacgccggaggaccgatgaacgagtccgacctcgccggattctgctcgcagacgagcgtgtaccgtcccggcatggacgtgacgaaggcagagcttgtaggcagaacgaatcggcgaaggcaagagaatacagagagcgtgggggagtggaaggcgcaggtgtacgaaatgcacaacgtggttttcagtttccggtcacggaaggtggccggcggcgagtctgacgtggcagggagcgagcaggtgctgccgttggaactggacgaagacgacgacggttttctcgttgcggagaatccgaatttcgggttcccaatgccagacaagagaagacacagtagctgcgttcgagaagagacagagtcggtcccaatgggaaggacaagcctccaccttaccttcgtaacggccccacacccgctgaggtcaccgcatagcgtgaccatgccacagaccaaggaaaaggagtacgttagaagcttacggccgtcagtgtggctaacggagcagttgccattaaagaccgaggagcttctgccgttactcgacatactcgctaat

SEQ ID NO: 68152 - DNA, 495 bp, Glycine max
  unsure (1)..(495): unsure at all n locations
  Clone ID: PAT_MRT3847_32554C.1
tggcttggaacctttgggctgatttatgtgcttgcatggtcgtgagaaatgatagaaggggaccgcagaatcgaataagggccctctccctctccctctcgctcgtcctcctatccctctctgccctaactgaaaaaactacgggtagaaaacctcctgctggcggtaatcggaaacgtaacgggattatcgaggaggcgaagaagaccgccatcatcccaaacgaagtcaaagctttcggagaagacgccgcagaagccgccgcgagtttcttccccgcgccttccttccccgcaaaaagcccgtcgtgtttcgacccttacgctctggtttaaaaccgccgggcctataaaggcggcgtccacatcggagaggccagcgtcgaaacgtccgccaacccgggaaccttccgggccaccaccggctatctcgaatggaggtagtccccgaacgaactanacgagcccgcgggagacaaagccgttcacgtatcct

SEQ ID NO: 68153 - DNA, 273 bp, Glycine max
  unsure (1)..(273): unsure at all n locations
  Clone ID: PAT_MRT3847_32555C.1
acgcaccaaccgaggccacaggccaccaccattccttccttgttccttccccanctccgcaggctgctcatcgccctccctccgcgcccccgatccagatccagatccaggggctgtcatggcatccaaacgtatcctcaaggaattanaggacttgcaaaaggaccctccaacatcatgcagtgcaggtcctgctggtgaggatatgttccactggcaggcaaccatcatgggtcctcctgatagtccatatgctggaggtgttttcttggt

SEQ ID NO: 68154 - DNA, 131 bp, Glycine max
  unsure (1)..(131): unsure at all n locations
  Clone ID: PAT_MRT3847_32556C.1
gcgcacgtgagctcgcaactctngccgagatccagccgcgacggcgcctttctgtagcccactctagcgtggaacacaggttccagtaaaaaagcttgcgacatgatgtaattactgatcaggagaaagtg

SEQ ID NO: 68155 - DNA, 419 bp, Glycine max
  Clone ID: PAT_MRT3847_32557C.1
tattttttttttttttttttttttttttttttttttttttttttatttttttggggaaaatttggcacacccttagtaatttattccagaacaaaagcccaagttctttcacgaggttcttaccgttgggataaaagattccctattttccctggcgttggcctcttgtagggggaaaaatgttttcttaattaaaaatctcgtgtaatggagaattaggcccccccttcctttttttttttactacgcgggaaccttcacaagcttctcaattgacccttaacgagtaatagagtgtcatgtgatttgccagttatggtcataaaaaaccctttgtagatccattctagaaggtgtcgccattttgttctttttgacccacccttttaaaaaagcaaggaacaaaatgctatcaagcc

SEQ ID NO: 68156 - DNA, 427 bp, Glycine max
  Clone ID: PAT_MRT3847_32558C.1
ggctcgaggagtggtgtatgctactatgaaagcccagacatcactctaccagaataacacagggggaagcccataaaagttgcagcccatcatgccaccaacgaggagcgggtcgtcactgctagactactccctactcagagcactgacagcgatcatcctgatgcatcaaaaacagaggaggagttcatatgaccctgcaagcaggactttggcatgctgagctgtcctataacataacatacatgagaattcctgcctactgtgcgaggagatcgcctataatatcaaatctggtcactgcgagcatacgggctgacacctgagcatattatactcgagagtcatcatcctctagagcatgtataccaattcaattgagaggcggctcaaatccaaatgcgtctgcgacgctttggggaacctt

SEQ ID NO: 68157 - DNA, 2060 bp, Glycine max
  unsure (1)..(2060): unsure at all n locations
  Clone ID: PAT_MRT3847_32559C.1
tcggaattcggctcgagaagaagagagagaaagaaagaatgaatgaataaataatcatgcactctctttctattcttcttctttctatcataacataactatgatatcaacaccatataataattaatagcaataatttagtaatactctcttcattgtcaattccatcttcacttcacttcacttctctgttctgttgaatattcaatcattcgcaaaacgcatacttttctcttcattctcagcttttttctttcatttttaattctccgttttccaaatccatgattgcatctcgccgctgcgaaaccgttccgccaccgtcgattcccgatctccggtgacccgaaaatgctccctttcgcgcatccgaatcccaccatgggaagccgcaacaacaacaacaacaacgccaccgccgagacggttttcgccgccgccaacgccatcgtcgccgccgaatccagagtccaacccaccgacgcgccgaaaaaacgttggggaggctgctggagccaatattggtgttttggatcttgtaagagcagtaaaagcagcaagcgaattggccatgctgtccttgttccagaacctgctgctccaacaggtccagcagctgctgctgctgcaccaaatccttcaaccgccattgtaatgccgttcattgcccctccatcttctcctgcatcttttcttcaatctgatccaccatctggtattcaatcaccgnctggattactttcactctctgctctagcggccaatgcttactcttctgctggaagcccaggtggccggctcatatgaccgggatcagcattttcaacttctggcacctcaaccccattccctgatagaccccctacacttgaattccccaaaggggaaacaccaaagatcttgggtgttgaacacttctccacccgaagatggggttcaagactgggatctgggtcattgacgccagacggtgcatggcaaggttcaagactaggttcgggatccttgactcctgatggtgttgggcttgcttcgcgattaggctctgggtgtgtgacacctgatggtctggggcaggaatccaggttaggttctggctgtttgacacctgacagtgctgggccaaccaatcaaaacaacatctctgtgcaaaaccagatttctaaggaagcaactcttgcagattcagacaatggacatccaagcaatgcaacattggttgatcacagagtttcatttgaattaaccggggaagatgttgcccggtgtcttgcaaataaaactggggtattgcttcgaaacatgtcagggtcttcacaaggtatactgaccaaagaccctgttgacagagaaagggtgcaaatagacaccaatagtagctgtaacgcgtgtacagagaaaactgacgataagcctgacaatcctgtaggaaaaggagagcaatgccttcacaagcaaaattctgtaaattcttccaaagaattcaattttgacaacaggaaaggtgatgtttctgttactactggcagtggctatgagtggtggactaacaggaaggttgctgggaaggaaggtagatcagccaacagctgggctttcttcccaatgttacagtcagaaatgaattgaggttttagtttatcgcaacatgacttaacctgtatggtataaaagcaaaaaggattttccatagaacctttagtatactgaaatgtatatttgaatagaccttatcttgaatgctgttcatcatatacctttgaggggaaattgtagtaaatggatgattaagactcggatgaaccaacagttgttatattcctttaggacctaaagtagaatgcaaggggagcatagtggtagtaggtagggaccaatagttggttatattatatttatataattatgtgaaacattacttcttgcatttcatcctttcaaatatacagaaatagcaaagtataggtatttcgtgttgtggattattgtatcctttcatatgcaataatgaaaaaaaatattatattatttaaaaatcctttttagtattattattcgag

SEQ ID NO: 68158 - DNA, 131 bp, Glycine max
  Clone ID: PAT_MRT3847_3255C.1
tgggttgaggttaattaactcaagcacaacaagggaggtggttccaggggtttttagtttggaactaaagaagccaatgttggcatggcccttttatcttgaactggaccccaatcagatgcatgaacacc

SEQ ID NO: 68159 - DNA, 604 bp, Glycine max
  Clone ID: PAT_MRT3847_32560C.1
gggatttccaatggcctgccggatgttgattcggtattttattttactaggaagtcggtgttggagacgtttgatatccggtttgatgagcatgcaccgaaggtggcgctgccgcagggcatgatggtgccggttaattcgtttaacacgatgtaccattcgtctgcgttttgggccttgatgctcccggtgtcggtcagcacgatggcgtccgatgtgttgagaggttactgggggcagaggctgctttgggaggttggtgggtatgttgtggtttaccctccaactgtgcataggtatgataggattgaggcgtatccgttttcggaggagaaggatcttcatgtgaatgttggaaggttgattaattatttgatttcatggcgatcggataagcataggttgtttgagaagatattggatttgagctttgcaatggcggaggaggggttttggactgagaaggatgtgaagcttactggtgcttggctgcaagatttgttggctcttggctatcaccatccgaggttgatatctttcgacttcgaacgtacgagggcatagtatttgacatgggggatagaaagtagttgttccaccaaaa

SEQ ID NO: 68160 - DNA, 309 bp, Glycine max
  Clone ID: PAT_MRT3847_32561C.1
ttcttctccatgcaatgagaagaagaccaatgcagacccatcaggccgtagttgatgatgacaatggagctcttgtcataatggacttattcatcaacttcatgtctaacacaatggacggatctattaaaggttatgctgaactaagacacacactagacatttctgtgcgacgaaatagaaaatttgtacgttcggcattgcattctatccatgacaacttacaagcagttttcgatttcacctccaatcatttcctcatttctcatgactgaagttaacttataactttgggttgtcacgattgga

SEQ ID NO: 68161 - DNA, 292 bp, Glycine max
  Clone ID: PAT_MRT3847_32562C.1
acccaattccgcatccagacccaatgccaccacgcgcggcgtcgaagaggattgtgccgagctcaccaaatcctattcccgccaggtcgggggagacgcctccatcctcgccccgacagacgatccccaatccgaaaagcccgtcgccgatgacaatcccaagcccactgacgacgacgaagaggaagatatcatagcaagaatacgaaacgatgggacggagatgaatgacgagaaaagaagcgggatatccagaaggtctggtaataagacagaatccgaatgtactaag

SEQ ID NO: 68162 - DNA, 127 bp, Glycine max
  Clone ID: PAT_MRT3847_32563C.1
agagacaacatccctgttgtgtaagacaaaaacaccaggagctgggtctaatgccacaaatgatgtgtacagggacagggtgcatgctttacctgctgctaaccaagatctagctggaggattaatt

SEQ ID NO: 68163 - DNA, 241 bp, Glycine max
  Clone ID: PAT_MRT3847_32564C.1
gggtgaggaaaaggtctacatctacattgtctgctttgtacatgtctactctgtgcatgtgcactccactgttcacttgatctacaagctagtaggtcttgacaagcttgtgatacagagggtctagatggatgttgcctagatgaacatgaggtaagtcatgtatgcctgggtgctccatatgctcgaagctgcgcgtgagagaggaattacccttgctattgcttggtggaagtatgaa

SEQ ID NO: 68164 - DNA, 257 bp, Glycine max
  unsure (1)..(257): unsure at all n locations
  Clone ID: PAT_MRT3847_32565C.1
tggccgtnnntgaccagcaatatatcagatgctatgatcgcgcacgcacgcctccaatagctgctaatgcgactcgagggaggtagcgatggcgcgattccatctcgaccaaccttactgcaatgcggtcttcggtttcttggctgcacataccctctactacaacctaattacgccagttcaaccttataacgacgaggaccgacccagagacacgtggacgcagctctctcgggctacacacaaagaagtggata

SEQ ID NO: 68165 - DNA, 672 bp, Glycine max
  unsure (1)..(672): unsure at all n locations
  Clone ID: PAT_MRT3847_32566C.1
caaaaattctatccgtggttacacttgcaatggtgcaaaccatagctgccaaagttacctcaccttcagatctcaacccatctacaactctgtcaagacaatatcaactttgttgggttctgacccatcccagcttgctaaaataaactcagtttccatgaatgacacctttgaaacaaacaagttggttattgttccggtcaactgttcctgtgcaggtgagtattatcaaacaaacacatcctatgagttccataattcagaaacttacttcttgattgccaacaatacttttgagggcctcacaacatgccaagctttggagaaccaaaaccacaaccctgcaaacatataccctggtagaaggcttttagtgcctcttagatgtgcttgtcccacaaagaatcaaactgagaaaggcatcaggtacctcctaagttacttggtaaactggggtgattctgtttcattcattagtgagaaatttggtgtcaacttttatgaccactcttgaagctaatacacttactctcacccaagccacgatctatccctttaccacaattctagttccccttcatgacaagccctcaagttctcaaactgtttcgccaacctcgcgcactccaccaccctctcctncctcttctgatcatagctcaaacaaaacat

SEQ ID NO: 68166 - DNA, 891 bp, Glycine max
  Clone ID: PAT_MRT3847_32567C.1
ctgctaattattcttcagtcttgcggaactccattttgatttctccacgttccacgagctctctgatgaagtggtatctaatctcaatgtgctttgtacggctgtggaatattggattcttagtcattgcaatagctgacatattatcacaatgaataactgttggagtcttggagtcttgttgtacgtcttgcagaatttttctgagccatgtcgcttcacacgcaacgcttgttgcaaccatgtattctgcttctttgacgcccatgatattgctttgttgcctagaagaaacacatatccacttgtgctttttctatcatctgtgcttcttgcccagttgctatttgtataacctgtcaagttaaagtctctatctacctcgtacaaaatgccaaaatcctttgtgcctttgacatatcttaggattctcttggctgctgcaaagtgtgctttgcttgggttactcatgaatctagacacgatgctaactgcatgtatgatttctgaccttgagttgtttaagtagattagcgaaccgactaggcttctataaactgttgcatcaactttgttttgcccatcatcttttgaaagcttctcgttcatcgccataggtgtggcaagtggtttgcaatcttgcatgttgaacttcttcagtaagtcatccgcatatttttcttgcgagacaaatatttgtccaggtctttgcttgacttgcatgccgagaaaatatctcatgagtccaagatcggtcatttcatactcttgcatcatagtctttttgaattcttccatattgtgagttgttggtccaggaagattaaatatcttatgtataggcacaaaatcaagaaatgattaccttgcatcttccatatagtgatgact

SEQ ID NO: 68167 - DNA, 284 bp, Glycine max
  Clone ID: PAT_MRT3847_32568C.1
aaaaggaaaaacattcccattttactatcaaatttttcccccaactaaattgggagcaaaattttcattgaataaaaaaagctctcgggtggtcttaaccctgctttcaatcaaaggatatgccatagggtcaatttcatttccatttgatcttccaaacaaacaaactgacttgtttattttacaaagcatgtttttacttttttttaggccatccaatggagccttacaaacccaaaaacctacattaccttttttttcaacaaaataatcttcaagagctt

SEQ ID NO: 68168 - DNA, 276 bp, Glycine max
  Clone ID: PAT_MRT3847_32569C.1
cgaatctagaaatcccagggaatcttcatatcgtatctcgtgtctctgatgcatggcactgatttctctccaaaacagcgtctttccacttccattgccaactactcattcctcagcgaagagctttccctatgttacgatgcgtcgaggcacaatctttggttcgagcctcgttgctatctcaactcaacaccatccagagttgcatagcagttgccgaatgatcatgatgagcttcagcaacaagaggtccaccttgtgcaactctttaaggat

SEQ ID NO: 68169 - DNA, 277 bp, Glycine max
  Clone ID: PAT_MRT3847_3256C.1
ctcaactaatcatgtgtggctcaagtggctgcaaaagaatcacatgatctacaatgactgttctgacactaaaagatttccacagggcctttctcgagaaagcaacacagcctaaaaatatctgaatatggctgtgtggagtgatgcaaactccaaggctaagctctctctcagagtgtccctttcctgaacttttgcaacatccataatgattaatgctctgatctgctggaaaccaataccttcaagctctgcttatgggctggcgtcctctggt

SEQ ID NO: 68170 - DNA, 224 bp, Glycine max
  Clone ID: PAT_MRT3847_32570C.1
cacgcgtcaaggaactccttcgcaaactagtactattattcttccattcataatgggtgttttcacattctaggatgaaatcatctcgcctgtggctcctgctactctttataaggtcctaattacatattcagacaacgtcatcacaaaagctcttgaatccttcatgagtgttgaaaactttgagggaaatggtagttaggaatcatcatgatgatcacttt

SEQ ID NO: 68171 - DNA, 389 bp, Glycine max
  Clone ID: PAT_MRT3847_32571C.1
gccaactcaagaatctactcctttcactgatagtctaaaatatagtacaagtgacccgcctataaataatttgcagggtacatttatctaaagcgccacaatcatcaaaggtgccctttaacaaaagagtgaaaactgtatgccattaaactccaaactaaacataaatctcaggtgggttacaagttaatccatccttcccttaaaaatcctttacttcacttcgggtggcatgaccccataaacatgtcctttccagccactcatacaatcactatctacagatgatagcactgcttggtagatggtgttcaacaaacactttgggtccatgtcaggcttaaacatttgcttacatggaccatacaaggacttagatgcaggcccag

SEQ ID NO: 68172 - DNA, 1220 bp, Glycine max
  Clone ID: PAT_MRT3847_32572C.1
ccaatcccagaccacacgatacaataaccatgacttgacttttgtatctgagtgccagcccctctatattgactttgacttggtctctctctctctctctctctttctttcaccattcccttgttcttagtttttacttccatccctcttccaagtctcagaaacgtataggaagatgtctagtttggttttgttgtccgtgttatttctccttctccaacgtcctctctcatccttctcagccaactccgaaggaaacgctcttcatgctttgagaagcaggctttctgaccccagcaacgtgcttcagagctgggacccaaatctcgttaatgcttgtacttggtttcatgttacctgcgactccaacaatcacgtcattcgcttagacttgggcaattctaagctctccggaactttgggaccagaacttgcccagctaccccacctccaatacctggagctctacaggaataacataagtggcaacattcctcgggaactttctaaattgaagaaccttattagtatggatttgtatgacaaccaatttcatggcaaaatccccaagtcttttggcaacttgaactcacttaaatttctacgcctaaacaacaacaaactgacaggagcgatcccaagagagctcactcatcttaaaaatctcaaaatccttgatgtttctaataatgacctctgtggaacaataccagtagatggcaactttgaatccttcccgatggaaagttttgagaataacaaactcagcggcccagagctgaaaggattggttccttatgattttggatgctgaagaatggtagatttcgtcactactcctcagactgcaaagaagccttctttattagggaagaaagcagtatcagaaatgtacgcttgtcacaaatctaaacgtgtggcacctatatgtgatgtcaatatatctaataaataaatgaatttatcgtctgcctctggttgcaagcagcataaccaagcttctgactgggatgatgtcaagttgaaaaaatgcctcagtctcagtctgagttgaaaaacatcctagttatgcttacatgaattaaagcgaaggcgctaatagtttatttccaacccccccatgttaacttggaacaagagaaaactcttttaagattgattagtttggcaaaaagaagaaacattactatattattataagagcactttattcatcatgt

SEQ ID NO: 68173 - DNA, 882 bp, Glycine max
  unsure (1)..(882): unsure at all n locations
  Clone ID: PAT_MRT3847_32573C.1
ggctcgagggaagatgtctagtttggttttgttgtccgtgttatttctccttctccaacgtcctctctcatccttctcagccaactccgaaggtgtgttttttaatgttccacttattgattattttgcttgtggtcctgtcctagctaatttctttcttgttttgtaggaaacgctcttcatgctttgagaagcaggctttctgaccccagcaacgtgcttcagagctgggacccaaatctcgttaatgcttgtacttggtttcatgttacctgcgactccaacaatcacgtcattcgcttagacttgggcaattctaagctctccggaactttgggaccagaacttgcccagctaccccaccttcaatacctgtttgtatctgtctcttttgttgctcccaacccaacaatccatcatggtctcacttattctttgttgagagtgcatggagctctatcatgataaatacgtggcaacattcctcgggaactttctaaatggacgcaccaaggcagtatggatttaaatgacaaaacattttgttagattatccctcctactttcttttacgtttcatgtcgtctgaggaaaagccaagttccatntcattcctttttttctttttttgttggtgttgctgatttatcagctaatttgaaacctccactgtgcagtgatgtttctaataatgacctctgtggaacaataccagtagatggcaactttgaatccttcccgatggaaaggtatatatagtaactattgcaattcttgcctcattagtcttgctgataataacatactcttaataagtccaatgacctttggatcaaacacgtgctggtgaatatgccagtttaaccatttagaacttacaac

SEQ ID NO: 68174 - DNA, 187 bp, Glycine max
  unsure (1)..(187): unsure at all n locations
  Clone ID: PAT_MRT3847_32574C.1
ctttcttgcgaaaccnatagagcgantnggcaaacncaatttncngggatcttcttgtttattntntgtnnnnnnnnnnnnnnnnnnnatgttggggancttcatcagttcagnggtgtcgccgccggaggagcnggtggccgctggcatcanancgccgtcgccgaanacnanggcgggtgaagct

SEQ ID NO: 68175 - DNA, 222 bp, Glycine max
  Clone ID: PAT_MRT3847_32575C.1
tatttttaacattttttttttattcactaacatccatcaatcagggtttgtgtacatttacaaaaaccaactctaaccgtgccccttcctctcttatctctatccagagattctaaaacttattcttccatttccataaagctaatatgcccttattcctctaccacccttctattagaaaacccaatttctttacacgagaagttgctcttctttcttact

SEQ ID NO: 68176 - DNA, 641 bp, Glycine max
  Clone ID: PAT_MRT3847_32576C.1
ccagcgtccgaactctctctctcacccaccacaaaacgaccaaagcaaaaaccttttttttttctcttctgttccctcatcctcatctattggattaactgattaatattattaggtccccttctaaaaagaagattcttcatccttccacacacaccccacaactactgggagagaaaaaaggaaggaagttttgttcttttctgagaccctattgattttttatattttttctgctctgaagaagaaagatggaaatgatggcataccatttttcccggctaccttactcggattccctcaaactgctagaggctgatatacagcatgcaaatgctttggctgctgcaattcccagagccaagggtgggactcttctccaaatgaaattggtgtacaaccacttggctcctctctttctgttgttgctacagtggatggaatgttcttgtacatgctttctacacagatatcttgacctcttccacatagttgtatacaaggtaaatacctagatggatggaagttatattttggtctctggtgctaacactagagaagcatttctagcactataaaaactttctgatggcgataaactgcaactaaaatttacagctttcttgtgtaaagactacaat

SEQ ID NO: 68177 - DNA, 248 bp, Glycine max
  Clone ID: PAT_MRT3847_32577C.1
caggacatcccagaagtgtttgataaaattaaagtttaaaccatcaggcccagggcatttgtcccctccacagccccacactgcttctttaatctcttgatcagagaaaggggtaatcagctggtcactttgcccttgagagatagttttaaagtgaaccccatctaaagtaggtctagattgcagttgttcagagaatctattctggaaaaactcaaaaaggcttgatttctcatcatgttcgagaa

SEQ ID NO: 68178 - DNA, 1250 bp, Glycine max
  Clone ID: PAT_MRT3847_32578C.1
cggacgcgtgggcggacgcgtgggcactaccgccgcagaagagaccgaaacgccgtcttatgcatctccgaacaccgaatatggaagaaagaggaaaccaacacaaacacgaacaagaagaagaagaagaaatcgtttgcttagacgcgtcgttcttcgtcgatgacaattaccagctgacgaaattcacgttcggttcgcaagacattcagctcttctgtctgcattctgcttccactgattttgatttgacagggcagctggtttggcctggagccatgttgctgaatgagtatctttcaaaaaatgttaacctgcttcagggttgcactgccattgaattaggttctggtgttggtattaccggaatactttgcagcagattctgccataaagttgtgatgacagatcataatgaagaagtgatcaagatcttaaagaaaaacatagagctgcattcatgtcctgagaatattacttctatttctcatggattagtagcagagaaactagaatgggggaacactgatcagataaatgaaatattacaaaaacatcctggaggtttcgacttcatacttggagctgatatatgctttcagcagtcaagcatacctatgctttttgatagtgttaaacagctcctgcaggctagggaggacagaaagtgcaaattcattctagcctatatatcaagagctaagaccatggattcaatgattcttattgaagcttctaagctacagatgcagatgaaagaagtgcctggaactcggtgcacagttaagaatcttgaaggagtcatctttgtagttactcttgagtagaaacactaaatatagttgagtttccagaaacagacattgcatgtgaaaaggaaaactgatgggggttagcaatagttggaatttctatttccattcaaagctactcccttgctgacaacatggtgttgatgactcaggaaacccatgggggaagataaagaacatgcaagaatgagaacctatcttgtggagtttatcttccaaaacataattctctatttaaagcatacatgaccaaccacagaagattttctagatagatttggttggactgagtggagtctatcatcccaaaggtagtctttgggaactttgagggtcaagaagagaaatcaggaattcattttgttaatcataaagtattaatcacacattttccaccttatgattttctcaatgaaataattaatgtcttacggtgtg

SEQ ID NO: 68179 - DNA, 1142 bp, Glycine max
  Clone ID: PAT_MRT3847_32579C.1
catggttttctagaaagcccaagtcctgctggttttaagatatctgtcttcaattcaaatcctgatatagtcatggttggttttcgagttcatgtgggaaatacatcagcgagtcacataccgtctagcatttctattttccaaagggttgttaaattcgatgaaggaatgaggtcctggtatgatattccatttactgttgcagaatctcttcttgcagatgaagaatttacaatctcagttgggcctacctgtaatggctcaacactggtccgaatagcctcgtctgaagttcgtccgcccacgcgtccggaaggctgcgggaaagagacagaaggggcagttttagatatggaagcaagagtacttggttcaaattcgtcacttagtgggtctgcaaagaagcgccgatcgatgcagtctgctcctattcaggagcaagtaatagcagatggactcaggctaattactaagttctactcatcatgtaagcaacaggatatctcaaggtttgaggaagcaaggacagaacttggaaaactcaagtgcaagccaatactagaaacgatattcgagtgtgatagggaaccaattctgcaggcttctgctagtcgtgtcttacaagcagtttttcccaagaaagagatatatcatcaagttaaggatactatgcaacttcttggagttgtaaaatcctcatcactactatcatcaaggcttgggataggtggtgctgcaggaagttggatcattgaagagttcaccatccagatgcatgcagtctgtaagattgcattgcaacgtcgctcaaatttagcaacatttctggagacaaagggctcagaagtggtggatgtacttatgcaagttttatggggaattttggattttgagcagcctgacacacaaaccatgaacaacattgttatgtctgcagttgaactcatttattgctatgctgaatgcttagccctacacggaaaagatgcaggagtgcattctgtggcgcctgctgttgtgttacttaagaagcttctcttttcgtccaatgaggctgtacaaactgctagcagtttggccatatcttcaagattgcttcaggtcccttttccaaagcaaaccatgttggctacagatgatgc

SEQ ID NO: 68180 - DNA, 432 bp, Glycine max
  Clone ID: PAT_MRT3847_3257C.1
aaaacacacacaacactatcacactctgcttcccttatcaaagtaatcattgaatcccctccagccagagacaaccatactcgcaactcattaaagccccaccttacctatctgatcattatcctccaagaaaattataaccacaacaccacctttatcatattcatggctattaactcatcgataccttttcagcatcagttcctccatgacgaacggggcgaacatattcttccaccaataccaataccatcacgtgaccccaatcacaccaactgcaacaacaacaacaacaacattagcggacatgatttaaagccaccggagctgctcattcccgtcccaaatatgcctcacttcatgcctcaagacaacaccaaattcgattcctcaagcattggttctgaccatctggaatcgctatgggattca

SEQ ID NO: 68181 - DNA, 225 bp, Glycine max
  unsure (1)..(225): unsure at all n locations
  Clone ID: PAT_MRT3847_32580C.1
cangctacgcgtacgnaangcgtacgtaagctcggaattcggctcgagnnagaattgcagacganatgtcatgcnaagtnctnaatcgtcaanttnatnncttnccatnatagtcgacttangagncgcantgangaanntccntcaancgcttngggccntgtaagnncccgatctgatcnagtatcnccgcngttagtncnacttacagttgtttatgtttgc

SEQ ID NO: 68182 - DNA, 322 bp, Glycine max
  unsure (1)..(322): unsure at all n locations
  Clone ID: PAT_MRT3847_32581C.1
cccggagttgctgtcccgcaacggggtgaagttcggagaagccgtgtggttcaaggccgggtcccagatcttcagcgagggtgggctcttttacttgggcaacccaagtttgatgggggcccagagcatccttgccatctgggccacacaagttatcctaatgggtgccggtgaaggttaccgnnttgctggtggccccctnggggagggcactgncccaatntacccagggggaagnttngncccctggggcctggctgntgaccccgnggctnnnggtgggctnnngggggngggnctnnngaacgggcganggggcctg

SEQ ID NO: 68183 - DNA, 357 bp, Glycine max
  Clone ID: PAT_MRT3847_32582C.1
cttgggaccttctccccaactatttcaaacacaacaacttctccagctacgttcgccaactcaacacctatgtatgtatcatacacccatcatgtctctcttctttttcttaatttctactcatacgttcttccgagacaatcttattcaatacattatgaaacactaaatataagagacagaacttagataccgtttagatgttttttgtttgttgttctattagaattggagtttcttcgataatgtgtctcttccttttgtttttcacattttcttctctgtgaagaggattctgtccgaaacatcattaagagacaattgtaacttagatataattattatatacttttgatg

SEQ ID NO: 68184 - DNA, 1152 bp, Glycine max
  Clone ID: PAT_MRT3847_32583C.1
aggttttctagaaagcccaagtcctgctggttttaagatatctgtcttcaattcaaatcctgatatattcatggttggttttcgagttcatgtgggaaatacatcagcgagtcacataccgtctagcatttctattttccaaagggttgttaaattcgatgaaagaatgaggtcctggtatgatattccatttactgttgcagaatctcttcttgcagatgaagaatttacaatctcagttgggccaacctttaatggctcaacactccccagaatagactcgcttgaagtttatggccgagctaaagatgaatttggttggaaagagaaaatggatgcagttttagatatggaagcaagagtacttggttcaaattcatcacttattgggtctgcaaagaagcgccgatcgatgcagtctgctcctattcaggagcaagtaatagcagatggactcaggctaattactaagttctactcatcatgtaaacaacaggattgctcaaggtttgaggaagccaggacagatcttggaaaactcaaatgcaagccattactagaaataatattcgagtgtgatagggaaccaattctgcaagcttctgctagtcgtgtcttacaagcggttgttcctaagaagagaataccatcaagttaaggatactatgcaacttcttggttttttaaaatcctcatcactactatcatcaaggcgtttgataaatggtgctgcaccaaattttatcattgaagagttcaccatccatatgcatgcactctgtaagattgcattgcaacgtcgctcaaatttagcaacatttctggagacaaagggtactgttgtctttactgattgaatcgtaaaatacatagaaattagcttttccttgtctatatttaaatgcacagtggggagataagaataagcatctgttgatataaacatccatgtttgctgcatgctatgactaattgattacaatgagatttctctctactaaagtcctatgtttacgtccttgatttaatgtgggcatatttattctatttgctaccattttattatgatataatcttttttttccctttttttttcctggtgtatgctcacaagtggtggatgtacttatgcaagttttatggggaattttt

SEQ ID NO: 68185 - DNA, 483 bp, Glycine max
  Clone ID: PAT_MRT3847_32584C.1
gagtggatccaatatgcaaccattaaaatagatgtagtgaattttgatgtgtatattaataaataaaaagataaataatttatttttttaatttagttctttatttttttaaaagtttattttaattttttatgtttgaaaaagacaaaaaatacaaaaccaaatgtaactttttattcccttcgtcttcctcctcttcttctccttcttcctccctgatcttcttccatcccaatttcgtctgaaattttattgtgaaacctcatgaaaccaaatcaacttatcatgcttcatctcaattcccctcaccaggtgacaccaaagttgcaaaactccatcaacccaaaaccataaaaattaaaataaaacaacaaaattcaccgtaaaaccccataaatccaaagcagcttaacacacccggtcacatgataccaaagctccagaacccaccaacccaaaaccaaaaaagattgaaacttgcac

SEQ ID NO: 68186 - DNA, 240 bp, Glycine max
  Clone ID: PAT_MRT3847_32585C.1
gtgcatattcctgcgaactgcaaccacaacatactctacggaaacaatatacgtcgcgtcaagttctgggacccttacttcttcttcatgagacctaagcctgtgtacgaagttaccttccttgatccttatgccggatcagatatctgttaaggctgcgaggtactcgtccatttaagtcgccaaccacgtcgcatcaagtacttgatgatctgtaagggtataagtacacctggctca

SEQ ID NO: 68187 - DNA, 311 bp, Glycine max
  Clone ID: PAT_MRT3847_32586C.1
aaatatatgtgctcctaggacctgctgtctggactcttagttagtgagttcttgaattatgctgcttcaaatatggcatcttggagcctctctggcgttcatataagcattattgctggctactcagagtgtcatatcattcacgtgtcgctgatttgatctgagaccgatagctaccttcaaatatgatgcgatatttagactgcttatcgggtcatacatgtgattgctaagatgatctttgtgaataaccctgtgttactgatctgttcgtctcacgattgtctgtaccatatctactggatctgtga

SEQ ID NO: 68188 - DNA, 144 bp, Glycine max
  unsure (1)..(144): unsure at all n locations
  Clone ID: PAT_MRT3847_32587C.1
tggaaaagctccatgcttctgtgctcgcncttgtattccttcttgtcatacnatntcaggnatgnttggtaacnngnatgangaatgtgacggatcagaagantggggatatntgcaatnagaccaaaagcccacttgttcngg

SEQ ID NO: 68189 - DNA, 615 bp, Glycine max
  Clone ID: PAT_MRT3847_32588C.1
tagggaatttggccctcgaggccaagaattcaagcctgaatctctttaagctagctaggaaatatgaagaaggggtttcagtttgcagggtatgataaagccaccataggaactataactcttgactgtcaaagtccctatggagagaagcgtaaccgatgtgcccttctaccacctaatgttcctattcttgctcattccttagaacgtacacaacgaaactggattgctaggtcaaattcccctactgatataattatacaagttggtgattctagctttcacttgcacaagcttgcaattgcctcaagaagcgaatatttgaaccggcttgtatttcagaggggaagcaacagagaaaaagctggtgacagcctcatcatccaaatgaaaaatcttccaggtggtaaaaaaacttttgaattagtagtcaaattctgttatggaagaaaaattgatattaccgcagccaacattgttccattgtattgttctgcacatttcttggaaatgagtgaagatgttgaagatggaaatctcatatccaaaacagaatcatttctaacctttctaatactatcttcatggaaagacacatttcgaatacttagagca

SEQ ID NO: 68190 - DNA, 873 bp, Glycine max
  Clone ID: PAT_MRT3847_32589C.1
gggaaactaaggtttgatgatttcaccttaaatttcaacaagcaagctaagagggagggcacctgagattataagccccctattacacttttttttttaaccgctaaagagcacccagctcctatataatagatacctaacatttccgaatttcccagtaactttctataggtgattgaaaatagtgctattcacgctccactctgcctctttctgtctctgcaatctctgcatcccctgctttgacaaaattgttgggaaagagcgtaaaagtggagcgcacatagcactactcataaaaggggggaatagttaaaaacagtaaaaggagattaattcctaagcattgcaagctaatataatatgtcctactattaggaacagatgaaaacggagctacaaacagaggaccctaactctattactctaactcctccttatggtggggtttttggtgtcatggaggaaatcaagcaaaacggtgcttttgcatttggggcactttggatcatcctcagagagcatcacatacatgaggcagcgagggcaacccacaagaaccatggaagtggcttcagggctgttagagtaactcttgtcctcttggttcagctccgaagacacgcacgagctcggcggtgacgtcggagacgccgtcgccgatcgtgtcggcgaatccagtctccgatcagccctcggtggggacaggttcagcttcaagtcaagctttggaccactttcgtttctgcgactcatggctgtcctctgtttttttaaggtgggtggaggaagtgtttttggaagagaggtcagaaagaatggcaccagcaaagtgttggtgatctttgttgttgcccccttctgtcgtcttct

SEQ ID NO: 68191 - DNA, 508 bp, Glycine max
  unsure (1)..(508): unsure at all n locations
  Clone ID: PAT_MRT3847_3258C.1
atcaccgccaaaccaaccccaactagtcttccttgggccgccttctgaaccgtccttcttgtctttggacttcccgtcggacttcttgtcttctggcgcatttggaataatggacaacgagtccactctgttgttctggccaggcatcgcggaaggctgggctactaaatcatcaaaagattgcgcgggcttgatcggggagttctgggcggcttgtgcatggcgatttgggcgacctgcttgaggctgaggctggcgctgttgttgcggaggctgctgctgaggctggggataatgacggggaccagcaggctgttgctgggattgaggcgcgtggttggcgggaagagtgacgttccggtagcgtaaactgaggtgtcctgttctgctcctgtggcggnggtgtctcgatgatttggggtacttgctgtggtggaggggtatagccgggcaaaggtgctgtcgttcgaccgttcgaggcgattctcgaatggaactgccgaggctg

SEQ ID NO: 68192 - DNA, 1709 bp, Glycine max
  Clone ID: PAT_MRT3847_32590C.1
aacattaacataacatcattgatgtagagaatgaaacagtaacattaacataacatcattgatgtagagaaaagagagtcaagggaaactaaggtttgatgatttcaccttaaatttcaacaagcaaactaagagggcacctgagattataagcccctattacactttttttaaccgctaaagagcgcccagctcctatataatagatacctaacattcccgaatttctcagtaactttctttctatgggtgattgaaaatagtgctattcacgctccactctgtctctttctgtctctgcaatctctgcatcccctgctttgacaaaattgttgggaaagagggtaaaagtggagcgcacatagcactactcataaaaggggggaatagttaaaacagtaaaaaaaagtaaaaggagattaattcctaagcattacaagctaatataatatgtcctactattaggaatagatgaaaacggagctaggaacagaggaaaacagagctagaaacagaggatcataactctatcagtctaactcctccttatggtggggtttttggtgtcatggagaaaatcaagcaaaaacggtgcttttgcatttggggcactttggatcatcctcagagagcatcacatacatgaggcagcgagggcaacccacaagaaccatggaagtggcttcagggctgttagagtaacttttgtcctcttggttcagctccgacgacacgcacgagctcggcggtgacgtcggcgacgccgtcgccgatcgtgtcggtgactccagtctccgatcagccctcggtggggacaggttcagcttcaagtcaagctttggaccactttcgtttctgcgactcatggctttcctctgtttttttaaggtgggtggaggaagtgtttttggaagagaagtcagaaagaatggcaccagcaaagtgttggtgatctttgttgttgttgttgcgagaattggtggaggttcagggccattttatataaggaaaacgaagggagtgatttaaggcttaatttaattgtgagagagaggtggaggggggtagggtgtagagagagaaagagaggagagagaaagggattgaattgaattgaagtattgggtagaaggagagtgtaaattgaggccaggaaatgtattaattgtttggaaaaatcccaagaagtatgcaggaaggggaaatttggagtaaatatcgcaattacaaaatgcagaaggaggacctttcttcattcattgccttaagggaggagagtcggtgttttaagactctcggagcaacacagcgcaagagaaatttaaagctaaaccccttttttaaatatccaacccctcaccaacaaaatttaataacacctagtagtaagtcccatttatttttttcttcttctttttgtttaattaaatcgtactgtaacaatggaattaaaaccaagtgtgtcactgtgtgcaacagccatgcctcaattttaaatattgggtagaaggagattgtataaattgaagccattgggtggaaggagagagaaaaaaaaaaaagagtgatgggattgaatcggacgcgtgggcggacgcgtgggtgtaatagccatgccccaattttaaatattcaacagtgcccccccgagaaaaggaaagcaaattaaatgaaatgacaatgttcagtgggatctcatctcaatgaca

SEQ ID NO: 68193 - DNA, 231 bp, Glycine max
  unsure (1)..(231): unsure at all n locations
  Clone ID: PAT_MRT3847_32591C.1
tattcttttttttgccancacacatggcaaggtgcatttgataacaaggatggtgttaatagcgggacttgaatgttcttgatgaactttgtttcttctcccccacatagggaaaaagaagttttttggggaaagggaccaagagtttattataagaacgggggggggggggggaaaaactactttggaaacatacaaacccccgttttgctttcccaaagggaagggggg

SEQ ID NO: 68194 - DNA, 488 bp, Glycine max
  Clone ID: PAT_MRT3847_32592C.1
ggctcgagacaagactctctgtagacgcgcacggagcacgcgtctatatacactctcttttctcggtgaccacaccgaccagggctaatggacactcctaatatgctgggtcctcccacgctctcaactactactaggcacatatatcctgccattcctcgatgcctcgcgctcaaccatccttatgtctgtcgacaacacatggcgaccagaagctgaatacgtcatgtcctaaaaaaaaactgcaatcctgactggaacgaagaattgaccctctctgagcaggacattcaaaccccaatacactctgacgggttatgacaaagacacttgctctgaagatgacacaatgggagaagcatagatagacttaaaaccatatctacagtgtaagcagatggtaataggtaaactcccaaaaggccgttcactcaagaggagccagccagatggaactaactaccttgctgacgaaagcatctgctttt

SEQ ID NO: 68195 - DNA, 235 bp, Glycine max
  Clone ID: PAT_MRT3847_32593C.1
ttaaaggaactgatatgctaagacaactatggggtactgggtgcatattacaagatacactcacctattcgacaaaacgatagaaacggatcagatccttagctaatcattagaccatacgtaatatatgtcatatgattaccagccgatagagtgtgggaagagatcgccacaacaaatacgttcgtgactctggcgacctctacatagattttctgatcgtactaacagaacc

SEQ ID NO: 68196 - DNA, 161 bp, Glycine max
  unsure (1)..(161): unsure at all n locations
  Clone ID: PAT_MRT3847_32594C.1
caaatacatggtcatccanggtgagcctggtgctgtcattcgagggaagaagggtcctggtggngntactgtgaagaagancggtgcggcctngancattggcanttatgatgaaccaatgantccaggtcaatgcaacatggtagntgaaaggcntangc

SEQ ID NO: 68197 - DNA, 403 bp, Glycine max
  unsure (1)..(403): unsure at all n locations
  Clone ID: PAT_MRT3847_32595C.1
gggctaatgacaagcgganacagcaaaggagccccaacaggagaacacaagggaaacgcccctggacgggccaacacgaagggacaaaagaaaggaacggggacatacccacaggcaaacatgcagagtgccacaggccaaacgcccccggaaagaacagaaagccagaccatgcgggcccgacaaacagagccacccacaacagaacaagctgcagggctcggccataacacagtcaagactgaaaactacaagccagagtggccaggttctacatcctggcaagaagacggagaatacacaaaaaggaaacacgggcacaaagaggcaaggaacctcagtgtcaaaaaaactcgggagccgaaagaaggaaagaactccgcatggccacactacaaagaaa

SEQ ID NO: 68198 - DNA, 523 bp, Glycine max
  Clone ID: PAT_MRT3847_32596C.1
cttccatcggctgcgagaagacgacagaaggggactccttttctccttcaaaacttgaattaccttcaaccataccttgtttttcaagcctctaaaggtaagatactttggaataaccatgaatgacgaaaatggaaccactccaacaatggtgtcaccaccttcacctcatagctcatgtgcgtccactgatcccagccaggaggacaacaacaacaacaacgataataacaaagatggtgacaacaacaacgacgatgataacaacaataataacgatgacaacgacaacaacaacaacgaccccaacaacaacaaccctgaagctccttccttggttctagtagggtgccctcactgccttatgtatctgatgatctctgaggataaccttaagtgcccaaaatgaaaaagcactaatttgattcattttacctaaacataagaaggggacaaagtactaggctaccttgtttctaattctgcattctatgttgcaagtaaaaaatgttagcatttcaag

SEQ ID NO: 68199 - DNA, 794 bp, Glycine max
  Clone ID: PAT_MRT3847_32597C.1
ggctcgagaatcagtcaccgtcacagtctcttctcactgtcacactctcccctctctctctcttctcttctatgttatgtttctactttcaatgcaccgagtccctcgtcattctcactagtagccagacaaaacccaaaaccacacgcaataacaaaaaaacaacatgcggtgttgcattccgacgttgttgctcgtaaccaccgtactattgtcggcggtgcacggagttttcctccctctggagcggagcattcctccgacgggccaccgcgtggaggtggcggcgctgaaagcccgcgacagggcccgccacgcccgcatgttgcgcggcgtcgccggcggcgtcgtcgacttctccgtccaaggcacctccgatccaaactccgttggattgtattatacgaaagtgaagatgggaactcctcctaaggagtttaacgttcagattgatacgggaagtgacatattgtgggtgaattgcaatacttgcagtaattgccctcagtctagtcaactagggattgagcttaatttctttgacacggttggctcatccacagcagcgttgattccctgctcggacccaatatgcacttccagggtccagggtgctgctgctgaatgctctccgagggttaatcagtgcagctacacctttcagtatggagatgggagtgggacatctcgggtattatgtttcggatgcaatgtattttagcttgatcatgggggcagcctccgcagtaaactcttcggctaccattgtttttgggtgagcatcagtcagtctg

SEQ ID NO: 68200 - DNA, 127 bp, Glycine max
  Clone ID: PAT_MRT3847_32598C.1
gctccatctaggagcttccaaacatacctataaaccttttcaggcgaaagcacactcacccaagatacacatccacatcacatcttggctcttgcttatactgagtacagaaaaagctgcacaccac

SEQ ID NO: 68201 - DNA, 441 bp, Glycine max
  unsure (1)..(441): unsure at all n locations
  Clone ID: PAT_MRT3847_32599C.1
tggtgcaactttctggagcttatataacaaaccggaataggggcccaataagaaagaagagtcatcacaaggaaaaaggggaaagaaaagatgccttgcctttacatctccaccaacataaacttagatggagttaacatcgatccaatcttttctcaagccaccactgcagtttccacaatcatcggcaagccagagaaggtatgccactctattctcttttctctctaatcatcttttttccaatcatagcttatgaaatttggtctcaattctcaagacgtgtgaaaaattcgcttttggggtattcttattcttattctttngttggtctattgtaaatttgatgcatatctgttaatggttcaactgtttgatttttatatactcccccaacaactcaatctactgcaaaaaggaatttgaattctatattgtaaa

SEQ ID NO: 68202 - DNA, 728 bp, Glycine max
  Clone ID: PAT_MRT3847_3259C.1
gaatggtatcggtattgtcaaactaatgggtcgtcacagtgggtttatatctatgtatgcaactctagcaagccgagacgtggatttgcttattccagagtcacctttttaccttgatggtccaggtggactctttgagttcatcaggaaaagacttgcagaaaacgggcatatggttatagtaatagctgaaggtgcaggtcatgagcttatttcggaaagcctatctgctacaaataagcaggatgcttctggcaacaagttatttctagatgtcggtctgtggttatcacagaagattaaggaccacttcacaaaaagtcgaaagatggatataactctgaagtacattgatcccacctacatgatccgagctgttccaagtattgcatctgataatgtatattgcactctccttgctcaaagtgctgttcatggtgcaatggctggatacacgggcttcgcagctggcgcggtcaatggcaaacatgcttatattccattttatcggataaatgagattgagaagaaggttgttataactgaccgcatgtgggcaaggttactgtcttcaaccaatcaacctagcttcttgaaaccactgtcatctcattaaaccagctgcttgttagtgttttctttttacctgcacttgtttagtgttaactcatgaatcaattcaagagcatcagtgctttaattaaatgagttgcttattttacaatgcc

SEQ ID NO: 68203 - DNA, 384 bp, Glycine max
  Clone ID: PAT_MRT3847_325C.1
acctctcgtacgaccatgttttgccttacgaagactatagagttctataccttcgaagctacaggcatcgcctgggttaggtgccagtacagtgaccgttttagttactgtacgagactacgtgaccattctccgacagggaacaactagtgcgtaagggcgttggttgttttcaaggcccccaaggtgacctcagtccccaggacactcgtgcatttttgggatcaggggtttttaggttactcacatctcttggaggatttgcactatctggtcgtagggctgggtttcttttgccgtggttacagagaaaaccatgcatggggttgcagcgcctcctaacaaccactggcttgttcttgttgaggcacatgccttggttgg

SEQ ID NO: 68204 - DNA, 447 bp, Glycine max
  Clone ID: PAT_MRT3847_32600C.1
tttgttttttttttgttttgttttttttttttttcaattggaaacttttgacatgtcataaaaagaattcgtaaccacacgaaagctatatccaggctgccaaaggtggttttttcaatcattgtacaaaacagactggtagtgtttaaccagaaaactgtggtccacttgggctcatataaaattatgtaatgcggggggttttatataattttaagagttgacggtcatttggtattgccacaaaaaaggagggtgaaaatttcctagatgagttggggtataaaaatttttattcaaaggtaattctggaatttttcaccctaaaatttttaagaatcccaaaccgcctctttaagaataattcttaattggttttccccggtccaacactcaaagtcttacatggggggcagcaaaacaaaagacaagttggtgagaaaccat

SEQ ID NO: 68205 - DNA, 865 bp, Glycine max
  unsure (1)..(865): unsure at all n locations
  Clone ID: PAT_MRT3847_32601C.1
ctctgctaatgctaatcatatcaatgattgttaccctttttatacccgctgtctctgatcgtcatcacaatctctttaatctttttttattttttatcattcattcggatttttattcttttctcaaatttcgtccgcagatatcgtgccacatttattccgtttctcatttctgaacaccacatagacacatcacacatttgatgagctatctatcaattttccagcttcaacaactttcgtgatcagtaaaaatggaggttgcagtccccagacaacaacagtaaaaaaatcagcacaatgaggatatgatagagttctcaagatactcaaaacattcgggaactgtccagaggaaagctgacaaaatccctgagtatggtcacaagaaacaagaactaaaaggggaagaaactatgagatgtttaaagaaaattaatgcagtaagattggaagctagggttacacaaggagaacaaataaatcagcttgctaaggacaagatcttaaaatgctcgaaagattttggaactacaaagacgaaaaaggttgaagaaatttataagtgtgataatacaanaatcgaagtcatgcaagaaaggacatgagacacagaagcttactgtctcaaacaagaaaaggaaatttgaagatgatctcttgaatgacgattttgaagatgaagaaatgctcattcttttaaagtcaaggaccaggagaagaagatgaataatgtatggggatgnntggacaaaatccccgaaaatgtcatcaatgcatgaaaaaggagagaactttntttgtgccttgtactaaatgcccaaaaatgtactgttgncggatgtgtcaataaatattaccctga

SEQ ID NO: 68206 - DNA, 430 bp, Glycine max
  Clone ID: PAT_MRT3847_32602C.1
caaaggaggaagcgctaatgttgcagtagtatgtggcaagccaaaatcctcgagaatttgatagtggagtacggccctacgttagtcaagtcctcatgttgcagcagtatgggctatatttttttgcggaatatgatattaaatgcataattgactttcatgctgttcttggttcccagaatgggatggagcatagtgcaagcagagatggatttacaggtgagcacaacaaagaaagcagtgcaacctgaaaaaggcttaaacaatgctagtctaaatgggatgcacaaggaattaatgaggcttcctagaatgattgatatcaaaaagtgttgtagaatgattgagcttactcaaggctgttacgacatgacatgttggcttactaaacagaaagtgctaagcaaagggacttgcaaacaagtggatg

SEQ ID NO: 68207 - DNA, 1888 bp, Glycine max
  Clone ID: PAT_MRT3847_32603C.1
atatattttgataagtaccctttatcaaagaagcgaattcatctagataccttaagagttgactcccagtttcgtcctcgaacaacgacggtcgcatcagtggtgcggacacgtagttctctgtgactatggccccacacatttttcaatgagcatttatttttcttttaacaaaaacctattataacaaggctcgagtgaatgtccatgatatgacatacaatatttacattttggttcttctagaacgtagcaccaccttattctacatgaatataaattgtgagatcagatactctttgataacatcctaagtacttatagtacgttgttccccccattgcacatatttcttaatcatatgattttcaagtgatgcaatacatcatgttatttattatatgacagttatttttacaatgagaagtttaactttgatctgtttataggtggcaactgtggtgcggatccgtagttctctttcttttgcaacccacacatttttcaatgagcatgcatttattgatgtgcaagtacctattataactagcacagactctgaagggtttagcaacatgttgaaggttaacaccctggaacagaaagcagagaaggagaaactagacacaatttatgagactgaaggtgttagccttgaacatgtgaaggcagctgcaaaggagaaaagcaacattattgagcatttgaaaagaactgagagcaatagggaagcactggctgctgcagttcaggatctgaggaaaacgaatgaactcgcatcgcaaatggaagcaagagaaaagagaaagttaggagcttcttttaaggacgatgacaaagtagactcttccaaagagtttttccctttccaaacttatttgactgtctctggacgcttgcatctcgagagttatgcatgtgctcttggaaatgtctactcatttggtcctagatttctagcagataaaacggattctgctaaacatgctgcagaaatgtggatggttgaggttgaaatggccttttcgctattaaaggattccatgaattgtgcaaatgactttttcaagtacctctgcaactgggttctgatacattgctctgaagaaatgaagttcgttgccaaaagaatcgacaacacctgcgtgaaccgtcttcagcagattatattaggttcacctgtaatgatgacctaccatgaagctatagatgttcttagaaagtgtctactgctgaaggttcgaaatttgaaacaaattttgagtcagggtttgcactcacttcagagcacctaagctatctaactgataccatctaccagaagccggttgtgatatacaattatccaaaagaagctaagccattttatgctcgccagaatgatgatggaactgtagctgcgtttgacttggttgtcccaaagcttggaacaataatatctggtagccaaaacgaggaacgtcttaacatgataagctccaggattgatgagttaggcttgccgcgagagaagtatgaatggtacctagatcttcgtcgaaacggaacagtgaagaactctgggttcactctaaggtttgacctgatggtcctcttcgcaactggccttggcaatgttagggacgttatccctttcccaagaagctatggcaaagccaataactaagtaaaagttttgggctaagattcaagttgcatattcgaggctattggcattcaaacttccaatatttgtggacctgaggaaatcatgacactgttgtatgcttgtgtaacaatttaacatatgaatggattacttgtgtgcctgatgtatatatggaaacgtataattgaaatgaaatttattcaagtcttgtgaagttaaaaaaaaaaaataaaaaaaaaa

SEQ ID NO: 68208 - DNA, 756 bp, Glycine max
  Clone ID: PAT_MRT3847_32604C.1
catgattggtcaagagcaaaatatgtaagtcataatttttaaaataaccatgtgacattaagggtgtatttggtttctatgttcaaaatcggcttttagttttcaaaatacaactaagcaaggtggctaagacagttggtggaaggtagtgtaagacacaaagcagagtgtggaattgagagaaaggttgaacaagatataaaaagcagaagatgagaaaacatctcccagattctatattttagtttttaaaacacttgtattttaaacaattttcagaagttgttaaattttcaatgagaaattgattgctgggtagtatgaaattggtttaaaaaacagtttttaaaaccaaaaagcaagagagaaatcaaacatgccccaagtaatcttcatatgtgattgtgtgtataaacacaaagacagtttatgaagaggatggttttaaccaatgcattgtttttctatcttaatggtaggattgattaagcatttatgattgattaacacataactttctcatgcttgcttgagaatctgaagcatggatacatctaaaatcacactgtacacgtaccgggtatgcacctgtattggatacttgatgagtactcgagggtacgtacagggtatgaccaagaaaaattttcaaaaaaacaatttcggtacttcacttgggtgcatatggatactttttaggtatgtatcaagttataaaaaaaataattgaagcacatattttttatctattctatg

SEQ ID NO: 68209 - DNA, 484 bp, Glycine max
  Clone ID: PAT_MRT3847_32605C.1
acctccggttcgatcctttgatcacactgtcgaggatatgatggacctgcttacacccatccacgcctacaggcagctttgtctcgatataactgtaatgcacttttgaatccattgtcagcatcgagactttcatgtcatcttcatcgccatctgtcataacggcaggagccgaggtcgttgcaacagtaaggaatgggagctcttgctcttccggtaaggagacatccaacaaagggtccagggtgtcgttcatcggatctcttggcgtcgaggcactgccactcatccctgctgtacatccgcacagcaacccgggcattggtatcccggcgtccaccaatgccagcgtgcaggcattgactgcggcggcgagaaccgagccgttcgacgacaaaacagagacgtgaatgctgattgtactatgtgggtacagatatgtgtgaaggtgcgattggaaagcgaaacgcaatgttaacgcaat

SEQ ID NO: 68210 - DNA, 223 bp, Glycine max
  Clone ID: PAT_MRT3847_32606C.1
attcgacaatagaaagggggcgaaggattacttagactataagtacatgcccaacacattaaatcctaaaaaccatagtgctctattctaaacatgctgagggtggacctattcaaattaaaaaagctctttatcacaaatggctgaaaatcgggaaccatcctctgaaagcctaaacccaacaacgatgcacaacaataggagtttgcctgcgttctcctac

SEQ ID NO: 68211 - DNA, 681 bp, Glycine max
  unsure (1)..(681): unsure at all n locations
  Clone ID: PAT_MRT3847_32607C.1
attctctactcccaattnnnnnnaatgctatgcaattgattaagagaaattannacggatnnnnggataaggatgnnnatcannnnggtcagcctactactcagggggggttcgagataatatgcatgngatcgttcaaatcttaaatgcaactattttacaacaaaaaaagaagaagaagagagtaatagtaatagtatttttacattacattcatcaacatgggatccccaccactaccaccactaccaccatcaccaccaccaccaccgtgaggagtgcacaagcaagagctgagcctaaacatgagaatgcaaaactccatttggcttagagcgccatcgccgtccaaatcgccctccatgagcatgcaggcgagctcgtcgtccatgacgtcgaggccgagcaggtagcagttgagcttgaggctctcgaaggtgatgaggcccttattcacgtccatgagcaagcggaacccgttgcagagctctccaatgaacccttccgctcccatgcgtgcaatcatcgaagggaagtagtcctcaaagtccaagaggtagtcctgctccatctctctctcaggagttagggcagttgaattaaactaactctgtgttttagtcgccgaatatttctctcaggaagagaggtggtggttgttagagacactgtgtgcagaga

SEQ ID NO: 68212 - DNA, 1599 bp, Glycine max
  Clone ID: PAT_MRT3847_32608C.1
cggctgcgagaagacgacagaaggggttcctcttcaatttcgcatcttctccttctcattccaactccaaaatacacacacacgatggaaaccttcctcttcacctcagaatctgtaaacgagggccaccccgacaagatctgtgaccaggtttctgatgccatcctcgatgcttgcttggagcaagacccagagagcaaggttgcctgcgagacctgtacaaaaaccaacatggtcatggtctttggggagatcacaaccaaggccaaggtgaactacgagaaaatagtccgcgacacttgcagaggtattgggtttgtgtctgctgatgttggtctcgatgctgacaagtgcaatgttcttgtcaacattgagcaacagagccctgacattgcacagggagttcacggccacttgaccaagaagcccgaggaaatcggagccggtgaccaaggccacatgtttggttatgccacagacgaaacacccgaactaatgccactcactcatgtgcttgctaccaagcttggtgccaagctcactgaagtgagaaagaacaagacatgtccttggttgaggcctgatggcaaaacccaagtgactgttgagtacaggaatgatggtggggcaatggtccctatccgtgtgcacacagtcctcatctcaacccaacatgatgaaactgtgacaaatgatcaaattgcgaaagatttgaaagaacatgtgataaagcctgtgatcccagctgagtaccttgatgacaataccatcttccacctcaacccttctggtaggtttgtgattggaggacctcatggagatgcaggactcactgggaggaagatcatcattgatacctatggtgggtggggtgctcatggtggaggtgccttctctggcaaggatcctaccaaggttgataggagtggtgcatacattgttaggcaagcagcaaagagtgtggtggcttcagggctcgcgcgccgttgcattgtgcaggtttcctatgcaattggggtgcctgatccactgtctgtgtttgtggatacctacaaaactgggaagattccagacagtgatattctggctttgattaaggagcattttgacttcaggcctggaatgatttccatcaatcttgacctcatgagagggggaaacttcaggtaccagaagactgctgcttatggccattttggaagagatgatcctgatttcacatgggagacagtgaagatactcaagcccagtgcttgactgattcattggcattggtgttgtttcttaaggtggttatcatcgtaattggtaaccatctttctgattttgggttaggaaaataataataaaggagcttcggtgagtacatacttcatttaagattgtgtttctcggcttggatgaggaatgggagcggaaatgtgctgtgtcctaagtggaggcgtttgcacaataggagcatgcaagcagcattagctggctagctacctcttttggtttttgccttttctcttgaaattttctttgttgttcacctttttttatccctcgcctttctgatatttgattattttgcaaccaatcttgcgtggttggggt

SEQ ID NO: 68213 - DNA, 388 bp, Glycine max
  Clone ID: PAT_MRT3847_32609C.1
caagttaaccaagatgcctgacaaccttcaaaactttattcaccatcttaaaaaaattaacgaaaggcagaaagggaacaaacataaacctccccacccttcctccggttttactggcaaaactaacaaggatgggtgagacggcctacatcctacaagcctgactagcaactcacggacattgtaaggttggaaccgcggtccatcaaacccatatgaagaaaaaagaggggtaaaaaagtcctaggtctcttacctcccagccaaaccaccgtcctccttcccacccctttgacggccgttttcttcgaaccgtcataactccatttaggtctttgcggccataggggccaaattgggtggccaacttgtccttaactaccttctg

SEQ ID NO: 68214 - DNA, 917 bp, Glycine max
  unsure (1)..(917): unsure at all n locations
  Clone ID: PAT_MRT3847_3260C.1
tcgagcacacaactaattctactttttttgacaaagcttctctccaaaaactcaagtggtgattccatttccaccatgtccaattctgaacacaacatcatcactggacatgctggctatgtccttgaagatgtccctcatctatctgactacatccctcacctcactacatatcctaatccattgcaagataatccttcgtattcagttgttaaggagcattctgttgatgtggatgatactattgcgcaaaaggcaagttgttgttgttgttgttctctctttcattacagtgttcctgaattgttgattcaattttctgtttctctgtctaggtagttgtacataagaatagcccaagagagactcattttcgccgtgctgggccgcgtcagaaggtatattttgagtccgaggatgtgtatgcttgtattgtcacatgtggaggtctttgtcctggtgtaaatacagtgatcagggaaatagtttgtgggttataccatatgtatggggtgcacaaagtactgggaatagagggagggtatagaggtttttattcttgcaatactattccattgacgccaaaggttgtgaatgacatccacaaacgtggtggaaccatccttggtacctctcaaggagaaggaggcaatgatacgttaaagattgttgatagcatccaggatcggggaattaatcaggtttacatacttggaggagatggaactcagagaggggcttctgtgatttttgaggaaattagaagacgtggcttgaaaggttcagtggttggaattccagaatcggttgataatgacatcccggttattgataagtcattttggntttgacactgctggtgaagaggcacaacgagccataaatgctgctcatgtggaagcagaaagcactgagat

SEQ ID NO: 68215 - DNA, 482 bp, Glycine max
  Clone ID: PAT_MRT3847_32610C.1
ttagataaccactttttaccatatttatattagagagagaagaatccaagcccccttggtaccggatgatgctctttttaggaggggaaccaaatcttataagaccccttaggtgggtggaatttttacctttaccatttaacctaaaaaaggtagtcctggcccaccacacagcacatgatatttaatttaatacacaatctcattctaatggggctcaaaatgcttggactaattaagcaccattgttggtctgataggcagggcccacagataaatggggtccccataaaagggcctggcttccaaggaaatggcaaacagggttagttccagaatcaactcccataagtggatgaagcattggatgattcattccaaaagtatttgaggggcaaatagcaagggcctgagttttggttccttcaccagccaccattggaaccatgaaagctgttgtttcacggacttcatggcagtaa

SEQ ID NO: 68216 - DNA, 566 bp, Glycine max
  Clone ID: PAT_MRT3847_32611C.1
gagaattttgacttcaggcctggaatgatttccatcaatcttgacctcatgagaggaggaaacttcaggtaccagaagactgctgcttatggacattttggaagagatgatccggatttcacatgggagacagtgaagatactcaagcctagtgcttgattggttcattggcattggtgtttgttgttttcttaaggtggttatcatatcgtaactcgtaaccatctttctgattttgggttaggaaaataatagtaataaaggagcttcggtgtaatacatacttcatttaagatgtgtttctcggcttggatgagaaatgggagcggaaaatgtgctgtcctaagtggaggcgttcgcacaataggagcatgcaagcagcattttggtttttttgccttttctcttgaaatttctttgttgttgacttttttttatatatccctctcctttctgatatttgattgttttgcaaccaaacttatgtggttggggcaaaattattagaatgctatttatttgattcttttcccgtcactgttttataatatattatttgtcaaaaa

SEQ ID NO: 68217 - DNA, 473 bp, Glycine max
  Clone ID: PAT_MRT3847_32612C.1
agctcgaattcggctggagccattcctaccctactctatctacaactttaatttttctatcccgcatgggaccatacaaggccgggggggaatacaagctatatcaacactcacactttgctttacattgtgtaaaacattaactttgcagcatcaagatggcggatgagtccataccgaaggaggctgcataccatatcatacacgacaagtagatgttggatgggaacccatggtagaatcaggcatcatttgtgacgactcggatggagccagagtgtgataaactcattatggctgccattaataagaaccaaggaaacttttactattacaatggcaatacttctctttgtaccacacatgaacctacgcgacgcaaagcttgtagggtaccacatgcaaactctgagcgagatcttggtgaatgcatcgtgtgtgtacaacacgccattaactggatggattggatt

SEQ ID NO: 68218 - DNA, 647 bp, Glycine max
  Clone ID: PAT_MRT3847_32613C.1
tttttttttttttttttgttttaagaaaacgtgaatttagataataaaattgttacaaggtacgtaacttatttatgaggctttataacatgctcaaattattaacgacaacacacaatgtatttcctgaagctttgacgacttgtaaaatcctcaggttgcctaacagactttttcagccttgtaagagctgattaatatgtggacatttatgataggtaattagtgataacttgtgctctatggcttggcgaaatggcaacgatggggaatggtgattgcgattttgggatcaacaccaactttcttgaaagcatcggaagagaagacatcatagaggcaagggatgctgacatttacaaggtctttgcaacactgtgaagaaacaggagccctcacatctcgtgcagccttttcacagtgacgcagtttatgcgtcaaaattctaagtgtgctgaactttccgcatggaccatgtttctcgtgttcagattcaggatatttaggaccatgatcgtattcagcatcgcccccagtgataaaaagaagcaggaagaaagcaaagaagttgtttcatcatctataattaaatgaagaatttggttttcttttttttttttcttttttgtaagtagcttcaagctttg

SEQ ID NO: 68219 - DNA, 250 bp, Glycine max
  Clone ID: PAT_MRT3847_32614C.1
tgagaattgaggaaggtgtaaggtagcatttctgttggatgaaatatttaaaagcagagtaaaggagggaagagtgacagagatggagaatagttggttatgagtggggtaagtctctcaggctgggggctaatctttggttatgagtggggtaggtcttttttttctctctcataaatttcatttttattcctttgttattccaagaaaatctataatcactgttatgaagatagcaatacagattata

SEQ ID NO: 68220 - DNA, 299 bp, Glycine max
  Clone ID: PAT_MRT3847_32615C.1
ctacccacgccgacccacacgtgcgcaaaagccatagcattattattcaatggtagcaagatgccaagctacaaatggaagaactggctaatcttaaaatactttacgaacattctgacatccctgcaacaatacatattgtcctaacttatttatctcaacgctctttatcatgtccatacttcttacaaagctgatgactgctaatcaacaatgaaaccacctatttctcaacgcgaccatgattccatttggaactcacactagttacctatgcacattacacctctcgacattat

SEQ ID NO: 68221 - DNA, 381 bp, Glycine max
  Clone ID: PAT_MRT3847_32616C.1
ttctagatcgcgagcggccgccctttcttcattccttacaaatgccaactcggccgaggaggtacaagccaagcagggctggccgtgcccagaagcgcctccgacgtgtcgtaacttcattttgacgaacgagcgcgacgactgtttgacgcaaactccctgggaacggcgggcgcgctattgcttgccttcgctcccgagccctttacaacgtggctcaccacggctgatgtcactccactcgttggtacgtaccactctggcactcacactcaggcgtgagactccgtctctctgcccgaccacctctcgtcagctggtacccgcccatgcgtttcttagttggacgagctggccaacaggatcgcattattattcata

SEQ ID NO: 68222 - DNA, 676 bp, Glycine max
  Clone ID: PAT_MRT3847_32617C.1
gcaatggatctgctcccacctctcacttcatcactagtttgggcaatggttccctaactggatctaaaatgacaaattcctcttcgtcgtcgcagttagctaaagagtctcctttgatggatgagatatcaagcattggacgcagtcagcgtcagatcatgcatcaattggacaatctcaataatcttctcagggggagcttgggggagaagtctcacccaacaagaaccaacagcaggaaaagcattgacatgtcatcggattccgtgggagctcgtgttatggtggtggccacagttggttgtttggggatcttcttgatgaagggttttttgaacaaaaagtgattcattcctctaggtatagtcagctttttaggttcaaaaatatttttcttcactgtgacaacccttctgttaagaaaggtgttgagacattgccagttgaagatagattcaggagacagtcattttaggatcatttgagggtcagtgagaggatggtgctcacttgaaattttgtcacttcgcggacttattactttgttatcacaattttatgccattttcaacactacaaagtaaagtctttggtttagaatcttgattaggtggtattccatacacctttctttcaacatttttaatctttaaataagttggtaatagtgaggtca

SEQ ID NO: 68223 - DNA, 124 bp, Glycine max
  Clone ID: PAT_MRT3847_32618C.1
gacggtccacagtaaccgagtttaactctctcaagttaagacccttcctctcaaatctgctaataatcttcgccataaagcctcttttgacgccatctggcgtgtacatgatgaaagtttgttc

SEQ ID NO: 68224 - DNA, 297 bp, Glycine max
  Clone ID: PAT_MRT3847_32619C.1
tcgcacactcgataataagacccttgctactttgctgcaaatgcatacacaggctaaggaccacgccatgaactttttcaagatcgtctatggacgacaagccacgacgagccgcgactactgctgccgggcgatatgggacaaccgccgatccgcctaagagccaccacgactccgcgaggagcttcggcggcctcagtacaaaccctcgcctcgaaattcgagggcgggctcgagaactaccgacttgagctcgaggaatttgacgccggtttgaggaacgaaactggggtgata

SEQ ID NO: 68225 - DNA, 2024 bp, Glycine max
  Clone ID: PAT_MRT3847_3261C.1
cacacaacacatcttatttttcttgacaaagcttctcttctgagacccaagtgatgattcaatttctctactgtctctgactcaactcaacacaacatcaccacgtgctaattacggcatacaacatcatccctggctatgctagctaagtccttgcctcactacatcacctatccaactacatgacaaacctcactacatagttgaatcgattgcaagactttccttgctattcagtattggaggagcattctgttgatgtgcatgatactattgcagtgttcctgaattgttgattcaattttctgtttctctgtctaggtagttgtacataagaatagcccaagagagactcattttcgccgtgctgggccgcgtcagaaggtctgtttgtttgttttgtttggctgccaccaatgtgtgtgtgatttatggggtgacagacaacaatgattgaatgtttcccaggtatattttgagtccgaggatgtgtatgcttgtattgtcacatgtggaggtctttgtcctggtgtaaatacagtgatcagggaaatagtttgtgggttataccatatgtatggggtgcacaaagtactgggaatagaggtaccaatcactctaagtgccttcgttatttctaaccgagacagattggcagtttcatttgaaatttttcatgagcattttcattgtgtaatatagtgttctctcttttcctccacttcaattcaattgtatgcagggagggtatagaggtttttattcttgcaatactattccattgacgccaaaggttgtgaatgacatccacaaacgtggtggaaccatccttggtacctctcaaggagaaggaggcaatgatacgttaaagattgttgatagcatccaggatcggggaattaatcaggtttacatacttggaggagatggaactcagagaggggcttctgtgatttttgaggaaattagaagacgtggcttgaaagtttcagtggttggaattccagaatcggttgataatgacatcccggttattgataagtcatttggttttgacactgctgttgaagaggcacaacgagccataaatgctgctcatgtggaagcagaaagcactgagaatggtattggtgttgtcaagttaatgggtcgtcacagtgggtttatatctatgtatgcaactctcgccagccgagatgtggattgttgcttaattccagagtcacctttttacctcgagggtccaggtggactctttgagttcattaggaaaagactcgcagaaaacgggcacatggttatagtaatttctgaaggtgcaggtcatgagcttatttcagaaagcctatctgctacaaataagcaggaagcttctggcaacaagttacttcaagatgttggtctgtggttatcccagaagattaaggatcacttcacaaaaagtcaaaagatggatataactctgaagtacattgatcccacctacatgatccgtgctgttccaagtattgcatctgataatgtacattgcactctccttgctcaaagtgctgttcatggtgcaatggctggatacacaggcttcgcagttggcacggtcaatggcaaacatgcttatattccattttatcggataaatgaaattgagaagaaggttgttataactgaccgcatgtgggcaaggttactgtcttcaaccaatcaacctagcttcttgaatcctaaagatatcactacacatcaaacgggaaattaaacctggccaatagaccagctgctagttagtgttttctttttacatgcacttgtttagtgttaactcatgagtcaatattcgttcctttgcgacgttaatcggtaagtgtaccaagtccctcgcacaagtaatataaaatggtaagaaccgagtatcgaatccagagggaacttgtttcactcccattaaaagcaaagtaaatgtcaagttggatttttgtgtgaaaatctagttaaatacaaattaaaatatttagagattgagaagt

SEQ ID NO: 68226 - DNA, 2095 bp, Glycine max
  Clone ID: PAT_MRT3847_32620C.1
cggacgcgtgggcacccacttgttatttcctcatgattcaagtctgtgcgtagtgagattgaatctagattgcgttccatgcccaatctgtatatctttagtacgacctagttacaaaacatataccttgtcgagttgcagtttccttcaatttctaaacgggcggttatagagatataagaagaagaagctagattatgttccattcactcacataataatccgtgacccatttcagatttcgtcttaacgcacataaattcaggttcaaaatctcacctttgttgattttggcgaggattttgagaatggttgtggctgggggtgctaagttcaatttgagaagaggcaatggttcttctcataatgttgtcaatggctatagcagtgatggagatctttgcagaattagcaaaagtgggtgtttttcgtcggtggctgaggtggatagagacccttcttgcgtttcattcaccactttcaacattctggctccgatttacaaacggattgacccacagaaccagggcctgcgagaaagagatcttcagagcattctggtttggtcaggaatgagaggatgcttgattgcttgctttctgaatcatcttccattatgtgtgctttaggagttttggaatggaaataaaaaatttgtaatcatgcatgtcgagagcacggtgttaggataggtgaaatgtctcctggcgcgtggtaacaaacaaccgcagccagtatcccttggttgtaaggtgaagaaaacaatcctgtgtcatcgtgtagtggtgaaaggattagggccagaagattattctctttctgatcatgctagactcacagctgtgttttcaacagcaaggatgcgatgttctggcgtacaaaactgaacgtacttcatgccactaatagttttaggctccactagaatcaaccaaaaaaagaaaagtggcaggtttaccaaatattgcaatatgtggaattgtatcagagagaaaacaggctcaaacccatgcctattatactctgtggtgactggaatggaagcaagcgtgggcatgtttacaagttcctaaggtcacaggggtttgtatcatcatatgacattgctaatcaatacagtgacagttatgcagattctcacaagtgggttagtcaccgaaatcataggggaaatatctgtggtgttgacttcatttggctttgcaatcccaaccaagcacgtaaacctttaaagacaagttgggctgaagctgtatttagtatactaaaattccagttacgaaaagcatcgttatctgaagatgatgcatttgcctttctgaagggtgacaactatgctgattctgtgacatattttagcttctccgaagcacttcggcaggtgaagttaattggtgtgccttatggactacgttttcaacagttgcaagatctatggaatcaagcagatgctgatggaaatggtgtcatagactttgaagaattcaagcagaaaatatggaattctacatgtccagagcatgtgttggaaaatctgaatggttgcacggaagattgtaacacagaacaggagcaagaagctattggttttaaggtgaagaatgcaatgctgtatccgcgtgaagtggagaaaggactatggccagaagattattctctttctgatcatgctagactcacagctgtgttttcaccagcaaggatgagatgttctgcctcacaaaactgaatgtacttcatggcactaatagtcttagcccacagaaaaatattcaattttgggaccagtttggtgtaggggtaaactgaagtgatactttttttcactttcatttttagtcccctaccaaacatgtcatgccataattagtgattagtctgtcttgtatatgtgtttggagtcaaattaaagtagtgttgtgctgtaatcagttttggtaagccctggccatgtttttttctctggtaatgggataacaatgtaaagatatttttgcaatgtagaagtggatgtgcatattatgtatttccttctcactgtttgaatccattgattttgacaaaaaaaaaaaaaaaaaaaaaaaatttaaacacc

SEQ ID NO: 68227 - DNA, 186 bp, Glycine max
  Clone ID: PAT_MRT3847_32621C.1
ctacccaccctcctcttatttctctactctttccttttaaatctcctactcatctctatctaagcagtttaatattacatttaccatcttttaaccactcattccaatactaaatctaattaaattatcatctttattccactataaaccccatttttcaatcatcaaacttttaaaatccttcca

SEQ ID NO: 68228 - DNA, 459 bp, Glycine max
  Clone ID: PAT_MRT3847_32622C.1
aatttgaaagaaatcttataaaaagaagggacaaacattatgagaaggctcctatatatagagagagagggaggtagtagcaaatatctagcacacagtatatgtaattattgaataaagtagtgataattgactttgcattgcagcagaaaatatggaattctacatgtccagagcatgtgttggaaaatctgaatggttgcacggaagattgtaacacagaacaggagcaagaagctattggttttaaggtgaagaatgcaatgctgtatccgcgtgaagtggagaaaggactatggccagaagattattctctttctgatcatgctagactcacagctgtgttttcaccagcaaggatgagatgttctgcctcacaaaactgaatgtacttcatggcactaatagtcttagcccacagaaaaatattcaattttgggaccagtttggtgtaggggt

SEQ ID NO: 68229 - DNA, 1128 bp, Glycine max
  unsure (1)..(1128): unsure at all n locations
  Clone ID: PAT_MRT3847_32623C.1
ctgattgtgaacacccacttgttatttcctcgtgattcaagtctgggcgtactgagattgaatcatgttgaccaaatattgcaatatgtggaatcgtatcacagagaaaacaggctcaaacccatgcctattatactctgtgggtgagtttattggacgattctcctacgatgttatgttagtgtttcactggaacagatgtccttatagtgtggatttcatgttctatctaatgcaccgactggaatggaagtaagcgtggacatgtatacaagttccttacgtcacacgggtgggtatcatcatatgatattgctaatcgatacagcgacagtcatgcacatgctcacaagtgggttagtcaccgaaatataggggaaatatctgtggtgttgacttcatttggctttgcaatcccaaccaagcacgtaaacctttgaagacaagttgggctgaagctgtatttagtatactaaaattccagttacgaaaagcatcagtgtctgaagatgacgcatttacctttctgaagggtgacaactatgctgattctgtgacttattttagtttttctgaagcactccgtcaggtgaagttagttggtgtgccttatggactatgctttcaacagttgcaagacctatggaatcaagcagatgttgatggaaatggtgtcatcgactttgaagaattcaagcagaaaatatggaattctacatgtccagagcatgtgttggaaaatgtgaatgggtgcatggaggatggtaacacagaacaggagcaagaagccattggttttaaggtgaagaatgcaatgctgtatccgcgtgaagtggagaaaggactatggccagaagattattctctttctgatcatgctagnactcacagctgtgttttcaacagcaaggatngcgatgttcctggcgtacaaaanctgaacgtacttcatgccactaatagttntaggctccactagaatcaaccaaaaaaagaaaagtggaaatataaggtatagcccacagaaaaatattcaatttttgggacaagntttggtgtanggggtaaactaaagtgataattttttttcactttcatttttgggttcctttaccanacatgtcatgc

SEQ ID NO: 68230 - DNA, 255 bp, Glycine max
  unsure (1)..(255): unsure at all n locations
  Clone ID: PAT_MRT3847_32624C.1
tatttataaagatatatatcatactatgatctgcgtgtatacagaacttcatcaccatatggtagctataaagatatatatgaaactacgaggtgcgtatttgcgaacgggaacttaaaggggtaccaccttcccaaaaagcgcgccgaattggggcttggcttaatcagggtaatggctgttccctgggagaaatcgtaaccggcccaaaattccaccaaaaaaaaantttaaaaaaaaaaaatccctgggaaa

SEQ ID NO: 68231 - DNA, 826 bp, Glycine max
  Clone ID: PAT_MRT3847_32625C.1
atccctctctctctctctctctctctctctctatatatatatatatatatatatatatatagtaattgctcaccacatcactaaagcgtccggagagacgtgggggcggttaagagatataagaagaagaagctagattatgttccattcactcacataataatccgtgacccatttcagatttcgtcttaacgcacataaattcaggttcaaaatctcacctttgttgattttggcgaggattttgagaatggttgtggctgggggtgctaagttcaatttgagaagaggcaatggttcttctcataatgttgtcaatggctatagcagtgatggagatctttgcagaattagcaaaagtgggtgtttttcgtcggtggctgaggtggatagagacccttcttgcgtttcattcaccactttcaacattctggctccgatttacaaacggattgacccacagaaccagggcctgcgagaaagtgacttcagagcattctggttggccaggaatgagaggattcttgattgcttgctttctgaatcatcttccattatgtgccttcaggagttttgggttggaaatgaagaacttgttaacatgtatgaggagagacttggggatgctggctacaatctcttcaagctcgcgcgaaccaacaatcgcggagatggtctgctgactgctatacgtaaagaatgtctaagagttatggattataaagagttgcttttaaacgattgtggcgatcgcgttgctcagttgttacatgtcagtcacacccactcgattttctcatgttaacgattgtggtgatcgtgtcgc

SEQ ID NO: 68232 - DNA, 442 bp, Glycine max
  Clone ID: PAT_MRT3847_32626C.1
cagacgtggacatgtctctttttccatttggaccaaaccgaataactacagagacggcaaggacagtgtgctgaggcacgtggggggaatccataatgtcacatccacaggaagaccagcgacataatgccactatcgagcactgacaacgagctcaggccagccaatcacctcgagaggaatcacggatgcaaaaacactaatctacaccgatggccaatggcctggatgccccaagacaaactagctaggcagccatgaacattgtattagaagcgctaccgagctacaacaagatgagtaccttggatcacgtgaaatgcgatctcgatattgcatatgcgagaacgagagaaatgataagcattgctgatgacatatcaataagaaatgacttgcactagacaccgttttggatctccacctaaagaaaccaaatagg

SEQ ID NO: 68233 - DNA, 462 bp, Glycine max
  Clone ID: PAT_MRT3847_32627C.1
gggccgggaattcccggggtcgacccaccccgcccggcaagcttttcctttgccaatcttaatgtgagcacattattgatgctttctaccactatcagacaggcatccctacaagagcgctatagctaatatgtccatatgtctttctacacgcgccatcgcttattgactcatcttagacattggccaaaggagcaggacaatctgctaatgattatcctacacaaactgcgatgaacggtgactccaagggtacagataaaatgccatcaggcacagactgctttccaactgagtgccagacatctatagccctatcttttaggccagtagcatagtcaactatgacatgttagacctataccaagtcctccggacagaggcgctacgtctacctatgccagggttccagatgcatataccagagtacgatgctagatgttaggtcaataccaaagacaa

SEQ ID NO: 68234 - DNA, 648 bp, Glycine max
  Clone ID: PAT_MRT3847_32628C.1
gtccatcctaaatgttttattggaggttgggatgacaccatcattgccaaagatatttcttcctggtccacctgaagctcttactgttctcttagatggttgtgttgttggttgtatagcttccagtgaagtggagaaagttgtggctcacatacgagaattaaaagtgtcatctgtcgcagtgattcctgatgatatggaagtgggatatgttcctttgagcatggggggggcctatcctggtctttacctgtgcacatccccttcaagatttgttcggccagtaagaaatatatcaattccttccaatggaagtgaaaacattgaattcattgggccatttgagcaggtttttatggaaattagatgtcctgatggcggagatggtggaagaaaaagttcatttcctgcaactcatgaagaaattcatccaacagtaatgcttagtgtagttgctaatctcacaccatggtcagatcataatcagagtccacgaaatatgtaccagtgtcagatggcaaagcaaacaatggcattttcttcacaaactattcaacatcctgccagatcaaaagttatatcatcttcagactcctcagactcccattgtacgcactagtacatatactaaatacaacattgatgaat

SEQ ID NO: 68235 - DNA, 171 bp, Glycine max
  Clone ID: PAT_MRT3847_32629C.1
cgacagactgagaaaccctctatgtgggactttcgctatcttaaaccgtggtattcttctaagaccagcccctgtagaattgtatgtgcgagtttctctcgagaccaaaattgaacgtgactgtgttaagcaacggttagatcggccatggcgtaacgtcccggccaacga

SEQ ID NO: 68236 - DNA, 804 bp, Glycine max
  Clone ID: PAT_MRT3847_3262C.1
gcatgagagtggcagcatgcttggcgccactagacgcgtggttggattcattcctcggaggttacgatcggtgcggcaagtgcatggagatggggatggcgaagaggctctacgtttccacaagagcagaggccaacacattctcatcaaccctcgaattctggacaccatcgttcggagatccgcgataaaccccaccgacacggtcctcgaaatcggacccggcaccggcaacctcaccctcaagctcctcgaagccgcgcacaaggtcgtagccatcgagatcgatcaccgcatggtccaggttctcgagaagcgcgtcctccaacgtggcctcaaagataagctcagggttatagaaagagatgcaatgagagccccgttcccgcggtttgatcttgttgtggccaacattccttaccggatatcttcccctctcgtgattaaactggtgtatggagcgacgccgtttaggagtgccacgcttctgcttcagaaagagttcgctcggaggttactgacttgccccggtgactccccgtgggtttaaccggttgtcggcgaatgtgaagcttgtggctgactgtggagcttgtgatggacgtaagcaagagggcctttctcccttctcctaaagttgactcttctgtggtcataatccgccccaagcctcaaattcccaatgtggatctccatgagtggagggctttcacccggacttgttttagtagtaacaggaacaagacacttggggcattgtttaagctcaaggggaaagtttttgagttgttcaaaatcttcaat

SEQ ID NO: 68237 - DNA, 233 bp, Glycine max
  Clone ID: PAT_MRT3847_32630C.1
aagtctttatgcacgctttaaatatctcttctgtgcactctacaactctacttatatcaatcatagtgattattggagagagagagagaaaaaaagttttttagtttttggttagggaggaacccacctacattctagttctagttagggagaaagtgtgagagagagagaaagaaaggaaggaatgaggctctatttctctcgagagtaagtgaaaaaaaaaaaaaaaaaaa

SEQ ID NO: 68238 - DNA, 542 bp, Glycine max
  Clone ID: PAT_MRT3847_32631C.1
aaaacacacccccccttcccccctttgggggggtttcccgggttcgaaatttttttaaataaaacaaggggaaaacccgggaaaacgggttcaaccaaaacagggggggggaaaaaaaaaaatgggcccctattttcaagggcccccaaaacggggcggaccttggaacctttttggaaatgggggccttgaaaacgggtttcgatcccaaaagagcccccccccccctttaaaggtcccctttgggaagggccccccccctttgggtttggggaacttttggcccgttctggaaaagaataaagggggggggcccaaaaactttaaccctttaaattagccggggggggggcttaggaccaatttttacacccggaaagggggctaaaaatcccttgggggggggttccttaggggggggaaagaaacggccgggcccccccccggggggggcaacctcaaaaaagcggggggggtggccctaaaaaccggggtttaaaaggggggcccggggggttccccgggcaaaggcgccccggggg

SEQ ID NO: 68239 - DNA, 423 bp, Glycine max
  Clone ID: PAT_MRT3847_32632C.1
tttaataccatcgtgcagattgaaccacacatgaattcagggctatagcttttgagtaccactaccaacggcgactttgttcatggaaaggacctcagactgtctatagctaatgatagcatgtgctgctgatggtttgacatcaagctcactccaactacattgccggaatgtggtttgctatatgacagtgggacaactgctgcgtattttgtactgatgtcttacgcctctgataccgctaggacttccccaattgaagcaacgaggccatgataaagttcgtcttacactcaatctaaatctccattcgattacgtgtaatctacaaatgcgccccgtgatcgtgcatcaacatacgcgagtggacccgacgcggctagtttatattctcgggccgaattcacatgataggcatgttat

SEQ ID NO: 68240 - DNA, 264 bp, Glycine max
  Clone ID: PAT_MRT3847_32633C.1
ggagtaaaaagacactccaaggactggccgggggggaaacatacttcgcgcgacgcaagcacaaggctaaacacttattgaatcatcgccactagcctaaagtcacaacacggcggataaggagccgtctgttatatcattaacaacgggaaggccaaagcggacctaaagctgagaagcggggggaaaaacggtctaacacctgggccgatgggagggggcacccgcgagatgggtggagaaataggaggatggcgggaatta

SEQ ID NO: 68241 - DNA, 256 bp, Glycine max
  Clone ID: PAT_MRT3847_32634C.1
tcattgttattgaaatatatactatcaagttctctgctctacaatgattttaaattcctttcttcaattcctacgtatagaatctgatatactcaacagtttttaagccttgaaacccattaagcaccttttccttgttaagccaccgttaattccattcatatagatcatatacacagatcattctacccataactaaacacactatgagcattatttctccaactgacctaacccacctattcagttcctttct

SEQ ID NO: 68242 - DNA, 243 bp, Glycine max
  Clone ID: PAT_MRT3847_32635C.1
ctcggtcggtgcctgtgggcatgggtgcttttttatcttctgcttctgcctacctctcggggtcccagggggcggcggagttgggtgtttgggatggctcgtgctgggtctgcgtctctgggtctcgcgcttgctgtcgtcttctttttgcggggcttccacctgttgggggactgttgggctttgcggaggtcctctctttgttgagccctttcgtgtggtcttttttgcgctggggttctt

SEQ ID NO: 68243 - DNA, 177 bp, Glycine max
  Clone ID: PAT_MRT3847_32636C.1
cccacgcgtacggacacacattcatgcgctgtttacagtgctggttgcattcggcactacacggaatattgcatgtatgccacttcatagctcatcacctggaggttgacatgacacatgctcagttaggcctaacaataatgcccaattatgcaacaccaaatcgtcatatggttc

SEQ ID NO: 68244 - DNA, 488 bp, Glycine max
  unsure (1)..(488): unsure at all n locations
  Clone ID: PAT_MRT3847_32637C.1
ggggggggggggggggcnnnaaaacaanagcggcgagggggacaagnnccaacannnnnnnggcgggaagaagnnngcnngaaaaaaaannccaaaggagccaaaggncacnnnggngggancagaannnncccangnacaanaagaaacacgaagggggaggaggggagcagagggagaaagnanngaacaagnnaacnannncccannngaanggccangcnnanggaaaggccaaagannnacnagacgnncaagnacgcnnnnngagaaanagccagagaancccgcaggggnggcgggnggagggaagncnncngcaggcagggcaaagggacgaancancancnccannnnnnccaaggggagananganccaaaanccngnagccnnncaggacccannanaggcagggggggcnccggangcaacgaagcagccncgcnancaaagnnccgcagggggagaaaccagcaccacggcnaaa

SEQ ID NO: 68245 - DNA, 315 bp, Glycine max
  Clone ID: PAT_MRT3847_32638C.1
ccccaacaggggtgcagcgtttgatattctcttgggaatctctcatgatattgaaattgcggggcatactctcatgccccctttttctgttcacacgctactgccccatcttctgaaaatgcgcaatcctctgcatgagctgtgatatgcgtgttcttttcctctggcgggctggtaaaacaataaaggagattatgcgtgaccctcttgtggagaatgcgctgtccatatgaaaaaatccccacccctcttataagtgtcaaagagatgtgaaaagtgtgtgtctttttaaccaaatccatcatacacttattt

SEQ ID NO: 68246 - DNA, 256 bp, Glycine max
  Clone ID: PAT_MRT3847_32639C.1
cttctatccagatcacaagtactactcacactcactggagatcactctccatcgataccattgttagcatcaatgcccgccacatctcatgtcactcgcggcaactacaaccgtctacagtggattcgacatgcaccgatggtacttatgctagagctgctgttccaagtggtgcatccaatgggatctatgacgaccttgtaatttctagatctacgatctgtctaccttggaatatgtgtatcaaaggctgttg

SEQ ID NO: 68247 - DNA, 2709 bp, Glycine max
  Clone ID: PAT_MRT3847_3263C.1
gcccatcaaaccccccaacccttgacctaacttcactcaaccaattccttttttttcctccatacgttttcccaatcaatacccactcctcctatctacaaaatcgcatgcactttcccatcttcattctctacaaaaaaattcttgcatcaaacacatatttctatctttttccactttcgttaaaacattttcctctatgaacactaaactaaaacaagaacaccttctcttgttcctggaacttagttttggggaaaatagcatttttaattattccaacaatgaatggccaagtgaatcacccccgccagtaccgccgaacatgcggttcctccaaacccgtcccttaccgataaggattctcctacggctgcgcaatccgcatgacctgcacctcaagcgtggcgtgcgtcttagaattctcgatccaaacacaagctgacagcttgatcgtgaagatgcaagcccaatgcaatcgacatgaggccttcaatgacagaagtggcttcagagtaagagcagcttaggttgagtacgtgatccacattgggaactgcaccgtgacccctttaccctgcttcatcccggagactctggtcctcaaccacttctgatccgtgggttggcacaacgcctgaggcaccgttggggtgagctgctactgccaccacaagaccaacggattcgtagatcatagaacgttggatgaaattggatgcaagtactttatgtcgtcccttgcagaccaagatatgtggaacagtgagcagagctctttgtctttggatgtaaatataatccagcttggatggtggcttcagggagatcagtgtttatgttctgatcatgccaattgtaccacgcttcagtctccgatggatggaaagcccgggttccggtgtcgctgccgcgacgggttcgtcggcgatgggtttttggccggaactggttgccggaaagcctcgtcatgcaacccagcgaagtacatatctggtcgatgtggaggaacaacgagattcattgtcttaattggagggttcgttgtgggtgtttcgctgatggttactttgggttcattgtgttgtttctatcgccgacgctccaaattgagagtcacaaatagcacgaaaaggcgcttaaccgaagccaccggcaaaaatagcgttcctatctatccctacaaagacattgagaaagccacaaatagtttctccgagaagcaacggcttggaacgggagcatacgggactgtttatgctgggaaactctacaacaatgaatgggttgccattaaaaggataaaacacagagacactgatagtattgagcaagtaatgaatgagatcaagctcctttcttcagtgagccacaccaatttagttcgtttgttgggttgctccattgaatacggagaacaaatcctagtgtatgagttcatgcccaatggaacactgagtcagcacttgcagaaggagagggggagtggtcttccttggccaattcgactcacgattgccactgaaactgcacaagccatagcacatcttcattcagccatttgtccccccatttaccacagggacatcaagtccagtaacatactcttggactacaatttcaggtccaaagtggcagattttggtctttctagacttgggatgaccgaaatatcccacatttcgacagccccacaaggaacccccggctacgttgatccacagtaccatcaagactttcacctctctgacaagagcgacgtgtatagcttgggtgttgttcttgttgagatcataacaggattgaaagtggtggacttttcacgcccacataacgaagtgaacctggcttctcttgctgcggataggatcgggaaagggcttttaaatgaaattatagacccattccttgaagctgaagcaagaagtgacgcatggactctttcatccatacacaaggtggctgagctcgcattcagatgcattgcgttccatagggacatgaggccttcaatgacagaagtggcttcagagttagagcagcttaggttgagtaggtggactacattgggagacaacaattgtgcaacctcgacggaattgtcctcctgttcttcctcgtcaaatgaatgtgagaaaccactaagcattgcaacgaggaattttggggcaaagggtaaaggccacctcaagctccaaactgggcctattaatttaaagtcattacaaaggcccaatagtaactcaccagtctcggtgcaagaccaagacttgtggttgagtgagcagagctctccttcgtcaagtagttttccaagcaagtcatttgattgatccaatacaactatcttttttatggaatagtttgtttgtaaatcatttgaattacctcgaaggaggcaaacaaacaaacaagcaaacatgaattaatttctcactaaggtgttcgggaaggacatgcatttgcacagggatagcatcctttgtgtgttacaaagtgacattttaggagaaatatagtgtttatggaaaaaattaaccaaatccacgagacaaatgttaggaagtaccttaggttatgtttagattaattaatggtaaagagtggaatggaggaaaatggaaaagttattctattatttaatttgtaaaaatgacattgatggaagaagataaaacttaatccattgcatttcattatttaaaacac

SEQ ID NO: 68248 - DNA, 1277 bp, Glycine max
  unsure (1)..(1277): unsure at all n locations
  Clone ID: PAT_MRT3847_32640C.1
gccaactatcccattccaaagtaacaactcaactcaatgacacttcttcccttctctttcattttcatttcgttcttcttctccaattagggttctatcaagccttttcctctactctcccactttgcattttcccatggctaccgagcttcttcaaatcgaacccgccgagctccgattcgtctttgaattgaagaaacaaagttcatgtttggttcaacttgccaacaccaccgatcactttattgcttttaaggtaaaaacaacttcacccaaaaaatattgcgtcagacccaacataggcatcgtcaagcccaatgataaatgtgattttactgttactatgcaagctcagcgcatggcaccgcctgatatgctgtgcaaagacaaatttctcattcaaagcacagttgtcccgtttggaaccacagaagatgacatcacctctgatatgttttcaaaagacagcggaaagtatattgaggagaagaaactaagggtagtcctcatcagtccgccatcttctccggtgttgcttccagtaaatggtgatatgaagcatgatccatccaacgaaatttatgtgcaaaaagatagggtgcccagtggagttgaaaacatacctcccgcctttgtaaagtttctgatgaggttaaaggtttggaaccagcccaagatatgaaggaggatagagaagatgaggagaatgtcccagatgaagctgaggatgcaagacaagctgagaatgttggtgacatgaagccagcaaaagatgatgtgcaattgaatttaactaatgaatctgaggaattgaagtcaaaacttagtgtaatggattcaaagctaagagaggctgaggtaaccatcacgaagctgaatgaggagaggcgcaggaacactcaagaaaaagatttgcttaagaaagagttggaggtgttgaagaggcaaatcaatacgaaaggaaatcaggctggttttccatttctgtttgtttgcatggttgctcttatcagtgtggcagttggatattatattcatccataagggagaaaactgcgtgtataggatagctgatggcagacgttctaaaatcatgggtttctccgtaatgactagatagaggatggttcatttgtttattgtgatggttttactggacagatgttaatatgtgatgtgggaagctttggaattgcatgtaaagtgaactaagcctttcaatagaagtgtaataagcagcattctgatattttgagccctttccattggcctgtnnt

SEQ ID NO: 68249 - DNA, 302 bp, Glycine max
  Clone ID: PAT_MRT3847_32641C.1
gggggtgtgaggaactgaacaaaatcttcataaaaaaaagaataatagaggactacaagaagatctgtattgtgagcaaaaaatgaattcaaatctttaagcctaagctaggcaaatgccaaataattacaaaatttttttttttaactcagaaactcttatgggggggggagattcaaccagaatataatgggttctctcctctcctggaggggaggggggggatctgcagcgaaatcgacgctaaacgaaggaatggagtgtactgcctcaactcctttcgaggtatctgagagaacaac

SEQ ID NO: 68250 - DNA, 831 bp, Glycine max
  Clone ID: PAT_MRT3847_32642C.1
attcattcttctccattagggctttgcattttgcatttcactttctcattttcccatggctactcaccttcttcatatcgaacccgccgagctccggttcgtctttgaattgaagaaacaaagttcatgtttggttcaacttgccaacaacactgatcactttcttgcctttaaggtaaaaacaacttcacccaaaaaatattgcgtcaggcccaacataggcatcatcaagcccaatgataaatgtgattttactggtatttttccgttactgcattcaattaaacattttaacgcacacatatatatatgcatgcactttctacatttttagtgtccttttatatgtgtgtgttggatgcagttactatgcaagctcagcgcatggcaccgcctgatatgctgtgtaaagacaaatttcttattcagagcacagttgtcccggttggaaccacagaagatgacatcacctctgatatgtttgcaaaagacagtggaaagtttattgaggagaagaaactacgggtagtcctcatcagtccaccatcttctccggtgttgcttccagtaaatggtgatatgaagcatgatccatccaacgaaattaatgtgcaaaaagataggttgcccagtggagttgaaaacatacctccccctcgtaaagtttccgaggaggttaaaggtttggaaccagcccaggatatgaaggaggatagagcagatgaggatattgtcccaagacaagctgagaatgttggtgacatgaagccagcaaaagatgatgtgcagtcgaatttagccaatgaatctgaggaattgaagtcaaaactt

SEQ ID NO: 68251 - DNA, 264 bp, Glycine max
  unsure (1)..(264): unsure at all n locations
  Clone ID: PAT_MRT3847_32643C.1
agaaaagtgaagatgaatacgatgaagaagacatgaagaatttggaactagncgcacaagcaaganatattttatgccgtgccatgaatcaagatgcttttgaaaaattctcaaaggacaaaacagccaagcaaacgtgggacgagcttganagggaaatgacagtngtcgactttccaactcagcaacaacanccgcaaatgggcaatgccgcatcagctcgtcataatcgtcctaaccttgagtttatagaggcaacagacg

SEQ ID NO: 68252 - DNA, 259 bp, Glycine max
  Clone ID: PAT_MRT3847_32644C.1
ggtctgctgatgtcatagataactctaagtgtgatggacggacgcgattctggtgtgtctgtcgcaataggattgatatgatctacggtggtcgtctatggtgttcatctagtctatggcaatcgtgtgagcattgcacctggtgatgatgatgatctgttaatacgtatgccataggacgattcatatagtatcaaaggtccgcttgttcatgggaattagccaggagcactcgatgtcgtgaatctaggattgcatg

SEQ ID NO: 68253 - DNA, 519 bp, Glycine max
  Clone ID: PAT_MRT3847_32645C.1
ccagaaatgaataatcacaaatttatagagttttatgatgtccgagctgcggaggctgctcttcgtgcattgaacaagattgacatttctgggaagcagatcaagcttgaacctggccatcctagtttgatgcaccagtctcggaaggggcaagaggagcgagatcttggtcaaagtattatagacaacttatcatcaagacaaaaagcaacagtgccttctggagtaattggatctggttgctttgaaaatggatataatcagagatttcaatctacagttaggcaaccgctgaatgcatttatggataatgcattcattcatgtgaattctggtattcacaacactgtgagaggggcacctgctggaaaagtgtccagtgtttgtgagtcaagtagctttattgatgcaatgaactttgcatctggttcgagatttcatcctcattccttacctgagtatcgtgatagtttagctaatggtagtccatataacttttctagctccattagcaacatg

SEQ ID NO: 68254 - DNA, 584 bp, Glycine max
  Clone ID: PAT_MRT3847_32646C.1
tacggctgcgagaagacgacaaaagggaccctcatttcttggaaatgtaagaagcaggatcgtgtttctaaatcttctactgaggctgaatatcgttcaatgtcttctgcttgttctgaaattgtgtggttacgtagtattttggaggagcttggattttcacagcctaactctacccctctttatgctaataatgcaagtgctattcagattgctgcaaatcccatgtttcacgaatgaaccaagcatattgaggttgattgtcattatatcaaggaagttatctcacttccttacatctccacagatcttcaagcggctgatatctttaccaaagctatgactagacaacaccattagttccttgttgacaaattgctgttggttgacttactaacatcaatttgaggagggatgttaatgtatattaatttaatttattacctgttttaataggtttatatctgttaggaaatctctgataatctctctcctccttgaaaagcatatattttgctgtctatttaagtaagaaaggctgtagaagacagatgtttttccaaaagcaaaagctcttatcatac

SEQ ID NO: 68255 - DNA, 163 bp, Glycine max
  unsure (1)..(163): unsure at all n locations
  Clone ID: PAT_MRT3847_32647C.1
caggataaggccacctataacgagtgttccaccagcccatgagtatcatcctagcatccttcgggagctcaccttnanacctttcctctacaaaccccctactcaagctgccaagataaccaccatactcaccaacaagcataccttcaagctctcgaccacc

SEQ ID NO: 68256 - DNA, 289 bp, Glycine max
  Clone ID: PAT_MRT3847_32648C.1
ggaaatctcaatgtgcacagtgacagtgtctctagcactatctctagcactaacactagcaaatattctctatggagaacatagcctaggttgatggtgatcacactccattcgactcacaataatggtactgcagccaagaaaatgattgacacatctcaaaagacaattaaagctgggcagcttgaccctctaactgatagagatacagggggcgccatatcaaccgctatgccagggatagaaacagaataattcctaacatatagcaatggtcaagtgaatgagc

SEQ ID NO: 68257 - DNA, 1408 bp, Glycine max
  Clone ID: PAT_MRT3847_32649C.1
agctagggtccatcataaatagcacaacttttttttttttttttttttgaaattcaaatttaaaaactattcaatagtcatttaacggatatattttcactagtttatcaaacaaaaaaatcaatacttaatcagacaacataatacttcaacaacttctcacacagcaataatacagtataggtcatttaaaagaaaagaaaaaatgaagaaaatgagttgtgttcggctggtagcataagttgaacatttcggttcgcgagtctattcaagtatacctcatttaacagataatttagttaatcacgaatttatttggggaacgctttcatacttgtgatcaactgtaggtaagttgttggttcaataagtttgacaaatcataacctgtagacgcactgaacacaatatccaactttgtgcaccaagttgaaccaaaactcatttctcaaaaaagagaaaaagcttggtatcctcctatgtctgtgctccaaacgacagacatgaattattcttcagacacatgactcttgccctcgtagtatcttttctcactttcacccttcttcttatttcggttctggtatgcctcatgatttgaaacaatccttctaattattgtagtagtagttatatctaaaggactttctaaaactttgaagatgcccatgctaataggaacagcatatggattgcattcttccttctgaaaatcattactttctgcaatggttccatgaacaactaatgagatgttaaatgtagtgagcatatctttggaaatctcccatggggcaccaattataacctcatccacatagcgacatgctaaaacacttagacttctttcatgaagattcatgataggacgatgcgatcctctagttgcactgactgtctgatcagtgtgtattccaacaagaagaaaatctccaagatccctagcaagcctcaagatctcaacatgtccagcatgaaagagatcaaaagcaccatctatatatacaatgcgagaatcttctgtcgtcctctcccatttgtagaactgaacaattctacgagatgtaggcaaaaaatgagatatacgagttccacttgcagttgcagcagatgcaccagcttcaaacttcggactatggccattgctgaattgtctttgtaaagaagaatgattatgatttttttcagtaatagacctttctcttacacagagaagcatgcgaccaacaatatcagtgctggaaaccccttcagtacgctttatctgcttatatcgaccagccttcttagcatgagcataagcatcagttccatcttctgtcgtcttttcgcggacgaactcaaggatcatccccgtgaataatgtaatctatcttgtactcatcaaaaagcttcctcgagccgaatt

SEQ ID NO: 68258 - DNA, 678 bp, Glycine max
  Clone ID: PAT_MRT3847_3264C.1
aatcaactaaaatacggactacagaaagatcacatgggtgaaacaggatcagcattattggacgattcttggatttctgctgatagctttttgcaccatctttgcaaggtatttcactgatgttaactcaatattcagtgaacaaatttgatgtgtgacctacctttcttaattttaagaagctaggttggtgcctattttggtcagttatggattttaagatcttgaaattctgaaagtggaagtcagaagttcatttcttcgtatatgtggctgttcttcattgataatgataagcatattagacatttaggcttcacgttgtttccctctacttgacactgtcctccactttctttatcatccttattaatcttttttgtgttctctaagtagttattgtgtccataggaccaaaactgttaaataagcaactcattccaaggggcaaatcagaaaccgacaattttcataagaagtttcctttcctaactgcacatcaaattcccctgactcaagcatacttgcctgtcctactggaatatgtatcccaatttacagaataacacaattaatgcatgccaataacaagtggacgtgttttgttacctttataagtctaccgcaggatgtcagaattgataaaatataaagatgtttttgtgggaactctaactt

SEQ ID NO: 68259 - DNA, 252 bp, Glycine max
  Clone ID: PAT_MRT3847_32650C.1
tttgtgggtttttttttttttgtttttttggggttggttttttttttaaaaaagaaaaaaattactaaaacccaatacagaagaaccatttgggtcacagaacataactgtatccgacgaagttcaatggaccattaactggtgccaatcaatttaccaacaatgggtggggattaaccactaaaaacccttttccattagaaactcaataaaaagcagaaaaacctttaatcaaaacaggcccaatgccat

SEQ ID NO: 68260 - DNA, 1655 bp, Glycine max
  Clone ID: PAT_MRT3847_32651C.1
gtggccacagagagagaaagataagaagtaaggaggtagtaggcagtgtgtttgtttgtgttgtgttgggcgttaaggatggtgttgaattgcaaaagcaaaaacatcctccttttagttttgttagccatagcaatagaaacgggatggtcatcagaagaagaaagcagcatcatatcacgattccagcaatacctgaaaatcaacactgcccaacccaccccgcgttaccacgaagccgccgatttcctgatatcccaaggtaaagccctctccctggaatcccaaagcattgagtttgtggcaggcaagccacttgtccttctgaaatgggaaggctcaaaccctaacctcccctccatcctcctctattcccacaccgacgtcgtcccatcggagcactctaagtggacccaccaccccttcagcgcccacctcgactcctccggccgcatcttctcccgaggctctcaggacatgaagtgcgtcggcatgcagtacctcgaggccctccgactcctcaagtcccacaacttccgccccctccgctccctctacctcgctttctcccccgacgaggaaatcggtggccacgacggtgccgagaagttcgctgactcctctatcttccaaagtatgaacgttggcgttgttcttgacgaaggtctggcttctcccgacccccattaccggtctttctatgccgaaaggagtccctggtggttggtcatcaaggcctttggtgttcccggccatggcgccaagctttatgataactctgccatggagaatctctttaagagcattgaaagtatccgaaggttccgctcctcgcagttcgacttgatcaaggccggcttcaaggccgaaggcgatgttgtttctgttaatatggtctttctcaaggctggaactccatctccaactggttttgtcatgaatttgcagccttctgaagcagaagctggatttgatattcgggtgccacccactgctgatccagaatcgttggagaggcgcattgctgaggaatgggcaccttcatcccgcaatatgtcatttactttcaaacagaaggcgcacacacgagataagtctgggaaaccaatcctcaccaaaactgatagttccaatccctggtgggcccttttagaaaatgctgtccaaaaggctggtgggaaacttggtaagcccgaggtctttcccgccgctacagattcacgctacttccgtgaacgtggattaccagcaattggattctcacctatggcaaacactcctgttcttctacatgaccacaatgagtttctgcacaaagatgaatacttgaaagggattaaaatctacgagtcaataattaaggtatatgcatcgttggatgataatggaagagatggagcatccaaagatgagttatgagcaagtggtgtggcacctacccctacctaattctcattttctgccttttcttatgtaacaatagagaggaaaaataacacctcaactgactttgttgtagcttctgacacataacaataaagaggaaacaaatatgtttgtttcaaactttgctcagagcaacttcacccttgcacgaatgctttcataaataattttcttgtgcacaatattatgaaacctcaatccttcaaaaa

SEQ ID NO: 68261 - DNA, 441 bp, Glycine max
  Clone ID: PAT_MRT3847_32652C.1
ggtctctttcatctcacaacgaacgtctcaagtgagaaagtttctgagagtctgactcgttttgtttttgttctctctaatctcttggttcgcgttgcagattaaatgattttgtatctttggttctcttttaggatcaatggattttagagatttagctcacaagttctctcgttgtattgttactgtaagtcttcagtttttcatatccttacttgccttggccttgagtcagatctgtttgcccgaaatttgatgttctttgaatttaagctctttatttctctcaattcaaatatcatgctgtcatagacacatttttagaccatacctattctttaataaactggtaatctatatccaaatgcgtgtaactaactggtaatattaactcaataaattacctattctgtaagataaataaattatgcttatgaaatt

SEQ ID NO: 68262 - DNA, 674 bp, Glycine max
  Clone ID: PAT_MRT3847_32653C.1
gatgatcgaaccacatagatagtccctctatacctctaattagttacagagcaggaaatgactaacgtattctggacacttccgagttgtagcaccaggatgcacaacgccacttagtactctcattcggagcactgataatttgtctcattacggttggggcgatgattctctttactatgtacctagatccagggaatatgaaaggcacataagacaagctcaataacatagaggatgtgaggaagatgcttattgctcctatagctaacaattactatttgagatcaaaatgcattgactcaacacatcgctagagtgctctctaccattatgaacatgaaatggatggaacatggcgccacatttgcgagctttcatcctaggacattattgatcatagcatacgatgatgatctgtgacatgcgcctatactctatcagttgcttacgcaacaggggtatcacattgtatgaacgtgattatcaaagttccagaccaaacgagattctttagtagaggagcagcccatggtgtacatagaatagtcagcttgtgcgaacctgctgagctatgaatgcatgggagaggatgtacttgcagaaacacatgagtcctctctcggtcagtcatactaagtctctaactacgcaatgaataccttttatgaatg

SEQ ID NO: 68263 - DNA, 1038 bp, Glycine max
  Clone ID: PAT_MRT3847_32654C.1
ccggctcgagggccttctttgaggaaccaattatgctaattgcatttgtcttgttaggaaggaatctcgaacagagagctaagattaaagcagccagtgatatgacaggacttcttagtttattgccaccaaaagctcgccttcttttgaacaatggggaaacagaggttggctcggttgttgaagttccttctgacagtctttctgttggagaccaaattattgtattacctggagatcgtatttccagctgatggagttgtgagatctggtagaagcactgtagacgaatcaagttttactggtgaaccactgcctgtaacaaaagtacctgggagtgaggtagcagctgggagtataaatcttaatggaactcttacaatggaagtgcagagaccaggtagtgagactgctatggcaaacattgttcgtctagttgaagaggcacaaagtagggaagctcctgtgcagcggttggctgacaaggtggctggacacttcacttatggagtgatggcaacctctgctgccacattcacattctggagtctgtatggcacacacattttacctcctgctttatatcaaggacgtgcagtctcactggctttgcagcttgcttgcagtgttctggttgttgcttgtccatgtgcacttgggttagccacacctactgcagtgctggctggaacatctttgggagctaagagaggattacttcttcgtggcggaaacattttttttaattttgccatggtagacaccgtcgtgtttgacaaattatggaccctcacggccggcagacctgttgtgacaaacaccgacattcctcaccgcataaaaaatgcaatttcaagccaaactgaagaaaacgcatcgtctgaggttgaagcgtcaaggttagcagctgcagaagaaacaaattcaggacatccagttggtaaaccgactgtggatgctgctcaggctgctaatccgtacaacgtcaagggaaaacaaggaacatccccggaaaaacctggatctggggctgtggga

SEQ ID NO: 68264 - DNA, 460 bp, Glycine max
  unsure (1)..(460): unsure at all n locations
  Clone ID: PAT_MRT3847_32655C.1
anaaaananaaggtttcctttnaannnaancnccgnncaagaangggcccggntnnnnannnggacnnnnaaagnacnttggcnnggnacgatnattatncccntaacgnatttncnnngaaantcgttcnanacnanncnntntanatnnnaccnatcggcganaganngaanncacncatgnannancctnccncanngtngcggacgcgctcnggcaacangacnnacgtgaccngncnnanctnacngcagacncnnnaccgatatcannanacnnngcnagancnncngngnggnantacnnncnnntnncagagngcganagnaagcanannncnnncngncacnngatgattnnngacatancgcacangannnnncacannagnntnnnngnagngagnggnngacagnannanncngtgaccnnnngtantangtncngttnaaantnanc

SEQ ID NO: 68265 - DNA, 317 bp, Glycine max
  unsure (1)..(317): unsure at all n locations
  Clone ID: PAT_MRT3847_32656C.1
aaaacccnnnttcatctgtatccaacgatttactanaacgacgtcgcaatttctccatcttcacatttctctttttctttaaatcaaaagttatatacactttctcgcgacacgaaatattttgaaccaatcaaaatatctatggcttactaaccattatatccaatatctctcgcttataaattagtttaaaaattattacatccagcttgctttaaactcaattcttatccttttaacaattgcaccttctctttttgattaataaacccttcgaaaatttaattcatttttaaattaataatattattattatt

SEQ ID NO: 68266 - DNA, 592 bp, Glycine max
  unsure (1)..(592): unsure at all n locations
  Clone ID: PAT_MRT3847_32657C.1
gtgtttgggtgattttttttttttttttttttttttaaagataaaaatcctatgatattcattcagaccaatttaaatccatacaacaaaatccaatttacagagttacaatgactagaagcaatgagaaagaaagcttctctccatcccatttcttccattgtcacagtttgcctagtcaagtcttgaagctaatataacaccattgccacattaaaaaaaaaaaaaaaaagacgctgccaagaaaaagaaaaatcaattgaaaacaaaataagaaagtaaggggtgtggaactagtacaggacggaccaaactgctaaacgtgacaattctcccaaaaacctcaaattcttcttgcagggcctgccaattcacacatgtcaaatctgcataatttcacgaaattgaagaggctagcttcgcatagcatgatcgatcatccatgacatatcgccaaataataataataataattaataattagttgttccacaccagagaaaaaaggaccagnnngaaaccctttccaataaagaacgaagcattaacgccangnnnacacagtcaagagnnnaacatcctnnnnngccag

SEQ ID NO: 68267 - DNA, 382 bp, Glycine max
  Clone ID: PAT_MRT3847_32658C.1
tttcttttttttttttttttagggaaaaatgttttaggttttgattaaactttgaacttaaaaaggtgctaacaaagacaaatttgccgttaaaaactgtgtaactcaaggaggttcattatttagtcatattcagtagttttgcagggctacgaggggactcaacagtgtatcaaacgtcaaatgggcgccaaatatattgagtttttagtaggtttcctcacctttccacctcctgcgaacctctcaaatgggctagtatgaaattgtatgagactaggtagaagttgcagcagagcaacccacgcgtcatctatttaacgtaaatcatactaaaaggatgcatggagttgcaaaaaaatcgcctcgtgccgaattcctg

SEQ ID NO: 68268 - DNA, 323 bp, Glycine max
  unsure (1)..(323): unsure at all n locations
  Clone ID: PAT_MRT3847_32659C.1
cacgcgcacgcaagcccggaagccggcccgagcccgagccgaacttttggtgtccccccaacaaagacggcaacacgcgcgcagaaaccacccaacnaccccagcccacccacaccgaagaacggcgccccgcaaaagcccacagaaaacagcggaagacgcgaagacaagggcccgggggcccgcccagaaaaggagggccacaaaaaaaccggcgaaggacagaagaccggcgcacgcagacaggcacgccgggaagccgcagaccagcaaacaggaggacaacacccacgcccgggcgggacccaaaggcccacggccac

SEQ ID NO: 68269 - DNA, 1145 bp, Glycine max
  Clone ID: PAT_MRT3847_3265C.1
tcagttctcacctctttctgtcattcttctttcatacacttttttattttctctatggacccaaacacaaccgaaaccgagtggggttcgaaggcatggcggcttctctccgaggtccgttcccaatccccactcattcaatgcatcaccaacttcgtctccatggacatcgtcgccaacaccctcctctccgccggcgcctcccccgccatgctccacgccgccgaggagctccccgacttcaccccgcgcgccgccgccctcgtagtcaacgtcggcacgctctccccctcctggctccccgccatgaaggccgccgcgcgcctttgcatgactctcgccacgccctgggtgctcgaccccgtcgccgcctccgcctccgccttccgcctcgacgcctgccgcgaacttctgaagctcaggcccaccgtcgtcaggggaaacgcctccgagatcatcgcgctctcccaagcctccgccgccgcacagccacacaccaacgctgcctccaagggtgtggacagtgttcacaagtcaatggatgcggttgaagcagcaaagttgttagctcggacaagtggtgcaatagttgcagtgtcaggagccacggacattgtcacagatggaaatcgagttgttggggctcataatggggtggcgatgatgcagaaaataacagcaacgggatgttcagtcactgcactgattgctgcctttgttgccgttgacaaaagccatgctttggatgccgcagtgtctgcattagctgtatttggtgttgctggtgagctaggaatgaagatggctaaaggtcctgcatcgcttcgaatgcacttgatagatgaactctatgggcttgatgaatctgccttgaattctcatgttaatgtcaccagtttgtgatgaaatgtgaagatctgcattcaaattgataattaattatcataaaattcgcatgtatcatagttgatagttgtctatcaatggtgtccattggttgaattggaaggtggatcgtattagttagcaatagagatccctctataatttatgtcaataataatcactggtagctacctctggtaataacagtttgttcctgtagttaaaaatatctcatggtttcagcccttaatttagtttgg

SEQ ID NO: 68270 - DNA, 586 bp, Glycine max
  unsure (1)..(586): unsure at all n locations
  Clone ID: PAT_MRT3847_32660C.1
cgtacccgtaagctcggaattcggcttcgaggtccancgcaggtnncttatatctcatgtgtcncnngaaatccgaacccagtgcttttaattcatcctgtcaaccatnnccctacaatgatgttgattgtatgaannactggtgagcaggtgggattgcaggggggaatcatgttgcaagggtgtgatnnccagaggatgnngaggagagtggaccaggcnncattgatttcaactcggtaccttgacccaggttgaatggtgcattagcnntcggtgggtccctttcagagaggaggggatggtcacgcggtgaatgaaagaaaacttttctgaaccagttaccctttgtgctaccaacactaaataccctctgttcagaacccctttcaaaatcattggcgtgtgtttatnnntatgcatggananntaaaagttttatttgtaatggagaaacggtttnttaccactgnntatgtaaannaatgtcttgagaaatgtgagggnnnttatctagtattttttattgccagannaaatgcctcactctgcttcttttcttacttnnnnaaaaaaaaannaaaaa

SEQ ID NO: 68271 - DNA, 391 bp, Glycine max
  Clone ID: PAT_MRT3847_32661C.1
ttttttttttttttttttttttttttttgggtttggtttttttttttttttttttttttttttttttgccacaaatagtttgttttacctttccaaagggctgggggtttaacaaaacacaaaagggggacaataatttaaaattttttaaattattacattaattctgtgcccagctttataaatttcaataatagccgcttttgttgctctgcccagcttataccccatagtttggcccataaactgagccattacctccaccatgtccaggattgggagggggaggggctttaacagaaccttgggcgggggaagaaattgtttctttggtttccaaaagcccaatttttttggggttgtcttgggccttaaatttaaatttaatttt

SEQ ID NO: 68272 - DNA, 276 bp, Glycine max
  Clone ID: PAT_MRT3847_32662C.1
tatatagtttatactataagttttggtgtaatctatgtttatcaatgttgaacttacacaaggtaacatatgctgtatttatatattgccacaacaacaatccttatcagccaatggagaattcaatcctaaatcatctaagttaaggactcctacgaagagagaattactagtctctgaatctcagccgaaaccagtaccatttgaagacctgtcatcaattcaattatcatgttccaaattatccaatcatatcaagtctgagtaaaataactg

SEQ ID NO: 68273 - DNA, 208 bp, Glycine max
  Clone ID: PAT_MRT3847_32663C.1
ctctccttctcgatcccaattccactagggattcaatgcccatgcgattcccagctcgttagatccacgacaacgtcacggttcccagattctttgggaaaaaaaaataatcctcctttgcccaacaggtaagttggaaaaaaatggaccatgacacgactgtgtgccaagctcctcctgacggtactatattgtgcatcaacaactg

SEQ ID NO: 68274 - DNA, 554 bp, Glycine max
  Clone ID: PAT_MRT3847_32664C.1
tgccatctcatcaatacctaaaaaaaaaaaaaaaaaaaaaaaaaaaaaaaaaaaaaaaaaaaaaaaaaaaaaaaaaaaaaaaaaaaaaccccaaaaaaatttccccccccccccctttttggaaccccaattccccaataaggaacgggaaatttaaaattcctccaaaaaaaaagggaaaaaacacaatgggttgcctcttcggcccccttaaaaaaatggttttcaaaaaaagggaaacaattccccctgccccaaaaggaaatgccagggtaaatctgtccttcaaaaaaaaaccaaagggggttaaacaacaaaaggaggagaaacccccggggtttaataatcccatcccgaatttaaatgaaggggtaattgctgttaatgccaagggccctgtaaaaattaacaaatcttgaaggaatgcattcccccaaccaattcaaaaaaaacctggtgcaaattggggggcacctaaaaaacaacctcttcctcaagaagaaaattgggggaaatttttcccacaacaaaaaaaaacccctgaacctccctct

SEQ ID NO: 68275 - DNA, 363 bp, Glycine max
  Clone ID: PAT_MRT3847_32665C.1
gaggtaggtgctccttgtatgtaccttggttacagttgcgcgcgtgggactgacctccttcagaagggaacaatcgtcatgttatgatgaggaggattattcaaacccatgctgtgatctctgcatgtgcacacgctcaatgcctcctcaatgcaggtgtgaagattagggctgaattcatgccactcagattgtaagatctatatgtgcacacgctcacagccaggacagtgtcgttgtcttgacaccaacgactactgctacaaaccttgcatgtccagagatgactagaaaaactaataagctctctcaaatggacgaagccccctttaggctctgcccgctatgtcaggggaggacaaa

SEQ ID NO: 68276 - DNA, 276 bp, Glycine max
  Clone ID: PAT_MRT3847_32666C.1
ggctcgagctagaattgtcagatttgcggggcgagatgatgcagcatccacgacccggcatgccgcctactgccatgggccatgatccaccacaacagtacccgtagtctccgccgcagacgacagcaccctccgcgatggagccatcgaacgcacaggggattgatgccatatggtcctcgatctgctaggaaccggctaactatacgtccgacaggatctaccaggtacgctcctttacaagcagggactttactaccggctattgcaacaact

SEQ ID NO: 68277 - DNA, 500 bp, Glycine max
  Clone ID: PAT_MRT3847_32667C.1
ggctcgaggaaaaacatcaacgattcctcaatcaactctactatgtagctgataatactaccccgacgtactcagtgctttgctctcaagtcaatggaagatgaaactgtgtgtcttggcctatccactggctacagaagctaccaatccaagctcaagtcacactacggtgattctttatgctcatacatcgattccttcattggtgggtcttgaggaaactgttgagggtggattttgcttctgaggtgttttggctaaaagtacaacctttgtgtgcgcccttcgaaacatagctattcatcgcttatgatgaagacaatggggaccatgagtagaggacggcttatccatgccctttgtgcactgaagattgtgatcttcatgagctatgacggcatatcgactcgcaccatgccgggtaagccaagcctgcgatgtgtcctgggtgtgccatgtggataggaacaaatgtgggggctcatatagcagcacaacac

SEQ ID NO: 68278 - DNA, 299 bp, Glycine max
  Clone ID: PAT_MRT3847_32668C.1
gaagaccacgcgaccgccactcctacgatgtttgtgaatcactcagtaatgattactttaagaacaacatttaaagactaattggggacattcaataatatgattacattactttatcattaactgtctaagatgacattgccagatccgaatacaagaggagatcttataaatcgcattgctggaatgttgaatcctatcaatacagcatatttgaacagatatgatccactactttatactgtaaagagtatttcaaccctcatgcaatacactgatatataactaaatcgaaattt

SEQ ID NO: 68279 - DNA, 321 bp, Glycine max
  Clone ID: PAT_MRT3847_32669C.1
gtttttaggttgtttccacagaagaagaacagatggaggagagtagaaatagaggcacttctgctgacgtgagcgacaacagcgccaatggattcagaaaccgtgatggtcatgaatgacttgaggaacaaacccccgctggagccaaggagtgtgctactaaggcgattcaggtggtaaaacaaatgtgccaagggcataatgctgatggggccctcaagctctgtactgggggcccggtgtctgatgataaacagtgtgctgtgtttatgccacgtagctgctgaagctatgtaaagagcagacgcagcaggtcacacc

SEQ ID NO: 68280 - DNA, 566 bp, Glycine max
  Clone ID: PAT_MRT3847_3266C.1
ggaacccttggttaaaaaatattttttcaattaatatggaagcttttttttttttttgatttaaaacctaaaatatttctttttttttggggggggggggcctaatgtccccaacaaactaaaagggccctgaatggccagccaatttcaccctttttggataataaagccggcaaaaaacttaattctcctttccaaaagttcccccaaatttttataagaaagacggaatttgccgatttaccttttgcgtgtttttagctttttaactgttggggaagatttcccagagctggcaacttttaagcttctttttttgtttgttaaaaagaacgttaccttttttaggagcacacactgcccctggtccattgggtgggatttttgcttttttaccaagttcaatttgccctgaaatgcttccctgggacaaatccccccctgaacttttaagggcctgtttaagcgtttgcaacaccccttttgagaaaacgctttgtttttgcttagggcccccccctttaaaaggtggggcttttttttttttttcaacttttttcttttgg

SEQ ID NO: 68281 - DNA, 427 bp, Glycine max
  Clone ID: PAT_MRT3847_32670C.1
ggctcgagctctagcccaatcggctcgttcggcttttggaaagatcatcattgatacctatggtggctggggagctcatggtggatgatccttttcaagaaaggacccatccaaggtgtacagatgtggcgcgtatactgtgggaaggctctacctatggccattaatcgccctcctggaaggtggtcgagctcgttatctatagcattgagagggatgttcccttgttgaacattatggtatcttatggtaccgggaagatccctgacatggaaattctgcatataggaaaagatacctttcgactttatacctggaatgaacaccataaacttggaccttaaaaggggaggtcataggttcctcataacaactgtttatggacactttggaagggatgatgcaatacttaacctgtgaagttgtt

SEQ ID NO: 68282 - DNA, 288 bp, Glycine max
  Clone ID: PAT_MRT3847_32671C.1
gacaacagacacagaaactgctaagaccataacaagaatggtgtttgactcaaaaaagacgaggaacatgaaatgttagggctaggatgcttcaacctcactcgattctctcactatccatccactacctctctaccatcctctcactccgaattacttaaggttgccccttgcaaatccacctaatcagtgactaatacgcaccaatcttcagtcacttagccacagtccacctgcaccgctataattgaaacatataacccgaccagtgccaaaaggcaattggca

SEQ ID NO: 68283 - DNA, 431 bp, Glycine max
  unsure (1)..(431): unsure at all n locations
  Clone ID: PAT_MRT3847_32672C.1
ttttccctttttttttttttttttttntttttttnttttttttnttttttnttttttttttntttttttttntttttttttttttcacgaggtaaaaaaaacaaactaaaaaatctacccgggacaacccggggaacaaaacaaattggaaaattttaccctggggaaaaggaaacaatgttttcttaaaaaccttaacccttttagggggaaaaaaaaaaaaccttatatcccttaaaaagggaaccccgggagggggggggaaattccagttagattcgggttttttaaaattccccccaaatcaaagggaaaacggttatcaccaggctttaaaaaacccccccccccccgggaattaggggggtaaaatccccccccccaaggggttttcaaaaccccccctgaacttaaggggggggggggcccaa

SEQ ID NO: 68284 - DNA, 520 bp, Glycine max
  Clone ID: PAT_MRT3847_32673C.1
ccagctctacaagttggaaggaatcaagttgcataagctcccaaaacaaacatagaccacagacttggatttctgcaaatctagccatttcaggcaatggtgctcattaattgaggcctggtcgcctctttgagctttatccaaatcatctttgttacagaatgaaacaggaccaatgcaccacaccttatcatttctcaccttcttgtaatccgtcacgtatgccttctccaactcttcaaaagtgtttatgattagcccgtatgacttcatttcagcatcacgcatctggtccccgaagtgcttcatttcttcatctgaatttgagatcatcataggtatctgctctttggtagcttgaatttgaccaggtatgccggggatagtgaagtactcggattctgaagtgatgctttcacaaatatttgaagtgtgtaccatgagcagacaatggaggcagaagcaagaaaaaccgtgaaacgaaatccttggaatatgatgcttttcagctacttgagcc

SEQ ID NO: 68285 - DNA, 594 bp, Glycine max
  Clone ID: PAT_MRT3847_32674C.1
ctgtataggaactgactccactccttaatctggagtcataccattacattctctaggaagcaaaattttggggattccaccagtttaggagatccaatttttgttagaaaaatttgacttcaaagttcaaagatattgagcttggattctctctctgttctcttcccaccaagtttttgcattcacctccccaaatctttcccggctgaatctgacacgtctaagctccctagttccatcagctaactgcctgattgtaatgtaaactccaggctcgtcttgttctacccattctgtctccatttcactggcattgctgatagaaggctcatctctagaagcagtggtatcccttgctggttccatagatggccctgcatggtattggccactgcctccaccgtgatccaacggttcggacgggtaatatcctctgctcccagagggcttatagtgactcctcggcgtccaatccttgtttgaggccatggggctttcccttgcagatgtcaatcttgagtaagaagaatctctttgctcatcctcagaccttggaggagtgttaagagcttgtttattaaatctctggacgtt

SEQ ID NO: 68286 - DNA, 638 bp, Glycine max
  Clone ID: PAT_MRT3847_32675C.1
ccacgcgtccggaatattgacccttcattgcactgcactgagttggcgttaagccgcacttcaaatcactcatttccattcatccactccactcttctttctcctatggctgcagaattggttggtggtgctcttctttcggctttccttcaggttgcgtttgagaagcttacttctcctcaagttctggacttctttcatggaagaaaactcgatgagaagctgctgagcaagatggaaatcaagctgcactccatccaggctctggctgatgatgcagaacaaaagcagttcagagatccacatgtcagaaactggcttcttaaggtaaaaaatgttgtgcttgatgccgaggatgtcttggatgagatacaatatgaaatctccaaatgccaaatggaagctgaatctgaatctcaaacctctacaggctgttcttgcaagggaccaaatttcttcaaaacttctcatgccagtttctttaacaaggaaattaaatcacggattgaacaagtccttgacagcctagaatttctctcaagccaaaagggtgatctaggcttgaaaaaagctagtgggggtgattatggatctggatcgggtagtggaatgtcacaaaaatgccatcttcatctttg

SEQ ID NO: 68287 - DNA, 499 bp, Glycine max
  Clone ID: PAT_MRT3847_32676C.1
tggggcgacaacatagcgcacttgtttcgttgatcaccgttcttcacctgccggtgacggaattcaaaaacacccgcctctttctctttctctctctgtctgtcaccagaatctgttccattcatcttctctggtttcgattccaattcgcttggggatctgaagattgatgacaaatagtctggttctgtaccaataacaaaaatcaagttgagtagtattttgctggaaaataatggaagcacatcctactttcttcattgaaagttccaagcaactcaataacatggggatgtctggagcactttcttcatccttgtcaatccttccaatacccccagaagagttgtttcccaagctgcctgaatcacagctggattttgtagaacaagagcttatgataagaccttttactcattcaagatatttgaattcctgtggagttattgggcatatatttttcgtctttccctggatattcaactgatcttcatcactc

SEQ ID NO: 68288 - DNA, 328 bp, Glycine max
  Clone ID: PAT_MRT3847_32677C.1
gtagaagccgcctccattgattccaaaacaaagacaacattggccgacttggaggtgggggctagtactgtgggggggaaaggaaatagatctaatgttgatcaacgacaaataaaattgagttattcaaactaggtaacaaagtttcaaccatgtagcagagtgattaaaggcaaaagagtgttctgttctgggtcatcagaattcagaatgggacggaaagaacgacccctggaactttaattcattccataccttgccgtggggcacatgatccctctatgcgacataacccagttctttgctcacgggggcacaatgtgaccat

SEQ ID NO: 68289 - DNA, 767 bp, Glycine max
  unsure (1)..(767): unsure at all n locations
  Clone ID: PAT_MRT3847_32678C.1
tgcaggtgcggcaagtgaagagagtccacgccagggtatcgacattgttgagcacgcgagtgggtggcgcgtgggagaggtttgcgcatagcaaagcaataacacagtgcgacgacatagcgcacttgtttcgttgatcaccgttcttcacctgccggtgacggaattcaaaacacccgcctctctctctctctctctctctctctctctctttctgtcaccagaatctgttccattcatcttctctggtttcgattccaattcgctgggggaaagaattcgatacagcgttttcgtaattgtgtagtggaatttcgggggtatgaagattgatgacaaatagtctggtttgggtaccagtacaaaaatcaagttgagtagtattttgctgggaaataatggaagcacatcctactttctccattgaaagatcaaagcaactcaataacatggggagtctggagcactttcttcatccttgcaatccttccaatacccccagaagagatgttcccaagctgcctcaatcacaattggattttgtagaacaagagcttatgacaagaccttttactcattcaagttatttaaattccggtggagtagtctggtctctttgtattgcttcgttttcacgttttttttatttgttgcgttactttactccatatcgtatcgcgttgcatttccctaactcctcttccctccgatgcttgctacgctggttntgctaccaactcntgttctctttctcactcttttttttt

SEQ ID NO: 68290 - DNA, 265 bp, Glycine max
  Clone ID: PAT_MRT3847_32679C.1
ctctattcattattattattactgctgagactctgctcaagtcttgcaccagagatctgggttcccagtatcctccaattctacggcaactttttcggctaaatcccattcttcccatcgaagccgagctcgcattgcacattaaacgcgctttgcgagctgcgctcttggttgtcatggagactaaggcatagattggccgtgcagatgaggttaagcgtttatcgaatgatcttcagcggcgatccttttacacggaagcgtg

SEQ ID NO: 68291 - DNA, 284 bp, Glycine max
  Clone ID: PAT_MRT3847_3267C.1
gggttattcttgaaacccaatattgagagtgagaaaaaggctgctgttattcactacagtgggcagacaaaaccttgggtgcaaattggctttgaacatcttccgccattttggaccaagtatgtgaattattctaatgataatttttttaactgctcgtggctggaatcatagtctgacaatgtggagcacaatgatgggacaacaggtgatatgaaagggacgagtaatacaggctggatctaacattttgcaggccggaatcaccttaaagatgaatttga

SEQ ID NO: 68292 - DNA, 400 bp, Glycine max
  Clone ID: PAT_MRT3847_32680C.1
gcttaccttttgcatattaagtattatgcatttgagctttaaagattgccttccattctctcactacatgcttctctaaaattactctacaatttcctatgatgagagcagtgcgatttgtttatttcctctgtaatctgtccttgatttctctttgcatctaataaacaagattgactatgggtacacaagacaacttctgaatactatttgtttcagctctactaaagctggataatcctccaaaccttgtcaattccataaaaacacctaccttttgcagtacccctccttgtcattatccaaagacaggataactaccactttctccacatcaataatttcagagacatgattcacaggttcaattgtatcccaatctctctaacaaaaggtgcct

SEQ ID NO: 68293 - DNA, 125 bp, Glycine max
  Clone ID: PAT_MRT3847_32681C.1
aaatacttaaaaatatagttggatttcccacctggcgtctacccctgttgaaagtaacaaagtaaagctgctctgcaacaggggtagaagcaaggtgggaaatactgaaaaatatagttggattt

SEQ ID NO: 68294 - DNA, 505 bp, Glycine max
  Clone ID: PAT_MRT3847_32682C.1
tttttctttgtttctttcttttctttctttctttttttttcttttttttctttttttctttttttcttttttttttttttttttttttttttttttttcaaagataaaaaaaaccggcgggaagagaattggggaaaaaaatccccccccccggaagcccctgaggggggccaaaattgggaggagggcatttccaatataatttgaaccccccccccaggggggtttttcctccctttcaaataaattattatccggttttcgcccccgggcttccagtgccagaaggggattgggggtttccccccaatcccttttgggagccacccatggttttgggggctggcccctcccaaaatgggctttctcccccgctaagtccctcccacttaaagaaaacagggccttaaggggggggggggcggatcccgggccccccccccggaaaagtttccctggctttttggcgaaaaaaaaaaaagggggggccggcctcttaaggccg

SEQ ID NO: 68295 - DNA, 485 bp, Glycine max
  Clone ID: PAT_MRT3847_32683C.1
aattcggcaccagaactgactagctgtccctaattaatttccctttcccttcaatctcaaaagcttaatagatagcatattaatcaactgctgtgttttgtggcacaatcatgtccgtgcatgcattgtgttgcattttaacaaattggccattgtgatttgaaatggtgtcaaattactgtcccattgcggcatctcattttgggtaattttttttgttttttatttttgagcatttatgtatgtagtataaaaaatgtattttttgttcataatctttggtacagtagtcaactacttcatcctactatttactatcctgctatagctttggaatggtcactctgtgcagctatccaaaattgataaattagaataaaactagactgacatttgggtggatgactactgttaaggttacagttgactcatgagaaagaggttcttgagttcttttatgtttatgggtgaatattgcagtaaat

SEQ ID NO: 68296 - DNA, 514 bp, Glycine max
  unsure (1)..(514): unsure at all n locations
  Clone ID: PAT_MRT3847_32684C.1
ataaaaagaactttttttttaataagaattcctggattttttaaaataatttattctcttcgttccagattatttggttattttagaaaaaaattggttcctaaaattgattcttttttattaaaccctttgttggtggttaaatattttttttttttcaaaactttccttaattaatatttaagtgggagtagtggtattttgaatggtaaataagtgattaatgagagggataaaagatattttagaaaatttttgatgttttataaaattcaattaattaattatattgtaatatatgtgttaaaatcttaaacgacatataatcagaatattactataaaatttcatatctaaaaatgattntcaacagcgtnaaacttctttacttaaactcgtttttaaaaggcaaatcttaaagtttattccanaatttctctttaatcttgtacttaaaaggctcgggttggttaaaaagaaaaaaaaaatattttttaaaagctttatctttcct

SEQ ID NO: 68297 - DNA, 1250 bp, Glycine max
  Clone ID: PAT_MRT3847_32685C.1
cggacgcgtgggttcgaaggcagcaccgcacttgttctgctccgccgcgattgcaatcgtttccactcccgccgctgatgggtttctcaaaggaacagcttcttgcgcggttaaaggagcttcaggttccattttcccagtatgagcatcctgttgttttgaccgtcgacgctcaggctcaatatgttggacatttggggggtggcctcagcaagaatttgtttctcaaggacaagaaaagcaggttgtatattgtttctgctttagctggtaccaaagtagatctcaaagtgttatctcagcggcttggtttgggaaaaggtggtctcagaatggcacctgaggaggctttaggtgaagtacttcaggtacccttgggttgtgtcactccatttgcacttgtgaatgaatcagcacgagatgtttcactgctattggatcaagggttcaagtctcagaagcactgcttcttccatccactgtcgaatgacatgtctatatctctaaatgcatgtgatcttgacaagtttcttaaatcaattggaagaaatccatcatacgttgatttggagaccaatcctacagtggggaaagatcaaccccctgatctagctgcactagttccatctggttccatagttttacccgatcaaccccaaaaacaatcttcttcacaggttcctaaggatgcaaaccatgtttctgtggataatggagccaatacagtttcagctaaagttgtcaagccatcctctggtgggaaaaatacaaaggggacaccagcaaaaaatgttaattcatcaggctcctttgcagatgctgggcaattcgttgaagagatattgcaaaaaacatcacaattattgctttcagaggtcaaggacgaaaatataaagttacacggggagcagctcggtactgtgttatctgacaaattacagaaaaacctcaatgcagagttcaagagccttgctatgatatttaagaacacagcatatacggaagggttccatgctggtactcattacaggcccccgctcatgtgaagcacaggatgatttacgatttgctgccaggaaagtaaaagaggaaccaaaattttaactctagttgttcaatgtttagtttgtgataacacaccatgcattgtttgagcattcatatatattctgggaaatgtttgttatagaatagatgatttgaaacgatttgatcaatgaaaaaaagtcaacattaagtcggtcaattga

SEQ ID NO: 68298 - DNA, 252 bp, Glycine max
  Clone ID: PAT_MRT3847_32686C.1
tttctctcctgtttctctgcaaaattaatatccctagcgggaactcttactctgagcagcttcttgagtgctgggtcttttctttaatccccttaacaccttattgccttgtgaaccccagtaataactaaatctttacattgtgatatgacagccctttgtgcctcatcccatgatcctgtaactttagataccatgctccgtgtttggtgcaataactttagaacttgcgcacgcaacgttgatatctat

SEQ ID NO: 68299 - DNA, 837 bp, Glycine max
  Clone ID: PAT_MRT3847_32687C.1
tgtgaggtttctccacaggaaggctgtgaaagatgttaactataaaggttatgacattccatgtgggtggaaagtgctcccggtgattgcagccgcgcatctggtgccctgactttttgaccaacctcaacagttcaagatatggggatggcagaacaatggtagtcgtggtggaagttgttcaagcaagaacacagcaaacaacaactttcttccgttcggaggaggaccacgattatgtgcaggatcagagttagctaagcttgaaatggctgttttcattcaccatctcattctcaactaccattgggaattggctgatacggatcaagcttttgcctacccttttgtcgacttccccaaaggcctacccattagagtccaagcccactctttgctttgagaaaaattagttagtaagttcaccccaaatatgtaataactccaagcctagccaataacagagtcacaccttgatctaaatcaaactacgtgaagaatttgaagttcctagctccaatggcattccatacaaatcaaaaatatttccgactttctcgcgtacaaagggaagagaaaaatattaagtacaattgtacaaagacaggcattaggaccacttccctttcttcttcttccttttccttcaattccccctctaggctgtagtagatttttactgccccgtacccccaccctccctcacattgtacatttttatatattcctcccaaatgcccacctcgagtgaatatttactcatttttatttttccactattgtattgtaatctatctttcttactatatatcatactcccaattatcttttgtgtat

SEQ ID NO: 68300 - DNA, 412 bp, Glycine max
  Clone ID: PAT_MRT3847_32688C.1
gtggaatatatgagagaggcgtgtgctttgaaaagtagcgtttgtatataaactatgtgagatgtggcctcttttgatgttatctttgtctctaataaaaccacgatttcatgccacgtggcctgtgttatttggttatggtggatcagttatgaacttatttagggtttaattatggtaaaacattgtttttcttaatttctcttgattcctgatctttggctttatggtggagtttgcactttgcggcatgcatgcatttgaagatcagataacgcggctattgtttgtgatttctttttcttgctaccagaactgtcacattatatataaaaatagtagatgctcttagcagtagtaccgtgcttgaaaaacagtaagaaaatcatggatggattagacaccgatttct

SEQ ID NO: 68301 - DNA, 409 bp, Glycine max
  unsure (1)..(409): unsure at all n locations
  Clone ID: PAT_MRT3847_32689C.1
acccacgcgtcagaacaacctcaaaatatattggaccaaggcctactacttctgttattctgcatatgtattctgcatatgctgtcaattttattttaaccactttttgttatttagttaattctgttacaataattatgtttactatgtttagtagtttcctattgtttttcctatatatttgtgtatagctggtgactaagagagacaacttttgtaaactttcttgcaagtctatcaatatactgattctgagttttccctcagcattcttttgtttctttcttccttcttgttttttttcattccaagttattacagggctaataacttcaatatggtatcagatgagcaacaacctttatgatcctcttcctgaatgggcctatgatcntctcctttgtcccct

SEQ ID NO: 68302 - DNA, 369 bp, Glycine max
  Clone ID: PAT_MRT3847_3268C.1
agcagccatattcggttgtctcttaacaaactttacagtgaagtttggaaaagataacaaaatgttgttacaatcagatatagtagccccaacctcggaaaaatgagcaagggggccatatattctatctaccaattctttgcaatcaactttaaaacagatgaacacagagattaccattctgaggctgtcagcacaaaacacccaatttaatctctaacacaagctccccagaaactatatttaggttggcaaaaaatccagcatctatattaactttgagaatccccgaacctcttgctctcagtgagagcaataggtccttgtatgcttcagtgagagcaagaggttcggggatgctcactgaag

SEQ ID NO: 68303 - DNA, 137 bp, Glycine max
  Clone ID: PAT_MRT3847_32690C.1
ataaaaaaaaatgtgttttttctatttcacacagaatataacacggccctaacatgttgcatccgatgaaaacctggctatgttgattaaactgcatgtgtggaatagcctacataaacgatgacattcaaatgaaa

SEQ ID NO: 68304 - DNA, 111 bp, Glycine max
  unsure (1)..(111): unsure at all n locations
  Clone ID: PAT_MRT3847_32691C.1
ttttanttgtccccttgtggtgcnagattctgatgatctcctcaaaactancngatcatccaaaactaccngatcagaccagaaatcttggcttaatggtaagttctcctc

SEQ ID NO: 68305 - DNA, 290 bp, Glycine max
  unsure (1)..(290): unsure at all n locations
  Clone ID: PAT_MRT3847_32692C.1
gcangcacgcgtacgtaagctcggaattcggctcgagaccaaaatcactcttcagcccttcctgtggctgttaggtcgacctgtctcccctgcctcttcccgctcccctcaagccaactatgcagcccaccagaaggctctggcggttcccatgggccctagaagcaccagccccttgatcacctggggtttgccatcaccgtgtccctgctgttcctcatgcccttctgccacctctgggggaaggaaaccaaaggatctcagtgggggtnggggagcttcagcctctc

SEQ ID NO: 68306 - DNA, 234 bp, Glycine max
  Clone ID: PAT_MRT3847_32693C.1
ccatatacgggttaagggaaaaagttcccttccctgttaacccatttcctcagggaacccacccataataaaaaagacccctccctacgatatcagagttttttatttttttaacataaaaattcaggcttcgaaaaaacccttgcaaaatgtgacccccggaacctatttgtttccaaaagtccaaaacaaaaaatccctttttagcatgacgggcccaatagcaccctcggc

SEQ ID NO: 68307 - DNA, 652 bp, Glycine max
  Clone ID: PAT_MRT3847_32694C.1
ccacgcgtccggttttataaataatttcgcagagttatttatttatttctgttgggtacatagttttatttctttaattatttaaaaactatgcactgaaagttcccttttcacatttcttaatgtatggacaatggtgattgtgatttgactcgctggttataatccctggatgtgcactacgtgtgatgcaggaagttgttaataggagatgcacagggagctttcatatccaagattcccgagtcattgaaacaggatatgattgaacgactccgatcatttagccaagaaaaaaaatacaattttcaggaccttgatccgagaatggtacgaggtgatctagtattttattctacagattttccattctataagtctagtattttattctacagattttccattctataagcctttaattcagttagtgatttgatactgatagtttctatttcattttcaaaatgttgcagaatgttgatctgtcgtgctagcgaggggtggtgtgaattctgtattactaatatatggatttttgtagtgatggtggcacccttgctgggatgctcagtttgggtttgttacatactaactctttgagctagtgctggcaatagtagcaggagaaggtggagaattggtatcattg

SEQ ID NO: 68308 - DNA, 188 bp, Glycine max
  unsure (1)..(188): unsure at all n locations
  Clone ID: PAT_MRT3847_32695C.1
gttaattgtaacctattattactgttactatgcgtgctgnctttatcggacangaattagaattgttggaataggaaagcattgtatctgtggacagaagtggtttgattatcagtgcgcgtatagggaatagggcctgacgcgacaggaactattaggcgaaaaggctggtacgttttagggggggg

SEQ ID NO: 68309 - DNA, 287 bp, Glycine max
  unsure (1)..(287): unsure at all n locations
  Clone ID: PAT_MRT3847_32696C.1
gacgcaacacnctctnngaaaaaggggtaatttnttattccntctgatagngcttccatttntcgtgcgntttctgnatacatggngngcattcnctaacacagtgnggttgaagtgtgggtccttggttgngagaagattnntgngaagatccacgaccacgatnccncgtgctncatgcanattccganaacgannannccagcgccantgattccttcaaatctaatgtttncagncttttcggcagatanaagcccattcatcatgtgtcttggcggtataaa

SEQ ID NO: 68310 - DNA, 228 bp, Glycine max
  unsure (1)..(228): unsure at all n locations
  Clone ID: PAT_MRT3847_32697C.1
nangtcgcatgcangcgtacgtaagctcggaattcggctcgagnnnaactgngtaaagctnaangctttttganagtttgagcattncagnnaaacatggnncagcnccgganagnagattagtggaganggggggttngtgnaggttgcnncnaaaancnagacaatggtttnatgtgcaaangtgggtgatttgttggagaaattgcngtgaagttntngtgtgat

SEQ ID NO: 68311 - DNA, 183 bp, Glycine max
  Clone ID: PAT_MRT3847_32698C.1
agcgttcgcccacacgctgcgacacacgctaagggcaggtgtgagataacacacacagagctgagatatgagagcgcacaagagaatatgtgataagtaccacatatatcactgttcacactctaccttgtgtgggcgctctctcctatagtgggggcatatcccccactctggaaagagcac

SEQ ID NO: 68312 - DNA, 219 bp, Glycine max
  Clone ID: PAT_MRT3847_32699C.1
tagcttcgcaaaccaacacacgccccaaaagggggggcacagatggaattcccgagaggacaggcacaccaccggccagagccacgaaaagcccccacagggggcgagccaagacagacaacaacaccagccggccccaagaccgcgaaacacggaaccccgcccgcacaaaagcacagaccaagccacaaaaaccaaaaccgcgaccagaagcacgga

SEQ ID NO: 68313 - DNA, 470 bp, Glycine max
  unsure (1)..(470): unsure at all n locations
  Clone ID: PAT_MRT3847_3269C.1
cccacgcgtccgatgcgtcctttacgcccgggcggacgcgcggggaagaattgctanttctaaggacaanacacaaanagccacccaaacaccngncatagagcaagaccattagccaggcagatgattgcttccattgaagaatttttgccattgttctgtaaatcgaaggaatcattggatcgttacctaattgggagaaccaaagctgtcaccgcagtgacttattcctcgcatttttgcattgttactcaagaaattgagcagctggtttctgaaaatttcaagaccattagggattttaaggatcgctttcttgaactacaggagcatgatttggatagaagcactgccagaaaagttctgatttagcatcttcaagaaattgctgataacgcaaaattagttgaggaagagtttacaatggcatttaagggaaatctcccatcaagtcgatttatctgaagaat

SEQ ID NO: 68314 - DNA, 283 bp, Glycine max
  Clone ID: PAT_MRT3847_326C.1
gcgacagtaccctgtgcaggattcaaaaacccgttttactcctgaaagtctgaaacaatgttgtttagagggtttttttgggtaaaattgtgatagttttctaatgcatttttttttttaaattcagaaacataataggatttgagaccctttttattccacaaaaaagctagtcatcttttgacctttgtttcttcacactttacagggttttttttcttgtgttcccagttcgcagtctactaatttttatctaatttgttaagttctttttctactaatt

SEQ ID NO: 68315 - DNA, 349 bp, Glycine max
  Clone ID: PAT_MRT3847_32700C.1
cgcttttccttaattgccaaaaacaattcgtttcttttcccttccaactattccaatccaacttgcaattttgcttttctccattgacacccaacacaaattacatacatcgaattcctcggttttttcctttcccacatttcggttgttattaattatcatattattattcaatattcatggcgtcagttttgatcgatgtgaaaaatatcctttctttaacgcggccgaagaagttcaagaatctgcatacaggatggaatctacatatcaacatggattcatcaatgaaagatgcgtccagcccatgtaactgtgatgaactcctcctagatcttaaaactactct

SEQ ID NO: 68316 - DNA, 1249 bp, Glycine max
  Clone ID: PAT_MRT3847_32701C.1
attatttcaagtggagtggttctcataaaaaataaaataaaatcaagtaaagtggtcagatatatagacatatagtttgtcttcacgttaatcggatcgaagtaatctatttacgtcgtcgagttgcaagtgcaggtaggtacagtagtattgttgaaaattgtcgaatatatacacatgggaaacgctcctggcagctttcgtcttctgggaaatggaaccagttcttaccattttcaactgggccaattggcctccattagcatgaaaaaaggagaggaaaagtgggaagataatgggaaaaggagccagaaaggctcgagctcatacaacgtagaaggattaacttgtacattctccataaccaaaagcaccggaataaattcagacgaggagttaaagatcgagatggaagataatacatgtcgagaaaaaatcaatcgccatgcaataaaacaatattcaagtggctttacccaaattgtgggaagagctgaagccggtcttcttgtagaagatatgatttgtttccatgcaaattcaacaaaagacgtcagaggatatgtcaaaggggcgtcaatgtatgttccctacacaagaaatacaactaattcatcgggcggtgtgacttcaacgaccatttgtccttatgggtcgtctggaactaggaagggtctttatgttaccgagtggaagaagaagaaagagaatgagaagccttacatggggaccatagcacattattatgctaataacggggaaaatttatttactagaggaatcgatgttggtctttctatgatggtaaagattcgagtgtcaaatggtgcattatttggcgttgacgagttggatttcaccgtagatggccctgtccaacacccttcatcggcaatactttacatgattaaagaagtcaccagaaccgggatgtggacacctagggcatgccctcactgtgccaatatccaaagacagcgtagatggcagtttgagagcgacgacagtgacaaccttcctgtagcaccaggtcatggtcatggcaactcgcaaaacgcaagaaatcatggagtattcaacggggatggtaacggtagtaactatgagagaaatatcatgttttttataaactagttctgtacttgatattatgcccctacaatgcagaggctataataacattaaggaataaaatcattcaatcaaaagtgagcccaaaataatagtattttttaaaaaaaattaactt

SEQ ID NO: 68317 - DNA, 480 bp, Glycine max
  Clone ID: PAT_MRT3847_32702C.1
gatcatttgattatttcaagtggagtggttctcataaaaaataaaataaaatcaagtaaagtggtcagatatatagacatatagtttgtcttcacgttaatcggatcgaagtaatctatttacgtcgtcgagttgcaagtgcagctagaaccatgcatactgacacacatgggattggtcctggcgacttttggttttcttaaaaatggaaactattcttaccatacactatgagaaggtaggtacagtagtattgttgaaaattgtcgaatatatacacatgggaaacgttcctggcagctttcgtattctgggaaatggagccagtccttaccattttcaactgggcaaattggcctccattagcatgaaagaaggagagagaaagtgggaagataatgggaaaaggagccagaaatgggaagtctcatacaacgtagaaggattaacttgtacattcttcataaccaaaagcaccgg

SEQ ID NO: 68318 - DNA, 167 bp, Glycine max
  Clone ID: PAT_MRT3847_32703C.1
caagaacacagatcctgcttttcttcatatgtattattgcttttttagtttgaaaaatgtattctttctgttttgctttctcacattgctggtggttgtataccaataaacactaaacgaggacccattttaatattaatggcattaagcttataccccattggtct

SEQ ID NO: 68319 - DNA, 607 bp, Glycine max
  Clone ID: PAT_MRT3847_32704C.1
ggcctacacaatcacaatcccaaaacacacatcaataccatcaatacaaatcacataaccgtcaaaatggtcaaagctgtcgccgtcctccgtggagactccaacatcaagggtaccgtcacctttgagcaggctgacgagtcctccaacaccaccatctcatggaacatcaccggccacgacgccaacgctgagcgtggcatgcacgtccacgcctttggcgacaacacaaacggctgcacatccgccggtccccacttcaacccccacaacaagacacacggtgcccccgaggacgaggagcgccacgtcggtgacttgggcaacttcaagactgatggtcagggcaatgcgcagggaagtgtcacagacaagttgatcaagttgatcggctccgagagcgtcattggccgtaccattgtcgtccacgctggaactgatgacctcggcaagggcggacacgaggagtcgaagaagactggtaacgctggcgctcgtcccgcttgcggtgttattggcatctccaactagatgtgtcattaaaaaaaatctagcgagcgagtagtcttagtatagccaaatcaatctatctatgcctctcacaaaa

SEQ ID NO: 68320 - DNA, 410 bp, Glycine max
  Clone ID: PAT_MRT3847_32705C.1
caaaaaaaacccctatgtggttttttaaccctcaaaaaagatttaaggggggaaaaatgggtgggcttgttaaaaacccccttttctttaaaaatttaagggaaacccccaggaaaacaattttttgacaaaggaccccatttttaagttttttcaaaaaaaaaacgggggtttcaaaaacaaaaaattttctggggcctaaaaataatgggtctcaagctctttgtaaagtccctccgttaatttttaaaaagggttttttttccaaaaacttttacttcaagttccccccgtgcaggaaccacaactttaaccttgatttacaccaggttcatggccttttttggggccccttgaactccccaaacaagacccattggtgggcttaagaggccccccccaagttggcc

SEQ ID NO: 68321 - DNA, 434 bp, Glycine max
  Clone ID: PAT_MRT3847_32706C.1
aaaaaaaaaaccaatttttttttttaagaacccccaaaaaaatttttgaatcccctccaggcggggttaaaaaaaaaaaacgggggctgtaaattgcctttaaaaaaaatttggaaaaaaacaattttccccccaaaatttcaaataaaattaccccctccttttaaaaaattatttttttgggggaaggggcaaaggggtaaaacattttaggggccaaaaaaaaaggctttaaagctaaggaataaaaaattttacaaaacccctttaaaaccccaaaccaatccttggggtggcgtaggcttttaaaagggttaacaaaatgggtccccccccccgggggtttttgggggggcccaaggggcaaccccagatccgggtttccgaggggggttagctttttttggacctggggcaagggctggggaattaaa

SEQ ID NO: 68322 - DNA, 377 bp, Glycine max
  Clone ID: PAT_MRT3847_32707C.1
aaagaaccgggcaaaaccccctttttttagcaaagtctttacggaggggcctttggtaaaaaaaacccccccaaaatttgccccccccccttgtgggaggtaaaattttcaaaaaagggtcaagggcccgagagaacattcaaacccaaaaaggggcccccttacaggcctttgtttgaaaaaccaaaaggtttttgaaaaaggaggggcatttgagggaaccaccttttaaaattttggaacaaaggccccggccgttgaaattgctgttgctgttgctgttgctgaacctttgactggggccaacttaaaaaaaggattatagccccctttctccttaaaaagcggggaaaaggggggcttgcaaaacaaaaggc

SEQ ID NO: 68323 - DNA, 709 bp, Glycine max
  unsure (1)..(709): unsure at all n locations
  Clone ID: PAT_MRT3847_32708C.1
tcgcttgtaaactatacaaatggaaaggagaggacgaccaagcgtccgtacacaaatggaaatgagaggatgccgaagtgaaagaaaaatctgaaaatcgagaggctgcctgcgtctctttccttctctgtctgggggtggcggtgtctatataaccaccgtattaccctctctatctgttctgttctgcggttcaagctaaggagttagttagttactatgcctatgcctatggctgcttcgacttcaacttcaacttcaacctctctctccgtcgtgggaactggcctcgccttcccgcgccatcctcccgccgtattctcctctgctcgttttcacactcgattgcgcagcaacaaccgtttcttcctatcttcttctcttccaagtgaaagaaggaggcataaggctgtttgtggcggcggattgggattattgcgaaggaacaagtctcgcggcggccacgctttcgtcgttggtgaaccctcgtttttgttgccgcagcatagctgtgcctcttgctgctgtcttgcgaggaaacgccgttccaatctttcaacatttgtcccttgagcttttctcgataaatcctctttctgcctatctaacaacaaactcaaccgttctnccgttcagattccacgtgcaactgttggtccagatgagccacatgcagcaagtacaacctggccagacnggtctgctgaaa

SEQ ID NO: 68324 - DNA, 629 bp, Glycine max
  Clone ID: PAT_MRT3847_32709C.1
gcgcgcgggtaattgcaagcaaaaccctagtgagtgatagataggtgaggtgctgttgtctgaatcgaatagaatcgggaaggaagatcaaagatgtggtggagatcagcatctttcatcatggacaggcagcggaacgaggaggctgatctgaagggggactcctcaaaccctaaccctaaccctaatatctctgcctactatgagacgagagcggcgcaccacggcgtggtcaccagcgactggctggcccaggctcaggccgctattgggcccgaccccgtccccgaccccaaccctgaacctgaacctcaactcaggcccgatcctgacaagcccttcagtgtcatcgatgagtttaacagctggcggaaacagccccatttggccgaggccgtcgccgccattcgggccctggccgccgtcataaggtccagcaaggctaccaccatgatgcagctcgagattgagctcaagaaggcctccgattttctcaagtcttgggataccacctctatctctctgacagccggctgtgatctctttatgcgatatgtcactcggacttctgctttagaatacgaagacttcaattccgctaagtctcgcttgatcgaacgcgctgagaa

SEQ ID NO: 68325 - DNA, 292 bp, Glycine max
  unsure (1)..(292): unsure at all n locations
  Clone ID: PAT_MRT3847_3270C.1
ttttttttctgttcagtcctcttttcaatggctgaactatccgccatgacatccgtcattttccgctacgccatccgccatatttttatgacggatttttggctttccgccatccaccattaacaacattgttagtttaccacccaagatctaacttctaaaatccattagcctgagtacgtgatttataaatataatagaatatagcttgacaagtttaccccacttnnnngnataaggtgtagctcttgttgtatagatccaaaacttgaggcttgaaattaacaaccca

SEQ ID NO: 68326 - DNA, 807 bp, Glycine max
  unsure (1)..(807): unsure at all n locations
  Clone ID: PAT_MRT3847_32710C.1
gggggcgcaattatacgggggccgctcnctttttttttttttttttttnntnnnnatatttgatatactttcatttctttattaaaatagcaacattgatgtgtgtactacaatgaatattttgctccaaaaacagtcaattttgggacaaaatcgattatacccactgtttttgggcttccaaactagatactaataaacaaaagtcgctgcaaatacaatcacaaggaaaatataaaggcaacaatgggagctttggaggttctataaaagaatctcatcctgaacacccacatttagggtcttatgtggcaaaataatgctattaaaaaccactacctcatcctcaacagtcacagattcacctggtctcagcaagggaacaagaattgcatagttagtaatttaactttgccttttcatacttctccataaaaatacaaaatagtaataaataaatagagacaaaatgtagacaaggttaaaaaaggtaccaagtattgtgaccccgagctttgcattgtaatctccactagcctgatttaatttatccaatttagcaaacaaattgccaataaaatcaaagtatttaccaaaaaaaagaaatcaaatgtaaagatagaaaatgacaatgtaagcacaacaagtagcataattgataaatgctttagttggggacattaccctcaagatgggtgaaaatgtaagaggctgctaaaggggaaatctatgccagttcagggcctatatgtttacttcctcaagggggttatacantacttaagaaagtaattaaatgggaaatat

SEQ ID NO: 68327 - DNA, 1363 bp, Glycine max
  Clone ID: PAT_MRT3847_32711C.1
ccagtctgttactaagccctaattattttttcaagattactcaatagcaaaaccccaggtgagggtgagggaagatcagagatgtggtggagatcagcatcattcatcatggacaggcagcagcagcagaaccagggggactcctcaaaccctaatatctctgcctactatgagaccagagcggcgcaccacggcgtggtcaccagcgactggctggcccaggctcaggccgctattggccccgaacctcaacctcaacctcaactcagccccgatcctgacaagcccttcagtgtcatcgaccagtttaacagctggcggaaacagccccatttggccgaggccgtcgccgccattcgcgccctggccgccgtcataagatccagccaggctaccaccatgatgcagctcgaaatcgagctcaagaaggcctccgattctctcaaatcttgggatacctcctctatctctttgacagccggctgtgatctctttatgcgatatgtcactcgcacttctgctttagagtatgaagacttcaattccgctaagtctcgcttgatcgaacgtgctgagaagtttggggaaatctcctacaaggcccgcaaagttattgcaatgttgagtcaggattttatatttgatggctgtacaattttggttcatggtttttccagagtcgtctttgaagtcctgaaacttgctgcacaaaataacaaactatttcgggtcttctgcacagagggaagaccagaccgaacaggtttgcggttgtcgaatgagctggccaaacttgatgtttcagtgaaacttctaatagattctgctgttgcatatactatggatgaggtggacatggtttttgtgggtgcggatggagttgtcgaaagtgggggcataatcaacatgatggggacctatcaaatagcattggttgctcacagtatgaataaaccagtttatgtcgctgctgagagctacaagtttgctcgcctttaccctcttgaccaaaaggatttagcccctgcattacgccctattgattttggcgtacctattccatcgaaggttgaggttgaaaggtccgcgcgggactacacccctcctcaatacctgactctgcttttcacagatttaggtgttcttactccatctgtcgttagtgatgagctcatccagctatacttatagtaatccatccatgtatatttttccccctattttccctatcaagatcatgtatttcacatgaaacaattttgtgacaagcacgtgtattgtttcaattaattagggataggttttagtatcaaaaagaggatctatgaagctcggatgctctgaaaatgtctaagtatcaata

SEQ ID NO: 68328 - DNA, 285 bp, Glycine max
  Clone ID: PAT_MRT3847_32712C.1
caccagtctaaattgcttatcattaactgggaaataaatttgaaagacacgatcaaaattggttatataataatgaatataaggttaaaactatggcgacgcatgattcatgaacatgcttatcctttaagttgtacgctttctctcatgagcaaatgccacgttcaattaactcaaaccgacgatgcaaaactcaattcccttccataaaccctctctactactgtctcagtcacctaaagcttcccatgagttttacatgctccctacaaggcaccccacaaa

SEQ ID NO: 68329 - DNA, 256 bp, Glycine max
  Clone ID: PAT_MRT3847_32713C.1
gggtttatgattttttttttatgttttgatcctgttttaatccatgaaatgattttgttatcttaatatttgttctgtggggggacaggcgcaccttgtttgctatggcttctggggggaaaacttttaaggccctttggccccacccccacttgggaacgcgcgataggaagaagctccttttcaacctgggttgaaaaaaaccgttttttggaaaaaaccccccctgaaaaaggggattaacctgaaacccccc

SEQ ID NO: 68330 - DNA, 401 bp, Glycine max
  Clone ID: PAT_MRT3847_32714C.1
gaattcgagctctttacccggggatcctctagagtcgacctgcagcacaatgtgcttacatgaatattggtttaagctcagtttttttattcttcactttgaactggttcacaatattttatatggttcctacaatttaatgcttccgttcttaaccaggcagagctagcagtctccgatttttctggaaaatggggctgggatactatcagctgccagcacagttgccagtacttttctctaggtttttgttgctgaatggggcgataagtcatttttctccacaataggtgagttctaaagttagaaattttggttcacagaaactaactgttatatatggacctacttataattatagacacctttcttcctaatttaattatcaatttcttctttta

SEQ ID NO: 68331 - DNA, 572 bp, Glycine max
  Clone ID: PAT_MRT3847_32715C.1
ccacgcgtccggataatttttttataagatggaattgattcttgtgtgttattcaaataccctataaatgacacaaatcctaatgcatgtaaaaaataacatctatgaacatttctaacgtggttgtttaaatgagttgcttaacaagttttttcattggagttgatgacttgatagtacatgtttaagtgagttgcttatataaacaattgttgctaaattgattactacaaaaaaaaaaaaaaagcttttcaattcaaaatttaatgtggcttaagttaagtacttgctccagccactttagcattgaagtaaaattttgtataaagttcttaaatctatctgacattgtaagttcataaatttaatataaataatccatttaagcaagatccattgcaaatgctctaagccatttgatatttattcatcagttttgatgtactatgtgaatgcatgacaataaactatagggaattcacatgtaaaaacttaatgaagaaaatcatttctaaaaatggaaatttccattgcaatattcctaagtccccgtcaggggtggtctctcattt

SEQ ID NO: 68332 - DNA, 247 bp, Glycine max
  Clone ID: PAT_MRT3847_32716C.1
cctcgtgccgattcggcacgaggtcggcacgaggagacaatcagagtcttaggagtcagttgcaggccattgagcagaaccctttgtaaaaagagtatgtgattgttgaaatatctagaaaaacagtttttatccttttgttttaactcttttttgagtgtcacatactttcttaatgaggttatagtagaatattatacataaatgacaaaactctattaaaccagtaaaaaaaaaaaaaaaaaaa

SEQ ID NO: 68333 - DNA, 569 bp, Glycine max
  Clone ID: PAT_MRT3847_32717C.1
gattgatccatagtatcagacatgaatatgtggctgcattggatagttatatgaaagatgtagatgagcctgttcatgctttctcctttattaacagagcattctcacagttgactgacaataaccatgcagcttttcggtcagcaatcatattgcgaattcctgagttggttgaactaagcagggagggcgcgttccatatggttatcagtcattttagggatgaaagttctcgtatcataactgaacttcactctcatccaagaagtcttttcctttatttaaagacactcattgagcttcatttatttggcaccctagacctgtctaatttgagaaaggatgatactatgaatccccttaatagaaagcaggtcaaggatcacccacaaggagtcaaagattacttagagaatatatctaatttccccaagtacatatgtgaaaatcctattcaagtgccagatgatcttattgagctttaccttgaggtgaatttttgtaccaatgcctttgcaaggccaaagaataatttgattttttttaaatttgttgtttttgccatctat

SEQ ID NO: 68334 - DNA, 486 bp, Glycine max
  unsure (1)..(486): unsure at all n locations
  Clone ID: PAT_MRT3847_32718C.1
ctcgggattgcggaagtttggtggggagggtcggagctctggtggagagagtgttgtctaaaacaagttccggaagggaggctgcccttcgcggtccgagaaccaccggcctccccagtttgagggctgttaccccgtgcgcgcttcgacgttgctgctgttggctctcctcgcccctcgttcccttgggaaccgcctgggaactccgccatgtcatccacttcgcccaacctccagaaagcgatagatctggctagcaaagcagcgcaagaagacaaggctgggaactacgaagaagcccttcagctctatcagcatgctgtgcagtattttcttcatgtcgttaaatgtgaggccataggttatattttatttaaaaacacgaaaaggaaaatttattctgtttcatttctaanaaattgaaatataatgccagacaattctaaacgatccattttttaaaaaaaaaaatacttcactttcttt

SEQ ID NO: 68335 - DNA, 410 bp, Glycine max
  Clone ID: PAT_MRT3847_32719C.1
tcagaacctgtgtccttcttgcgtggccactggccatttctagcaacggcatcatttttttgttcttctccaatgtttactcttcgatcctattacctatctacgaatctaacgcctccgacggcccttcgttgacattgaggcagggaaaagtcgtggagaagaacgacacagacgaagaagccactgatactgaaaatggtcgcgattctcgatgacaatcaaaactcatacgccacgcacaactgaaatcgccttctcacttcgacttctcgccgcacctcgccttcgccaacagcatcgtctccttcgactccaccttcgcgtcgtctcatgagcgcgccatgtgcctcaacttcttgtagattaatatgaaatcctaggctacgaatacgcgaataaagcatgaa

SEQ ID NO: 68336 - DNA, 810 bp, Glycine max
  Clone ID: PAT_MRT3847_3271C.1
ttcccgggtcgacccacgcgtccgtgctgattatagagttcgagatgaatctatgttacatgcatccaatatattatgtaatggtcaccctgaaaaattggtcagcagcagctcctatggtctgcttcatgatgaaagaaatgggcatatcattcaaagattagttggtgaagcagttaattctggacatgatattgctagggataaaggtgaaagtagtataatttctaatatattgtccatggactttgatacctgggatgactcactaacatcacctcataatttagcgaagttgttgggtgacaatactgataaccagcctggtcctttaaacaaatctagttcttggaaaggtcacagtaacaatcaatcaaggttttcttttgcaaggcaggaggaatccaaaatccaaatgtttgatccacatgcatcttatggtgtcagccatcaacggccaaaccgtacagtcttcctgaattgtgcagaaagagacttgtatatggataagttgggcattgcaaatggattttctaccagtaactttgaggaagctgagaatatggtcagtggtcattccattgcatcttctaataagttttctgccatctcaagagcacaagtttcagccccgccaggattttccattccaagcaggttgccaccacctggtttttctttccatgagagagtggagcacgcttttgattccatttctgggaattctttgcttgaccattcttccctcttgagaaattcatatcagacaccttcaactggaaaccttggtagtgcaggggacattgaatt

SEQ ID NO: 68337 - DNA, 617 bp, Glycine max
  unsure (1)..(617): unsure at all n locations
  Clone ID: PAT_MRT3847_32720C.1
acgagctaagaaggagaagcaaatggcttcctcaatgatctcttccccagcttgttaccactgtnncaaccgtgccggtnngccggcatggttgcttccattttcactgnngcctcaagtccatggnnctggcttccccanccaggaaagacnncaacaatgacatnnntacctccattgctagcaancggtgganagagtgcaantgcatgcagngtgtggcccaccagttggcaagaaagaagtnttgagactcttttcctttacctgccagacccttgatgaatgcaccnnnattggcaaaggaaagtagaaanntaccttcttaaaggaaggnngatggattnnccttgcttgnngaattcgagttggagccacggtttcgtgtacccgtgagcaccaacaggtcanccaggatannctacgatggacgctactggaccatgtnggaaagctgcctatgttntggttgcaccttgatgcttctcanggtgttgaagggagcttcaagaggctaangactgcatacccccaacggcttcatccgtatcatcggattcgacaacgttcgccaagtgcagtgcatcagcttcatcgcctacaagcccccaggcttc

SEQ ID NO: 68338 - DNA, 210 bp, Glycine max
  Clone ID: PAT_MRT3847_32721C.1
tcgccaagcggcgggatcgctcggtccagatgttgagagtaggacagatgcactcgataactctataggagcacatgtcgtatttgtccgtgtcgcggccaaccctcctggcatacaggagagcgattaattgacccccactgacttgctgaagctgcttgagattctgaacgctctagataaacctcgatggatcacgataactacatg

SEQ ID NO: 68339 - DNA, 506 bp, Glycine max
  Clone ID: PAT_MRT3847_32722C.1
agcataaaaagttcaacatttactgaggtaagatggtttcacaaggatatttctcatagtacatggtgccttcctttgctgatcttaccattctttcctcagacatagtcactgaggtaagatggtttcacaattcttctgatgggctttgcttcctcttgtatccctggtttgctatttcgacccctacccctgctattatcttttgttccttattacttccctaacatgactagtggtaaagtagtcatttcaacacataccaaaatactaacaaactaggaaagttaaatcaaccacaaatatatattacatatataggaaattgcatatattaaatataaaacttgagcaggacaaagctgatgatgaagactgttcagatgaatgatatgaatatatcatatattctcgtagaagtatttcttgaagagttgcatatgtgctatttggaagtgcatggacacaataacggatccatcccctgaagacttagaagatcactg

SEQ ID NO: 68340 - DNA, 309 bp, Glycine max
  Clone ID: PAT_MRT3847_32723C.1
ggaacattcaacaacaatggctgtgtgctgttttctcatcaggaacagagagggattccgggtgctgaatttcgcagaggatgttcaaacttaactcactcaatcagaccttgtctaattctcaactctgctctgcttttctccaacaaaaaggcaaagataccagatattgagaaggcttagatgtgtgctacattgcaagcaaagagggtactgggagaagtggggatatgctggatattctatagtcttacacagcatgacacaacaaccaaccttttccattgcgaaggccttactgtgatttga

SEQ ID NO: 68341 - DNA, 530 bp, Glycine max
  Clone ID: PAT_MRT3847_32724C.1
tttttttttttttttttttttttttttttttttttttttttttttttttttttttttttttttttttttttttaaaaaaaaagagggaaaccccgggggcaaattggatttcaaggcaaattagcaaacaagggggcaaatggggaccaaaaatcccccattcttttgggacatttggaacaaacatccaatagcttttgggggcaatatttggaaacaaaggctttggcacccagttttgtgggggcccacttggaattcttttttaccccattttaaaatttttggtaaacaatgaattttggaaaatgaaaaggctaaaggttaccccctttttttaaagaaaattttgaacttgcccccaaaaaattttcaagggacgaggggctttccaggcaaaaaatatgggccttaaaaactttattaacgggtacaagaggaattttccccaaaattcctttaggaacctgggggaaaagacccccttttattttgcagaactgggggaacaaaataactcctagcggggg

SEQ ID NO: 68342 - DNA, 1004 bp, Glycine max
  Clone ID: PAT_MRT3847_32725C.1
gtctgagatagaagcatagaataaattttacacttagaacatagaagcaaagtgtttggtgtgagaagagagataatggcgcagagagctcaaccagcgttggccaccacggatgtttttcagaagggagatattcattggaagcaattcaatgttgaaacatccactgcttcttcctcacctccaaaaccattgcttatttttacaccaaccgtgcctggcttataccctgtaatattgttttgccatggcttttgtattcgcactagctactactctaagctcctagcccacatagtttcacatggattcatacttgttgctcctcagctggtttatcttgggctcttaatacttgcgaatttttcttcttcttcaatttgcgcaccattagatttatatacaactttgtttaataatttaaaaccagaaaattaaaattttcagggtactatctttattattttatttaatttcaaacaacgagtgaggaatgataagaaaaaaaccatgctgggcccggagcaggcctcttctctttttcctccttgtgctccaaatggggtgaaccataaagagtttttctctgagtgcaaaccacctagtgcatattttgttgcaacggattatggtcacatggacatgttggatgatgaaacaccaggggtaattgggacaatgatgtcaaagtgtatgtgcaagaatgggaagaagggtcctagggacttgatgagaaggactgtgggagggttagttgtggccttcttgagagcacagttgaatgagcagtggaaggattttgatgctattttagcgagtcctaatctagctcccgccaaacttgatgatgtgcgatacttaccaacatgaagtcatcacacaaacattcatttatgcagtttttattctatttctatgaaaggcctataatgtctttcaaatttgtctatataatgatgttattcacattgcacttttcaattgggtttttacatgggacaaaa

SEQ ID NO: 68343 - DNA, 332 bp, Glycine max
  Clone ID: PAT_MRT3847_32726C.1
tcgagggtcctaaagatccgtgaggggtcgtgaagggaggatatgtgatcggttgtatcttgtgtgaccaagttgccgtgtcatatccataatagcgtagtcaatgcatgtcttggtgaaacaatatctacgagattgagcatacttttatagtcatgggatgtggcacatgatatgacaagccttcatgcgagtacctctgtcgacatggatgacatttgtgaaaaggaactctcttgattctggtgccaagagaagcatgaaaccttcaagttctaccatcttgtataatgtaatacccacgaagatgatggaatcaagatggatgattt

SEQ ID NO: 68344 - DNA, 236 bp, Glycine max
  Clone ID: PAT_MRT3847_32727C.1
ctctcttccttccttctccacatcatttcaaatacacaaaaaaccctaacccccaattcatctctcttgaatcgaatcgatggcacgcatgggtccagggttccgattcaacccaccgacgaagctctggtggtgttctaacttaagcggaaaattacttgaaaactctcccggtacgaacaaatcgccgtcgttgacgtctaaaagctcgagccctgggaacttccctctctgtc

SEQ ID NO: 68345 - DNA, 297 bp, Glycine max
  Clone ID: PAT_MRT3847_32728C.1
cactttcagactctttcactctctcgctctctcactcataattttctcctctctctgattcctttaactaattggagttttcacgctccttggtctttcccatgaagccatttcatcttcgtagggaggtcgggaaagggtcagccacttcgcacgattggtgaatgaggatgtaaatgatggaacctcaactgaggggttcacaatgctgttgaataaggacaacgatgtgaaaaagcacagtggaaacccagagtcagcataatggatagataatgatcctcattgcaaactttt

SEQ ID NO: 68346 - DNA, 1117 bp, Glycine max
  Clone ID: PAT_MRT3847_32729C.1
ccacgccgtccgcagacacacacactgcaagtgcgtttccaatttcaatggtgaaatctctgtagtgacagtgaagtcactcactactgcaaattttcaaaggcagcgaaagagactccaatcaatggctcttcctcctctctgtattcttcttttcctcgtctttctgttatcagcaacatcaacacaacaagaagaagagttcacggaggagttgctgctgaagcccttgcccgatcgcaaggttctcgcgcatttccacttccaaagcgattctcctcctctcgccgccgctgatgagtcctcctccttcgatcgtcaccaccacctctttcccaaatctatttctcagctggttcagagaagtatcatattaaagcaatggagttatcttttacacaaggtcgatggaactatgaaagatggggtggatttgattcaatatcaagctacaatgcaaagcctccaggtgttgaattgtgggcagtttttgatgtccctctacatcaggttgatgcttcttggaaaaatttaacccattcactatcaggcctcttttgtgcttcaatcaacttcctggagtcttctacctcttattctgatcctgaatgggcatttcaatcagctttgggcagtttaagatatggtacactgccacgtgaagctgtgtgcactgagaatcttaccccctggttgaagctccttccttgtcgagataaagctggactctcttccttaatggatagaccatctatttacaaaagcttttaccactctcagcagttgcacttgacaatgtccacagatccttcagatgggtcaagatcaggaattattcatagaacaaacacttacagttgtactccagcctaatgatcagaaagctggtatgagccatctcagtaaaacaaagatacaaccaagctggtccctgagttcaatatttggaagaaaaatcagtggaagatgtgttcttgccaagttgagtaatgtctaccttcatgctgagagaagtctagtcaatcaacttgagaatctccagaagaatactgttaaatttgctgctatgacacaggtcttgaagatttaaaaggaatgctgggttcccttctgtcgt

SEQ ID NO: 68347 - DNA, 3049 bp, Glycine max
  Clone ID: PAT_MRT3847_3272C.1
ggcccaagcggactacagctggtgttgttcagcagtttccaaacaatacatgtagtgtatatattacttactcgaaggaagaagaagcaattcgatgcattcaaaatgtgcatggattcgttttggagggtagacctttaagggcttgttttggaaccactaaatattttcatgcctgtctctttgacatgccttgcagttagccaaatggtctatatcttcaagagattagcaatcttgaggtcattttcacaaaagatgaaataattccagcataaacttgcaagtcatgttcaacaaattactggtgctgcaaacaatatacaacgacaagcagggaatgtattgcctcctccattggatgattgcatggataattcatcaggaaaaccaattgtgaaaaattcatcaagtacctctgttagcattgtaagaagttcacctcctaatggaacttctgggagacctatagctctttctgcggttgcatggggtacacgggctacaaattgtcagccagctgctgataatttattatgtccaaatggactgtccgggcctaaacctaatccaataagctgcagccctacccttttcctctgatgttgcatgcacaattcaggcgtcattaaatagtgatgtgacaaagaggccacttctgattgatgggattcgtagtatgacacctcaaataaaagataaataggccaattctgtcagataaaatagaagcattgttaaaatgcagtcttctggtataagaaattggatgtctgaagttaggctttcagttgttaaagtgaacaacctgttttcttctctaacatttgccagagatagtggtagagacatcttttctgcaactaacacaactagttcaattgacatcacttgtcaaccattaaactttggtccttaggaagcatttccatctacctgttaagtgattgagaatttgtcctgcaagttttcttctttttagattgatagaaatgatcaaaattaacactacagcctatccatacctagcagctcacctgataatgtgttggttaaatctatgcaatctcaagaattgcagtataatactgacaaattgaaagatttaatgattaaaaatgcagacagtaaagctgctgcattatataatgaggtttgtaatttaaaggaacagtgtgatttgtcattggattctcaatctcaagtagtatcagctaatactgaagtggaagatgatgtaacaacttttgataatcagagacttaaggatccagaagttattggttcttatttgcccgagtcagccagtttccttcatgtctcaaatcattctagtcctcttcttctgcagcgtggtgacccatgtaatgttgtaaatgctggttttttagatgccaatgataaagttgaggataactcactattacatgcacataacatatgcaatggatattctgatgagatcagtaccagttcttattggttccgccatgatgcaagcaatgagcaccacattggaagattagttagtgatgcagttaatattggaagtgatgctgttatggacaagggtgagagtagtataatttcaaatatattatcgatggagtttgatgcctgggatgactcgctggcatcacatgagagtttgaccaagttgttgggtgacaacactgacagccagaatggtccgttaaaaaaatctagttctaggaaagttcaaagtaacaatcaatcaagattttcttttgcatggcaggaggaatccaaattccaagccaatgtacctccatcttctggtgctacccagccatttccaaagaatggctcactcatccaggattttgtggaaagagacttttctttgaacaagctgggttttgcaaatggcttcccctccaataacctcaaggaatctggaaatcttggcagtggtcatttcattgcttcaaacaataagctttcagctgtttcaagagcacaaatttcagcaccgccaggattctctgttccgaacagggcaccacctcctggtttctcttcagttgagagaatggggcaggcttttgactccctctctgggaattcattgctggacccttctttcttactgagaaattcttatcaaacaccctcaaatggaaatattggtggtccaggtgacgttgaatttatggatcctgctattttggcagttagtaaaggccctgaacagtttaactactttgaaaatgaggccagagttcaattattgatgcaaagatctccctcaccacagcaagaccttcgattttctgaaattgggaattccttttctcagtttggtgattcttatggcatttcttcaaggttaaatcaatcacaagttagtaatctggcttcatttcctcagttatctctgcagcagtctagaaatgcagtcttgtcaaatggccaattggatgggcggaatggaaatggtctgggtgtggcagagcttttgagaaatgaaagacttggatttaacaagttttatagaggatatgatgattcaaaatatcggatgcctaattctatggatgtgttcaacaggacatttgggatttgagattgttgggtatattggccatggtaaagccaagtcagaaataaacaaacagaatttttctgcattgccaaaggtgatggggatggctcatgacataacctgtctattgggctacgaaaggatgaaactctcgcttatagctgcagctggttactgttcttgatttgcagaagcaagctgcgttgagatttaagaaatcaatcatggatcggaaagtatttggcaggtagatcttagttgagtggtttctcttagtacagaacatggaaacctgttgatcgatcgactatcaaataatctctcctattttgttaatgatattttttcttttaccgatattgtggatatagatagaggtttgattattttttaatatgtatattttgtatgaaatacgtcactttttaaagttggaaatcccttctgatatgtgtatgaaagagatcttttactaaccataaa

SEQ ID NO: 68348 - DNA, 253 bp, Glycine max
  Clone ID: PAT_MRT3847_32730C.1
ggctcgagccaaaacataatgctcaggattatgtctgcaaccggatggaccaatgagggaatggggacctagatatcacatatacaggaggcctgtgtaggtagggattcttgatcagacattccctgtatggatgtttcccatttatggcgagaatgatctgactactcacagctcaacctgtgcctacatgggacctcgttgtctgactagatcaacatactatgcgacgacgtgcgattgaggtaagcaa

SEQ ID NO: 68349 - DNA, 725 bp, Glycine max
  Clone ID: PAT_MRT3847_32731C.1
gtcgacacacgggctcgacctttcctcccagagcatatagcatgactctttctcacttttccgctgccattttcatctctttccttctcctcactctccaccaccacgccgaatcaactcagcctccctattcctgcgactcgtcctccaactcaccctactacccattctgcaacaccaggctccccatcagcaaaagagcccaagacctcgtctcgcggctcactctcgacgagaaactcgcccaactcgtcaacacggcaccggcgattccccggctcggcatcccgagttaccagtggtggagtgaagcgctgcacggcgtcgccgatgccggcttcggcatcagattcaacggcaccatcaaatccgccaccagtttcccccaagtcattctcaccgccgcttccttcgacccaaacctctggtaccaaatcagcaagactattgggaaggaagcgagggcggtgtacaatgcggggcaagcgacggggatgacgttctgggctccgaacataaacgttttcagggatccacggtgggggagagggcaagagactgcaggggaagaccctctgatgaatgccaagtatggtgtggcgtatgtgagagggcttcaaggggattcctttgaaggagggaaactgggtgagaggcttcaagcttcggcgtgttgcaagcacttcactgcctatgatttggaccattggaagggactagatcgc

SEQ ID NO: 68350 - DNA, 921 bp, Glycine max
  Clone ID: PAT_MRT3847_32732C.1
gtgagggggaagtgaagatcgcaaagggaaggaattgcatattaaaaccgaagatatgctgttaaagcttcaagctaaactggtttctcctttagatgcctgcaaccacatcatacagtttttcaactacgtggatggcgtgtcagactttcctgcttctgctatatcctcaaaggatttgtcaacatctaaggctaaccttgcaatggacacaacaacatcatctcttccacaatctacttctctaatacaaaaatacacttatgacatgagctacactaggtcaaatgatcttcaacaaaaagacctcaaatcctccctcttaagtgaacataaaaatgagagtgatttccacttagaggctctattagggaaaggaggagggcttgaaagcttggagagcatcgtgcggataaaagaggccgaagcgagaatgtaccaaaacaaggcagatgaggcaaggagagaggcagaagggttccagaagatgatcaagacaaaggctgcacagatggaagaagagtatgcagaaaggattggcaagatttgcttgaatgaggcagaggaaaggaggaagaacaaatttgatgaactcaatgtcttgcaaaattcccactacgattacttcaacatgaaaagcagaatgcaagatgagatccatggtttgttgaagagaatggaagcaacaaagcaccaacgggtttaatatacatattttcttcttcttcttgtttaatgttttactgtctagaacactagtaaaatgtgtgtactttattgatctagtgccgatttgtattctgctgtttcttatcattcagaatagatacctttctattgattaaaaaaaaaaaaaaaaaagaaaaaaaaaaaaaaaaaaaaaaaaaaaaaaaaaaaaaaaaaaaaaaaaaaaaaaaaaaa

SEQ ID NO: 68351 - DNA, 238 bp, Glycine max
  Clone ID: PAT_MRT3847_32733C.1
atgcatcgcacgccgacgttagatggtaactgggctttagtctaaaggtttatgtttccgaattactgaggcaacaatgcgcatacgtcaaatggaatccatggcatgcctattatgcttaatgctaatccaacagacatgaataccggaatgactctgagtattccaaatccccatcttgtcgaaatagagctgccccattgttcatatatgaatggctattacatgactactgaat

SEQ ID NO: 68352 - DNA, 805 bp, Glycine max
  unsure (1)..(805): unsure at all n locations
  Clone ID: PAT_MRT3847_32734C.1
cggccgctcgagccggcgggcgggaagttcccttcttgttccatcaacacacgttttccttgttccgtggtggcacacactataatctcatggaaaaggaaaacatgctcaaaacgcctccaaaagttccaattcaaccacaaacacccgaacctgaatgcaaaacaccagctccagttcaacaacaagaccccaatgatcataataactcctcaaatgaattgcacaaacctgttaccccaaatcgtcttagagtccccaaggctttcaaatacccagaaaggtaatattatccttttatatattaagagcaaataatgtctacaatttttcactaatcgattgaaatctattaaagattacaatttttgtaagtcatacttcctatttaataaaccatacataatatgatttttaattatttgacggtcgaagttttcacataaacaacattgaaattaaactcatcatatatgtgagtgatgtcaaatatattcatatgtagtggttttatgaaattttaaggacaaaacatgccagattagttgatagttgggtcagtgatgtcaatatgtgaggtcttaaatcttaaagtgtgtttttttcattttaccagatatacaagtccaattgatttgataatgtctccagtaaccaaaggccttcttgccagaactagaaggggtggcggtgcagtgttaccacctggntggtaaaaatcaaccaaggtacacccagtgaggcaataacatattgntctgcatttacttttttctagctatgctactaaatttactcttttggg

SEQ ID NO: 68353 - DNA, 484 bp, Glycine max
  Clone ID: PAT_MRT3847_32735C.1
ttgatttgtgggcggacgcgtggggttggtattcctgagattacaggtatatcattggcctgtgctatgaatagtttttttagggggcgtgccagttctgatattcacaccatctgttctcacgactgtgaattatggaatcctgcttgcacaaaagcaatgactatgtcatttaatccaattccgtgtcctgatgcatggagtatggaatttttgaagcgtaccggatttcatagtgatatcatttgtgtcactggatgtactgtcaccccaatgcatgatgttcaagtcacaattgattggattatttcctctcaagaatgagtacccaggacctattgtgtttaataaccacaaaatcttttgtgttaatacgaggaaggaaaactgatttctctccagggactttccgatcgaaaaaagaatgccattttctactgggaaggagcctgtgcaaagaatggtaatttcattaatattccca

SEQ ID NO: 68354 - DNA, 270 bp, Glycine max
  Clone ID: PAT_MRT3847_32736C.1
gagaactactatggagagagaccttactgaaatttacttgtataataattaattataacaagtgacacaagtcaataatattgtactaataggatcctagtagctagctagccatgttctccgctggcataatattattgtctgtttgccatgtggctttaattctggctctgtctcgcgtgttaaatcgtgtagctactctgtattcttgtttttattgcttctctaatatataaagtataaatgtctgatatgcttccttttaaaaaa

SEQ ID NO: 68355 - DNA, 366 bp, Glycine max
  Clone ID: PAT_MRT3847_32737C.1
gggggggaaaaacagaataatgcattatggccgaggcagagttttactctctgcatctcaacaatcgttcgagttagtaatttggcactcgtttatgggcgagaaggttgatgcaaatgccaaaacggaatggggtacataacttacttgtttactgaatttaaaaaaaattgaaaaaatcttggccatttacgtgtaattgagatatccttttgggagctaaaggttcctgttgaatttggcatagctgttcaatcacagatcaggcaaatcccatttctgtttacaaattccacgttttacgggtttcacaattattggaagtcattcccaaagggtggaagggagtaagatctttcgtgcatg

SEQ ID NO: 68356 - DNA, 210 bp, Glycine max
  Clone ID: PAT_MRT3847_32738C.1
gaagtctcaacccaaaattctaaaatgcccagttgtaaaaatttaagttaatagtaatacatatgtgccttgcatttggcttcttccccccacttcttgtttggttttattggctaggggagaaaagcagcttgggattttcttttttagggagcatggcatcatctggctgaatcagtttcaattaattaaaatttatcacttaacttc

SEQ ID NO: 68357 - DNA, 104 bp, Glycine max
  Clone ID: PAT_MRT3847_32739C.1
ctcgagccgatttgtatctggtgttgtcaaacagacgcaatacgagagacaaatatgttatcatatggttcaatttcaagttttgtagggtcattttctggctc

SEQ ID NO: 68358 - DNA, 587 bp, Glycine max
  Clone ID: PAT_MRT3847_3273C.1
ttttattgtttttttttttttttttttgggagagctttacatttcaaaaaccgaacagcaaagtctaaaacaagtagttgaagacaatatttcacatatgataagatagagtctagaaccctatggaggacaatattttttaatctagtattggaggacaagtagttgaagacattttcgtacacaatgtacaatgccttttaggaggaagagtaaaatcaagaactagaccataaaaattaaggcaagaaaagagaaagcttgagatttgaatgattaccagtaaccagctgcagctataagcgagagtttcatcctttcgtagcccaatagacaggttatgtcatgagccatccccatcacctttggcaatgcagaaaaattctgtttgtttatttctgacttggctttaccatggccaatatacccaacaatctcaaatcccaaatgtcctgttgaacacatccatagaattaggcatccgatattttgaatcatcatatcctctataaaacttgttaaatccaagtctttcatttctcaaaagctctgccacacccaaaccatttccattccgcccatccaat

SEQ ID NO: 68359 - DNA, 249 bp, Glycine max
  unsure (1)..(249): unsure at all n locations
  Clone ID: PAT_MRT3847_32740C.1
cctgtnctgtgctctnangggccatantttgggaccctttgaaccctaatctccacccaaacccattttncccggnaaattnccttnncaaanaaagnacgaagaggtnaatgcagaatcacaggctnaagcagcagcgnnngcagcaacaccaagctcttatgcngcaagctcttctccaacaacagtnnntctaccaccctggcctccttgctcctcctcagattgaaccatatccaagtggaaatt

SEQ ID NO: 68360 - DNA, 740 bp, Glycine max
  unsure (1)..(740): unsure at all n locations
  Clone ID: PAT_MRT3847_32741C.1
aacatgtgccaagggtactaatggattacataatgttgaatgctcctgcaaaagtttataacagtatgacttacatctcagttgagattagtccttcacttgctgaggtgcaaagagaaactgttggtgaagtgcgcagccatataccaaagttcagggtagaatgtcgtgatgctgctgaccggattggatgggggcaggtggagcaacaaccatgttgggtaataatgcttgaggtacttgataatcttccgcatgatcttatctatgcagagaatcaaatttcctcatggatggaagtctgggttgagaggcaacatgaccagtaagtctcagctttatgtgtggacgctgatcttacaagtgcacataccccttggcacatattcaagtgcttcattaggtagtatctgttagaaaatctcataaatatctgatgatattttttgtatcttggaatattttagagtatcctagatgacctttgtagttgtaggcctatcatatcatgtaaataggggggtaacatgttttaggtccttctaaaatgactattgctcgaatttgatcggtctaaaaatttttgtattatttttcgtccctctcattttaaaaagtatttttttcatccttcnaaatttgaaatgtatcactttttggtccttaaaatgctttcgatagctctttatacaaggtaaaactggtttagatagcggctaaaatggaaaaatacataaaat

SEQ ID NO: 68361 - DNA, 532 bp, Glycine max
  Clone ID: PAT_MRT3847_32742C.1
tggctcctctaagcggccgctttttttttattttttttttttttttttttccacaagaacagtatcggtcaatatgatccaacaaccattcctatttattaagcgaaacaaaatattttccattctaagatcctgagcgtcctctgcatattccttttatttccacacccatcccgtctatcattctccattatatctttcacaatctaatccaataactgagagcaaacagttacatagagacacaacctgtacaggattgctagcattcacaactacgaacccttcctgccctttttccttaaatgaaaaaccggtaacacctattgagttaaagacctatttaaaatcattaatgtccacccacaccttatccttgcactaaacaatccgaacccgattattaaattgcccaatcaatgaacctcgccaggaattggacttatcccacgcaaacctactcacgcttttggcgagctattcagccaacatgacaatgctctcaaccttgggaaatccaaagaacttccta

SEQ ID NO: 68362 - DNA, 233 bp, Glycine max
  Clone ID: PAT_MRT3847_32743C.1
tagatcgattgcgatgaggcatgctctttcaaggggtaatagtaaattagttgatggcgctttctttagaaccagaaccaactcgcctagttatcaatattgctgcgtggaatatacactaccaaacatcctacacacgatgcctatgaaccacacctggctcttcgtgggatcactacatgaaccacactagagcatattagatgcgtgatgagttgctgaactacatgata

SEQ ID NO: 68363 - DNA, 437 bp, Glycine max
  Clone ID: PAT_MRT3847_32744C.1
atcgcctctcggtgcagcttgtatagctagcagacgcaacaacacacacttctccacacccgtcacctctccctatagacacctagatcgcatcaccatggccgtcaaccgcgctttcatcaaaaagtggctgcctaccgagacctggcccatctttggcatcgtgggcatcgcttgcggcggggccggctactacctgtataagcttgctatgggccccgaggttgtttgggaccgcaagggcgactggaggccttgggacaaggtcaagcacgaccagaacctcaagttcctctcgtacaaccccgacttttgggccaagcgcaaggaagaggccgccgcgcgcgaaaagcagcgcatggtcgatgccatctagatgtcgtccaaggcggggactaccctggatgtttcttcttgatcgtttctctttttactcg

SEQ ID NO: 68364 - DNA, 217 bp, Glycine max
  Clone ID: PAT_MRT3847_32745C.1
caacataaatacatctattgaaaatgcatgccctggtgttgtatcttgagctgataatcttgcccttgctgttgaagtttcggtgtcttttggcaggaggaccttcatggaacgtattattaggatgatgggacggtttgattgcaaaccaatttggtgcgaacacgtccatttgacaatccaactaaaaggctggccaaagttactgttcaatttt

SEQ ID NO: 68365 - DNA, 471 bp, Glycine max
  Clone ID: PAT_MRT3847_32746C.1
aaagctggttggagttattgttctttgcttctcaagaacagaagtgtttgtgatttattactttcggatgtacttgtcattggtacttcttggtttcttgcatggacttgttttcttgccggtagtattaagcatctttggtccaccttcaagatgttcaatcattgagcaagaggaagatcgttcatcaacctcttcatagctgtaaactactcattggacgatgggatgtccgcaagtagtgcagaagcatctgtaaagtacagaaatttataggcgaaacagaagataggaaatacagcaattttgacatatccgccccctaacttgtgtatcatggctcttgtacctatttaataatctcttgtgtgtaaggttaaggtggaagtttgccaaaaaccaaattaaaaggttaatttaatctataggcctagtgttattaactaaaaaaaaaaaaaaaaacacacacac

SEQ ID NO: 68366 - DNA, 433 bp, Glycine max
  Clone ID: PAT_MRT3847_32747C.1
gagaaaaaaaaatacttttattttcaaaggatgttttaaccccttgaccatttgaatttccagggtcttttaatagtcaataagggatttaattgatccaaaccctcaatgatgaaaccaaattgcaaaccaaaaaggccttaaaatctaattgcccgacaaagggatccataaaaaactgcaggggaaaatgggataccaaaaaaatgactgggaaagctgaagtttgaaaatcaaaattttgtaaaaaattgctccacaggggctgggggagcttccttctggggaaaatctggggcagcgttatgggggggggcatcctttggttgggatgcaggggcagctccttttgttttaaaagctgttttttttccgtttttcccattttgggcgtttttagcaggtgctggaggagggggaatcatgtgacctg

SEQ ID NO: 68367 - DNA, 417 bp, Glycine max
  unsure (1)..(417): unsure at all n locations
  Clone ID: PAT_MRT3847_32748C.1
cggggnaagcaagacccatgaattacatgagcatgagcctgngttgacgcgccgcagggtgtattactgtgatgcttgcaatgaagagggacatatatggtcctactactgtggagattgtgactttgatctccatccaaaatgtgcattggaaaaggaggacaaagaaggaagcaaagatgatgccaaggaagaaaagtccaaagatgaatgggtgggtgatggagaagtctctaattagcctaaaagctgcttgtcaagggttttggtgatgaataatctgaatatttccctgaggtattgtgaacgcccttcctagtatgttttgtgagttgtgcagaataatctgaatatttggatgaggtattttgatgttaattatggtctttaatatatatggtataatggtttactctc

SEQ ID NO: 68368 - DNA, 2216 bp, Glycine max
  Clone ID: PAT_MRT3847_32749C.1
ccacgcgtccgtacggctgcgagaagacgacagaaggggacgcattttctgttctgttttgttctcattctgtgactctgtgcttagttaacgttaacagtgacttaagatggcggattctgcagatgtcacccacgatgttgtgtccctcctctcttctcctcaaagggactttcttcttcgaaacaacggcgatcaggttaaaattgacagcttgaagggtaagaaacttggtttgtatttttcggcatcctggtgtggtccatgtcaaacatttacgccaactttggtggatgtgtacaatgaggttgcaaaaaaaggtgacttccagatcgttttcattacggctgatgaagatgatgagtcctttaacggttacttttccaagatgccatggcttgcaatcccattttctgattcagacacacgcagccgccttgatgaattgtttcatgtgagggggattccccatcttgcattacttgatgaagctggcaatgttgtcactgaagatggagttgatgttatacgcgaatacggtgttgaaggatacccgtttacatcagcaaggatccaagagttgagagatcaagaagaggaagctaggaggaaccagtccgtgagatctctcttggtctctccatctcgggacttcgtaatatcatctgatggaaagaaaacacttgtctctgagcttgagggcaagacagttggtctgtatttctgcgtgaagtcattcggatcatgcagtgactttaccccaaagcttgtggaggtttatgagaagctgaaggcccagggggagaactttgaggttgtgctgatacccctagatgatgatgaagagtcattcaaggaactattagaaagtgtgccttggttatccttgcctttcaaggacaaaatctgtgggaagctagctcggtacttcgagctttcaaccctccccactttggttattattggaccagatgggaaaactcttcattctaatgttgctgaggcaattgaggatcatggggttgctgcatacccattcacccctgaaaagtttgctgagcttgatgaaatactgaaggccaaagaggcagctcaaacccttgagtcaattttggtgtctgacgatcaagattttgtcattgggaaagatggggtgaagattccagtgtcagaattgaaggggaaggttgtcctcctctacttctcagctcactggtgtcctccatgccgtgcattccttccaaaacttattgatgcatataataagattaaggaaaagggcaatgcattagaagttgttttcatctcaagtgacagagatcaaacctcctttgatgaattctttgcgggaatgccatggttggcacttccctttggggactcgaggaagaaattcctgagtcgcaaattcagggtatctggcatccccatgcttgtggccattgcatcaagtggtcagacattgacaacaaaagctcgagatctggtttcactctatggagcagatgcatatcctttcaccgaggagagaataaaagaaatagagacagaacaagaagagactgcaaaggggtggccggagaagctgaagcatgaattacatgagcatgagcttgtgttgacgcgccgcagggtgtattactgtgatgcttgcaatgaagagggacatatatggtcctactactgtggagattgtgactttgatctccatccaaaatgtgcattggaaaaggaggacaaagaaggaagcaaagatgatgccaaggaagaaaagtccaaagatgaatgggtttgtgatggagaagtctgcaaaaaagcctaaaagctgcttgtcaagggttttggtgatgaataatctgaatatttggatgaagtattgtgaacgcccttcctagtatgttttatgagttgtgcagaataatctgaatatttggatgaggtattgtgaacgcccttcctagtatgttttgtgagttgtgcagaataatctgaatatttggatgaggtattttgatgttaattatggtctttaatatatatggtataatggtttactcttatttcttcttgtgtacttatgaattactacttactgggcaaaaatcgtgtctatatccctgcttgtcttttaaatttccttttctaatcttggattttgcttccaatgaattaaaaccttcaataaagcgttgctgctttaacagctttattgtttc

SEQ ID NO: 68369 - DNA, 449 bp, Glycine max
  unsure (1)..(449): unsure at all n locations
  Clone ID: PAT_MRT3847_3274C.1
gcgatactccacgggcatgttgccagtgccagttttccagattgcgattttctcgaacgcttcaatggggagaaccaagtgctgcttcggagggttgcagtgtccggcgacgctctccgcgtcggaaccgtagttcggggcgcagaaattggtggcggtgacggcgaccgtcgtgccggagatgcaccaccgccggtcgaagtcggaatcctcctcgcggcaccggacctcgaagcaggcgccgcagatctggccgcgcccgaagagagcttcgctgagagcggcggtggccatgccataaccgccgttaaggaggtcgccgtaaccacaccccgccgccgaccgcgtcggtggcggcgtagtgagttgcgtgggcgggtaaccattcttcggcgcgtggttcanggtcggtgtggggggtagattcngaaaatggcgcggtagggggt

SEQ ID NO: 68370 - DNA, 236 bp, Glycine max
  Clone ID: PAT_MRT3847_32750C.1
ccaagttctcattaacgtcatgccatgccatgcaagccaatgaaaatgagaggatgggcggaaccccagggagcgatgaatcagcaactatgcaacccccaaggtcgcgggatgacagatcatgcttcccaggacctacggtacactgctaagcgccgacatcgcgcctggtgcctggcctgaccgaacttcacagaagatcaacgaaaaaagagcaacaacgcgagtagtagtag

SEQ ID NO: 68371 - DNA, 370 bp, Glycine max
  Clone ID: PAT_MRT3847_32751C.1
gtgccgcctgcttgggggggggggggggggcctgtgctgataataagaaacggtgatgagaagcaaatacaccagggacacataaaacgcgaccgagaggacaaaattagtgtaaaattcgctagcatggtaacggtacacaggtataagatttaggactaccttaaagagagagcatagggggccaataattttaggggtaactaggcagataagatacacgaaacaaaacccaaaacaaaaaacaaaaaaggaaccccaggcagtagagcagtagcagtagcgccgccacgtgaaaagcattggcctgggcttataagccgccaagctggcacgagcgctaactgaaaggctttgttgggtgtatgac

SEQ ID NO: 68372 - DNA, 321 bp, Glycine max
  Clone ID: PAT_MRT3847_32752C.1
gcctcacacaacaacaagaaatttattcatgaaatatagtaagtacttagtagaactactctgtctcatttgagagtcttattctctctgtcctgggaatccaccaccccttccaccagggaagccgccaccaccactaggggagccaccaacatcaccagggaaaccgccaactccaccaggaaaacctccacgtccgggaggggtgccaccaacttcaccagggaaaccgccaactccaccacgaaaacctccacgtccgggaggggagccaccacgaccacgaggggtgccaccaccactagggaaggtaccaacaat

SEQ ID NO: 68373 - DNA, 307 bp, Glycine max
  Clone ID: PAT_MRT3847_32753C.1
acgcgtgcgaacaagtatttgataactaataatgagaagcaaatttcttcctcaatgatctcttccccagcgtttccactgtcaaccgtgccggttgccccattgtttctccattcactggcctcaatttcattgcttgctttcccaccatgaataccaacaattacatttccttcatttctatcaaccgtgtaagagtgcaattcattccagttttgccaccactttgcaagaaaaaatttgatactcttttctaccttccataccttgattattcacaattttcaaatgaaatttaataccctct

SEQ ID NO: 68374 - DNA, 308 bp, Glycine max
  Clone ID: PAT_MRT3847_32754C.1
gaatactttggaaatggagggacaacaaatttggtcacaaagtcaagcccagtacttggagacagagttgaccaagatgctgccaaatgtggttctacaaatgtctgaagtcaatgagcaatgcatttataaagtaccacagaaatttcgtgaaggtaatccaaaagcttatactcctcaagttgtttccattggtccgtttcacaaaccgcgtgaccctaatggagagaacaacactttggtgcgaatggaagaactcaaactggaatatcttctgagattcctaaatcgaagcaagcagttctgta

SEQ ID NO: 68375 - DNA, 371 bp, Glycine max
  Clone ID: PAT_MRT3847_32755C.1
caacatctctctgaaaatcactcaaacgcagaagagagagggagagaatcgaaacagccctacgcagcacagcacaatcgcaacgcaagcgattaataataatcgattggcatcgatcaatcgttggttagggtttttgtttatctggtatgggcgagttgactcaggcggaggtgtactcgcctcggactcagcaagtgtggagggcactgttgagttggttagctttcttctttcagatcttcttccagattataagagccttaggtcactaccctctactctctttctcttcttcttcaaacgctgcttcatcttcaaacgcttccttcaagcctcttccctccgttgagctttctgaacacgattcg

SEQ ID NO: 68376 - DNA, 393 bp, Glycine max
  Clone ID: PAT_MRT3847_32756C.1
cagctccaataacgctggcgatgggccggaaaagacccgcgagcggaaaagttggttcccacggtttaagtccaattggctgggcacgttccgttccaagcaaatgttccagtgctgcgagtgcgcagtggtccttgcttccaacaataactcgctcttgagtcaggccggacgctacaagggcgccgagggcaagcactgccggtgtgggaaggaccagtggcatctcgccaagtccgtcgaggagaccgagtacaaccgccgtatggagatcagcaaggcttttggtggcatgcgctacgatgaggccgtactccgactgcgtagcatgggccaatctgagctggactttaagccgtccgagtacacggccaacgatggattgcctacaca

SEQ ID NO: 68377 - DNA, 209 bp, Glycine max
  Clone ID: PAT_MRT3847_32757C.1
cccacgtgtccgtttttttgaaccatccggaaaggaatttattgtaaaaggggtgctttttgtatagtgtttattggacccgtgggcggttccgtgttgcaaactaggaattatgtgtggtgattgtggtgtgataggtaattttatagggggtatttttaaatttgggggtattcaggggcttaagtgttttctgggtgaaattgttt

SEQ ID NO: 68378 - DNA, 1855 bp, Glycine max
  Clone ID: PAT_MRT3847_32758C.1
agcctcctcaacataactttgtattaaaaactattcctctcagttgaatgctgatataaaatttcccacaggaattctctggatcataaatcagatacaactggaagtagtattattgtagcaaagtgaacatttttccctcatgaaaatgtggcttggcaagaaaattatcttccttcaaactctgctttgtttttccatagttggaaccaattcccatggattgaaggaataccattttgttctgaaagaagctcattatagaagactctgcagctcaaaacccatattgacagtgaatggacaatttccagggccaactgttagagcctactatggtgaaacgatatatgtcaatgttcacaacaagggaaaatacaacatcaccttgcactggcatggagtgaaacaaccaaggaatccatggtcagatggccctgaatacatcacccagtgccccatcaaacctggtgggaaattcaggcagatgttgattttttctattgaggaaggaaccatatggtggcatgctcatagtgactgggcaagagccactgtccatggagctatctatatttatccaagaaagggtgaatcctacccttttcccacacctgatgaagaagtgcctattgtattaggagaatggtggaagagtgatgtcagcgatgtgtatgaggaatttctcagaaatggaggatccccaaatgaatctgatgctatcacaataaatggtcaacctggtgatctctatccttgctccaaatcagaaacattcaagttaaatgtgcactatggcaagacttatcatctgcgcatggtcaatgctgcaatgaatctcgttctcttttttgccgtttcaaagcacaatctcacagttgttggtgttgatagtgcctactctaagccattaacaagagattacatatgcatagctccaggacaaacagctgatgtattattgcatgccaaccaagagcctaatgactactacatggctgcaagggcatattcaagtgcacttggagttgcctttaataatggcataaccacagctaggatccactatcatgagaatcatgctccaaacaaatctccttcattaccttatctccctctttacaacgacacaaaagcagtttttgactactatgttagcattaagggcttaaatgaagcagacccctatcaagtccctacaaatatcaccactcatatgctaaccaccctttcaattaacacatttccatgccctgaaaaccaaacctgtgcaggaccaaatggaacacgtttagcttctagcgtgaacaacataagttttgaaaaccctaccattgacatactagaagcctattactaccacatcaaaggggtgtatcacaaggggttaccaaaatttcctcctttgaaatttgactttaatgcagagtatttgcctctagaacttcagataccaaagaaaggaaccaaggtggctgttattaaatttggttcaacagttgaacttgtttttcaagggacaaatttggttactgggatagaccatcctatgcatctgcatggcactagtttctttgctgttggatatgggtttgggaattttgataaacacaaggaccgcaagacatacaatctcattgatcctccccttatgaatacaatactagtgcccaagaatggttgggccagcataaggtatagggcttctaacccaggtatgtggcatgagaaaattgatctttttaaatgctattttttattttattgttttagtaggtaatttatgaactagcatgtaaagaatgttatgtaattagaaactattgtgtgggataaatttgttaacttttataat

SEQ ID NO: 68379 - DNA, 296 bp, Glycine max
  Clone ID: PAT_MRT3847_32759C.1
gttcaaggaccccaatgcccccaagaggcctccttcggccttcttcttgttctgttctgagtaccgcccaaaaatcaaaggcgagcatcctggcttatccattggtgatgttgcgaagaaactaggagagatgtggaacaacactgctgcggatgacaagcagccctatgaaaagaaggccgccaagctgaaggagaagtatgagaaggatattgctgcctacagagctaaaggaaaacctgatgcagcgaaaaagggggtggtcaaggctgagaagagcaaaaaaaaaaaaaagg

SEQ ID NO: 68380 - DNA, 134 bp, Glycine max
  Clone ID: PAT_MRT3847_3275C.1
aatccttcccctacaaatttgaaagcaactaccaatatccataaacaaaaacctttttttacgtcactatttcaaagatttcacattcgtttaccctcttttataaccaataaaaatggtaaacacaaatcttt

SEQ ID NO: 68381 - DNA, 384 bp, Glycine max
  Clone ID: PAT_MRT3847_32760C.1
acggctgcgagaagacgacagaagggtcctcaaataaacgttggtggcgactccacgcgccttcctttcttggaagacgcacctgtgagccctcgcgtcgccctcctgccgaagggtaggttgcgataacagtcaatttgtgttttccacaaacggaaaagaaccaaaaaatcaaatcacaaaaataggaaaaaatcgtgtgaacaatgcaccattttccattacatggcatggtggcgtccaaagcctgaattggttgcatttaaggaggaagttggcatgcttccgtaatggaggccgaccccgattaaaataaccattaaaatggcggtttctgggggatttaaggaattaccggatttaaacctggtggtttcccttgga

SEQ ID NO: 68382 - DNA, 437 bp, Glycine max
  Clone ID: PAT_MRT3847_32761C.1
ctttctcaaacaaaaagtagaaatttggaattttcatcctttctccctcccttctgtttccattaaatcaaacggtaacttgctgttttggggtaaaattgtataacgtgtcatgcttttcatgtgatatgtaagatgctctaaaccaattttttatttattttatattagtgatgcaacgatgttgagttgtgtttctaaactgtttaaagaaacactcgaaagaaaagaataaatctgaattgttttaatagcagtgttattaaaaagcggccatggcggaatggcgtcgcggaattttggaaaaacgccaccaaatagcgatggcgttgcgggttgcttatggcggcgttatggcggccagtcatggcggtcatggcggaatcgcgtgaatggtggaatagcggattttttattttaaaaaacgtgcgcgacag

SEQ ID NO: 68383 - DNA, 1119 bp, Glycine max
  Clone ID: PAT_MRT3847_32762C.1
tccggaattaccgggtcgacccaattcggctcgagcaaaccacccaatggaacactcgttttggtcactcccatgagacatgatcgcatccacctccaccaacgttggacctcaccctctgcgttttctgtccaaaccaaccacacattccgctacgaggtttctgtctctcagactccactctcggggcagcgctgttgcactttcctcgtccacacggaccacacccttgaagcccacgtgtcacttcaacggcaaagatggaagctttgagcagcacgaggaagagggtgagcgtgaggtgcattgtgaggttcaagtgatatcgtggagggaacgcagagttaacgcccaaattacggttgatgctgacactgagtccgtttggaatgctctcactgattatgagcatctcgctgatttcatcccaaatcttgtatggagtgggagaattccttgtccttacccaggaaggatatggttagaacaaaggggattccaaagggcaatgtattggcatatagaagcccgcgttgtgttggatcttcgagaagtcgtcaattcagcatgggatcgagaacttcacttttccatggttgatggggactttaagaagtttgatggtaaatggtctgtaaaatctggaacaaggtcatcaactgctattttatcttatgaagttgatgtgataccaaggttcaatttcccagctatttttttggaaaggattatcagatccgatcttcctgtgaaccttcgagctttggcatacagagctgaaaggaactttgtgggatatcagaaacttccagtgtcagaaaaccacttgcacaaaacttatgcggccattaacgggtcatctgttaaaaagataaatggtgcttcgtctgaaagttttaaaaagataaatggtgctttgtgtggaagtgataagttgcctcctgcagagaacaaaaaagaaattgccacctcagtttctggttccatgctcacatcttccagtgaggtgagaagcaactggggtgtatttggaaaaatttgcaggcttgacagacctcggatggtggatgaagttcatctccgcagatttgatggacttctggaaaatggaggtgttca

SEQ ID NO: 68384 - DNA, 189 bp, Glycine max
  Clone ID: PAT_MRT3847_32763C.1
gatcatccataggataactgaagccatgtcagtacgaagcctgctgagcatctatatagcagagctagactccgcctgctctaaggattaggaggaatccctgcaacaagacaaatttgccagactttgctggcaatgataccacaaagactccacgaccaaggtggagagcagagatgagcgcagcat

SEQ ID NO: 68385 - DNA, 144 bp, Glycine max
  Clone ID: PAT_MRT3847_32764C.1
gtctcattttatcctaccggccacttttttcattactaatgcttatgctagagtctctggaggacattgtaaaattttgcatactcatctgattataaattgcatttgatattgatatgaaataacttgtataaggttcattct

SEQ ID NO: 68386 - DNA, 400 bp, Glycine max
  Clone ID: PAT_MRT3847_32765C.1
aagatgtagatgaagatgatgagcaacagctagagagcgaagaaagtgaagattctgggttaagatgacataagaatgagaacgcttttctcttaggattgacagggtcgaaacgtctcttcgagaaccaatctggacgcattcgcgtgctccagaggttcaaccgaacgctggccacaacttgagaatcttcgagactaccgcattttggagttcaagtacgaacgcaacaccctgcttctccccaagcatgctgacgctgagacctcatcgttatacttaacgggactgccattctgtccttggcgaacaacgtccacagagacttctacagacttgaatctggtgataccctgagagtgctcgtaagaaccacatactatgtggtcaagcctgacaa

SEQ ID NO: 68387 - DNA, 356 bp, Glycine max
  Clone ID: PAT_MRT3847_32766C.1
ggctcgagaaaaaaaaaaaaaaaaaaaaaaaaaaaaaagaccgaacaactaataaaggaaaagagcaacaaagaaataaaaaaagactaacatataagcatagggggcggccccctcttgagggccttgtccccccggggattaatcccggaccgggacctgctggcgtcccattttgccctatatagactggccttaaggtttggcgatcctggggccatagctgttcctggggggaatttggtgtcggctcacaatcccaaacaacatccgacccgaaacctttaattgtgaagcttggggtgccttaggaggggccttattaaaattttttgctttgggctatctgccggttt

SEQ ID NO: 68388 - DNA, 413 bp, Glycine max
  Clone ID: PAT_MRT3847_32767C.1
ggctcgagccaaaaggttctaatgcacttacctaacgcctcctgtcactgacgcgcactgtcacaagactagcggcaacaattgcactgataatagtgctccgtgcacgagatgcaagccggacctcattggtcgagatcaccaacccaagaggacctgaaactgcttggagaggctcccacgcataagcaggagacgatgagaacgaacacagacgagatgcacgaaaaccactctagcctctggtacttcggctctagcaagagcaatgcacggtactgtaactccaagactgacagacgagaggggctagacatgtggctctgaagcacgcaactgggctgacagaaccccaaagaggtacaaaagtaaccacagcatcacacggaacactagatgctgatttaaaccat

SEQ ID NO: 68389 - DNA, 178 bp, Glycine max
  Clone ID: PAT_MRT3847_32768C.1
ggatattggtggatagtgatcacccttccagggttcttgccgacgcgttttatgttctttatgatggtccagagaagcacggttggtgtgtttatgcttagagatatatacacctttgtcacacactatacatagctactacgtgactctaggatgtgcaagaatacaatagctttag

SEQ ID NO: 68390 - DNA, 310 bp, Glycine max
  Clone ID: PAT_MRT3847_32769C.1
ggtcctgtcagaagattgagatcttagtgagtgagggaggaagcattgacagtaggtggaacttaaggaccagaatcctactgatcatcgagtattcacgatatcatggactagcctggaatctcaagcaatgcaccatagaacacgacaaaccttactgtatacgcattctatacagatgcacatacatgctttcatgatagcttccatagctaaagatatacttgtgattgcatctccatctacactgactgcagctgctgacccaattgcttctcttatagacacagcattcatacgtcatttgcat

SEQ ID NO: 68391 - DNA, 1510 bp, Glycine max
  Clone ID: PAT_MRT3847_3276C.1
taaatgcccttacttttattttatggttaacagccatctcaagagcacaagtttcagcccccgccaggattttccattccaagcaggttgccaccaccttggtttttcttcccatgagagagtgaggcaggcttttgattccatttctggttagttatggtttcttttatattcccacgcataccctttttaatatattgttgaatatgttagtccttttgacagggaattctttgcttgaccattcttccctcttgagaaattcatatcagacaccttcagctggaaaccttggtagtgcaggggacattgaatttatggaccctgctattatggcagttggcaaagggagacttcaaggtgcactgaacagtccggcactggacattcgatctaatttcatgccacaattaaattactttgaaaatgatgctagactacaattattgatgcaaagatctcttgtaccacagcaaaaccttagattttctgaaattgggaatactttttctcaacttggtgattcctatgctgtttcttcgaggttagaccaatcacaagtcagtaatctaggcccattccaacagctgtctctgcaggtcgactctagaggatccccggctaatgagcaattgtatgggtggaatgaagtgccgagtggaaatggtctgggtgtggcagagcttttgagaaatgaaagacttggatttaacaagttttatagaggatatgatgattcaaaatatcgaatgccgaattctatggatctgttcaacaggacatttgggatttgagattgttgggtatattggccatggtaaagctaagtcagaaatatacaaacagaatttttctgcattgtcgaaggtgatggggctggctcatgacataacctgtctattaggctatgaaatgatgaaactctcaagaagggctatagctgcagctggtaatcattcaaatctcaagcttcctcttttcttgctttaatttttatggtccagttcttgattttagtcttcctcctaaaagacattgtacattttgtgtacgaaaatgtcttcaactacttgtcttccaatactagattaaaaaatattgtcctccatatggttctagactctatcttatcatatgtgaaatatgactttgctgttctgtttttgaaatataaagctctcaatctccatcccttttctgtgtagttcttgatttgcggaagcaaaccgcgttgagatttaagaaatcaatcatggatctgaaagtggtctatttggcaggtagatgttagttgagtgttttctctttttagcacagagcatggaaacctgttgattgactatcaaataatttctcctatttaatgtaattttttcttttaccatattgtggatatagatagaggcttgatttgtgaaatagatcgctttgtaaatgttggaaatcccttctgatatgtgtaactctgttgctatcttggcagatctagtcacttttttagagatctttt

SEQ ID NO: 68392 - DNA, 993 bp, Glycine max
  Clone ID: PAT_MRT3847_32770C.1
gaaagattaacaaaaagtaagtggacctaacccattgaattatacctatatttactattctgatattcaaattggataaagatgaaattcgaacaatgattttttcattttctttttaatacttttttggtttagactccctaagaatctgtcgatatttccaattaaatcttcttgttcctgtgaaggtcctataaaaaaaagggctatgccctttctttactcagaagggccttattccaagttccaccaaacaagtttttattcatttgaaacatctttttttccgaatacaagaaaaaattcatttcaatttcaattatgtctataagataaaatcgatatagatagattttatcttatagaaataattgaaaaatacattcaattatgtcttcgcgtatcaaatattttcttttcatatcgatgcgtacgatatttttccagcaattaatgtatgtgagacagaaactttcacttacagtttttttctttttaatattgtatttcattttttttaataattaataaaataataataataatgaataaaaaaatcaaataataattaataaaaagaaaaaagtgtaaatcaaatagaaatttataaaatctatgatcctagagtagttccctagacaaaatagaagtaagttcacaaacaagattcaagaataagattctctgatgaaaggagagaaatatgtctgaggatccgctgggtataaggagtgaaagaggggatcatttgtttcttgaacagttcttttaaaaaaattttctatcggatttttgagtcataggagattttatgatttatgacttggaggatttttaagaatagaaaggaataactacattgagttcatcgatttgccctagatatcaatagactcataaattattttttattcgaaaccaattaagaatagaaaggaataactccattgcgttcatcgatttttaagaatagaaaggaataactacattgag

SEQ ID NO: 68393 - DNA, 688 bp, Glycine max
  unsure (1)..(688): unsure at all n locations
  Clone ID: PAT_MRT3847_32771C.1
atttaatccggtattggaatgtgggggtgttgcgagggggagaggtgaggaggaacttaatttgaacgtttccctctgacttctgaggttacaagaatcctccacccaacctacctctgttgtgttttccggagattatgttcaggttgggaaaagactatgatctggttgggaaactgctatagaagtgtacggatctcatccatcggggcattctcttgtttttgggatgggttggagatacaacgctggattgttcctcatagtcactgttgttattatttgggtcacctccgccgaagttacccaggatatttttacagattataagcagccatttgcagtaacatatcttggagcttctcttatggtagtttacctcccaatagcattcattaaggactggttctgtaacttgcttaaatcccgctcctctaaaagtggtaaaaatgcagaatgcgtggatgagttttctgtcaggattagctctcctctcaaaagcaatggagtgcataaaaactttgaactggaactggggagtgtgaatcggaaagatagtgatttagacctttcaacacttgcagaagtaaagccattagtagctaaatataatgataatactgtgctgaaggtggagagacaacttactgggaagggaagttgctgcttatggattntacattgcacc

SEQ ID NO: 68394 - DNA, 588 bp, Glycine max
  unsure (1)..(588): unsure at all n locations
  Clone ID: PAT_MRT3847_32772C.1
atttaatccggtattggaatgggcgcgagctcgagaggggtgaggaggaacttaatttgaacgtttccctctgactctgaggttacaagaatcctccacccaacctctgttgtgtttccggagattaggatctggttgggaaactgctatagaagtgtacggatctcatccatcggggcatagcttgtttttgcgatgggttggagatacaacgctggattgttcctcatagtcactgttgttattatttgggtcacctccgccgaagttacccaggatatttttacagattataagcagccatttgcagtaacatatcttggagcttctcttatggtagtttacctcccaatagcattcattaaggactgggtctgtaacttgcttaaatcccgctcctctaaaagtggtaaaaatgcagaatgcgtggatgagttttctgtcaggattagctctcctctcaaaagcaatggagtgcagaaaaactttgaactggaatngnggagtgtgaatcgaaaagatagtgatttagacctttcaacacttgcagaagtaaagccattagtagctaaatataatgataatact

SEQ ID NO: 68395 - DNA, 314 bp, Glycine max
  Clone ID: PAT_MRT3847_32773C.1
cgcggggaatacaccaaattttattttaatgccgaatttatctgtgcacaacattaaggactcccgtctcattttagacagcaggtttcaatatgaatcacccctcatccacaatacataatattttattaaagatcgaaaaatgatgcatcatgtacatataaatcaccattcatccatgatacatagttcattattaaaaagtcaggcgcttcattgtagaagtcctcatgtaaagggttgacccacctctactgtttaacaaccctcgttatattaaaaaccatgtacacctttgttttgaatggatccac

SEQ ID NO: 68396 - DNA, 271 bp, Glycine max
  Clone ID: PAT_MRT3847_32774C.1
cactcttcccagccttgtatctaccaatgctaaaaataggatacaaaagatgcttgtggatgaccctatgaggataatgaccataccagaaatacggcaacacccatggtcccaagcaccacttccgagtgatttacctagggcaccaccagatacaatgcatcaggccaaaaccattgacgaggatattcttcatgaggaggagaaaatgggatttgacaggaatcaataggattaatttatcgggaacaggaaacctaatgagggcact

SEQ ID NO: 68397 - DNA, 479 bp, Glycine max
  Clone ID: PAT_MRT3847_32775C.1
ttgccgtgctacatgtgtaggagtgccgcctgcttgggggggggggggggacaagaagacaatactcaagagggtaagtagtgcgcgacgacgaagaagaaggtggttcttccgtacaaaacgactaaaataagggataaacatacggaaaaacacacctaatggaattatattgaaaacaaaacgggctagatcggaacggttataaagggatacttacttgtcaagggcgggtactgagtggataagaggatacgaatttagtgatgagtggtgcaagttggacgcccatgatatgggagtactaagaactagcgttggagagagacggcgcggctggctgactgcggttatagacggacccataaaagaagagaagcgtgattgtggctcgggccatgggaaacaacgaattcaggcacacggctgcgcttacggatcgggttgggccagcagcaattaaggaggaagggctggta

SEQ ID NO: 68398 - DNA, 566 bp, Glycine max
  Clone ID: PAT_MRT3847_32776C.1
aattcggcaccaggcgctctcttctttcaacttattacttctctcgagtctcgcgtcttcttcttcaaagagaagagagagagagagagagagagagagagagagagagagagattttcagagagattttcactttttgatacgagcgcatgctccctctcaccctaaccacctaaaacttagttgaaagttaaaacctccacctttgccgccgcacaatgacggtgttctccgccaagcaggtgttcccggtggactacgaggagaccgaagtgtcacagcgcctcctcgaagcctcccactccggcgatctctccctggcattccgctgcattgtcgatccctccgtcgacgtcaacttcgccggcgccgtcacgctcaagatcgcctccaccgacctcctcctcctcccggagtcccccagccaagtccgcctcgacttccaggaattcatctccgacgtctcgccgctcttcctcgccgtccacgccgcccacgccgccctcgtcagaaagttactgagtgtgggagctgatgtaaaccagaggctcttcagaggctttgca

SEQ ID NO: 68399 - DNA, 186 bp, Glycine max
  unsure (1)..(186): unsure at all n locations
  Clone ID: PAT_MRT3847_32777C.1
aagaataaggaccatctacaaanaacgagagcgagtttttctttcttttttcgcttccaaatcatacgatcttaatcgaatcaactacattctccataaccacttttaacgaccctctccttccacttttccccccatcacctccttctccaacaattccaacctccaattctaataatctcaaac

SEQ ID NO: 68400 - DNA, 455 bp, Glycine max
  unsure (1)..(455): unsure at all n locations
  Clone ID: PAT_MRT3847_32778C.1
ggtctagaattcccgggccgacccaagcgtccacccacgcgtccgggattcaactcagaaaggacttttggctgctggtgatggccacaaggttaaattttggaatatggacagtgttgagctctggacaagcactgatgttgatgctgaattactggaaaatccatgcattcgctttaacaagaagggaacattactggctgttgctgcaaaaggaaacaaaataaaaattttagcaattgatgacattttgcagaaacagaatgaaacacattcaattcatgtccccaataatcaacatgaagccttaaagtgtacacaaagtccaattttggttgatgctggtgctggaatcgcaggtgaaggcattgtcatgaatgggtaccaaaaggcttggangatgggaggtataattcaattgaggagtctcataacaactcaaagttttggaatgt

SEQ ID NO: 68401 - DNA, 559 bp, Glycine max
  unsure (1)..(559): unsure at all n locations
  Clone ID: PAT_MRT3847_32779C.1
ggttacaaggctcttatactacacccctgtggctatccttgcctctatcatcctctcttctcttcctggattaatcgacctacgtgaggcttgctatatctggaaggttgacaagttggactttcttgcttgtattggtgcttttcttggggtgttgtttgcgctactacacattggcccttttgttgcagcgataatatcttttggaaagatactcatacaactaattccacctgcaatagaacttctacgtagagttccaacaacagaagccttctgtgatgttactcaatatcccatggccataagcactccacgcatcatagtgatccgcataagctctggctcactctgctctccgaatgctaattttgtcagacaaagaatactcacctgggtctcgcaccatgaacatgaccttaacgaaacccccacgggtttgatcctagcagtgattctggacatgactaacctgatgaatgtcgatacttctggaattcttttacttgacgaactgcacaatagagtcgttncccgtcgcgccgaacttcctgttctc

SEQ ID NO: 68402 - DNA, 205 bp, Glycine max
  Clone ID: PAT_MRT3847_3277C.1
ctcaaaacttttagcttctcaaggtatgtgggttttacttaatggttaataagaaatctttgtaaagtgtttgttgcttgctgcaattgctagtgttggagtgcacctaacacacaattgtgcaataaattagtgatcagagtgattgccttatctctgtacatgctatggcatcgcttttgttgcagcacttggtattttggac

SEQ ID NO: 68403 - DNA, 2118 bp, Glycine max
  Clone ID: PAT_MRT3847_32780C.1
caaaaacccaatagtcccatactatactacttaaaaccctaactatatctttcgcctcagcctctaaaacctcagcaacaaacactcttcttctctccgccgtctctctccattctctctttccttccccttttcgagacgacaagatggtgaagaagagcaagaagagtaagagcaagagggtttcgctgaagaagaagtacaaggtcataaggaaggtgagggagcacaacaggaagaaaacgaaggaagcgaagaagcttcgattgagtgggaagaagaaggttgagaaggatcctggtattcccaacgattggcccttcaaggagcaggaactcaaggccctcgaggcgcgaagggcgaaggcaattgaggaattggaacaaaagaaagccgaacgcaaggaaagggctcggaaaaggaaattgggcttgctagaggatgaagataactccaaattgagtgaaatgaatactctaaaaggtagtactgttgggaagactaaagatagctcagatagggccttttacaaagatttggatttaggtcattgaagcctctgatgtcttactggaggatacttgatgcccgggatccattgggtactcgatgtgttgatataaaaaagatggtgatgaaatcggcacctgataaacgcactcgtctaggttttaactcaaatcaatatcatccctacagaagctttagagaagtggctcaagtaccttagagaagaattacctactgtggccttcaagtgcagcacacaacaacaaagatcaaacttaagtgattgtcttggtgctgatactctcatcaaattgttgaaaaattactcaagaagtcatgagatcaagaagtcgatcactgtgggtttgattggcttgcccaatgttggtaagagtagtcttattaatagcttaaagaggtcccatgttgtcaatgttggttctactcctgggttaacaagatcaatgcaagaggttcatttggacaaaaatgttaagttgctggattgccctggtgttgttatgccgaagtctcaagaaaatgatgcttccgtggttttaaaaaattgcaagagaattgagaagttagacaatccaattaacccagtgaaggaaattctcaagctctgccctcctgagcagctggtaactcattacaagattggaagtttcaaattaggcgatgttgatgattttctactgaaggtaggtacagttaggggcaagctcaagaagggtggaatagttgacattaatgctgctgcaagaatcgttcttcatgattggaatgaaggtaaaattatatattataccatgcccccaaatagggatcaaggggaaccttcagaggccaatatagtttctgatttttcaaaagagtttaacattgatgaagtttacagcagtgaatcttcatatattgggagccttatatctgttgataacttcaatgctgttgaagttccttcaagtcaccctctcactcttgatgagatgatgttagaggacgagacacaaatcaaaccagctgaacaaggtgaaggtcctggaaacctggctgaggttgatgaatcaatggaagaagatgatgttggcaagaacaaggggaacagtgaagctggcatgcaaaatgaaaaattatatgctgcagatggtatgcttaatacaaaaatgaggcgagcagagaagaagaaaaggaaaaaggccaagaaagccggagcctcatcggatcccgtggatggtgattatgacttcaaagttgattacttccaaaagggagcctcaatggatgatgctgaagagagcaagagtgaggatgattatgaacaagtcaactccgaggtgcctatgaatgagtgatgggggaaatggacttgccataatttatgggagaaatgaatgatgaacaagccaacatagccataattttaaacatgatgtaagggttttgccttttaatttcaatttttgtttcggagattttaaatttctgcagttgatccattatgtatatattattttgggatggcacgaacaaagttttggataggtcattgtccaattgaggcatatgattatgcaattttatttccagatttttatccctcac

SEQ ID NO: 68404 - DNA, 376 bp, Glycine max
  unsure (1)..(376): unsure at all n locations
  Clone ID: PAT_MRT3847_32781C.1
agaangactttatactttggaaaaagacgcgctttttgtaaacgcatttcaacacaaacaacaccaagtgaaaaaaaaaagtgcatgtcccaatccagcgactgaaaataccgggagatcttttagttttcttttgaaaaactcggggccatctcccaaattcggggaacgaaactttacaacaccaggcaaaatcaccgggggttattcaaacaaccgtccattaaaggaagccggggacaatggaggcttaaggacgagagggtgcaccacgggggcctttaaattgggggacgagacacaaagggcggtgcaacccacgaggtacttagagtcaatgtcccaagacaggaaacgttcccagggaaagctcatc

SEQ ID NO: 68405 - DNA, 249 bp, Glycine max
  unsure (1)..(249): unsure at all n locations
  Clone ID: PAT_MRT3847_32782C.1
gtcttcataaacgcctttcttctccgtttccgtttcctcgatcgaattcgctttttgatctgcgaaaatgagagagtgcatctcgatcttcattggtcaggctggtatccatgtcggaaatgcttgctgggagctgctctgcctcgagcacggtagcgggcacgatgggcaaatgccaagtgacaagacagttggcggtagtgatgatgctttcaatactttcttcagcgagnacggtgctggaaagca

SEQ ID NO: 68406 - DNA, 806 bp, Glycine max
  unsure (1)..(806): unsure at all n locations
  Clone ID: PAT_MRT3847_32784C.1
cttgcatgcctgcagtgtacccaccatattcaactttctaactaggggatgccaggtggactttgacaaataaaaaggctcaattgatttttatctctccatacacttgaatatgaatttaataggtgaccaatattgattgtcatattttgtgaatgtgatcatgtttcattcttttgtctatttcttataatttattattataaagagtaaaaaaatgcttcaaaacatttcatttgtttccctccacccccaacctatcaactacatcgatccctgggtatcagagttgaattaaatggtaatttagattgagagctaaggctaaggcttgagtcagttctctgctctcttttagtgctgctgctatttctgctgacatttgagaggaatatagttgaagaggatggtgctggtttcttatagtgactgctgctatccattgaaaaagatgacttgggcacccaaataataagccagatttgggacctcagcttgctgcaacaatggtgggtttggagaagaaggatggtctcacctggagttcatgtcagctaggagcattaaagttgacaaagcatgaagttttcattatgaactaagctttagggtggttgtgtcacaaaatgaaatttatatatgaaactgttaggaagtcccgcatcgcctgcatcagttcttaggatgcaacttatatatttgttggacaacttcacttaatgtcaattggttntaagatgaaatttaacctggtatcaaagcctatagtccatcttgatcatttgcctattctggcaggcatctgt

SEQ ID NO: 68407 - DNA, 335 bp, Glycine max
  unsure (1)..(335): unsure at all n locations
  Clone ID: PAT_MRT3847_32785C.1
ttacatgctactgaaccaaataactaccttacatagctatacgtctaagcgcatacagacttatttgttagctccacacacctctgacgcttacaatacgatccatctatctttcacttgaaagccaaacactgcatgctggaatagcgaaaggctaacccgtgctagtagatccacccattctctacactatacagcgtgcagtccgtttcattatgtatcccaccgacaccaacacggngggggcatatgtgtatgaggccgaaatctgcatgcaccgcctgagggatgaaaaggaccgaacatcgcatcatccactcattttttggatacac

SEQ ID NO: 68408 - DNA, 521 bp, Glycine max
  Clone ID: PAT_MRT3847_32786C.1
caaatatttccactcacattttccctataaatcccaatctttcaacagcacctgttccttttgtgagatgacgacaaatagtacccaggggaaaaaaatccaacacttgaaagaagaagaggaggaggaggaggaagaagatgactatatctaagcattgtcactttgcgatcttcctgtcaatctggtcgaccacgaagtccaatcaaaagcaaaaccagattctcgaatcattgaagcccaagaagatgattttgatttccgcttatggggtggcccttttttaacagaatttgatatgtgtgctgttgatgaagttttctttcatggccaaattcttatatagtatctttcaatttaacgatgtgaatccttggtctacgtttcctttagagatttgcgtaggaatagttctaaaagtagtagtagttttattattcataattcgtataatatcatattttacacttgtactacatcctcaagtattctcatactcagactcgtaaatctaattaatt

SEQ ID NO: 68409 - DNA, 334 bp, Glycine max
  Clone ID: PAT_MRT3847_32787C.1
gacacgttcgttggtatgcgcaactggatcagttctgtgagtcaccgttgactgtgcttaatctctctgctccggagatctagaagaatgatacactacagaagcaggactcatatttagaagatgacgccactgtggattccttctgctcaggaacaccattgactactgtactgccgatagaggcggaggttctgagacttgtggctctgttccaaagaactcaggatcagtatatgtagaggactcatgttcttatggcttcagccttgacaccttgtcgtgcagggctattgcaaggtgtgattaaggtacagccacagatgcctgtacc

SEQ ID NO: 68410 - DNA, 737 bp, Glycine max
  Clone ID: PAT_MRT3847_32788C.1
taaaaacaaccgtgcacgggttccaagaagaaaaaaatcccgacagagtagtgtttgtgggagagagagactctgttctgtcgtccattatctaatccaaaatgacaacaacggtggtgccggtggcagcagctgcaacttggttgaaccatcctccaaaccaagcattaacatggcgtctctctgtattgccccgaaacgctgcgtttttgtcccaccaccatctcatgaaggagaagaagaaaaagctaatgtcttggtcaattggtgcccagccctcacctttcgacctctctcctcctcccatcgaccatgacttcctggatactgtcaaaactgcaggcggagagatttctggtgaagggatcattgagacatttcataatgatgatgaagcactggctgctgtggacaatggggttgtggttgtggatctttcacactttggtcggataagagtcagtggagaagatcgcattcagttccttcacaaccagagtactgcaaacttcgaatctctacacgaaggacaaggatgtgacactgtttttgtaacaccaacagctcgaacgatagatatcgcacatgcatggctcatgaaaaatgcgataacattagtggtttcaccagagacctgtacaaccattactgaaatgctgaacaagtacatattttttgctgatgaggtagagatgcaagacataactaagcaaaccagtttttttgttttggtggga

SEQ ID NO: 68411 - DNA, 367 bp, Glycine max
  Clone ID: PAT_MRT3847_32789C.1
caataaatctgatgcatgcggttcgctactacgcctactggggaggtcctttctacctcaagcacgtttaaatttccgttcccagtccaaaagcaaatgactttttaatcaaactttaagcatttatcattaaccctatttatttgaaaattcataaaagttttcttcgtcctttatttttccccataacctttccccacataccttgcactgatttggctggaaaaataattgatatctgaactcatgtcaagattttaaagtttgcgaccaagtccttgctaaactcactcatcaataattaggttggttttcccagtttgcttttgctactgagagcttaacaacatccaaaccatcttatgtt

SEQ ID NO: 68412 - DNA, 312 bp, Glycine max
  Clone ID: PAT_MRT3847_3278C.1
aaaagctgtcattttgttttttgtttagtttactggaatggatttcagtcgattcttattgtctttgaatatgactccacgtacctagttcctgttttctgtgttattatatctgaaccttcaaaatctagtttaatgtcagatacatcaagttcattagaatctcactttaacagccacagttaaaagatgatagtatattaatctcttgttgtccctacttttgtgtctgattccctgctttggtctcttcttctttatcttgcatttcgaacccttcgaaaattgattatagttcacataaattttaat

SEQ ID NO: 68413 - DNA, 601 bp, Glycine max
  unsure (1)..(601): unsure at all n locations
  Clone ID: PAT_MRT3847_32790C.1
ggctcgaggaagtttttttttctgataaagacaaacagacgaagagaacagaagaggagggaaacgcagggatctatgcaacttccgcggtttggcataagcgaaatacacaagaaatttttgagggacccacgctgcagaacttcttcactcaaccgagaagaaaggcgaagaaaattgtcttgttcatggcacattcaatgtttccccttcttacctcaacatcttgctttgttgggtgggtcgctaccgtcactttcaccttccttgagatgctcgttcccccgcttgctcatcttcttcttcgaccaagtctgatctattccgatctagcacagtaaaagcttttttaggtcgcatatatggagttccagatccattcaatgctcaacgttgcgccgtcaatggaggccattgtcgccgacaaagtctccaacgtgaatgatgaagtcgttacctgatgttattgcttgttttgcttctgatgggatgtcttcaatctagactgttttggttattgctctaagttctaacttaatntatgttagttagggatattaagcatcgtctgggatagtttctttttgtaagttttcaaatt

SEQ ID NO: 68414 - DNA, 506 bp, Glycine max
  Clone ID: PAT_MRT3847_32791C.1
aagaggcaacaactaaaagaccgaggctcattatcagcttggaattcaaaattgatttcaaagccgaaaatggtttgaactttaagtgttcagactatgtattattagtctacacggagcaatttaattttgaccgttggttatacccctaccagtaagttttggaaaataaatatagcataccagaaggtcatttatgcaagagaggtgatacacctaacaattcttattactgctaatctgtacaatttcttttttgtgtatttctcttttcaacatcatttattacccttcaattttcacaatttttctcttttagttgtgcaaattattatacaactaacattttcctttatgtgatttctacctggacaagtcattgtcacagaatttcattgggtcggtccatttaggagcatatgaacttcatcttctggagcagagacataattatgcaagacagctgaatactagaattcttctctattttgggccttgtgaagctg

SEQ ID NO: 68415 - DNA, 336 bp, Glycine max
  Clone ID: PAT_MRT3847_32792C.1
agctgaaacatatctgttacgtgcgactgattttgaagacacaaaagtatgtctttctcagggaatcttgaagatctagaattgagttttgtgactttcactacgaaatggggaaaggcttgaagagacttggactgcaacataactcttctaaatttacatgcagacggggaccacaacaaacactaagtccttgtcttgaataccagacttagatactgtgtggctactcttgacagcgctaactcttgctagagcgccccttacactatcagccgctgggtgcttatttgctacctgattatagacaggctaggccatagtacagaactgctt

SEQ ID NO: 68416 - DNA, 572 bp, Glycine max
  Clone ID: PAT_MRT3847_32793C.1
ccacgcgtccgcgaagctgacgctgctgaattcaaatccctacttcaatattcctcactggtacctctctctctcacactctctctgcattctcactcacttattaattctcgtgagtgatcaatctccagtgttatcatcaccgtcaaactagttgcaacattgccaactagaaccatcccataatgtttcttgagttttgttctacatgcaaaacttgactaactaggattcattcactaccactattcacttcttcaatcatggcttcactgctgaatactgtgtcaccagccgcaaatttatctcacaaaacaaaaagacccacttgtggcggtttcttgcactcccaggttccaaatctccacacttttaccctccacaagggtttttctagggtttcggcatcgacccagattgccatttccccaaaagataccatttttaatctccccaattggaggattgggaggaatgaccaaaagggtaagagctgaggatctatgatgcatttctgcatttggagtatttggtggggaagggccaaaagcctggagtaaatcaagcgactc

SEQ ID NO: 68417 - DNA, 433 bp, Glycine max
  Clone ID: PAT_MRT3847_32794C.1
ctcatattttggagaatccgaaaaacacgttaaagaaagtcccattcccactaccgaagcaaattaagaagatgaagcagcagagagtggagtttatgggcctgggccttttggtggtgatgatggcatgtgggtcggcgagtggtgcggatgatttggcaaccaagtgttcagcggtgattcagaaggtaataccgtgtttggatttcgcgaaggggaaggaagaaacgccgaaaaagcaatgttgcgacgcagcaacgtccataaaggagagcaacccagagtgcctctgctacatcattgaagagacccacaagggtagcccacaggttaaaagcttgggcattcaagaggccaagctgcttcagctcccttctgtttgtaacgtcaaaaacgccagcatcaccaactgtcctaagcttttgggtctatc

SEQ ID NO: 68418 - DNA, 1072 bp, Glycine max
  Clone ID: PAT_MRT3847_32795C.1
tacggctgcgagaagacgacagaagggtacggctgcgagaagacgacagaaggggacacacagagcggttctcatattttggagaatccgaaaaacacgttaaagaaagtcccattcccactaccgaagcaaattaagaagatgaagcagcagagagtggagtttatgggcatgggcatgggcatgggcatgggcctgggccttttggtggtgatgatggcatgtgggtcggcgagtggtgcggatgatttggcaaccaagtgttcagcggtgattcagaaggtaataccgtgtttggatttcgcgaaggggaaggaagaaacgccgaaaaagcaatgttgcgacgcagcaacgtccataaaggagagcaacccagagtgcctctgctacatcattgaagagacccacaagggtagcccacaggttaaaagcttgggcattcaagaggccaagctgcttcagctcccttctgtttgtaacgtcaaaaacgccagcatcaccaactgtcctaagcttttgggtctatctccaagttcccctgatgctgctatcttcacatcaaattcttcgaagacaactccttctgcacctgcaacctcaaactcacaaactacgaccccccagagccaaaacgcatcgtatggaagcatggttcaacccagtagtaccgttacctatgcgattgtgatggctttggccattgttctaattgctcttccaaccgaaattgtgagcatttacacatgatgatgatgatgatgatgcggcattgttgaatgaatgcttcttcatctacttacctcctgcagtgatgaagacagagagtagtagacagttggggttgtttcctgcttttgttatgcataggacttcttcgcagctttgaattaaatgaattgaattggtttgcatttgtggcctgtgatggtttctcgaattttgggacctcgctgtaatgtttggctttattgtggacttgtttcttttctgcttcccacaattaatattaaccgatagttggtgaaagttgagagccttaataaaaaaaaaaaaaaaaaaaaaaaaccaaaac

SEQ ID NO: 68419 - DNA, 165 bp, Glycine max
  Clone ID: PAT_MRT3847_32796C.1
tggaagaacgaagctgaagtcatagaagacaagaaggaactggcagtgaccgcagacaagaaggaaattgaactaacacatgagaataacgaagctgaactcatacacgagacgacggaagtgcaactgacggacgacaagaacgaccttgaactaacacaacag

SEQ ID NO: 68420 - DNA, 421 bp, Glycine max
  Clone ID: PAT_MRT3847_32797C.1
ctaattcgttcttatccgctttttaagcaggttaggtttatccaccaataggttgaaaaaatagtaagagaatctctatgaacccttgaaaaattacgaggattttggtacttagttatttttttaatcaataaaaaagtaagaactaatttagaaaaaacaaaaaattctttaattaatgagaagataaataacatgataattttttggttaaaaaacaaccttaccaaaattctcatgatttttgaaggcaccatgcaaactttcaaatagttatcatgttttatgtttgctgatatgactgtgataacccttaacaaaaataggtctctgaaccattccactcgttggggtcagaataaatacatcagtattgggctcagatttgataagaagggtacaagtgtcactatctcattta

SEQ ID NO: 68421 - DNA, 607 bp, Glycine max
  Clone ID: PAT_MRT3847_32798C.1
aggatacccatctctttgcgtcccctcgatctcgaacacatctcctcccccagatctattcaataccgacaaaatggtgcaaggacctaagaaccccactgccggcggcggaggaaacaagggcgctcccaagaagggtgctaaggtgaccaagaagttcatcatcaacgccacccagcccgtgaacgaccgcatcttcgacgcctctgccttcaccaccttcctccagcagcgcatcaaggtcgacggcctcaccggcaacctcggcgagaagatcaacgtcaccaacctcggcgacggccgcatcgaggtcgttgcccaccaggagttctccggtcgctacatcaagtacctgaccaagaagttcctcaagaagcagcagctccgtgactggctccgtgtcgtcgccaccaacaagggcgagtacaccctcaagttcttcaacgttgttggtgaggagggtgaggaggaggaggactaagcgtatcgcttggttctgccttgtttccgaatctgaaagatgggaagaattttttttttccctaggtgcaaggattattgaaagtttttgtcggcggaaatttaattattataaaaaataatagag

SEQ ID NO: 68422 - DNA, 253 bp, Glycine max
  unsure (1)..(253): unsure at all n locations
  Clone ID: PAT_MRT3847_32799C.1
cccacaacccccattctccctcgaggcatcccaatgggctctcccaagtgatgcctcggcgacaccccaataatattcaataatattcttcaaccttacaaccaccacacgatgcctccgcatctgcatccgcggtcncgtatgaccacctcgctctttaccaccactctcatggtctcattccttgtcgtcgcggcgccacatctgataccctgccccgtcgacccacgcacactcgccgatgctccagacc

SEQ ID NO: 68423 - DNA, 203 bp, Glycine max
  Clone ID: PAT_MRT3847_3279C.1
atattatcatggaccacataaaaactaccctagggggaaccctctatatggtatccctatcatgcctacaatcaggactttcacaccttttatgaccactgggtgaattgtgagaaccaaaagcctccacctcatctaaatttcaagcaaattcattcaccctagtatgcacaccaaaaaccacaacccttgctttaacgggt

SEQ ID NO: 68424 - DNA, 476 bp, Glycine max
  unsure (1)..(476): unsure at all n locations
  Clone ID: PAT_MRT3847_327C.1
aattcggctcgagctcattcgactgctcttcttttggtggtaattttaagtgtcaagcgttctgcctcaaaaactttccttgcctggcctctttcccattttaattcttccttcttgatcatcttctcgctttgcttgatttttattattattcatttgttattcttcctctttctattctttagttacctaatttcacaaccttactataatcaatttatataatccctcttgtttactttgattgaaaaaaatttaaagagatcgtcggcaacccattgaatgcatgctctagcatatattgttgtcttaaaatcacataggaaatttataaaaatttcatataataagataaataaatctttatctatatttttgtttgcctttcgttgagcttggaactgatctttccgtttttgttgagccttatacatggttctttcttcttttttaatggttnctttacctcgttgact

SEQ ID NO: 68425 - DNA, 187 bp, Glycine max
  Clone ID: PAT_MRT3847_32800C.1
gctagaagcccagttcaaaggtaaggtaggttaacactcgtcgtcatcgtcgtcgcagtgggacgtgtgatccggtgcgcacgataagggagcaggctcggtcgtcaaatcggagacgcagcagcggaagggccctgcaggcgtcaggagcctggaggtgcgggagcgcaaggggtacctcaagggc

SEQ ID NO: 68426 - DNA, 412 bp, Glycine max
  Clone ID: PAT_MRT3847_32801C.1
gttttctctattactgaattaggttaacaaatggtttaggaaatagaaagagatgaaatcaacgttttgttttggctttttgcacatagacggataagtgtcgaatccttgttcaccgtccaaggaaaaaagcgtcataggcgccgatcgaagatggcacttcaattaattaagatcaagtctatccatgttgaggagaatttttcagagaaaattttaataaaaagagagaatgtgaaaagggtgtcagaatagaatgagcacaataataagacatgctccttctatgatggttgttggaaatggaaaagggaatggagaatgatttacaatcgcgcgcagccattttgggggtcttgtctaaaataattcaataaactattgaaactttacatattaaaaaaaaaaaaaa

SEQ ID NO: 68427 - DNA, 333 bp, Glycine max
  Clone ID: PAT_MRT3847_32802C.1
gacccacacaaaccggcttcaattatttttttaactctaatcattataaaaacacccctttttaaaaatcactcgtgcaactaaagtggccggcataccatggaacaaatgctttaccttttcataccccaaccttataaaaatcttttttttaactcaaatccattctcaacaacacactgattttccttctataactaaattcttagtcgttacttacatcactcctccaacaacaaatctatactccgctcctataataactctaattttaattcccttcaactttacattttttaactctcaatctttttctattcaaatccaattaaa

SEQ ID NO: 68428 - DNA, 232 bp, Glycine max
  Clone ID: PAT_MRT3847_32803C.1
cacgtcgttgaagaacaaaggctctggcgtttgcaccaggtaagcatacgatttggctcgataatttgtacttgtatcaatgattatgaaatatagctaatgtaacatcagaattgaattgtagttaaaaaaaaaaaaaaaaaaaaagcaaaaaaagcaaaaaaagaaactagaaaaaatcgaaataaaaaaaaaggccgaccaaaaaccaaagacgggggggcccccaaaa

SEQ ID NO: 68429 - DNA, 1041 bp, Glycine max
  Clone ID: PAT_MRT3847_32804C.1
gattccggctcgaggatttgggaagccattattcgcgaccttttaccactgggtttgggaaaggcacggaaggctttgctttcaggttgctcagcaggaggtttagcgacctttcaccattgtgacaacttcgccaagtatttgccaacgaatgctagtgttaaatgcttgagtgatgccggtttttttcttgacgaaagagatatcagtttgaatcatactatgaggtataatttcaaaagtctagttcaattgcaggggatagagaagaacctgaacagaaattgtaccagagcactgtactttccagacttgtgcttctttccacaatatgcgttgagatacatatcaacaccatattttatcttgaactctgcctatgatgtattccagcagttcactcatatattggtgccaccctctgctgatatgcgcggacactggaaacactgcaaggcaaacctggcagagtgtacaacagaacaaattgatacattgcaaggttttaggctagacatgcttggagctttgagaccgttctatatgaattcaagaagatggggggatgttcataaattcatgttttgctcattgccaaagtgaactacaagaaacatggtttggggatgattctccaagaataaacaataagactattgccgaagcgattggtgattggtattttagtagaaacataagcaaggaaatagattgtgcatatccttgtgatgcaacttgtcataatcttataccgtaagctcaggttagttggaagattaaactgaacattttttcctcaagcttctctatttctcagagaagttatgatagttctctgaaaaagaattaagagacatttttcgtagacagccagtcagccatacaagtacagtgaatgctagacagatagaaaattctttgataggaacaagaaagggataaagaaaccaaatgaaaaaaaaatgtggtttgaatgatgttaattattgtttattcattacaaaatattttattacttaataaaatcaattggtttttctt

SEQ ID NO: 68430 - DNA, 1601 bp, Glycine max
  Clone ID: PAT_MRT3847_32805C.1
ataggttgctagaagacgacagaagggtacggctgcgagaagacgacagaaggggatgacttcatcatttaattgactcagctctcccctctctctcgcagtcccatccatctgaagcaagcaatacagcaaaggaccaaaacccaaataaaacacaaatttcattttatttatttatttgtttattcatttatttttagaaaaagtggagagccatatggaatttgacgagcacgaggaccaagagcaagaagaggaggaggaggaggaggaaatgggattctcagtggcggcggcggcgagttacgactcgctgggaaacgccgcggtgaggtctaaaattagcggcggcgatggtgttgcggccaccgtgaattccggtcgcaaagggacggtgagatacagagaatgtcagaagaaccatgccgtcagcatcggcggccacgccgtcgacggatgctgcgagttcttggctgccggagaggaaggcacgctggaagccgtaatttgcgccgcctgtaactgccaccgcaacttccaccgcaaggagatcgacggcgaaaccagcccttaccagcaccgttcgcagccacagcctcagcctctgcaccctcagtaccaccaccaattctccccttactaccaccgcgcgcccccaccttccgccgccggatatctccaccaccaccttgtaacacctccggtgtcgcagcaccggcccttggctctgccaccgttagcttctggaggagtgttcagtagggaggaagaggacatgtcaaaccccagctccagcggcggcggcggtggtggcggttttagtggcggtggtggtagcgggagtggaacgaagaagaggtttagaacaaaattcacgcaggagcagaaggataagatgctggcatttgcggagaagctagggtggagaattcagaagcatgacgaagctgctgttgaacaattctgcgctgaaacttgcatcaagagacatgtactcaaggtttggatgcacaataacaaacacactcttgctaattctgagcaacattcggctgggaatggatcgaatcacttgaacagcaccacaataattgagaattctcaattctcctgagggatattaacgaaataaagagaaagaactgaagttggcagaagttcatggaagggtttgcaagtgttcatcttatcagtagcatcaggtgatggtgatcgaggagggggagtacgcaatggaagtatgcggatgagcacagagaataaattccaacataaagttgtatttaacgtgagtggaatgcaagtgcaaagctgtttatgttactactttgctgtgttccttcgcattatttgtcgtctttctttcctgtttttcctccctaacaccgccctagtttagttttattatcgtttgtctctctcatattaatgtctcctcttctatttctttgcttctggacacattagacctgaaagatttaatgagtcaaatagattcatcatgatccgtaactgaagtgacaccattttcttttggtccaaaaaaaataatataataaaaaaaaaaaaagcgtacgctttataggatgcatgataaagaa

SEQ ID NO: 68431 - DNA, 197 bp, Glycine max
  Clone ID: PAT_MRT3847_32806C.1
ttttgtttacaaagcaatgtgacggatacaattgtgagagctaacacataccgggaatttacgcatgcgcagaagtgacttggaagaaaaagagttgaagaacacgtctatacgcaattagacaccaaaacactaactgaatctacgacacatatgaattgtgaacatgaggctggagtgctagatgcttacaggag

SEQ ID NO: 68432 - DNA, 447 bp, Glycine max
  unsure (1)..(447): unsure at all n locations
  Clone ID: PAT_MRT3847_32807C.1
gcacgagctcacgaacgccacaacttgagagaagcaaggtgagagccactgcgcgcagcacacctgagcaccaaccgaaagagatcgaatcagcagacgacggcaccatggcggcggacgtggtgagtctcaacaagaacgtgaactggatggagtcccgcgggttctggaccttctacgtgatcctcatcgcctgcgtctacgcggctatgccgctcttcgtgcccgcaagagaggcctggacctacgtgagcgttgtccatggagttgtttctttcggaattatgcactggatcaagggatcgccanatgagcagaactcgatgggcgactaccgcgagctcaccttttacgancaaattgacganggccacccgtggacgccgacgaaaaattcctcatgctcgtgccgacggngttgttcatggcgggctccgttgcgaaaaa

SEQ ID NO: 68433 - DNA, 1900 bp, Glycine max
  Clone ID: PAT_MRT3847_32808C.1
ctcacacactcacattgtttatttgatgtgggttaaatggataccttgtttagactagtaagttttcatcaacagcaacaaccacaacaacaacctgatccatccctcaactccaccaccagcagaacctccagcagctccagatcctccagacaaaactactacccttattcccatcaagaagaagaagaatgcttcaacttttacatggatgaagaagacttatcctcgtcttcttccaaacactactaccacccttatcaaccccatcatcatcaacaacacaacgtatccaacatttctacaaacaccttcagcaccacccctaacactgattactcctactcctactccttctctcccacgcaacctgttcaagacttcaacttcgaattctcctcccccaactggtcccacaacctcctcctcgaatccgcacgcgccgtcgccgacaacaactccacgcgcctccaccacctcctctggatgctcaacgagctcagctccccctacggcgacaccgaacaaaaacttgctgcgtatttcctccgagccttgttcagccgcgtcaccgaagctggcgaccgaacctaccgaagcttagcttcggcgtctgagaaaacatgctcatttgaatccacaagaaaaacggtcctgaaattccaagaagttagcccttggactaccttcggacacgtggcatccaatggcgccatcttggaagccttggagggaaactccaaattgcatatacttgacatcagcaacacttattgcacccagtggccaatgcttctggaagcattggccactcggagcgaagaaactccacacctatgtttaacaacaattgttactggttctagaatcggtaacaacgtccagcgcgtgatgaaggaaatcggaacgcgaatggagaaattcgccagactcatgggcgttccttttaagttcaacgtcgttcatcactacggcgatctatccgagttcaatttctcagagcttgatatcaaagacgatgaggctttggctgtgaattgtgtgaactcgctgcattcggtttccgcgctaggaaacaaccgcgacgcgttgatatcggcgttgcaagcgttgcagccgcggattgtgacggtggtggaggaggaggctgatttggacgttggaatcgacggttacgagttcgtaaaaggctttgaagaaagtttgaggtggtttagggtttactttgaggctttggatgagagttttgtgaagacgagcaacgagaggctgatgctggagcgcgcggcggggagggcggtggtggacctggtggcgtgctcgccggcggattccgtggagcgccgcgagacggcggcgcggtgggcggcgaggcttcacaacggagggctaaacgcggcgccgtttagcgacgaagtttgcgacgacgtgagggcgctgttgaggaggtacaaggaagggtggtcgatggcggcgtgctccgacgccggaatattcctctcgtggaaggacacgccggtggtgtgggccagtgcatggaggccataacgtaaagatcgtatcataatagtatcatttggctttgacatgggtgaatccctcgcacgtgttctcggtttttttggcacgtgcggaaggatatatattgatggagttttttttcttcttttcagtattattaattattattattattgggctttatttcctatttttgttcttttggttaaatatatataagtttggtaagacaccgggattcatgggcgtttgcttgtgttgaaaaaggaactaagtaaattattattttcttaactttttatgattgatttttttgtttaccaaagaatagcttgtgtctttggatcgatatttgtatgacatgtttttcaatcgcttc

SEQ ID NO: 68434 - DNA, 352 bp, Glycine max
  Clone ID: PAT_MRT3847_32809C.1
tgtgacttgtgtgccaaattaatagaacctcctctattctattctgtctaattttctaacaataacaccttgacctagagcttgtggtatgatggtatcaatatcaagaagggttggagccgtacccttaaatttgatgaagcgtgtgattcactgtttaattttggagtgccttcgatagctctcaaatgtgcctgtggcttgtagttgtgggcgtggcattagcatttgcatgtacccattattgaagcaagcgcaaggtccttacccttctctttcatgttgctctctcctcctaaaccactgtttatctcaaaaatcccttaactgtgtcaaaatcgtgcatgcccac

SEQ ID NO: 68435 - DNA, 436 bp, Glycine max
  unsure (1)..(436): unsure at all n locations
  Clone ID: PAT_MRT3847_3280C.1
tttcccattacgttctctaaaattcactcccaaaccctaaacctcacaacacatagaggttcgcttttggtcagtttctccgccatcgcagtagcacttcacagcttcactaggaagaagctagtccatttgattactgtgatattgncacctcaaccactcacaaaagtctctgaggtccatggggaggtttatcttttatagaaggggggcaaaaccaaggaaatttcagattggtgattgatgggaccgacattcatcttttgctatgggatctaacagcacttggcttaattgattagagcaaatgatatgtatgatggagttgaggatggctatgacagctcatgagatgacatctcatcagcttcttttttataaccccatgagagagagcctacacagaggctttggaagttcactgtcattgcgatct

SEQ ID NO: 68436 - DNA, 476 bp, Glycine max
  Clone ID: PAT_MRT3847_32810C.1
ttgggggtttttttttttttttttttttttttttttttttttttttttttttttttttttttttttggggggggaaccccccttttaaaaaactaacggggcaaaccttatccaaaggaaaggaaaccccccctttaaggggagcccttaaaaaaacccaaaagggggggaacctttcccacaagctaaaaaaaaaaaaacaaccggggggggccccccttacaggtttacaacccatatttaaacggggccctcctcacacattaggaaacacgggggggattatcaacaaacaaaaccctcctttttactaaacattttcatggggcctaacagcagccgaaaaaaaagggggtccccccccggggggggggggggcatcgggggtgttcctggcccaaaacctcccccccccttaaaaattttgaaaggggggggccttggcccggggcaattgggggggggctccgggcaaa

SEQ ID NO: 68437 - DNA, 300 bp, Glycine max
  Clone ID: PAT_MRT3847_32811C.1
gtttcaggatgaattctcagtagatttgcaagtgtttgcccaaaaattattgagagagcatttgacaatgaaattctcttagaatatatatcttttttgcttttcgaagtcatgcacatatattaggcccttcttaccttttcaaaaatggttcaagagatgtgtcttttcaaaaaagctttttctgaaattctttactagtaatcgataacaggtttctggtaatcgattacacagttatattttgaagggtcataactttttaaattgaattccaagagtttcgttactgataatcga

SEQ ID NO: 68438 - DNA, 401 bp, Glycine max
  Clone ID: PAT_MRT3847_32812C.1
tttgttcctgggaacgactatgctcagtctgggggggaggttatcaaacaagtggtgagcccaatggcagaaatcatggattgtctttggccaggagatgaaagatctgtccaggataggacacacctgatggaaggctatggttcaaaaaactgaatgggtaacaaagatgttggtagagtagaatgacgaacaccatgtggactctcgcttgcaggtattaaaagttacaccatcaccgagaggctctttacttgtagctctgaaaaattgctgcacattgatgaacatacaatattgttgttacaatcctgccataattctgtggcccacgctgagtatagagaaaactacttaattagtgttaatgaatatcccaacccttactgaattgggggtaa

SEQ ID NO: 68439 - DNA, 112 bp, Glycine max
  Clone ID: PAT_MRT3847_32813C.1
cctagttcttgctgcatccaataggcctttctactgggatgtagctattattaggcgattggttagatggatgatgaggatgtcttccatctgtggagaacagggaaaagat

SEQ ID NO: 68440 - DNA, 792 bp, Glycine max
  unsure (1)..(792): unsure at all n locations
  Clone ID: PAT_MRT3847_32814C.1
tttttatgttataacttataactcaattgaatttataagaatcgggacttacatttgtgtctactgcttcttacatacttctgcaatattcttagctacctatgaattggaacttacatttgtgtgtattgattgatacatattcttatctaccttggtttacattgaggacaaaatttgaagaaacacaaaggtggccattgtggactagcaggtagcaactatcctggcagaaatcccttaagagcttccaaccttcccatctgataacaaccgtttcagaccctctctgagaccaggattaagtgcagaacaagaagtcaaaacattgagcgaccgaaccacacctttgcgaacaagcaactgaaaggcggacgacacgcctttaacaatgacacttctccgtcccacatcataacgatccacaagatgcaacaagaactcaagaagagcatgagtcatgttgatgaacttgggaacagaatgcaccatgagcagaatcgcaggctcgatgttcatgatactatccatcctttcatcaaagaagagccagtcataaaacaaagccagtttcacactctcctccacatgtttcttcctacaacacgtcaaaagccaaccaatcagtgcccacctaggaaaaatatcagactgaatgatctcatttggagggtggtgtgcacaacatataaacctcacaatatcaactannngnaactctttatcacgctcattcaaaaacttgttagcaaaccaaagctggtgcctcctgtgatgccccaattttatatc

SEQ ID NO: 68441 - DNA, 331 bp, Glycine max
  Clone ID: PAT_MRT3847_32815C.1
tacggctgcgagaagacgacagaggggggcagcatggcgaacctactggagagatttactcggcctaagcttaagttagaactaagacgactacttaatggagcagataatcctcaagaacttggacctagatcccatactggcttatgtgagtaggcagaagcattatcaagccttacgagttgcagaacgagtgctggttgcgaccaatgtgtattgctcaagaagtctgtgtttagtcaacgcgcgggtcatgttattcaagactcaggagtaaactgatctggcgatctagatccatgtccaacgcacgagggacgagcggaccttg

SEQ ID NO: 68442 - DNA, 134 bp, Glycine max
  Clone ID: PAT_MRT3847_32816C.1
ggctcgaggccggaagagttctacgcgcttcactcattttgtcacggctccgacatcgagacgaaccctggaggtctatagctctccacacagcggtgtaccccactccctccaaaaaccatcattggaaccct

SEQ ID NO: 68443 - DNA, 520 bp, Glycine max
  unsure (1)..(520): unsure at all n locations
  Clone ID: PAT_MRT3847_32817C.1
acgagggaaagtgagcaacaattgcatgaagtttttgattcagccattcaagctgcacctgctgtggtattcattgatgaattagatgcaattgcccctgcaaggaaagatggaggtgaagagctatctcaaagattggttgcaactttattaaatctgatggatggaattagtagaagtgaagggttacttgtaattgccgccactaaccggcctgaccatattgagccagctctcagacgaccaggaagatttgacaaggaaattgaaattggtgtgccatcacccgaccaacgttcggatattttgctcactcttctcagtgaaatggatcacactctctctgagtttcaaattgaacaccttggcaccgccactcatggttttgtgggtgctgatctagctgcactttgcaatgaggcagccttgatttgtctaaggcattatgccaattntaagaagacttatggttcttgttctgattatataacagagcaacctgctctgatgaatagtgcaa

SEQ ID NO: 68444 - DNA, 161 bp, Glycine max
  unsure (1)..(161): unsure at all n locations
  Clone ID: PAT_MRT3847_32818C.1
cccacacntccactttaccatatgtgtacttttaaagtcctcagcattaccttcggtcaggtattttttctaaggcaggggcgcctcttcaagatcactcctcaccattggaggatgtgtgcatggtgagataagcgttgctgttggcgtaggaagttatg

SEQ ID NO: 68445 - DNA, 567 bp, Glycine max
  unsure (1)..(567): unsure at all n locations
  Clone ID: PAT_MRT3847_32819C.1
ctatgaccgntcgcatgccacgccgtaccgtnaagcctnncggaatttcggcttcgaggggatatggaaaatcaatggtaaaggcagcaggcatggcatgacaaaaaagtctcaatttctcaaacaaagttttgaaaggaaaagggacattcacaactcacttcacaaactgcgatcaagtgaagcagccatttccactcccttccatatcacattcactttttgacaagctagatgagttaattaaggctttgcctgggaacaataatggaagggatgaagcttaaaaggtggctcgtgagtgttttgttcctcattgttgccacagtgagcaatgcagcaggtgcatttgtgggggtaaacattggcactgatgttactgatcttccatctgcttcaaacgtggttgctattctaaaagcacatcaaattacacacgtgcgtctgtacaatgccaatgagcacatgctacgagccctttcaaacactggcattgaagtgaattgttggtgtcacagatgaagagatattaggcattggagaatctgcatcagttgctgcagcatg

SEQ ID NO: 68446 - DNA, 441 bp, Glycine max
  Clone ID: PAT_MRT3847_3281C.1
gttggaacctttgggctgatttatgtgcttgcatggtcgtgagaagatgatagaaggggagagaacgaataacggcgtaaatgcacggaaccgtttagcagttcatgataagtccggggcgagacatagaacgcggagagacgtaccggagagaggagttaaataatcattacctctattataatatacagaccaagcatagagcgaataacccccacccctccccctctctatctagcgatgtcctccaaacttcctgacaaggaaccccctcccccctaatctaaggtcctactactctcataagagtccttggaaatcgccgcacctactagaggtcgccttccttttcacaacagctgagctccgatattcccctatttcccccctaccccccccaaacgcgcatagccctaaaattacccccccttttccgcgaca

SEQ ID NO: 68447 - DNA, 487 bp, Glycine max
  Clone ID: PAT_MRT3847_32820C.1
tacggctgcgagaagacgacagaagggttacaaattgttgacagtaaagataaacctgccatgggttttctttaccaagctatgtataaagccaaagaggagatgattaggaggtttcagaaaaataagaaggtagagccttacttgaatatcttggataggcattgggattctctttgtaaaagtatacatgctgctggttattggttaaatccagcttgtcatttcaatgaagaatttgctaagcataagtccacaacatctggccttttggatgtcattgaaaggtatgctcatggagatcctgatttgcaatttaatttggcaagtgaaatgagaatatttaaaaatgccgagttagattttgggaggctagttgctacacgtgaacggaatacggtgatgccagatgaatggtgggaatcttatggatgtggtacaccaaacttacaaaagctggctattcttgttctaagccaaacttgca

SEQ ID NO: 68448 - DNA, 424 bp, Glycine max
  Clone ID: PAT_MRT3847_32821C.1
ataagtctggatgagatccaacaaggttccaaggtcctggctgatgttctggaaattgatctaccaaagttgcagaagacaaagccaaaagatgctgctccggttgcctctagtgcatgtgatcgttgtggtagagtcttgtattaaccatataaagacgtatagattgcatgtacctttaattttccttggaaaaaaatatcacatgaagaatgttattccttatacatgaacccctggaaactatgctccaatattccatatatcatcataatttaaggccatgatatatgtgataggtagctgtataaataaatatgtaggagttaagggctcatttgtataacttcagtgattgataagatatatgatttattagggctagaacaaagttctctttcaaaaccataaaaatatacaaaaa

SEQ ID NO: 68449 - DNA, 749 bp, Glycine max
  unsure (1)..(749): unsure at all n locations
  Clone ID: PAT_MRT3847_32822C.1
catgctgaacctgttggtgtttctggttttcattctagacccaagggtgattgtgcttcttgtgaagctgcttctgcaaccaacgtcttaatacaccttagatcacagaagatcaccgataataagccttggatgaacggcacatcagagctagctgatcctgatttacaggttgatcaaactgcacggaacagtgctccctccttgtggagcccaaacactgcttctggtgcagctcttcactgggcatctgctggcagtgcttcacgtggtagtactgaggggatagttttgtcaaaccaagcaagttgatttgtgctccatttgtagttaagtaggttatattttgagggtgttcactaacaaagggaatctagctatgcaatctggaagcccttggtctttgtacttaggatggatgagattgtgtattttgaaaattggtggttgttagaatagggtgatctttccttcagggtatttgatcgaggaattcttgtaagtatcccaaaaacttaaattgggaatgctagatttccttatttggtattaattttttgaaagacaattttaggaaactatcatttctaatgattctctttcctctcaacaaaacattctcatgggaggagtgagaatttgagattcctgtgaaggtgaggtgttagatttatgatctcatttctaagaaacctttgaacgtatttgtaacgtttttataaaattataatccannngaaagannnaca

SEQ ID NO: 68450 - DNA, 765 bp, Glycine max
  Clone ID: PAT_MRT3847_32823C.1
ccctctcgttttggtaaggatggaggatttggtgcttttatgatcttgagaacaaaggtttcagtctggttaaaccataagagtgtcactgtggtgttggatatgtagaccattttgggtggaagtgggtatggtcctagaatgttcccattcccctcaacatcaactccctcgtcaacaagcgtgactctttccccgtcctccgccgctgcgtctttgactcctacacccctctggtgccaacaccggagccggagcaatccctgccatcagagagaggctttcggagccggagcaatccctgccatcagagagaggctttcggctgcctcccttaccgccgagattctgacgaagcatgttagatctctttgttccttcaacagataagattttgtcctgtttgagctctaaagaaaccgtcgaacctgattccgtggctgaaaaggatgaagttgctgaaaaaacaacacagacaagctcttcttcttgataatttcttgggtgttgatgggcttgcccctgggcattcacttcatgatagaaaacctgttacctacgctttagggttgctgatctgagacgaggatgaggagtataacagagtacaataactggacacaagtaaaataagtttaaatagatatggcttttgattatcaagccctgtagttcttttttttctttctgtcttcatggactctcgatagtgatcagcttttgagcaaaatagggttgaccgtgtttctttgttcatctgatcag

SEQ ID NO: 68451 - DNA, 581 bp, Glycine max
  Clone ID: PAT_MRT3847_32824C.1
gagctggatcctcaggcgccgccctccccccccccagacccactccaccacttgtacagtggtataatgacatgacatacacttgtcccaaaattcactgtacctgcagagcgaactgccaagggtattctgacttcactgcaacccatcttcccataacaggtatccaaatgagaatctgctttgaactcgtagcttggaagaaaaagttaccttgaatttcattttctttctcttggaactaaatgctaaggttgatggcttcaactataactgatattccaattggagcaacaacacgagcagtgtagtttgatttaactggaccaacattagtgactgttcttgataccgtgaggggttgctttagctctggaatggtaatagaaggcaggttcatgtttaagaggaacttgtgtgatttatggcatttggtaggaaaccctgtcaatatgctctatggcggtgtttgttgtagcccatagaacagaggaaacgaatgtagtctgagtttttcatgtcatatacaagaacaggatctgtgactttgttaagatcaacatgaccaccaccgtagtcaa

SEQ ID NO: 68452 - DNA, 479 bp, Glycine max
  Clone ID: PAT_MRT3847_32825C.1
ttttgattcgagggctgacacaagccacgacccacgaagaatgcaacaaactttccaatactagaagacggcgagaaaaaggcagaaaaggttaacatataaagagtggaatggataaaagagcaaaagaaggacattaatgccactatgtagaaaaatacatttccattcagatggaaaaaggaaccgcatctccttcatgtttgaaccgaggtatggcgcttgtactgtgaaaaattatgcttactttttgcctgaagcgaccggcctaatgattccagggtttatttctgatgtttagtgttttccagaggtggcttaatgcgctcccgatgatgaactaactttatgagtgtagcatgagacttttcagatttactcttcaagaatagattctccttcttgaggaccctgattgagtatgacatcttctcaaaatcttgggtggaaggtgcaaaaaaatcattggtcttaaacaa

SEQ ID NO: 68453 - DNA, 1189 bp, Glycine max
  unsure (1)..(1189): unsure at all n locations
  Clone ID: PAT_MRT3847_32826C.1
cccacgcgtccggggggcgcgggttttagacgggagtgcgaatgcgatgatgaagggaaagggaaccgaagacgatcgtccatggcaatcttaccacactgtttacacaaccgccaaagcaggaatggaattggttgacaaggagaaagttcaaagggtagtttatgaaatgagcaaaggatccaaatattttcaaaacgaggaacgcaaggaagcttttattaagcagaaaattgataacctgcgaattcagtgtgcaaacctcacacaagaagacttggcccattatcaaaaggttgctgatagaagaattgttgagctggaagcttcgcgtgacctttcaaggatttggttacatgtagatatggatgctttctatgctgcagttgagactttaagtaaccctacattaaagggcaagccaatggctgttgggagcatgtccatgttatccactgccactatgaggttactatgaccttgacattgtttctgtattatctggtcttaatgtactgaatcatggaattcctgatcctcatttggtctttacataggcccggaaatttggggttcgagctgccatgcctggcttcattgcacgtaagctatgtccagaattaatctttgtcccaacagatttcaaaaagtatacttactacagtgatttgaccagaaaaggtattcttgctgtttgtgattgattttgtattgcaacttttcctttaattactgatgttagcttaatataaacttattattgttagtttttgggaggtatgatcccaatttcattgctggtagcctggatgaagcataccttgatataactgaagtttgcagagaaaggaatgtcaaaagtgaagaagtaagttggcgcgtgctttggattaattttacaacgaaagacctttaatgtattagatttcttgattttgtaaatttggaatacgtagattgcccaagaactcagagctggggtttatgaagagactggtctcacatgcagtgctggagtggcaccaaatcgcttacttgctaaggttctgggttctatctcccaaacattttccccatagctatgttatcagcccgtttgttgaaggagaagctntaaagcaccttatcattttacatttaagatactaacccctttagtagagatgaaatgattgtttcatcttcctgg

SEQ ID NO: 68454 - DNA, 1686 bp, Glycine max
  Clone ID: PAT_MRT3847_32827C.1
ataagattgtagggaggaacattagccaacaccacacagctggcatgcattcccacacttcaagacaatcttcaacaatggacgaacaatcagtaaataggaaatactttccttttaagcaaggttacccatttgtggcaactcttagagtgggatctgaaggaatccagatgacagttgatgggaagcacataacctcgtttgctttccgtgaaactttggagccatggctagtcagtgaaataaaaatctcaggggacctcaaattaatatctattcttgccagtggtttgcccacatcagaagattcagagcatattattgacctagaatcattgaaatcaagtcctatatctgcacgactctattggatctcttcatgatggttttctcttttcccaacaatttgatcccacggagatgctctttttgtggcagaaacttctggtcgataaacatgcaaaatgttgtggtgatagtaggaaatgattgaggactggtcaggttacaacttacagaaaataaataaaaagaaaaggctagggagctttgtataatgattagaatagttagcttgtataactcacttatcttattgctctatgtagagatgcagatttgggacacaagtttctgcaaagtttgtcatgaattcagatgttgatgcatttgtccgggtttatgaagttctagactctttgcacagaatcaatgcggatcatgggttactatatggactcatcaatttggattccagacctcatcgaaatacagatagcaaatggtacatcagcccagaggaatggagcgaaggaacttatcctccttgggcacatggtcccggctatgtggtctcacatgatatcgctaggacggtgtccaagaaattcagagagaaccatttgaagatgtttaaactagaagacgttgcaatgggaatctggatcgctgacatgaagaaggaaggtctagaagttcgctatgagaatgaggtcagagtgtaccctgaaggttgtaaggatggttatgtggttgcccattaccaaggccctagggagatgctctgtttgtggcagaagcttcaggtagataaacgtgcaaaatgctgtggtgatagtaggaaatgattgatgactgaccaggttacaacttactgaaaataaataaaagaaaaagatcccccttttgaatggctggggagcttgtataatgattagaatagttagctttagcctgaaattattagaaatggttaatggtagggcatattcttagtcattaattcgtttaagtaaatctgatgattgttctatgtagagagagagagagagatttgtatagatcggtcaatcggaaatagtttatcagattttctggcacctaatcaattttgattgagatgtcattatactaagaaacctcaattttttggttattttatatttttttctccctacccttttcttttatttgaataagatataggagtataatggttgataaactcttccaaatatctaatacagttgaatatctaatttcgtacttaaaatacagctgcataaccaatttcggacgtagataactttttctgtttagctttataattgtactcttttaatattttattgaccttgaattctctatagaagcttgcttgtaattcacttcattcatttgttttaa

SEQ ID NO: 68455 - DNA, 360 bp, Glycine max
  Clone ID: PAT_MRT3847_32828C.1
gtgcatgtgggggaggagggagagagatgtactttttaaatcatgttccccctaaacatggctgttaacccactgcatgcagaaacttggatgtcactgcctgacattcacttccagagaggacctatcccaaatgtggaattgactgcctatgccaagtccctggaaaaggagcttcagtattgtggggctcataaaacatgaatcaagcaatccagcctcatgggaagtcctggcacagtttttgtaaagcccttgcacagctggagaaatggcatcattataagctatgagttgaaatgttctgtcaaatgtgtctcacatctacacgtggcttggaggcttttatggggcctgtcc

SEQ ID NO: 68456 - DNA, 615 bp, Glycine max
  Clone ID: PAT_MRT3847_32829C.1
cgacctagcgtccgaatatttttaggtattctctttgcgcagacccctacctatactttcaagacgcagatcttcggcaagaccctcaccggaaagacctcacccttgaggtggaaagtctctgacaccatcgacaacgcacaaggccaaaatccaggacaaggaaggaattcccccggatcatcaacgcttcatcttaaacagaaagcatttcttgtacgtccgtaccctcgccgactacaacatacacaaagagccaaccctagaccttgtcccccctctccgaggaggcatgcaaatcttccacaagactctcactggccaaaccataacccaagaggtcgaaagctctgacaccattgacaacgtcaaggccaagatccaggacaaggataggaatccccccacaccagcaacagtctcatgcttagaccgaaagcaacttgaagacggtgcgcaccctcgccgactacaacataacagaaggaatcaacccttgacctcgaactccgtcttcgtggtggcatgcaaatcttctataagaccctcaccggccagactataaccctagaaggatagagctcctacaccatcgacaacgtgaaggctaagatc

SEQ ID NO: 68457 - DNA, 321 bp, Glycine max
  unsure (1)..(321): unsure at all n locations
  Clone ID: PAT_MRT3847_3282C.1
agacgagctgacatgngcgnngcaanaccanacacacntacgncnagnnnaacatnaagngccnagagnngaccgcangncnnnaaacgnccantatactnnangcgancgnganggagnnnngnaannanngacagncacaagtcngaggnaangnngagcaangaatacnaganaangccagncanggnagcacnncggaaananagaccnnnnaanggaaanaatgcnccncnaacaganngcagncnacnanaacgcgncacnagacgcgnnagnagcagatggnananaggangcgcnatnnncagncgnggacnn

SEQ ID NO: 68458 - DNA, 478 bp, Glycine max
  Clone ID: PAT_MRT3847_32830C.1
gagttcaggttgggtgctaaatactttcaggtaaatattttatgccttttccactacatggatgctttaacgttgttgctttccattttccctctttaggatgtttcaagggaatttaagagtacacttgagcgggagattggtcttgatgacaatttaagtcctacccagaacacatacaattccaatgtacgtaataccacaccaacttcatcatccactgttgaccccagtgagtaatctagtatcactttttttgttttaaattttatttgccatgcaatttacaagtattaaatctggacaggttatttatccttataaaatgtatggtttggtataccttattgaagtagcgtcttatgcatccttagacattgataggaaccagaaaataaaactgacacaaatgaataaaaaaagagaaactggttgtgcatattctgaaattttctaggaatacaaacagaaatgaaaa

SEQ ID NO: 68459 - DNA, 507 bp, Glycine max
  Clone ID: PAT_MRT3847_32831C.1
tatgtactcagccacgacgtgttgcggctatgagtgttgctgctcgagtttctcaagaaatgggtgttaaattaggacatgaggttggttactccatccgttttgaagattgtacatcagagaagactattctgaaatacatgactgatggaatgttactgagggaatttcttggtgagccggatttggcaagttatagtgttgtgatggtggatgaggctcatgaaagaacactctcaactgatattctgtttggattagtgaaggatattgctcgtttccggcctgatctcaagctgctgatatcaagtgctacacttgatgcagagaaattcagtgattactttgattctgcgccaatattcagaattccagggagacgatatcctgttgaaataagctataccaaagcttcagaagctgactacttagatgcagctattgtcacatcactttaaatccatgtcactcaaccttctggagatatatgggaattcttactggtca

SEQ ID NO: 68460 - DNA, 331 bp, Glycine max
  Clone ID: PAT_MRT3847_32832C.1
acttacggagtaaaacacctattattatctatatttttgagacaaaccttatgaggggaacccagcctctagaacagctagggcgcaattacatttttctatttggcacatgttaactacgatgtttgaagttacacggccggattgggcacagagcttgaaacacccaaagcatgattgctgctaccatttgaaagcttgcaagcgcaagacctggaaattgcataatgggttgcaccggaacctttatgctacctggtggtggcagagaacccatcgctcacccatgggggaagaacactctacaagttcactgcgtgatagaggatgt

SEQ ID NO: 68461 - DNA, 383 bp, Glycine max
  Clone ID: PAT_MRT3847_32833C.1
acgaaaaacaaaataaataaaaaaaaactataaaaaaaaaaataaagataaaaaaaaataaaaagcggaagggaagaacagaatcaacggattagaaaaaaatagaacaaaagaaaaccggagggcctctttaaagaaaccatgctgaactcgctgccgttcacgaccctagcattaccatagagtacctgacatacatgttaatgtacgacattttacatggacactatggaaaaccatgcataccaatttaatacattgtataaatcccgatttgccaagctgtattattagacacaaggcccctgccgatagcccttgccaaaaaattggaaccctcattggcgaatgggaccccccctttatcggcgcattaaacccgg

SEQ ID NO: 68462 - DNA, 1469 bp, Glycine max
  Clone ID: PAT_MRT3847_32834C.1
tatcgggaaatttcaagataacatgccaaattaaactcatacatgtctgaaaattgataccgagttatgaatgcaactgaaagccttatatttaagacaatgacattagcagtggctgtaacacttgattatgggaaaatttgtcaacaagggagaatgattaggaaatgcttaagatataaatacagaagtagatcaggatggcttatagtattttgttggtacaaatggcattttcgtaaggactccttcattgggttttcctcgaataataatctttactttggtgcctgccttgtgcaatccagatttcacatatcccatggctatgttcttctggaggcaaggactgaatccaccactggtgatttccccaatgttgttgcctccttcatcttgaatctcactgtggcttctgggaggtggaccagaagaaaagaaaccaacacgcctgattttaggaccttcttcgagctgtttcaagataacatcagctcctagaaaaccaccttctgctctcctcctcttccctatagcccatgtgagtcctgcctcaataggtgtaatgtgctgttccatgtcatttccatataagcacaatccagcttcaagtcgcagactatctctagctcccaatcctgtcaatcttaccttcccttcagatttttccagtattgccttggcaagatctagtccatgctctgaaggaactgagatctcaaatccatcttctccagtataccctgtccgggtaagaaagcactgtgagccattgatgtccaacacacggaactccccaaagaatagcttgctcaaatcctcttttgttaggtgttgaagaacgggagcagcaagaggaccctgcagagcaagtagggatctttcatcgtggatgtgccaagacacatcaccacctttggccttgaatgccttcatatgttcctcaatatgagccagatctttatccctgcaaccagcattcacaaccaaatatatgtggtcatccgtcaccttagtaattactgaatcatcaattgcccctcctttttcatttgtgaaaacagtcaatgtcccagttccaggggcaagcccggcaacatcagcaatgactagcttttcaaggaatgggacagcatccttccccttgaggctcagcccacacatatgggaaacatcaaaaaggctaccattctccctacagttaagggttgagtcaataattgagtccttatattggattggcatgctccatccagcaaatggcaccatcttccctccattagcaacatggaagtcatcagcgactgtctttttcagctcagcatttgaggcagaatacctacgagcagcagccttcttatcaccctgggcaacacggcgagtgattgattgcacaagttgccataagccccccctcattttctgttacatagtgtgtgaagtaacatagaatggtgcaaacgagaggg

SEQ ID NO: 68463 - DNA, 2437 bp, Glycine max
  Clone ID: PAT_MRT3847_32835C.1
tttttatgaatgcaattgaaagccttgtatttaagacaatgacattaagtcattaacagtgactgtaacactcgattatgggaaaatttgtcaacaagggagagagcaattaggaaatgtttaagatataaatacagaagtaaatcaggaaggcttatagtattttgttggtacaaatggcatttttgtaacgactccttcattgggttttccccgaataataatctttactttggtggctgccttgtgcaatccagatttcacatatcccatggctatgttcttctggaggcaaggactgaatccaccactggtgatttccccaatgttgttgcctccttcatcttgaatctcactgtggcttctgggaggtggaccagaagaaaagaaaccaacacgcctgattttaggaccttcttcaagctgtttcaggataacatcagctcctagaaaaccaccttctgctctcctcctcttccctatagcccatgttagtcctgcctcaataggtgtaatgtgctgttccatgtcatttccatataagcacaatccagcttcaagtcgcagactatctctagctcccaatcctgtcaatcttaccttcccttcagatttttccagtattgctttggcaagatctactccatgctctgaaggaactgagatctcaaatccatcttccccagtataccctgtcctggtaagaaaacactctgagccattgatgtccaacacacggaactccccaaagtagagcttgctcaaatcctcttttgtcaggtgttgaagaagggggcagcaagaggaccctgcaccggtgacaataagaatcctttattgatgttacagtaaggaaacaattcattaatttaaaatcccctcaatgatttgtatatttaacatgagtacaaatcaccttaacaagtgaactatgatcgcttaatgaccacgctaacaaagttctaatatttttactgtggggaaaagataacaagcaacatggccaaaagtatgagacactacaacaaaagatagaaaaagcaggtgatatgaaagtatactgaatagtttcctaaatcattcatttaatatttaatgcctctagactctagagcacattacaggcatcgcaaagtaaaaaggattgaggaacgtttacaagaaagaaaaaaaaagattgaagtaaaaaattaaacacataacaagtgaatgaatacttcaatatttggtttatgtttctcaactaaaatagagatatcaagagaaaacctcagaaacagcaggaaatcggtaatacataacaaacaaaacaagttgaaggtgtgtatttagcatgcatgatgtcaatgtagaagagcgttctaaatgacctgcagagcaagtagggatctctcatcgtggatgtgccaagacacatcaccacctttggccttgaatgccttcatatgctcctcaatatgagccagatctttatccctacatccagcattcacaaccaagtatatgtgatcatccttcaccttggtaataactgaatcatcaattgcccctcctttttcatttgtgaagacagtcaatgaaccagttccaggggcaagcccagcaacatcagcaatgacaagcttttcaaggaacggaacagagtcctttcccttgaggcttagcccgcacatatgggaaacatcaaaaaggctaccattctccctacagttaagggttgagtccataattgagtccttatattgaattggcatgctccatccagcaaatggcaccatcttccctccattagcaacatggaagtcataaacgactgtctttttcagctcagcttctgaggcaaaatacctacgagcaacagccttcttatcaccctgggcaagacggcgagtgattgattgcccgagttgccacaagccccccctcattttctaagcaaaatatcagacgaatgaattataaggttaaaataacaagttattggagtcacaagatttcatgtcatccctattatgggaaatatggatattatggcacaagacagtacattctacccgttacattttgcagaactcagaaattaaatcaacatatctgtgtaacatggcagatgataaacaagaatcaatcatacatctaatgataaaatgaggttgatcaagagcatccacgtacccagaacgacagaaaaaccatatctctgtaatttttctagatctaattatcaatttgcagatcatcacaaagtcattagctaaataaagggatgaaaatgatacatatatatgtatatattaataagctagtaattgagatggtaaaatgcaagtgagaaaaagaagggtagagcactgacaaagattggtttgttgttgagaatgaatgaagcaacggggagagaaagctctgcactctgcagagaggaaggcttctcgag

SEQ ID NO: 68464 - DNA, 672 bp, Glycine max
  Clone ID: PAT_MRT3847_32836C.1
ccacgcgtccgcccactttacttgcacttttacatacgcccacatatctgtctctcaatgccattttcttctctacctatctgccactccacttcccttcttttctacttctcggtgagtcccatcctatcccctccttccaccaagcctacagtaacggaatcatccaatatttcaaaggaaaacatagccattagcagaatcaagggtagctagcgtatatggaagcaggagtaggaggaggaagggtaggtggtgcatgcgacaacgaaattagcgacggaatgcaatgcatgaaccaccctcacaacaacagcaacaacaatcccggtgggatttgcgccttctgtctccaagataaactccgcaaccttctctcttcttcacctcctctttcttcctcgtcttctccttccccttctttcactcctccacctcctccctctgttaaaaccgaccacgaccacaacacgcgctctcgcctccccttcctcgtacccaagaaaaacaacaacaaaaaaccctcctcctacaccaacatttcttcatcagctaatatcattttcaaacgcagcaagtccactgccacaacccaaagaaccagtttctcgaggagaaggacttcagtcccagaaaaagaacgggttttggtctttcctctatccttcttct

SEQ ID NO: 68465 - DNA, 407 bp, Glycine max
  unsure (1)..(407): unsure at all n locations
  Clone ID: PAT_MRT3847_32837C.1
ccgtcgcgcatgagtttgagggtggactctgtctcaagctactcctcttaacctttgggttgattcaactaacgtcatggcgcaggttgcaatgcagctgttagtcaacgcgcgcaccactatggcccttccttaaatgtcatnnntctacatttgtggcacctacntnntgttctcaatctagtacaatgatagggattggaggcttcttgggttgtcactatgcatttattaannntatgaaaaagggttggattggtatatatacttggatgcacatctgcactagtaggggcacacgggattgtttaattcatctgtctggattttattattgcgatgtggatctgcagatttgttcttccttctggcctgctttcccaaagtagtgtactcattcaaggtat

SEQ ID NO: 68466 - DNA, 292 bp, Glycine max
  Clone ID: PAT_MRT3847_32838C.1
gttagacttctttagaatgtttaaaggcctacgacgtgaacgttgacacctaaaaatcattcgggttaacaccccgaggatttggttcccatcctattgccagttggtaaacctctgatgcaacaatgagtttcaggtggtttctttttagcactcattaagataatagttaaaaaggctcgatcttgaaaaaaacaacgtgggtgcacaaaaatgcgttaacatgaattttctccgtttcgtgaaactgttttaacgggagactatgggatatattgtatgcaaatatagc

SEQ ID NO: 68467 - DNA, 549 bp, Glycine max
  Clone ID: PAT_MRT3847_32839C.1
ggaaatacccgggccgacgcgacgcgtccgctcaaaacttgtcttccccctctctcctcctcggaacgccattcgcatgcagttctcgcacaacacactgcacaattatatttcaaagcgcaacccatttcaacatttcatcatttttctcgtgtaaccatcccctcacccacgaacccatcccatgaatttcccaaaatgccctcaacccagaaccccctcttctccttcctcctacattccaccccaccgtacccaactgcaccctcgcatgatctccctctactcttcttcttcttcttccctaaaatatccaaatcccaacaacaaaccccacaacgccaaatgcctcttgttcttcttcgccctcctcttcttcaccgcccccttcctcttctacctcttctccaccggcctccaactctactccttccccaaattcgccgactcccgcccctactcctttgccctcgccctccgcgccggcccccacgcccttcgtctcttcgtctttcacttccttggccccttccctaacccccttacttt

SEQ ID NO: 68468 - DNA, 374 bp, Glycine max
  unsure (1)..(374): unsure at all n locations
  Clone ID: PAT_MRT3847_3283C.1
tcgagggggcttccgccaggactttgggcaacatatatcgatgtagaatttggttgtaantaacagcaggctccaaactccagagcccggcgctcgtttcctcaagatgggttgcgccaagatcgacgaggcgttggcantgggctcggatncgacnngaggacacgctcttattgatttgggggaaggggggaagtnntcccgttgtgcnctcaaagcctattctcaagaagtagtaagctattgctgtgtggaaaggacacagttngctgttttgtaaaattggtcaagtaccttcagagttgtgaacncnntagctagttgcttcnngcttcaatgtgtgtcaatcnntatgaattngcattctgaggata

SEQ ID NO: 68469 - DNA, 451 bp, Glycine max
  unsure (1)..(451): unsure at all n locations
  Clone ID: PAT_MRT3847_32840C.1
ggcaaccgcngaaacaacncaacaacaaagggacgcggcacaaccagcaaaaccaaaagcagccgaggcnaggccacaaggcaaaanggaagaagcacaggcccaaccgacaaaagccaacnaggngaacccgcaaccagcaaaaccncaagccacnacagccagcaaccacacgaaanggaagaaaccttttttttttttacnagatgctgacactgccttgaaaattaatttttcaccccctaaaggctacaaaaaacaanngaatgtcaaggcctatgttcgcaactatgncaaagaaccattaagtgaccttcacacggcttcaaagctaaattaccatgaagagatcagtatggaacttaaaaaggtgaacctaatgcccttaaaaaccaggagcaatacgagaaaatatgaacgcttaaaaaagcaaaagcgacagaaaaaaagc

SEQ ID NO: 68470 - DNA, 1453 bp, Glycine max
  Clone ID: PAT_MRT3847_32841C.1
gcgcgtgcgtacggctgcgagaagacgacagaagggggaagttgaaggggaaagagagaaaagaactagctagctggagtctgagaactctagcatgtactagtactactcctacattcctccatcttcctttgtactatttttttttaaccataaaagcaagagcacaaagatggtgagagctccttgttgtgaaaagatgggtttgaagaagggtccttgggctcccgaggaagatcaaatcctcacatcttacattgacaaacatggtcatggcaattggcgtgccctcccaaagcaagcaggcttgttaaggtgtgggaaaagctgtagactccgctggattaactatttgaggcctgatattaaaagagggaatttcacaattgaagaagaagaaactatcattaagctgcatgacatgctggggaacaggtggtcagcaattgcagccaaattgccaggaagaactgacaatgagattaaaaatgtttggcacaccaatttgaagaagaggctgctgaaatcagaccagtccaagtccaaaccaagttccaaaagagccattaagccaaaaatcgaacgttctgattcaaattccagcatcataactcaatcagaacctgacaattttaatttcagagaaatggacacaataacatcatcagcatgcactacttctagtagtgatttttcatcggtcacggttggtgacagcaaaaatatcaagagtgaagacacagagtctacggaaacaatgcctgtgattgatgagagcttttggtcagaagctgcaattgatgatgaaacccccaccatgtcatcatctcagtctttgacaatctcaaatgagatgcgacttcaatacccttttgctaactatgaggaaactttccagcagggtcatcatgcttatgattcaaactttgatgatggcatggatttctggtatgacatatttaccaggaccaatgattcaatagaattgctagagttctgaagttttcatgtgacacgttgaacgagggcattattgaatttggcagatagagtagtttaaatggcatggtataacttgaatttgaccgttacaacaaaagggtacgataatttctggtgtggggacagcattatcaccagctgcaagatctagaggcataatccattgacaaagaaactagccagggtaatgcgaaaggctaatgaatgatatgtaatgtacacatgtaatcaagtagtgaaacactgactttctttctttttagtggaaaacagcaatgctctaacatttttgtattttacaaattagagtttaattaggctagagttacttgattgtaatatcaataaatgatgtattatgtgaattattcaaaaaaatttatgcccttgttgagcaaaattttctaaaaaagaaaaaaaaaaaaaaaaaagcggccagcggccactcgag

SEQ ID NO: 68471 - DNA, 147 bp, Glycine max
  unsure (1)..(147): unsure at all n locations
  Clone ID: PAT_MRT3847_32842C.1
gtgcgngctcggcttcgacatcttggtgaaccgatanctctgtttggngacanggagatggaganacgggacagattgcggatgattatggcgaactggctgcagaaggtcagcnggagaagctgatgnaagctcatgaggnagaag

SEQ ID NO: 68472 - DNA, 224 bp, Glycine max
  Clone ID: PAT_MRT3847_32843C.1
gttttggaacaacatcaatgcattaaaaatgattcattgttcaaccatgttgtcaataacactcatggtatatgtctttgatatggagaccttcgagattacgacttacaagcatcagttatacagcaaagttcatatacaacaacattattcatagacagtctaagtctcaatacactacatgcaatctattttgaagtatcaacgtgttcatatgtacccct

SEQ ID NO: 68473 - DNA, 2612 bp, Glycine max
  Clone ID: PAT_MRT3847_32844C.1
gcacctttccctctctaataagggttcctctttccttctctagcacaatttacaatctcaatggctgggaatttgctgtggtgttgttggagaaggtgacatctccggttcctctccaactccctccttgcctctcaaggcggtggagaatggacgtaatacctttaaaagatgtcgcagaaatgaacaatccgtcgccgcaagccttacggacgcgtcccaggctcagcctaagttgactgcgatgaagcaattaaaacaagccacggagaagatggtctcaaagttttagacaaagaactttcaagtgaatttggacggcctgggctggtttgaacattggaaccttctgggcgtgatgcctttatagcaaatgaagccactaagatgttgactgtcaaacaattgggtcattttggaaattgacttccactagatcttcacttgacctcctaaaggcaaaacaagcatatcaagcccgtttcaaaaagtcccttgaagaagacgttgcctatcatactaaaggggacatccgcaagcctattggttcctcttgtgagcacattccgttatgagggggatgaggtgaacatgacattggcaaaatctgaggctaaactgcttcaccagaagattgcagagaaggcctacaacgacgaggacctgatcaggattttgtcaacaaggagtaaagcacagttaacagcgacactaaatcagtacaacaatgaggttcgggaatgccataaacaaggatctgaaaactggatccaaaagatgaatatctgcaattattgagaggcagccattaagtgcttgacttaccctgagaaatattttgcaaaagtcttgaggctggctataaacaagctaggaactgatgaaggggcccattactagagtggtgacaaccagagctgaggttgatttgcagcgaattgctgaggaataccaaagaagaacattctctctgcacggcctggcaataggcagtgacacttctggagactatcagagcattctccttgcactggtttgtgggatatgttaagttttctttcttaatctggtgagttgtcatgggatcgctggttaggctatttcattgtcctcttatcatgaatgtgatattgctatggatttctggacagaggagttcagatgcgtcgattcactcgaccaagttggcgctggcaaggcatagttcggataatgtgagcgtggtggtggttgatttgaggagggatcaacgacaatcatcaaactacaacgacgttaattaattgattgattaacggagacgagaaaccaaaccaaactaaggaatcacaaatgaatgagatcgcccttttaaccataatgggcacaccctttgttttcaggacttcgttaaggacgggaagaccaaatcagagggaggaggggcgtgtggcttttgcttaatcaaatgttgattgtaatgtaatgggattttaggtttattaaaaaaaaaaaggaaattagaagaaaactgttaaagaggaaaagtaattgtaacattagaagatagattacaaaatggatatttgtaacttctaattttgggaaaagtagtttggaaacacttttctttttgtcgatgtatgaaccatcccttttgttttagtattgttttgaatgtcgaaaatttttcattttattaaagaaacttttgattttaaataactgcgggggaggctttgtttttttaaaaaaaaaaaaaaaaaaaaaaaaaaaaaaaaaaaaaaaaaaaaaaaaaaaaatgggaaccgaacacgcttgaaattgaaaaaaaaaaaaaaaaaaaaaaaaaaaaaaaaacctaccaaaaaatcatgacacttcacataaagacgttctagatacaataaaggcaactataattgtctacttctcaacaatatatcagcaaatatacttctcaacaattatctcataaaaagcataaaccagatttcatatttgctgatttttgaagattatcaatgttctgtaatagagcaagattaagtttcttatgtatagagaagcttacgtgttgcatttgttttagcatcttgatataggccttgtattagggagacttttgattttctctagatgtggggtatgccccgtttattattgtatcattttggatttaatataattttcattttttccaaaaaaaaagctaattattctgtatatcaacaatttcttattaaaaaaaatatctcaacaattttatttatccaatatatgactgtgtatatcaacataaataaacgtttgtacccattatatggtaaagcaaattattctgtgtcgggggttataccataaatatacaatgttgacaatccaacacactgatccttcccgtcaaaacacggaacctcagaggaatttatagaacgcacacagttaattgaacgaatttagataatcaaatttaaacgagggcaatgctgcttcctccacctgggggtctgcgtgcacctcttatattatctctgttttctgcctttccgtccgcaaatatgtcatttccagccatttctctaagtttagctctgctcgaaggtttttccgggtatcctgcaggcatgcaa

SEQ ID NO: 68474 - DNA, 185 bp, Glycine max
  Clone ID: PAT_MRT3847_32845C.1
gaccgctgttacacgacgactgattgattcgggcccatgtcgacatcagatggttacacccgactgatgacgacatcaagtgtctgaaactggatgacgacatgaagagatacttcatgtcagcgcagactcactgctgagagtcagcatgtgcttaaaggagcctttgcactaccaaattcttg

SEQ ID NO: 68475 - DNA, 236 bp, Glycine max
  unsure (1)..(236): unsure at all n locations
  Clone ID: PAT_MRT3847_32846C.1
aaaacaaaacaataatttggttataattgttccataantcnttttggggttgtttatatatcaancnacacntccttttnaancanaaaccnaaccntccacccctttntantttgaancnatcaacacncncaaccacnncnattatnatncaaatcaacatcacctccaccacctcaatcntcacnncttttctcttcnaatcattccccnaattttctacccttanccatttt

SEQ ID NO: 68476 - DNA, 373 bp, Glycine max
  unsure (1)..(373): unsure at all n locations
  Clone ID: PAT_MRT3847_32847C.1
gaaagaaggagtgaggggcaggttactgagtacctggttgcaacatttggtgattattttggtgatgtaaaaatgtacattgaagaacgatcttttaggagatttgttgaagcctgcctggaagaaacagtggttgtttatgttgatcgtnttttaacacaggttntgatgtgaataagggggggggggnctttatttatgtactaatattgcgcttattttatgctaatgctatgattattctgagcagtaatcctgggaccaccatgtgtaccggaaccatgagtgggggaggaaggaaccctggtttggacgggagtctgtgggttggtggtgggactgggggtgggtgtggtgggggggggggtgtggg

SEQ ID NO: 68477 - DNA, 178 bp, Glycine max
  unsure (1)..(178): unsure at all n locations
  Clone ID: PAT_MRT3847_32848C.1
ctcctaaagagctgtctataaacccattcttcgtaccgaaccaatatttaaaacttctgccgtctttggtttgcagatgtcagtgatgataagctaatgcattcactattctcaaaagggaactttttttttttgcctttctttcccatgtttcgtggctcttntgagatgttttttt

SEQ ID NO: 68478 - DNA, 2627 bp, Glycine max
  Clone ID: PAT_MRT3847_32849C.1
ccacgcgtccgcctttctttgactcagagagatctaagagcgcaaaaaacaaaaaccagctcgtgcttgtactttgcgcgatgaatctcctttgaagaaaacagaaacttcaaaaagcacattattttctcttttgaacacactctgttttttttgttgtttccatgaaggaaggtgaaaaggtattggatccgcagctatggcacgcgtgtgcaggtggcatggttcagatgccgcaaatgaactccaaagtcttctacttcccacagggtcacgccgaacacgcccacaccaacattcatctgaggcttccaccattcattttatgcaacgttgaagcagttaagttcatggcgaacccagaaaccgacgaagtgttcgcgaagctgagtttgcttcctctcagaaactcggaactcggtgctgactcggacggtgctggtggtgatgacgtggcagaaccttcttgttgtgaaaagcctgcgtctttcgctaagactctgactcagagcgacgccaacaatggtggggggttttcggttccgcggtactgcgcggagacaattttcccgcgtctggactacacggcggagccgccggtgcagacggtggtggcgaaagacgtgcacggcgagacctggaggttccggcacatctaccgagggacgccacgtaggcacttgctgaccacagggtggagcagtttcgtgaaccagaagaaactcgtggctggggattccgttgtgtttctgagggctgagaatggtgatttgtgtgttgggattcggagggcaaaaaagggaattagcgagggttcaggttcaggttcatcatctgtgtggagttcagcttctgggtctggaaatggaaattgtgggattgggccttatgggcctttttcttttttcttgaaagaagaaaacaaaatgttaaggaatggttgtggtgggaatttgagtggaagggtaaaagtgagggctgaggatgttgttgaagctgtgactcttgctgctagtaacaagccttttgaggttgtgtattacccaagagccagtactcctgagttttgtgttaaggcttcttctgtgggggctgctatgaggattcagtggtgttctgggatgaggttcaagatggcctttgagactgaggatgcttcaaggataagttggttcatgggaaccattgcttctgttcaggttgttgaccccatctgctggcctaattccccttggaggcttcttcaggttacttgggatgagccagatttactacaaaatgtgaagcgtgttagcccgtggcttgttgagttggtatctaacattccactcattaatttcacacccttctctccaccaagaaagaagctgcggccacaacacccagacttcccccttgatgttcaatttccaataccaatgttttcaggcaaccagcttgggcctaacagccccttgtgtggtttttcggataatgctcctgcagggatacagggagccaggcatgctcaatttggaaaatctctatcagatctccaccttaacaataaactgcagttggggatgcttccaactaatatccatcaacttggagtgtataatgagatttcaaatggtaacatgatgaccaaccatgataagagcaaagaaagtttatcatgctttctgaccatggggaaatctaccaagagtttggagaaatctgatgatgttaagaaacaccagtttttgctttttggtcaaccaattctcactgagcaacaaatttctagctgttctggagatgtgttgtctcaccgaaaaagatcggtaagtgatgataaggacaaagcgaagtgccttatggatgactcgcaatctacactctcacagcagttttcaccaggaaaagcatcttctgctgagttctcttggcaacttggcttggatactggtcattgcaaagttttcttggagtcggaagatgtaggaaggaccctagacctatcgctgtttggttcttatgaagatctgtataggagacttgccatcatgtttgggattgaaaggtctgagattttgaaccatgtgctctaccatgatgcagctggtgctgctaagaaaaccggagaagaacccttcagtgacttcatgaagacagcaaaaagattgacaattctgacggattcaagcagcaaaaacattaaaagggcctttattacaggaactcgtaatggtgaacatggactagatgcatcaaacaaaacaggccctctgagcatatttgcttaaaatatgctatagatagcatctgagacattgttgagatctgagtagttgaaggacagtcctaactctatttacctctgcaaagactgaacatgagctgaatcttttatcatggttgttactattgtgtactaaaaacaatatctatcaaggttggcttagttgtttattagtgtacaaataatgatgccattatcatggtcaactgttattgtaatattaaccaagatttggaccccatttggcaacttgcttcttttcttttccttatttttttgttcattgtgctctcacactcacatgctgctgcctacgtgtctccacgtcaccagtgctcaataaattgtgcaaagttggtat

SEQ ID NO: 68479 - DNA, 526 bp, Glycine max
  Clone ID: PAT_MRT3847_3284C.1
tgcgtccagtttttcctatattgagtcggaggggaagggaagaaaaaatggtcataaatgttttcagaggaaaaagccatcggtttacagggcaaaacaacgcccaagaggaaagctaatttgtaaaaactgggaaaaaaaatgaaaaagctatcggacatcccgggcccgggggggactgccgggtttcaacccggaaaaccggaccggcccccgggaggaaaccaattttccaaaaaggggggagaggaaaaacgcggataaaacacgagaaaagttgttccctggggaaaagagactgccctcaacaaattgcaaaaaaaaagcagccggaagacaaaggggaaaaaccgggggcccctaagggggggccaaacccaaaaaaatcgggttgagcgaactgcccgctttcaaataaaaaaacctgtctgcccaatcgtaataaaaaaatacccaaacccccggaaaagggggcatgcctaacgggccccaggggggcatttttttcaacgccataagagggcaa

SEQ ID NO: 68480 - DNA, 359 bp, Glycine max
  Clone ID: PAT_MRT3847_32850C.1
cccacgcgtcctaataggttttgtttaagtttttgaaggcaaaggaggtttcagaagcaatgggtgattcgaagaggaggactgtcattataaatataaattggttttggaagaaagtgaaccaacaaaagaacaggtatcacttttatgaacacaactatactttcaactttaactccggggctcaaagcgaacatgaaagcatgccttacaggttttcatctacgtttgctgctcctggtctacgccagaatgaatcatgttacatattcatcactagtatacatttccactttgataataccttttaacatgtatattgtttcccataaattgttacattgattgtaattttttta

SEQ ID NO: 68481 - DNA, 551 bp, Glycine max
  Clone ID: PAT_MRT3847_32851C.1
ataatgacatttcttcttgaacatggatcataaatcaggtgaccaacaagaaagggatgcaagaaaaactttgggctaaaccattaagatgaccataccataccaataaaatatcttgtatcataaagtaaaagtagtcacatttttttgcatagaatcaccacatttcgtttcttcattatccttttattatcacataacctttcctccaaaatctgttttttgcagggcctttattacaggaactcgtaatggtgaacatggactagatccatcaaacaaaacaggccctctgagcatatttgcttaaaatatgctatagatagcatctgagacattgttgagatctgagtagttgaaggacagtcttaactctatttacctctgcaaagactgaacatgaactgaatcttttatcatggttgttacaattgtttactaaaaacaagtattttatcaaggttggcattgttggttattagtgtacaaataataatgatgctattatcatgatcaactaatattgtaatattaaccaagatttggacccc

SEQ ID NO: 68482 - DNA, 280 bp, Glycine max
  Clone ID: PAT_MRT3847_32852C.1
gaacacagctggcaaactaaactctttttcaaagttgtatagactctagccggcgttgaaaggaccaaacattgtcgtccaaatgtcactttacacatttggaaaagcaagtcaatttttcaccgaaatggatacacaaattctggttatgcactcattacaacaaattgtgtaaaccaacaatattaagactgaacctctgaaacacccctcttttacatcacattttttcaagttaaccgcctgattaccccaaacacaatttttaaactgcacaaac

SEQ ID NO: 68483 - DNA, 451 bp, Glycine max
  Clone ID: PAT_MRT3847_32853C.1
tctttcttaacttgcttataaaaactttttcatcctcattatttaaaatcgggccatcttctaccttgcattctcccctataaactataatacctctatcaatctcctcatttactccatttatttcttttcttccttacccacctttactttaatttaacttaagaatcaaataagatttattaatttatcacataatccaccaatgaaatcactgagcctttaaagtaatttatgaataaacatcattaaggcaaatggtcattaaatatcaatgactttgcaaattcaaaacaaggtattataggacaataatcgtcaattttgcataaaattaattcatttccaataatgattgcctaaagtgtaagccttggtttaacaagaaagatgagcttaatgctcctgtatgttttgaatcaaacttaaccgaatttctcccataattaca

SEQ ID NO: 68484 - DNA, 153 bp, Glycine max
  Clone ID: PAT_MRT3847_32854C.1
gtggacttaaagatcaacgcacaagatccccgttgcagacgatttgtaacgctaagaataccaacatttgtcttctggtgaaattatgtaaagctccctaaatgtaatttaaaggttattgaaaggtacagccgatctggggatggaaaacca

SEQ ID NO: 68485 - DNA, 305 bp, Glycine max
  unsure (1)..(305): unsure at all n locations
  Clone ID: PAT_MRT3847_32855C.1
cccacgcgtccgcccacgcgtnncggccacgcgtccgccacgcgtccagatgactcgctcagagagaagaagaacgaaccaattttttagtttaaacaccacaaaacatcggcatcattcttattattttttccggaacactttgaaactttcatggtgggcctttaaaaaccttttccgcgcccccggggaattttccgggtcctttttggcccaaaaaaaaaaaaaccccccttggtgttttataaaaaaggggggggccttgcctttgccttgggggggggttttttttaaaaagggggggg

SEQ ID NO: 68486 - DNA, 235 bp, Glycine max
  Clone ID: PAT_MRT3847_32856C.1
aacagaacggatctctctctctgtcaaatccaatcatttcctgagagacaaaaacaaagtcaagatcgcgttcagatacactcacacacaaacaaaaccaccaatccccaatctctaacttttcccgagaaaattttagtttccattttcatgtctccctcagattcccggaaaatatattcacaacattaatttcgcacgtcggcctctgccaactatcaagctccggcttcct

SEQ ID NO: 68487 - DNA, 907 bp, Glycine max
  unsure (1)..(907): unsure at all n locations
  Clone ID: PAT_MRT3847_32857C.1
gaagcctttgatatataccgatcatgtttgagaatcacaagaatatggtgcaactcaaggtcgtagcctcaaccttggtggtgttgtggtcatggtggagctttgatggtgcaattggagaccctcaactctttttactcaaatgggagtgcagcgtagtcgcagtacacgacttgctcaacttcaaccaaaatctaaacgcacgtttggtcgaccttagagcacaagtgagcaaccaaagaaaacactttgccacggctcaatcaaccagcggagcagacccagtccatgccatgtttcaatgcaggaactacctttccacactgactgcaccacctgctttgacgcggctgctgccaatatccgcaactgctccaccggaaatactgctcatcttgtttatgacggctgtatcctcaggtacttgaacagtgtgttcttggacaacagtatcatttttagcagccacacattttgtggaaatcagactgcagatgaaagcactgcttttggaacagttggactacaagtgctgatggatctacaaatagcaacacccaaaattagtggctactttgcagctaccaagacacatgtagcaggcggtgcaatctatgcttttgcacaatgtgctgaaactctcacacccgacacttgtttgaattgtttgtcaaatcaactgagcaacatacaagattgtcttcccaatacaaatggtagggcaattgacccttctggatgctttatgagatactcggagacaccctactttgctgataaccaaaccactgatatcagtctcttcttaaaacaaggaccaagaggttcaatgaggaagtgggtcactattggtggtggtcttgcaggtgcactccttgnntgngatccttctatcattatttttttg

SEQ ID NO: 68488 - DNA, 495 bp, Glycine max
  Clone ID: PAT_MRT3847_32858C.1
ggcccatggaaaaggaccaaaaaggggaaggggacaaaaaaatcccaaaccggccgggggaaaagggcggggttttttgggcaaaaaaaaatgttttttttaaaacaaaaccctatttttaaaaaaaaaaaaaaattcattctaaaaccgggaaaatctttaggaaatcaaaattatattcaaaaaccaccaaaaaaggttgggttttgggccaaccccaactttaggagcagtttttttaaagggaagctttcgtttatttggaaagggggggccaaattcaaaagcttttaccgggggctccacattaggccaacaaggggggggaaaagcagccccaaacccggcccttttaaagggccgagcaaaacccctttcaccaaaaagaaaaagaaaggggccggcgggaggaaccagggcccccaaaacggggttaaaacaaaaaaaaggcccggggggcaaattttgggcaacgggtttgcccccctggaaaag

SEQ ID NO: 68489 - DNA, 343 bp, Glycine max
  unsure (1)..(343): unsure at all n locations
  Clone ID: PAT_MRT3847_32859C.1
ttttccgcttcttttcaagccacancacaacaaatagaattagagctataacataaaactgccctcacaacccatggacaacaccagggacttcaggaaagtcactgaccagttgagggtcgactctgggccggccactcggtcgctcaatgagtatctcattgggagcaacatccacagctacaagaggccggatcagaggacgcaccttgatgggaagggcagtgatctgaacaacgactgcaactgacgcaacgcctcagatgatgctctcaatgatgagtggaagaacaccgattacaacggccccctctactgtatgcctcactacaacaacaacaac

SEQ ID NO: 68490 - DNA, 575 bp, Glycine max
  Clone ID: PAT_MRT3847_3285C.1
agaagagccaaaatgaagcaaataaagttgaaaatataatagaccttccaatgaacattgtgagaaagtggaacataagcgtggtcagtcaatgccaccaaagacaatctcgccccatatctttggcaatggatcttgatttagccaaaaagaaaacttttagacccatgggactttgctctatcatattatattagtattcacaaaactaatcactacatttgagacatcatattatagccactaaaagaaatgtcttcataccaagcttcatcaagcagagcaatgattccacctggtttctgaaaaataagacattttttagatatcaatgttgtgccattctgaatgtagatttagaggatataatcttagaaaattctgaaacaaatattccataaatacttcaaaacagaattcctgaatatagcaaaatcatgttgtgagaactgagaagctatcatcacaaatatcttgactatagaatgccttatggatgatgatcctggaatctttccaataccatgactgacaaatgataacctccttgtgtatatatgatgctaacaaacaaa

SEQ ID NO: 68491 - DNA, 494 bp, Glycine max
  Clone ID: PAT_MRT3847_32860C.1
aaaaagtgactaatagtcataaaattattattaaaatgtttaatagcgattaacttcatctcaaaaaatgaagtgaaaaaaaaaactttatttatctaaaaaatggttaatattaaccacgtctatagttgtatacaatcctgtttatcggatagacgctggttatacaaatccagcaaaaccctatcatattactcattcaactttaacttcaagcccatattataatacccttctctattatttttttctttcctgcattatgcatggctattacatcatgaaagaccatagcagaaagaaaaaagtcccagatattccatctcccgttcatgtcatgtggcattcttttcaaagggacagaaaatctaggaatcaataactaattaaggtacgtagtctcagcaatcatacaatattcaagttgaagacttcatgtctgcttcactagcataagaagtaaaaaaattctcttgatcatgatccctctgctt

SEQ ID NO: 68492 - DNA, 325 bp, Glycine max
  Clone ID: PAT_MRT3847_32861C.1
tctctgtgtatttgtctacctctccctataagatgcagatcttcgtcaagaccctcaccggcatgaccatcacccttgaggtggaaagctcttacaccatcgacaacgtcaaggccatgatccaggacatggaatgaattcctccggaccagcaacgtctcattttcgccggaaagcaacttgaggaccgccgttcccttgctgactacaacatccagatggagagtactcttcaccatgtctctcgtcttcgcggtggcatgcatatctttgtttagacacttaccttgctgaccattatcctattggttgttagctcctactc

SEQ ID NO: 68493 - DNA, 593 bp, Glycine max
  Clone ID: PAT_MRT3847_32862C.1
acgacagaagggcaattttccaatttctgcaggaaatatctcatgcctgtgggttggccagaaatgctgataaaggtggtagtcccacaaatgatttgctcaatatcagtcaaggtcccgagattaaagacaagattgtacttgatggagatgcatcatgcctcctactggatgagtatttactgcaaacacaagtcactgctggtacagttcagggggctatcttggatgatgtgaccaccccaagctctcctgatggaatttcatgctataacgatgctttgctatcctggatattttcatgttcacctattggggatcagttgacatcatggctgcggaccagagaagataaactaaataaaggaaaggaaattgtccagttgcttgagaaggagttttatcatctacagggcctatgtgagaagaagggtgagcgaatagcttatgaggaagctctgcaaacagtggaggatctttgtcttgaagaagggaagaagagggaaactgttggtgaatttgtccagcgaagctatgaatctgtcttaagaaagcgaacagaagagctcattgagagtgacaatgatatgatg

SEQ ID NO: 68494 - DNA, 605 bp, Glycine max
  Clone ID: PAT_MRT3847_32863C.1
cctcggaattcggctcgagcacaaaataatcactgaagaatcacaaaacaactctggaagattgcaggtccaattgttattgctaatgagaacttgaatccaaatgatactaggcggaagacagttaattacttgcaaaaagctgccgtggcatatggtcctggaaagccctttgtggttgaacgtgtccttgtccatcctcctcaaaaaatggagtttcgaatcaaaatcctcttcacttcaatcagtcacaccgatctcagttcttggcaaggcgagaatgaggctcatcgtgcttatcctcggattttcggccatgaagcttccgggattgtggagagtgtgggtgaaggtgtgagtgaaatgaaagaaggggacttggtcgtgccaattttcaatgggggatgtcgggattgcaaatattgcatgtgcgaaaagaccaacatgagtcagagatttggggtgaatcctatgaagaaggtgatggccagtgatggtaccacaaaagttttctacaatggatggaaaacccatctttcattttttgacactttaattttcgcagagtacacagtggtggattcagcatgtgtcgtaaaatcaca

SEQ ID NO: 68495 - DNA, 1138 bp, Glycine max
  Clone ID: PAT_MRT3847_32864C.1
cccacgcgccggtctggttgcaacctttacccctctctttgaattaccttcacttcacagtcccaccaacctctccgaacaccaaccctctctctttgcctcttggcgcaattcgatcgaagctatctacccttccatggcggcaggactctccaccgccgcaatcttaaagccctacaatctcgtccaacccccaatccctctttctaaaccaaccacatcactcttcttcaaccccttaagatgtttccatcacagtacaatccttcgagttcgacccagaagaagaatgagcggcttcaccgtttgcgtcctcacggaggattccaaagagatcaaaacggtcgaacaagaacaagaacaagtgattcctcaagccgtgtcagcaggtgtggcagagaagttggcgagaaagaagtcccagaggttcacttatctcgttgcggctgtcatgtctagctttggcatcacctctatggcagtctttgccgtttattatagattctcctggcaaatggagggtggagatgttccttggtctgaaatgctaggcacattttccctctccgtcggtgctgctgtggctatggaattttgggcaagatgggctcatagagctctttggcatgcttccttgtggcacatgcacgagtcacaccatcgaccaagagagggaccgttcgagctcaacgacgttttcgcgataattaacgctgtccctgcgatcgctcttctctcatacggtattttccacaagggtctggtccctgggctctgttttggtgcaggccttggaatcacggtatttgggatggcctacatgtttgtccacgatggattagttcataagagattccctgtgggtcccattgccaacgtgccctacttcagaagagttgctgctgctcaccaactccaccattcggataaattcaacggggcgccatatggcctctttttgggaccaaaggaagttgaagaagtgggagggctagaagagctagagaaagagataagtaggagaatcaggtccggttcatgaccatgccaagctagagttgtttgaaagaattgactgtagaagaaagggaaacaatacaattaatgaatgaaatgatttgcatctttttttgctttc

SEQ ID NO: 68496 - DNA, 430 bp, Glycine max
  Clone ID: PAT_MRT3847_32865C.1
accggtccaagaattcccgggccgacccacgcgtcagagacgacataaggggagctctcacacttgcgattggaggaactcgagatcagcagaccctaacacacactctctgtcgctcttcgaatctgaattttttttccatcttctccacgatcattgcgattgagattgagagtaaccctaacacacaacgaagtacatacacacacactcactcactctgttgcgatttctactttggattcaatgggtatgaatggtgcctctcgcaatcattcacgcaagccaggcttctcttcgccatggagccaaattgtctctgcagcagcacctcactcctcctcaacgccgtctgaagactctgacaacgtgtgcgggagcaatgcagacaccggtaataaggctgcgtgtattaaaccctcgactggcg

SEQ ID NO: 68497 - DNA, 349 bp, Glycine max
  unsure (1)..(349): unsure at all n locations
  Clone ID: PAT_MRT3847_32866C.1
cagacttancaacagcacaaagcgggtgactgtcntgttcaagctaccatctctctctctcttgcgnagtgnctncttgncagaagtaanangggccgannaaactttcctacnncanntntgantcnagtgnccnaggggcaccctgacaagctctnctgaccagatctccgatgctgtgctcgatgcatgcttggancaggaccctgacagcaaggttgcctgtgaaacctgcancaagaccaacatggtgatggttgcgganagatcacaaccaangccaacgtggactatgagaagattgtgcgtgacacatgcagganattggtntgtctctgatgatgttggc

SEQ ID NO: 68498 - DNA, 213 bp, Glycine max
  unsure (1)..(213): unsure at all n locations
  Clone ID: PAT_MRT3847_32867C.1
gacgtcgcatgcaccgcgtacngtaagncttgggatncctnctagaaacggcacgccctttttttttttttttttttgctattacaaaacgaagaaactattatgtggaattcaattcaaattgaagtgcacatgattaataagattcaaccaaactangagaaggccaccacgggagcctaagggacaacatagacatagaaaatttttggt

SEQ ID NO: 68499 - DNA, 275 bp, Glycine max
  Clone ID: PAT_MRT3847_32868C.1
ccggaatacccggggggattccaccagcgcgttgctgatacgcgcccgcaggagcatcggaggtggccgacacataaccaagcgtcggctagtccaaccagagggaagagcctacacaataaaatcacgtggatcaggattcagaagacacagggagcgtagttacagaatggtgaaagagaacggaatgggtaacaagcttaatgcatgtcccagctgcacatggggacacattgctcgagaacaatgtgaaatataatacttgatccgaggac

SEQ ID NO: 68500 - DNA, 302 bp, Glycine max
  Clone ID: PAT_MRT3847_32869C.1
aaatctctctcctttttctttccctctttttttctcagactcataacaaccaaaaggacgaaggtattaagtatgctgtatgccacatagaaagagagattgctcaaacatttcattgattttcgggtaattatccatgtgatctgtgcacaatcgtctgctacttcatataccttttttctttttccccaccttttttcctcctttctttgttcaacaccattcccataggagcaacccttttaaaagttattggatttggagggttcaaaatggcattagttctttgaatataatgcttt

SEQ ID NO: 68501 - DNA, 325 bp, Glycine max
  Clone ID: PAT_MRT3847_3286C.1
cgaagaagggcaacacaaaggggggcataaagaaagaggcccgcgggaacccaaacaacggggagacaaaaaccaaaagggcacgagaacaacaagcccagaagcaccgacaagcggaacaaagagagaaccgagaaagaagccagacgaaagaacaacaagccaaaaaaggaaggccgggaagcaaagggaagcccaaggacccaaagcaaaaaaacaacgacaacggaaaacgccaaggggaaggcaaaaaccacgaaacgcaaacgaacagaaagcgaagcaaagggagacaccaaggaaatcaagaacaggacccacggga

SEQ ID NO: 68502 - DNA, 484 bp, Glycine max
  Clone ID: PAT_MRT3847_32870C.1
ctggcataggctcgcgcgcgcgatggcggcggccggcttggattttggctgcttcccccaggtgcgaggccgcagggaggcagtgttctatatacaacaggagcggagcccggggtggagaaggtagagggtgggagggaggcacggaaatgaggcagcagcgtcactgcagaaagaggtgatctgcagcgctccttcgtcggtgtggatgatggcgtcgaggcagccgccgtggcgtgcacccaaagcatggtggggcgagtgggaagcgtgtgcatggcgccttgcgggcaaggagagcatacgtgcagcgcggcgggtcaggctgaggtggcggaagcgcgcgcaggatgccccgcggttggcgacggagtgacgatgtcatgtcgtggtcaaagagtttgcaagacggctgctaaagcgtgctggtgcggcgggtgaagggaccagatgggaataggtgacgggaacaacaggcgccggt

SEQ ID NO: 68503 - DNA, 295 bp, Glycine max
  Clone ID: PAT_MRT3847_32871C.1
tttaaacttcttactgatgggaagttgtatgagggtaagcatattcctgtatctaacattagcgcaggggaaaatcatgtagttcaaatgcccttaatgggacaggaggaaacactgatttctagtgcaagtgatttcagaactgcaacggcgagtaaaaataccaggcctcatgctactgcattgcatgtgggagctatcgaaattatgcattgatagatacccaagacccgactgcaacataaagcggagcaatgcttctggttgatacttatcataccaatcctgaaaatgc

SEQ ID NO: 68504 - DNA, 469 bp, Glycine max
  Clone ID: PAT_MRT3847_32872C.1
cttccccattaactctcgtgatgatgcatagaatacttgcttggctatatatatgcacataaagttcgttcaataactactatatagttcctctatgcatgtagctacactatcatagagaatcatggaagaggaatctaagtcaaagtgggaaggtaaagccatggttgaggtagtaggcacaggcgcagaagtagcatgggctgtgttagaggatttctgcaacatacacaagtggatctccttagacacatgctaccaagtagatgggattctagggcaacctggcctaatccgttactgtgcttccaccgttgaagaaggtgttggtgctgagaagacaacaacaatcaagtgggccaaagagaagatactcgcgattgatcctgtccaacgttggttgacctatgaagttgttgaaaacaacatgggatttaagtcctatgtggccactctcaaagtgctgcca

SEQ ID NO: 68505 - DNA, 205 bp, Glycine max
  Clone ID: PAT_MRT3847_32873C.1
tcgctttaatctgctacatctagagctcactgatatctctcctaacaattaaccggtcacatgtgttgcaaaaagcaattcaatctatgaatcaacaaaatagactgaaggaaaaatcagttgtcaaattgcaattcaatcaaatgctgatatagcacataatatcagctaccatttgctcttaaaaaaaaaaaaaaaaataaac

SEQ ID NO: 68506 - DNA, 320 bp, Glycine max
  Clone ID: PAT_MRT3847_32874C.1
aaaaaacccacttttttggcattttttacaacatttttaaggggccaaagcccttcctccgccccagtttcttaaatttggtttggccctgtttggcccccttgaaatttagggggccctaaaaccgggtaaaagggcctaaaaactttttttttttaaaggacaggggctcccccgaattagggaagggttaaatcgaaaagaaaaaccctggttccccctttcttgtttcttcttgctaacccctaagttttgggaaagaacccccccttggtggggaagggggaaaaaaacccccattcctctcttccaaacccaaa

SEQ ID NO: 68507 - DNA, 879 bp, Glycine max
  Clone ID: PAT_MRT3847_32875C.1
caacgatgagttgcctgacatgaaccttggaaatggctattcaacctatgttgatctccatgcaactgtggaccaaggagctgtgaaagtttggtcagaagtccaagagggcaagtttgccttggacaagggttggaatattgattctatatctgtgttgggattagaaggaagtggagcagtgtcttcacttgagcctctaatgggtggctcgaatgtgaatgttactacatctgcacatgagcacttgaacagtgagggagaaggagaaaagaagactgtgatggttgttttgaagggcttgagcatccctgtgggtaaaaactttgccatgacatggaaaatggggtgataggttgagtggtctcaaatctgatttatcattttgaaactttgttatgttcttttttctttgccacaattcttgtaggcgttgtgagggaaaaaaaatgtgctagaattatgctcgtccttttccaatttaacaagccaaggcaacaatggcgtatgggttgaaatcttaatgttatgttagttttttttttgggggggggggcacgttaagttgaaacttatcgtaattcaagtgatttagtcttatgcttgccatagaacctaagaaggggaatgtcagggccataggttttggttttctgcttaacttgaaggatccctataagaccaccgtcaggggtctcttcaatggagacaagacggtagccttggccaattctggtggcacctgtggaagacgaagaagaagagctagccccaactgcacatagaagcagagctaggagaagagaacagagaggtagagcagcaaaacggttggaagaaaccatatctcactatggagtaaagctgctgctgctactc

SEQ ID NO: 68508 - DNA, 2573 bp, Glycine max
  Clone ID: PAT_MRT3847_32876C.1
atcagcattgagattaatggctgaaatgtcagtggtgtacaaggtgtaaggatcactagggtacaacttgatcccatgcgtctgaccctggaattgctgttaacaccagtatggtgtatatcaaaggggtgtagctaatgatgtttttatcaagtatgttggtgaacccttcttggctcaagtttggccgcagtgaactttcctgattttctcaatccaaagacggtttcatggtgggttgatgagattcaccgcatgaacttgttcctgttgatggcctgtggattgacatgaatgaagtttcaaatttctgttctggaaagtgcaaaattcccgagggacagtgcccgactggaacaggacctggatggatatgctgcttggattgcaagaacatcaccaaaacacggtgggatgatcctccatacaaaattaatgcctcaggaataaaagctcctattggcttcaaaacaatagccactagtgcgtaccactataatggcgttttggagtatgatgctcacagtctttatggcttctctcaaaccattgcaactcacaagggccttcaagggcttcaaggcaaaagaccctttattttgtcccgctccacttatgtcggttcaggcaaatatgccgcacattggactggtgacaatcagggcacatgggagaacttgaggtactcaatatccacaatgctcaattttggcatatttggggtgccaatggtgggttcagatatatgtggcttctatccacagcccactgaagagctatgcaatagatggattgaagtaggggctttctaccccttttcaagggaccatgcaaactactactcccctagacaggagctttaccaatggcagtcagtagccgagtctgcgagaaatgctttgggtataaggtataagctactcccattcctttacaccctgaactatgaagctcatgtcagtggagccccaattgccagacctcttttcttctcatttccaacttacaccgaatgctatggccttagcacccagttcttgctaggaggcagtctcatggtttctccagtgcttgagcagggaaaaacacaagtgaaatcactctttcctcctggtagctggtacagtttgcttgattggacacacaccattacgtcaaaggatggagtctatgtcaccctcgacgctcctcttcatgtcgtcaatgtgcatttgtatcagaatgccattcttcctatgcagcagggtggaatggtctctaaggaggctagaatgacacccttcaccctcatcgtaaccttcccatcgggcgccacccaaggagaggctaaggggaacattttcgttgacgatgatgagttgccagacatgaaccttggaaatggctattcaacctatgttgatctccatgcaactgtggaccaaggagctgtgaaagtttggtcagaagtccaagagggcaagtttgccttggataagggttggattattgattctatatctgtgttgggattagaaggaagtggagcagtgtcttcactcgagatagatggaaagcctctaatgggtggtggctcaaatgtgaatgttactacatcagcacatgagcacttgaacaatgagggagaaggagaaaagaagactgtgatggttgctttgaggggcttgaacatcgttgtgggtaaaaactttgccatgacatggaaaatggggtgataggttgtgtggtctcatcttatttttatcatcttgtaactttgtgttctttttctttgctacaattcttgtaggtgtttgtgagggagaagagatgagctagaattatgctcgtccttttccaatttaacaagccgatgcaacactggcttatgtgttgaaatcttcaatgttatgttagttttttttttgggtacgtaaagttgaaacttatcgttatccaagttattttgaagattagccaattttgatggcattgtttgaatcctaaaagcccctgcatatcagaagttgagaggtagagaagcaaaacggttaactttctgtagatgcccttaaaaacaagggaactaaaagggtcagaatcaccagaagtggtgtcaaaaagggtctcaccattggacttccttttcactgcaaagctaaaagggtctgaagtgtagctgaacagaaactcagaaccagaatactgagagactgtaatagggttcttcctggacttcccaatgctttgactcaaaggtggtggttgttcccttggcaaaaggttatagggaacctcccacctttgcttttgtgcatcggttatgtgtactctcaaacggttctctgcctcgtgcttgacataaaacctaagaaggggaatatcagggccataggttttggttttctgcttaacctgaaggatccctataaggccaccgtcaggggtctcttcaatggagacaagacggtagccttggccaattttggtggcatttttggaagaagagagtagccccaactgcacatagaagcatagcaaggagaagacaagagagagatagagcagcaaaacagtggggagcggacgcgtgg

SEQ ID NO: 68509 - DNA, 617 bp, Glycine max
  unsure (1)..(617): unsure at all n locations
  Clone ID: PAT_MRT3847_32877C.1
cttggttcacgttgctgttcaaatctggaaaggaaagataatccgaacttgtttctagggtttccgatggagatgagattgcacaaacacaatactaagtcaaacaaatttctataatcccatttcatttcccttgacaacaatgccaactttgaattcagattccggataacagaacagaacaagtttgaatttctgtttttttttagaactcgagaacctcagaaagaaacccaatcggaagcgatggagaggtctagatctaagaggaactactactatgaccaagactatgattccgagaccttagcgaggacaaggccgcgctataaccaccactacaccaccgccgggaaccagcgccaccgcggaggcggcgccgcccgccacgcgaagactcagcaggactcaccgttgacggtcaccaccagctaccgcattctctgccacgacctgaaagccggcggcgtcattggcaagtccggcagcatcataaagtctatacggcagcacaccggcgcgtggatcaacgtgcacgagctcatgccgggggacgaggagcggatcatcgagatttccgacacgcgccgncgcgatcccgaggggagaatgccgtc

SEQ ID NO: 68510 - DNA, 2533 bp, Glycine max
  Clone ID: PAT_MRT3847_32878C.1
ttcacggtccggtaattcccggagtcgacccaggcgtcgataatccgaactcctttctagggtttagggtggcgatgagagttgagattgcacaaacacaaactgaatagtactcaataaaacaaatttctataatcccacttcattgcccttgacaacaatgcgattttgttgacacattcggattcttcacgctgcgtgcgtgcggatagataataagcgcactcaaacagaacaagtttgaatttctacttttcgaactcaataaccgaaaataaaaaacccaatcggaagcgatggagaggtctagatctaagaggaactactactatgaccaagattatgattctgagaccttggcaaggacaagaccgcgctataaccaccactacagcaccggcgggaaccaccgccaccgcggcggcggcgccgcccgccatgcaaagacccaacaggactcgccgttgacggtcaccactagctaccgcattctatgccacgacctgaaggccggtggcgtcattggcaagtccggcagcatcataaagtccatacggcagcacaccggctcgtggatcatagtgcagagcatcatgccgggggacgaggagcggatcatcgagatttccgacacgcgccgccgcgacccggaggggagaatgccgtccttctcgccggcgcaggaggcgctgctgctgatccacgagcggattctcgagagcgacgctgccttcggggtggcggaggaggacgaggagtacggcggaaggggcggcggaagggaccgcatcgcgacgaggctggtggtgtcgcggatgcatgtggggtgtttgttggggaaaggagggaagattattgaacaaatgaggatggaaacaaagacgcaaattaggatactccctagagatcacaaccttcctcgttgtgtttccatgtctgaagaaattgttcaggttgtaggcgatgtaaatgctgtaaagaatgctctagtaattatttcatcacggttgagggagagtcagcaccgtgaccgcagtcatttccatggacgtgtacattcaccagagcgttttttctctcctgacgatgattatgttcctcatgtgactagtggatctcgcagatcttctgttgatggggcctcttttggatcacgaggatctaacacaaatagtagaaataataaccacccctcattgaattatgcaatggagcctggggctgctcctgttgttgatgatgcgcagggcttttatggggaggaacttgttttccgtatactctgtccaattgagaaagttgatcgtattattggggaatcagaaggaattgtagagttccttcagaatgaagttggcgtagatgttaaggtcactgatcctgttggtggttcagatgaacagataattatcattacttcagaggagggtcctgacgatgagctgttcccagctcaggaagctttgttacatgtacaaactcgcattgttgatcttgttctagataaggacaatactataaccaccaggcttgttgtcccatctagcgaaatcgaatgcttagatggaaaagatgtttctctatcggaaataaggaggttgactggtgctaatattcaaattttgcctagagacgagctacctctctgtgttgcaaaaactgatgaactggtacagatcgtaggagagattaaagcagcccgagatgctgttgttgaggtgacttcaagattaaggagttacttgtacagggatttctttcaaagggacacagtaccactaccagctcccttacctggtgcggcggcatcttcttccaataatatagttccggttactgaaactcccacaacctatcaaaatctgcaaactgttgcagcagcccttccatcaaaggaaactggaggatctagcactgagacgggaaagcagaaagaaagtgaccgccgggatgatttgcttagtggtttaaataggattgctgtgcctcttgttacgaggagtacacttgaagttgttttaccagagtacgcagtaccaaagcttgtagcaaaatccaaaagcaagcttgcccaaataagtgagttatcaggagccaatgtaacccttgtagaggatagaccagacgtgacacagaagattattcagatatctggtactccagagcaggcagagagagcccagagcttgctccaaggatttattttgagcacacaagaagacggcccttaaactacctgaaattccgaaagctgggtagtgtcgttgatttagtgcctgaggcattttgttccatgcactgattggttttccatatgtttacaagattgttgtggccaagggttgaaattttcaatgtgagagaagcatctcactgtatatgttgtacaagagagcttctttttagttttgttagtctttttagctagtgcatgggagcaattgttagctaccccctggatgttgttttccttgtttatctcatctaatattaatttgagtaagtaatcaaaaaggttttactcaaagcctgc

SEQ ID NO: 68511 - DNA, 328 bp, Glycine max
  Clone ID: PAT_MRT3847_32879C.1
cgcctcttcccacgcgtccgcccacgcgtccggaaaagtgttcctacattggttggcactgaatgtcccctggatgagaaacttgctcgcaccagaattgttgacaagacctaagacgcgctgcttcactattgtgcctatggagtgtaatcttgtggtccgacaggagttattaaattttgggagggtcattatgaagaagagggacatgcttagctgaggagttggaatcagcccatactccatgggatggtctggtttggccaattgacaactgagtatgggccacgtattctgtgttgcgatgatgctaggattgatggtttga

SEQ ID NO: 68512 - DNA, 326 bp, Glycine max
  Clone ID: PAT_MRT3847_3287C.1
aaaggccaatattttttttccaaccaaaattttttaaatttgaaaaaccccgaaaaaaacattaacccccccccccttattttggggaccaaaaaaaccttttttcattaagttttaaaccaaaaacttttttatggctggggccgtttcctttttgggataaaccccgggcccaatttcgaattttcttcccccggcttggaaaagattaattttttttttggggccccaaaaattaatttcttggccccctttttaaaaccttggtaatggaaaaaccctggggttacccaaattaaatgccttggaaaaaaatccccttttcc

SEQ ID NO: 68513 - DNA, 330 bp, Glycine max
  Clone ID: PAT_MRT3847_32880C.1
gttgaaaaccacttctgttttaaatgaaactatccacttttaataaataacttaaataaaacttatttcaaggatcaaaacttgattttatttttggtgaatggtcaaaacttgattttgttgtaaaatggttaagtctaaaactagaaactagttcagaagctcaaaatcactataaaaaaaagtagaaaaaaaaactaagaaagttaaaggatactatacagagacttgctattctagttcacccacaaatcacttggtctacatctaatccctacccctttttcattcttttatcatagtcttgattctattttatggttttatggt

SEQ ID NO: 68514 - DNA, 609 bp, Glycine max
  Clone ID: PAT_MRT3847_32881C.1
cgacgatggcggaatttgccggcttatggcgatatctgatgcggtggcgaggaacttcagcaccatcttcgtgggtctcatggcgtgttttgaggcctatggctttgcttcggggagaaggtttagcggcggttatgttgttattgtgtccaccgccgcggtcattctcttcctcgtggcaacgctcacgtgggacgtctcgcgtaaggccacgtgtgcctttcacagagaccacgctgacagccaagaggatgtgtgcaagggaggtatctgttggcacggcgtcgcgccgcgatccccagcctctcaggtccgtgtcagacttcccagccaccttcccttagcccctttgtaataataacacccttcttcataatagtatatagtaataaataaataagatagttttcatttattttcttaacctcttgttctccctatttgtaagtgtgtgttttggttctaaaattcggactggtttttgtaatttgtatatccttttttttttttttttttacagaataatttgtatatccttatgcttattccttgtaatcaatggatgcgggaaatttgttggaataattaatgatatttttgtttgagagt

SEQ ID NO: 68515 - DNA, 603 bp, Glycine max
  Clone ID: PAT_MRT3847_32882C.1
cctcgtcccgagccgggtcggaattcccgggtcgacctgttacgtagtcaccagtcactcagtcactctccacaacttccgatcgccggcgtcaactctccggctactttcttatctctcaatgcacgaatgaatgacaacgccttcactctgtaaatcaacttcacagtcactgtgtcgatcaccatgctctctcgtttaattcccaaaccctctcatctccgtcgctttctctcttttccgttgaagccttcccacgcgcctgcgaatccctacttcaccgtcgtcgtgcccaaacacaggaccccttttcctcccgcgtgtggaaggatttccgggagcaaggaaggaggagcctccgagcctcgccggaatgaacgacgaccgaagcagtggtgggaggagaagggagaagcggaggaggaggaggagagcggaagcctggtcagaatgaacgaagggtttggatgatgcggttgaagatgctatatttaaagggggtgacgaggaaagcggaaacacgggtggttgcaacagaagggtttagcagttgcagatgaaggagcaatagataaatggatcgacgaggagcatggaggggga

SEQ ID NO: 68516 - DNA, 516 bp, Glycine max
  Clone ID: PAT_MRT3847_32883C.1
ggaccccaatactcggcatccggagaaaaccctagccactctcccggcgtcacgatgcagatcgtcgtgaaaaccctaacgggtaagacgatcacgttggacgtggagtcttcggacaccatcgacaacgtgaaggccaagatccaggacaaggaatgcatccctccggaccagcagcgcctcatcttcgccgggaagcagctggaggacggccgcaccctcgccgactacaacatccagaaggagtccacgcttcacctcgtcctccgcctccgtggcggtgccaagaagcgcaagaagaagacctacaccaagcccaagaagatcacgcacaagcacaagaaggccaagctcgccattcttcagtcctacaacgccgaccactctggaaacgtccagaggctccgcaaggagtgcccccccctccagcgcggtgccggcaccttcatggccaatccttttcaccgccaccaccgagcgcagtgcggcttgacctacctctcccccaaggccgac

SEQ ID NO: 68517 - DNA, 465 bp, Glycine max
  Clone ID: PAT_MRT3847_32884C.1
ctgtcgtccttttttttttttttttttgggtccaatacgaaagcattatatttaattttcgtaccagactagactattacaaagacattgagtagtttacagtgtcattgaactttaagatacgtaattttggtgtccaggtattgatggacacaaccaaaataataaaagaaatgctgcaagttctggttctggtaaagaaaaatacgctactttggcagaattaaggcttcagatggttcttcagataccttgttaggtgataaaaaaaagaggagcataattcaatttacatttgaccacatatggatgctgatggaaactgagcttaatacttaataagtgtgaacaaaatataatttgctgagccaagaatcacatttaacctgccaatggatgcttagaactactagtgtaattctcacccacctttattttgtgaataggagtagaacaaaatctccc

SEQ ID NO: 68518 - DNA, 375 bp, Glycine max
  Clone ID: PAT_MRT3847_32885C.1
cggctcgagcggctcgagcggctcgagatcaatccaacgatggtgtaaactgatcgctcctcatttaattaccttaactatgaaaaggactgtaataatgcagtacatctaatcggtgtacatgattgcaggcattgaagtcaggccagcttcctgcagatttattgttggataatgttgatgaaaaacatgaggacatgattcatgacgatagaggtcaagctgatggagaatctaatgatacacaagagcagagaaatactgattctgcttcaatggaacaggtatatggccacattgacatgtgtccatcaaaacattaaattctatatctttgtgacaaatcattattactccatcatacatatttaatat

SEQ ID NO: 68519 - DNA, 405 bp, Glycine max
  Clone ID: PAT_MRT3847_32886C.1
gttttaaacacatattccgataaacagaaacaccaccgttgtattcgagaataccggagaggcatgaacttgctacgagtccactcagaggaagaggaccaccctctggagcctcaaagcatctggcaatgccactacaaacacaacaaccataaattcatgggacgcagagggacactccaatcgttccgaacctcttcccattgctggctcccaaaccagacctttctttggttgatcctgtagatactctacagccacaactacctctacttgcacgacttcattaccttacgaggaccccaccttgagcgatgtcaccaccttctcttgatgagaaacgacggccaccaagatggctatagctgtcctcattgagatcgacgatcactttgccgccgacgc

SEQ ID NO: 68520 - DNA, 789 bp, Glycine max
  Clone ID: PAT_MRT3847_32887C.1
gatgaaaatgtgagaaaagaaagcgagtacgcaaatgtttctctctgcataggaaggagaggagaaagacgaacaagttggactgattcgaaagaaagcattccttaacacacactctgcctctctctttctttctctttgggtcgtaatccttgtcgttttattattcctctgcggtgcggccaatcaaccaaccagcacaagaaacatattatgcagaggtcgtggagtggtagtgttttggcgtaagacatcgacatcgttatccttgacgcccgacaacatggactccgaccaacacctacccacatacgatcccctctcccacgttgcccagagagacctctctcgtctcagatcagctcaaaacgccgtccatcttatccctctcctcgttctcctctgcgccgtcatcctctggttcttctctgctcccacttcttcacccaacaaccactcttcataaataaatcaagatttgatggactatttcagactatggtcaacgtttgattcattatacacggaggtcagcgtatatgtatgcattaggttgacttttctacgagtctcgtgaaggaagctacagtgaagaaaatcagacctgatgccagaagaaatttttttttttgtcatatatcatgtacttgccctggaatctagatagaaaatttatcggattgtgttgtaatagattggtgtatgtttattcattcagaccctcttcaattttgactctattacacaacttttttgctttattcgaaggaaagctcatgttttaagcgg

SEQ ID NO: 68521 - DNA, 206 bp, Glycine max
  Clone ID: PAT_MRT3847_32888C.1
ctcttacacatcgaagcactggtactactactactttctctctagatatggggtccccctgtgtagaagtggttttggaactaggggcacttggttagctcaggcttacctcaaataccaggtgttgcaccgtcagaaccacgaattatgagtccattactaccaccacccaggtcagcatctggaccagcacccaccacaccagg

SEQ ID NO: 68522 - DNA, 288 bp, Glycine max
  Clone ID: PAT_MRT3847_32889C.1
gcttgtggagggccacaccgaggtcccaaactggaggtttaactgcaacgttgagcttgtccaatcgccgcaaaaacatggtgggatgatcctcatccaaccgtagggtagacacgcggtcaggctcgtcaacgactccgagatcagtcagcatctgccagttgagaagggtatccatttactcgctcacgttcagtgcggttcgcacctgccctcactttgagtccatcaacatctcggttctgcctgcgtcgaatacgatagacttgcagacactctacaacgtcc

SEQ ID NO: 68523 - DNA, 1813 bp, Glycine max
  Clone ID: PAT_MRT3847_3288C.1
tacggctgcgagaagacgacagaaggggattcgtaaagattttttttttcttttactcacagtgtccccgcaatccccaaatcgcccctcctctcgtcgaaacccgaccccatctccaaattcgcctccggcatcgtaccatttctctcactacttcggggattcgctccttcttccgtccatggctctcccagacactctcactagcactcccaccagttctatggatgaaagggaatccttgaagaatgacactccaatttgcagcaatgcttgtaaggatgtgacaaaggagaaaaccttctatcttcaaccagtgtcacctttttcttctggtgtaggtttgccatatgcacctgaagggtggcctagtcctggtgatgtatggggctggaaagtggcaaaaaggatgaacaattctggatattttactgatagattccttactcttccaagatctcttgagaagtctcgtcgcaaggcagagtttcgaagcaaggctgatattagtagatatcttcaatcaaattatcctgacatgaaaattgaagcattctttgctttatttagctggcagattccctcaactcagcaaacccctacaaaagctatagaatcactagagactggagaagatgccacagatgaaattggcaccccaagaaagaagttaaaacaagaaacaggaagcctgagtgtccccactcacaaatctctagcactattagctctaccatcatcggaggctggagaagatgcgacagatgagattggcaccctgggaaagaagttaaaacgaaaaacacgaagtgtcggtcgccccccgaagaagtcttttggactagttcagggtcgaccccatttaacacctgatcaagttgtgaatttggatgactatctagataccttggaggacatgcttgttatgcctgaaattgagactacaccatcggatcatctgactcctcctaccgttttggatgataatgaaatgattgagagctgcaagaagaagctttcttcccttcttgctatagattttccttctttggtctctcgtagtgatgttgcagaagttgcaacccttgcagcacatattcgcgaagatcctagtcttagtgttgatcaactgtttaagttgaagttggtggaacaagttccgttagctggtgaggctttcgtggaggctaaggaaaacattgaggaggtaaacaattttttagctgacctagaggctaagaaacttaaagttcctagtctcagaaaagagtacaacgaattgaaggacaaaataggccagcaagaggctgaaatggacataagcactctaactattcgagaaattgatgatcaaattcggcaacttcaagcaaaacgaaaccggataactaatggccttgaaaccatgaagaagactaaagctgagctgacttccgagctaacaaatgtcgctaactcaatttcaaccattggtcatgacattaaacatggattatcgcaaaagtcaaaattggagctgaagaaagccaacaatatccggcgtgtagccgagatacaagaaaagttcatcactttaagagggttaacattttaatgaaactcgtctagattttctcagtttcacaaaaacacttttggatagcgagctatgccagtgtcagtgatttataatgtatttatccatgtttctaacttatgggtctgcatctgtggaagttgtgctatataacattgtttttagactttgtgacaatgcatgtagttatgttaaaattgcaaaaaatgacctgttttgcagtcaaaaaaaaaaaaa

SEQ ID NO: 68524 - DNA, 775 bp, Glycine max
  Clone ID: PAT_MRT3847_32890C.1
gaaagacgaacaagttggactgattcgaaagaaagcattccttaacacacactctgcctctctctttctttctctttgggtcgtaatccttgtcgttttattatattcctctgcggtgcggccaatcaaccaaccagcacaagaaacatattatgcagaggtcgtggagtggtagtgtttggcgtaagacatcgacatcgttatccttgacgcccgacaacatggactccgaccaacacctacccacatacgatcccctctcccacgttgcccagagagacctctctcgtctcagatcagctcaaaacgccgtccatcttatccctctcctcgttctcctctgcgccgtcatcctctggttcttctctgctcccacttcttcacccaacaaccactcttcataaataaatcaaggtcaaccaaatctccccaatttctcttctcttctttacttgttaacgcctctaaaaattttatttttccgatttcagatttgatggactatttcagactatggtcaacgtttgattcattatacacggaggtcagcgtatatgtatgcattaggttgacttttctacgagtctcgtgaaggaagctacagtgaagaaaatcagacctgatgccagaagaaatttttttttttgtcatatatcatgtacttgccctggaatctagatagaaaatttatcggattgtgttgtaatagattggtgtatgtttattcattcagaccctcttcaattttgactctattacacaacttttttgcttt

SEQ ID NO: 68525 - DNA, 328 bp, Glycine max
  Clone ID: PAT_MRT3847_32891C.1
gggggggtaaagtctttttttttttttttttaaaaaaaaaaagcgtgagaagctcagttggctgtgtcatgcaacggttttcgcatacaacttagtagcctattgtaaacatttgatactctacatagaacctgagaaatacataaaactgtccacaagacaagacaaaggtttacactgttctatatggattatgggggatgaatattggataacaagcgagacatatcttagttaaactaatttctgcaaagatgtcaaatccaagatggaaaacaactcttgattgttgcaaatatatgtcatttacgtctagttctttttggac

SEQ ID NO: 68526 - DNA, 561 bp, Glycine max
  Clone ID: PAT_MRT3847_32892C.1
ggagatgcgtccatcccattgaatatcaacatagggaagggtaaagctatcaacagaacacctgcactcataatcaagcctttgcaccaaccacttcacctctcgcaccttctccatgccaagtcccgcaggtcgaccggcctccacttggtaatcgcaagcgaacttgtccgattgcgtgcgcttcacatggtactcaccggctatttgttgcacttctgccactggacgtacacgacttgggtgaacttgacatcgggcgagtcggtggcgagcagaccggtagcagagctgttggagctggtcaggcggacctgggagttgatgttgagcatgccggcggcaccgcagggcgaccagacaatccaggttgagtcggcctcctcgtgcttgaggcactcaccggtgactgggccaacgaagctgtactcggtggaagtctgagcagtctgaccagagaagtagtaggtggacttaagggttccggtaacacccttctggatggaagagtagccgcggtagtcggcagacaggatcgagtactggaagcctcggggtact

SEQ ID NO: 68527 - DNA, 241 bp, Glycine max
  Clone ID: PAT_MRT3847_32893C.1
gcagatcttcgttaagacactcaccggcaagaccataaccctagaggttgaaagcttccacactatcgataactgttggggcaagatccatgacagggatggtatcctcctcgaccaacaacgtattatattcgacggagagcagtgtagggacggccgtatcctcgccgactacagcatctcgatagtgattacgtcttagatcgtcttactaatccgtagggagatgtacatcttatta

SEQ ID NO: 68528 - DNA, 202 bp, Glycine max
  Clone ID: PAT_MRT3847_32894C.1
tgcagattccacaaccacgcaatcgcaattttgagagaaaaaaaaaaaaaaaaaagcaaaaacgaagaagaaactgaatgctgtgtagtagtcgcgcgtgattgctacagattgagggattacgtcaagatagaatacagtattgattaaaatgctgctagtatttagtaatactcaaaaaaaattaaatgaaaagggcggc

SEQ ID NO: 68529 - DNA, 278 bp, Glycine max
  Clone ID: PAT_MRT3847_32895C.1
ttgggggggggggggggggggggggggggggggggggagaagaagggacggtgggaaggaagagaatgcggttaccggaatgaacctacaggcgtacagattaactgcaggtatcacacgattaactgaattggtaaatcatgctgtaaatgtgtaatcgcttgggccatttggacttgtgcacaaaatagaagctcccaagcatatataccaggctagatgcttagacagattagtggtagtatgccctcactgtaagttactcgcattgtgataag

SEQ ID NO: 68530 - DNA, 192 bp, Glycine max
  Clone ID: PAT_MRT3847_32896C.1
ctcgagccgttttacttcccctatggctcgtcactccttgctcttagccctcctcctcttcgccgccggggccaccggcgcgatggcgggggccgcgtccgacgccgacgacatcctgatcccgcaggtggtgccagatgttggggaagcccaaaaggaaggcaacctggtggacgcccagcaccacttcgc

SEQ ID NO: 68531 - DNA, 794 bp, Glycine max
  Clone ID: PAT_MRT3847_32897C.1
aaactgcataatataacttgacctagttccccatttttattcatatccatatatatcttaattactccagtcttaatatcaaatatagcgaggctaaaatgaacattcttgtctcataggctcataaccaacatccaactttcagagcaaaaaagtacaaatataattggaagttcaaaagtaaaaaaaaatcatatatatatatataaagaaacactttgcatttaatgaattcgtcgtgattttttttcaaaaagaagcacgtggagaaatttttagcaaaggaaaaagaggatcaaagttaacagtgaagcctctggattccttatgttctttaagatctaaatctccccaccttccatttatatatttatgggggggcagggcatataaaattaaatatatgctccaaacatataacatgtacgtaccttaaaagaaaaactctccaatttctcgcgtatggatagaatcacaagcaatcattttgacggatcgaaaaattttatagaaaataaggaatatttttatgaccatataagttttacaaacccccatgttctgcaatctttttcttggataaaattctcccagccacaaagttctctccccactcaaatagtcttccatgaccgtactatacttaggcttatagtggtatatatgcttccaaaaccaaacactacataaattagaagacagccaagaccttcttctatgatctttctaatgtaaagagaaagttggtgattaaattttctattagaaaaacaacatactactcctctcgagcc

SEQ ID NO: 68532 - DNA, 309 bp, Glycine max
  Clone ID: PAT_MRT3847_32898C.1
cgcaactaaagtaataaacattcgattggatgttaaataaagagctctggggtagagcatttcaaaacgggtctgaacatgtctgctgttatatagaagacacacgattgtgactttgaagacagttgcattcgtagggatgaatgaaatggctctgtcttttgatgtacgaagatcggttctaaattggaatgcaggtaaccgcgtttgaatatctgtggcgaataacatgaataatagcagtgtttcgtaaatatactgctgatttatctatcacaacgaactcttgctgcttggataatgatgagg

SEQ ID NO: 68533 - DNA, 340 bp, Glycine max
  unsure (1)..(340): unsure at all n locations
  Clone ID: PAT_MRT3847_32899C.1
ctcgagccggctcgagcggctcgagcganctcgagcgagcaggagntnnacggctgacgactgaatgacgagctagatagggggagcatgagctatagctaagtgtacgtgannctgctagnngcgaagcagnnctagaganatgggctgcaaccctnnagatgngacgagatgtaccanngtagccggaatagctatcactaagacttacgctactagacccggagtatcgcatggggggcacgtggatatacccgatgtgaatcagcaagggatccaccttgcaaggctaaatactcctggggtgaccgataggagtagtaccgtgagggaagggtga

SEQ ID NO: 68534 - DNA, 536 bp, Glycine max
  Clone ID: PAT_MRT3847_3289C.1
gtgattcgtaaagatttttttttttcttttactcacagtcttcccgcaatccccaaatcgcccctcctctcgtcgaaacccgaccccatctccaaattcgcctccggcatcgtaccatgtaaagcctcgccggaatatctcctgtcattttccactgtgttttctctgataaccctaattttctcgacatgtgtttttttaaattccctcgcagttctctcactacttcggggagtcgctccttgttccgtccatggctctcccagacactctcactagcactgccaccagttctatggatgaaagggaatccttgaagaatgacactccaatttgcggcaatgcttgtaaggatgtgacaaaggagaaaaccttctatcttcaaccagggtcacctttttcttctggggtaggtgagccatatgcacctgaagggtggcctagtcctggggatgtatggggctggaaagtggcaaaaaggatgaacagttctggatattgtattgatggatgccttacacttccaagagctcttg

SEQ ID NO: 68535 - DNA, 289 bp, Glycine max
  Clone ID: PAT_MRT3847_328C.1
accgctcgtacgagaccacgtacggcggatgccagaagaccaccgtaggcgacttcattcacaactgacaccttcttctgccgttcgatttcagactcttcattcgggcggtggctttacaggatccaggcttacatacacgcgcatgcgagctcgtacgtctgttatagtggcacctaagtacagttcacgtggccgtcatactacacctgcatgacatgggaaagccctgatgttgcaaacttattagccatgggtcgcgtactacttaccacagctggcgtaatat

SEQ ID NO: 68536 - DNA, 433 bp, Glycine max
  Clone ID: PAT_MRT3847_32900C.1
acctgactggatgagtgagcctgagctgaaccagataggttcgcccacacgagcgcaagctttgtgccggcagccgcgataaggtaaaccacagccggagataatggcgcaactaacgccatggccctcggctaacagaaagaagccaactgcggcctagcagctgtaaaagccatagctaggggtgctggcgggccagaagccaccccgtaaagcttacgcgtttatacccgggacaccgcagccgcgaaaaaaggcgtaacagagacagcaagctaaacacaacaacctggcgtacgctttgcatgcgactgctaacaagatggccccaactgagcatgctacggcgaccccacagtggtgcgagagcagccattatcagattgctagaacgaaaatgcctacgtaccaaacagtgatgccctgctggggg

SEQ ID NO: 68537 - DNA, 209 bp, Glycine max
  Clone ID: PAT_MRT3847_32901C.1
ggtggtgaagctatgctggagggtaattattgcggggctggtcaaggacggcgaaatgcgaggaattgactagggaaagagactgactggagaatgaaccccaatctgagattgctgtttgtcacatatggatttggctgccccggaaatgttctcctgaacgaacaagttaagactgggaaagatctcatgcgatggagttgcatatt

SEQ ID NO: 68538 - DNA, 297 bp, Glycine max
  unsure (1)..(297): unsure at all n locations
  Clone ID: PAT_MRT3847_32902C.1
agaggangannngnaangtagaaagtnggaattngganngagtnaaaaaanaggaaggnaanaagnaagttaacaaattnaaaantgttgggaanaattttttgnnnntgattagtttttaataattntntaaggtggttaagggagnaaaagtnattttaanaaanaattggagggngaaaggngtganaaggaannnaagnggngacaaaaatcatangtngtaaaaaaggntttgagttggttccggaganaatnagggnnnnnnnaaattnaatggtggaaaggtttgggaga

SEQ ID NO: 68539 - DNA, 728 bp, Glycine max
  Clone ID: PAT_MRT3847_32903C.1
ttttcaggatttcattatacattgactagatgtagaaacagtcaaggttgcaaagatgcaaactcgtgcagtttagttgcacttttacattatgaaggcagtctcaaaacatcctggttttcttgtcagttaagctcatagtgatgcttaacctcaaaataaatccaccatctccatcctatatacattgatcagtaaatcataaggtttaagcttttaggttcaaggatcgttcaatttcttctagagagcgtcccttagtttctactatgaagtaataggcaaatgttgcggctaacagggaaattgcaccaaagctggcatatacaggtgcaactccaaatttatccaccaattcaagaaagaataatcccaccacaaaattacaaacccaatgagtagaaaaactgaaccccataatctttcctcgtgttctggtgctgctaagctctggtataatgataccagttacagggccagctccaattgcaaaagagaatatatacatgatagttcctagtattgataagttgttgccgagttgctcgtccaaaggaaagatgataccagaggccacaagaaacattgaaattgccattcctaagtagcttcctattagaagcttttgtctcccttccctatcaattaagtataacgcacacagtgcacctgcaaagttagtaagcccaacaaacaagcttgctaaagcactgctttcaactccaact

SEQ ID NO: 68540 - DNA, 382 bp, Glycine max
  Clone ID: PAT_MRT3847_32904C.1
atgaatatggagcgctacacgctacccgaaccacccattatatattattctcgagggagaagaaaaaggagagaacattgccattggcatgtgggccccttttattcctttctttaaatgcatgctttaacaccaacaacaacaacctgactcttacttcaaatttaactttaaatctttaaatagatctgataccataccctttggttctaacatggaaaaaatttcttttcttgaccccttctcccccttactttcataactttcatttgttatacacaacaccgagatcaacattgcattttgaccccgggtttttgactttagccaggacaacttcttggggtttacttcttttggttctccccggggtcccattttt

SEQ ID NO: 68541 - DNA, 507 bp, Glycine max
  Clone ID: PAT_MRT3847_32905C.1
taccaagtaccgtacctgggtgtgtgtgtgtgtgtgtgtgtgtgcaacagcctggtatctacctgtcgagtggtgtgcaggtcagttgtttggtcgacagtgtaagtcaactttgtaagggttctagtcatagtcacctgtatcgtagttaattcgcttgtattctatccagatggctgcaattctcgtcttcacgatcttattcttctcctgctgctgattatgttgtttgtgttgttgttgttccccaacaaccactgtcctcctcctcccaacagtattcagcaaggtattcccaaccctctcagtccctaccgtgcttaccgtaggccgcttcgtcgtcagcgtacaggtcatcacccgggcttgttcagtagcattctctgccaccggtgccagtatgtcgtcacctggcgcggccaacgcctctactagggcccgcaaactcggcgttcaattaggctgagccagcttattcaagcgcgtcggacagctgcctctcggtgt

SEQ ID NO: 68542 - DNA, 342 bp, Glycine max
  unsure (1)..(342): unsure at all n locations
  Clone ID: PAT_MRT3847_32906C.1
ggtgattcggccgcncatcacccgagctttcattgagaagtatngcacacaaagacaggccnanggggatgctccgcaagccgcagacgcgccgccacctcatcaggctagcccagctggatcgtttgacacggagcagtatttgcggcatttggttcgccaacaggcggcaaccaccaggcgcatgtacagacccatgattgtctttaccagttgagcctcagccggacagagccagggttttacttcttttccgtgccctactccggaccagttcagggcagggatcgcatggcttggagattggctgaggcacgggaggaagangcgccacagaggcac

SEQ ID NO: 68543 - DNA, 241 bp, Glycine max
  unsure (1)..(241): unsure at all n locations
  Clone ID: PAT_MRT3847_32907C.1
agggaactcaccgaatcgcaacgattgaagtttcacatcaaccttaaccaatttaagggttccgttccttaacctacctttgacgtatctaaaccttaaatttgggattangtctgagcaatctggttggtaaaacctttggtcttagagagtcaagttttatgtctggattagacgatcaaattcccactgccttcgatccttttgctgatgcaaatgctgatgactccggtgctgggtc

SEQ ID NO: 68544 - DNA, 218 bp, Glycine max
  Clone ID: PAT_MRT3847_32908C.1
ctgattggttctgtcagaattgggactttggattgagaggttttagcccttccttttgcagcatattttgggttttgatgaatccattgacattccttcgttattggggaaggaatgtgagctactgtttcaatgattgcagggatattgagggtttcatagaatcctgtgttatgtttatgataggttgtggttttttactttacttgctgctcttg

SEQ ID NO: 68545 - DNA, 397 bp, Glycine max
  Clone ID: PAT_MRT3847_32909C.1
ctcgagccgattcgcttgagttagctgcctctattgtagaacccattcaaggagaacgtggaatactacagtgccacagaagaatttctacagcctctgcgtagtgcttgagatgaagctggggcacttatcgcctttgatgaggttcaaaggggactatgtagatcatggtttctgtgggcccatgaggcattgggcgacttcccggatatgatgaccctggcaaagcctcttgctgcaggcctacctatgggagcatgcctagcgactgatagagtagcttgttacataaatgatggggaccatggaagcactgatgctagcaaaccctatgaggaagtagcagctgcccttgcagggtgagatacactaatgagacctgattacctgacccatg

SEQ ID NO: 68546 - DNA, 465 bp, Glycine max
  Clone ID: PAT_MRT3847_3290C.1
caattcttcactaccagggtcttcttctggtatggttcttggccataactagccatcatctcctggtgcatctgtcaggggtggtagatatgggattccaagaaattcaccttcatcagtggatgagcaacagagaatacaatacaatcaaatgctatctggaagaaacattcagcagagtatgtcagttacagggactctttctggaagtgatcatggtgttcgcatacttcctggtggaaatggtatgggcttaatgggtggaattaacaaaaacatggcaatgaggccagggtttcaaggaatggcatcaccatcaatgcttaattctggaagcatgctttcctctagtatggttggtatgccaagccctgtaaatatgcactctggagttggtcctggacaaggcaactcaatcttaagacctcatgagaatctacatatgatgaggcctggtcataaccc

SEQ ID NO: 68547 - DNA, 390 bp, Glycine max
  Clone ID: PAT_MRT3847_32910C.1
gaggcacgcgtcagtccagactgtcagtgcgctgagagagggatagagagcggggagggtgatgaacctacagagagatacaatgcagcgtgagttgttgctccggctccacaattctctgtgaacatgggttttgctagagattcgacgcagattaggcgtggcactggtggcaagaagaaggcctgtaggaagaagagaacgtctgagcttggtcgacagccggctaacactaagctgtcaggcaacatgacagtcacagaggatccgtgttagaggtctacatgtgacatgaagggcattgtgattggatactggaaagtacgcgtgaggaagtgaagctgtacgtcgcagtactcgtgtactacatctggtttacaaaggctcaac

SEQ ID NO: 68548 - DNA, 435 bp, Glycine max
  Clone ID: PAT_MRT3847_32911C.1
aggcggaaggggggaaatttttcgaattcaaaggattaacaataatcccattcttccttaaaagagaaatattccaaaaccaccaggggcccctctttgttaagaagaaaaccattcgggcaaggaatggaaaaaaaggtagggggcctttgaccgcaaaatttggcccccttaagaaggttgtgccccaatctaagataccctcccttttccaaatggcccccatcaaaaagcccatttccattggcttatgattcttcctcccggggggcctccggaggggaaatggaacccccaagaaaaaaattctggctaccaataaaaaccgggcctttttttctcgaagggaaattcaaccctttgaaccaagggattttcaaaaggaacttgtttgggaattgtttaattcaaactttttttctttaaaattaaaaa

SEQ ID NO: 68549 - DNA, 437 bp, Glycine max
  Clone ID: PAT_MRT3847_32912C.1
acccaaggaaacccaaaaaacgtccataaaggatttaacatacaaaattggtggattcagaaaaaaacatactgatacttttctattctaagccctgcccaaaaaaagaggggatgaaaccaatgaccaatataaaaaccccctcaaatgttacaacacaaagggtaatttgggaactgggaccttttacttgaaaatcctttttcaatcccccactttgaggctaaaaaaaataacataccggtgtttttattgcacccgactccaaaactacaatttggggaaaatcaaaacatgggatttgaattttaatcccccccccaatccccaaaaaaaactaggggggggttcaccttaactttgggttaccaatggatccactgcttccctgaaacaaaccatagagtcttgcttgaaatccccccgtcccatactta

SEQ ID NO: 68550 - DNA, 549 bp, Glycine max
  unsure (1)..(549): unsure at all n locations
  Clone ID: PAT_MRT3847_32913C.1
cgctttacaaggagctttgatagctttttcaaacacgagtgtttatgatgataagctggcgttggcttacacacatgaattatatgatggaaactatgcagaggattattggctaccaaaccaagtgaattgtgtttatcctgtcagtcgattacctcaagacgctgacagtgtggatgtctcatgtacatgcacgacgaccaacttggtcatggtcttcggagagatcaccaccaaggccaacgttgactacgagaagatcgtgcgtgacacctgcaggaacatcggcttcgtctcaaacgatgtgggacttgatgctgacaactgcaaggtccttgtaaacattgagcagcagagccctgatattgcccagggtgtgcacggcaacttaaccaaagacccgaggaaatcggtgtggagaccagggtcactgtttgctatgcacggacgagaccccagattgngccatgagtcatgtncttncaataaactcggtgtcgtctaccgagntcgcaagacggnacttcccnggttgggctatggaanacc

SEQ ID NO: 68551 - DNA, 567 bp, Glycine max
  Clone ID: PAT_MRT3847_32914C.1
cgcgtccggaaagatgagtagcacccaacttccatttccaatcagaatgcagagcgcaacacgcgccgaggcggagcgtctcctggggatcgcggagaagctcctccagaaccgcgatctggtggggtctcgagagttcgccttcctcgcccaggaaaccgagcctctcctcgaaggctccgaccagatcctggccatagttgacgtcctcctcgccgccgacaagcgcgtcaacaaccaccccgactggtacgccgtcctccaggtggaccgccgctccgacgacctggacctgatcaagaaacagtaccgccgccttgccctcctcctccaccccgacaagtcccgcttccacttcgccgaccacgccttccagctcgtcgccgatgcgtgggccctactctccgaccctattaagaaatctgtttatgacaaggagctctctttcttctcccgcgtcgatttgtccgtccctggatgggtccagcagcaggagaagctccccgtccggaggactgggcctgggccccgtcccggtcccgggcccactgcgggccgcatagcgct

SEQ ID NO: 68552 - DNA, 580 bp, Glycine max
  Clone ID: PAT_MRT3847_32915C.1
tccatgaaggggtattttcttaaggggatggagaaggaggctatggagtgttacgaggaggtgttggggaagaagaagatgagtgctgttgggtataattcggtgctcgatgcgctttctaagaatgggaggcttgacgaggcgttgaggcttttcgataggatgatgaaggagtaccagcctccaaagaggttgagggtgaatttttttatctttaatgagattgcggatgggtattcgggggatttttttcctccccccccccccggggaagagggtcgcaccggcgcaggagataagctacggccgaacaaaaaaaaaaacccatcaggcgaagggggtgggaacccaccgggtagcgaacgcagaaacgcgggctaggagagagcgacgcaggggggacctagtggacgagggattagcggacacaggacagatgacgtggggccgcgacgcggagaggcgaggaaacaagccctgccttacaacagctcagctggctagaaaccgagggcggagaagcatgtaggggggagacgaaaccgggcaaacagacgttgaaacgggcgagaagcaagtg

SEQ ID NO: 68553 - DNA, 446 bp, Glycine max
  Clone ID: PAT_MRT3847_32916C.1
tttggtttttgggctacgaagaatcccatttagcaccagcggtggttgtttgggcgtacacattggagctacaaattggggctttctgtgcacacagtacattactttgctccagtgacggcctgttccttatgtgcaaacactactccttggcagaactaggggaccgtacctgaatgaacgaacttcctcctgtaaacctcaacactgctagtgggtaaaaaaacaacctaaaatcttctgcctaacgtttcaacctccaatctcttgggggaaaacaaaaaggcttagcttatacataattcgctctgatccatgtggcgcaatcgaacaacaagcatgaacgagttagaagaaaatagcatgcttgggccctattttgtggctgaccctagagccaccgcctgcgcccacactatgagccgcgccttctctggtcgggttca

SEQ ID NO: 68554 - DNA, 519 bp, Glycine max
  Clone ID: PAT_MRT3847_32917C.1
aaaacttccccacagcactacttatcttcttcattgggtttgtttcctcaagtctgtttcaagtttcagttgcatatattgtttcaacaggagatttcaataaggacttctttgtgatatggtctcctacccatgtgaacacgtctgctgatggacatgcaagaagcttgaaactggaccaagaatctggatctggttttgcgtcaaaccagatgtttttatttgggcaaattgacatgcaaatcaaactagtgccaggtgattctgcaggcactgtcctggcctattatcttacctctgatcaacctaatcgagatgagatagactttgagtttcttggcaatgtctctgggcagccatatattctacaaacaaatattttcgcagatggaactgacaatcgagaggagaggatttatctgtggtttgatccaacaaaggacttccatacttattcggtgttgtggaatatgcaccagattgtgttaatggtggatatgattcctataagagtttata

SEQ ID NO: 68555 - DNA, 372 bp, Glycine max
  Clone ID: PAT_MRT3847_32918C.1
aaaaagggggctttggcgtggggggcccaaaaaaaccttgcaatcccaaattcaacaaaatttgggacccaaactaatcccaattcccaataggagaggcaaaacccccccaggacaatcagttttttggcttcatagggaggccctaacccggaagaagaaaacccccctctcaggataataaccaggcccttccatcgggaaggggccccccccatcaataaaaaggggttctacccaccccggggaaaaaaaaaacttggccccccccgggtttacacgggggaaacccacttgggtccccaaaaaaaaaaattttggttttgggaaccggcggaagcccctggggggcccccccaaaaagggtggggg

SEQ ID NO: 68556 - DNA, 402 bp, Glycine max
  Clone ID: PAT_MRT3847_32919C.1
gtaccgccgcgagcccggcgcccgattaaccgcaggttgcacacagctcaagcagacgtttaggacactgcgcggagccaacaacagaggcggggcgcgacctaaccagcacccactgcgccagcggcgcaccaccactacaagggacagaacaggcacagccacacctagcaccgtatacaggcaacaacctgcggcccctaacattacgaagagcccaaggaccgccaccttggaccaaacaccacagcgcccgaggcaccagcaaaaggacaccaccgtagcccaccccgacccaaacacccaagcgcccacataatgaccccggagcaacccttgaccgcccccaccattgggatcagaagagcacccgcacgtgccggcaggcgagccacgacgaga

SEQ ID NO: 68557 - DNA, 220 bp, Glycine max
  Clone ID: PAT_MRT3847_3291C.1
accctccaactgatgacacccatttctgaaagaggtcaggaggtgtgttgagtatatgtctaaataagaggtgctcaaaatgtaattataaatgacagattcttgctagggttgcgcttatcttcttcatttcaagcttttgtgtactctttgaagctgctatggcaaactattcctagtatcatggatggaaaaagggggggggaaaattttgcttttt

SEQ ID NO: 68558 - DNA, 253 bp, Glycine max
  unsure (1)..(253): unsure at all n locations
  Clone ID: PAT_MRT3847_32920C.1
ggcaaatctcctgtcatgggcgcgccattgtgcgcgaaatgggaagcttgttgagcttgttgatnagtctattgaattgttnggataaggagcaggctcttctctgcatcagggtggctttgctttgcttgctgaagtcacctgctcgtcgtccttcaatgaaggaggttgtaggaatgctcagtggagaattggagcctccccaattgcctgttgaatactctccttcaaccccttctaggttccctttcaa

SEQ ID NO: 68559 - DNA, 432 bp, Glycine max
  Clone ID: PAT_MRT3847_32921C.1
tacataacaatttcccttagagtgtggaagattcaaaatattgttaatttaacatttgaacatgtccgcttgtccaaaattcattagaacatcaataatttatacttattgttattcatcaaaatccaagatagatgagaagattggttgtccagacctaacatatgatacaaaaccctatagcaagtgacaaatcgattccccccaaactaatttttcacttgctttatattttctttacgtaattaagaaatgatgaatcaatttcttaactattttttatacacttttagaaatagattccctaggaactgatttctaaacatccttttttttagaagccaattatgaaattagtttccaagaaccgatttcataattgttttcttatttttttcaatgttttttttggtatttctttaaattcttttt

SEQ ID NO: 68560 - DNA, 306 bp, Glycine max
  Clone ID: PAT_MRT3847_32922C.1
cgtcgcaagcatgcgaattttagcctcacctacggcccgggctgcaacattaagcccactaagcaaaaaaaaagtgcattacatgttaccagcttggtatagcaataccataatataaggctgaagcgcgcaagtgaatttcctggaaaatgtcatgttgccaaatttgctccatattagtaggaggatatgtactcttactacacttcaacattatgtccatttagctttatattatggtattgctataccaagctggtaacatgtaatgcaattatataaagctaaatggacataatgttgaag

SEQ ID NO: 68561 - DNA, 119 bp, Glycine max
  Clone ID: PAT_MRT3847_32923C.1
gcccaccgtccggatgaatatcatggctgcctccaatcttttgtttccagagtctatgtatatcccctacttgactgggtggtacaattccctctttcgcaagtcaaggagaaggaagc

SEQ ID NO: 68562 - DNA, 259 bp, Glycine max
  unsure (1)..(259): unsure at all n locations
  Clone ID: PAT_MRT3847_32924C.1
aaccctctcatcaatagtagnaattcacaccctcaaaccctaatctccaccctcacctctnccncctctncctctnncctccaaactccacgcgctcnaccanctcacgcgcctctcncactctcgactccctcttcgncgccgcctgcttcaactcccccgccctcgtcnccgcnctcctaaccttcctccaacacatctccgccgcnnacctcngcnaccgcgcnctctccctgcncctccacctctccctggacga

SEQ ID NO: 68563 - DNA, 202 bp, Glycine max
  Clone ID: PAT_MRT3847_32925C.1
ggccttcccaagaaaaccaactataatgtctttcctggtgccattcctggttcggtcacccgagaaatctaagcacgccgacacattgcaagggcttaagaatcccttcaatgtgcattaaacttcggtctttccttcgccacttaccccggcttgtgtgatagctcacagggcacagaaaatagaggcttttaggcacgag

SEQ ID NO: 68564 - DNA, 295 bp, Glycine max
  Clone ID: PAT_MRT3847_32926C.1
gtaattatctttgaaaaacctttacggagacttttatcaaaatttaactctatctgcaccgacattggcctgtaaaagaacggccgccaagattgcttaaacaaactttgaaagttgatcccttttgcacgttctacatgacgctctctgaacggtctcccgcacccattgtacatgccccgttagggcttaaagctgaccattggaaaaaggggatgccagcttctttggggcaagaaaaaacaccttggaacctaaccaacacactttcgaggcctttaaagggctgcacatc

SEQ ID NO: 68565 - DNA, 1028 bp, Glycine max
  Clone ID: PAT_MRT3847_32927C.1
aagctctgaaacttgcttgtaaccattaataaaacattacaagactacatttaatacgtcattttacagctgcaacaaaatctggaaaaggtaaccgtcatattgaaatcaattgtcacaaaacttagaattatatgaaactgacttattatcattttatgttattcaggtcactcaaccagggaaagtttaattcacttgtccaaatttcagagcacgccagcgaaagggttattctcaatcagctgccaaaggcttcaccttctctagcaggaactgtagtatatgctcactttccaattagcagtcattgttcataccaactaaagcctcttctttgataaaaggtttaagttttccagttttggcatgctatcttcaagaaccttatccggtacagaactgctatgcgcacacagctgtggctctgcattttccttctcagcttctaacatttcattgaaattctttgatacacgctgaagattctctaatgctttattcctgtcccaaaatgatgcaaacatatatccgaccctaccatcagcacttgccaaaggactggaaggagggacaccatgtccaccagcacccttgcgaagaataattgttatagcaggattaatcaatgcaagttcactcctttgaatctcatctatatcttcaaatggaataaccaccttcatttgctttaatatattggaatagaaacaaatgtgccatgctgagacatacaaatgaccttggtacaagaatgacatctcaagtgcacaaatatatctatgatcaacaacctcgtctggaggaagatcaaatatagtttgaagaggccctggcttttgatggactacagtggctcctccacaacaatgtatcctagaagcatttgcagatagtttttctgttccaatttgaagagaaaccttccctgatgggctatccaaagtatgccacaccggaccagtttgtccttcactttcaactagaacagtcactgaaccaagaacagcattttcccggacgcgtgg

SEQ ID NO: 68566 - DNA, 272 bp, Glycine max
  unsure (1)..(272): unsure at all n locations
  Clone ID: PAT_MRT3847_32928C.1
ttttntnntttttattaagaataattgtaaattaaaataaagctaaataattcacaatgatcattatcaaatatatacttttccccttcattaatccaccctggtctaatatggatcaccaagcgacagcgcagatataaattcgatcgccgaactgaaactcagtccgagatcgtctcgcgccgaggtagatcacttagacattcgagctacatacagacatagagagtgtgtgtgtgtgctgacatatgtatatgtaatcttatgctcta

SEQ ID NO: 68567 - DNA, 307 bp, Glycine max
  Clone ID: PAT_MRT3847_32929C.1
gcatgcacgcgtacgtaagctggtccttaggcggccgtttttttttttttttttttttttttggcaaagagacggggtttattctactctcatgtatcatgcatatccgaccaactaaagtgccaaatttttctctttatgtatacacaaacacaacaataaggtagtaacataatcagctgcagggccatggggaatatcttaagggagatatacatgccggagtgactgaatcaaagctgagtgagtgggtgggaaaaaaaaatatcaggcattgcctgccctggagtctcatgtttgtacaggc

SEQ ID NO: 68568 - DNA, 273 bp, Glycine max
  Clone ID: PAT_MRT3847_3292C.1
ctccaagtctatgtattttctggagaccaaaccagataccagatactcacaaagaaagcttttttaataaggcttaaaccaagaccttgtctagatatttttagtttgttgccaaggtagcactgtgagaacatctcacttggatgttatgtaaggcgtgagacacaacagtctgactatgagtgaggcaaatatctgggtcttttcgtcagtttggtgcatttgctgctgctgttgctactgtttgcctcaaacgctgtgtttaaacaacgt

SEQ ID NO: 68569 - DNA, 334 bp, Glycine max
  unsure (1)..(334): unsure at all n locations
  Clone ID: PAT_MRT3847_32930C.1
tgcgtgtcatnnatncacccactcttttggaccaaagagctgtgtcagttattataactagatagcacccaatagatcataaagtgttttcttgcgctgccactgctaaccacatgagaggctgaaaaaaaaaagaggattgtacaggccaagtgcaagatgaactctgggctttgacattacacttcacctcaccagggctaggagatgtgccgtttataaaggatcttacgacaannttctgcaatatcgtggtaagctgtctaaggtggatcatctggcatnnnnatnnctgctcnccatgttgagcttaccatcaccacagagcttaact

SEQ ID NO: 68570 - DNA, 320 bp, Glycine max
  Clone ID: PAT_MRT3847_32931C.1
gggacatacctaggcatcaatttaaaataaatttgcctaattaacctagtttttgagggacattaaggaaaatacttctgtttcccgagtcaaaaatgcgaaaactgaaaattgatgaactctaaaacgggttatactggattggacgtgaagctaactaagccaacccagggcagtcctgctggtttaaaaaaaaaccctaccaccggtgaagaagatttcttcattcactgcgacattgagaaagaaaagcagagctacaggggccaacccagagtgcaaagggaggaacttgtgcctggtgaaaaagggccaccctt

SEQ ID NO: 68571 - DNA, 262 bp, Glycine max
  Clone ID: PAT_MRT3847_32932C.1
cacaattcaggcttcattaaatatttatgtgacaaagatgccgctgttcagttatgggagtcgtagtatggcacctcaggtaaaaaatgaggtattgatacctgttgagcaaaatagaagcattgatatcctggatattgccggtgatagaactttggtttctgatgtttcacggtcagctgttagatttaataaccaggtgtcttctctaccattagccgtgcatagtggtagaggcagctttactgcggctaattaacta

SEQ ID NO: 68572 - DNA, 1373 bp, Glycine max
  Clone ID: PAT_MRT3847_32933C.1
acgagatttatgctgatagtgatgatgaatcagatggcagctcaggtacagtcacctctgctgatgaatccagtgttatctgtcttgaagatccagctactttcagttccttacagttaccatattacgatgctcgagctggtttccagcacaacataactgagaaggaaaaggggaaaatacagaatatacaggccataagtgtgaaattcttgaggcttgtcctgcgaataagcttatctcttgaagattccttggtttcaaaagttttatacaggttggtcgcagatattgaaaggcgcttgaatcaggaatttatcattaaatcagcaaaaacatcagcaaagaagcttgaagaaaattgtcaagatgatttggacttttctttgaacattctgcttcttgggagaagtggggtgggaaagagtgcaaccataaattctatgtttggtgatatgaaggtcgtgacaaatgcatgtgaacctgccactacttctgtaaaagaggtttctggaactattgatggaatcaagatcagaatccttgacacacctggtctcaagtcctgtataaaggagcaagcttacaacagaaagatattgtcatctgtaaagaggtatatgaaaaagtttccaccagatgtcattctctatgttgatcgagtagatgcccaaaccagagatctaaatgatttaccaatattaaggtcaatcacaagttctctcggtccctcaatatggcaacatgcaattcttactctgacacatgctgcttctgttcctttcgatggaccatcaggatcccctttgagctatgaagtatttgttgctcaaaaatcctatcttgttcaacaatcaattactcaagcagtacgtaatctatgtcaattgagtccaagtttcatgtgtccagtcgcccttgttgagaatcatccattgtgtggaaagaatatgtttggggactgtgtgcttcccaatggacttagatggagaagccaattattagctttgtgtttctctctgaagatcgtatctgaagtgtcttctatttcaggatctcaaactctttttgataattggaagaattgtttcttccaggaccatccccagcctctgtgccatctattttcttcattgttgaagtctcctgctcatctaaaattttctgccaattggaattgacctagatgttcacttcacaaataatgaatatgtgaaatatgatagttgaattcacatttcagctttttcgtgatgtcaattatcgggagtcatggctgtaacaacgatcttcaggatcagactgttagcattgcaagaaatctttatgttcatactttcatagtagctttattgctgcttttcctcttcaga

SEQ ID NO: 68573 - DNA, 147 bp, Glycine max
  Clone ID: PAT_MRT3847_32934C.1
gagttctactccatcgtcactccgtcttcgctgtttatgtgtatctcacgtgcatcgagcaaggacgtcaaagggacctcatcgagatctacttaaaggctacattccgtgtagacaccttgtctaaatccagtccatatccaaaca

SEQ ID NO: 68574 - DNA, 257 bp, Glycine max
  unsure (1)..(257): unsure at all n locations
  Clone ID: PAT_MRT3847_32935C.1
gtcgcacgcacgcgtacgtaagctcggaattcggctcgaggntngataaatacnagtgcngtcntatcctgtngtgntnnagatcnngccnnatttatcntccaaantnntagannagagncanatatactgtngagtggnataaatnngtanngcaggtcacacgtgtangggcnagctattgcnagtgtaatccatcttgcgattaatggtcntcgtggnantaaagagagagacacagaggannnnaaaagatt

SEQ ID NO: 68575 - DNA, 2605 bp, Glycine max
  Clone ID: PAT_MRT3847_32936C.1
ttgaacaagcacgcgggcgagagctgaaactgcagaacactttacgaacgttctgccactgggaatctggcattcttcaacttttgagaatgaacgtggtattcctatttgaggaatcggacctacacaactgtacaggcggcttcatctgggtttaaatagccccactttaccaatgaaacttaaaatggagccaactataatgagtatgaacctctggtcgagctttctaatccttcagatacagatattgatattccaggaaactttgattagaagggtctaagtgattcattaaggtgaggagttttatataatggtcccctctgtagtatattggtggtgtactaatcagatgcagatctagaagcagtgaaagtgatacgtaccagagacaattaggaaatttggggttatgaataattgtagccctcagatatggaaatgattagaaaattatgacgctctgacgccgtcaaaccagatttcactctcatttagttcgcgtcgagggaattgcaaacacaacccctgctctccacaacgtaacgcatcttcacttcacttcattcaatcctctctcccctatccttctcgtaccctccaccaattctgaaacttattttcaacgcttccaatttccgtcacttgggtcatgctccgaaattagggtttccgacaggcgcgtggggggaatcgatggcgaccgtgaatccgcagcctctgcagttcgaggacccagcgatacccgtcgacgatgacgatgacgacgacgacgacggtggtgatgatgacgctatggatgagttggaggatgcgaatgttaactcagtgaacgttactgctaatgccgcggcgagtgtaaatcatgaagcggtagtggctatgccttccagaactagcgagctcactctttctttcgagggcgaagtttatgtctttcccgctatcactcctcagaaggtgcaagctgtcttgctgcttttgggaggacgtgatgtgcaggcaggtgccaacttaagtgagccaccggtaactcatcccctctccatttcattcacatctctgctctctctttctcccacgaattcccaaacttattttctgcctgcatatgaccactctactaaacactctacgacatgggtgatactccaaagtgttccaacctttcacgaagaacaataccgatagttattttccacgcttcacacttcgaaaactttgttgatgcgaaaaattgagattccgccagagacgagggggcagagaggatggataccgtgaatgggcagtttgcgtacttgaaggacagagcagtatccgttgatggtgatgctgcagagagtgaagatcatggtggcgcttatgcttctgattatttagaggaagcaaacgttagctttgtcagtgaaactaatactcctgctatgcgtcgggggccagctggaccaaggactttatgtaatggctgcggccttatgtgggttaacaggggaacattcgagagatctcagtaagggtggaaggaatctttctgtggagcaaagtgatctggacactcctattgatgtcaagcctacttctgttcttgaaggggaattgcctggcatccatgatgagcaaggtagttctgaagatccttccaagtccaatgcagcggatggttctagtaatcatgctgtaaaccccagtgatgaggaattgcctgaaactgcagaacactttacgaacgttctgccactgggaattggtcattcttcaacaaatgacagtgaacaggaacctctggttaagcctgcttagccttcagatacagatattcacatttcaggaaactttgattagaaggtactaagtgattcattaagttgaggggttttataaaatggtccctctgtagtatattgtcggtgtactaatcagatgcagatctagaagcagtgatacatacccgagacaattaggaaattcggggttatgactgatagtagccctcggaaatggaaatgattactgattagcaagtgtcaagaagcactgctgttccggtctaacattaaatagtagtctgcaatattgatgctggtataagtgccaagacattgtttgtgtatatgttatcagatgatcttccttcagtgtttatatcataaaatattcattagtatggggcctgtgttgtaagaatgctgtctgcttgtccctgactgtaataatttcattgagatcaaagctctgctaccctgattttagagatgaattttaggtgatatgctatgccactcaaggatgggttgctaatttgaatatcaacgtagcggtgtgctaatctcgacctttgatgaagtttaggcttgtgctgctgtgctctggtgagaacatttggaatatgttaattagtacagatagacttgttccaaatgtacatatacttacaaataaatattagttgtcgtcttctctatgttctttcacacttaaaatatcattgctgttgtggtgcccgaaaataattgccattcttgtcatcatcatatcccaatagcctgatattatattaagcatagttataatcaaataaaattattggaatttttacgct

SEQ ID NO: 68576 - DNA, 779 bp, Glycine max
  Clone ID: PAT_MRT3847_32937C.1
ccacgcgtccgatcgtgttgaaaaaatatttatattatatatgctcaagataaaaaaaaaatatgagtgattttaacgggaacaattttatattaataccatgttagaaaaataaaaaaattaaattaatactttatccaaatcttaccttgtgctttccatttctcactgtaaatgatccttgtcattttccaatcttttcatattttgcaatttccaaagcatgcatctagatgaacaaaaattacatccacgatggtcacataaatggcttgctcctcattgtatcggttagaagttagtgactagatgtggtaccttaatatttgttttccctctgttgatttagacgtagcacctacaaattaagaatgattgaaaaaaaatgtatgaaacgtttagctcgttaatagatttcgtaccataagagcgcagggaccatagaatattaatcttatttgttttccattttcgaaatttaaatttccctgctaaatcttagtgtaagttgaacacttaaatatagaaaaaggaaaaatagaactagaacatgaaaagaacatgacggtgaaaaaagtattgataatgtttcctctcaaacttagtttctagctaagtactttattggactatatttacgtttgtcaagtactttattgcagtatatttacgttttgtcttaacagatttgcaattgcaagacggtttctttttacgcagtgaattgttgttgcttgaagtgattttttttattgataggaatcaaaacacatacttgg

SEQ ID NO: 68577 - DNA, 483 bp, Glycine max
  Clone ID: PAT_MRT3847_32938C.1
tttcttactggaatgtcattgttctatcaatttgagagcctttaacaatttagttggtttctgggggtggtaattgcatccatttatccactaaccatccaatttgtacatgcataaattaaaccaatctgtccaatcgtaggaatagaacttaatggattggatcaacaattattattggatggttaataaactataagccatattttttagaccaatgtgtcaagatcatcaatgatggtcataaagacccgttgcaggtttttatgaaaacaatcctcataaggagagaaataattagatagagaagttttgttgataagtagaagagtataaaaagtgaatggatggattgattttagggagagaaccgattctgttatcaccaatattctgcctttgacaagttctacattagaagtacctgtaatagaatatatttcattataaattcaaaatttacttgttccaatttttaatcaa

SEQ ID NO: 68578 - DNA, 409 bp, Glycine max
  Clone ID: PAT_MRT3847_32939C.1
cattctttcttttaagattgtgcctaattaaaagaaaggaactacttatgagcgtggggttggctaattccttcattttgccgacggcattatgttcaagaccggtaaacggtaacagcagagtggctgataagagtgactcactaaataacaaagggtgtacttcacaaggccactatgtttgcagcctaggttgcagcgtgtgtataaattcatcaatttgcaatgtataaacggggatggggtgcataacctatgtttattagctttcatgggctttaaactctctagacagattttaaaaatggttgagaagtccatgatgggatcagtgattatataggactaattactattttttggtccaagatgcaattggagataacatcaccaatcggaaatgcgataa

SEQ ID NO: 68579 - DNA, 392 bp, Glycine max
  Clone ID: PAT_MRT3847_3293C.1
tttttaaatgcaaaaggaaaatcaattaattcttttaagtatcacattgaacagaaaatcaataaagactctagaaagtgccatatgaaaaataaaaaaataaaaaagatggaattcaaaactaaaaggtatgtaaaatcccaaactaaaaaaggacttggatttgaatgggacacatttagaagtccaaccatttctgataatattgacaagttgtaggggagataacaccatcgggtgtacaagaattaatcctaggacaaaccccacaaggaatagaagccatggcaccaacaccagcagccttcttcaccaatctataacaaacttcaccaacaggaacagactcaaaatccccagagccatcactagtcactttctgcaccttattc

SEQ ID NO: 68580 - DNA, 343 bp, Glycine max
  Clone ID: PAT_MRT3847_32940C.1
attaaatgtacaggctatctcttcatagcatgagaaaattagggtgataataccatcaattttgaggctgtttcacatacgctggcgcagtttggagagattcaagaaaaagatgtattgaaattttcacaggaggaaattcttacaggtcggtcacataaggtgcttcctgccacaactctgttggctgacggcggtacatatctgaatgctatggtgcatgatagttgatagtctacattaccatgagatattggcatagtggtcaagctgtcaaccatagacaatgtgtgtgcatatgggctcaatcctggtatttcaggttctcgtcttttgggcacca

SEQ ID NO: 68581 - DNA, 553 bp, Glycine max
  unsure (1)..(553): unsure at all n locations
  Clone ID: PAT_MRT3847_32941C.1
ggcacgaggaannntcttgctagagatttcttncattcatnaccactaanccacactagacactacaatcattatcaagncccatttgggttattttntgncattnaaaangaacatcaangcnngagtntntttgannaagacttgatcacagagatgagttcaagcagaacttgngctgtggcagccagtgntggagttgtggaggccttgaaggaccagggtctgtgtaggnggaacaatgctttangatnagcacantntnaagtgaaaaaccatgngagatccttgnnttaggcnancaaggcttcttcttactnatcttctgntgnggattctagtccattaaaggaagagggtgcnaagcagnnagaggaatcattgaggacagnnatgtacttaagntgnnggngtnccaactagcgtcatanggcaattactngatactgactatttgatangnaaagttggggcanagatttgtagacttgtaatgatgcttgatgattaagcattcaaaggtcgacagatnttgatgtnaancgtgataaan

SEQ ID NO: 68582 - DNA, 406 bp, Glycine max
  Clone ID: PAT_MRT3847_32942C.1
cagtcatttcccaccagacgagcggcgaaagaaggcggatgaatagcgactgaacacgatactcgaatcgaaaccggaatcacttacaggccctcaaacgaacttgcatgcatgggtagaagagaccgtgaacgaggagggcgatgaggccctaagaaggagcctgtgaagcaccgaaggcctgttaccgtagacaaagaaatgcgggcgacctctcatagtgaagaggaggcagggccagatgcaataggaccatgacaacccataggccatgacgaatatggacaatgtataggtagcaaggcaaaatgctggtgtcacagacaggaacaacgacagtgacccagtcatggacctctacgaccaccagtgagaacttgcatatgaccaaatgactgaggaacca

SEQ ID NO: 68583 - DNA, 571 bp, Glycine max
  Clone ID: PAT_MRT3847_32943C.1
aaatgcgttccgtttctaacttaactacttgttcgagtttgatacatagtaatcataacaataatagcggttttatctcttctttgttttgctgtgtagtttcatttttcaaccattcttatattgatttttgtgttggaagcagctcgaattgtgagtgacggctgttttgattgttgattgctttgaatcactgagataacagggagtaggagtgcttgttcttgttgtattgtgtgtacaaaacctgaggttattctattcaagttgtctttggatgtcagtcatgtgcagcaagaaaatatagccaaaaaattcattggtgttggagattctgtagaatttgacaaaggtgtagcctgtccaaggttacctatttaattttgggttggaaatttgaagatacataaaaatgtcaatggctgctccaagttccctattgaaggtggaggaaatacaaggaagagggaggggaatggttgcatctcagcctcttaaagctggtcaaattgtcctcagagactctcccattctgctgtattcggctttgcccttggtcagacagtctctg

SEQ ID NO: 68584 - DNA, 320 bp, Glycine max
  Clone ID: PAT_MRT3847_32944C.1
tctccttgtttgtgttttccgcaatcgcaaagaataaccaacatctggtgcgtaaacaatatcattcagaaagaacaagcttatggatgagacatactcaacttcaaaggttaatggggaaactgcatgttattccctgagtatgcaacaaaccaacttttttttatgagggttgtaaggcaccccctaccgctcttcctttatactttaccaccacccgtgtatgcgtcgcattctcctcccagatcagacccagacctttttttaaaccacagaccttgattactagccccaacccgatttcttcagatcctcttacc

SEQ ID NO: 68585 - DNA, 420 bp, Glycine max
  Clone ID: PAT_MRT3847_32945C.1
aaaccttataatatttaggttctgaaatatcacatactcgtacttagaaaacaggtggattcccatacaacagtacccaaatagttagcccaaactgggcatgcagggaatgaactttacagaaattctgcgcggttaaaacataaaaagccagtctgctggcgaaagtcgattgtcaacaaggggggaacccatcatagttaaggcgggacatatttccccgtgcgtggctggaccagtccacctgtgaaaacactgtcacctgtgtcgaacaagacttgctagtaagttcctcaacctggcatttccacctctctggagacatgggcgcttgatatcatgccatggctgattaacaacatcattttaacagctgtggatgtacatgacatagaacctcatactgagaatcaagcttgc

SEQ ID NO: 68586 - DNA, 511 bp, Glycine max
  Clone ID: PAT_MRT3847_32946C.1
aagcagtggcgttagtgccgctggaaattctactagcatgggagctatcacacctgccacaattgcatcaagtaataacagttcctccacagtggtggcatcctcatcttcagcaacttcctttttcaaatttggatcctctcctgtccgatcagtaggtttacctgtgtcatcttctggtggttcagaaccaccagaaattaaaagcaggcaggatgcaggaaccggtggtcttagcagcactgcctttggtagctcatctgcagggagtggtatttttggcttcagctcttcagcaatgacaactgtaaatagcagccagtctcagagttctgccgttggtgctagcagtggttctgtgcttggtgcccaggcttcatttaccagtgggtttgcaacttctactcagacccagtctgtttcatttggttcatctgcatcttcctcatcttttggattgtccgggaacacacctctttcaagcagttcttcattttcttcgtccagccct

SEQ ID NO: 68587 - DNA, 273 bp, Glycine max
  Clone ID: PAT_MRT3847_32947C.1
tgcatttcaaagtcaccaaatttgcttaaacacgtgttgatcgctggtgctgggtcacttttttttttctctctcacaaacacatgttatctgtcattactctctcattttttactgggtctcccagggattggtctctatctaattgaattttgatccaccccatatccaaatgaaatggtctctcactccctaaataatttactagttggaaaaagagtattcctaaagaaccaattccccttaaaaattaataccctcttattccacaca

SEQ ID NO: 68588 - DNA, 135 bp, Glycine max
  Clone ID: PAT_MRT3847_32948C.1
attccaaaccgctggaaagcgaaaacaacttatccatgtgacctgatctcactagtaaaactcgcatgaacacattaggcgataccttacactaaaaaccaaaactcgacgaatgcctggaaaaaggaagatatt

SEQ ID NO: 68589 - DNA, 367 bp, Glycine max
  Clone ID: PAT_MRT3847_32949C.1
gaattccgggtcgaccccgcgtccgcatttatgtatattttcatttttatgggaaaaatattagatttcaatcgggttttgatgtctattgaaatcactttttaagcaccattatgccttaatgatagagggttttttaaaatttatttcaatttttttggttattcttggcgttaaatcacataatatttgggcttatgttattatgttctggtatcatttgctgtaaatttgttcttgcaggaagcagctgttaagaaaaagtatggaggggtgttgccaaagaagcctccactaatatccaaggttactttcttatcttaaccgatcctgcgtcatcaatgtttctcttactcctgtcatgcaa

SEQ ID NO: 68590 - DNA, 253 bp, Glycine max
  Clone ID: PAT_MRT3847_3294C.1
acgcgtccgccgacgcgttctctttcctactctcttctatttctttcaatcatcacactataaaatctcccacggcgggatttttaaccaccctcagtcgactcataacgactcacatgcactcacgccattcttacaatgcttaatcactcttcattttgaacttactgacaacctcactgtatctcatccacattcaaacctaccaattctctaacataattcccttacaccttcaatctctataaacccc

SEQ ID NO: 68591 - DNA, 402 bp, Glycine max
  Clone ID: PAT_MRT3847_32950C.1
atggaacaagggcgccctaattttttaaagccccgaaagaaaaaacaacttagggaagttttttacatgacttggtgcccacaggtgaaacaacataaagggaagctggggcccctttttgaacccctttttttacatttaaatagaagggaccccccttaattgttgagaggggaaggaacttctgattgtattacaggggattaggaagcttaaagggccttttttcccctttggggcccccgaggaaaaccctccattggtctccaatgatcccaacaatgggggatccccgccttataaatttttttttccctggtgtgtttgaaaaaaccgcatttgggggggaaggatcttggggatccctgaaaataaatttttcccatgggggggggcccccct

SEQ ID NO: 68592 - DNA, 438 bp, Glycine max
  Clone ID: PAT_MRT3847_32951C.1
ctttcaagcacagctactacaccatcatcactttcctctcccactcaccaatcaatactataagccagggttattttctaactatcgcgggaatatcatccaactcactcttgtctctaccacctctacctacacaccatattcatctctttacttctctattatacctcttcttactatcttgttacaatttcaaccaccttttcatatctttattcaacccaaccaataaatttcatatatgctacagatcttcatcaatcctccagttcaaactctaactcttcttactatgattttcaacgtataaactaagaataaagataatgatatataaaataaaacaaaaactactcattatattaatatgcaataataataatgatcatgcacacacaacaacttctccaaccacctacactaaccacccttcttatc

SEQ ID NO: 68593 - DNA, 276 bp, Glycine max
  unsure (1)..(276): unsure at all n locations
  Clone ID: PAT_MRT3847_32952C.1
cgcgtccgtcgacatattctcattttcaattcngtaattgcatgngcttgtctgacaacagcgcntgatttgaggaataaagtggtctactaattgaaaatggtgcaaagagagaaacttttgctgatctgattgaacaaaagggacgtgagagcagtttcagctccgagtatctgccatctgagaccactcatggcgagcatactaggagtagcactgacgactcatcttcatctccatctgtggggtgcccggttcaggaaattgctgcatctg

SEQ ID NO: 68594 - DNA, 222 bp, Glycine max
  Clone ID: PAT_MRT3847_32953C.1
ggggggggtttttctgtcgcggggacccaccgccgaattcctggcccgtccctggaatcctcccacctttccctatagcggtccaattttacctataggaaatcaatttcaatcctgttttcataatgaaaattgttttcccctacaataaaacataacatcctaaccgttaccataaaattcaagcctggggttaaaatgaaaacctaactcacataaatt

SEQ ID NO: 68595 - DNA, 279 bp, Glycine max
  Clone ID: PAT_MRT3847_32954C.1
cggaatgcccgggtcgtcccttgcgaccgtttttttaaaagacaggggggcactagacgagggtgtgggaaggatggattacgtagctcatgacgattatcacccggaagagaaagatatggcggagggaaatggtgccgagggtatggactctcgaggtagaataacctactgatatcatgatattctcgggattatcaaaaatgccagtgaagatgaaatcaagaaggcctatagaaaggcggttctgaagaaccatccagataagggaggaaatcc

SEQ ID NO: 68596 - DNA, 666 bp, Glycine max
  Clone ID: PAT_MRT3847_32955C.1
gctctaatctgagccctctgtataaatgaaacgtgtgtttttctgtttcagataaacttcaacatttcccttcattcatcttctatctaccaacacgatatcggtgtaactattcgttgtcgtttccccttgggtcggattccgatctacaggtcgatggtgctcttcctaggatacgtattcgaagcgcggtgtcactgatctacctaccgtacagagttgtgatgatcgtgtctgagttgcttttaaggtttctttcaaaaaatcgttcgatcaataatcggagattgcagcgcagatctagagaagaaagcggagtcacgttcttcgcattccaatgtcggtggtgcatgttgtggtattgaaacaatgatgtgagggctggtttttaagggggaaactattatgttgtgtgggttttataaaacaacgaaggttcaggtgaactttgttaaccgacctttggcatgacaggtgcgcttgcatggcaagtcaaaataattaataaaaaaaactttttttttgggttttcagggagatcccacgggaattctcggcttctccctctggtgtgatgttctccttttcctttttctttattacctaactattattctgctgctactcttctttccacagatacatcacaggactcacatttctctt

SEQ ID NO: 68597 - DNA, 661 bp, Glycine max
  Clone ID: PAT_MRT3847_32956C.1
aagaacgtgagaaaataaattatttcaattaaaaaataaaatttattgattacttatctagttaaaaggtacatatatttattttcttcatattattcatttaatgatagttagtatccattgtttaaaattttcataataataaatgttttctcttgacaataataaattatattaaaatttaaaaaagagtgattaaatatttatttttaaaagttataaatatttaataataatcaacattcgttgttgacattctgttttttttttttttttgcaatgacgtttgagtagttataaataatatattgataaaaaagtgactaaggctgtgtttgaagaaacattcaactgaacatagcccacatgttttcttttttgcaaatagacgtatgatatctctggcaatccaaaaattccaaatacattgagaaagtgtgccagccacggggaagtcagataaaaaaaccaaacatgtaaggagcagattggctttctgatatatgggttttttttttatcaaaatgggttaaaaatgaaaactatttaacataataggttgatccaaaaattatttaccaaaattagtgacttttgtcactaggaaacaggagacagacatcaccctgagttgccccatatgttttaatttgttagtccc

SEQ ID NO: 68598 - DNA, 356 bp, Glycine max
  Clone ID: PAT_MRT3847_32957C.1
gttagtggtttagttggtttttttgaaattccttattttatttttttgactgagaaagaacataaggctgggtgagtatggaggtagggagctaggacccatgcagaaggagctggctgagcagctgggcctgtctaccggggagaaggagaaattgccaggagaactggagcctgtgcaggccgcccagaacaagacagggaagtatgtgcctcctagtctccgggacggggcaagccgccgtggggagtctatgcagccaaaccgcagagctgatgacaatgccaccatccgtgtcactaatctgtctgaggacactcgtgagactgacttacaggaactcttccggccttttg

SEQ ID NO: 68599 - DNA, 570 bp, Glycine max
  unsure (1)..(570): unsure at all n locations
  Clone ID: PAT_MRT3847_32958C.1
ggacatgaaggcttgagcgtgggctgagtacttgcaaggatttgcgtgagctcggggttttccctggcaataccctcgaggagataaaaggtcccgtgtctgaggcgggatttgaggcgatttctctaggttgaacgaaaactgacattccaattactggttttctctcgccatgaggaatcgacttaactgacctgcctgtngagtaggcgcatcgtctcaatacatacttcgctcggagtatactctgatggatagttctgcgggctagtgctataatgtggatcaactataaggttcgtgacccttgtgacactataaacccatgggatgagggctttcgctgccatctgttatgagactgcgcggaacctcacctcggtctcgcgtgtgtgctggcttgactgactgaccggtctcttgagtgacattggaatctgtgggaagctgctcaagacgctgtcacctgccttagctgcaaacactgtccttgcactccacgatgacctacaaggcagtgacctactgtgcagacgctcgagctgaaggacggagcatatggggatggag

SEQ ID NO: 68600 - DNA, 1272 bp, Glycine max
  Clone ID: PAT_MRT3847_32959C.1
gtggaataatgggtatctgcatatccgttgcagaagaagctcatgatgatgataatgtgacaatatttgaagcaagaaaggttctaaatgggagtcagagactttgctctgtttactccaaacagggtagcaaaggactcaaccaagatgctgcctctgttcatgagggttatgggatggaggatggaacattttgtggagtttatgatgggcatggagggaatggacacaaagtgagcaaaatagtaagcagtcgtttatcttccctcatactggaccaaaagaatgttcttgaaaggattgatgagatagaaaatggttacaacaacaccacaaaaaagcatgttaactcagtgaaagaggaattgcctgcaaggaactttcagaaatggaaagaagcaattgttagtgctttcaaggtgatggacaaagaggtgaagcttcaaaagaatctagactgctttagcagtggaaccacagctgtagttatcataaaacagggtgaaggtcttgtcatagctaatctgggtgactcaagagcagtgttgggaacaatctatgatgaaaaactcgtagccattcaattgaccactgatttgaaaacctgattacctcaaagatttatgtgtaataaattggaatgcaggagaagcagaaagaataaggaggtgcaatggttgtgtgtgtgggtcgaatgaagaaccagatatccagagagtgtggatgcccaacaatgagaattcacctggcctagccatgtctcgatctttgggagatttcctgctcaaagatcacggtgtcattgccatccctgatgtttcctatcaccctctaacatcaactgaccaattcattgtttttgcaagtgatggggtgtgggatgtactaagcaacaatgaggttgcatcaattgtgtggagtgtagacagtgaagaggcagcagcaatggcagtagtggaagcagccactgctgcatggaatgagaagtatccttcctatatggcagatgactgcaccgtggtttgcctcttcctgcacaagaaatcacaacttactaacttaagtgccccttaacttatattctagacataaaagccttgctagttgcctcaaataatgcattgtaatacggccacaattatgcttattgagaactaggattcattgttagttgcttcttcctgaatctgaagttgatgttgaattaaagcaaacttctgcatttgacataaaaaaaaaactagtggcctcttcctgcagaatacaattgat

SEQ ID NO: 68601 - DNA, 528 bp, Glycine max
  unsure (1)..(528): unsure at all n locations
  Clone ID: PAT_MRT3847_3295C.1
agtcctgccccatnaagnccnaacggccgggttaaccggttnaaaggctttccggcgggnaaaatttcccggggcctncccgnaagggntggtngggnaaacccttaaaccttggggttngggaaccccccccaaaaaagggggnaangtcgntttcggaattaattcccaaaaatttggaangcaaaggtnaatttnatttcaacttncttccttttaaaggccttgcgcgggtttnaaaaggcccggaaccctggntttngggaaaggacgntggnttaaaaattgcaaaaccaaattttggaaanctnggaangcaaagggaatggttaattaaccaattaattcccataacccctttgcccaaacttttggcccaccaatnataattntcggatcagggggtccatttggagggaaggaaccatttcccatnatggggcatgggtngncttnccaaatnagggtttnctgggncgtgnggggatgtnccaaaattgttaaatttgaaggatgttggggcgaaac

SEQ ID NO: 68602 - DNA, 574 bp, Glycine max
  Clone ID: PAT_MRT3847_32960C.1
ggctcgagtccttctcatgtaatccattcataatttatttttattttaggtcttcataacttacataggctcgttattcattttccaacaacttttggcttcatggaaaaccaattctttctcaatgctggtgtgccccctcagctgcattttgagccttcaccacacggtcaccaaccttgtccaccaccctcttggcaatcatcactgtcttctgccatggatgttcaagtcaccgttttgaattgttcaactgagcagacccaggattgcttctacaacaccaccccaacatgggacaagtcaacggatcatggccttcagtttgattcagctctgagttcaatggtgtcctctcctgcagcctccaattccaacatatcaagtgagaattttgtcatcagggaattgataggaaaattgggaaacattggtggtggtggtggttcagatgagatctcacctcattctcagcctttggttggtgcatctttctacatcaattgcaataataatagcaccaacacttcatgttatagcaaccctttgagttctcctccaaagtgaacacgat

SEQ ID NO: 68603 - DNA, 408 bp, Glycine max
  Clone ID: PAT_MRT3847_32961C.1
gtgttccatcattttgaaagaagcaaatttcgctgcggttaggattactattgggggtgggtattcaatgtggaatatactgaccccacctctggtcatacacacgttgcatccgctgagactgccaatgagaccctcacacgctatatcactcctaagagatgcgctcctctgatgacacattatacatgcaactctaatgagacttacgacgtgagctacacgaccggcggtcccttcgtaaccatacagcacaatatgctactcgatcactggtctaactactgtcttgacttaactgttatgctatcacagtcactcacatcatactatcctattttgtgctacgccaattccttccagcctaatggcattgctaccttacatttcatgtgttgaccttaattt

SEQ ID NO: 68604 - DNA, 519 bp, Glycine max
  Clone ID: PAT_MRT3847_32962C.1
cccgggtgcgacccacgcgtccgtggttctctcactttctgggtgcagcattttttttctgtttctccgagattccatcgcaaaggttgtttctttactcacactttctctagcttcctctttcaagtttgaatttgcgccaagagtcaagaatgtctaaagaagttattgctactcaatcacctgctccttttgagtatgagatcttggatagcgatgctgaagtccttagaactgttagagcctcatcgaatcacacgaatccatggattgaacctggaaggttgaaacttagacacagaattggccgaggcccctttggtgatgtctggttagcaactcatcatcagtcaactgaagattatgacgagtaccatgaagctgctgctaagatgttgcatccaatcaaagaggatcatgtgaagattgtattagagaaagtcaatgaattgtattttaagtgccaaggagttgctagcattttcctggcttcattggaatttcaggccttaaatggaa

SEQ ID NO: 68605 - DNA, 499 bp, Glycine max
  Clone ID: PAT_MRT3847_32963C.1
ctccgagattccatcgcaaaggttgtttctttcactacacactttctctaggttcctgtttcaagtatgaatttgcgccgaggttgtttcttcgacacaccactttctatgtctaacttttaattctggggaaaccgactgctgctgaattttaatttttttggattgaactctgcagggagtcaagaatgtctaaagaagttattgctactcaatcacctactccttttgagtatgaggtcttggatagtgatgctgaagtccttagaactgttagagcctcatccaattgtgctaatccatggattgaacctgaaaggttgaaacttagacatagaattggccgaggcccctttggtgatgtctggctagcaactcatcatcagtcaactgaagattttgatgagtaccatgaagttgctgctaagatgttgcatccaatcagagaggatcctgtgaagattgtattagagaagttcaatgaattgtattttaagtg

SEQ ID NO: 68606 - DNA, 1276 bp, Glycine max
  Clone ID: PAT_MRT3847_32964C.1
actccgtggttcctccgccatggttgtttcgttctcccccctcttgctcttgcgtccgcgttcaagtggggacttgcgccaaggttgcttcttcgcgatgagtattttcctttctgacttatgcttccgggttctcttactttctgggtgcagcatttttcttctgtttctccgcgattccatcgcaaagagtcaagaatgtctaaagaagttattgctactcaatcacctgctccttttgagtatgagatcttggatagcgatgctgaagtccttagaactgttagagcctcatcgaatcacacgaatccatggattgaacctgaaaggttgaaacttagacacagaattggccgaggcccctttggtgatgtctggttagcaactcatcatcagtcaactgaagattatgacgagtaccatgaagttgctgctaagatgttgcatccaatcaaagaggatcatgtgaagattgtattagagaagttcaatgaattgtattttaagtgccaaggagttgctagcatttcctggctacatggaatttcagtcttaaatggaaggatatgcatcattatgaatttgtatgagggttcaatgggtgacaagatggcaggactcaaagaaggaaggatttcattgcatgatgtcctaaggtatggaatcaatctggctcaaggtgttcaggaacttcactctaaagggatcttcattctgaaccttaaaccttttaatgttcttctcaatggtaatgatcaagcaattttgggagatgttggtattcctagccttttgcttggctcatcattcataagctcggacatggctaagaggtttggaactcccaattacatggctccagagcaatgggaaccagaggtcagaggtcctatatcttttgaaacagattcttggggattcggttgcaccattgtcgaaatgttgaccggtaatcaaccttggtatggatgtcctgttggcagaatataccagtctgttgttgaaaagcatgaaaaacccaatattccaagtggccttccttcttcagttgagaatgtcctcagtggatgctttgagtatgatttgaggaatcgccctttaatggtagatattctgagtgtctttcaaaggcttctaaataactttccatttatcttggtgtttggagttctcttggaaatggctgtggctgtgtaagcttttgcttagtttcaaaaagttgtaattatcttgggtctggcatattttatttagttgcattcatttagtgaggctt

SEQ ID NO: 68607 - DNA, 775 bp, Glycine max
  Clone ID: PAT_MRT3847_32965C.1
atgacgtggatggcccccgaccgaaagctcgaaattcggttggggaaaccttaggagggagaaaattccctccactcttgctttctttcggctcttcttcccaaaactctttcaaactcaaacaggtcaacaaaaccgggtcgaccccattacccgcttaacctcaaacaacatgccatcccgacaattatccaccccatcagacacaccccatccgctgccaccgccacgtcatcaccaccaccaccatcaccactttctgactcctctcctcgccgccaccgtctcaacatgctcccttttcctcctccttctcctcttctgccaccgcaccctcacccgcaaacgcgctaccacctaccctccttctccggccaccacctccccgccgcaccgcctctccttctccgtcctccgccgtgccaccaactccttctccacgcgcctcggccacggaggcttcggccccgtcttcgccggcaccctcgccggcgcccccgtcgccgtcaagctcatggactccgccaccaaccaccaccagggtgagcgcgagttccacaacgaactcttcttcgcctcgaagctcctctcccgccacgtcatcaccgccacgcacttctgctccgacccgaaacgacgccgcttcctcctggtctacgagctcatgcacaacggcaacctccaagacgcgcttttgcaccgcaagtgccccgaactctctaactggaacacgcgcttctcgattatcctcaacatagcgaaaggtgttcacttt

SEQ ID NO: 68608 - DNA, 493 bp, Glycine max
  Clone ID: PAT_MRT3847_32966C.1
ctagaattcattgtttggatgttttttttgtgaagaatttaaaattttggaattttaaaacaaaattttaaacaactaaaaatctggaatttcaatttccttctaaaagatgagaaattaaaattctctttttacagtcttctccacaaaacaccgtctgagctcgtggaacatcgatcaagtgtgagcgtagaggaacacatagaactagcataccaatcatatcttctctttttttcattcattttttttcaccctcataattttaattttttttatccaaacacaaaattttgaaaataaaagaattttaattgaagtatttaaaattcttaaaatttaaaatttcccaaaattttaaatccccccatccaatttggatagagaattttaactgagaaaagtgatttatcagagaatttgaatttctgtaatttaaaaatcattggttggatgtttttatgaagatttaaaattttgaatttaaaacaga

SEQ ID NO: 68609 - DNA, 223 bp, Glycine max
  Clone ID: PAT_MRT3847_32967C.1
aacccaatggcttatttcacattttaggggtaattttttggaattggtgaataaattccagcttttaatcccaaaattccaaccaccaatttttttctttcttccacttcttattccaacttttattgccaaccttaaaatatttccttaaaaaaaaattttaatccaaccttccaggggtttttagggtttaatagccatctcctgaagggcctggggaacc

SEQ ID NO: 68610 - DNA, 344 bp, Glycine max
  Clone ID: PAT_MRT3847_32968C.1
ggtataatggttctgtgtttatttccattgttgtctggatatttataactgaacctagacaatagctatggccaatcattggccagctgctcactaccagaataacaaaccagcattaattggttataacagaattggatattttgtgataacagaatatgaagcaataatagaataggaagcaatggaattttctattgctagtagttcacacttagtcgcggaaatgagtgggcttattattggacctcttgggtctgcgattacacaccctgctgctggagatgctatcatttacctcgcctggaaaacaaccttggccccaagggtggaagaagattacg

SEQ ID NO: 68611 - DNA, 606 bp, Glycine max
  Clone ID: PAT_MRT3847_32969C.1
atctaattcaccttcagcataacagggtggttctggtgtgcatggctagttttactaagttggcatgggtggttctggtgtgcatggttgtgatgggtgcacacaacactgtccaaggcatcacgtgtgggcaagttcagggtaacctagcaccgtgcctagggtttctccataacggtggagctgttaccagaggatgctgcaacggggtcaggagtattgtgagcaatgctaggaccactgctgatcgccgtggtgtgtgcaactgcttgatggttgctgctggtgctgttcgtaggttcaacacttacaatgcgcaggctctccccgggaaatgtggggtctacataccctacaagatcagcacctccaccaactgtaacagcatcaggtgaaggacaaaaagatttggatagtgatttggccgcgatgaactatgcatatggtactacgtatacgtgctaggaaagagaaataaaggaagatgagggtctccgtttatacaagctagttttgttttgtgcattaacaccctgcgaagtttatacacttccagtggttttaactatgtgataattttaaattaaataaaagagtttgttgatg

SEQ ID NO: 68612 - DNA, 641 bp, Glycine max
  Clone ID: PAT_MRT3847_3296C.1
ttcagaagctcaagctggacactgggacggcaatgctagagctgaaccagattctacgggcaaatgaaatcaactttgcagttctgactgctttacctgcattttttctctctcttttactcatgatgttagtacgtggatggttcaaacaggataccaaagctgagggaagaggtagaattgctcggattcagaggaggctacttgttatagaggttaagaaaaggattatgcagtaccaaaattatgttgatcaagggttggagagagatgcacaatatatgtttggattggcactctatagcctggatcgcctgtatcagtctgtcaagtggcacgcagaagctactggagagtgggaacgtttgcgtgaggatataatagatttggctaagcctagactacaaactgcacacaaggaatctgtgatatcacacatggttacatttgaatgcttgcttccaagtcggaaccgccagtagcatattttagcttaccattcttaatttttttaatgatgtttttcttgctactttgaaatccaattttgtcgtgaatgtatgcatttattcttcatacaaggttacattttatcatcaaagtatgatgataattttttttatcaaaaaaaaaaaaaaaaa

SEQ ID NO: 68613 - DNA, 248 bp, Glycine max
  Clone ID: PAT_MRT3847_32970C.1
acacaagatcggaaacaggaacgggaggggctttatagcgtaccttctggcgatctatacactacaatgagtataacgagcacagccaccgcaaccaggaccaccttccctgaatccacagactccgaaccaagacttacgtcatgctctccaacatctgcgggggggccctcaatttcctggactacgcgccccggaaattaatcccgcaccggcgactgcagggtcctctattttcatatgatggg

SEQ ID NO: 68614 - DNA, 436 bp, Glycine max
  Clone ID: PAT_MRT3847_32971C.1
tacggctgcgagaagacgacagaagggctctcatttcagagataggtgaatttactcatgatagttggaggtgggacatgaagtgtaggaggaacttatttgatcatgaaagtgatttagctgtgcagtttatggaggaaatcagttctattcctattcagatcattgtcctattctaattaaagctaaaaatgtggattggggtcctaaaccttttaggatattaaactgctggctaacagataattctttcaaagaagtagtcaatcaatgctggaattctgcccaagtttcaggatggggagcatatgtattaaaagaaaaaatcaaaagattgaagtgcagattaaagatatggaacaaggaagaatgtggggatatctttaaaaaagtccagcacttggaagtggagcttaataaattagaggaggacaca

SEQ ID NO: 68615 - DNA, 520 bp, Glycine max
  unsure (1)..(520): unsure at all n locations
  Clone ID: PAT_MRT3847_32972C.1
tccctccgtcctcccgcccgcccgtcctttgtttcggcgggcgattagggccctcagaagttctcctctttcccagttcggcccgcccacccaaaccctctccctctttctgtttgagaagttntcctttccctcctttggtggttttccaaagcccctccctctaaacctctttccgtgtgtttcttcaaccggcccttccattcattcctcccttcggtccgcctttctttccacgggttttcattccacctcttccaaaccccctcaattctcccggagccccacctccctcccccgttgtttggaattcccttggccccgcttccccacccgtttcccaagaaacccacccggctntttttcacaaagttananaaagccccgtttctntcgaaagntgggaagaaagaaaaggtaattccgaagaaagattgtttgtgggcacctaaagagaaaaagacctcgaccggagatttcccttcgcccggagggagaagccccctggtgtctgcttagg

SEQ ID NO: 68616 - DNA, 127 bp, Glycine max
  Clone ID: PAT_MRT3847_32973C.1
ataacgcagccctatcgctcgatgataacccgttcatggagtccacttcactcgccaatctactagggtccaacaacaccgttcaaccagagctaacgaggaacgaccatgtgtaccatcaacggga

SEQ ID NO: 68617 - DNA, 294 bp, Glycine max
  Clone ID: PAT_MRT3847_32974C.1
taggcctagccgaatccgtctccgtttatgtagctttcttcagtgtcgagcccgtatgagaaagccaccggcccgtccgcaacaccctcatagttgagcctgcatgtgctctagacgccatgcgacctctaacccctggcgtcaccgttacctgagtttatattccggaccattttaagccaaacatgtgcgactctgagacaaagctactgctacactaccgcagatggaaactagcctgctgatgccgagctttcgaagctcaacatacggaacaccacggctacgattacc

SEQ ID NO: 68618 - DNA, 472 bp, Glycine max
  unsure (1)..(472): unsure at all n locations
  Clone ID: PAT_MRT3847_32975C.1
ttgaaaaaaaagtgattgaaaaggaaaaaggtttaatttatcaatttgagcagaagcctcaagcatatatagacataagcccttcatataccacctgtcaaggagtattatttaaattttcatctttacagacataggttcctcttcaaagccccaacatgttgtgctaaatcatgtcttcatagagaaaaatttggccttaaagtctgttgttgccctgggactcactcacaggttccagtccaaatatgtgacagttgtcctttacaaaccactcaagaggtgaaatatgtgacgcttgtcaattatataaacctttttttttcttttttctttttggtagcctcagtctgtaaagatgaaaatttaaataatactccttgacaggtggtatatgaagggcttatgtctatatatgcttnaggcttctgttcaaattgataaattaaattttcatctttacagactgagg

SEQ ID NO: 68619 - DNA, 572 bp, Glycine max
  Clone ID: PAT_MRT3847_32976C.1
cgaaaaagctggccgcggacggctgtgatgattactatcatgatcttcgtctatatctccttattcttcgcccatcacgtctccctcaatggtatcctctccctcctcgcgatatcgtatacccaatctttaatcggcttcacatcagtggacttgatcggcaccctgtgatccccatcccactccacaacttcactcgtctccggatcacaatactgcttcaacaaccttcgatgcaaatgcaacccattatccctcaaaccatgcacatgcagcgtaggtaacttcaaaatatgcggactcgtcccctcaaacacaaacccctcactcaactgcccagcacttaccaacgcttccgatcgactatgttccccaaaactcaccaacggattcctccccgccatcaacaccccaaatgtatacctcggatccacctccaaccccctctcttccctaatctgctgatcatacagcaaactcgccgcaaccttcgcaccctgcgagaatcccaaataccgacccactctaccgtcgcacccttatcatcatcttccctcttacacctgtcaatc

SEQ ID NO: 68620 - DNA, 1444 bp, Glycine max
  Clone ID: PAT_MRT3847_32977C.1
taattataccaattgaacagaagcctcaagcatatatagacataagcccttcatataccacctgtcaaggagtattatttaaattttcatcttaacacccacgcgtccaattacttttaattaatttctcgctctccaaagtccttcctcaacatagcgcagatcagaatcagacaagagaagttgataagaacaaacaaaacaacaaccaaaccgtttattttttcttttttcttctctcaacactctcacttcctatctaatttttttcgttccgtcgtttcatcctcgcgagcgtgcatttgcattgcattgctctctctctctcacaaaacgacgacgacgtcgccaccgcgcaccgttttggttttcctttctcttccgtcgtttgcttccgcaaatagcctttcgcatgggaaacgctaacggcagagaagacggatccattccccccgccgccgccgatccctccgccgccgcacgtggaactcacgcgccgccggtctctctccctccggttcgcgccttctcctccgattcaatggccaatagcccgccgcacagccctcgccgctccagatcgccgatcctcttcggtcctcaggttcctctagctccattacaacgaggtaatggccctccttttctcaatcaaatgtggcagaatgagtctcatggtattgttaatcaccctcctgagcaagggatccctgtcatgattacatggaactatggtggtaacaatgtggctgtggagggatcttgggataactggacatctaggaaggcattacagcgagctggcaaggatcactcattccttatagtccttccaccaggtatatatcattacaggttcattgctgatggtgaagagagatttatcccagagctacctaatgtagctgatgagatggggcatgtctgcaatcttcttgatgttaatgattatgtgccagaaaaccccgatggtgtgtctgagtttgaagcaccaccctcccccgaatccagttatggccaagcatttccagctgaagaagactttgcaaaagagccaatggctgttccttcgcaactgcatcttactgtcctaggtatggaaaactctgacataggttcctcttcaaagccccaacatgttgtgctaaatcatgtcttcatagagaaaaatttggcctcaaagtctgttgttgccctgggactcactcacaggttccagtccaaatatgtgacagttgtcctttacaaaccgctcaagaggtgaaatatataacgcttgtcaattatataaacctttttttcttttttttggtagcctcagtctgtaaagatgaaaatttaaataatactccttgacaggtggtatatgaagggcttgtgtctatatatgcttgaggcttctgttcaaattgataaattaaattttcatctttacagactgagg

SEQ ID NO: 68621 - DNA, 455 bp, Glycine max
  Clone ID: PAT_MRT3847_32978C.1
tctccttccgtcgtttctctcatccctcgcgagcgtgcattgcattgcattgctctctctctctctctctctcataacacgacgacgttgccaccgcgcaccgtcgattgcttccgtaagtagcctttcgcatgggaaacgctaacggcagagaagatggatccattcccggccccgccgatccctccgtcgccgaccccgccgcacgtggaactcacgcgccggactcccgccccccggttcgcgccttctcctccgattcaatggccaatagcccgccgcagagccctcgccgctccagatcgccgatcctcttcggtcctcaggttcctctagctccattacaaagaggtaatggccctccttttctcaatcaaatgtggcagaatgagtctcatggtattgttaatcaacttcctgagcaagggatccctgtcatgattacatggaactat

SEQ ID NO: 68622 - DNA, 260 bp, Glycine max
  Clone ID: PAT_MRT3847_32979C.1
cggctgatccgggaagcttcaacaacagtgtagcagaacaacaggctgttctggaaactgtggccagagtcacaccaaacaagaatgacacgaaagatgaaaaatcatttcaactacatcatgtattcaatagagctgaggaaaccccgatgttgatagatcgaaaggacaatgtcttcatcatttctaactttaaatccaagtaccggtgctccagctagatttacgattgatttcagacctggtagttgctatttttc

SEQ ID NO: 68623 - DNA, 375 bp, Glycine max
  unsure (1)..(375): unsure at all n locations
  Clone ID: PAT_MRT3847_3297C.1
gcganaataacttgcgctcggatcaaaataaccgacccgtaagcgaattgattgatggaaaccgtgccttgtgcgagagctttgagcgacatggttaaacctaccaatcgggcacaatgtagaatgaaactcagtggtgcaacgatgaagactgtgagcttgtgaattgcgaccaccaccgccatcaaacccagcaatacacaaacggtgacaggcggttatgctggcaaagatgtgacaggaccatcctatgttcaagagcgagacgaacaaatccccgaggaaactcgtgataagaaagatgtggaaagccgtgacagggaataaaaacaatcagagcatcatgaagaacaagatgaaaacccctacattttt

SEQ ID NO: 68624 - DNA, 512 bp, Glycine max
  Clone ID: PAT_MRT3847_32980C.1
atagcgaatctttctttactaagaatatttactatctagtctagctagcatttctatatttttgttcaagaataggatttgaaaatagacatcatgttccaccatcaatagctgagatatttgtaaagcaacttttttacttgtcatcactataatttaaagttttcattgtgataggtaatgggttgaaccctcttcattgatctcttgtcatcaccattttcacgggtttagttatttataaaagagcaattcctaattgcacttttagttatttcatatgcgattccaatgtgacatgccacgtggaatcacacttcaaatattttttctcttagaaacaaaatgctaatgtgtcaatgttagactgttggcaagtgcatcaaattatcacaaatacaaagttaaaatggaagtttgaatatcgaatctacaagaactttatttgtacttatgtaggtgaatatataattgttaggcaataaataaattgatttgaaaagattgcgagt

SEQ ID NO: 68625 - DNA, 374 bp, Glycine max
  unsure (1)..(374): unsure at all n locations
  Clone ID: PAT_MRT3847_32981C.1
nccacgcgtccggttaattntatcttcattgtggtttaatgtaattagactacaacatgcatatatacatataattacgttttattcttattgttatacaacaagattttgtcattttggaacttaagggtcttggcaatactcttgtaattagggtgctgagatagattttcgaacttgtcaacttctttctagttgcgttcgtagcaccaactggtattctctatttctctttgtggttgtgcatcttgcgcttatactaatctatttttcttataaaaaattatctataaaaaagaatcacaaaattattattaaatataactttctaatgtaaaattctaggttgcaatagaaaaaaaaaggtgaatttt

SEQ ID NO: 68626 - DNA, 322 bp, Glycine max
  Clone ID: PAT_MRT3847_32982C.1
ttggtgggatatatttttttttttttttttaaccttaaccttgccctttatgcaaggggggaatgtaatgggggtgaatatggtttgcgcatcaaaaacgacctaaacgtcaattgtccacacatgcattataaaaaatttgcattcgcgaactggcatgcaacgagcagattcgccaaaactggatccactaacataaaaaatttcagtggggtgtaacaaccaaagaatgtgtgaaatcactaaaaaacctaatgtaaaaggacttgatgctgagggctccttaaacccatcaacactttttctgatacgaccagagggt

SEQ ID NO: 68627 - DNA, 597 bp, Glycine max
  Clone ID: PAT_MRT3847_32983C.1
gtcttttcttgcgggtagggttctagaagcagctccttctaacaccaatgaagatgcgttaagtgaaaaggttcacaatcagtatagtggatatagaccatgttgactctgtgaagaacactaccactggccacctgatctacaagctatgaaggcattgacaaacgtacatattgaaagagttgagaaggaagctgttgatatgaacaacaggactttcacgattgcctgacagcatgataagcttatggctgagcgtgaaagaggaatcacaatagatattgtcttgtggaagtttgaaaccacctaggactatcgtacaatcattgaagccactggacacagggatatcatgaagaacatgatcactgggacatcccaagctgacatgtgctggtcttatcattgattccactactgagggaggatgaagctggaatagtggaggatggacagactaacgagacatgctctgcttctattgacccttggcgtgaaacacatgattggttcgcgtgaacatgatggatgctactgacaccagaggactgagaggccatgtttgatgaaattgtgaaggaagattcttactatttg

SEQ ID NO: 68628 - DNA, 951 bp, Glycine max
  Clone ID: PAT_MRT3847_32984C.1
ccacgccgtccgattaacccgtacactctgaattaatagttagtgtcctttcttctcaggataccacttgagggtgcagaataattctgattctatatatttcaaaatctggcatataattgatggatcttatcatcagtgattcagactgggaaacttccagtggcagcaacagcagtgaggatcaagatgaaattgattttctatacggcggtaaagctcagagtatattgtcaagtttagaggaaagcattggtaggatcgatgattttctttcatttgagagagcatttgttcatggagatgtggtctgctccttgtcagacccatctggacaaatggggagggtcacaagtgtggatttgtttgtggatttggaaagtattaaaggaaaagtattaaaaaatgtgaactctaagaaacttttgaggattcgctccatttcagaaggtgattatgtaattaaggggccatggcttggtcgagttcaaagggtggtggacaaagtggctgtattgtttgatgatggagctaaatgtgatatcactgccttggaaagagagaagcttttaccactgactggtaattttcctgaagattcgcagtttccgtactatccagggcagagagtaaaggttaagtcctccagtgcttctaaatcaactagatggctatgtgacacttggagagacaatcatgatgaaggaactgtttgtgctgtggaagcaggcttggtgtatgttaattggatttctcatgttctagtgggttgcgattttagtgtgagtgctcccaaatgctggcaagattctaaaaccttgactgtgttatcttgactttcacatgcaaactggcagcttgcagattggtgcatcctctccgttgcggaccataggaacacactactcatcacgctcctatagatgatcatactatggagcattgtgtgct

SEQ ID NO: 68629 - DNA, 510 bp, Glycine max
  unsure (1)..(510): unsure at all n locations
  Clone ID: PAT_MRT3847_32985C.1
cactgtatgacgtcctccttctttgggggggggggggggaaaaaataagagggggggctggaggagcgggtccagagtaaacagccaaaccaataaaggaagagcaaactggtgaaagtagaatttacatacttctacttaaacttggaggcaaagtaagcacgaaggggccgtggaattggtactttaagcctaggcgcagttgatgaaaaaaacaaaaaacacntgttgagcgtgattataaagcgaaaggcgaagcccaaaaagttaaaacccaaacgcgaataacgatgttgccccaaggcagacgagacgggaccgggaggtgtttttagacagccagtacgattgcgcgcagtacgtgcgagccatttgtaatccgtatatgcagcgaagtantggccgtgggccaaagtggccgcacgttgactgttaantgccttaaccgccacacgaacttatgggtgtcgtaacgcatgcccgtaatatagatattggtggtgtagatgg

SEQ ID NO: 68630 - DNA, 232 bp, Glycine max
  unsure (1)..(232): unsure at all n locations
  Clone ID: PAT_MRT3847_32986C.1
ctcaaacgacacaaactctgtaatgtaagtgataagggttcccatgtgatgggatctgaatctaatcagagaagtaccaattagcgattctgcttgtgtgctataatcctcttagttacgataatctgtttcttccttattattggaactgatttattgttatgttgaaagtaaggccaatnttaatatatttatatttattaaataaaattatatatttaataatatttat

SEQ ID NO: 68631 - DNA, 375 bp, Glycine max
  Clone ID: PAT_MRT3847_32987C.1
ggctcgagaaaagatctgatttgaatgatgctgcgatctcagccttcatagctgagggctgctcatcacttgtgagagaatacttggatatatgccaatggagtttcccctgactgatcactgggccctgcttgtcctgtctcgctggaggctgccttttgtactgactaaactacaaaagatggctatcttagtgatggatagaagactatcagaagaggagactgctggcttgagaaaatgctgctggctactggatactgatgacaaggtggctgtctcttgaaaggaactacaagctggtctaataaagaaggcgctccacccttaaggcatagaactacatcatgttatggacacggatgacggggacaa

SEQ ID NO: 68632 - DNA, 255 bp, Glycine max
  Clone ID: PAT_MRT3847_32988C.1
cggctcgagtttaactgttcaaaagtgtttttgaatctgcctgccaataatgacttagatttctttggaggcacctgagtgtcagtttctcccttacctacccttccctttcccttcatttgatattgggatcctgtaaccaaaagaataagtgtcttcgcttctgatgagcagttatcattgtttatttccaaacttcaatctcttttactcttaagtcttgttttggacctggcctcgatgaagaaaaaataa

SEQ ID NO: 68633 - DNA, 532 bp, Glycine max
  unsure (1)..(532): unsure at all n locations
  Clone ID: PAT_MRT3847_32989C.1
ggctcgagctgaatttaacattcatggattgtctgcttgactttagcatttgacttgtgaagtaatataatccaaacaagcttcaacagcattctttctgttcaacaagtcttcactgtttcaaccagtgaccttcacctttctctctgcatcttctccctcttaaattaaatttttatgaattattgctcagttagtaacagaattaaggtgcttgtgtctttgatttgcttcacttttgtgttgaacactagagctgcaagcatcatggtatgcttcagaaacaaaatttacaagcatagaagggtgtaggagcctgtcttgattgcaacatgaaccatattgttcttgtgattcaatgctgcagttaatctgtttccatcactcattcaaggaactaaaattttcctcactgtattacagctggaagtcattgttgatgtccttaatgggtgatccagctgatgaaaatcttgaaactaaagagatggatgcaagaaagttgcattntcacatggtcaggaaacatatg

SEQ ID NO: 68634 - DNA, 194 bp, Glycine max
  Clone ID: PAT_MRT3847_3298C.1
ctttcctgtgttcaatttcgattctctcgttaatttaataagatgtttgggagggcaccgaagaagtagcgataatacgaggtatcacgaaatcctcggcgtctccaagaacgcttcgcatgatgatctgaagaaggcttacaagaaagccgccattaagtatcaccccgacaagggcggtgatcccgagaagt

SEQ ID NO: 68635 - DNA, 276 bp, Glycine max
  unsure (1)..(276): unsure at all n locations
  Clone ID: PAT_MRT3847_32990C.1
gcaggatctatctcagccaaagtcagaagttagtccaccagaaggattgctgngcagttcctcttttaagacatcancagaattgctttatcatggatggttcaaaaggaaacatcaagtttatattgctcaggaggaattcttgcagatgatcagggacttggaaaaacagtatcaactattgcattaatattaaaggnnagacctccattcacttaatgggtgcaccaatgcccganaaagtgaattggnaactctgaatctggntgtggatga

SEQ ID NO: 68636 - DNA, 374 bp, Glycine max
  Clone ID: PAT_MRT3847_32991C.1
aaaaatcataattttttaaacaatataaaacaaaataaaatactaataataatgtaataacacaaagaggtcgtatgcttattaggtattaattataacttatagtaactaagatacattaaacatggtgttgtaagtttactaaatttcaatttttggtgccgtcgttttaaaactatctaatatgttaaaacccgctcttcattaaaagtaaattttgttttgtatcaaaacctctatattccttcatgctgttgttattaatagctttgattggttctctcttcctaaccagtttcacactttgtatttgtgttcgaaagcgctccttacttctatattaaatacatgagttgattctgattactcatatg

SEQ ID NO: 68637 - DNA, 316 bp, Glycine max
  unsure (1)..(316): unsure at all n locations
  Clone ID: PAT_MRT3847_32992C.1
cggccgctcgagggcggctggncgggattcgtatccgcnctaattattagcggttttccaagacagaagtaattaatggagaaaatgagggtgatagtaattactgtatgtctatctctagagagcagcaattgcagaagatgttggtattggtctccttagcgaagctgaggcgtatgtgtctcctaagttaaaaaagttcatcacaccttgcacttcgcatgtcggtgaaacatgcagtactactagtagtagtggaagcgaagcattaatgcagaaccagggcgggctgcctccctgcctcttcgattctatg

SEQ ID NO: 68638 - DNA, 320 bp, Glycine max
  Clone ID: PAT_MRT3847_32993C.1
aaacatttactttgttctctctctttccgatattgatattaagagacacattggttgggcatacatacaaacagagagttcattgcttcagttgatcacgtaaaaaattacaaaagaacatacaaataacataataggaggaagaggtgagaaactcacagcagtaagagatgtggaaagttatggatatttgacattttatcagggtcacgcatcaaaaaacttccagcatagagcagtggaatgaactactaaggctttatcctacttgaggggggatgaccacttcccatgtgaagctagggccttctttttccaaa

SEQ ID NO: 68639 - DNA, 417 bp, Glycine max
  Clone ID: PAT_MRT3847_32994C.1
agcagaaaaatagagattggttattactcataattgggcttggtacaaagggggggggcttttctctttattttggggaaaaaccccctacaattgggcattggaaactggggttataaaaaccccttgcttcagggggggggcattcagccttttttttgatcaatgttcctcctcaaaaatggaccatttgggccacctggcctccattttttggcagggggaaaaaaaaattttccttttttcaccccctaattccaaaaagattttctaagggggccccccggggcaaaaccccccccttttgttggggggtctaagaaggaccatataaaagagcccttcccccctaagcgggggtgttgttttttatataaaaacccccgggggcggcgctttttttttctcccccccttt

SEQ ID NO: 68640 - DNA, 462 bp, Glycine max
  Clone ID: PAT_MRT3847_32995C.1
cggccccccctgcctgtagtacagtaattggggttttcagaagagaaccacttatgcagcagagaaacagaggaaatttgggaatatgctgaacatatttcggtggagggacatcaacgtgctacgcgggtcgggtattgatctggaacaactctgacttaaaggacttttattttatctgttcactgctctatcgggctgacataaaaggctgtggcaaacgcaatatacctccaataacaacgactctcaaaaggttgctgcagctaaccttaagaagcctctccctggtcttgtggccaccccttaagaacaaggctgatgcctgacccaatgtggccgccttaacgaaatcgctccctggaaggggactgggcagaacctagaaaaatgttgggtttagaagggggaattgtcgcaaccgccattacggaatgggtgggggccacactcatccacata

SEQ ID NO: 68641 - DNA, 307 bp, Glycine max
  Clone ID: PAT_MRT3847_32996C.1
acccacgcgtacgcattgtgctgcaccattcatagccattccatatgattaaccaggctaacagtaaatttagggtatggctttacttgctgaagagaccatccgcaaattcttgcagctactactgcacttaatcataatgaacattaatctgtaattgtacagctatcactaaaccagttcttaaattactccttaatcaccaaatcttcttggtctcaaatcttctaacaacttcttaatatatccaaaattaaagttccatacaatgatccacaacaataccataactttcacagtaaccttt

SEQ ID NO: 68642 - DNA, 226 bp, Glycine max
  Clone ID: PAT_MRT3847_32997C.1
gttgttaaatatttttttttattcagggcattccggatttaggaccccaggaattggtatgaaactcataggatggcctctacactggttctagcgaggaaggaaagctaaatttgcccagggaggctggttgttgccgaacgccttattgaaataaaaaactgccatttcaagagttaggggggggtcctggggggaaaagaaactaaccgtcggcggggtactt

SEQ ID NO: 68643 - DNA, 1375 bp, Glycine max
  Clone ID: PAT_MRT3847_32998C.1
gtaagtatatggaccccttgaaagcttaatcatattattggtgtagcgtaattacaatcaaataccaatttctataatactttgaatagtttattgttcaaattggcaaattagcgtcattctcagtttgagttggattccaagatccatatgaaaacagtatgttgatatcagaactttttgcatgagagttaattttacttcctttcactcccaagatacaagacatgagactaggagagaaaaaaagcattagcttaaggatccagcaaaagtgcatcaatatttcgttttcctccagggcctttggtataccatgatgatacatagtctccataaacaacatcacggtatttagctagtgatgagtcgtttatcagttcagaagcaggggaaatcttgactgtcttagcagggtcatgaaatgttgccacagagagccttgctctatcaggattagtgattgccctatgctcacagctcctgtactttccattggttataatctcagtttggtcagccaatagaacaaggatagcatctgacagaggctgaacagtgacccacttgttaccacccttgagaacctgaagaccccccacatcatcctgaatcagaagcgtgattgctcccatatcagaatgcgattgcaacccgagagtaagatccggttcggggcacggagggtaataactaatcgtaatgttctgataaaactccccaacagcatcttcaatgcacgaagctcgcaacccaagactctccgaaatcaaagccagcaacttttgcgccagaacattcatctcgtcgctgtacctcgccaccagctcacggtaatcggagggagactccggccaccgggtagggttccggcgagagagggggagcgtgtggtggtcgaagtagtccctccaatcgaggacctgaacggcgtcgttttgatcggaggtagttgttgcgagcattttgctgccgtagccctcggaggcggcggcggagcaggagtagcggagcttgtcaggaatgggggtgtcggagaagaaggagaggccggcgcggcggagggaggcgaggagggaaggggggacgccgtggttcgtgacgtggaaggcgccccattcgcggcaggcgcgagctatggagtcgcgggtggaggcgcgttgggtggggtcgaaggaggagaggtcgatgacgggaatggaatcgggttcgggtgcggtgtggcggacgggtcgggtttgagggggttggatgtattggggtgggacccgggagagacccgattgggccagggattgcaccctcgtcgtcatgatggcttcgtcgcttactacttgcattggataagaacgaaccatcgatggaatagaaacgt

SEQ ID NO: 68644 - DNA, 359 bp, Glycine max
  unsure (1)..(359): unsure at all n locations
  Clone ID: PAT_MRT3847_32999C.1
ggaacttgtaaaataaaatttgcatcatatagagtcatatatagcttgcgctgcgcagttattttgaacctttttttaatatgtgtaattcatatatgtgtttgtactagcttatgctataagataattattctgtgtgactgactgaactatttactttatggtaacgaagatattctcttgtattattttaattgttttcatgttcaccttttctatcctcccctactttttcatctaatctaaagctggctcctgcttctgcttctgccattcttcttcattattctctgcactaatttaagagcatgatacacgatgcaggtccctataanggagggtttctcatgcatgtgact

SEQ ID NO: 68645 - DNA, 530 bp, Glycine max
  Clone ID: PAT_MRT3847_3299C.1
ccccccttttttttttttttttttttttttttttttttttttttttttttttttttttttttttttttttttttttttttttttttttttttttttttttttttaattcataacaatatataatagctgcatttatttatatatattgatatatagtgacatagatcaacacgatcgagagttacataattatgagaacatgcagcttaaaacactagaacaatgcaaattaatggcactacttgttgcccttttctccagcatgcaagccactgaaatacccctgagggttgttttcaaatgttccccttgaaatgtaagctccatcaccaccaggggctttcatatatccccctgaaccaccaccaccaccaccgccaccgcctttgctagaatttcctccaccgccacctttcccaccaccactgctaccgcggtttccacccatgtttcaaataatcacaacagacacttacaaaagttactgaaatactagtactagataggaaattaattttgcggacgcgtgg

SEQ ID NO: 68646 - DNA, 620 bp, Glycine max
  unsure (1)..(620): unsure at all n locations
  Clone ID: PAT_MRT3847_329C.1
atcacccacctatgctcaacgacgaagtgtggcgcctagagaagattggtaaagacggagctttccacaaaaaattgtccaaagaggggataaacagcgttcaagacttcctcaagttatactttgttgatttccataggctcaaaaagattttgggcgttgggatgtcagataaaatgtgggatgtgacaatcaagcatgcaaagacttgcgagaagggcaacaaatactacgcgtaccgtgggcataattttaccgtctttctgaattccatatgccagttggttagagctgatatcaacggccaaacttttcctggcagagagctaagcaacatgactaggagctatatggaaaaattggtgagagaagcatatgctagatggaatgacttggaagaaattgatgcggctctgttaacccaaggtgaaaccttggaggaatttccaaacaatcatcaggcatcactaatagcatatgatcaaaatgactactttggtgataaatctgcccaaagttggtaactatgtaccaacccataatgcacaaatgggatgcagcgactgngcaagtgaatggaacatttggcacaacatcattcgtgaatggcgggatacctt

SEQ ID NO: 68647 - DNA, 484 bp, Glycine max
  unsure (1)..(484): unsure at all n locations
  Clone ID: PAT_MRT3847_32C.1
ccttcatcaatattacactcttcaacagccttctgttgcggcgtgaatgttgtactttctcaaatggtgaatatgttaagtctggtctcgcagaacttgagaaatggatagcaaatgcaaaagaggagtatgcaggaacgtcctggcatgagctgaattatataagacaagctgttgggtttctggtaatacatcagaagaggaaaaaatctttggaagaaattcggcaggatctttgtccggcattgactgtgaggcaaatttatcgaatcagtactatgtactgggacgacaagtatggaacccagagtgtgtccaatgaggtagttagtgaaatgagggaaattgtgagcaaggacaatcagagtttgagctctaattcattcttgntggatgatgatatgagcattcctttttctgctgaagacatagataaggcaatccctgctataaatactgttgatatcgatcttccagcattttt

SEQ ID NO: 68648 - DNA, 759 bp, Glycine max
  Clone ID: PAT_MRT3847_33000C.1
ggaagttaagaaaaatggaggggttggcatgattttggcaaatggtgtatttgataatgatgaagaaaaagttggagctgatattgtgaaaagagctcttagttaccctttgaaattaattgccaaaaacgctggtgtcaacggtagtgttgtcagtgagaaggtattgtccagcgacaatccaagatatggatataatgctgccaccggaaaatatgaagatttgatgtctgctgggatcattgatccaacaaaggtggtcagatgttgcctggaacatgcagcctctgtagccaaaaccttcttaatgtcagattgtgtggttgtcgagataaaggaacctgagcctgtacctgctggaaaccccatggacaattcaggatatggtatctagagcaacggctgcttcagtgagaagagtattttttttctcctcggatgaaatgcaaaatttggtatagccatatagcaagagtcgaaatgtattgaagtgtggtgaactagatagtgatgcatcctctcctcccttattttttttaagttaataataatttttttttgctgattacttccagattttatttttataattgtttttcgctcttttgtccagtaccagccgttgcgggaagaaaatatgcttttttttgcccctttaagtacacttacccttcggttggtagggaagttgaaaactagtggaataaacgataaaatgggatgaaatttatatttttacacgttacacgtagtggaatt

SEQ ID NO: 68649 - DNA, 425 bp, Glycine max
  Clone ID: PAT_MRT3847_33001C.1
tctgattaataacccactcgagttccgaccatgggcgaatcggttggagcttccgagtctcttggcgattctcccgtgcaggaacaaggccctcttgcccggcgccatcaacagactccgctgcacttcccccaccagagcgaagatggcggaacaagaactttggcagcgagaacagaaggggtcgaatggcctccttccacagcgtgatggcgatgaaactaagccagtggaacccactgaatgtgaaagagctgactcaccagaccagaactcatatgtttagagcggtacatctgattgtcataaactggatacatagaagcagactgatgttcattggcacaacaagggggtggctgctcgaccattacatttatcatggtgagtggataaaccaagtgggagggtcacatacacagctg

SEQ ID NO: 68650 - DNA, 3429 bp, Glycine max
  Clone ID: PAT_MRT3847_33002C.1
ggcaaagaggactgcagatgaggtgagagcaactgttcagcctcgtacacattacgaggctgaacagcggcaagactgtataaaaactctactgagagccatacatttggcgccctcaaactataccttaaggtttgatgcaggggttgcaatgcaaaagttttcagcatcaacactacaaaaggcaaagaggactgcagatgaggtgagagcaactgttgcagagcttcaaaatgctgttcgtgtatttagtcagttgtctgctgcttccaacctacatattcacgggtttgatgagaagaaaattgacactcatgttggatactgcaaccacttactttcagctgcaaaagttcatcttgaagcagctgaacgtgaagagcagcaagtactgcagagacaagaacttgctcgtcaggttgcatttgctgaggaagcccgtcgaaaggctgaagagcaaaggaaatttcagatggaaaggagaaaacaagaggatgaactaaagcgagtgcaacaacaggaggaacattttaggcgtgttaacgagcaatgtaagcccttgcggatgcaggaccggaattcccgggtcgacccacgcgtccggcacaacgaaccactctgaagccgctcacgttatccacaacactctcaaccctccttaaaccctaaccaatccaaccatggcttcttcttccaccttcactgcaatgtccgcctgcaagctctcctcctccgccgccatctcctccttcccctcccgccgccgctccaacgccgtcgttctgtcgaggcgcagccgcgccgccagggtctccgccatggccaaggagttgcacttcaacaaagacggcaccgcaattaagaagctccagagcggtgtgaacaagctcgcggatctggttggggtcacgcttggtcccaagggaagaaatgttgttctcgagagcaagtatggctcgccgaaaatcgttaacgacggtgtcactgtcgctaaagaggttgagttggaggatcccgttgagaatattggtgccaagttggtgagacaagcggctgccaagacaaacgacttggctggtgatggaaccacgacctcggttgttcttgctcagggtcttatagcggaaggtgtcaaggttgttgcagctggggccaaccctgtgctcatcacacgtggcattgagaagacagcgaaagctcttgtatctgagcttaaacagatgtcaaaagaggttgaagatagtgagttggcagatgtggcagcagtcagtgcagggaacaattatgaagtaggaaatatgattgctgaagcattgagcagagttggtagaaagggtgtcgtgacccttgaggagggaaagagtgctgataacagtctgtatgttgttgaggggatgcaattcgaccgtggttatatttctccatacttcgttactgacagtgagaaaatggctgttgagtatgagaactgtaagttgctgttagttgacaaaaagataaccaatgcacgggatcttatcaacatactggaggatgctattagaagtggacaccctatattgattattgctgaggatattgaacaagaggctttagcaactcttgtggtgaacaaacttagaggatcactgaagattgcagcactgaaggcccctgggtttggagagcgcaagagccagtaccttgatgatattgccatcttgactggaggtactgtaatcagagaagaggttggccttactttggacaaagctgggaaagaggttctcggatatgcctccaaggtggtgctcaccaaggatacaaccacaattgttggtgatggaagtacccaggaagcagtgaacaagagagttgcacaaattaggaacctaattgaggctgctgagcaagagtatgagaaagaaaagctgaatgagagaattgctaaattgtctggtggtgtggctgtgatacaggttggcgcacaaactgagacagagctcaaggaaaagaaattgagagttgaagacgctcttaatgctacaaaggcagctgtagaggaaggtattgttgttggtggtggttgcactcttctgagacttgcatcaaaggtggatgcaatcaaggatagccttgataatgatgaagaaaaagttggagctgatattgtgaaaagagctcttagttaccctttgaaattaattgccaagaatgctggtgtcaatggtagtgttgtcagtgagaaggtattgtccagtgacaatccaagatatggatataatgctgccactggtaaatatgaagatttgatgtctgctgggatcattgatccaacaaaggtggtcagatgttgcctggagcatgcagcctctgtagccaaaaccttcttaatgtcagattgcgtggttgttgagataaaggaacctgaggccatacctgctggaaaccccatggacaattcaggatatggactctagagcaacgagcaacggctgcttcagtgagaagagtattttgttctccctcggatgaaatgcaaaatttggtggccatttagcaatgagtccaaatgtattgttagtgtggtgaactagatagtgatgcaccctttcctcccttatttttttcaagttaataataattttttttttgcttattacttccatatttatttattttataataattgttttttgctcttttgtccagttccaactgttgtgggaagaaaatgtctttttttgctcgttacatcatttagttttaaatatattcgttgtaagttatgtttaatcaaatggcaagtagttgcaagagttgcataagaagagaaaaaaaggtggaaagcggagaaaaaaggataagcactcaaaatcgcgctatgacacagaggaacccgaaaatgatatgatggatgaacagggaatggaggatgaagaagctgacataaactacagagaggagccccaaactcagatgaatgatgatgctgaggaaaatgctcagggtcttcttgcagcagctgggcttgaagattccgatgcagatgaggaagcgcctgcaccttcctcaagcatagcccggcgaaggcaagcattatcagaatctgatgatgacgaaccattaatacaaaggcagtcaagtccagcaagagaaaactctgctgatatgcagttgagtgatggagaaatcagggatggggataagacaaatggagatgatggcagtgaagaggagaaacaatattagattttggaccctacaggttagtcttattatcagccaagtgattttgtacgagtgataacatttaaattttatgtatatatacttgaaaagttaaaaaggttttatttagaaaaagccaacttttttgttcgtggcaaaaaaaaaaaaagaagctgtgttatgtcaaatgtaaggcgtcgtttgtagctactaatgaat

SEQ ID NO: 68651 - DNA, 290 bp, Glycine max
  Clone ID: PAT_MRT3847_33003C.1
gagatcacaggcaatgtctacgtggactatgagaagattgtgcgtgacacatgcaggaacattgtttacgtatacgacgatgttgtgtcttgatgctgacaactgatatgttgcttttaacattgagcagacatgatcgcttatatagctcaaagtgttcactgcaacctaacagagatatctaaccagatttgtactacctaccaaagtcttatgttcggatataccactgtcgatactccagagctcatgcaatttagcaataaactttcctcgaataccggattcaa

SEQ ID NO: 68652 - DNA, 347 bp, Glycine max
  Clone ID: PAT_MRT3847_33004C.1
agcggccgcctatattttcatatatttagcccacgaacccacagaacaattttgggggggattttacgtgcattcccaccataggaaaaaaacaaaataacaagaagaagaggaaaacccacaccgctgataaataaggtgaagcccatgaagactaaatcgctgaccctaaaaaaatacaaagcctttcgcgaaataaatcctccggcaccataatcatgaaccctcaaaaaggcagcggacgcgaagcagggtttacagcccaaccctcaactggaaactgaacattctgcacattgagggggaaatggaagaagggaagccccgaacaaggggcggggaaaggg

SEQ ID NO: 68653 - DNA, 200 bp, Glycine max
  Clone ID: PAT_MRT3847_33005C.1
ctagactcgctgcacgcaacgaagctcgtttcggctcgaggaatatgatattgttcatgaccataataaccctcagcggggattcactctggggaaagtgctacataaaacacacccatacatatacagtaatattgttttcatgtctttactaataattgtattaaaaaatacttttttctaagaagaattctttcaaa

SEQ ID NO: 68654 - DNA, 506 bp, Glycine max
  Clone ID: PAT_MRT3847_33006C.1
aaaagcaaatttttttttttttttttccaacttttagcccaacatagccgaagtttttcaaaatttataattcttcccccccttttttttcataggatcctttgtttgggggcccgttttttttcgacgggtttaaacaattacttgattttcatttaaccactatactggggagcccttgttttaggttcaaaatcgtccttggtttttgacctggatgcaaagtcatcatacttgctaatattggggccgggttaaaaatcatcgttttgggaaaggcttgatttgagttctaaatcatcatattgggaaacactgggtctcgattaaaaatcattattttgggaaacgcttgacctgggttaaaagtcttcatacttgctaatattggggccgggttaaaaaatatttttttggggaacccttgacctgggttcaaaattattatttttgggaacccttgggctgggttaaaaattattgtttttggtaacccttggcttggg

SEQ ID NO: 68655 - DNA, 280 bp, Glycine max
  Clone ID: PAT_MRT3847_33007C.1
aacttgaagactttttttttgattttgtttttaaaagacacattggtggggcatacatacaaacagagagtccgtgttttttgttgttcacgttaaaaatgtcaaagggagcatacaaatatcaaaatatgaggaagaggtgagaaacacacatagtaagaaacggggaggggtgtggattatcaacattttataagggacacgcttaaaatacttccagcatagaggcagggaaatgaatacttaggccttttccctcttggggggtttgaccacttca

SEQ ID NO: 68656 - DNA, 271 bp, Glycine max
  unsure (1)..(271): unsure at all n locations
  Clone ID: PAT_MRT3847_33008C.1
ggtgcggagttcccggggcgacccacgcgtccgatggggaaaagggggacacttatacggcggctgggaatggggctctggggaaancgaanggcattattanctcatcatgcgttgaggggtggggaattctgtgtgcgcaactgggcaaaaacaatgggggggttgaatctgacagatatttanattttcatgaatttgggatgaanctctattcagaggcggtggaggagacaattacaagtgacgaagcacaangggtatttggcat

SEQ ID NO: 68657 - DNA, 226 bp, Glycine max
  Clone ID: PAT_MRT3847_33009C.1
cggggaaaaaacttaaaggttgaaaaaacattttttttccaaataaacccccctggggccccattttggggtccccaaaacaacgcgctttaaactgggggggaaaaaggggtcccagaggccgcgcttttttcaaaagaaagagcggggcacaaaaacaaatcggcgccctacacaggggttttttgaaaatctcccccggcgacaaaaaatggggttatccccc

SEQ ID NO: 68658 - DNA, 529 bp, Glycine max
  Clone ID: PAT_MRT3847_3300C.1
ggaaaattattgctgtgatgtaatgttaatgtaagcttgttttcttctccttttataatcataccgtagtatgatgagtactggcactcacgtccggttttcttctatgtctttctacttcatttggattccaaaggtttcccagttaatatagtagagtatgtaggaagcaacattaggtggctaagtaccttagtttgatttgaggcctttctgagtttttcggttccggggatcgattgattcatcaccatgcctttatatgagttataccggctggccagagagaagcttggtaaagaaactaccagcacacgtgctcctgatcaatgttcctcgccagagaatgatttttttgagctggtttgggagaacggtcagatttcgagccagggtcagttcagtagagttagaaagagcccctcttgcaagagtttgccaattcactgcttaccattttacagtcccaaggctagggataaagatgtacgatatggtagctacaccaggttggggaaatttggggatt

SEQ ID NO: 68659 - DNA, 506 bp, Glycine max
  Clone ID: PAT_MRT3847_33010C.1
cactgtatgacgtcctccttctttgggggggggggggggctatagaagtggagtttagggggggggagaaaagtaggggcaccaggataatagcaggggatagcaataagagtagaaaggactaacctagcagtaaggctaggttagcgtggcttataaccaagggtagttagcggtgtttacctaaatttagtagatttgggtaacgcgggctcagcgtagatgtagtgttatacccggtaatatgttactgttgggtggtaaagccccagcaggctataaaagttagagtgatttatgttattttaaaggtatggcagcagcaaggagtttaatatgttatgttagtaagtgtgtttacggaggaggttagcagcacacgtatatgtgggagaagaggagcgtgtagtaagagggtcgatttgagcagcagcaagtagcagcagtttttagtggctggttatgaagggtacttgtaaaccattgaagtaacttgcacgttaagg

SEQ ID NO: 68660 - DNA, 391 bp, Glycine max
  Clone ID: PAT_MRT3847_33011C.1
ggctcgagggtcaatacaggcaataggatattactttgactacaaagaatgtcacaggtgagtccgtgggagattaccctatgagaagttgaaaccaaacccagatatgtggaacctcttgctgagcctaccctatgagagacgtggaaagttgtacatgatcaatagagttgagcaatgatggtagatgggtaatgagatgagggagaggctgcaggtctgaatctctaaactgacatgtgtggcagaactatcatttgtcgatcataaattgcatacaatggcgcaagaccctactacctacatgaactgcatagaatctcctgagaccttatttcggtgtttcatgctgagatcttcacactctcagacagagtccatgcatgttagg

SEQ ID NO: 68661 - DNA, 427 bp, Glycine max
  unsure (1)..(427): unsure at all n locations
  Clone ID: PAT_MRT3847_33012C.1
aanctancttagaccnactngaagctngcaaactcgncacgagagaacantccacancgggncncngcannannncctagaacnagngcnnaacganganacnnggcaaagtncncgnacnacagtagngcnngcngccagtctagncagnangtggatnantgctngannntnnagaggtcagttnggnanatncnncanncgnagaattgngtagagacnnctacatagcnattgagaanatnnaatgnnggncantcgttagangnggagagatgtnanngttatnctcnatgancngtngnnnancgcgagtgacncgnngcgncgatgnncnatgcgcncnncancngancaacncgnagngcagcacangnannannnngatanncntgtancgtcgnnnacnntgnngnanctanngagn

SEQ ID NO: 68662 - DNA, 1444 bp, Glycine max
  unsure (1)..(1444): unsure at all n locations
  Clone ID: PAT_MRT3847_33013C.1
ccacgcgtccgatttgaatttgagtttagttctaattctctgggtgttgtacctcttgatgttgattttttagaatcagaatgcactaaccatgttgtaggaagtacatatacttctgacttgctttatgaggtacaggctaaggaaccttcttcttctcctaccctggttcctcccactgttcagccaccacccacactagagttgaagccncttaccatcaaccctcaaatatgcttacttggaggacaaggaaaaattcccagtgatcatctctgcctcccttgatgctgagcaagaggagaagttgttgctagtgctcaagaagcacaagaaggccattggatggactttagcagagattcctggtattagtccatctacttgcatgcatatgatacttttagaggatggagctaagccagtgaggcagccacaatgatgactcaaccccgtcattctagatatggtgaaaaaggaagtgaccaagctcttacaagctggaatcatctaccttatttctaacagccagtgggtgagtccagtccaagtggttcctaagaagacaggcctcacagtgattaagaatgaaagggatgagcttatccccacaagagtaatgaacaactgcagagtctacattgattataggaggttgaaccaagtaactagaaaagatcattttcccttgccactcattgatcaaatgcttgagcgcttggcagggttttatagacgctttatcaaggattttagcaaagtggcccttccactatccaatctactgcaaaaggaggtggagttagattttgatgaccgatgcaaaaaggcttttgattgcctcaagcgtgcagtgactaccacccctatcattcaagcacttgattggacagccccatttgagctaatgtgcaatgcatccaattacacattgggggctgtccttgctcaaaatattgataagctgcctcacgtgatctactatgcttccagaactttggatgttgctcaagaaaattacactaccacagagaatgagctattagcgatagtttttgctcttgagaaaattcgttcatatttacttggtactcgtgttattgtttatattgaccatgcagctctgaagtggatgctttggctccaagagtttgatttggagattcgtaatcggagtggtgcacagaacctcatggctgaccacctaagtaggattgagtgtgcgtctgaggactcacccattcgggatgatttttcggatgaccatttgtacattctgtatagtatttctgattccttccccactccttggtttgctaatattgtgaattacttggttgcttctgtttgtcattctttcgcaccatgtggccatcttggcatacagagaacaactcgcaaggtgcttgacttcggtttctattggcccactgtcataccctaa

SEQ ID NO: 68663 - DNA, 445 bp, Glycine max
  Clone ID: PAT_MRT3847_33014C.1
aatagatcattttttaaaaattatttactatttttacacataaaatcaaaataaatttttatttttaatgataataatcttaaccattatcataataacaaaaaacaaacaactacttttacacaactttacactagttatcaccttaactattgttgtaataacaacaaacaactaatttttcacaattttatatatctaaccttaacaattaattttaccctaacttaaaaactacatatgtatatacataaggggcaccaagagaggggctaggaccccttcctgcgcccctctaaatccgttactgcatactaatatgaacatgccaaaaatttcaaacttaagttactaaatattcttagacttcatgacaccatacagataaaaaaataaataattaaatagaaaagacgaatcatatacaaacaaatcagtttgactc

SEQ ID NO: 68664 - DNA, 631 bp, Glycine max
  unsure (1)..(631): unsure at all n locations
  Clone ID: PAT_MRT3847_33015C.1
agctcggaattcattgtcaagtccttcttacttcgtagacattctcaagccatgacttgtaaacttgtgatctacttcactttcttcttctgcttgctttttaccttggttccttatgttcatatgtatccctcgtacccctatagtggaaattaccagcttgacctcaatttctatgatagatcatgcccaaatttgcaaaggattgttggatatggtgtttggttagccttaaaaaatgacaacagaatggccgcgtccctccttcggttgcactttcacgattgcatagtaaatggctgtgatgcttctgtacttcttgatgatacaccatattttacgggcgaaaagaatgctcttcctaatcgcaattcacttcgggggtttgaagtcattgatgacataaaagaacatcttgaaaggatatgtccatcaacagtttcctgcgctgatatattagccttagcagctagggaagctattgatcagattggagggccttcttggcaagttcaattaggcccgagagatgcaacaacaacaagtaaggaagcagctgagcaacaaattccctcaccaattgagcctctagaaaacattactgcanagtttttctccagggtcttgacat

SEQ ID NO: 68665 - DNA, 363 bp, Glycine max
  Clone ID: PAT_MRT3847_33016C.1
cccacgcgtccgctcaattccaccaggatcaagtctatgtcctccaatcctaggccaaacaaagcctctggaatggtgccattgaaaccattacctctgagctggaccacagataactttgtgcaggaactcaatgatgatggaatagttccaacaagcttgttatttgaaatgctcaggtgagtcagtgatctcagttcccctattgactgtgggatgcttccagtgaactgattgtttgagagctctaggtactccagattggtcatgttaccaatccattgagggaattcactgttgaaatgattgtttgatgccttgaaatagctcaaagaacttagcatccctagtgactcaggtagt

SEQ ID NO: 68666 - DNA, 346 bp, Glycine max
  unsure (1)..(346): unsure at all n locations
  Clone ID: PAT_MRT3847_33017C.1
gtcttgngtaaaaaaaaaaaaacccaaaaaggagagggaggattggaaggaagcaaaagtaccaagaaggggaaaaattactgatgactgggataacaactccctggagtaaaactttgcttcgctttttctcttcattgggtgtgttcctcttctaccccttggaacccatgcaattgcccctcctggatccctttgatttggttcccaaaggggtttaaatggttgagaactcgaaaaggttttgggttttgtaatggaaggggtaggctgaagctatctggaatatttggtggtacatttttggagggccaattatgattatagcattttggccatactcttg

SEQ ID NO: 68667 - DNA, 1344 bp, Glycine max
  Clone ID: PAT_MRT3847_33018C.1
cactctcccggtctcctgttcctacttgacgctgactcttcctcctcctgttcctacttgtgcgtttccactgtcatcagacactgctcacagcaatcacagttactggaaatctttatagtcaagcctctcagattcgttgcttccaccatggaggaacaaatcccatttaagaatctccatagcagagagtattcgggtcacaagaagaaggtgcactctgtggcttggaattgcattggcacaaaacttgcttctggttccgtggaccaaactgcgcgaatatggcatattgagccacatgggcatggcaaggtcaaagatattgaattgaaaggtcacactgatagtgtggatcagctatgctgggaccccaaacatgctgatttgattgcaactgcatcgggtgacaagactgttcgtttgtgggatgctcgaagtggaaaatgctctcaacaggcggaacttagtggggagaatattaacatcacttacaaacctgatgggactcatgtagctgttggtaacagggatgatgaattaacaatactggatgttcggaagtgaattatgaggtaaatgagattgcttggaacatgacgggtgagatgttctttctaacaacaggaaatgggactgtggaagtactttcttacccatctcttcgacctcttgacactctcatggctcatacagctggttgttattgcatcgcaattgatccagtaggaagatattttgctgttggaagtgctgattcccttgtcagtctgtgggatatctcagagatgctctgcgtgcgtaccttcacaaagctggaatggcctgtccggacaattggcttcaattacactggagattttattgcttctgcaagtgaagacttgttcattgatatttcaaatgttcatactggaagaacagtgcatcaaattccttgtagggctgctatgaacagtgttgagtggaatcctaaatacaatttacttgcatatgctggtgatgacaaaaacaagcatcaggctgatgaaggtgtttttcgcatttttggttttaaaaatgcttagtatttggcagaggcaccgtttttactggtatttgagaatgcaaacaaagagcctgatgaggttgatttgtaatctgaatgaatcagattattatgtaataatctttggaacaaggggcattcacggacatgaatagaatcgaaaggatttttttttttcttccattctttttagtaattagtatggaaaaatgagatctttttaagaaattttgtatgttatacaagttgtgaccacaatttgttaatagatttagacatccttctttcttttctaa

SEQ ID NO: 68668 - DNA, 680 bp, Glycine max
  Clone ID: PAT_MRT3847_33019C.1
tggcccatacagctggttgttattgcatcgcaattgatccagtaggaagatattttgctgttggaagtgctgattcccttgtaagtctgtgggatatatcagagatgctctgcgtgcgtaccttcacaaagctggaatggcctgtccggacaattggcttcaattattctggagattttattgcttctgcaagtgaagacttgttcattgatatttcaaatgttcatactggaagaacagtgcatcaaattccttgtaggggcgctatgaacagtgttgagtggaatcctaaatacaatttacttgcatatgctggtgatgacaaaaacaagcatcaggctgatgaaggtgtttttcgcatttttggttttaaaaatgcttagtatatatggtaggggcactgtttttactggtttgagaatgcaaacaaatgggaagactgagagagcctaatggaggttgatttgtaatctgaataaatttgattattatgtgtagaacaaggggcagcattcacggacatgaatagtaagtaaaagggatattttttttttttccattctttttagtaattgtatggataaatgatatcgttcaacagcacattgccctatacaagttgtgacacaagttgtgcccaaattgttatgtatttagacataatagttcttttacttttt

SEQ ID NO: 68669 - DNA, 214 bp, Glycine max
  Clone ID: PAT_MRT3847_3301C.1
cacatagtaaaatggtatactctctataattggagattatgacagatttctagcttaaatctggagagaacattttttttggtttcatcatataaaaaatatatgttctgaaggaccacatccaagttcccaaaaaaaagggggaatttcttaaaaaattccggaaaaaaaaaaccggatttgtgttggagggagggaaacttggggaaaattt

SEQ ID NO: 68670 - DNA, 310 bp, Glycine max
  unsure (1)..(310): unsure at all n locations
  Clone ID: PAT_MRT3847_33020C.1
nngtcgcatgcacgcgtacgtaagctcggaattcggctcgagctcantcncgcngnagngnagnaaantctnntggacgccanggnggtattgaagcttttgagtagatntcnaagttgtatctgtagtgcganagantttcttanggtgnnccactgntgtgcatcccatcagaagcnatacatccntcnaactgtgctnctntanncagccgtgttnttgcngcagnnccaagancggtnnanatngngtccccgtatntgttggtgnctggattgcannnnnnngnngcgtggatagattccctgtg

SEQ ID NO: 68671 - DNA, 1019 bp, Glycine max
  Clone ID: PAT_MRT3847_33021C.1
gaatcatgaaagcccatgcatttttactcaaaattcatatacatttacattcatatacagacccgggttagaagcaaattaccaaacctcaaggatctgaacttacctcaatttaactacctaaaaccaaccaccataaaatccagagagagagagacaaaattagaaccctgatcaaggttttaaattatagtctcatttatagttccatcccgatccttgatgttgcaagaaattgtaaaaatttgcagtgaccccaaaaaccttgaagcaagaactgaaattgtagtcacggaacattttttaaaaccttgatcataatgtttaaaataaaaagaaaagaaaaagaaagatcaacgaagaaacccatatatgatatatccttagcagggcttgtgcaagcttaacaagccattaaagttggtacattgaaacaatgccttagctgtcatttccctctcaaacctccaaacatagttcagccccacaagcagctcagtgatggcagcttctgtcttctccttgtttgcaaagaacaaagtctgcaacaacaacacattggtctttggcaccaagttctgatgctcatagctcctctcactctgccactttatcatgttatgcgccaaaggtcccaaccacctcaatatcctccccaatgcatccctccactccccagccagcacatgatcatcacatgctgaaaaccccacccctctcaaccttcccctcaagcatgaccttatgcttcttggcaacatcccatacaaatcatccctagcttccaccccaaccaactggggtgactttatcatcttctccaacaccatcaccaagtttgcatagtgcaaagccaaagctgaagcacccaaagtatcaccatcacccttcaaccggacgcgtgtaacctcaacaccttgcaattggactcaaaaaaatccacttcgcaaatcctcattgtcttcaccaagttttgatcttttcaacggcccagatacaaaggagcaagaattggaaat

SEQ ID NO: 68672 - DNA, 336 bp, Glycine max
  Clone ID: PAT_MRT3847_33022C.1
ttctcctcgcgcccgccaagcttctctgctaaaaaaaaattaggcgtataaagggccaaagcttacaaaggcgccaattttgttgttgcagtgcaagagaaatggtgggcatggataatctgatggctgaggactcgaacttgggcttcaagaagacttatgagcggtgactcgtaaggggtgatcaagtggagacaagcgggtcgaaccttgaagagtatgggtgtagccacacacgagctgcgaagtgatactatcctcgttggagcatctctgagtgcaaaattcaagagcctctgcgtgagatggagacatgaccgtgagatacataacctt

SEQ ID NO: 68673 - DNA, 209 bp, Glycine max
  Clone ID: PAT_MRT3847_33023C.1
atctttcttacgatccatagatgtttataattcggaatcttacactgtaaactaaggactgtgtttatacacaaacagcttaatttcaactatatctaaaacgcaccttcattttttttcacctaaatcaatctgtattgttgatgaacataaagaacgtaatttagattaagatcacatatttagtgataaaatgttcatcaatttac

SEQ ID NO: 68674 - DNA, 114 bp, Glycine max
  Clone ID: PAT_MRT3847_33024C.1
tagcatttcatatgttctggctcattttaattttggtttgcagattgcatgccgagactatcctcacgcgcgacatctgtgtggtaaatttccagcctcttccacacaacataa

SEQ ID NO: 68675 - DNA, 560 bp, Glycine max
  Clone ID: PAT_MRT3847_33025C.1
cacgcgtccgcctacgcgaacgcctaatctatatccttactcatatctaatacgttaacgagaaggaaaagtgacgggaccaccttgatggacgacttgaccgagcagagcttcgatttggccctaaagtacgctcataaagcactctacgccgcaacagacaccgtcgtcgtcaatggcgccatcactgaccccggatgagaccaaggttgataacaataccaatcacgacgagatactgggcgagctagggcaggagctcggtcagatcctcgatgagaactgagataaccaggtatagaaccatctccagagcattcgcggggatttccgcggcgacttggggaagatcatggtgaagaacaccttgatgaagaggctcgctaagatgcacgctgacaaaacctataacaacgttaatctgatccttattgggattgttggagggaatgtgagattgagtgacaccaaaggggacactgaggaggtcaccgaggacgatgccaaagacactgctggagctgctgctcgtgccgcattggatgccccaattgatgctg

SEQ ID NO: 68676 - DNA, 617 bp, Glycine max
  Clone ID: PAT_MRT3847_33026C.1
tcgcgatctaaatttcgttggatacagctacacgattcctcacaagcagaatggacttagatgttgcgatgaggtcgatcctattgccaaggcaataggagctattagttgcatgattaagagaccaaatgatggaaggctaataggctataattttgattatcttggtgccattgcagctattgaggaacgactacatctacaagattcaaacggaagatccatatctggttgttcacctttgtatggcaaactgtttgtggttatgggagctggaggggctggaaaggcactagcttatggtggaaaagaaaagggtgcaagagtagttgttgccaatcgtacatatgccaaagccaaagaacttgccactaaagtgggaggagaggccattactctatctgaattagagagcttccacccggaacaagggatgattcttgcaaatactacatctgttggaatgaaaccaaaaattgacctgacacccataccaaaggaagccctgaaacactactccttggtatttgatgccatctacacacccaaattgacaagacttcttcgagaagcacaagaaactggagctgccatcgtctatggtacagaaatgttca

SEQ ID NO: 68677 - DNA, 1404 bp, Glycine max
  unsure (1)..(1404): unsure at all n locations
  Clone ID: PAT_MRT3847_33027C.1
gatcacatccacattgttggtcatagattagagagcgattggagtgaacgggaaaaggataatagagattattatcaagatggtattcagaagcttctatctctgaaacggacacatttttgtatggctgaagaccttatggctagatcattttgtaatgttgataaacattttggtatgcaccccatgccatccacttgttatgatcaaagttctatgaaaagtagtgaaaggttttctttctgtgcaaaaatcaaggataaattacaaaatcctaagaattacttttcaaagcatgtggatatctacagcaaggaaaaaactactcgacaagaattgccatcatcaacaactgatttcccaagaaaattcccagatctcatgaagggatttaatgaatgtgtaacccaatgtaagaagatgaatgaatcctcgagggatgaagaacatgtgcagaaacaaataaagttggaagactggaacagagatcgacatcatgatggttatgatcgggtgaaagaaacagttagtgattgccggaaaagggacaaatctactgtagttgccaacaagaatgtttctggtcgtaagttgtctctatatgccagcaagaagaagaattctgcaaaatctgttagagagctggatctatctatctgtgaaaagtgcactcccagttactatcttctaccaaaagaatttcaaatcccatcttctagccggagaacaaaacttgatgcagaagtattgaatgaccattggaaatgtgttgctccaagtattaaggattattcttctaaacacatgagcaaaaatcttaatgaaatgaccttgtttgaatgtgaagatgataggattgaacttgacatgtgtttagaaactgcaaagtcaacaactaagcaagttgaagagctcatagaaaagatcaataccaatatgattgaaagagacaatccaattaacattgagaagcacttaatagctcaaaatcttaggtgcattgagcagttatatggcgaccatgggattgatgtgctggatgtgttaaggaagaatgcatctcaagttttgccagtcattttaactaggttgaagcagaaacatgaagaatgggcaagatgtcgtgctgatttaaataaactttgggctgaagtatatgctaaaaactatcataaatcacttaatcatgatcgtgttccttctactaggaaccaagagctttagtacttgggttatgattttttatgcttttttttttcacttatggaaaaacaaattttgtccagaatgtttcttttttgtaaaaaaaatattacataatcatcatagtttttaaataaaaaaaacacacccccagggcggccgctccacgagggctagcttncgtacgcgtgcaggcttcgt

SEQ ID NO: 68678 - DNA, 432 bp, Glycine max
  Clone ID: PAT_MRT3847_33028C.1
aattcggctcgagtaagtgcattattcttaagagggggcaaaaactgtaatcacactgattcttaatttcttacaatccaatctgcagactgagtgtgatatataacttgattacgattcattcctcatcactgtgcatatacaaacattaaaatggaatgcttatctggacatcgcttcaatatgattttgctgatgttcagcttcaccaactactgcatacctttttctcaaagtcatatgaatctacttggagagcatccactgaccaaaattgccattcacaagaccaggatggctctacacaattcttcttgccttatatcaggccttttcgcgctaggaactcacggtgaggatacccacagggtgactggatagcttgaaggcccaataccatttggatattgctggggcggaatttttttattc

SEQ ID NO: 68679 - DNA, 202 bp, Glycine max
  Clone ID: PAT_MRT3847_33029C.1
tccgttccctcacattcacttcttcttggtgggattcgccccactcacttcctgcggttcccatccctacagggctctcactaaacatgaattgacccaacaaactttggatgctaagaacttgatgtgcacagaaaatcctcacaccggacgatctttgagatcttctgcaatattcggtgaaaagatgatcactaaggag

SEQ ID NO: 68680 - DNA, 898 bp, Glycine max
  unsure (1)..(898): unsure at all n locations
  Clone ID: PAT_MRT3847_3302C.1
cttctatccctttcccattctctccctctctgccccttcctcttcaaccctaaccctaactctaattccctcttcgtcctcttgtcttccccctctctcgtacccttctccatctccctccgccttcatgacctcgagggagaagttggacgtggcgcggcagctcgccaagctgggcgttgacatcatcgaggccggcttccccgccgcctccatggacgactgtaaggtcgtgaaaatgatcgcccaagggtcggcaatgccgttgacgacggctacgtccccgccatctgcggcctctcccgctgcaacgagaaggacatttgaactgcctgggaggccgttaagtacgccaagaggcccaggattcacaccttcatcgccaccagcgccattcacatggagtacaagttgagaatgtccaaagacaaggtcgtcgacattgcccgcaatatggtcaagttcgctcgtagtttgggctgcgaagacgtcgagttcagtcctgaagatgctggaaggtcggatagggagtttctttatgaaattcttggagaagttattaaggccggggccaccacgctcaacatacctgacactgttggtataactatgcccagtgaatttggaaagttgattgctgatattaaagctaatacccctggaattgaaaatgttattatttccacccactgccagaatgatctcggactttctactgcaaacactatagagggtgcgcgtgctggtgcaaggcaactggaagtgacgattaatgggattggtgaaagggctggaaatgcctncctagaagaggttgtgatggccttgagatgcggagcacatgtcaatggcaatctctacactggaattaatacgaagcacatctttctgacgagca

SEQ ID NO: 68681 - DNA, 280 bp, Glycine max
  Clone ID: PAT_MRT3847_33030C.1
tgcggctgcaagaagacaacagaagggatagacttgagtcttagtataattgttgcataatgcatgtgaattatttattatgaaatcaacaagtgttgttatgccttgattgagtgggtgattcatgaataatgtgatgagtgattgaaatatgaaatttaaatgataaagtgttgaaataacgtgaattgaattaagtcgagttatgttataaatagttgtataatgtattttttcttatgctttatttatctgtattttatattaaaatgtttttacc

SEQ ID NO: 68682 - DNA, 376 bp, Glycine max
  Clone ID: PAT_MRT3847_33031C.1
aataaaaaaaaaaaattgttaaaaaaaaagggttatcgggcccggttttaaatcctactttgtgtacatgcaacatttttgattggcaaccgttatcgttatttttcaatacaaattttgcaatcaactaatttttatacaaaacagttggtgacagacccgcactagatgagttaaaaatgttttaaagagcacttctaattcactttctaaaagattttattcacaaattggtaaaaaaaactctagggattaggagttgggttcagaggtgaggaaagtgacaccacttcttcaaaaccattggtgcattccttaaagaaagggctctttgaacatcctccttaggaagcgatctgatgattttgaaaacttt

SEQ ID NO: 68683 - DNA, 207 bp, Glycine max
  Clone ID: PAT_MRT3847_33032C.1
gcacgaatatcttgttgtttggagcgatcctttaaaaactatgacaacattgattcctaccgtgatcattgctagagcggtgttgcttgcagtggactcgtggtggcaccagcaccaccaccaccacatcatcaacaacgtggatttttcgttaggcttggagaaggcgacgtgtttcacgatcttatcaagacattgtttattcgt

SEQ ID NO: 68684 - DNA, 380 bp, Glycine max
  Clone ID: PAT_MRT3847_33033C.1
ctgagaagacgacagaagggtatgctttcttataatctccatcataagtattttttttcttttagttttttaactaatgttttaaggatattagttagcaaaatcctataaaaattagtgcgggccatagaatttaaaatcaccttataattttttttgtatcagttagctttgataacatgataagtgtgtgtttagattgatgatgattttacataactgattttgatagaagttgaaattactcctatttgtttcaattccaccatgatttttttttccatcataattgattctaccataattttaaaaataatctaaacatgtaaatttgataaaaattaagaatggcttacctcatcatgatcaaccatgatttt

SEQ ID NO: 68685 - DNA, 390 bp, Glycine max
  Clone ID: PAT_MRT3847_33034C.1
agctgactggcgggctgccgccctttttttttttttttttttttttttttttttttctctgctgaaatggaatcttctcctttacaacaaataatttcgtttgggtacaggttttaaagcacccacaagcactcatatcaaacatttttcctaaatctaactgttccaacttattaaagcatattagataactcctaagacaaaccaggaaagcctaaaaagtccacttcctaacactaataacacctaacacaaagcgagctatttcttaagggaaaaccaaccatggacatatccataccactttaagcgttatgtgaattgaaaaactccctctagcatgagccccaaaggggattagccctttataacacctaattctttgcacgg

SEQ ID NO: 68686 - DNA, 315 bp, Glycine max
  unsure (1)..(315): unsure at all n locations
  Clone ID: PAT_MRT3847_33035C.1
gtcgcatgcacgcgtacgtaagctcgganttcggctcgagcnnggaattcttnagncgcnntgacgtncncntgggntnnnntacancatgtgnntccgtangnngngcgtnatcngnagnangtggganccattgcagnnggtacntngttctacggnntgtgantccagntatngnnntngttgntnnaannntngnnacnnatgtngnnntagnnctgtncatntgtangtcccanngggncaangttnnaatacatgngcccacagattggtnncgagnctgttnagcngncaccagtgacnntgcnacac

SEQ ID NO: 68687 - DNA, 212 bp, Glycine max
  Clone ID: PAT_MRT3847_33036C.1
tccacgcgtccgtacagctgcgagaggacgacacaaggggaaagagtgtattagaggttgtgttgccaacactcctcaattcttggtcatctatgacaactaagacccattttatcatgcataaatcatatttttgcattctagaatttattcatataaacaatgaaatgataatatccagagaataagcgatctgtgcaagcttgagaaaa

SEQ ID NO: 68688 - DNA, 706 bp, Glycine max
  unsure (1)..(706): unsure at all n locations
  Clone ID: PAT_MRT3847_33037C.1
gagcaaagaacacatagaaggcaaaccccagatcacttgtgtctttggattgtacatttggtgtgcagcatctgaccctgcagatcctggggttttcaagtccaaaaaatatcttaaaattccagatagcaaaaagcttgatggactcaagaattctaaactaggaggcgaatcaacttcgtcaatgcatgatggaaatgcttcaactgttggaccaaaatcggtcgataaggaagaattgggaactgaagcaagttttaaagatgctgctatttctacagagaagaaaaatgcatcatcaccttctttgtcccgtctcctattggtttgctctccttgtgcttatatatgtggttgctcaagttcaagtaacgaatcttctgatcaacaagcaagtgaagatggcatgttctattgcagtttgtgtgaagttgaggtcttcaagtatagcaagcattgtagagtttgtgacaagtgtgttgatcgctttgatcatcattgcaggtggctgaacaactgtattggggaaaaggaactacagaaaatttttcacccttatggttgcttctctcctcttggtatgtgcatggtttgtgcacctagngcttgggattgcagcttattcttcagtggttgactgggatactngtgcttatctgctgttttgttgagaagaagaaatttctgtggatatctcctccaaaat

SEQ ID NO: 68689 - DNA, 232 bp, Glycine max
  Clone ID: PAT_MRT3847_33038C.1
atcctgtatagcgggcgcgctccaggcgttcgttcacacgttggatcactcgtactttgagcatgggaaggcaccatgatatggagaacgatatagaccatatggtttagcatagagtgatctgaggtgttacaacatctactacctgatccatcttctactacagagacacgattgagtttgactataccagaaccttgaaatataacctaaccactgcaatggctactgt

SEQ ID NO: 68690 - DNA, 133 bp, Glycine max
  unsure (1)..(133): unsure at all n locations
  Clone ID: PAT_MRT3847_33039C.1
ctaccactgtaatatcatatgaaaactacaatgaaacaccagcatctgaggagagtgcaatcaagatacgaatccagctgaaagcggacgaatagaagatccgatacagccgccaccaaacagnactaacact

SEQ ID NO: 68691 - DNA, 274 bp, Glycine max
  Clone ID: PAT_MRT3847_3303C.1
cgacgagggaaacggcgatcagaggtggcccatccttaatggcgcaaggagaaaccttcgcaacttgaaaatgagagtgctgcaattggaccctaccttgttgtgtacgagtatctgatggggaagaacatacgtgtgggtactggtctgaagcatacgagagggatcagtgccacacatgtacaacatggagtgaacactgtccaatgtggttgatgacaacccttcagggatgatcagctgcacgcttgtattgaattggttgccatacctc

SEQ ID NO: 68692 - DNA, 238 bp, Glycine max
  Clone ID: PAT_MRT3847_33040C.1
tctgaatccgcgcagttaggtttgtgattgattgattgatcaatcaaagagagagagagagagggtatgggagatcaagtggattgaacggtgcagaacgttctggaacaggagactctgaagtgattcttcgttggtggtcacaggcggcgtcggcaaaaggaaatgcagttcaatcctctcaattctcttcgcaacggttggttcttcggtcttcatcatctcaacggacccggcc

SEQ ID NO: 68693 - DNA, 223 bp, Glycine max
  Clone ID: PAT_MRT3847_33041C.1
ctgaaatcgtgtttcgcgtttcgtcatactcatttccttaaaatcctaactctaatcatttctcgcccgctacttctatgacccttcctccgaagcttcgaggtcttagtgaatctgtcgtgtgtttccttcaaaaactcactataaagtttaatactttggatgctggtgcctactattctgtggataatttgcgcaggtttgaaggacccaaatgaaaatt

SEQ ID NO: 68694 - DNA, 621 bp, Glycine max
  Clone ID: PAT_MRT3847_33042C.1
caaaatccctctcctcgttttctcctcaattttgatttctgatatcttcaatgtggacgacacaagaagccgcgccaggagaagcccccaccggttattgacgatgctcctgccaacgccgtcgtagcccccatggcgccgccgatctcggtcccggagaacgcacatgtgcgcgaactgacgcgtcagcactagcgggtgaagcgacatcgtcgtcgtcgctcatggccggtgtgactcggtggtcatcatcagatctgggttttgaccatcataacgaaaatctcatacagatctgacagtatctcgactccatggacggtggcgcctttcgccagaagggagaactccgacattgaccactccgtggtggaatcgctacccgctttcagattcagggcactgcgggaacaaaatgaagggctcttttgtgtggtttgccttacaaagttcgaggctgcgaaagggaaacaaaattagtttttgctcattttctattaatctgtcataaaattctttagttctgaaattctcgattgattgttgtggatgagattttggttttacttattccttcatggtaaaacagatgcattgttagtttgcttgtgatgaattctt

SEQ ID NO: 68695 - DNA, 323 bp, Glycine max
  unsure (1)..(323): unsure at all n locations
  Clone ID: PAT_MRT3847_33043C.1
gcaaaggaatacatgtagttactccanataagaaggcanattcaggaccacttgatcagttatatggctgtcactaacgtgtagttagctgcgtcagactcagcatagtattcagttaggctaaatttcaaagtgataggcggttattgaagtgcaagctaaagttcacnatacaagactatggagccaacaaaattaatgattcaatgcatctttcagttttaaacatttttctcagtcttntctctgtttctctctctaaacccaggttcactggatcnttgactagtggcacnatgttctaacagangattatagtntag

SEQ ID NO: 68696 - DNA, 302 bp, Glycine max
  unsure (1)..(302): unsure at all n locations
  Clone ID: PAT_MRT3847_33045C.1
angnaagngtagtaagcncggaattnggntngagnaattnnananaanatnaagantttagannagnganangaaagaagcaaangnaaannnnnacanagaaganttagaagnaantngaagannannnanananaangaagaagaagaagaagaaaaagaagaanaaggagagagagtgtgtgaaggtgatgaagatggaaagagngnancagagagagatagagatggagagtgnaatgtanaagaatgnntgttgttgggtctngnangaagatnatnggagtnggagntncaaacgc

SEQ ID NO: 68697 - DNA, 1702 bp, Glycine max
  Clone ID: PAT_MRT3847_33046C.1
tccaacgtaaagaaggaagaagaagtagtagttgctacttgatatggctccaaagaggaagcgccagatggcagtcaaagatcagaataaaggaaaagcttttaagagtcatccaacaattcaacttgctaggcatctagcagagataacttctcaaattcctccttgtgtttcatcacatgcaatatctcatcctactgatcctcctgctaggacatctgatgtgatacctccaccttcaatactaggggaacactcaccatgtacttcacaaccaacaaatccagatgcagaatgtagccttgacatggcctcagagaagacaacttctgttcgcaaaaagtttgttaggcagcaggtggcagagaaagatccgaataaaggaaaagcttccaagagtcatccaacgaaacaccgtactgcatatctatcacagatgacttctcaaaatccaccatgtgcatcacgaccaactaattcaatggaaggggcacacctacctgctaggatatctgatgtatcacttccaccttcagtggaaggggtacactcaccatgtacatcacaaccaatgaattcagatgcaggacgtactgatagatctttggctgcattagagacacaaagaaatgatgccaagccaattttatatcttgatgagcaaggattcttaccttctcgctctgctgctaatgggattggggatatcctcaagaggaattttactgatccctggccatcatggaaaaagataccaattagcacaagaaactcttggtttgaagagtttttggaaaacttctctgtttctccaccggattacaattgggctaaaaagaattttgaaatgcgaggttcagtattgctgaaaaataatctaaataaggctcgaaccacaatggataaacctcattggattacagatggtgtctgggagagattgtgcaatcattggagatctgaaggattcaaaaagaagagcacccaagcaaaaacaaatcgagcatctaattgtggagcatctcacactggtggctctattagtgcttcacagcatagagctaatatgatgaaagagactggaaccattcctactccattggagttgttccgtcgcatgcaccaacgtaaggacaacacatgggtggataggagatcacaacatgtaaacgaggtatttacacgcacattgaaacaattgaccaaaagagcatcggcacaaggtaaacctccaccaagtgagttagatgtgtggtgtgatgtagctaggtcaaagaaaggaaaagtatatgggtttggaatggaatctacagtagttgcaacaagtccttgctatcgttgctcatcttcttatcaatggagtgggtaaaaaaacaagagtttgatgaattgagaaaaaagatggaaggagttataaatggaagagatgggcttcaaaccaaagttgcaaatattgagaggcttcttgagcagaacaatgcattgatacgacaattgatggaaagcatgaatcgttagtccatgccatccatgtagtacagaggaaagtcaagatgaggattagacaaagtcacgaagtgaactatagtgactcgttgatactgatttgcctttaatgtaattgtgtcttgtatgacaaatgttttacagtttggatattaacgtatatattaactttatgaggttcacaaaatgtgttttg

SEQ ID NO: 68698 - DNA, 335 bp, Glycine max
  Clone ID: PAT_MRT3847_33048C.1
gaatggggatatgctgtctttgacgattagtgcaacactgcaaagcaaagcagtagagttgaatccttccacactggatgatccactttccaatggcaaatccgttcccagaaatggcacacaagcatcaacaccaggttcaaacttaatctctaacgctatcactcttataacgatgctacatatggcatcattgtagatcaggcttcgcaatgacagcaaggacgttcattgctatactcaactacatgcagcctgatagactaagctgatagctaggagttctgatgacgcagcacctcttgcaatggcacctgaaaatgctagggtttcac

SEQ ID NO: 68699 - DNA, 363 bp, Glycine max
  Clone ID: PAT_MRT3847_33049C.1
gggtgcaacacaagcaaacagtgttcaaagtgctgatgcaataatggcttatcaacaggtaattatgtcattcaaatgtaacttaatgtatcaagattttgggaaatcaaatgtgtgatcatgagggggacatttatggaactattaagttagggagtttgtcatgtctcttttcaaaatctggttcatgagtttcagaattctggttattttttctaacccttgtcataagtaactatttatgatattaagcttattttagggcataatgtatatcactagttcttatttattttcatgtacagatgtttccaactgtaattgtatgagcaagtattatatatttcctatgctaagtacccc

SEQ ID NO: 68700 - DNA, 487 bp, Glycine max
  Clone ID: PAT_MRT3847_3304C.1
tttatagttacacacaaaagcttagccctagccagcatcttccagcaccaatttgcttggatcggaattagggttttgaaattgatgggtacggagagaaagaggaaggtgagcttgttcgatgtggtagacgattccgcggcaaagatggcgaaaaccaatggcggcgctgctaataatctcatcaatcactggacctcaaggccttactcccaaaggtacttcgagattctggagaagagaaagaccctccccgtttggcaccagaaagaagagtttttgcaggttctcaaagataaccagactttgattctcgtcggtgaaactggtagtggcaaaactacgcagattcctcagtttgttttggatgctgtcgaattagagacaccggataaacgtaagaagatgatgatagcgtgcactcagcctcggagagtggctgcaatgtctgtttcgcgtcgtgtggctgaagagatggatgtaacta

SEQ ID NO: 68701 - DNA, 418 bp, Glycine max
  Clone ID: PAT_MRT3847_33050C.1
aaaaaggagaggggagctaatccatccgtaatttctgtgtacgtaccttctgagcttctggagtggagagacgggggcggaagaaacggctcgtccggagcagatacttccgagtggcgcggggcgcggaggagagcggcggactctgtcctgagcgaggcgggatttctggagaccatctgagcttatctcatgtcaccaggtttgtcaaacagtcctgagggtgccgactctacacgctgagttgatccatttttgggtcaaagtctattcagaacgaacccaaatccagcatatagtcgaagaaactaatctcttttttttttcagctcaaatgcctgcactgaaaatgcaccaacatcattactatatcacgtggtttaaagcttccggaagaagatgaaatatattggaattt

SEQ ID NO: 68702 - DNA, 625 bp, Glycine max
  Clone ID: PAT_MRT3847_33051C.1
gatatcattttctcaggtgaaacatgtgctgacacatggattgaaaaagaggttgcagctttaaaggaggatggttgccccaaagtctgggtagtcacttctgatcactgccatcagcaagcagcacatggagctggagcctttatttggagttgcaaggcattggttactgagatcaaggcatcacaaaaggaggttgaaaggatgcttcaagagcaaagatccacttcttttcaaggtagattattgaagcacaatcttgatgcagaagtagtggatgctctgaaggacctgaggcaaaaactatctgaaaatgagttgaagtaaaatatcagaacaagctttggaaagaccctgctcgatagccaacaagattgatcaaatgcgaaagaccctgccccaaaaattgacaagtatccctttttgaggccatcactgaccatttgttatttgcctattttatagttacagttactttcgtttgtacaagcgaagagaagctgaagtataaaacattttttttaaaattatatttttctatgtttataagtgtaatatgtattagtttaaaactttaaattgtattttttaattagcaataaataaagacgtgactcgtgattgg

SEQ ID NO: 68703 - DNA, 379 bp, Glycine max
  Clone ID: PAT_MRT3847_33052C.1
gttttctcgaattctcgtcctctcactcgactctgatacacattagaaatgtataggaaattacggctggtgattcacaagcttcatctctttggatcgatgctcatctctatggcctcgcggtatctaaagagatttagggtgcatgtaatactgattcatgcaaagattcatcggctgaatcacattcaggcaatcaatgagcagaagtttctcgtttccaaattgtggactatcttgttaggaaatacgatggtggtaaagactcagtgttgcgagttagcacaggtatctatgtgaattgcagcatcgcaaactgcaaataggagtacaatgacgataccagacatgatcatcttgagcatccaaggccattcta

SEQ ID NO: 68704 - DNA, 273 bp, Glycine max
  Clone ID: PAT_MRT3847_33053C.1
acgatcgaaaactcaaacactttatcaaacactttcaatatgatgcttaaaccctgacttatcggagaggtttattctatagatgcacatgcccaccaacctcctactgactacgctcattcagatgctgcaaatactaatatctaagaagctgattaaaacttacttaatcacatgctaccacattagaaacaatgaaagggaaaaacatgacaacctactaagtgatataaaaaattagaatcatcctaaacaatataccgaaagatatta

SEQ ID NO: 68705 - DNA, 304 bp, Glycine max
  Clone ID: PAT_MRT3847_33054C.1
aaaaaagcaagggtttcacaccaaagggtctgattcattaaaagcaatagattctttacaaccacccaccatttacttggcatttttggaacacatacataagccatatagcatttcttagggggggggcattttttacttttattttatgcacaaacataacaagggctgggagggaaaccccaaaattaaaaccgagatttttttgctgttaataataacaaccacccatgcgacataaaaaccacatgccattgggggagtggcttttttttcaaattggaaaccccttaatgatggaagg

SEQ ID NO: 68706 - DNA, 281 bp, Glycine max
  unsure (1)..(281): unsure at all n locations
  Clone ID: PAT_MRT3847_33055C.1
ggagaaacaaagaaaagaagagagagagagagagagagagagagagagaagggcatggnnctgggttactggcatgnggcggtanggaggtnnggcggaggaaaagaagccggaggacgacgggcatcattcccaatncctgttnttcgtgcagatcaggcaaaagtaccgtcagaccgaacttcgatcaagaagggcngagcctcttcttcccggcgttgggattccattgatcctaccgggccaaagaatttgccttcccccaaggaacattctccccc

SEQ ID NO: 68707 - DNA, 329 bp, Glycine max
  Clone ID: PAT_MRT3847_33056C.1
gatcacaggttgccgggcgttaatttctcggaggcagacgcctccgttacttgatgacaagagtgttccaactttttcctacttcttggtgtacgaatttctaagggaaagagaatcactctctgagcgggccgacagactacgcgaatcattttgcttcgcacactctaagattattatgctgaacaactcttcctataatgatataaggacctccgttgtctagtatttaaaacttgatcttgtgtgctaaactcaagttcacgtggcttgattaacaaggatcaacgccttgggtgaaaatttttggaagttagacgccttcccac

SEQ ID NO: 68708 - DNA, 190 bp, Glycine max
  Clone ID: PAT_MRT3847_33057C.1
ggagaaattcaggggtacgggatattccacatcgaatgggctttgttagatgtgtttagaccagattcaattgtttggagcaaatgctcagaatggtgatggcttattgtccttaggccaacatctgtatgcccaaatgatcttggatcatacttcatgaaattttttgtgaccttatgcaacatttctt

SEQ ID NO: 68709 - DNA, 434 bp, Glycine max
  Clone ID: PAT_MRT3847_33058C.1
agcaaaaaggggccacccttatcgcgtgaacacaacaaaaaaagtctcttttcgtttctcaaaagggaacgaaggcactctttttcactgactaaaggagcctatgaatacaggtactgccctgggtatggaacttttagaaaagcaccaaagaaacccactgggcttacgaaggaggagggggaaacgccgactccttatgcgtccttggccactctaaaagggagcctcgcaggacttgtaagcagcaaggggcaccttccaccgttctctgaagatttcaaactcccagggtggaaagcgcttaccatcgaagctcgcacattaattcctacaccacccggttccatagctgggccttgcggctttgaagacctcgttgttcttggtccactgccgcccaggtgggggtggccggggaaaaaacaatgggg

SEQ ID NO: 68710 - DNA, 567 bp, Glycine max
  Clone ID: PAT_MRT3847_33059C.1
gccattaaaaataaaaaaaaaaaaaaaaaaaaaaaaaaaaaaaaaaaaaaaaaaaaaaaaaaaaaaaaaaaaaaaaaaaaaaaaaaaaaaaaaaaaaaaaaaaaaaaaaaaaaaaaaaaaaaaaaaaaaaaaaaaaaaaaaaaaaaaaaaaaaaaaaaaggggggggctttttaaaaaaatcaattttttttcccgggttttggaaaaatattattttttttatggggccccaaaattaaattcattggcccttttttaaaaaccgttaaattggaaaaaccctggggttccccaatttaaaacgtttggaaaaaataccttttttcccaattggggtaaaaaaaaaaaagccccccccaatgcctttttcaaaaaattggcaaacttaaattggaaatgggaaccccctttttaccggcctttaaggccgggggggttgggtttttcccccaaggggaacctttaattttgaaggcctttatcgcccgttttttttggttttttcctttttttttttccccattttgggggtttttcccctaaatttttaaaaggggggcctcttt

SEQ ID NO: 68711 - DNA, 313 bp, Glycine max
  Clone ID: PAT_MRT3847_3305C.1
cttttcatttctcactctactcctttcgcttgttttctcttcaccaatcattcatggcacactctgcacaagttaaacccacaccaaatcaatcctctgcgacatttttctcattttcatacatttaatcttcatcatcatcatctatgtactaaagaccaatctccaagcacctggatatcagataacgctacattttatttatttaccctatgctgctataagactattaagtatttctatatatattttatttactatcacacactctacttatctattatattatcattgggattattatatatatgct

SEQ ID NO: 68712 - DNA, 401 bp, Glycine max
  unsure (1)..(401): unsure at all n locations
  Clone ID: PAT_MRT3847_33060C.1
gggaaaggggagacccccgcaggcaccggaccggaagacccgggaagacccaagccttcgcctccccgcccgaagcacaaaagcacggggaggggtagattaaaagaaccgncaccgcaccccccccncgaagggaaaccagaacgagaccacgcccgggcagcccgacaggggggacggaaaccggggaggggagaaacccaagcgacaacgggacaccccccccgggaggagccggaacgcgcaaaccaaaaggccacgcaaaaccaccgggggccgagagaaccccgggacggagagaggcccggggaagcccacagaagagagcgcgccccgccaacggaggaagcgagccggcggaaacggaggcaacaagaccggcggagaggggcagagagaga

SEQ ID NO: 68713 - DNA, 259 bp, Glycine max
  Clone ID: PAT_MRT3847_33061C.1
gctacgtacgctgcatgcacgcatacttttatggcactaatcatcactgccgcgtgacacgctgacggaaacctgcgtaccactaatgctgcgacatcccttcgcagtgggaatacaaaggccgaccgacgccttccacagtgcgcagctgatggaatggacgcccctgagcggccatagcgcggggtgtggggtaccgcacgtgaccgtcactgcaggccctaccccgctctttgcttcttccttcttctcgcacgtc

SEQ ID NO: 68714 - DNA, 291 bp, Glycine max
  Clone ID: PAT_MRT3847_33062C.1
cacaaacacacaatttttgaaattgaaccaaaacacggggacctgtaggtagatctatctatatctctctctctatatctatctacagactccaataactttctctacaaccactaatataaactctcaatactaaatccttcttcccatctaactaaaacacaacttaccctctggaacattaaaaccatcaattctcaaaccccctaaaacactttacacccgaaaaattccaattcctaatgaaccaacatcatgctctaacccccctgcaatttcctatacccataa

SEQ ID NO: 68715 - DNA, 602 bp, Glycine max
  unsure (1)..(602): unsure at all n locations
  Clone ID: PAT_MRT3847_33063C.1
aaagcatgcagccgaaggatacggaataaatgggcnntgtatagccggggaatgtattatgggggactgctacatgtgacacgcccactgaagcaggaccaaagaactccagacaaaggacctacgaacaaaggctctattaaaaaagcatagaataccttccttccttatacagtctttatttacacctcattaagctccatgttgttaggcgaaaacgtgtcaggagattacttgtcatgggtagacttgatctcttgaacgggaggagggtgaacggcgggcagttctgaaaagatgatgtccgagagccggccattcatcaccctgcgatcttgacccatggggcaccaacgcaagcagcaccgcacacagcatgcattacanggagaagccttacagggagatttcttctggagagattggcgcagtagaccagggcgaacgccacnnatgcgccatgcacacatncaacccgcaatcatgagacctacagtccctggatcaacagcacgagagatggaagctnnngcaacggatgctattgccacagaagcgccagcctcnnnncagccggcttgacnnnngcaggnnnnacanca

SEQ ID NO: 68716 - DNA, 266 bp, Glycine max
  Clone ID: PAT_MRT3847_33064C.1
gtttcgattaagcatccatgaagcacaggaagggagaaaagagagtgtttcattaggtgatacccatggtcttactggcatgcaattcagcaagatcagttttcctgatccatgctggtggaccaccacatatttttgatacgatgactgaagcctatatatgtactaatgcagaaagtcttgatcgatacgttgcaacgtatagatgcatgtgctgttaaggctgtaaataccagatttgttaatcagtatattgtagaacctat

SEQ ID NO: 68717 - DNA, 404 bp, Glycine max
  unsure (1)..(404): unsure at all n locations
  Clone ID: PAT_MRT3847_33065C.1
aaaccttccaaatactttaattnttctatggggattattcataaatgggagtgaatatctaacacgtgcattacataggtctatactctataacctagtcatatacatataattatttggggattcagaccaaatctttaaaagaatcataggttaaaaaaatgtcaaatttctcataaacttaggcatacaacaattttatcaaaactgactttagaatattttcacatctccgcaatgcaaaatccaatattccaatgtattaatctctaaaagttttatgaatggccaaaaatattcattcaatcatatttcctcaaaattacaattactaatattttcccgtgtccaaagtataattgaatttttcaccaattagaaaattaaaaaattttctaaaattt

SEQ ID NO: 68718 - DNA, 186 bp, Glycine max
  Clone ID: PAT_MRT3847_33066C.1
acaaggtaagggtactgcagcgcgataacaagagaaagggttagtagtcaatcacactacggcctctctagcagatcttgcgatgcatgttcagccacgcgtggatgaatagccttgtcggaagttccctcgctgcaactaacctctcatttacaccctcacggcactgtgtcaaatcgaagaact

SEQ ID NO: 68719 - DNA, 489 bp, Glycine max
  Clone ID: PAT_MRT3847_33067C.1
tttgattgctaacagaccaccaacgccaactagaggtcgccccccagtaacaaatgaccgaggttcgctggcttggatatagtgatcattatgaatgtccttcaaatttatgccgtactggctcgtgctatcagccttgttttagtgttatgtatatagcataatgccatttacgggagtctcttcgaacctgtgaacttaatccctgcagaaagttttggttctcatcactccatcagcaggccctgataagataagatatacacgttccgcatcaaaggttggtagccactgttacgtttactttgaccaagctagaacgcaattcaagttccccccacccgtttgtaaattgagcatagtttacgacatcaaggttatggttgtcatggaggctatttttgtcttcaattcttacatattttttacttgccctaggctattggtggggttttgttattaaaaagacgatgattttttttttttttt

SEQ ID NO: 68720 - DNA, 633 bp, Glycine max
  Clone ID: PAT_MRT3847_33068C.1
cggacgcgtgggtgcaaatgcaagaggtggttccctaatgatccattgcttctgttgaagaatcctttggtttctctctctctctcgaccgacattatctctctttatatcagttgtcttaggctgagtttctaaagcaaaagaaaaagaaagcaaagggttggcattgacccctttgcacaaaggaaaagagggtggtgttgtgttaaaaaaatattgaacttggttggttcaaagttgaaacaagattttcattttcccatttccacattttttgggtttgggagggaagcagaatccaagaattaagaaatgggttgctccataagagagtgttgcgtcttatttttggttttgttggtgtcatgtgctagaggggaagacccttatagattctacactcggaatgttacatatggagacatttatccacttggtgttaaacaacaggggattttgataaactggcaattccccaaggccacaaattgaagctgtgaccaatgacaacttgattattcatgtttacaacagcttgggatgaacctttcctcttatcttgggatggagttctgcacaggacaaactcatggcaggatggagtggatggcccccaattgtccaaattctccc

SEQ ID NO: 68721 - DNA, 706 bp, Glycine max
  Clone ID: PAT_MRT3847_33069C.1
aggtggtagacattgttttagaattattgaaagtttatcaaatagagtttgtttcatcttcagatattggtttcttgaagagtatcaatgggaaatcaaacaaggcaactaaaggcctttttaaacttcttaacgataataaggttgaaccctcaaccaagaagccatatggaagtattgtgaaggatcttgtcacaatcaagtcgtttgcatcaggaataatggtcccaaaagaatacatatggccagttaaaccagacaaatatctaggacttcccacaacacttgtggctgatgcccataaatcaggactagaagtttatgcttctggttttgctaatgacttctttactagttatagttatgactacgaccctgttgccgagtaccttcaatttgtagacagaggtgattctgttgatggtgttgtcactgatttcccagcaacagcatcaaatgccatcgcttgctttgcacacaacaatactttgcctaaaaaagcaccaactttgatcataagcaacaatggagcaagtggagtttatccaggcagcagtgatcttgcatatcagaaagcaatagatgatggcgctgacattatagattgctcggttcaaatgacaaaagatggaattgccttctgctcagaatccacagacctaacatcagataccactggaatgcctaaattcatgtctcgatcttt

SEQ ID NO: 68722 - DNA, 359 bp, Glycine max
  Clone ID: PAT_MRT3847_3306C.1
gccaccccaattttaaaatttttcacacatcatccacaatgcatggccggatttacattcctgagatcaactggagtttgatgctgctttgcctgactacaacagaggctgtcaaatcaagctgccaacatggtaaaagcaacgctcttgggagccatacctgtgatgcatttgacacagctcgcgtaatggctctaggtatagacctggtcgggccctcgaactaacggttcacccagaagcaaatagggccattaccggatccttgaagcaccttattctactgagtccctcatgaagatccttgagggggcctgggtacccattggcctgttgacctacgtgctgacaaacagaat

SEQ ID NO: 68723 - DNA, 691 bp, Glycine max
  unsure (1)..(691): unsure at all n locations
  Clone ID: PAT_MRT3847_33070C.1
aaattatcatcttattcgctgaataataaaatcacatgatgtggtctatctgtatcttacaaggagtaagcttttggaaaactgtcattttatacacatataaaccaacaaattattggcttggagagttcatggaagcgataaaagaattgttggcagccccttcggaagcattttcaccgtctttatgactacttgatgtctcatcaatggttgaaatctgagtattagagactttattactagacttctgttgatggtccaacattttcttttgttgcctgctttgttcctcgatacgccactgtaattttctctgaatctctagttgttcatgcatcaacctttgagcatcttattgcagcttaagttcctctctaattagtctaccagctttgacatcaaactgatgcacatcatttgtatgggttcttttgccagatttacttgacacaagtcacttattcgcagcccctccggggcgtgtccctcactcttcaaaccatgtaagaacaatgaaggcaatgaagattatgaataactggagagaagaataaagcaataaagaacagtcactcatgtcctaaagagatatttcacagtaagaaacaaggattggtaattaagtagtttgactnnnnnngctatcatcaagaagagaaagtagactatatttgccatttagtagctc

SEQ ID NO: 68724 - DNA, 324 bp, Glycine max
  Clone ID: PAT_MRT3847_33071C.1
gggcacaacatttctgccttttttatgggttatatttcagccccatatttaaaacccttacattactacaggcatacattttttttttttttacataaactttaaccattttctttttcccccaaatacatgaaaagacactgtgcgttcgtaaggccctttgccgcaaatttttttaaagaccacaattttttttttttgcctgcctgcctgatgcaccatgcatttacttgtcactggggcccccaggaagcgtttcctataatattggccaaaaacccttttttctgggtttgaccaccaagaaaatgggcatccctacca

SEQ ID NO: 68725 - DNA, 418 bp, Glycine max
  Clone ID: PAT_MRT3847_33072C.1
ctcgagccgaatcggctcgagcggctcgagcggctcgagtacggctgcgagaagacgacagaaggggtacaaaacatagacattaaaatttgatgtacatttttgttttattttccagcacagcacgctatgctccttcaatattatttaatttttggttgttgagaacatttgatgaatgcgcttacgtgttttgcaggcactggggcatgtgaatatccatcaactaggtgaccctttcttgaccatatatatgctttcattttatttaatatacatatactatgcttttatttgctactatgttgcaacagttcgaacagaaaatatcatattaattagcttgataattggtaactaaatttgcagcactagtacatcagtgttgaacacaacaaactcaagcggtgccaacgtt

SEQ ID NO: 68726 - DNA, 1812 bp, Glycine max
  Clone ID: PAT_MRT3847_33073C.1
acggctgcgagacgacagaagggtacggtgcgagaagacgacagaaggggtacggctgcgagaagacgacagaagggtacggctgcgaaagacgacagatactggaagttgaacttgattgacgtgtgttaatgcagagagagatatttcattgttgttcaaagtctttggtgcacttaaaagagaccagatacaagtgaaagtggatgatgaagtggaggagtatgagacaatagtggagtggggtacaactttctgtttcttggagtcccggttcgtgggtacctggctgttgaagtggaggagtatgagacaatagtggagtggggtacaactttctgtttcagattgagaatttcttctaagcttttaagtacatacatgtacatgcacagcacagcttttgcaatctgataggtagatgcccctttgggaaatagttgccgttgattgagaaaaggctgtagaccaatcctgttgttgaaggtaagtgcgactctaagcaagccttgatcgatagtagaaaacaatgaagaacttatgtgagaatggctctggtcctacccatttaacatcttatgctcttggatgctcatcatgggggacttcctctgaatctgatgtgcaacaatcatccatgtccaaaagtttgagcttgaaaatgagtgttctgccgcaacaatgccataagaccaaaccattgagttttctgcttctggtgccggactcctcttcgtccctttcttcccgtcagtcgtatcccgtggctggctctgcgccatccgggctgtcgtctgtgccgcgtggcaagtcgtccgctggtttgaaaagattaaccagtaattttttcgaatctctatatcaagttcttacaagtatcttataggagcttctgcatggcacttcagattgtctgatttctatgctttctagtcagtttacaggaacataatgtttttctctttcatatatctcttttccaatactgaaccgtgagtttattttctgactatacacatgccacaagctggcttgtcttatttgtttgtgcatgtataagttaacatgttcattaatagtttgatatgtttatataatttcaaaaaccccacattcatgcggttgctttgcatattattgttgctattaataattgcaacagcatttttcaaggtcgatgcccctttgttttattattcttttttttctttttatgtgcccatcttttttttttctggtgaagaattttttgtttttgagaaaaaaaaattactttggagttttgtggtatggtagtgaatctataacaagagggcttcttgttgtaggtaaggcaggcagacttgtatttgctgatggttgataccttactgttgtatttgcctataactttgtttcttgtttatgtgaatattctgggaattaaccatttatgaattggagctttcaaatttgacatgctttttatgatgtcaaaagtcttaaaaagggaagaattccttttcattcaactcctctcttttctttttctcttatcttttaataccccatattttttattttttattttcaattttttaacggttcacatgcattctatctgtctattctgttttgttgattcaagttgttttttgttggattgctttgtaaaggctgtgaacttgtaaatgattcctatactcgtacttttcaaagaaatttattaactttcttattattggcatgcgtttattgttgaatgaaaccaacatttggtgctcccatttcatttcaaactcatgcttcctgcttttgatgacgtactgcata

SEQ ID NO: 68727 - DNA, 457 bp, Glycine max
  Clone ID: PAT_MRT3847_33074C.1
gggaaggaaaggaaaattgtttttttgtctgataattgaattgcatcccctttcatatttatagaggtttttaaacaattttggaggaaaattttttaacaaattttggcagcatgccttgggggaaaatcaaaacgctcccaggagacaacttttaacgacccaaagatttgggattttgtttttaaaaaactggtaccaggaaacaacttttaacgacccaaaaatttgggattttgtttttaaaaaactactggcagggcatccatactttattggatagcccttcagggactggggcttggtcattttcctttttgaccttttacgtttttccttgtttggttccactgcaggctctggttttgctgcctcttcatctttcaattttgaatattggtctggggctgcatagggttccatgttctgctcccctttcataacaattttccaaaaa

SEQ ID NO: 68728 - DNA, 261 bp, Glycine max
  Clone ID: PAT_MRT3847_33075C.1
gaatgtctatctatctcttgcccgaatttcaacagcggcgactccgttctggttcagcgttccaatcacgccatgatcatgtataccggattgctatgcaaggtcaagaaaacggactggttcaagatgcacctctctgactctactttcttcgggacgatagcatacgctaccgcgagtcggaaagagagaaccgattctagccactacgctatcactaaatacatggacgggaagcgcaaggagttgactgctgcctac

SEQ ID NO: 68729 - DNA, 719 bp, Glycine max
  Clone ID: PAT_MRT3847_33076C.1
gaacaagacacacataattagcatagttattatggggagggttgagtactccccattgtttgagacaagaaggtgcagaggaaggttcatctacaggtcctttgcaatctcattatttgtggccatatgctttatatggcattacagatttagccacataacaaagggtgaagatggaaactgggcatggcttggtatgcttgcttcagagctgtggtttggcttttactgggtccttactcaagcccttagatggaaccttgtgttcagacaacccttcaaaaacagactctctcaaagatatgagaaaaagttgccaagagtggacatatttgtgtgcacagcagatccagatattgagccagcaatgatggtgattaacacagtgctatctgttatggcttatgattatccaactgaaaaattgagtgtgtatctctctgatgatgctggatcgcaaatcacgttctatgctctgctagaggcttcaaactttgcaaaacattgggtcccattctgcaagaggttcaaagtggaacccaggtcaccatctgcatattttaaaagcttagtctcatcaggttaccctacagacccaagccaagccaaagaactgggaaatattaagaaattatacgacgaaatggaaaaacgcattgaagatgcgaccaaatttggtgaagtagccaaagaagcacgtttaaagcatatgggggttt

SEQ ID NO: 68730 - DNA, 135 bp, Glycine max
  Clone ID: PAT_MRT3847_33077C.1
gggtttgatatgcgaaagacttcaaatattaaaaatatatggacataattaaacttttccttttaggtctcctcaaataaattacgctctattaagctcatgcgcatctttgtgcgagtggggaagagaggacac

SEQ ID NO: 68731 - DNA, 856 bp, Glycine max
  Clone ID: PAT_MRT3847_33078C.1
aacacgtctcgtttctgcttgacacatatcccgtatctgctttctaccgaagcccacatccactaccaatcctgaaagcttcagaggctgcaaacatcatttttatatcctccattgctggtgtgctatcaataggtataggatccacttatggtgcaacaaaaggagcaatgaaccaactgactaaaaatttggcatgtgagtgggccaaagacaatataaggactaattgcgttgcaccagggccaatcaaaacccctctcggtgacaagcattttaaaaatgaaaaacttcttaatgctttcatttcgcaaaccccccttggacggattggagaagcagaggaagtgtcttcattggtggcattcctctgcttacctgcagcctcttacataacaggacagaccatttgtgttgatggtggattaacagtgaatggtctctatataaattagagaagtactaccaacacactctctaacacacttctcttgacacatattctaccataagttacaaataataaaaaattacaaaatcatgaaaataagatctaggacccatatatttttgtgatatctaaaaaatttcaagcaataaaaaaaatgtattgaaaagagtgtataagataatgtgttgttagcatttttatataaactatgttaagagcaaggtctgatgcatacgttgctagtttttatattagtattgagaataaatagctgaaagtcccttggttcaatctatatcatttgggagggggaatttgttgggaataaatttgtatgtccacgatccaatcatcatgtaatcaattttaattttaataataaagtattattttattttcattgtc

SEQ ID NO: 68732 - DNA, 168 bp, Glycine max
  Clone ID: PAT_MRT3847_33079C.1
agtttctccaaattcctttccttcttccaaatccctttactgtcacgtgaaatctaacaccgaccgtgtacatagattatgtaatccaattaaatgatcgtctgcgaacaaataacatcagtttacttacagaaagcgcttatcaatggctttacacgaccatcttcc

SEQ ID NO: 68733 - DNA, 220 bp, Glycine max
  Clone ID: PAT_MRT3847_3307C.1
tttcactcgttgaaatgacaatgccgctcttctttgtggaatttgtgtctaattttggattcactaccctctctctgcattctgtgcctttccacggaggccactccctgcctcattcggcacaaactacgttctcacttgggcttttgatcacatcacatacttcaatgcacgttctgagattccacttcatcttgacaactacactggtactggcttc

SEQ ID NO: 68734 - DNA, 300 bp, Glycine max
  Clone ID: PAT_MRT3847_33080C.1
aaaaaaggacttttcatggacaaaaacaaacatggggaacttacacagggggtaggacccataaccatttaactaccggagataaaaaaaaatttttcggcccccattttttcaaaattacaggaacttttttttgttttccaaaatggggggaccctttaaaaaaggaataaattcaagcctatttcctatattatgggcacaactttttttttttttaaaaagggaggggcaaaaaatttttttatcatggacttcgacaaaagggggttattcaccttccttatttcccttggacgg

SEQ ID NO: 68735 - DNA, 336 bp, Glycine max
  Clone ID: PAT_MRT3847_33081C.1
gagaaacatgagcagagattacaattaatatataaatatacgttcatgttaaccagattataaactggaaagaacaagaggggagagatcattatgatacatctaacttatagaggatattattgctttatattattctacacatacgtataatatataaatatatgtgaatctgaagctactttcgcatcatgaaggtcaaacgctaggaattgggagacccagctccctggattgacagaggtgaacatcttatagaagtagttgcagagatgttgggtttgacattcaccggcttgacagatatagaatcatgaactggggtcctgagctata

SEQ ID NO: 68736 - DNA, 328 bp, Glycine max
  unsure (1)..(328): unsure at all n locations
  Clone ID: PAT_MRT3847_33082C.1
ggtcgncctttttttttttttttttttttttcacaaacgctgggtaattaacatgaaaactacattggagtttaccaaactaagtttacagttgccccaacggtcaacacttattaaacaacacaaagtgagatagcgcccatgattctacaaccactaccaaaaattaattcaaacactggccgcagcagataagtttctaagattctagaacacaaaggatttccatttaacagcatgctgtttgtgagagaaggcaccctacggaagaaattcaccggagcaggcggaactttgctccaaagcttggggggcctaataaagtaaa

SEQ ID NO: 68737 - DNA, 1207 bp, Glycine max
  Clone ID: PAT_MRT3847_33083C.1
tccacatcaggtgctgaggatttctcttatccttggactttcatcccatttcagaaaataaacttcagcattgataatatcttggattgcttgagggatgaaaatgtcattggaaagggttgctcaggtgttgtgtacaaggctgagatgccaaatggggagttgatagcagtgaagaagctatggaaagcaagcaaagcagacgaagcagtggattcttttgctgcagagattcagattcttggatacattcggcacaggaacattgtgaggttcataggttattgttctaacaggagtgttaatcttcttctctataactacatcccaaacggtaatctgcgacagctgttacaagggaacaggaacctagactgggaaacaagatacaagattgctgttggatcagctcaaggtctagcttaccttcaccatgattgtgtccctgcaattctccatagagatgtgaaatgcaataacatactcctagactccaaatttgaggcatatctggccgatttcggtcttgcaaagctaatgcattcaccaaattatcatcatgcaatgtccagagttgctggttcctatggttacattgccccagaatatggctactccatgaacataacagagaagagtgatgtctatagttatggggtggttttgctagagatactaagcgggcgcagtgctgttgaatcccatgttggagatggccaacacatagtggagtgggtgaagaggaagatgggaagctttgaaccagctgtatcaatactagacacaaagctccaaggtctgccagatcaaatggtgcaagagatgcttcaaacacttggcattgctatgttttgcgtgaactcttccccggcggagcgccccacgatgaaggaagtggttgcactacttatggaggtcaagagccagcctgaggagatgggcaagacctctcaacctctaataaaacagtcctcaaatcaaagctgattcctccaacccttctttcttttttctttatttcttttacttccaaattccaatggctagtgattggttttcatctcttccacgatgaaaacaaggatgctgctactgtggaaacatgagatgagagtaggagctagagaggaactgatgtttcattcaaacggctattgttgtacagttttagaaatacagatattgtcagttatctgcattatgagat

SEQ ID NO: 68738 - DNA, 284 bp, Glycine max
  unsure (1)..(284): unsure at all n locations
  Clone ID: PAT_MRT3847_33084C.1
gacggttgacttcactgggcccngagcgcgagggcaagacagttggactggatnaacgcgcgaagccacccggaccacgcagggaccagaccccaaagcangnggaggngcacgagaagcagaaggcccagggggagaacaccgaggaggggccgacaccccnagaggacgacgaagagacaaccaaggaaccaccagaaagggagccccggcgagccaggccgcccaaggacaagaaaccgagggaagcgagcgcggcacancgagcaagcaacccaccccac

SEQ ID NO: 68739 - DNA, 511 bp, Glycine max
  Clone ID: PAT_MRT3847_33085C.1
gtttccgtcatcactgtatgacgtcctccttctttggggggggggggggggggaaaaacaataatcaaagagacgaaacgagggaccagcgtacaatccaacggattttggtcataagaagaaaacatctaacgcagatatgcggtatgggtgtataagtagggtagtaaatatgatggagtgcgaacttatatatgatacggagccaatagtaatacgaggagtagtagagtagtaggggtagtaaggtgcaagtgagtggttatataaacgtaggatggtgccgtgtatgggatttgtgcgcgtattattacctagcgtagtagttgtagtagagcgttgttgcagtggcggctgcgtggttgttgacgtgttgttgttagcggcatagtagccacgcgacgggttgtataggtagttactgttagcgtgcgtaaggcgcaacaacgtgggccgcctacaatacttgttaacgttggaatggcagtaaccgggacacaagtgccaaatg

SEQ ID NO: 68740 - DNA, 382 bp, Glycine max
  Clone ID: PAT_MRT3847_33086C.1
cagtgcttctctgattccattttcctgattaccttctcagccactttctcctttcaaaggaacagtaaaaacctatttcgcaaaaccatacctaaataaaattcagcaaccaacacccctcatttccataattaacaaaactacctctctatcttcccccatcacaacacccaacatcaacgttcaattctcactaaacaatttacaaccccaaccaatttctcaaaataaaactaagataagaaatagagaaatattcgcagaacaatagacaaattgatattttaatataagaaatcataaatctcgatctcaacctaacattgaaaaaaatttcgaaactatccagataccactttatcacctaatccccaaactcaga

SEQ ID NO: 68741 - DNA, 356 bp, Glycine max
  Clone ID: PAT_MRT3847_33087C.1
ctctagccgcttaattagggttcatgaatatctcaagccttactttagtggttctaaattgaaaagctgtctagctagtcataacatcaccattactgatggaattgacaaaactagtgcagctttgcaatctacaaagttagcagattgtgattatctcaacagaaactttaagcagatgtataatgtttagtgggtggctcctgaagacaaagccagtttatggtcacaacttcattatgtttcgggtaataatccggaaatgcaagaagcttatcttgacaatctcgtaaatgtgttacgagaatttgatttgcacaagccacaggaagctcgctcattgagaaggaaagctc

SEQ ID NO: 68742 - DNA, 224 bp, Glycine max
  Clone ID: PAT_MRT3847_33088C.1
tgcttatcatgtttgcaaccaccaatatgtatcacaatttttaggactaagcattatctcataggcaaacaaatggatgcagcagtctttatgagcattatccgcaacatttacataaatcctcacgtccagatggattctacatggattctttacatagtcttgccatgccttaacaagcttaaagttaagtctattcagatccaccacattgcctaaaatgt

SEQ ID NO: 68743 - DNA, 319 bp, Glycine max
  unsure (1)..(319): unsure at all n locations
  Clone ID: PAT_MRT3847_33089C.1
tgatgccggggaggttgagaaggctttggaggtgtttgggaagatgggggatgggtcatgcttgcccaatttggacacttataatgttttgattagtgcgatgtttgtcaggaagaaatcggaggatttggtggtggctgggaagttgttgatggacatggttgatagagggttcttgccgcgcaagtttacttttaatanagtgtttgaatggaccttgtattactggcaatcatgattttgcaaaggagatactgagaatgcagagcaggtgtggccgtattgttcggcgtttgaaattgtgacttgttttattgtt

SEQ ID NO: 68744 - DNA, 192 bp, Glycine max
  Clone ID: PAT_MRT3847_3308C.1
agtataactcataaacaaatttagatatatacgatcgaatcttcctctgaagcaaatagttagaacaacgttaatggagaaaaaaaacttcactaccacgagaatccataatatcaaaacggaaacactacaaaggttataagtgatttctttttaaaagagttccagcaatttccatccaattaacataat

SEQ ID NO: 68745 - DNA, 972 bp, Glycine max
  unsure (1)..(972): unsure at all n locations
  Clone ID: PAT_MRT3847_33090C.1
aaacagatggctcaagaaatgaaagagcctgcagtgaacatcatagagcaatctcaagttgctcccccacaagattcccttcattcaaccattctccccctcacttttctggacattccatggttcctaacccgccacgccagacgcatcttcttctatgagtttccctttcctaccacccacttcctccaaacagcacttcccaccctgaaacactctctttccctcactctccaacatttcttcccctttgcctctaatctcatcctccctccacgtctccatgtcccttacatccgttaccttaacggcgactctgtctcgttcactgtctcagagttcagtcctgcaaacttcacgcttctcacgtcaaattcccctcaagatgtcaatgactggcaaccccttgctccggcatttccctcgccacgcactacacacgacggcacgtgcgagttccccctcatggccattcaggtaacggtgatacctaactctggattcagcatatgtgttatcttcaaccacgttgcaggagatgggagaacccttcatcatttcatgaagttttgggcctcagtttgcaaggccaaaggggatttgaatttccctggctctgtgcctctacccttatatgatagggacatagtgaaagaccccaaagggctcatgcacgtttacgtgcaagagatgagaaattcagcgttgcaaaataagcatttcggagggtttttacgtggtgtttacgctgacaaggtacgtgccgcttttatgtttagtagagaacaagctgagaaactaaagaaatgggtctctcttaaatgtaacagttcanggactttacatatatcaacctttgtagtgacatgttctttgatatgggtgtgtatgctcaaatcagaacanaaggaagaggaaggtaataactatgttacaaaaggttactttgatgaaccatgcaacattggattt

SEQ ID NO: 68746 - DNA, 336 bp, Glycine max
  Clone ID: PAT_MRT3847_33091C.1
gggggggattgataactcctaaaaaactgtgctctgcgctaaaagaatatagtgagaatttatttaaaaatatttatttagcacagatttatgtgaatatgtgaagaaaaaatgtgttatttaaacacatgtgtggatatataaactctggtgacacaaagcacaaaggtgtggaaatatcgcggaaaagagggggtctcattggcccccaccaatgtgtcgctctcagcgcacatctctctatgaacaccccgaattttaaggggcgctataaacacacaacacgctatatgcgcacatccaaaacacaatgtgctaaaagaaatctttttttta

SEQ ID NO: 68747 - DNA, 236 bp, Glycine max
  unsure (1)..(236): unsure at all n locations
  Clone ID: PAT_MRT3847_33092C.1
ggaagtagagatgatttctcattgtaaaattcaaagttttactgaattatgtcggttcccatagtccatcagagtggctgttatggcctatggggattgatttcttatgttgtaatattccctgtttgctccttgcatatgtctctatctgtgtgtgttntaagaagtgtcaacttcttgaactgtgctgcattttaacctttttaatgactatatgtatcttttttttaaaaaaa

SEQ ID NO: 68748 - DNA, 438 bp, Glycine max
  Clone ID: PAT_MRT3847_33093C.1
aaatgaagatcgaaaacgccacatcgagatctatttctcttcattttcactcacccacttaactcccccaaccctattcagatcccaaacccaaaccccgccacgcgatgtgtttcaaatcggagcgataaacccctgcatctcgcacgatcccacgccgtttcgcgtaaaaatgggtgcgagccaatcagtgcaaagtttggaagacagcgaagaagaggaacaagaggaggaagaagaagatgacgagaggaacctcaacgggcccttgatgggccgggcccaattgggcaaccacatggtgaagaaggttctggagcaggagcccgagatgctgccgtgccatgcctccgcttctccgctctcgccgcagctctcgtcgctcgggacgcctcggctcggcccctcgatcaaggtctgggacccctacaacgttct

SEQ ID NO: 68749 - DNA, 543 bp, Glycine max
  Clone ID: PAT_MRT3847_33094C.1
atggtggagtggttcgagattctcctgaatgctagagatcatgcatggacaagagcttataaaccgtttgtaatatagcagctgctgtatccctaataatctgcctggtcgggcagatccacaggcttatagtctagcaatatagatcaaggtaggatataaccctctatccatattcccctcgcacaagttaatgccataatgacgctagacacctacatgtccaagattatccaatcgtaagcagctgtacaggcacaaacttgtatgtcaacaacagtgatcttaattttgacatcttcatggatccatagatatctcttataatttactagcagttcaaggtagggagaacgtctgcagacagtataagggtcaaggtgcaataggggcaaactatgtttctggatatactatatattatatactatgagtttcgcttgcagcattacaaccagtcactacatccatgttccaacccactattgcgcatccatccacagaaccctaccctttaatctccccagacgtaaccactgtccc

SEQ ID NO: 68750 - DNA, 301 bp, Glycine max
  Clone ID: PAT_MRT3847_33095C.1
gcttgttggtaccttatccgtacacagaggctagtctggcatagtccatatgaatagagatgcttctgacctttgtagcgcaacactagtctccttccaatggagagaccggaaacggttagcaccccttaaatttcatacatgcttaaacgccgcatgttacggtaaaacctccattactaaacccggtatagtctgcaccctctctgtggtcagatgaggttcccatgagctcagtcacatatatggcagacgaagtatcgtacgccataaaagtcacaggatatgcagttcacaacat

SEQ ID NO: 68751 - DNA, 493 bp, Glycine max
  Clone ID: PAT_MRT3847_33096C.1
tggtttttctagagcggccgccctttttgtcccgtttttttttttcttattggcttggggggagagatctagcactgctttcctaagagctcacctaccacaatgatgtacatataacacttcctctctaagctctacttacataatttttaaaccttccttatctcacccttggctaaattatggggggggtcccctcaacataagtcccaatttaacccccatagctccctaatcgatgaaaatatatccgaatcagattgatattgccttgtcaacaacgcattcatatcgtagacttggcattgagccttgccattaacatgccagccaagttccaacaaggagcaactcatcatcaattttatgccatgaaaaaaaaagggacttgccacatcaccattaaacctacaacgggacttaatctcaccatttcacaatcgagcggtgaacattgtcaaaatcgacacccgggaccaccatctaaatttag

SEQ ID NO: 68752 - DNA, 1207 bp, Glycine max
  Clone ID: PAT_MRT3847_33097C.1
attcaaaaaaatttatagaactttctatttttataaatgattgtataattttatcataccaaaaaaattctccttttttcattttcccacgtggttgtttgtgcaacaagttaagcaacgtgaaatgcagcagcaggcccttggtatatataaccagcatttgagcaaaagttagaacaggaagctttttggtaacattaactaagcacaaagcattatcattactactataagcttatagttgaaatctttgagcatagaaaaaagatgccgatttctagaattgccattggaaatccttcagagtttggccaagcggatgcgcttaaggctgctcttgctgagttcatctcaatgctaatatttgtctttgcaggagaaggctctggcatggcatataacaaactcacagacaatggttcggcaacaccagctggggtggtggcagcatccctgtctcatgcatttgctctttttgttgcggtctctgttggtgctaacatctcaggtgggcatgttaaccctgctgtcacatttggtgcctttattggtggccacatatccctcctcagaggcattctgtactggattgctcagttgcttggctctgtagttgcttgcttgctccttaaatttgccactggtggattggaaacatctgcgttctcattgtctcctggggtgggagccgcaaatgcacttgtttttgagattgtgatgacttttggtttggtttacacagtgtatgctactgcagtggacccaaagaagggtaaccttgggataatagctccaattgcaattggtttcattgttggtgctaacatcttggcaggtggtgcctttgatggtgcatccatgaacccagcagtttcttttggacctgctgttgttagcgggacatgggctaatcactgggtctactgggttggcccattaattggttccgctattgctgccattatatatgagacttttttcatcacccctaactcttatgaacatcttcctgtaacagattattaggacctaaattccctattagagtttaaagttgggggtcggggatgatggttctttgctttccatgaagtgctttgttgtttgcattcccttgttttgatttctgttacatttcgtcttgttctacaagatcatttaccaagtaattgccacatttaaacttcgaagttttaaccaaacttta

SEQ ID NO: 68753 - DNA, 1595 bp, Glycine max
  Clone ID: PAT_MRT3847_33098C.1
cagagagcttactccttctctgggccaaactctacaaattcaggtgccgatagcttaggcaataaaaacagcagctacgtaaaagggcctgttgtggaggaattcacttttcctgaaagatcaactcccttcaacagctgtcatgcttctaccattgttgaggttgggaagggtcattttttggttgcctatttcggtggctcatctgagggggcaccagatgtaaaaatatggttgcagacttataagagtggcagatggaaatcacctataattgctgatgaagagccaaatgttcctatgtggaaccctgtactgttcaaacttccatccaatgagttactgctgttctacaaaataggcctagatgttcaaaagtggagtggattcatgaaacgctcatatgataaaggaattacttggacagaaagagaacaacttccttctggtatattaggacctatcaagaataagcctctcttgctggaaaatggtgacttactatgtggatcttctgttgaaagctggaactcctggggagcatgggcagaggttacgacagattttggcggagcatggagaaagtatggcccgatttacattgagaataagccccatggtgtgattcagccagtaccataccagactgcaaaggggacactgcgtgttttgctacgatcctttgatggcattggtagagtatgtatgtcagaatcatctgatggtggcaagacctggggatatgcaaaacctactcagctccctaacccaaattcaggtattgatggggttaagcttagagatggccggttattgcttgcttataatactgtatcaaggagtgtgcttaaagtggcactctctaaggatgatggtgattcctggtgtgaggttctcacattagaggatacatcgggaatggaattctcatatcctgctgtaatccaggatagtgatgggcgaatacatatcacctatacatataataggacacaaattaagcatgtcgttcttcggccaagttgatgtggagtaaattgtttcaattgagaaaaagcagaagcaaccaatcctatacggctgagatcatatttggccttttctatcatcagtagttgtaacctgtaagcacatgagcaaggactaaaagcatgagtattcattgtttattacaaacttcttatttccaatttttatatttggggtacagttattcttaattttttaaagattttttttatacgggacagttttttttttggtataacttttttttgaattcatctacattatcatatgtactatccttcgatcaataaaagctaactaaaagtttgcttgttatcaattatactcttatcaagaaaagagaaaacataatagctaataaaatttcaaagtagtaaatgagagagataaatgatttattaggaaactataaataatttattaatatagagaagtttaattatttttcttaatttatgtgtaatataattaaatggcaaataaaaatttcggagtaaataaaacaaacttttgaaaaaaagagtaaaaacttaaaaattatattctttgggtcttacgaattatgc

SEQ ID NO: 68754 - DNA, 552 bp, Glycine max
  unsure (1)..(552): unsure at all n locations
  Clone ID: PAT_MRT3847_33099C.1
ggtgctgcagaaatttcttgacaaacaattatacacttcaaggcataaactctccaaattaattagaaacaacatttggaagtgcttcaaacttcaagaattctggagcttcaaaattcaaaaaccttgaatactaaatatggcttgaaaacagcctgtggttggaagagaacacaccccagttgtagggaagcatagccaacaggggtgaaataagttcgcatttaaggcagccccaaagaggccgcaactaaggcagaccagagatgactgcaattaaggcagtttttcaacacttctcctcatgttcagggctaccggcctggagtgtggcaaatgcaagtggcccaacaatagatctagaataggctctggcccaacaacatttttatttctctgatgtttgaataatacagctactgatatatagacaaagaggaatagaaatctgctgtaatgaggaaacaaatcaggaagcaatgaatagcctatcatcttatcataattcagatnttattcaaatctgactctaaacacatntattacaaaata

SEQ ID NO: 68755 - DNA, 343 bp, Glycine max
  Clone ID: PAT_MRT3847_3309C.1
gtgttcaacttatggattcgcacagcacttgggaaaggttagaaaattgtctttatcctgtaagttaattacctttagaagctgtcgttgtcaatgttacatgtggaagtggacgtggtggttcacccaccactttttgtatttgttctgctgtttacaatcgttcctcagatataaacaaaaggatttctcacatcacttggtgaaaggttagaaaattgtttttcttactatagttgatccttttccagtgtttttacttggctgttatttttggcttttaagaatgaaattctttgttctattgccattaaccctattctgacgcgacttcttgagaact

SEQ ID NO: 68756 - DNA, 350 bp, Glycine max
  Clone ID: PAT_MRT3847_330C.1
gcagagctatatggaaaaattggtgagagaagcatatgctagatggaatgacttggaagaaattgatgcggctctgttaacccaaggtatgttctagttaatcaatgtgtagcaaaattattttacaatcacaaatcctttcactttaaaattcaccgtgacattaacatatttcattcagtggcagtaattaatttatatgaatcaaactctataggtgaaaccttggaggaatttccaaacaatcatcaggcatcactaatagcatatgatcagaatgactactttggtgataaatctgccgaagttggtaactatgtaccaacccataatgcacaaatggaatgcag

SEQ ID NO: 68757 - DNA, 541 bp, Glycine max
  Clone ID: PAT_MRT3847_33100C.1
aacgtcccttgaactatgatcaggtgaatcatgtcaatgatcccatcaaagagaaaactagtcatctctcgccagatgacaagtctgataaccatagtgatcaactgaagcatagtaaaaatgaagaaactggaaacaagtcatctacaagaaatcatcctcttcctagtgaacggaacaatgaggttagagagagaagacgcagggaaagtgataaaatagttaggaagcctacaagttcaagaagtagtgtcagatctaaccaagttaaagaaaaaagtagtcatgatagagaaaaccgagaagagcgctctgaattttctaggcgaggtggaactagtggaagtagtggaggagttccgttcagaggtggtcgcagggaataccgtagtacaagactaccttccggagaaaaacctacacattataacaatgatgataaatattctaaaaatatttcatcaaactctaggaaaattactcgaacatcacataagcgatcttcgatttcagaaacttatgaaaaggatgaaagaaaacg

SEQ ID NO: 68758 - DNA, 250 bp, Glycine max
  Clone ID: PAT_MRT3847_33101C.1
tataacaccacctcattagatccaatttttgattgtttgttgatttaactcattcctgtacttttgttgatctttaaaagtgggggatttttctctcaccttaaaatatcttacttctttggtaacttccgttaccgaaactccttcaaatgctgcaacacctgcttatgctgcaagatgtacccagactttatctacactgagtcaaccaccacctatacctttttcattttatattcacctgttaaaa

SEQ ID NO: 68759 - DNA, 324 bp, Glycine max
  Clone ID: PAT_MRT3847_33102C.1
ctcgagccttatcggctttagttttgaaaaaaaaaaaccaatgacaggcgtttaatcaatttgagcaggggcattctttgttttcttccattttgggtcccctcaaaagtagtttcaaaagggtatctctttcttcacagatatcatggcaaatcatacccttcgttcaggaaccgtttctgttgaatctatcttcacaagaaagatttaaacttttaaactttcttctattcgtgagacttatttttgtgaagctttgtttccactacttaatcttctattgctatttacttttaactcatacctattcttggttttacttta

SEQ ID NO: 68760 - DNA, 1526 bp, Glycine max
  Clone ID: PAT_MRT3847_33103C.1
ctcatatccctcaaggtttggcttgtgcctttgtgtgctcatttttcactaaacaccaacccaaaccttatacacaaacattcttaattttgatatttttgtttatatattctaggtttttgttaattaattatattaagcatcatgggaaccccacaatccaataacttgccaccagggtttaggttccaccctacagatgaagagctcattcttcactacctaaggaagaaggttgcctccattcctttgccagttgccatcattgctgaggttgatatctacaagtttgatccatgggagctaccagctaaggccgcgtttggggagaaagagtggtacttcttcagtcctagagaccggaagtacccaaatggagcgaggccaaacagggcagcagcttcagggtattggaaggccacaggcactgataagaacatagtggcatcactggcaggaggagtgagggagcactttggtgtgaagaaggctttggtgttctacaaaggaaaacccccaaagggtgtcaaaaccaattggatcatgcatgaatatcgccttgttgacaccaatagacccattaggatcaaagacacctccatgaggttggatgactgggttctatgccggatatacaagaagttcaagcatgctgtatctccaaccacagaggcagcatcaacactgcaagtgatcaatgagcaattagatcaagcagtggtagaagaagaggagcaaatcaaagacacccttttaccaattttgaagaataacaacacttttgtccctcctccacaagccacaatactcatgtctcagaaatccttatccttctcaaatctcttggatgccacagactactccatgcttagcaccatcttatctgagaaccactccaataattaccctactccaagtgaaaccagcttattcaataattgtgagaatctggatcaggaaattaccccccaaaactactacatcaacgatactaatagtattaataataatagctacttgtttcagaagaacccttccaacatggaaaacattgctaggccaaaacgccaccttccaaacatggatcatgaggacaacatgttattataccctttaaagaaatatcatagttcctcttgcaatttccccaacaccaacctccaaaaccagaatccacaatggaacttcatgttcaagcagccactcatgagtcctcaatatcttcaatttcagtgataaatagcaaacaattatacgagtcacataaagaaaagaagaaaaaaaggttagggagaaaataaaaatgaaaaaaaaaggtgaaatatctacaagatgaatgtgctacatggtatccacatcaacctgttcactacgtaaggattagcacacagaaagatagcattttttttctttttcttttatgttgaaaaatgatgaaaagagacttcattggatcatgaactattacggaatcacagaaaaatcgtgtacaaataaaaatgttaatttgtacgtgttgggttggg

SEQ ID NO: 68761 - DNA, 769 bp, Glycine max
  Clone ID: PAT_MRT3847_33104C.1
ggctcgaggccggatatacaagaagaccaaacatgctgtatctccaaccacagaggcagcatcatcaacactgcacgtgatcaatgagcaattagatcaagcagaagaagaggagcaaatcaaagacaaccttttaccaattttgaagaacaacactactcttgtccctcctcaacaaaccacactgctcatgtctcagaaatctttatccttttccaacctcttggatgccacagattactccatgctcagcaccatcttatctgagaataaccactccaataattaccttactccaagtgaagccttattcaataattgtgagaatctggatcaggaaattaccccccaaaattactactacaacaacaacaccaatagctacttgtttcagaagaacccttcccacatggaaaacatggctaggccaaaacgccacctttcaaacatggatcatgaggacaacatgatattatacccttcaaagaaatatcaaagttcctcttgcaattttcctaactctaatccacaatggaacttcatgttcaagcagccactcatgagtcctcaatatcttccatttcagtgataaatagccaaaaattatacgagtcacataaagaaaagaaaagaacaaaaaaaggttagggagaaaataaaaatgaaaaaaagaagtgaaatatctactagttgaatgtgccgtatggtatccacaacctgttcactaggtaaggattagcacacagaaatatagcaatcattttctttt

SEQ ID NO: 68762 - DNA, 372 bp, Glycine max
  Clone ID: PAT_MRT3847_33105C.1
ggtcgcagagcgcgcccccaactctagctccccctcctcttaacacctcactctcttctcctctttcacactcgggggtattatatctcatagagataccccaaccccatgtctcacgcctactctaagatttgtggtgggaaaactataggaccccgtgtcctcttgtggcgctctatcaccccagcccccacattatatcgtgtgtgtgagaaaaaccccacggggggtccactctctctctctcacgggtgtgctctctactctaaagcgctggagatattatacgctcacatagacacgcgcgatactcttcttatccccttacacacattggtgtgtcatatagacacagtacaccgtgacatatat

SEQ ID NO: 68763 - DNA, 344 bp, Glycine max
  Clone ID: PAT_MRT3847_33106C.1
cctcattctccgtcatgttcatcatcttcagttcaattctctctcgctgtctctgtcacggttcctcattcgcatggtgaatgacaccgccgccgccgcgcacatcacttccaccgccaccgcggctgctatcgtcagttccggtcgagtgctctctattctccatgatctagaagatgcgcattccaatttctctggcgacgagcagatggcagaacacgtgaacgcagaactcacagcagaagaggtcgttgatcgactatccgatgactgtgaaggataagaatctgtatcggccgcactcagcccgcgctgttcgtccatatcccctttcactaatctca

SEQ ID NO: 68764 - DNA, 595 bp, Glycine max
  Clone ID: PAT_MRT3847_33107C.1
aaaataccattgaaacaagggcaatgtgattatgtgaatgaatgtaaatttatatattatcaaacatcggggagtgccaaagcattctataaatgaaagttgctagccttcaaataacattcctctagtctagaaacaatggaaaagtaaccaaagatactaacccatactacgactaacctaactaataacaagagaaaagattgctagcaacaacgagataattaccacaaaacgatacagagctacctgacatggcttaaattaatttgatcaccctagccataggaagaaacaattaaaagccatggggaatagtacaccgaaaagcacaaagcaagcacccagctaagaaataaacagcgagaaaaaatatatacttttagcttctccaacgcttctttccactcttgagctcacttgtgcctttgatgaacttggaagtcttgcccttggcattttctacctctcctgctcaaacatcagagttctcattctcggaatattttctcttcaataaaccaaatttcaccttgcccgcaccattaacatcagtctttccaccacttttgaaaggtttttttttcgaaatgag

SEQ ID NO: 68765 - DNA, 273 bp, Glycine max
  unsure (1)..(273): unsure at all n locations
  Clone ID: PAT_MRT3847_33108C.1
tcaaaaaccttcccttctcttctcacccccacactcccatctgcacanacccctcgcatccaacaatgtntctcaccattcctnccaactctccaagcccgcagccctncgccccaaactaagcccaaagctaaggtccgcngccacaannatcatcgtctgcagcacnnnnnnnnnnnnnnnnnnnnnnnnngtgtcntccgactgaaggcgttctccgcngtggtggccctntcntcnatcctctntccgtccctctncccggnggcgncg

SEQ ID NO: 68766 - DNA, 259 bp, Glycine max
  unsure (1)..(259): unsure at all n locations
  Clone ID: PAT_MRT3847_33109C.1
atccctgtacaaaagaatttgaatacaatgtaaatggattttttttttcccttcaattgaataattaaaaaccaatgagaggaagaggtcaacaaaacaaggtttgcctttcctaataaaggggnnnccaatgatttctcttgaaaggtgatcccaaaattcaactacctgagatcactaaacaaaccaaaccaaccatcccaactcccaaccaccattttacctccacacaatttctaacattgaaaccaaattttga

SEQ ID NO: 68767 - DNA, 394 bp, Glycine max
  Clone ID: PAT_MRT3847_3310C.1
tccggattcccgggtcgacccacgcgtccgccttttttttttttttttttttttttttttttttttttttttttttttttttttttaaactctatcactttaaactttaaaatcttaaaacaatgttaaaaaatcctaaaaaaatttatgacgggcaggtcttaaatcaatactaaaggttaattgttagatgaagagcctacattaaaaacagggaacaaaacatgctaaattggcggtaaaaaaattatgtcccaatgggtactatttttttggtcccggttcaataaaaagacatgaaaacaacttcgttaataaataggtgtcgcgctagatattttggtcaaccatcgtggaaacttcttggaggggttttatgaccatggcgggataa

SEQ ID NO: 68768 - DNA, 622 bp, Glycine max
  Clone ID: PAT_MRT3847_33110C.1
cctcgtgccgaattcggcacgaggcgagacggtgcaggaagcggttaatgcggcgccggatgagggggaaaagaggtttgtgatatatataaaagaaggggtttatgaagagagggtgagggttccgttgaagaagaggaatgtggtgttcttgggagatggcatgggcaaaactgtcattacgggatcagctaacgtgggccagcccgggatgacaacctacaactctgcaacagtaggggttgctggggatggatttatagcaaaggatctcacaatccaaaatacagccggtgctaatgctcaccaagcagtggccttcagatcagacagtgatctttctgtcattgagaactgtgaattcattggcaatcaagatactctttatgctcattccctgcgccaattttatagatcttgccgcataattggcaacgtggacttcatcttcggaaactctgcagcaatcttccaagactgcgaaatcctagtccggcccaggcaagccagaccagagaagggagagaacaacgcaattaccgcacatggcaggacagaccctgctcagtcaacagggtttgttttccagaactgcatgggttatggtaccgaggaatacatg

SEQ ID NO: 68769 - DNA, 268 bp, Glycine max
  Clone ID: PAT_MRT3847_33111C.1
aatccggataagcggtagcattacaacctacctaagagcaagagttatcaagttgccaaaattaggaaggattcaaagacaactgaaatcgaaaacactcaagaactgtccaagttaccatgcttaacctgttactgcactatatatctcttttctttgtggtgtagttagtcaccatcacttatttatttcatttggctgaattaatctttattgtatgagaaatataattcttatttatatatttttttatgcctttagtgttttt

SEQ ID NO: 68770 - DNA, 435 bp, Glycine max
  Clone ID: PAT_MRT3847_33112C.1
gccaaattgtccatgttaaggcaatccaccagcatttccaccttttagatttgaacccatcagctatgtcagttccatactgtaagaagtggtgtctaggaatttgtggcattgctgtcttcaagttaacccaagacattgactcccaccatagagggagggttttggtacagttaaagaataaatgtgcagccccctcttcaatatttttgcataatgggcagagcatgtcttatttaagctatttgttaacttgtgtatatattttggatttaggcccaaggtccaccaaattagaaaagagaaaaacaccctaaaccctaaagacctgacccaacaccaccttagttagctagtgctgcccaagtgaaaatgaaggtaactttgtcagagtttctagactaagagaattgagagagagagagatcgagagag

SEQ ID NO: 68771 - DNA, 258 bp, Glycine max
  Clone ID: PAT_MRT3847_33113C.1
gagaaatgcagcattcactctccctgtcttttccccttccctcagcagaaacgtgtttatcagcaagtcgtgagtcaaactgctgccttttaaaaaacccacaaaatgctgattcagttcaaaattaatgcaaatgtttcaaaactgggtttctgatatttgtaaatgtgtttctttattagataagagtgtattaccattaaagtcattagtataatattgctttcaaaaagaaatggtagacaaaactataatcca

SEQ ID NO: 68772 - DNA, 310 bp, Glycine max
  unsure (1)..(310): unsure at all n locations
  Clone ID: PAT_MRT3847_33114C.1
aataacagagagtatagtcttataacatcatgatcatttttccccctccacctggtcctcagnnaggaaggattnacaaacatgaaccaagggctaggcacttgcacagacgcatcatataacnnctctacgaagattgcactctacaacgaaccatatcgttataagccagtctacncaccnatgcaaccagagctaccttcattcaacaccnnnccgagagcgtgatactacccggaagtccctgaccgacnnctgcagaccttgctgcttttgataaactaagtcgaattctagcgtgaggcatcct

SEQ ID NO: 68773 - DNA, 182 bp, Glycine max
  unsure (1)..(182): unsure at all n locations
  Clone ID: PAT_MRT3847_33115C.1
ngtacgcangcacgcgtacgtaagctcggaattcggctcgagtgtgatttcataacaagtnganagcntctacncgtntcctagctcgtctaagagctaggacacgagtagaggcnancaatgtgatttcataacaagttgangcgtccgaatatcggaataactaaaaannaaaaaaaang

SEQ ID NO: 68774 - DNA, 429 bp, Glycine max
  unsure (1)..(429): unsure at all n locations
  Clone ID: PAT_MRT3847_33116C.1
tgggatgcgnttcatactgggatcgcgacgcatactagcgagactttagacattctaaaaaaaaaaaaaaaaaaaaaaaaaaaataaaaaaataaaaaaaaaaagaannnnaaaaaaataaaataaaagaacaaaagaaaacaannnatacaaaataattaanntaaatgaacaatttgcatacgaggcatacaaatattcatttcgtataaaacttctaatttattcaatgaagaacttgtctagagcaaagcctagaagaatttgggttttgttacagactgaggcctacgaatgtccacaacaaagtatgagcttatcatcactgacgtcccccatccatcccaccacggttgggagttcctccccaatccacattcaccaaagttcatgactaagnaaagagaaacgctcttccnncnnnngctt

SEQ ID NO: 68775 - DNA, 510 bp, Glycine max
  Clone ID: PAT_MRT3847_33117C.1
tccatcagaggtcatggaatttctcaagtcccttgtgttgggaaatcaagccccttaaaaagccttatatagtgtatagaggagagaaaatactctcctatactatactatgtcatattttttcgattttggttttttcagaaacattccaagaggttttctggagcagatttacgcccagaagaaccttttttggtaacaacagggttgtcgctacccagttgttttgctcgaagctcttgtgggagctgtaaattcgtcaactcataattataaatattttaaagaattaaagaatgagctgggttggttcgtttttttttttccttctcccattacaaatggattgatatttaatcattgatgtttcagttttgatccctatatctaacccctaaaacgggagtcccccatgcgaaatcattcatttgttaagtcattttgcatgtagtttgcctgtttgaataaaataatttatgatagcttttgatgagatatccgtgatagctc

SEQ ID NO: 68776 - DNA, 265 bp, Glycine max
  Clone ID: PAT_MRT3847_33118C.1
tgctcgagaagctacaacacgtcactacttctatcttaacccttcaccattcctacactctttcgtggctctcaaatacactattccttattctcccaaacccaaaactcttatcaaaaactaaacaccaagtctatactcttcacctgactacatatttgcaacagaaactttcctattatttataattctttcctttctactcaatgactaatctacattatccatttttctatacctgtcacttgctataaaatatactttt

SEQ ID NO: 68777 - DNA, 323 bp, Glycine max
  Clone ID: PAT_MRT3847_33119C.1
gactcagccacggtgatgcaattgaatatgcacctattttgcatatccttctggtggtatcactccatggcagctcttagacggccagccctggaggaggacacatcacacacatcacctctaatggctttgactgctgggaaccaatattactatcacgtaccgtccatgacgacaaacctctgcacatgggcaatattactggaaggcacacatgtctgacgacaaccactggtgcactactgtgcgtagacaagctgactctttctgacagacagatcacataccacattggacacttagccatatctgccttatctaat

SEQ ID NO: 68778 - DNA, 456 bp, Glycine max
  unsure (1)..(456): unsure at all n locations
  Clone ID: PAT_MRT3847_3311C.1
ccacgcgtccggctgttcggaagaagggaaggggaaaagcagttaagcttgagcgcgcgcgacagggtcaagtcgagggccggggaatcgccggagaatggaggtgggcagggctccgcgacgacgggtgtccccagcggcggcggcggcggctgtgccttcgctgcttctgttcgccgttctattcgcgggccgggcggcggcgttcggccacctgcaaggcgccggcgcgacggcgctgtacaagcacgcgtcgttcttcgaccgcgatggcgacggcgtcgtctccttctcggagacgtacggcgcgtttcgggcactcgggtttggattcggcctgtccagcgtcagcgctgccctcatcaatggcgcccttggtagcaagtgcagacctcanaacgcaacgtcatcgaagttggacatctacatagaggacatccagaaaggaaaacacgg

SEQ ID NO: 68779 - DNA, 231 bp, Glycine max
  Clone ID: PAT_MRT3847_33120C.1
cttgctcagtcctggatgtggaggtccttgactctctcggcttattccccatgccagctactcttgtcgagtgcatgcttagctatcagctccagcaagctcaacgagtgccaactcaagaacctcaacgcgttggaacccgaccaccgcgctgagtccgaaagtggtttgattcgaacatggtactctcaacaccctgagctgacatgcgccggtgtcactgttcccaaa

SEQ ID NO: 68780 - DNA, 716 bp, Glycine max
  Clone ID: PAT_MRT3847_33121C.1
gcgcccacgcgtccgaaattttttagacttatttctattctgtccctctcctttcaaatttattactttggaggtcaaccaaaacaaacagtgtaagactacagcgaatgcttcaagagttgaatctggattaaaagcattgaccagaccacccactagcggcgaattgtgtagcaaggaaagaagcagaggctgaggaaacaatgaagatattggtgaccggcgcatccggtttcctcggtggaaaactctgcgacgccctcgtccggcaaggttactctgtcagggttctcgtaagatccaccagcgatatctccgccctttctccgcacatcgaaatcttctacggcgacatcaccgactacgcctctctcctcgccgcctgcttctcctgcactctcgtcttccaccttgccgccctcgtcgaaccctggcttcctgatccttccaaattcttctccgtcaacgttggaggattgaaaaacgtgttggcggcggtgaaggagactcgcacagtggaaaaactcctgtatacgtcgtcgtttttcgctctcggaccaactgatggaatcgtcgccgacgagaatcaagtccatcacgagaaatatttctgtacggaatatgagaaatcccacgcggccccggcttagattgccgtgcttgctgcccccggccggggcccccctgtactactgtatcccggagtaatctatggg

SEQ ID NO: 68781 - DNA, 443 bp, Glycine max
  Clone ID: PAT_MRT3847_33122C.1
cccccggcggacccggcccggaattcccgggccgcccacacccgtccgaggttcttaatccacccagcccggtcccatatttaagccaggttgggtggcctaattggatatttgaggcttggggtttttaataaatttatctagttaaaggaagggattggaaggtggggtttgtaataagtttctccgttgggccccctgggaggccagccttttttatccaatgggcggatggattgggacctttgaaggtcctgatgggttggatttttttcctttaatccgattttctggtgggggccaagaataagggccctcgggtaaggagaccgatggcttagtatcttttttcccaaagggatttttgggccagttccggttaaaattaattaatgcctaaatgtggtttattgttggctttaacctcaaaattcataaggttt

SEQ ID NO: 68782 - DNA, 380 bp, Glycine max
  Clone ID: PAT_MRT3847_33123C.1
gggccacaaatagaagttttgggggcttccattccaaaccattttattccaaaattttcctttttaaaggccacaaaccggggctgtgggttaactaaaactttaacacagcctcctggggactaattcctaagccctattcccacagggatgttaaacaattttaagggcttcagcattgcagcctttggcacaaaaggttgggtaacatgcccaaaaggcttaagtttccttttccactttttccaaacattggggggccctcttcctttttttaatttttttaacaaacccaacaaacttcttccagttttttggttcaaacaaatgcggattccccttttgtggttttttcgcactcaagccgaattccgagctta

SEQ ID NO: 68783 - DNA, 382 bp, Glycine max
  Clone ID: PAT_MRT3847_33124C.1
ggctcgagaaacaaactacatttgcagcctttgtcggcacacttatatttttcactccgggtcggatttttccaccaccgaccttctacatttttcgggagaattgtgtcccttcctgctcactcgctccaacagaccacctctttctatcctatccctggtcttggttgacggtccttacctcatctttgtttttttttggacggggggcatatgaagagcctgtagggttctgaaaagaggaggattggatgtggttacctccgaacgacgcaaccttaacgagtgacctaagaattgtgtcacaaacatgggatgctaaaccaagacccctctcatgagtgattgttcatatggaaacgcttatgtgctcaaatggatt

SEQ ID NO: 68784 - DNA, 632 bp, Glycine max
  unsure (1)..(632): unsure at all n locations
  Clone ID: PAT_MRT3847_33125C.1
tttaattgnnnanagatattgagnnnctagcaatacataactttaagaaatattgtttaggcattaccccttattcataaatcttttccattattctacaagcagcctcagagagctcctcgtatgtcttcataccatcaaaaacatgacttggcacttcatcatggtgaagactcgtcaaaattgagtggcaagcaagatcaatacttagggctctagccacagcagattcagctttgtcatatctatgattccgcaaggcatgcttggaggaaaaaaactctttcttggcaatgtggtggccatagtcttttgcacattttttacaaatggactttagatgtccatttgatgtggaagccaactttgtcatgttgagtgccaaggcatttgccttgtccttgatgcaattgataacgatcatggctactccaacagtactattaacattcacagcctttttagaagattgcacacacctcatacaagtttcaggtgtctcagagttgtggcacaaagtttgaatcaatttgttgtctgctgcaatgaacaatggtggtggcaaaataagaagtagaagaagaacagctactccgggcatattcatgaagaaggccatattcattattctt

SEQ ID NO: 68785 - DNA, 331 bp, Glycine max
  Clone ID: PAT_MRT3847_33126C.1
aaccttgatttttaaacattgttcctgggggacaaagcgaaagccttgcaacacccacctttgagaaaaggttgaggtgttagatttcgggcagttgtaagttggcccccaaaaaataaaatgccgaaaggacattttggcttcatactaggaagcaaaaaggacaaggggttgggatgttattaacaaaagaaaccatgggtgaaactggtagggggcttccaaaaaaaacaagcctcccattgttggacgatctctaacatacctttttctttcctccgttaaaaataagcaccaccccctcggttttgtgattctttccggggatgac

SEQ ID NO: 68786 - DNA, 269 bp, Glycine max
  Clone ID: PAT_MRT3847_33127C.1
tattcctgaacacaaatataaagtcgacatataaaaggcacactctcaacgcactggaaaagccctaaaactcgctgcgcttaacaaaaatgtaacgaggggttctcacaaccacaacacataaaaacagagcgatcaaaggattttttcctccggggggcaagaccccaaacctgggaacaaaagaggcgagaggacgggggagacgccaaacaagggcccccaaacaagcgacctacaaacaaacacacaggggcaagaaaccaaca

SEQ ID NO: 68787 - DNA, 187 bp, Glycine max
  Clone ID: PAT_MRT3847_33128C.1
gacgatgataccacatggctgaaaatgtgaaaaaatcaacaagtaaactccaaatctttgaggaagtagccataccactaaaacgcgacaggcagaaaatcagggtagactgactagccatgatgaacattgctgtgatacaaagctagaggatccaagcacaggtcctgatactaatcctcagaca

SEQ ID NO: 68788 - DNA, 321 bp, Glycine max
  Clone ID: PAT_MRT3847_33129C.1
taaaaagaaatcgcaatataaatatcaatattgatatggtacatacagtcgactcatgggccacctatatataaataccacgtgtagaaaaatagaaggaaaaaaaaatgaacctctatcctagggaatccacctgaataaaacatatcgaattttttcattaattaattaataaaaattcctctaaatctaaaaacaaccaaaaaaccttggcttggccgtaattccaattaataaaccggcggtggtcccggtccctaaatcctttggaacactccttcgagggcaacatcgaaagcgtcctccacaccatctaaccct

SEQ ID NO: 68789 - DNA, 795 bp, Glycine max
  Clone ID: PAT_MRT3847_3312C.1
agaaacgcacagaagggtgtcccagtggttaaacagtatgtagttttcatcccagggaatgagcaggaaacgcttaatctttcactgaaaatgcatcctaaccctcaaatgcttggccacggacgctcaaataaacgcaattgaactcttcaagatcaacgacccaacaggtaatctcgctggacctaacccagacactcatccacaatctccaaagcgggttcctcttcaaagctcaaacaagaaaagccaaggcagcaccacgagaacccttgctgccgtcgcaggtgcagtttccggtgtccttatgctctcccttattgctttcctcatcaaacgcaggaagaatgtcgctgtcaatgaaagttcaaataaaaaagagggaacttctcgggacgatggctcactatctgtaccaacgggcctctgccgccacttctcaatcaaagaaatcagaactgccaccaacaactttgatgaactcttcgtggttggcatgggaggcttcggcaatgtgtacaaaggccacatcgacgacggttcaacaaccgtcgcaatcaaaaggctcaaaccgggttctcggcaaggtgtggacgagttcacgaacgagatcgaaatgctgtctcaacttcgtcatcgcaatcttgtttccctcatcggttactgttacgagagcaatgagatgatacttgtttacgaattcatggatcagggaaccctccgtgaccatctctacgacactgataacccgaccctttcatgaagcataggctgcagatatgcataggcgttgcg

SEQ ID NO: 68790 - DNA, 414 bp, Glycine max
  Clone ID: PAT_MRT3847_33130C.1
gcttcgaacctttgggctgatttatgtgcttgtttatgtgcttggcccgtgccgtgcggccggccccgtggcactgaagaagaagacggggaggtaggccgcgttggcgaaactagcgactcatgtgtcccttttcccttagtaaaagaccacgttgggctctcggaaggatccgtttatgaagacctattataaggctcttgagaaccggactagtgttatctccccgtctggcttttctgctcgtattcatgtgcacgcctaaaatcattcgtaaaaggagaagtcggtctataggcatcgagtctccgtaagactcgaccggacaattcctcagcccgacgttccgactccgcccagttatttaacaacgcgatatcgccgaaatccgtcccattgcccgcccccgacacg

SEQ ID NO: 68791 - DNA, 360 bp, Glycine max
  Clone ID: PAT_MRT3847_33131C.1
cttggttcacaaaattgtcaaaggcgtttctgtttctgcaattaatccttgactccggggaaagggaataaggataaaatggcgaagatatcatttgttttggtatttgcatttgtgttgttggctctgccattatgttcagttttgggccaagaagattggaaggatctcctggaccaaggagggttctctcaagattctttgaaaaaggcccagatggcttttggtgctgcttctgcccaagcagctgtcaatgattattttggaggtgacgactctcctcaggaagccgatgatggagaagcttcatccttggctgactttttagacgctgacgaaataacaaacaacaacccccat

SEQ ID NO: 68792 - DNA, 205 bp, Glycine max
  Clone ID: PAT_MRT3847_33132C.1
agaggtggagactaagcagtcagaggtgacggagcaggtggtcaaaccagcctttgtttctcccagcgctagcgcactcacttgcatcctcgttcaagccacttatcacccaaacgtattctctatctctcaatatctcggcctccctaaccttctacagcttgaagcaactgagaattctacttatcttgatatgcttcagttg

SEQ ID NO: 68793 - DNA, 506 bp, Glycine max
  Clone ID: PAT_MRT3847_33133C.1
agaaacagaatgaccgagactaaggaacttttcgagtggatcctgaagcaaccatgttttgaggtttcctttttatagtcttttttaacttcaacttctactacaattacgtagaaatttctatgccatacttttctttctcaggtccctttgtacttttttgtcagttaacttttctacttatctcacaaaaaaatgatgtcattctcttttctacacagaaaacatccttcatgttattcttaaacaagtttgacatatttgagaagaagatcctgaaagtaagaaccatctgaatgttgtacattttatccttgctggagcggtatcatcatttcagtctaataatgtcttgcattgtgcaggtcccacttaatgtatgcgagtggttcaaagattaccaaccagtttcaacagggaaacaagaaattgagcatgcttatgagtaagcaacttctttatactgctgaggcatatagaataaagaatgttgctgacggaaaaga

SEQ ID NO: 68794 - DNA, 818 bp, Glycine max
  Clone ID: PAT_MRT3847_33134C.1
aattcggctcgagttttagagggtgttgcagttgcagatagtaactgtagattctaagccgcgcttaaaatgagggcagtactggtgtcggtgttgccgcttccaccttcccatcgactttccactcaaaaccacaatcccaattcgcacctccgttttccttcttcttcttctgtcacttcctccacatcctccaacagaaccatagtgtttggcgtcaatcccagcgactccaaaaaagacccttccttcttcgacgaaaatggcgccgtcaacgacatggaaggttacctcaaccacctctccctcgaatacgactctgtctgggacactaaaccctcttggtgtcaaccctggacaatagctctgacgggggtatcaattattgccattagctggttgattttgcattcggtgataatcacttcacttatatcatcactaatatgtgcatggtggtacatcttcctctattcttatcccaaggcatattcagatatgattgctgaacgcagagaaagagttacaaatggtgttgaagacacatttggtcaaaagaagaatcagtaattcgtattattcttgccccttctttccttgctctgtacctttgcttgtattttcatattcaattactgaatagtactccttgaggcttcattcatgttatgttactgccaattggcctggagatcatagggtgatgtacaagtcttgacaaataacgctgtataataaatatttgaccttttcttcacaccctggttgtggtcgcatgtgtattaacttatgctttggtttggttgaattgactttga

SEQ ID NO: 68795 - DNA, 881 bp, Glycine max
  Clone ID: PAT_MRT3847_33135C.1
ccaaaccacaatctgaatacaagaacgaataaaagacaacaaaagtaggactgagttttcttttattcgttcttgtattcagattgtggtttggagatttcttcagaggtcaaaaggttcagatgtactagcaacaaagcaggccttgttgttcattatcttgcttcagtatgttcctagatttctccgaatggtaccattgacttcagagcttaagagaacagccggtgtctttgctgaaactgcatgggcaggggctgcatattatttgctgctatacatgcttgccagtcatatagttggtgctttttggtacttgttagctattgaacgcaatgacacatgctggcagaaggcttgcagtgacattgggtgcaaagaaaatttcctatattgtgggaaccggcacatggaaggttatagtgcttggaataaaacaagtgaagatattcagtcaaggtgctctgcagatggtgatcctgcacattttgattatggaattttcgggcaagtcttgtcttctggcatcatttcatctaagaagttcatctccaaatactgttactgtttatggtgggggctccagaatttgagtacacttggccaggggcttcaaactagcacctatcctggggaggttatcttttcaatagcactagctataagtggcctcatcctttttgcccttctgattggcacatgcagcatatcttcaatctctcaccattaggcttgagaaatgagagtcgcgtgattcaacagtggatgcaccatcgcttactcccacaagatctttcttcaatctctcaccattaggcttgaggaaatgagagtcaaaaggcgtgattcagaacagtggatgcaccatcgcttactcccac

SEQ ID NO: 68796 - DNA, 135 bp, Glycine max
  Clone ID: PAT_MRT3847_33136C.1
caaatcgaattaatagaaaatctcgagatgaaatttactatcaacacgctataatattgaatcactgacctgttttttttatctattgtacataaaactaaaagcaacttcaaccatggtcatgataataatacc

SEQ ID NO: 68797 - DNA, 204 bp, Glycine max
  Clone ID: PAT_MRT3847_33137C.1
cggctcgagaaaaaaaaaaaaaaaaaaaaaaaaaaaagcaggggggccccccgattaggggcctcggcgcccggggatttatttcgggccgggtccctgagggggaacaagtttccgcaaagggggcccgtttaagactttggggaaaccagggcaaaggcttttcccgggggaaattttttacccgcccaaatttccacaaaa

SEQ ID NO: 68798 - DNA, 351 bp, Glycine max
  Clone ID: PAT_MRT3847_33138C.1
cctgtcccaaaattctaccctgcctaaagacgcctgacatagacacctagactcaaattctaatgcttctttatctgatagattgctacgtggcaacaaatacttataatttaccacatacaatgcgtgattccttacatgcctgcgtttagaagtgtggcacctctcaacgattcccaaccaccctaagtgagaaaaggcctatttaacaaaaaaaaggggatgatcccccaacgacagaaggagttactggactgtgccttagacgacgcgtggtgtcatgcccccctgcatgctgtacaaactctggaggagaaaatgtgcttccatggcacccacctgtattgctga

SEQ ID NO: 68799 - DNA, 473 bp, Glycine max
  Clone ID: PAT_MRT3847_33139C.1
tggcttggaaccgttggactgatttatgtgcttgtttatgtgcttgcatggtcgtgcagcaagatgatagtaggggacaacacatatacgtgaacttccgaaagcctatcgagacacacagaatcactcctaaccctatagtacgaaaaatgcgcccgctatacctgcgagtctcgtcaggcgtactcggctccatagcgatagaccgacatctacacttattaactctaataaatctaatattaaacgatcataaccgcctataatcgacgaacaatccgttcgctctgcgtacaaaccattccaccgttggagacgtcggcttcctatgcgcccggcgttaaagatacaacgtagctccagtactaatatgcctatgtacctacttagcggtcgtacgcacgcgtcaccatcatgaccgactcacatccatccatctgtctgcagatagggttagactatccctcacacat

SEQ ID NO: 68800 - DNA, 1436 bp, Glycine max
  Clone ID: PAT_MRT3847_3313C.1
gagagacgtcattaaaagaaaaatatttctctctctctctctccctctctgcattcattccttaccccaactctgtttgttcctccctcgccgccgcagaatagctcagtgaatcgcgtcgtattttggagttggttgaagggttggattggagatttgggaagaaggtacagaacgagaacgtgggtctgcaaatgcagttgttggaggtttattggttgtgtctaacaactcatatttaatttaggggtgtgtgtctttctctcctagagcctagtgaagtagaagagatgagcgtggctcaagctgttacaagaatataaagggcacactaataaggttagtctgcagatgcctgaaactgattttagcacttcctactttttaatgttctgcatatagccttgtttaaagatacaggaccaggtgcaagttcccaaagaatttgggatacaagttgagattcactgtcacttatatatcttcatttctggactattatttagcggttcctgcaattgttcattcttaaagcattttcttgtgtgatttaacttttaagtaactttacatgttacaaactttttaaatattcgtcgtcttcttctttttttttttaatatttgaccatttctatccctcagtcttacaaattggattgctgccttaccaatacggatgctcatgtaactggtggctctgaggatggcttcatctatttttgggatcttgtagatgcatctgttgtttcaagattcagggcttatacgcatcggttcttagacacattcttttggacaggtccacaggtgaactgttacaagaatataaagggcaccctaataagtcttacaaattggattgctgccttaccaatacggatgctcatgtaactggtggctctgaggatggcttcatctatttttgggatcttgtagatgcatctgttgtttcaagattcagggctcatacctcagtggtaacaagtgttagttatcatccaaaggaaaactgcatggtaacttcttctgtggatggccccattagagtatggaagacataagaacaaaatgcaaacactaagcttatatggtgtgtccacgcagcccatagcaataccaattaggatagtgatgattacatgtccaattgcatatggagtccacagacacgatgttacttccaagttatatatatatatatatcctttggcagattttgacctataatatgtgcttttcgtgtggaagatggtaaacgcaaggtgagtttgttggttgcagcatctctcttatatacggtcaaatcgcacacattttttgaccttctgtctccgaaagggatagggtattgtattattcacttgtgtccatagaaggaaaatgttttgtatactatccgttatgttgtgaaaatgagtttgtattgcatccgtt

SEQ ID NO: 68801 - DNA, 286 bp, Glycine max
  Clone ID: PAT_MRT3847_33140C.1
gagaacaagaaaaagaggcgcaagatgagcggagggttcaggaggggtatgagttgttcagggagatgaaggggaagggttgtttggtggatagggtgatatatggagcgctggttgaggcgtttgtggctgagggtaaggttggattggcttttgatttgttgaaggatttggtgagctccgggtatagggctgatttggggatttatatttgccttattgaaggtttgtgcaatttgaatagggttcagaaggcatacaagcttttccaattgactgttcggga

SEQ ID NO: 68802 - DNA, 632 bp, Glycine max
  unsure (1)..(632): unsure at all n locations
  Clone ID: PAT_MRT3847_33141C.1
ccacgcgtccgcgctcctctctctctctctcttggaactccgatgcacccttccatctctccctttcactccaacccaaatctcaatctctgatcccttctccctcttctcaaccacatttcttttcacttccattttcattccatcaccatatcttttttttttaattttcaatgtagggttaaccatttcattcaatttttgttttccgatttgttcaacagctatttaacattttaattcaattccagggaatccaccgttagttttagcgtaattgagtagctaggcttttgtttattgttctcgtcgtgccaatcgagaatgcctcgggggtgattcctattcgtgtcttaaatctcgttactgccgcgtggaattggattttgggggttttatcgatcccttttccgacggtggattgtttgtgtcgtgttgatacaatgtggttggagaagtatttatgagttctaatgagtccttgcttttggaatcatcggattctcgtccagtgattcatcaccgccgcgggaaatcgggttcccggagctacctctccctccatggttccttctcttcttccgcctttgatgatgctttcgctgaagcatcgctntggatgtgaaggaacg

SEQ ID NO: 68803 - DNA, 340 bp, Glycine max
  Clone ID: PAT_MRT3847_33142C.1
tttcggcaattggccttgcggctcttatctagccgttgttatataagagtaaatcatcgtagcaacttcctgtgctttttccatccatggtatatgatctgtcattacagccgttgacttggaacccattccgtcatgaaataatctagatggcagagtcctgcttggcgaaagtgcgggcaagagcctcgaaggagtcaacgacgtccttgaaggtctgcttctgctccttggcgatctcggagacaacgtcggcggtagagtcgtcgtccttgttggcccactgtatctcgaaggtgttgagctcgaagtagacgtcgctctctctctctctctctcc

SEQ ID NO: 68804 - DNA, 1017 bp, Glycine max
  Clone ID: PAT_MRT3847_33143C.1
atgcccctggcttctttcttcattataaacgctttttttttttggaaatgtgcattttcgtgggttcgttgtgaacgattaggtgcggtgaaggtaccggtgttgagcattgtggtgattgtcggtggcatacgagtgatcaaccaagaagcaaatcctgcttcttgcaatgaacccaaggaacgttggtcccttgtgttcagtgtttgcaaccaagaagaccttctcttgaaaataatcaccaagagtaggtttcttgaaaaactttttatcgacgaagatcagtggatgtatgaaagtataatgtttgaagaagcagatatggattatcaaaatgaagaagcatgtggtgcgaatgaaccacatgttgattgttccgatgcgttcaatacttatcaagtgtttgacagtcgagaagatgttttgcggtgggctcgatccattgctcatgaaaacggatttgtggcagtgattataagaagagacactaggactaggaaatgtgggtgtcccttcaagctttgttgcaagccagtggttggaggagaaggctggatggtgaagttgatttgtgcagtacataatcatgaattggtcaactcattagttggacatccatatgcggagcgattgactaaagctgaaaaaacacttattgttgatatgacgaagtccatggtgaagccaagaaacattctactaactctgaaggaacacaatgccaatagttgtacgaccattaaacagatatacaatgcaagaagtgcattttgttcttccataagaggaagtgatattgaaatgcaacatctgatgaagcttcttgaacgtgatcagtatattcattggcacgaaataaaggatgaagacgtggttcgtgatatcttttggtgtcaccctgatacagtgagacaacacctacaaaacaaaccagtacagacttccactgctcgattttgttggggtgacaccgactgggatgacattctctgccggttttgcatatgtggagtgtga

SEQ ID NO: 68805 - DNA, 327 bp, Glycine max
  Clone ID: PAT_MRT3847_33144C.1
aaacacaaatataaagttgtcatttaaaaagcaaacctacaacgcgacgggagagccctaaaactgggtgtgctaaacaaaaaagaaataaggggttcttacaaacacaacacatttaaaccgaatgaaaaaaggggttttggggccgtctaacaaaaacccaattttgggaacaaaagttggggggtgttgggggcgactttaaactatctccgaaagacaagctaccttgaaacgaagacgcgggggcaaaaaaccatcttttattgtgaccctaagaaaccacctcccccggggggccaaacccgccctttttttttttttttt

SEQ ID NO: 68806 - DNA, 432 bp, Glycine max
  Clone ID: PAT_MRT3847_33145C.1
ggaattcgcctcgacgggataatgtggtctttttgttcacttcatgagcttggttattgttggttggatggattctttccaatatattaaattaatgcctgctctctgtgttttgatattctttctttaattcttattttttaaaagtgaacgctgttaatcgatgcttctcgttggtctcacgtgtgtttctgctactccttattgtgatcttctttctcccttctgtttttattttctttttccaattgatggtgggtttgcaacactggtttgtataatcttgttttgcctgttttcatgttttgcttttctgcatttggttgtcatcagccttggcccttgaattctccaaaaaagctgactcattttatgagcttgtggtaacgcatgaagaaattcttctttttcaaatcttctgcatctagcagt

SEQ ID NO: 68807 - DNA, 239 bp, Glycine max
  Clone ID: PAT_MRT3847_33146C.1
aaaaaacaaaaaaagcacctaataataaaataaataaaaaataacaaaactaatcaagggccgggcatacgtactcactcatacaataacataagcatacctatagtgtcacataagataggttgactgaccttccatttacaacaaaggtcactggaaatacattgtgcacttacacaacttattcgcaatacaccacatacatttttacacactttcacttttacatagacggctca

SEQ ID NO: 68808 - DNA, 423 bp, Glycine max
  Clone ID: PAT_MRT3847_33147C.1
caaacaaggaaaagggggctttttaatcttcccgccccaattttagccagaaaagccggttttacaaaaccaattttggttccctccctgggccttccaaacttttagggcccccctttgggaaaacaacccctggggaaaatttttttttttaggggttccttccccttaaatcttccaagggaaaattcaggggggaaacggaccctttttttattttttttccaaaagcagccagaaagcccttaacgctttctgggtccccaaaccccccaagggggtctgccttccggggaagggtttttccccccccaaattttggccccccttccccttttttataaaatttggaaaaagcccttttaatgggtctcttttcacaaaccctgggggggaaaaccctttaaagattctgccctgggg

SEQ ID NO: 68809 - DNA, 379 bp, Glycine max
  Clone ID: PAT_MRT3847_33148C.1
gccggcgacactctgaactgattcaacttaagtaatgcacatgcgagtctcattctaagcaccttcggaaaatgcactgattccagtttctccatcaaaaaacctgacactagctaccacaactttttttgttcaaaaagagaatgttttttgtgacgtcgtgccggcgacggcgacggcgtatccgttgccgccggtggtggttgtcggccgaagccggtcgcagggcttcacgacgcggggagtgactgcggccggtgcaacgggcggatccggcgacgaggagcgcgggctgcctaatggggacttttacgccgggagctattgctgagatgtaccggacgggtcaggaaaatacctttggaccaacggatgcatg

SEQ ID NO: 68810 - DNA, 505 bp, Glycine max
  Clone ID: PAT_MRT3847_33149C.1
ggaacaaatccctaaaacaagaattctgggtagctatatctattttgtattagtagcagtaatacacctagaggttgctagttaaggagtgtacaggagtacaattgaagttcaagcttctatgtaagttaatgcaatgagtttcaagttttaatagcttaagcatttacctggttgtggtccaattcttttgtagctagtttttgaaatgcatatagttaacttagtgcctaggatttctacaataaaggtgaataccgtttgattttcttatacactaatgtactaatgttaaaggttagcaaatatcagcaatttgatattctgaaaatcaaaattttccttaagattactgaaataatttatatcaaaatcaagcatttactggatttttgtgtatatcacatacaagccatttaaatccaatgagtgcatgagtccagattctgttgaaacagagagggaggagattatcactcattgacaaataaaaaaataaaaaaaa

SEQ ID NO: 68811 - DNA, 2340 bp, Glycine max
  Clone ID: PAT_MRT3847_3314C.1
gaaaaatatttctctctctctctctctctctctgcattcattccttaccccaactctgtttgttcctccctcgccgccgcagaatagctcagtgaatcgcgtcgtattttggagttggttgaagggttggattggagatttgggaagaaggtacagaacgagaacgtgggtctgcaaatgcagttgttggaggtttattggttgtgtctaacaactcatatttaatttaggggtgtgtgtctttctctcctagagcctagtgaagtagaagagatgagcgtgaaaaatgatgttcctgggaaagaggtaaacgtgctgaagggtcacgagggtggtgtgttagccgcgaggttcaacaccgacggcaattatgttctaagttgcggcaaagaccgtaccatacgcctctggaatcctcaccgtggcatccatatcaagacttataaatcccacgctcgcgaagtccgcgatgtccatgtcacacaggacaactccaagttatgttcctgtggtggagatcgacaaatattttattgggacgttgcaactggacgtgtaattaggaaatttcgtggccatgatggtgaggtaaatgggtgtcaaattcaatgagtattcatctgttgtagtctctgctggctatgatcaatcattgcgtgcttgggactgcagatcccacagcacagagccaattcagattattgacacatttgcggatagtgtgatgtctgtttgtttaacaaaaactgaaattattggaggaagtgttgatggaactgttcgaacatttgacattcgtattggcagagaaatatccgataatttagggcaatctgtcaactgtgtatcaatgtcaaatgatggtaactgcattctagccggttgcttagctctacattgcgtcttttggacaggtccacaggtgaactgttacaagaataagggcaaagtcttattgacggatgctcatgtctcactggtaacccgacatagtagtcatccaaaggattactgcatggtaacttcttctgtggatggcaccattagagtatggaagacataagaacggaatgcatacactaagctcctatggtgtgtccacgcggcccatagcaataccaattaggataatgatgaggccacctcccatcgcggttgcagtgcccggtcacggtgtctcctccaagttatttataattcttcggcagattttgacctataatatgtgcttttcatgtggaagatggtaaacgcaaggtgagttagttggttgcagcatctatacggtcaaatctcacacattttttgactttttgtctccaaaagggatagggtattgtattattcacttgtgtccataaaaggaaaatgatttgtatactatccgttattttgtgaaaatgaggttgtattgtatccgttttggagtttttgatcttgggttttttttactggtatagttggaaaactagtggctgcgatgctcttatgtagttacaaatctatgctgtgattcaatccatggctggtgtttttccagtgatctaatccacagctcaaacggtgaaactcttgcagccagtttttctaatttgtgggcaaaatcatttgggaaaaaagactcttttgttattgatgtagacttaataatttttttacggtttattgacaattttcgttgtaggtaaccggggaggttttattttttttaatgttcagattttttttggtgctaaataaccgtgatcggagtaaacgattagtaggagaggatttaactaggacatgttcgtgtcctcagtcacgatgttacttccatgttacccttttaggggcctcctttggcggaccctgacctatatcatgtgcttttcgtgtggaagatggtaaacgcaaggtgagtttgttggttgcagcatctctcttatatacggtcaaatcgcacacattttttgaccttctgtctccgaaagggatagggtattgaattattcacagttgtccataaaaggaaaatgttttgtatacgatccgttatgttgtgaaaatgagtttgtattgcatccgttatatggagtttttgatctgggagtcaactggaatagttggaaaactagttcctgcaatgctcttatgtagctccaaatctttgctgtgattcattcaatccgtggctggggtttttccattgatctaacccagctcaaactttttcgaatttgtgggccccatcgtttgggaaaagaaaacccttttgttcaaattattgattgaggtagacgttttggactgtttatttcattaatccttggtttaattaattttttacggttgattgat

SEQ ID NO: 68812 - DNA, 548 bp, Glycine max
  Clone ID: PAT_MRT3847_33150C.1
ggaaccctacaaatagaagggggacttttaataaaccaaagcaacccaacgcagcaaagccctgaaactcggggggctaaacaaaaagggaagcgggggttccgacaaacccaacacattaaaacacagattataaaaagcatttttgcccccggcgatcaaaaacccagttttgggaacaacagttgcgaaaggaggggggaaacttaaaactttggccgaaaaacaagctccctaaaaaagaagacccaagagtccagaaaagaacccaccttttatgggaaccaacatccccggaggaaccagcccgcacgattcactttttttttggggcagccttggggaccttggctccgggaggaccctttttctaaacgtttttgaggacccccacagcaacagttggacgcagggccctaacagcaaacctaccaagggggggatcctcggaaaaagtttcaacaaccaggggtgtgggggggaatcattttaacaaaaccagcatcaccgtttttaaaaaactggggctccttttaaagctttttgcc

SEQ ID NO: 68813 - DNA, 794 bp, Glycine max
  unsure (1)..(794): unsure at all n locations
  Clone ID: PAT_MRT3847_33151C.1
acttcttcttcctccatccttccgttttcaatttcttcttcttacttcactaagctcttcctttccttggctcgtggtggtttgttacctgcattatctcggtggtttgttacctgcattgccttcatcgtggtggtgagtattgcggtggcaacggcagtcaaaatacggatccatatagcttatacacagattgattgacaatcaatgtgaactttacgtcagattgtaccaattgtcaatccgtatatataagctttcccgtgtcattttcattccaacttccacttctatgctttcaatctctcactcttctcttttccgtcttcattcagctgcaagcatcaccaccctcctcaaagccagcaagaaaagtgagcacctgaaacaaatgcaagcgtgcgtcatccatcacgccctcgagcaagaccacttcctcgtttccctcttcatttcctgcgcccacaccctcctctccactttctcctatgccttttccatcttctaccacgttctcgcccttcccaccttcctctggaacactctcgtcaaatcccactgccaaaagaatctcttttcccacaccctctccgtcttcgctcgcatgaaggcacatggggaactcccctatagcttcacctacccttttgtcattaaggcctattctggtgcatgcaaggtaagggagggaaaattgcttcatggtttcgcgtttctgtgcagcattgaccatgatctctacagggcaccattttgatcaacatgtataggaaatgcnaggagattgctgatgc

SEQ ID NO: 68814 - DNA, 236 bp, Glycine max
  Clone ID: PAT_MRT3847_33152C.1
cgcggtgtgctcagcggcaggggcactggcaccaacgtgtggctgcttgaggcggcctcgccgggagcagaagtgacccttcatggaagatgggagattttgaccctgttcggttctattctgccgccatcggccccacctgcagcgagaggactagccatatatctggctggcggacagggacaggtagtatgaggaagcgtggagcctgccatgggggcctctagaccctgggt

SEQ ID NO: 68815 - DNA, 528 bp, Glycine max
  unsure (1)..(528): unsure at all n locations
  Clone ID: PAT_MRT3847_33153C.1
ctgcaatccatcctcattcngaatnnccnanaancannnttnannanaanaaaaacnnaaaaaananggagggaaaaaaaaaaaaaaaaaaanaaaaaaaaaaaaattttaattttttaaaaaaatattttattattttttaaattggtgtatattttaaaatatatttttattattattatataaatattataattattattaatttttattctaaaccccctaataacaatttacaaaataacataaaataaattggaattgtgcaaaacatcaaataacaaagaaaattattattttgatcattacacaactcaatttccctccattcctctatcaatatatccctatatattattgcaagttcaattcctaagcttttgcctctactggaatctcaaccttcctagctattatctactcatatacatctcttatcttcaaaccaactattgtttgaaatacaccttttccattgtttcttcctgaaaactcagcattcttcaacatcttttgaataacctctcc

SEQ ID NO: 68816 - DNA, 1876 bp, Glycine max
  unsure (1)..(1876): unsure at all n locations
  Clone ID: PAT_MRT3847_33154C.1
gagctagtatctaaggtatcaacaatatggtattttttatttttattattgtcaatctgaacaaattattatacacagtattgtttagccctgtacttttgtgctctgatcaaataagtgaagaacttggtgtagtataatcgtgcattccttgttttaaagagttgagagcttcttcttatgtactaaggttactgactgaaggtcttctcaattaataactgttcagagcgaattgtaaatcttgccagacaaatctctacttcgtttctgaagtgtttagttttgataaagttcaataggaggaagatctattaatgttcaaaaatattgttgatttcttttgttctatatccaatctccctggagtctttaaaaccaaggctttaacttgtatcgtgccattgataattaattaaatattgaggagtacatgaagtatatcgagaagtttgaactattaagtatgtccaaagcattttgagatttctttttcgcctttattacttttctcctcctcctcagtcctgaagcacaaatatgttctatatttatctcttttggtgcataagtgtatgattatttcctcaatttctttggacctcggctgtgcaaagaatgtatttgaaagggacgaaggccttgcaaagacccatcgggactatccgcaccgagcgtgatcttcatagggtctcctacaaggctattgttcattatctctcattagccaatggcaatctagataatacaacctgaactcacgccttgtatgtaatgtcacctgttcaaggtaaattcttgtttgtgtactcggaacattaaaaaagaattattccctctatacagggaacttggtattggaattgtaccttatagtcctcttggtcgtggcttttttggcggcaaaggagttgtggaaaatgtgcctacaaatagctccctgaaagcacatccacgctttcaagccgagaacttagacaagaacaagaatatatatgaacgaattgaaggccttgctaagaagcatcaggccactcctgcccagttggcattagcatgggtacttcagcaaggcgaggatgttgtacctatccctggaacaactaagattaagaacctggatcaaaacataggtgccttagcagtgaaactgtcagaaaaagacctgagagaaatttctgaggcggttcccattggtgatgtagcaggtggtagatactacaatggattggatcacttttcatggaagtatgctaacacacctccaaaagattcaaaaatctcaacctgacgcacccaaccaaccctttggttagggaatctaccaagtcatcatgaattgagggtaacaaggctggcaaaggctaatatcaggatgctatttaaatatcaataatgtagcccttcttgatgttggacttcctagatatttggttggttaaaatttttaatttagactgtaatactattttatatgcaacagataattatgagcagtttcgaaggcatgacttgagtttaggatgggtcaaacatggtttttgcattcaccaagatgtttgaatctgcgttagaaacatgattttaaattatggactcaagtctcattgaagtatttggaatcagtttttgcatcacccttgacttgagtcattaatttgttccaagtataattctgtttaatattgatattgtcatgataaatttttaaaaaaaacatattttctattttataaaaaaaaaaaaaaaaaaaaaaaaaaaaaaaaaaagacaaaaaaaaaaaaaaaaaaaaacatgattttgggggtcaaaaaaaagtttgaatctgcgttagaaacatgattttaaattannaaaaaaaaaaaaaaaaaaaaaa

SEQ ID NO: 68817 - DNA, 276 bp, Glycine max
  Clone ID: PAT_MRT3847_33155C.1
gccacgcgtacgacgaggtgtccccgtttgaaccatgggagcagtgctctatactttgaagggtcctgttaggtggctagccaataatgaaaactgcctcatgatggatcaaaactgtgattaatgtgcccgctgatagcgcaaaagcattgactgtgataggcgaaactaccctgtgttttgtggtgtgctggatcgcacttgagcaccgtaccgagtttcatagtgagaggctacgtctagctcgagcaaccacgagtcaaggatcagtgattg

SEQ ID NO: 68818 - DNA, 713 bp, Glycine max
  Clone ID: PAT_MRT3847_33156C.1
gcaccagatcattcccccactatgggcattcaggcatagttgaggctgcacgagagctttttatgcagattgaagcgtccggtggaaatgcagactcggaatcctatggacttctttctaaattactgggatttggttgtgaatgctttgggtataatgtccgcatagttgggcattcacttgggggtgctatagctgcattgcttggactgcaagtatgacatttctcacttaaataggattatttagttactgatctatcttcgttagtaaacatgatttgctattttgattgcatcaagaactaggtattcattgaaaggctattctgaaaaatatacatatatacacacacaaaaaatattccttgcttccttagaaaattcagattgtagatgcaaatatgaagcgcagatgaggtcatgagttgtggattgaattgtggcctttacaaaatattgattgctatcattaaaactaaaaccggtacccatcggagagagtatcatccacaaaatatatgtgcaatgttggaaatatatacatcccaatgccagtgtagcatcgaacaacttattcaggaatctagaatgaaagctataaatcaggtagaacttacaagctaattaacctcgtgagtatgtaaaagaaacaaagcattccttttgtctaactcatggatttttttgtccaaaattaataaaggaaattgg

SEQ ID NO: 68819 - DNA, 226 bp, Glycine max
  Clone ID: PAT_MRT3847_33157C.1
cgtacgctagggtgagtgggatgctgctacatgcaacagttggttttaaaggaacagtgggtctgtttgagttttgtggaaagaacctatacaaacatgagggtatatcagaaagcttttgtgctccactctgaatcaagggataatgatctgatggggacttatagagggaacaagaagttgtctaaaagtaaggactttttctaccaaaacactctcgattaca

SEQ ID NO: 68820 - DNA, 494 bp, Glycine max
  Clone ID: PAT_MRT3847_33158C.1
ccagaaccaaaaagcctggccaaaacgtgactcttgttcaagttaaaaaatcaaaggctaggggaaaataaaccgttcttccttgaaatagcatttgatctagctccacatgaattttgtctgttccatacttagggagaaaaactagggtcacagggtggaagggcaaaaataatccgagttcactttttgaaagcaagttagaatcaagctgctataagttctgctttcaggcgggtatataccactctgaaactgatcacagtgagcaattttgtttgtaaagaacgacacttttttttctaattgattacaagtagcagttttcacatcatttgaaacaagtgccatggaaggataagaaagagaaactggggaatagttccagccggagcaaatagttcaagagtaatgctagtgtcatcacaaaaacaatagcatgagctgagttgtgaatgtttcaatagagctacccccatgaattttattttgta

SEQ ID NO: 68821 - DNA, 215 bp, Glycine max
  Clone ID: PAT_MRT3847_33159C.1
ctcacgcgtctgaatactcgagttctataaactacaccataacgctgtgcaagctagccacggggggcacgcaaagacaagccaggcgcagactctgttcacctcaacgtctatgaactcaccccaatcaacgtctatgcctatgggattggccgtggagaagaccattctgggggtgaaggacacgtgattgaaatagacgtattgaggcgcac

SEQ ID NO: 68822 - DNA, 526 bp, Glycine max
  unsure (1)..(526): unsure at all n locations
  Clone ID: PAT_MRT3847_3315C.1
gaaatataacagcactagcttattatgtgtagcatatttccatgaaacaggcattgtaaaattggatgaaaaggactggaatggcacctangcactctgctgtctgaaactgatccctcanttgatcctgattaggccatgtttctaatggaagaaccatgtaatgctattctaataatcatgtgccttaaactcaaggcaaatcataaactaattaatgctttgtgtagtataaactgatggagaactgaagctagacagccactcttcaggaaaatacaaatactggcaggcagattcagtccttaaaaaaagattcttatgggccagcttttcattctttattccttcagtacaaaatcttgcatccagtgactgatcctactgcactctggcttacattatccagtgataaggtgaagaatatgaaaaaaaacgatggatgatgcatctgtctcatataatttaacctgtggagaattattcgttcaacatcaccaataatcgccacaagaacagatcccat

SEQ ID NO: 68823 - DNA, 480 bp, Glycine max
  Clone ID: PAT_MRT3847_33160C.1
tgtttcagatgctaaattaatctcctgtgactatgcttcttatgcctgcttcatagtaattttttatatgcagcatgcaggaatatttcacatggctgtcagttgttgggcccttttaacatttgggcctcaagtttgcaaaggctatggttcatttacatttttcttgatctacatactgggtggagttgcttgcaacttcataagttttctacatacaccagatcccactgttggtggaactgtaagtatcatgttaaaattctaaaccattgtccttttagttcaacatttttttagtcactatgctataatatttcatttttcaattataatgaattctagagaattatattttaatgtgagttctaaaaccaaggaagattttgccgttcacccatcatgtttaatgtttgtgaacaacgatactacatcaatttgattaatcccccttctgtcgtcttctcgcggacgcgtggg

SEQ ID NO: 68824 - DNA, 2304 bp, Glycine max
  Clone ID: PAT_MRT3847_33161C.1
cccacgcgtccgcaagaagacgacagaagggggattaatcaaattgatgtaggatcggtgttcacaaacattaaacatgatgggtgaacggaaaactctgccttggttttagaactcacataaaaatataattctatacaattcatttataattgaaaatggactaaattatagcataccgactaaatgggggggggaaaaatggaggaaaataactttctattttaagcatctttcaagtatgagaattgtaatctaatcttgaaaatattagtgcttgtgcaaaacttagtttattgggctggggactgagcttacacaattatacttttgtaaccctataatatttatatactagaagaaacagtagagcctaatctcagtaattagtgcctctaatgcatttctcactttttacttccttttttacaatacatgtctttgtagggcagtagcgactgccttccttccaaggtataagtccttcttagggcagaaaccttatgacatgttgcatcagccaaatatcaacatatattccaaggcatcaacagctgctgcattgacagatgccagtgcattaggtgggggctccatgaagaaaaggaaggagcttaaaacaatgatgaacattgtgaatatcaatagtgatttgcaagaatcaccatattttctaacaagtttgagtccttcttcttgaccagttcctgatgatgaatcattcaactgaagtattggactagttaaaaagccatatgccatgcctgagaaggctgctccaaagtgtgaccattcgtcaattggaccaaagtggcttaatatgaaaataagagctgtcataataactgccttctggaacaggttctctgaagcatcacttgcaataacatgcttgttttgaatttgatacatgagccaagcaccaattattgcaaatacaggtccagttccaccaacagtgggatctgatgtatgtagaaaacttgtgaagttgcaagcaaccccacccagtatgtagatcaagaaaaatgtaaatgaaccatagcctttgcaaacttgaggcccaaatgttaaaagggcccaacaactgacagccatgtgaaatattcctgcatgccaattctcaattgtgtaccagaaacattggtgttacaagcctccaccattctccaaccatgatcaaatgatttatctttgctccatatagtagtggaatagaaaacagctctaaatcagaagtccttataggacttgctatttcaaatagaaacactgcaatgtttacagaagccaatatgccacttaggtagagactggaggtttcaacttgctgctgtgaatctatagcagaccttggatcatgtaaacgttttagccttcttatatccacaaaagcattttgtttcctaaagtttgatctttcaatatctttgctgagagatcgttttggtgctaaattttcttcactatgattctcaacatacgatggcacacaaggttcttggtttgcttcatgatttagtttgccaagatactcctcaagagattccagtccagtttttgatctagcttgacgatctatgtgatgcaactgtatcaccttgtgtgatgaatcaaatgtacgcaattttgcattatcttggagttttccaaaataagaatctaatgaccttagttgcttctcagttgagctagaacctgctgaacaccaaactctggaaaggttttctgtctttgaataacattccttaatgaggcttaggtgactgtctgaaccacaaagttttgtgacattcttatgcaaagagcatctgccatgaagtatgctcctaggaacattcctctcttttgtgtttgattttgtgaggacattgttgactttgttccatggttggctactcctgcaaatttgaccaggagttgaagagatgaacctcttcatattatcacactcatacatgaacctcttctcattctgcctcattacattttgggttggcagattttggtccttgtaaggcgttttgtagaacataggaaatgcagccatgaaaacccacctgagtcaaataaggttctactactacaatgccaagtttgtttaattaagacttatatctaagcttgagaattgcataggagatcatggggaagttgttacttagtacttccattaatggtggcttcatggttgttaattgaaaatgatgtacaatgacaactaattctcagtcattgtgccttatctggcttcccccttctgtcgtcttctcgcagccgtctcaagcatattcgtgacccgtc

SEQ ID NO: 68825 - DNA, 267 bp, Glycine max
  unsure (1)..(267): unsure at all n locations
  Clone ID: PAT_MRT3847_33162C.1
ctgcacgcgtacgtaagctcggaatcggctcgangtgctatccgtgagcgcctgggggcactggtggagcanggtcgtcagcgcacanccaacctaggcgtngcgccggccanccccttgcgcgatcgcgccaagntttnantgaacgcatccgaggcggctggagantggcaacaggccgagacgctanagagtcgtgacagatgaagagtcgtccagatggagagcagaccagcagatagctgcagcgagncttcaggccgatca

SEQ ID NO: 68826 - DNA, 1541 bp, Glycine max
  Clone ID: PAT_MRT3847_33163C.1
ctcggattgaggaggtcccttttcagagtctgtctcaattccccttcccattatctcagttgtctgtgcctgagagcaagaacagccacagaaactgagaagaaaagaaaaaaagaatgctatcttcaaatgttgttccatcatcatcccctgtcactttctccaaacccaatcaccattttttcatcaatgcatctcccaatcccaaaccaaatcttctcaggtttcaggcccaacacagaaccactcctctcaaaagttccaaactttcttttatgccaacgtctcagatccaacattcaatcgcaaagttaggctctttcagcagattcctctcacacccttttgagctctcatcaaaacccagataccaaatcgttaaggctgcatcagaagccaatcctgaaggagaaaatgtagcccccactgaacctaattctaaaaatctcaaacttggtcttgtgtttgggctatggtacttccaaaacattgtgttcaacatttacaacaaaaaagtgttgaacatattccctttcccatggcttcttgcatcttttcagctctttgttgggtccatttggatgctggtgctttggtccttgaagctccaaccttgtccaaaaatctcaaaacccttcatcattgctctccttggacctgctttgttccacacaataggccacatatcagcctgtgtttcattctccaaggttgctgtttcctttacacatgtcatcaaatctgcagaaccagttttctctgtcatgttttcttcagtccttggagataagtaccccattcaggtttggctttcaattctgcccattgtgcttggttgttctttagctgctgttactgaggtgtctttcaatgtacaaggattgtggtgtgcccttattagcaatgttggttttgtgttgaggaacatctactctaaaagaagtctacagaatttcaaggaagttgatggcttgaacttgtatggatggattaccatactttcattgctttatctgtttccagtggctatttttgtagaagggtatcagtggatcccagggtattacaaggcaattgaagccataggtaaagcatccacattttatacttgggtgttggtgtctggggtgttctaccatctttataaccaatcatcttaccaagcactggatgagattagcccattgactttctctgtggggaacacaatgaaaagagtggtggtgattgtgtcttcagttttggtgttcaggaatccggttcggcctcttaacggccttggatccgccattgcaattcttgggactttcctgtattctcaggcaacatccaaaaagaaagcaatgaaaattgaaggtgaaaagagtagttagagaaaaagaaggaaaaaagaagcattacacagagaaaaaaatgtttgattatttgagtgctactcttagccttgttagaattagacattaaataagatcttccattttggtttcttttgaactattgctatggtttttctattgatattttaaagcgccttttctgtt

SEQ ID NO: 68827 - DNA, 253 bp, Glycine max
  Clone ID: PAT_MRT3847_33164C.1
gagacctcaggtcaggcggggctacccgctgagtttaagcatatcaataagcggaaaaaaaaaaaaaaaaaaaaaaaagcggccggtgtacaggatacaagattacagactccggcctgcgacatgctacgtcttatatagtgtatcctgaaaccaaaatacaggccactggtcgacaacgtacaaactgggaaatgggtaaaccttgccaacttaaaagtttagcagcttataccacattcccctgttggcg

SEQ ID NO: 68828 - DNA, 410 bp, Glycine max
  unsure (1)..(410): unsure at all n locations
  Clone ID: PAT_MRT3847_33165C.1
tacggctgcgagaagacgacagaaggggtccgttacaacttaaaccggtcatttatagcactttttttttgggtataaggtcgttgttttgctttgatatctctttcgggtcaattcttccctgccattatgatgtccatgaagacatttagtactgttaattagcattcgtgtctcctcgttaacgatgcttatttatatctattcttctacttgcgatgcaaagcagcctaaatcattagtaattatgagaaacatcatgaatgaacattagttatcgtggaatctttattcagggacaaaccactgaaaccagcaaaacaaaacataagggtatgttatgtccanaaagaatagaggattattacatcataatctgttaaattattatattaaaataaatgatgctt

SEQ ID NO: 68829 - DNA, 1310 bp, Glycine max
  Clone ID: PAT_MRT3847_33166C.1
cacatctctatatctcttacgccaccgcttcatttgactacactccatttcctctcctcatcccttctcctttctatttctcttccaatttctttcattcccttacgtatcgcctctttctaatctacaccactttctcttcctttctgaattttttgtttctacaactttgaataattctccttcgtatcaagtcttcctcatcttcaccacctctttgtaagtgtatatttatgtgtctaagaacataaactaaaaaaccaaggcgagtgaaagaaaaaaaatgtcaggtgtgtctctagcagtgtctggtccaccagcagcaacagtggctgaagcagcaggtacaaagcctaaacgaagaacagaacaggcaccaatgggtggcatgatgggttcactgcgcgtgatagaacttcagctggtggccttcatcttggtgttctcagcaagtggccttcgtcccactccttgatctagtgttccctgcattcgcctctgcatacatcttggcactttcacaattcgcatttccatcggcgtcttcgtcggggactgagatcttcaaagggagcagattgttccgaatgtatgttgtttttggcaccaccgtggggctgttcttgccgctggcttacgtgcttggtgggtttgcaagaggggatgagcatgcagtgcgttctgccaccccgcacttgttcttgctatcgtttcagatactcactgagaacattattggtggtttgtactctgtttttcgccacccgtgagggcgttggtgccaatcatctacacaattcgtaggatctttgtggatattgattggattcatgatgtctggctcaacaagactttgcctgtcaatgccaaatttcaggacttggcatggtattggttcggaaagggtctggcagtggccaatctggcttatttctccattaatctatttgggttcttgatacccaggttccttccaagagcttttgagaggtatttccaagagaagggagagatctataccaagtcagcagaggataaaagatctgtggttgtcaacagaacccaattatcagaaaagaagacagattaagagctatagccaattttgacttcacttgcaattttaaacactttcagcattttttttccttagaaaatagtaatgaatgtgtatgatgatatgtgagcctggacttaaaaatctggctctccgttacattatgaaactatatatggcttttggataaattttatgtatcatacaggttaattcaatatttgctgatttcttctaaaaaaaaaaaaaaaaa

SEQ ID NO: 68830 - DNA, 287 bp, Glycine max
  Clone ID: PAT_MRT3847_33167C.1
gaacaatgcatggaggatgccgcgggccattccgacaagcaccttttaatgctactttcatggattccgcctatcaattgccagcttcttattcaataattggggtttcaccgtttgtcccttcggccagtcacacctacttcgcttcctttggcatgcccgtaatgaatcaagccacatcaagatcaacccttgaacaagtgaaccaatttgcttcacaagggtcttaatggcaaaaatggcattcatctgtataaggagcccatttttacccttattattaccca

SEQ ID NO: 68831 - DNA, 380 bp, Glycine max
  Clone ID: PAT_MRT3847_33168C.1
atggcaaaatctcttttcatttggtgtcttaaaaaaaaacatatactaattgttcaagatttattaaaaactatagtatcaggagtaagactaattaaatataatataaaattcacaaaatttcatcatttttaataaatttcaacaaataaaaaaaatgttgaaaaaagtataacagagaatatattcttagcatatttctcatagttaggtttaagaaagcaaaccttgttattgcttctgctccacagagtttcaatgttactttccgagagatccatgacagcaagttccaaaggactatagctagaaggcatataccttaatggacattgtttccattgtagccatttcagtcctgggggaaggcatctgaattg

SEQ ID NO: 68832 - DNA, 424 bp, Glycine max
  Clone ID: PAT_MRT3847_33169C.1
agtgaacctcttctactcccttaactagcaaaaccttacccacaacattactcttcaatcacccaacatcattctccataatatcaaataaaggtcatttactaatagatttgcaaatatatatataaataatacaaaataactccgaagtcaacatattactttcttagcatctttcagctcccctacacatatctttaaacaactttctatcatatatacactccctcatttatttattacttccttcacattagtattacctttctttgccactaaatcctttaagcaaataagaaaagaagaagatatagcagctaccttgacccttacttaaatattagcaaatattccaatttctagaggtgacccaactagttgagtcatatatgacattcataccttagcaagaaaagttttattt

SEQ ID NO: 68833 - DNA, 308 bp, Glycine max
  Clone ID: PAT_MRT3847_3316C.1
gggtcgagctaaagcttttttggattctaaacaattccttcagattattttttctctattagcgcttcacaagagagagggtctctttatgctggggatgagaataaccctttccctatatttcctttgcataccttcaattcttcttataatccatgttgaccaacccttctcaatacaatttcatcttacaagaattgctccaaaatatcactattacaccatattcttgttttacaaatgacaatgcacataccctctaaaaatcttttatatactccacattatcaccattaatcaaacatact

SEQ ID NO: 68834 - DNA, 269 bp, Glycine max
  Clone ID: PAT_MRT3847_33170C.1
tagctgcgagcgcgagagccggacttaggactatctacgggtggaacaaactatgcaagatctcggggtgaatttgaacccaaaggttccaacgagagctgggggtacagagcatctcgaattaagaaaagaaatactaacttggctgagtctcctttttcaagcgcagtataaagaggccgaaagaacctcttctggtgatgggccatatggcgaaacacctggcacaccaaagcatgtacatcgagtcggggatcatgaccgaacat

SEQ ID NO: 68835 - DNA, 347 bp, Glycine max
  Clone ID: PAT_MRT3847_33171C.1
attgaaatgtttaaacccaaaaggggacctgaaagggttttgccttttaaacatatcgggaaataaatttgggaaaaaaaagggctaccaaaaattttgttttgttaacaaacttttaaaagacttgcccttaagttaaaattccgaacaaccaaaaaagggtttgtttttcaattagcggggggtggaggggaaaagggaatgaacaacaaaggccttggttttcctgtttgttaaaaaaagggtgccttaccctgcccaggtttgggactttccccatgatcaagatgaaaaaatgctcccttaattttgggcaaaaactcaagctttttttgggatgcttcccc

SEQ ID NO: 68836 - DNA, 377 bp, Glycine max
  Clone ID: PAT_MRT3847_33172C.1
cttcgtttttttttttttttttttttgtcttaaattttttttttttttttttttttggcgggccggggtaaaagcaaagttctcgggtctattgcgaaaggtaaaataacaaccgcctggataaaatcccccactcttgggaaaactttcccacaaagggaacttaaccccctaaactttttgacatgtggagctcctcccctaatcctttgctgcggggggggcaacgttaggcccaaccacaaccttttccaacgaggcgcctggccggaaaaagttttttggggagccgaccccaaaaaggggtgggggtaactttcaagctttcgaggccaacaacaccgtggggaagctttcccaccccccccttttccaga

SEQ ID NO: 68837 - DNA, 277 bp, Glycine max
  Clone ID: PAT_MRT3847_33173C.1
cccacgcgtccgaaaaaaaaaaaaaaataaataaaaaaaaaaaaaaaaaaaaaaggccggctggtataaaaaaaggcaaggctgatctagaggatcaagccatacatacgctatcatgtaacgtcatatcaattcaatggactgacctaaattaaatatcgtggcgagtgataaacaccttacggaacggaaaaaccttgccttgcaccacattaatctcttgtcagctgataccatattggccaggtcccataatatcgaacaggccaacaccaat

SEQ ID NO: 68838 - DNA, 368 bp, Glycine max
  Clone ID: PAT_MRT3847_33174C.1
ggctaatccctcaagcaagaaaggcatgtggtattgggatgatgatgaacaagaatatcctattactgatgtgatcaaattccgagttactaatgtgagttatccccaaattccagttgaacaaccaaaagaatcaaagccatttgcccctatgttggtctctggagcgatagatgatgatggtctaggccctatttcttggtggtttggagatgaggatgaggacgagtaaatgagtccaaaaatggtcggatagaagatatttcggatgctttctgcatgatttttaatttaacaactcaagttacaactcgacaacagtatacttttgttaaattcctttgcttcataaagtatttaattcaatg

SEQ ID NO: 68839 - DNA, 409 bp, Glycine max
  Clone ID: PAT_MRT3847_33175C.1
gtacagcaagcagcaaccttgttttttcttttaccacaactcttcattttgtgggtaacaataatccatacagataataataatttggaatgttttaatcaagctcttcagtgtatttgatagcaagagtgaactgtctgaaaaagaatgtttgaatcaaaacataaaataaaataatttgaaaattattagtgacatcatttttatcaagcagaaacttttaatctgcagctaacgggttcaattgattcgtcctaaattgtttataattgggggtatcataagataaaatgaccttacaaaaccatacaacgtcattttttatcactgaacataaatgtcattcttacaactttcccctttagaggttatacatgttaattacaacttccttttccagttccacacg

SEQ ID NO: 68840 - DNA, 277 bp, Glycine max
  Clone ID: PAT_MRT3847_33176C.1
cttaattatgattttaatttgggaatacattaacatcatgtgaattatgactgaaccgagcttgagaaagatgaatcgggaaaagattgatgaagatggccggttcggttagaaactggaggaaagggtaccatgaagaagaaagaagaaggctgtccaggggacgacgtcttacaggtgccaagctgctttacagcaccctgcagagaataggctttaatgccatgcacgctattgaagatgtctggccctctaatgacaacgtagttattgggaa

SEQ ID NO: 68841 - DNA, 288 bp, Glycine max
  Clone ID: PAT_MRT3847_33177C.1
gggtatgtggtttcttttttaaattaaaccatcgaactttgctccccacctcccaaaaaaaccgcccctaaacaatggtactcctataaaataaacaaaaaaatgcttcttgactttcctcttcctattcctaaccttgggtcaccccccccccccattattcacgaaacgggatccgcctcttgtaaattaagaaattccgtctactttaacaacatatttacttttttccaaccaaatttgtttcttttctcacacaactcaaaaaggggtggccttttggaaaaa

SEQ ID NO: 68842 - DNA, 386 bp, Glycine max
  Clone ID: PAT_MRT3847_33178C.1
ccctgagggatcccgatctgatttcctttggcttcacgatcgtgctatatacgagagcacactcatcccaattcatataggaacattcaatgcctgtcttagttctggaaaatgtggaataggaattcccccaggaaccccaatctcatttccttcggcttccggataggtctcataagaaaacagatagttccaaggcatctctgaacatttctgcccccttatttcttgaaaagtgtgcaatttggaatttcccgaggaaagcccacctcatttcctgtggcttcaggataggcctcgttagaaaaccaattattgccaattcaccttatgaacattgctgcctccttatttattgaaaatggtggaatcgcaattccccgggg

SEQ ID NO: 68843 - DNA, 961 bp, Glycine max
  Clone ID: PAT_MRT3847_33179C.1
gttccttggtctttaattttattggggcagaacttatctcattggttccattcctcgtggcatttttttgctcaccaagacctgaccccctttctttctgcataagatcttgagtttgtccagaaatgttgaaaaagctttgctgctggtgattgctttgttcccgaggatggacttgagatgcaatactttgagaatgggtaattgcaacttggcctgcaggttctgttgtttgaagactagatctgttcatgccattttcatcctttttctttaagtcacttgttgatgcttctgttttgaaaggatcaaagccgttaacttcaagcattcctgagttttcaattgattcgcttttttgactgttatcttcataaaacttggtcgaactaaccatttcaaggagtttactgaaggaagtgttgctaccaaaatggttgtactttgctgtgctggacagaacttctacttctgagttgctatctgagcatgatcctattttctcaggattttgatcatttgaaaaatctccagatatttgagaggaaaaaacagagccttgggatgaaactatgtcatttaactctttcctatcaccattgtaacatgatttttcttctccttcctcaattgtagcactaagtattccactcctcgtaggactacagtgttccttaatattcttttgaggtaattctgacaatctggagtttgattcatctgttaagctaattacactgctgggagttccacaggattcattgctgttgacggcttctttttctccagaatgttcagccatatctattgtagaagtctggtcataaacagattgattcaataattttacatcccattctgtgctctctttcggttccactatatgcacttgtgggtcggtgactaccagccttgtgtcttctttatggggtcttttgcacatgctggcttgaattttttg

SEQ ID NO: 68844 - DNA, 805 bp, Glycine max
  unsure (1)..(805): unsure at all n locations
  Clone ID: PAT_MRT3847_3317C.1
ccacgcgtccgggaaaccctctcattattgatgagaactctgagagttccaaacctgcaaaaaatatttttcttcaaaaattgaatgattgtttttgtgtctgctttttttgtggcaatgacttccacccatttgatacatagtccactattacaagaatatattcatttgaatgtgagaaaggcagtggtcctacaaagtctatccncctagnncagtagtcaaaaccttcaacttcaagaatgttgttcaaggccatctcattccttcttgaaattcctccttttctttggcatttgtcatattgtttcacatacaaatgtgcatctttaaatagcatgggccacaaaattcctgcttggagaaccttggcagcacttctttctccattaaaatggcccccataaggtgaattgtgataatgccaaagaatgctccaaaatgacacatcttatatcaatttatttgctctaatcttgaacaagtgaggattatcccgcacataatgattagcatccttaaagaatttcttcttctagtgccaattcattccttcaaaattactcctacagccttgaaatttgccatatcaacaaactaaggtctttgttgcactgctagaagcttttcattaggaaattcttcttgtatctcagcttctttaatggtcacttcactattgttaaatttggagagatgatcagctacaacattctcattgcccttcttgtatttgatttccaaatcaaattcctacaacagtaaaacccaacaaataagtctaggttttgaatttgatttagtt

SEQ ID NO: 68845 - DNA, 194 bp, Glycine max
  Clone ID: PAT_MRT3847_33180C.1
cgcatactatttcatgtggaagttgtctgctctagcagagcatggttccctacgcacagagaacgcatgggcaggaagatggtggacttggctagggacgtgggcaagggtggaacaccttcgtaccgtcgacacctgcatgttgttgttaccggttaggatgatgaggatagatacattgacatcccccaaat

SEQ ID NO: 68846 - DNA, 263 bp, Glycine max
  Clone ID: PAT_MRT3847_33181C.1
cagcatcggcggcgacagtcatctccgacaacaacacttcctcggcgacaaatgtctctagtggcgaacgaggatttccagcacattctgcgtgtgctgaacaccaacgtggatgggaagcagaagataatgttcgctatgacctccatcaagggtattggcaggagattcgccaacatcgcttgcaacaaggccgatgttgacatgaacaaaagggctggtgagttgacccgtgcagagttggatagtgtgatgactgtcgt

SEQ ID NO: 68847 - DNA, 383 bp, Glycine max
  Clone ID: PAT_MRT3847_33182C.1
aggccatatttatactactgagtagatcgtgagcaaggcaatgggctcccaagataatccgtaaggccataggccatatgaaggctaaagaaaggcgaggtgaaacaaatggagtagctccttctcggtgtggagactggggagtaaaccaacacgcctgtatgtgtacccaacaaactgccgtcgatccttgcctcgagagggttgatgagcctgacaacaaaccaaagaatacccgatggcaccctgatgagttggatgctgataaatgagcatgcaagtgggggactcaaggtgttgggggaacaaaaggtagagatctagtgtgggatgataggaggattggaaagatgactattggtttccgattaggtgttgttgca

SEQ ID NO: 68848 - DNA, 228 bp, Glycine max
  Clone ID: PAT_MRT3847_33183C.1
aaaagatgacaagtcatatttcatatacagaacttatttgcaaaagcaaaaagtagagaaaaatagcatatgatatcgtataacttttttattttaaatagaatacacaaggcatgatctaataagaaaaattagatcatactaacaattaacatttatcaataagaacagtatactaggcatgagctacaatttttacaactttcatatatggtttcttctcaacac

SEQ ID NO: 68849 - DNA, 208 bp, Glycine max
  Clone ID: PAT_MRT3847_33184C.1
cgttgctgatatgacagagcttcctagtgtgctgccgctccaaataatggtaatgctggtccttatcaaaaggggcagcagcaacaatgagtgggggggatgggcttgcggctcttgcccaccacctatcaaattttcctttaaacttatcaaggggattaaagattgatgggggtatccgggggtttggctatattggactcaaaaa

SEQ ID NO: 68850 - DNA, 324 bp, Glycine max
  Clone ID: PAT_MRT3847_33185C.1
gtcctgaattatgatggaataattccttgtgaatttattaatcttgacaagtgctccgtgatgtgatatagataatacatttattcgtttacaatcaaaggcatgacgtgcttagtttggacttgggagctatatagtacaaagccctaaattccttggagcatatccaccatacttttgttgtgtgtttatcggatgcaagtttttttatggtattggtagcaaccatgaaaacaagacagctaaattgccgagcacgtacttaccagacaagtagccttgatgatggtatctgaatcataaccagaaatctctgcatctttc

SEQ ID NO: 68851 - DNA, 231 bp, Glycine max
  Clone ID: PAT_MRT3847_33186C.1
tcacattttttctgagacccaaactttaatactatcattcattcagctggagggttgaacgattaatatcttaagatgcaactatacatggtggctgtatccatgagaaccacaaattaacttggtccattattccaacttctagaaaagacgcatgaagcacaccattgacaaaggaaggtgccctgctatttctttttaggaattcataccctaaattaatgcctattt

SEQ ID NO: 68852 - DNA, 833 bp, Glycine max
  Clone ID: PAT_MRT3847_33187C.1
ccccttcggctcgagtgctcacgtatcagaatttttgcactcgaaggtcaataaaacagctagggtggttgcttgctgtggttcagagtcttttgatagtagcatctcgcaaacattacacggttgatgtagttgttgcctggtacactgttaatttggtggtgtttttcattgacaagaaattgccagaattaccagacaggtcaattgcagctgcaaccttgctacctttgagcaccaaagataaagacaataggaccaaagaggagaaccacaagctattgaatgggaattctggagaccctgcagattggaggcagagaactcaagtgaatggcaagatcatggaagatggcaatacactccatgcagattctgccatgaatggtgcatagatataggagcctctgctgtataaattggatccactgcaaagattgctgctgatggaaaagctgcaaccaaccttcaatttgaaggatttgttgtctgaaacattcacctgttaattcaaattagtacgccccaatttgtactagtgaaattgaaactgggttgtgcatttcaacattttgcagctcagattccatgtcatggttaaattatctatacaccatcagcatgtgccatagaaaaatttccattccctcttttacctacatcattgatcccacatgcataatgctgtagagtcttttgtttttgttggttgttaaatcttcttgcaatcacatggtaaccaacctaatgatcagcactatgtaatagactagtaggcgtgttttataaaaaagtaagggaaattctaattcctagatcaacttttcctggtt

SEQ ID NO: 68853 - DNA, 1117 bp, Glycine max
  Clone ID: PAT_MRT3847_33188C.1
ctcgagccgaatcggctcgagattcttttttctaaattaaacaaggcaaggactaactcccgaactgcaagtaaaaaaaatgatagaatagaatatagatttatctataagctctatgacttgtaatagaacttatgcttgatagaaaggttattatcatatagagttgacgaatgagatgaagttgagttcattaaataaagacgaaaagataaaggtggatcttattgttattggatctgttgctgttgatccaaagacaggtgctcgattgggaaagggagagggatttgcagaacttgaatatggtatgctgaggtacatgggagccatcgatgattcaacacgagttgttacatctgtgcatgactgccaattggtggatgatattccagttgaaaagctgttaatccatgatgtaccagtggatatcatttgtaccccgacacaggtcatttttacaaatacatctatcccaaagcctcaaggaatttattgggacaagttgtctcctgagaagttgggacaagttcgtatactgagggagctcaagaagaggattgaacaagagactggacagaagcttcctactggtccatcggagaaattaccccctactgctcaacgaagtagaaggggttgattatgtacataatgatgggtcttgagtggaaggatattgcttttgttcagaagtcaaatgtggagagttatatacaatgaattacagatttccttggtccccatgaaagctttgataatgaaaggaaggaagctccacgtaatggttcatttgtccactccaaaccgactgcggaatatcattggatgtcttttacgacgacttggatttcttttaagatcttattacataagtcaaatgtgacgtggatacaaacacgtgaatctattaaaaaatttcatgatgtgaccagagatagaatgctcttcaagcctttttcaactatcattgtccactgggttccagttgtacgataaaaatgtattgatatcatattgttaaggcaaatctatcatgcttttgaagcataaatgtggaatgtaaaaagactcgccacttaaacgtatagtagtcaaaatctatcttgaagtatcc

SEQ ID NO: 68854 - DNA, 182 bp, Glycine max
  Clone ID: PAT_MRT3847_33189C.1
aacattggggttttataagctacacttgataaaactttgttaaaaaaaaacgatgaaggggcatatttaaaaacaataatggaaattttttatactactctaataaaaattctactaataggatatattttacacacttgtaatgaaatgaagaacattacaatcattaaaatcattaaaaa

SEQ ID NO: 68855 - DNA, 468 bp, Glycine max
  Clone ID: PAT_MRT3847_3318C.1
caaactctatgatttcaattaatatttacaaatcctttattttttaagaaaatcctacaaatttaataccgaagcgacaaaagtattttcaacaataggaagtataaaaaatataaaccaaggccaattacacaaatacgcttcagatcaaaatccacactaaacaggaatagcacatacctaggaatttcataatttaaataggaccaaaatgttgagcaaaaatagtcttgttataaatgacttaaaaatattaccattccctttatattaatggtttttacaaaagcaaggtaaaatacttgcatttccttactgcttgaaaacaaataatggtaaacgtgtacacaatacctggtacatcatattccactgaccaactgggggtaaacaattcttttctttcaagcaaagggaaatctaatttcattgaaaattatatccttggagatgtatattctgtcatct

SEQ ID NO: 68856 - DNA, 464 bp, Glycine max
  Clone ID: PAT_MRT3847_33190C.1
gcttctgcatgggacttggtgtgattccaaacatcttgtgttcagaaatcttcccaacaagtgttcgcggaatatgcatttctatttgctccctcacattttggatctgcacattgatagtcacttctttatttcccttcttgctccatctccttggtcttactggggtctttggattattcgttgttgggtgcatcattgcatggatatttgtctacttgaaagttcctgaaacaaagggcatgcctcttgaagtcatcattgagttcttctctattggtgcgaagcctgaatgaaacgtactgatcttgcaaggttcggaagcaaattaaaagctgaattaatactcacataattttcatcacaaggaagatggaaagaaggatattgccattgaaatattttcaagtttgattgcttttgattcccctaaaattatgagtttaaaattttgttggaggaag

SEQ ID NO: 68857 - DNA, 205 bp, Glycine max
  unsure (1)..(205): unsure at all n locations
  Clone ID: PAT_MRT3847_33191C.1
cggaccggccggaattattattcggggggcgactagtaaagtcggcggccgccctcctnnnttggggttttttaagaagtaaaaaactggatttatataatttaaaaataaagctttaattttccatgtgcaccgtgaaaagctcctaaatggagaatgaaaccctagattaaaaatgcttatcaaaagcggggtcaacagaaaa

SEQ ID NO: 68858 - DNA, 352 bp, Glycine max
  Clone ID: PAT_MRT3847_33192C.1
ggcagctgctactcctatggcaagccaactcaaatgcaccttcactaaaactcttgtaactgccaagggcctctctgcctcttcaccactccacctcctgccttctaagaggcaatttagctacactgttagggccatccaatcagaaaacccaacctatcaagtgattcaaccaatcaaaggtgatcccttcattgggagacttgaaaccacaattacatccaacaccttgattgcatggcacttatcgaaccttacagcatacacgaccgcagggaacacactactaacaggcacctaggcgggcgctggaccaggctaccttatgctgagcccatattcaacgccgggc

SEQ ID NO: 68859 - DNA, 1093 bp, Glycine max
  unsure (1)..(1093): unsure at all n locations
  Clone ID: PAT_MRT3847_33193C.1
gcgcgagctcacagttactaatctcacgcacattctttctctctctaaattctgcaccacaatccgcaaaatgaccaaatacttcttgctgtgaatgtcgaaaatgcctgcaggcacaacatgtgaagtgatgcaaaacggcaacacttgtttcaccagatcctttcgtcattgatggggaagaaaggaggcagctggttctcatctgtgaagaaagttttcaagtcatcttctaaagattcgccccagcctgagaagaagaaggacaacacacagaaattacagcatgaagtggcagaggtggtgtcctttgagcattttcctgcagagagttctccagataatgtgagcaatgcagagatgagtacgacatcaacgccagtgaccaacgaagatagaagccatgcgattgccgttgcagcagcaactgccgcagctgcagaagctgctgtggtggctgctcaagcagctgcaagagttgtaagattggcaggaagttacgggcggcagtccaaggaagaaagagcagcaacactcattcaatcatactatagaggctacctggctcgacgtgcactacgagcattgaagggattagtgaggctgcaagcactggtgaggggacacaatgtgcggaagcaagcgcagatgacgatgcggtgcatgcaagcactggtgagggtgcaggcacgagtacgggctcgccgattccaattgagtcacgcggatcaggaaagagagaagaaagaagagcccaagcccatacccgtgcccgtgcccatgagccccctgagaagaatagacgacattaatgactgggacaataggcgtcaaagtagctacaaaattaaggaaaacgatttgcggaaacatgaagctgtaatgaagagagagagagctcttgcatacgctttcaactatcaacagcaacaacaaaagcaatttttgcagccagactggaatggtaatgatgatgtaggaacaaactagagcatgaaaaagttagtttcatgtctcgctccgcaacttgttacactcttagatttattttgtgtctcgacatggatganattaatggttatacgagaaacag

SEQ ID NO: 68860 - DNA, 575 bp, Glycine max
  Clone ID: PAT_MRT3847_33194C.1
acccaaaatccgaaagatggctacgatgataaccacttgtagcaatgaacaccgtaatgggtggctaactcaagcgttaggcttgaggatcttcacggtctcccaagtgaaatcaggatcgtcacgtccaaaatgcccataagcagcagttttctggtacctgaagttgcctcctctcatgagatcaagatggattgctatcattcctggcctgaaatcaaatttctcctaattagagccaggaatcttccccgtttggagaaagtggctctggaactccaattgcataagaaacctgcacaatgcaacgtcgtgcaagccctgaagctaccacgctcttggctgcttgcctaacaatgtatgcaccactcctatcaaccttggttgggtccttgccggagaaggcaccaccaccatgagcaccccaaccaccataggtgtcgataatgatcttccttccagtgagtcctgcatctccatggggtccaccaatcacaaacctaccagaggggttgaggtggaagatggtcttatcatcaaggtatttagctgggatgacaggtttgatcacatgc

SEQ ID NO: 68861 - DNA, 371 bp, Glycine max
  Clone ID: PAT_MRT3847_33195C.1
aattgaaatcatccattcagccaatgatcaagacatgggaaattcatgagtttatctttatcttctatgcatataaaatgtacaagatcgaatagtgattatgatccagaacatcatcattatttttttttttttacacaaaaaaaaaaaacaacgagacgagccagaaaaaaaagagagagaagaaaaccctttcagagggaacactcgaacgatcagtgagtaaaacgtcagaatcagaaaacacaaatctcatctcaaactggaaccggtgaaacaaaccccggatcttctgtagcagggtgcaccgctggctccacgattctatcatcaaagtaattctcaccgttgatctgatcaagtaccaagac

SEQ ID NO: 68862 - DNA, 471 bp, Glycine max
  Clone ID: PAT_MRT3847_33196C.1
cccccggggattgcccccaaaaaaagggccggggaaaatttaaccccaagggccccccccaaaaaaaaaaccccccgggggaaaacaaacaaaaggggggggtttgccggcctttttttcacccaaacaaattgccgaatttgagggggggtttggggaatttttttttttaaaaaaaacaaggggggggggaaaaaaccttttaaaggcccaaagggtctccactggggcaaaaaaaaaccccccttggttttttgggggaaacactggtccctttaaaaaaccaaaatttccccccccttgggtgggggggggggggcatcaccccccaccccttcaataaaaagggggttgaaacggcttttttgatccctaaaagccaagagaacctcgggggcccgggggaacatttggaaaacccccgggggcccaagaaccttgggagggggggcgggggggccccccccccca

SEQ ID NO: 68863 - DNA, 1613 bp, Glycine max
  Clone ID: PAT_MRT3847_33197C.1
acgaagctcggaattcggctcgaggtccatcttcttcttctcttcctcttcgcacaaagcagcatgcatccttgagatggaaactttcctcttcacctcagaatctgtaaacgaaggccatcccgacaagctgtgtgaccaggtttcagatgccatcctagatgcatgcttggagcaagacccagaaagcaaggttgcttgcgagacctgtacaaaaactaacatggttatggtctttggtgagattacaaccaaggccagcgtgaactacgagaaaatagttcgagacacttgcaaaggcattgggtttgtgtcaccagatgttggtcttgatgctgacaactgcaaagttctggtcaacattgagcaacagagccctgatattgctcaaggagttcacggtcatatgaccaagaaacctgaggaaattggtgctggtgaccaaggccacatgtttggttatgctacagacgaaacacctgagttaatgccactcactcatgtgcttgctactaaacttggtgccaggctcactgaggtgagaaagaacaaaacatgcccctggctgaggccagatggtaaaacccaagtgacagttgagtacaagaacgatggtggagccatgattcctattcgggttcacacagttctcatctcaactcagcatgatgaaactgtcacaaatgaacaaatctctaaagaattgaaagagcatgtgatcaaacctgtcatcccagctaaataccttgatgataagaccatcttccacctcaacccctctggtaggtttgtgattggtggaccccatggagatgcaggactcactggaaggaagatcattatcgacacctatggtggttggggtgctcatggtggtggtgccttctccggcaaggacccaaccaaggttgataggagtggtgcatacattgttaggcaagcagccaagagcgtggtagcttcagggcttgcacgacgttgcattgtgcaggtttcttatgcaattggagttccagagccactttctgtgtttgtagacacataccaaacggggaagattccagacaaggacatattggctctaattaaggagaaatttgatttcaggccaggaatgatagcaatccatcttgatctcatgagaggaggcaacttcaggtaccagaaaactgctgcttatgggcattttggacgtgacgatcctgatttcacttgggagaccgtgaagatcctcaagcctaacgcttgagttagccacccattacggtgttcattgctacaagtggttatcatcgtagccatctttcggattttgggtaaaagggaaataaaaaataaaaaaaagaagcttcaatgcgtacatctcttattgacgatacgtttcacagcttggacgagaaaaaggagtagacattagcacaataggagagcatgcaccattaactacctctttggttttattgcttaatttaaatttaattctgtactgcgatcaatccttgcgtgttggtgttgtcgatttgatttttttgagggggtcaatttatgaagttgtttaccacataaaagacaatttcttatggagacatggaataattaagttttgttctatc

SEQ ID NO: 68864 - DNA, 388 bp, Glycine max
  Clone ID: PAT_MRT3847_33198C.1
cggaagaaaaaaccattctgggttggccaagaatataaagagcaaacatctagaaaacttcaaaaagggggggccagggaaaaaaatatcaaaaaaacaaaaatcaaagctagctttggggcaaaaaaaaagggggtcgggaaaaaaaataaaagggccaacaaataaatcttgaaaaaagggggcatgtttgtccctgcaaatcttccaaaaccccaaggcccttaagtttggatcccaattaataaggaacaggatttttttaagccccctaaaaaggggcttccccataaggattattctcatccaaaggacccagcatatcgggggagttttggaatatattttaaaaccaataaattccttcataaaaaaggaagttagcatc

SEQ ID NO: 68865 - DNA, 613 bp, Glycine max
  Clone ID: PAT_MRT3847_33199C.1
atggaggaagaggaagatgaagtgggttggtgttcttctgattcgggcgacggcgacggcgacgacgatatcgaagaacggaaatctcagaatgtggatgccttgctcaggggcaacctcgtggtgaagagacaatcgttgctaccgcgacttctatcagtatcgcaaggagcggctgtttgtagaaagcccttcaaacctccatgctctaaatctcatgcttccgcttccgcttacaatcaagaccttactcgtaagctttccgctcgcaaaaggtttgttccctggggttcttcctctcctattcctattcctattcctagatctgccttagacgactccaaattcaatgttgctgttgctgttgctgatgttgccgaggagctcaagccctctttgcctcccgggattgatcctctcgtattgtggcaccctcaagactccgaggatgctaatgctaattttaccaccataacagttgatcccgtgcttgttcgttaccttcgtccacatcagagagaaggggttcagttcatgtttgattgtgtctcaggcctgtctaccacaccaaatatacacggatgcattttggcagatgatatgggtttgggga

SEQ ID NO: 68866 - DNA, 490 bp, Glycine max
  Clone ID: PAT_MRT3847_3319C.1
gtcgggatggttatgaaggaaacccatatcttggctgcatagacattgacgaatgtaagacaggccatcatacatgcataagtgaaaaatattgtctcaacaccaacggatcccacatatgtttctgtccaaaatccggaaatggaacaaagggatcgaagggtgccacaaacaagatgtagttaccaaggttgtcataggagtaggagcaggaactattattttagttgtggggactaccttactgtacttgatataccagaaaaagaaactcaacaaactcagagagaaatactttcagcagaatggtggttccattttgctacagaaactctctacaagagaaaactcctcccaaattcaaattttcacagaagaacaactaaataaggccaccgacaactttgacgagagcttaatcattggtaaaggaggttttggcacagttttcaaaggacacctatcagataacagaattgttgctatcaag

SEQ ID NO: 68867 - DNA, 696 bp, Glycine max
  unsure (1)..(696): unsure at all n locations
  Clone ID: PAT_MRT3847_331C.1
gttttttttttctggtgatcaagctcgagccggatttgggagcaagatcattttggatacacaacacaggacccattggctgcctcccttacattttggccaattttctatcagctgaaagggatgcctatggttgtgcaaagacatataatgatatagctcagtatttcaaccacaaattgaaggaagttgtggttcaacttcgcaaagaccttcctctggctgcaattacatatgtagatatttattctgttaagtactctctattcagccacccaaagaaatatggatttaaactcccacttgttgcttgttgtggttatggaggggaatacaactacagtggtagtgttggatgtggagaaaacatagagggcaatggaactgaaatttttgtgggttcatgtggaaggccatcagctagagtaaattgggatgggatccattacacggaggcagctagcaagttcatctttgatcaaatttctactggtgctttctcagagacagccattcctttgaatatggcatgtcacagaagttatacaaaaagttattgagctttagaagcttatcaatgtaataatttgtattaaaaataatttgatattccatgaagaagtctcaatatgataagttattgtgtaagttgttcactactccccntgtagttgtttaaattatactatctttcta

SEQ ID NO: 68868 - DNA, 629 bp, Glycine max
  Clone ID: PAT_MRT3847_33200C.1
tttcatttttctcctaaaatgtgatacaatataaagaattgctatagtatccagagaaatctaaggattttgatacggttatatttttggaacaatgaatttgataaaccataaaaaatttgttaataactgtatcaaaactcttaaaacttctgaagataatatagaatttctctacaacaatataaccttacttgagaaacaaatctggaagtttgaagttggttgcatcttcaacattgttgatccaaccaaaggtctccatgaaagggttggccaaggactctggtgggtagtcatcaatgcagtaactccacacatttgtatgatccccaagatccttcattacctcccacaaacagctgttgcatttaaagccagcaccaaagcttatcatcaacactctgtcacctttcttgagcctcttcttggcttccatgtaccccagcacataccacaggctacttgctgaagtgttaccaaaacggtgcagtgtcatccttgctggctcaagatcatactcacacagatccaagctctttccaatcccatctatcacagcctttcctcctgtgtggaggcaaaaatgttccaccccggtctaagttcaaagggattaaaagatccac

SEQ ID NO: 68869 - DNA, 516 bp, Glycine max
  Clone ID: PAT_MRT3847_33201C.1
cggatgttttggcggacgcgtgggggccccacctgtggagcgatatctgcatgatttgcttcagtatgcgttgggtgttctgcacattgttacattagtacctagcagtcgtgagatgattgtaaatgtaacattaagcaataatcgcgttggtatcgcggtaattttggatgctgcaaatatagctagtaatcatgtggaccctgagataattcaaccggcattaaatgttttagtcaatcttgtttgccctcctccttcaatcagcaataaaccagctatgtttgcacaaggtcagcaattcgcattttcccaaacatctattggtcctccctcagaggctagagatagaaatgctgaacgtaatgtctcagatagagctgttcactctaccagccagattgatcctagggagaggagtggggagcccaatgctgtagatcgaggaagtgctgcatgatttagtacacagtctgtttatagtacttccacaaactcttggtgcttttgcatttt

SEQ ID NO: 68870 - DNA, 286 bp, Glycine max
  Clone ID: PAT_MRT3847_33202C.1
cccggggaaaacaattaaaatcccctgattgcatgattcttatcaaaccggcaaaccccagccgggcgggagtgtttcacaggatccaccggttcaaaaaaaaaataagcaggcaagggccatttcaaacccctttaccattttcagcggggttttcccccaaattaccaggttggccccgggaaccccgccccacttggggttgccggggcggaaattaagggggatctcccttccttaaacctcttagtcccaaaaaaggttctccgcccccccaaaaaaagga

SEQ ID NO: 68871 - DNA, 423 bp, Glycine max
  Clone ID: PAT_MRT3847_33203C.1
catgctactgttcaagtcagagctgctcctaatgttccacacgcttcactggtaacgatagagccgcacaccgaggatgactgggaaattttggagcttaacgcggaccaagccgaagctcaaatcctcagccaggtcaggattgtccatgaagggatgagatttcctttgtggttacatggtcatactgtcatcacattccaagtggcttctgtttttccgaagaacgtggtgggtaagatgatgccaatttctgtctgcatagttctataccatcacatgctttgtcaaagcagacaaagctgcaaagatcattaatgacactttttttttggctttcttgttacaactcatgccaggaactgaagttgctgttgctccaaaaagacgcaaaaaaagttcagattcagcaggagattcaca

SEQ ID NO: 68872 - DNA, 428 bp, Glycine max
  Clone ID: PAT_MRT3847_33204C.1
agacggtgttaatctggcgcacctatatgatgtgggacgcttgttatacccaaactcggtgtgcagatttctgagcaaaccgtaactggcgagacgatcaccttgccagtggcttccatctgacacgcatctcaacgcgtacgccaaaatccaagacatggagggccttcctacagatcaacaatgattaatgttgatgcactaacagctctattacagacaaaccgtacccgactacaacatacaaaaggagtgcacgctacacctattactccacctgcacctacgaatgcaaaacttgctaaacaccctaactggcaaaacaatcactactagaggtggagctctaccacacaaatcttctcgggaaatccatgattcactatgatgaatggattgctctggatcaacaacagatgcatcttgct

SEQ ID NO: 68873 - DNA, 513 bp, Glycine max
  Clone ID: PAT_MRT3847_33205C.1
ggggatgtgcatggcacttcaattatttttcccgtctgaatcacaaggatttttaaatgtcttggctggggtacgaggttgagattgctgaatcaatgttggatgggcttctggttttgtgacttggtactagagacagatgacacagacgaaactcagaatctattactatatgtcagctgaaaagaaaaagattactcaatataggccctcataatctcagttaatacctcactatgtttcatttgtccactctcttcccactctgcccttttttatttcttctgggataaacctttcacttccagtttttgggctttggtttggagtttggatcattagtcggatggccttgagtttcccccacatttactcacaaaagtcttggcctaacactaggtggtttcaaggatttgaaaaaatggtgtggttcctcctcctctctctttatgcatggccaaaggtgtcctgggttgtgtctgcaggagcgctgcgtgaatgtcattcttgcct

SEQ ID NO: 68874 - DNA, 577 bp, Glycine max
  Clone ID: PAT_MRT3847_33206C.1
gttggagaggcttcttgggataatattattgtgctgaagtccatgcttaggggatttgaaatggtctcaggtctgaggattaactatgcaaaaagccaatttgggattgttggttttcagcccaattgggctcatgatgcagcccaacttctgaactgtaggcagctggacattccttttcactacttgggaatgcctattgctgtaaaagcttccagcaggatggtttgggagcctctgattaacaagtttaaagctaagctctccaagtggaatcagaagtacttatctatgggtggcagggtcaccttgataaaatctgtcctcaatgcgcttcccatttatctcctatctttcttcaagattcctcaaagaatagtagataaactggtgtctcttcaaagaacatttatgtgggggggaaatcaacaccataatagaatctcttgggtcaaatgggctgatatctgcactccaaaaattgatgggggattggggatcaaagacttggttcaatttaatacagctttgagaggtagatggatatgggacctaatctcccagcataaccagctgt

SEQ ID NO: 68875 - DNA, 474 bp, Glycine max
  Clone ID: PAT_MRT3847_33207C.1
ggctcgagggcggggggacttcttctggatgttggagtgagtgagggtgcggtcgtcctgcagctggtactacggatccgccgtggtgccaagatgcgcaagaagaagacctacaccatgccgaggatgatcatgcacaagcaccacaaggtgatgcttgtcattctccagttctgcacggtcgacgagtctggacaagtgcagtaggatccgtagggagtgcccacacatcgagtgtggtgccgggactgtcatggccaatcactttgatcgtcactatagcggcaagtgtggcttgcctatgtgaccagacgccgagctatattctgggagagaatctctgggtctatttaaattagtataaccagaagggcattgcattcgtagttaccgtctgactgcatgggcttggattcaacctttatgaactgtgaagcgttacggattccgtacgtgaacataagcaatttgggc

SEQ ID NO: 68876 - DNA, 308 bp, Glycine max
  Clone ID: PAT_MRT3847_33208C.1
gcgggtcgtttctcaagcggaaccattttttcgttgacgctaggaaatccggtgggggtttgaacgtggtgaggtcaaaatctacgcatgatatttacacgcggactgaatcgtaagcttatggtgacaacaaaaaaaaatccttcacgctgaagagagcagggaatgaattgcggccagtagggcttacaacggcgaaagaaggcgagtatttctgattctgatcctggcactggccctctcactgggggcatcattgagacaaatatttttctagcagtcataacggacctggataaccatacttg

SEQ ID NO: 68877 - DNA, 274 bp, Glycine max
  Clone ID: PAT_MRT3847_33209C.1
actatgtcctcttcctctcccttatcatggcatgtctgagagtttcattgctgctcagtcactttttatcgacgctttagctttctcttgcggaggtactaacttacttatggtggattagagtcacttggtgacccgtgagcatgatcatagctaccatacgaaagaggagatataagcactacagagatccgtatatcatgcactcaaactaaggtaggataattcgaaatttgatactccttcagggtaaagatttcatgcatctgatcca

SEQ ID NO: 68878 - DNA, 431 bp, Glycine max
  Clone ID: PAT_MRT3847_3320C.1
atcaaaagattattttcctacatgcataaacttcgttcataggggcgtatatatatacttttaagaatatcatatggcgatgaaggtggctacgcctttttattgaaaatacacacgagctctaagcaatggtccctatagctaaaaaagaataatgggggccacatcttttatctatggaaccaagacgatgtctttgttgatggttgatgtacctaccgagaacgaggatgcaaggccaaaatgaaggccccagagctccaaagatcccttgacagagtcataggatcctccttttagcgacattgtcttgttcaccacgccatctttaacaaatgggtatgcaataaggcttccaagggaaacattcacggccttcttctttctgtgttagcacaacgcagcaagaggggcagccccatggtgtggct

SEQ ID NO: 68879 - DNA, 462 bp, Glycine max
  Clone ID: PAT_MRT3847_33210C.1
ggtaagtgtgggatggatgcagttgaatctggaattaagccctgtgatcttgctaaagaagctcttcatcaacaccctttaaccccactaacacttaccaaatctattattgttggatacttgggaatattttccatctatttgattttttgcttcttgagattctttgctcaactaaaggatactctggaaatccggcatttttactacaacaagtgagtatgaatgataaacggttgaaatgcattgaagcaaatggttaattgtttttgccatatcttaccatgattgtcttgcagtctccatgttaccgacaatgaaatccaaaccatgccctgggctacaattcttgaaaaagttgttctgggacaaaggtctcgtcaactttgtgtggtaaaagatctttctgcccatgacattgtcatgcggttgatgaggaaggagaactacttaattggaatg

SEQ ID NO: 68880 - DNA, 382 bp, Glycine max
  Clone ID: PAT_MRT3847_33211C.1
aaacaattaataacaaataaatcccaaaagcctagttgatggttgcaatgattcataaaagtttcaatcgggataggttatcataaaatttgccggttgccaagggggggggatcaacaaagacaaattcttccaaccaagcttgggggaaccattttttttgaccagggtttcccctttccaagggaacattcccagaaacaagttcgtttgtgcagccggtttgcccttgagcgaaacgggcccaaacccggcccgtttaaattattccccccaccttttcaactaaacctcgcgggtccttttgggcccgcccacggcccagatgttcctgatcttgcagcccaacagatgctgctcccccgggtgccttttcaggttg

SEQ ID NO: 68881 - DNA, 582 bp, Glycine max
  unsure (1)..(582): unsure at all n locations
  Clone ID: PAT_MRT3847_33212C.1
ggctcgaggacagaacagtatttttagcctttccaataaaacataaatagtgtttgtagtgcagaagagaaggtagagtcataaagaaaaggatgacatgctctgtggattttaacaacaaagatttggaaataagcttctatgttttcaagccaactgtagtaattgtcgaccatcttgttcatggactgcaacagttttccttactcactcagaatcttggttgtgtacaaagctctatatttaggagcatacatggaaatatgatcatatggtatggagcatggcagaaacggtctagtgaagaaaaagataagctgacagaaaatcttgtaagtttgatccctaactattggttctcttttttgaagcactgaagtagactttgaagtacttcaataggacagcaacttaataaaatttagacatctatatacaaaacangacaattctgatgaatcctttatgtgaacaaaaattatatgtgaaccacaattatgtgtgtgtgtgtatttcgataaaagaaggaattattaagagaaatgaaatacaaaacaatgctcaccaagtaatcttaaaaac

SEQ ID NO: 68882 - DNA, 127 bp, Glycine max
  Clone ID: PAT_MRT3847_33213C.1
tcgcccacgcgtgcggagacgcgtggggacacataaacgcactcctagcgctcgttaggagcttaagcttgaccctgcagagtgcgagcgcgtgcaattgagtatctatgggccttggcagccattg

SEQ ID NO: 68883 - DNA, 228 bp, Glycine max
  Clone ID: PAT_MRT3847_33214C.1
aagagaatcaccaaaagagcctgggaaacgtagcaggttatggtccaatgaggaacataaaggaagttttacaagaaaaaaaggggactggaaagattgaaatcatatgtatgaatttttcctcatttggaaaagaagtagaatgggacggagatgccttaaagaagatggaaaatctcaaaacacttattatcaagagtgcttgtttttccaaaggtcccaaacatc

SEQ ID NO: 68884 - DNA, 116 bp, Glycine max
  Clone ID: PAT_MRT3847_33215C.1
ctgatcgcttgtttctgacggatcttttcgcttgagaccgtcttcactttcgctgaataatctcagggtacgttgtttcagcgaaccagaagaaggggtcctcaactctaaaaagt

SEQ ID NO: 68885 - DNA, 190 bp, Glycine max
  Clone ID: PAT_MRT3847_33216C.1
ctttaattttttacttctaccaagctccctccattttaacttcctctttttccttttaattcaaacaaatctgggtttctttcattccattacctttttcacaaaaaccggtccttattgatttggattgggccttttccacggaagctttttgttggaacttttaacccgaatttggacgaacctgggg

SEQ ID NO: 68886 - DNA, 416 bp, Glycine max
  Clone ID: PAT_MRT3847_33217C.1
ataaatgaccatgtctgtgaaagagtgctatctccacacggggaagaagaggaagatcggggggcatgtgttcaggtgcttagtggtgccccttttcatcgtgctgttcacaattctttttatatgggcaatccttagacccaccaaacccaccttcacgctccaagacgttaccggttacgcctttatacgccaccgtgccgaactttctcacttggaattttcaggtcacgctcatctcacttaaccctaacgaccgcatcattgtttactatgatcgccattaaaccttcttgacctaccggagccagcatgtcacgttcctaaccggcatccctgcaacatattaaggccatttagagaacaatattttgtctccgttggtttatggaaccaacattctcttctcgccattc

SEQ ID NO: 68887 - DNA, 443 bp, Glycine max
  unsure (1)..(443): unsure at all n locations
  Clone ID: PAT_MRT3847_33218C.1
tttctctctctacatctctttctctctctagaaaaaaaaaagtttccttctccttaacgattttctctgactcagcgactatattccaagttcttgccgtgcaccactgattcactgcaccttcggtcggagttatatctgttgtcgctatgtatgacgatggagatatttgattgaagttattcaccaaaatttgcataaggggaaaactaaggctaggtttgggctaatgggggcctcaagctccaaaatggatgatgatgataaggcactccagctttgccgtgaaaggaagaaatttgttaagcaagcacttgatgggcgttgctcttttgcagcttctcatgtttcatatgtccagtcatgaacagtacaggaccagctttganaggttcatggnacctggaagccccaatggaatcttccttagacacttccacana

SEQ ID NO: 68888 - DNA, 269 bp, Glycine max
  Clone ID: PAT_MRT3847_33219C.1
gaaacgagagatcttccaattccagtgacaagtaggtagttcccacagcatgagcaagaggagcatgtatcttcataacctccatagaaattatctggctgatatcggggcagataatcaaggtgtctcatcatgtcaagcttcaaagccaggtccagaatcaaggccctgatgtcatactaagtgaggcagaactttctcaacgcagcagcattatcatcatctacaacatctattctggatggaaaattgttcacacgcaaactctc

SEQ ID NO: 68889 - DNA, 243 bp, Glycine max
  Clone ID: PAT_MRT3847_3321C.1
caacaattggaagaatacatcatcaaaatgtagttcaactaattggatattgtgttgaaggctcaaaacgtgcccttgtttatgaattcatgcccaatggatctcttgacaaatttatttttcccaaagatggaaatatacatttaacatatgacgaaatatataatatagcaattggagtcaaaaaaaaaaaaaaaaaaaaaaaaaaaaaaaaaaaaaaaaaaactgtgttgcctccgactt

SEQ ID NO: 68890 - DNA, 1007 bp, Glycine max
  Clone ID: PAT_MRT3847_33220C.1
tttaaagaattgtttctatatcttacagtttccaccctttgctctcctcacaatgccaaaacaaacaaaaaaagtttaagatccttgagacccaccatgttttcccttttctgtttcaattttaactttgatatggatgtggtagtgcaaatttatatttccccatttgtgaggaaagaaatattcagaaacttccttccaggcttcagaagctccctgccacactacctacttgcgacgcaatctcgtcgaaatggctacacatattgtgttgttgcagatgaatcaattggaagacagttacccatggcttttctagagcgtgtcaaagatgaatttgtgtcaaaatatggtggtggaaaggctgccacagctcctgcaaacagccttaacaaggaatttgggccaaagttgagggaacatatgcagtactgtgttgatcatcctgaagagataagcaagcttgcaaaggtgaaagctcaggtttctgaagttaagggtgtcatgatggagaatattgaaaaggttctggacaggggtgacaagatagaacttctggtggacaagactgagaaccttcataaccaggcacaagatttcaggacttctggaaccagaatccgtcgaaaaatgtggctgcaaaacatgaagataaagctgattgtattgggaatattgatagcacttatcctgataatagtcctatctgtgtgtcgtgggttcaactgtggaaaataaggccattctccgaggccttttatcatgttatttcaaccttgagattatcggagaaaagatactaatgaatggcatgagtttgtatgtaatatagatatagatatagtaaaggtcgtatgttggtcactttgatctacttataaatgcttttgaaaatataatttgggttgtcaaattgaaatttgatttccattttattcatattcatgaatcatgtaaatgtgtttcttgatcatattctttaatgattccagttacagcattttggc

SEQ ID NO: 68891 - DNA, 463 bp, Glycine max
  Clone ID: PAT_MRT3847_33221C.1
ggctcgaggattcgcatattccatagcatgccttacaagctcacgcatcatttcattgacttacggggctataaaaaagatcactttataagtttatatcaacatcattcattaattccttttgcttgtgtgaagcgccaaattaagagagaaacagagagatagaaggaaaagcatcaaagatgaaacccaacttttcatttttgtttaagcttttgatactgcaatatctagcagatctatccatttctcaggaatttgatttcttctactttgttcagcagtggccaggagcatactgtgacacaaagcatagctgctgttatcccaagactgggaaaccttcagcagatttcatcattcatggactttggcctaactacaatgatggatcatggccctcaaactgtgaccctgacagtgtctttgataaatctcagatctcatatcttattagcaacat

SEQ ID NO: 68892 - DNA, 425 bp, Glycine max
  Clone ID: PAT_MRT3847_33222C.1
aattcggctcgaggtaagtttctcaatttctctcaccaagtttgtttcttctttaatttcttccttttctttgtttttccataaactctcaaattagtccatacttaccaatatgtagttggtttgaataataattgctcgagtttcttaaataactgtttaaatgttcaaattctcaaatgagtaataaaacaactcttttttttcggcgaacccatgacctctttctttctccttctttctctttatttcttcgaccaccaagtaaatcttgtaactttgagtcattagacaacttaactttaggtgttttcggatcttggaaaaaattagcaacttatgaacacgtttcttgtaatcatatattcatatgcatataaaaaaaaaatagtccaaagttacaaccataagtcacttttttttat

SEQ ID NO: 68893 - DNA, 352 bp, Glycine max
  Clone ID: PAT_MRT3847_33223C.1
ggctcgagaatgactgctggtttaaatatgcacggttggtacaaatgggaacaatgttacatgaagactggtgctgtcactgatcaagagcataagcagcacactgggattgaaaacgtattaagtggatatacaacgtggacacatatcaagcatggtgaatattttactatatcagacatcagggactgctgggctgactatgcaactactgcagatgatggtatattaacttaacatcacctaaccattaactacaaatcaaatgtacgttatgcggattaacgcatcacacaatgcaatgggagggggtactgattagaagacgaaccagtaatgtacactggctgaa

SEQ ID NO: 68894 - DNA, 243 bp, Glycine max
  Clone ID: PAT_MRT3847_33224C.1
ttctatcagcatgggcaatgcaattagatttctcaaaagtcgcattgccaagctacctttgacgctgtctgagtcagaatcaaaaacctctcttcaatcagatattgagcgttttatatatgagaaaattatacttgccaacaaggtgatagtcaagcatgctgttacaaaactaagagatggtgatgttcttcttacttatgggtcttcatcggcggttgaaatgatactgttacatgcaca

SEQ ID NO: 68895 - DNA, 1309 bp, Glycine max
  Clone ID: PAT_MRT3847_33225C.1
gcatgaggcaggacgaaggaagggcagcgggaaggcgacttgcggggggagtgaagaagattaacgaaggatggaatctgggtctagcgaaggagaagaggtgcagcaacgcgtgccgttgagggagagagtggagtggtcagatgttactccggttcctcaaaacgacggccctaaccctgtcgttccgatccagtacactgaagagttttccgaagttatggattactttcgcgccgtttacctcaccgatgaacgctcccctcgcgccctcgctctcacagccgaagccgttcaattcaactccggcaactacactgtgtggcatttccgacggttgttacttgagtcgctaaaagtcgacttgaacgatgaactggagtttgtggagcgtatggccgctggaaattctaaaaattatcagatgtggcatcatagacgatgggttgccgagaagttaggtcctgaagctagaaacaatgagctcgagttcaccaaaaagatactgtccgttgatgccaaacattatcatgcatggtctcatagacagtgggctcttcaaacactaggaggatgggaagatgaacttaattattgcacagaactacttaaagaagacatttttaacaattctgcttggaatcagagatattttgtcataacaaggtctcctttcttggggggcctaaaagctatgagagagtctgaagtgctttacaccattgaagccattatagcctaccctgaaaatgaaagctcgtggagatatctacgaggactttataaaggtgaaactacttcatgggtaaatgatcctcaagtttcttcagtatgcttaaagattttgagaactaagagcaactacgtgtttgctcttagcactattttagatcttatatgctttggttatcaaccaaatgaagacattagagatgccattgacgccttaaagaccgcagatatggataaacaagatttagatgatgatgagaaaggggaacaacaaaatttaaatatagcacgaaatatttgttctatcctaaaacaagttgatccaattagaaccaactattggatttggcgcaagagcagacttcctctatcagcttagtaaccaaagtaattaaagggcaactctgtgttatgtgtaacctagtttattgaaactggatgtttatttattattattttttatgttgtcatgtatctgtttgtgcaaatttatctttttgtcatgccattactggcatttgagtgtaaggattgaaagccatgcagaataagaaatttaagtttttttttccgttgg

SEQ ID NO: 68896 - DNA, 369 bp, Glycine max
  Clone ID: PAT_MRT3847_33226C.1
ttacacatctataaataaaatttacaaatataaatattctaatccaacttaatttaatgaatcaattttacattcatctttttatctataaaataccaacaattaactcaaaatctatcttaaatatttattcataaactcaactatccaaattgatctttcttacaacctaatatcttttattatccattttccctacatactaattaaaatattccttaatattcattttatactttttatataactttataaaaaatttaatttaaaatatctaatctttaattaccaccaatttattaataacttttttaaaaatttttaatatttttttttttaattaatgttcaccaaataaattttcttcta

SEQ ID NO: 68897 - DNA, 629 bp, Glycine max
  Clone ID: PAT_MRT3847_33227C.1
gaaggatgaaggaaggggaacagcaacgagtgcctttgagggagagagcggagtggtcagatgttactccgcttgctcaaaacgacggccctaaccctgtcgttccgatccagtacacggaagacttttcccaagttatggattactttcgcgccgtttacctcgcctcgcgatgctcccctagcgccctcgctctcaccgccgaagctgttcaattcaactccggcaactacactgtatgtcaagttcgaattaaatgcttccgattgcatttatttttgtttatttcgtctttgttgcaggtgtggcatttccgacggttgttacttgagtcgctaaaagttgacttgaacgctgaactggactttgtggagcgtatggccgctggaaattctaaaaattatcagatgtggcatcatagacgatgggttgctgagaagttaggtccagaagctagaaaaaatgagcttgagttcaccaaaaagatactgtccgttgatgccaaacattatcatgcatggtctcatagacagtgggttcttcaagcactaggaggatgggaagatgaacttaattattgcacagaacttcttaaagaagacatttttaacaattccgcttggaatcag

SEQ ID NO: 68898 - DNA, 273 bp, Glycine max
  Clone ID: PAT_MRT3847_33228C.1
cggtacttctcctacaaaaccacacactggtaccgtcgctacaagacgacacatcggtactgtctgccacaacaccacactatggtactgctgcgatacaatcacagaaggggatgagggtaatgtgtaggatgttgatgaaaaggttcattcctcttcattgaaagaaatgcggccgctcatatacgatccaatcttatctacgcgtacatgctacgtcacatctcttctatattgtcacctaacttcacttcagtggtcgtcgttttacaa

SEQ ID NO: 68899 - DNA, 276 bp, Glycine max
  Clone ID: PAT_MRT3847_33229C.1
tcggtcgaacagaacagaaccaccacataactgtgcttttcaaaggcgggaagagcaatggcgggcataaataaaaggggaaatctggtcaagacttctgctgccatgcacatgaatcaaaaattgtcggcgcttacaccgatcacttttgcaagcaataaaaaccatgtcatatgcaaagctatccctccgatgtatttcctaccgcactgaagatatgagtttgccagagactttcgcttcttatggcaaaataattgatgtcaaagatattat

SEQ ID NO: 68900 - DNA, 398 bp, Glycine max
  Clone ID: PAT_MRT3847_3322C.1
ggggaaacaaactgggggggccccaactttaaaaaaacttttggaacccccggggggggcaacatttggggggcccccccccccaaaaaaaaattaatttttaaaaaccccccgaggttccggggaaaaataatgggaattataggggccccaaatttttcagggttaaaaccccccccaaaaaaaattcccaacccccccacccccgggaagatccctcggagtttttccaaaacccccccttttctacaaaaaggccgaaggtgggcccaataaagggcctttttttacccaaaatttccttttttgaaggggtaaaaaccccccagggaaaacccctccttcccaagggcccttaagccccaacccacccaagggccaactttttttttaaaccc

SEQ ID NO: 68901 - DNA, 453 bp, Glycine max
  Clone ID: PAT_MRT3847_33230C.1
gctgtattctactaaggttaataagttggcaaaaatgatgaaccttatacaaagcgttgttggagatcttaaacttgttactgatgggaagacggatgaggggaagcacattgctgtacccaatattagtgcaggggaaaatcatgtagtccaaatacccttaatggcacaggaggaaactctggcttctagtgcaagtgatttcacaactgcaatggtgagtgaaaagagcaggcctaaagctactgcaatgcatgcgggagctctagaaagtatcattgatagtttcgcaagtcctgactgcagcatagactgcgccatgcttttggctgagacttatgataccaatcctgaaaacgcagctcgtagtacttttggtgcgcctttcagaggcggaaggcccatccggatggccacattggcgaataccattgcgcataccgaaccagacat

SEQ ID NO: 68902 - DNA, 350 bp, Glycine max
  Clone ID: PAT_MRT3847_33231C.1
ttcttctaacagagcaatgaaatttcacaatcgaaatctaggactagataagttctttcttctttcttcatgattgtctcgatgtattcaaaaatccgatagaaaatttttggatagtacatttttatagtaatagtataaaatgaaggttcttcacatttcacattattagtttcggactaaaaactaagtatcaattaaaatcggaatatggtaaattggtttcttagaattcataaaggagattttatatttctagaattcaattagatgccaaatctataaatatactttttgtggttgttgaagatattttttctattttcttctatattaattcaaaattaaag

SEQ ID NO: 68903 - DNA, 607 bp, Glycine max
  Clone ID: PAT_MRT3847_33232C.1
aagttgtttgtcctggagaatttgtttgaaggatcaaatgctatgtgcctattggatcagtgtttgttttgaatggcaatggagctgacattgctaagcattgtattccatccgtgtcgtcaaaaagaatttctattacttttagaaagatggacgagagcaagttaccatataagttttcacctgatcctgacttagtgggaatcaagccacttataatttcacctctaaacaaaggacaagatgaagttgggaacctagataataaggctgacagtgttgaatctgaatctgatacaggataacaagaggaaggcattgtttcatgtaaaataaattaatttacttcttctctcaatggaagcttttgaaagacaaagaggtcaacaaatttggacggaggtccaggcaaaataggtttagggggcttgtttttaattttattaattctagtatcgcatgtgtttaattttcacaggtgacttttcttaaatctgcatccaatcaaaattgtttatggtttgaaggatcaaatgctatgtgcctatgtgtgaggttcttatactgtaatgtactttgttaaaggaagttgttcattactttgtaa

SEQ ID NO: 68904 - DNA, 457 bp, Glycine max
  Clone ID: PAT_MRT3847_33233C.1
ggtgaaacaaaaaaaggaaactagaatttaaaccttcggggccaaatttacacattaaatgtcaccaaagttgcctaacaaagaactgggaccttccagtaaaatacaagaacctccccacataacggggccccccccctaaaagaagtgccctgaataaaatttaaaactcccttttccccagcccattggaagctttgggtgctccatactggatccagttttttgcacatacaagggcccccactgtttttggccgcagggaacttttatactgaaccatttttttgacttttgtttcaaaaacagattctgggggaaaacttgaaaccggaacagacagttttttcccagccattttggaaagagaaggggccttgagtttgtttagcttccaccaacccaatacattaaagtttggaacacgtggcaacaaggatttttccaaaaactgggc

SEQ ID NO: 68905 - DNA, 1027 bp, Glycine max
  Clone ID: PAT_MRT3847_33234C.1
tttaaaataataatcttccatcaacgttgaatatatgaaccgtcaacgactattataaaattaaaattttaattataaaattaaaattttaacctaatgactcttaaaagttgaagtgaagtttacttttatatatacaaatgaatattctttggttacgggatagaattcatcaaatatccccaaaatcaaagtgtaatgtcacaacccactagtattcaccattatggtaaagtcataagctaacactgctggaaaatacagttaaaaactaaggtccgcataacgctgtatgttacttttctacccttctaggccattgctgagggcggccagtgaaaagtcctgtgcgctgttgcttgagatcagaaaaactaacaagaaaaatatcttatttacttaaatcattaattatataaagaaaaatagcctaagttgcagcatcagttttcgcttacatcgccatctgtgttgctaatttcacgtatctgctggaacaaggctcctacaggggtgttaaagcttaattgtaatgccctctgtgaatgaccatttgaaagaagcagctgtggtttacaaagagatcacagtggagatgttttgttttgttttgcagctaaggttgattactgttttgtgcttcatgcagaatcttggactatctatattggtttgatcattgcctgggaggagggattcaagaaccttattatagaatctgactctaattaatggttacccaagtcatcatccctgtttgagtatcatccagaatatcaatcacctagttttggatggaggtttaatggcgtggtctcacaccctgagaaaagctaaccggcctggccaatgttggccagactttacctgataacatttctgtttttgatgttgtttcttctttcagctcttattttagctgatgtaactcgactgctgtttcgtgcggttcttagtgttgcttggggcttgccccagtttttccaccaaaaaaataaataaagaaaataacagtttacattgacaa

SEQ ID NO: 68906 - DNA, 382 bp, Glycine max
  unsure (1)..(382): unsure at all n locations
  Clone ID: PAT_MRT3847_33235C.1
ttggtttttcacaaagctctggcanaactgagagccgtgagctagctatctaagatttaacacacgaaaattgaagcaaaactacacaagatatttatttcttgttgaattcaccaatattctttatgcaatttcaccctctaccgagtaggtcacgcgtgcagcatggaagctgaaaccaattctccagaagatgcatctgctatggtatgtctttctaccaaagtttttaatgactggattcatgcagacttcgcttgctattacatgtatttagctgaagtaaatactttgattagttatctctgtccaaagtcttatgtatgtttctgctagatgctccttgtatatttggttatgctgtaatatttcttccggtcta

SEQ ID NO: 68907 - DNA, 322 bp, Glycine max
  Clone ID: PAT_MRT3847_33236C.1
acaaaaaacaaattcttgagattgactcttaaccatttcataccaccaacaccacttttaatcaaaatcttattccttgacatcaaaaacatttccccaacaaactttaaccattcgcaaaaatttttacattttaatcaataacaaaccattcaacattttttaattttccacttacaaaactatcaaacattaacacccaaaatcccacctttttataattgacatattcactcttaaaaaccttcaatatattatcccatcttaccataactatcatccttctcatttcaatctcatttactaccaactcatcaacatc

SEQ ID NO: 68908 - DNA, 233 bp, Glycine max
  Clone ID: PAT_MRT3847_33237C.1
ggcggccgccctttcgtcctttttttttttttttttctttatttttttttttttccccttggatctaaaagagtgattcatacaacagagtttaaataacccgtattacacgcttaccttacctattcccctttctagtcctatcccccaaggtccaaagaatgcttacatgctggtaacttgcccaaggatttcttgaacaagcgagccggttgacctttgtgatacatggg

SEQ ID NO: 68909 - DNA, 290 bp, Glycine max
  Clone ID: PAT_MRT3847_33238C.1
atggcgcttgcaaactgtttttctttgcctttgtggtaatacagtcaatgcaacagattctggtgcgtgatgaaatcaagagacggtcacaacaagtacgcaatactttcctatgctcgatgtacacattttttaaatattggaacggcttcaatatattctcaagatgtaaatgcaatcttgagaaataacaagcactttattaaaaaaattgctagatatatgagctaattatcgtgctgtaacatctgatgcatacttaacctaaaatgtttttcttattacacctg

SEQ ID NO: 68910 - DNA, 113 bp, Glycine max
  Clone ID: PAT_MRT3847_33239C.1
cgcgttagttcactcggaattccgctctagcgtctccatataagctatgaggcttttctccaaacactggttcagtttggagatattcgcgaataacttgtgttgacattttc

SEQ ID NO: 68911 - DNA, 177 bp, Glycine max
  Clone ID: PAT_MRT3847_3323C.1
taatatcactgtcccttttccttttccttttatcataaacacaatcgaatacaggggaatcactggattaccatatccgaatcaattactgaaccaattaactttaaacctcggctaaccaaaccatcatcattctcttacccgaataatcgacccatcattaattaaatctaaatt

SEQ ID NO: 68912 - DNA, 193 bp, Glycine max
  unsure (1)..(193): unsure at all n locations
  Clone ID: PAT_MRT3847_33240C.1
cacagaagntccnactnctcnancctcccccaaagcaacntcgannctacgcgtncctatantcgaccagtcttcccgtcgnccccctcttacacttcttcccaaaccagttacaatggccggtggtgctgtcgtcgccggaggttcccgaggaaaccccctcaagaatggtttcatcactcgacaatacctc

SEQ ID NO: 68913 - DNA, 110 bp, Glycine max
  unsure (1)..(110): unsure at all n locations
  Clone ID: PAT_MRT3847_33241C.1
cggttttattgtactgggaaaagaaaatatacactncacctcattcagatgataaacaattgtccatctggttttggggatacgtatcaaatatcttcctttttgaggca

SEQ ID NO: 68914 - DNA, 814 bp, Glycine max
  Clone ID: PAT_MRT3847_33242C.1
cccacgcgtccgcggacgcgtgggcaaagtcacaccaacaactagcagcatagcactgcattgatttcttcctcttcataattacttcctcccaatttcaacctctacttcatcatcttccataaaagatcaactcatacaattaataatatcctcttctatttacacacacatggcttctgttctgcctatttaccacaactacgttaacctcccatgtcctcttcccctttcaaaaccatccaccaccttcaacacacccataattctcttcttcccaaaaaccaaaccttcactaaccctcaagtgctcctcttccgcttcaagcctaaccccggaactggaccaagaagaagaaacatttggtaactttgatgagcctcccttgagcgaatcgtggaaggaaatccaaggcttgaacaactgggatggtctcatagacccaaccatgaaccctcacctccgaagagaaataatccgctacggcgaactcgcccaagcatgctacgactccttcgacttcgaccctcactccaagtactgcggaacatgcaagtaccacccttcacagttgttcgagaaactcaacatgtcccaaaccggctacatgataagccggtacctctacgccacctccaatgtcaacctccccaacttcttccagaagtccaggctctccaccagcgtctggtccccacacgccaacttgatgggctacgtggcagtctccaccgacagggaccaaatcaaacgcctcggacgccgcgacatcgtcattgcatggcgaggaaccgtcacctacgttcgatggatc

SEQ ID NO: 68915 - DNA, 341 bp, Glycine max
  unsure (1)..(341): unsure at all n locations
  Clone ID: PAT_MRT3847_33243C.1
gggttaagccattatatanagggaaaaagaaaagaacaacattgtatctttgtatcctaggggcagaaatcgaacatccttaaggagttgttgtaggagagatacaatcacacttactccttcattggcaagacagaacacaattttatgcattgacgggtgccngncnncgnagaagaagagaccgaaaaaaggggagaaacaacattggggctggaaaaacggggaaaaattgaacaaaaaaaagagatgccgtccatcatcatccaaaaacaaaaaaaagcctgaccaccccaggaattttgagacagccaccccgggacattagttactaaaagctc

SEQ ID NO: 68916 - DNA, 959 bp, Glycine max
  Clone ID: PAT_MRT3847_33244C.1
aaagaattctatactgtatccttaaaagtttattgagattgaaattcgttttaaaaaaagaagaaggtgttttttgcaattttttatttaatagttgtatttgttctcacacccacagattctcaacaagagccaccagttacaacaccagcaccaccaaaaggcagggccacaaagagcaccaggtcccccatcgcagggcaccacaggaagggcccccaaagatactgggtcaccacttcgaggtcaccaaacggcaggaccaccaacgacactagatacagctccagcaacaaagccaccagttacaacatcaggaccaccaaaagcaccaggaccaccagcgccacgatcaacacggagacccccaacagatgcgggcccaccaatggcagcaacaacaggaggaccaccaaaagcagcacaaccagaagcaccaattacagcttcagaaccagagccaccagttacacctttaggaccaccaaaggcagggcagccaagggcaccgattacaacttgcgggcccaccaaaggcagggccaccaagggcaccagttacagcttcagaaccagagccaccagttacaccttcaggaccaccaaaggcagggccaccaagggcaccgattacaacttcggggccaccaaaggcagggccgccaagagcaccgattacaacttcggggccaccaaaggcaggaccaccaagagcaccagttataacttcaggatgaaaattttattgagctcgtgattaaggcaaaggagaaagtagtataataaaagggatgggtactttgaagttgctttattccaaaaaaaaaaaaaaacttgtctaatatatgtgaaacaaacatttgatgttgcaaataataattaatgaaacaaatttaggtgttcttgtccaaaaaaaaaaaaaaagaactttggggccttttaagggccgggggcccttg

SEQ ID NO: 68917 - DNA, 374 bp, Glycine max
  Clone ID: PAT_MRT3847_33245C.1
cccgcgcacggaagctcggaagagggcccgagccacaccactgcagccgtggggggctaaagccagatttattggttagagtacgtgccgatacgactttcgttttttccacaactgacaggaggatctccataacagtgctgctcaagctgaatacagcccacgagacacttgggacggatggcgacggaccaagactaggaaccaaaaaataaaagagtgggaccatacaaaccgcgaaccgaaaagagcacaaaggaaatgcgcccaatctggggggcacgtagggttatggagatccaggaccctgctggagggctctgggcgctcaatatgaccatcacggagagtagtgcagccaagcgaaacccttt

SEQ ID NO: 68918 - DNA, 223 bp, Glycine max
  Clone ID: PAT_MRT3847_33246C.1
cgacccactcatacacccacgcgtccaaaacaaacactatttcattattataacttcgcagaagataaacaagcccgatttctatataaagaaacgtcgcactcccatacatgtcttccttccatgccttcatcaactacttaaacaccaactcttcttccactcaccagcacgacaattactatgacaacttctctagctacaacagctactcctccttcac

SEQ ID NO: 68919 - DNA, 439 bp, Glycine max
  Clone ID: PAT_MRT3847_33247C.1
agacattgaattagggaaagcaggaatttaaaaagtgcaaaacataattgtttaaatatctgaaatctaatagctatagacaggtagaaagatcaacttctgagaagacttgaaaaaggaaattcataataccgttccactgtgtagaaagatcaaattccatagagaatagttatagacaggtgatagttacttggtttttcgaacctgatctccctggttgcgatcttctatctgcactcaatagatttgcattttggagagtagaaatcataaatggcacagaagggttatcgtaggtggtcatttatcttgcatcacataagcctagacttgtttttctgatttctcaacgtgaagacaaagaattgcaaatgatagcacctttaactatgtaatagggtgaagatatcgctggtttggatgttatgtcccttga

SEQ ID NO: 68920 - DNA, 2897 bp, Glycine max
  Clone ID: PAT_MRT3847_33248C.1
tcggctcgagtttgacccatctccatctgtctctgcatagcctaactactgcacgcagcctattttctccttcctttttaccttgttttgttttttcactctttggccatttttcctattcattcttttgagtcccgaccaaaaccctaatcgagttcgattgcaaaacatctcagtttctgaattccaccttctccgaccaatggctgccaaacctcttactaccgaggcgattgcgcttacggaaaagaagatggacatgacactagatgacataatcaaaatgtctaaaaatacgaagaataagaagcaaagaagggttccgaacaaaagtcaaaaattttcaaataattttactcaggataagtctgcaaaggtccaacgttataggagaatcgagatcttctcttagacagggggctcttgcaaaaagaaggtctaatttccagggaaaccaatttcctgctgcagttgaagttgcgcgaaaagctgttactgctcctctgcacaatagagtccctaatcgtaatagggtggctaactggaataaaacaagatttcaagttcctgtaggtcagagaagggctgctaatggaggctttgctgctaagcagcaaccacttccttcccctcagaagcagcaagagaatgtggatataatgccaaagcaaaagcctcagacgctggattcactgtttgcaaacatgaaggagcaaagaatgagagttttgtcaatgcagaataatgctgtgcaacgcaatggaggtggaaataggaggctcccatggggaagaggccgatttggcaactaagatgtttacacaatgggaatttcatgatatcaccgtttgaacctatgtcctgctgcgtcctgattcctgggttgatgcaagtgaaaaatttctttaatgcagaagaaaactctagattcccccccccctaagttggattatctttccccttttcatttgaatgcacttcttcgtttgctcgtctgttgtaaattagtttcttccgtggcttaatgtttgacggcgattcttgtttgtggtctgtcttatgtggacacaattcctagcagttacaacataatgtcatttgagtggtctttggctcccttttattgaaactgtaccattacaaaaaattgccccttctttgcatgacatttatgcttattctttgttagcgaattattcgaacaatatgattattaaattaattttgttatgtacgatatgatattggctctatcacctgatgatttctccaagttgagttaatactgcaaggatgcctgcacgtgctttgaaaatgtgggtcatggtatcattttgtcaataggggccctccgaaaattgcaacatgccacattaatatttttgtgttggctgcatcttctaggttagttactgtttcaaacataggccacgtaagtgaaattctctgttcattctatgggattaagaaactatttttatgtgaccaagaatctggagtctcttcttcatcggtttggcattgaagaagaccttttgtgattggaaatcaagtaaatcaatggggagttcttgtgggtctggtaaacatcgtgggggcatggtgatcattttgttttgagctcttttagtcctcgcagaggtgccataaagtggttgctgatggggaaacactaaccttgtcaccgtgcagataaattttcttcccactttactgtgatatgatctctgtggaaactttaaattcttaagtggtctactttcatacaacagcctccacgattgtaagttttgtacagcaggccaaattgttgggtgctagtacaaacccaccaagatgatgttgcaactagcaggttactgtggaaattttggcagtagttcaccgacactgagattttcttcaactatgtgaccagtattctctttttgcttaaattattttcttctttctttatagttggatatagatagaatctgacggtaagtggctcaacttttctagtaagagaggttatttagtggtgtctgttctattacaaatagttggtggtactgggcatcttaatgctactgatcttgatggagtattttaatgttgtgtttctacacctggattaccctcttctcttttctgggtgcagatttcgagttcctgtagatcagagaagggctgctaatggaggctttgctgctaagcaaccacttccttcccctcagaagcagcaggagaatgtggatatagtgccaaagcaaaagcctcagacgctggattccctgtttgcaaacatgaaggagcaaagaatgagagttttgtcaatgcagaataatgctgtgcaacgcaatggaggtggaaataagaggctcccatggagaagaggccgatttggcaactaagttgttcacacaatggggaatttcatgatatcaccttttgaacctatgtcctggcctgctgcgtcctgactcctcctgggttgatgcaagtgaaaaatttctcgagtgcagaagaaaactctagattccccaccccctagttggatggattatctttccccctttcattcgaatggacttcttcatttgctcgtccgttgtatattagtgtcttccgtggcttaatgtttgttctggtctggtctgtggtccatatgtggacacaattcctagcagttacaatataatgtcatttgagaggcctttgggcccgtagcaggtttatctgtactggtatgtttttctttttttgatatttagttatgggacagtatttctttgctaatgttcaactacaatgatgggcttttgcgtttcaagaaatggttggttttttttgccctgcaaaacaaccacagtttgccatcataaacagcaggaaaaatgtggatatagtgccaa

SEQ ID NO: 68921 - DNA, 366 bp, Glycine max
  Clone ID: PAT_MRT3847_33249C.1
ctccctagcaaccattcctgtcgagacttccttcggctgaattaaaacgactgaagggcatctaacggttaaccatgttggcccagacaccggatcaattcacgctgcacttgactcaaatgctgcaggttggtgtgtaatggttagcaattggatgggcgagactgaggataacattcatcgcggatctctctgacggctaggccagtggacagataaagactgttgccccttgcacgaggtgagtgataggcaacatataatcatcttcttcagatcgaacattaacttgagagctggcgatacgctggaaaaactacaagatctccttatagtgaacctcatttgatccataatataaaactg

SEQ ID NO: 68922 - DNA, 1030 bp, Glycine max
  unsure (1)..(1030): unsure at all n locations
  Clone ID: PAT_MRT3847_3324C.1
cccaagaaatgaggagagaaaacgtgtcccctgggttgcgtgcttcgtttgacagcaaattcgtggtttcagcacggtaagtgctatcggttcggtggccttaacttaagaataataacaaaacaaacacagcctaatacccaatcctcactctactttccccatttatctgtcaaacgcgcagcaacaagaatcaaaatccaagggcgagctttaaaccatttcagggttttgttcgttctggtacgagttttcttatttctgatcatctgccttacatcattaacaaacaacaatgaccacccctttccctcgctcactgtcctgtgtagccaacactgctcttcaccgcaccaaatccgagcagttaactcattttgtttccaacacagtgacacggctcctctgctcttcaactcagccacaacacgaaaaccctctcagggaacaagcacagacaccacctcaagaatctctccatgatgagaacaaacaaagccatgagcccgaagaagaccacgaagatggtgacagtattaacaaagaaacaggtgagattggtggacccaaggggcctgagcccactaggtatggtgactgggaacgcaatggtcgctgctctgatttttaagtttttacttcactctgcataccataatagtgtgtttggatccactttatacatgcacgtctcaaactaaaatcacgtcaaattgaaggaaagacaagaaagctactaatagtaggtttacctttgacgcttatccaaacatgcagatgataaattaaatttcattaatattgtgtattttttttcctattcagttctgattggatgactatatgtgatgattatgtaacgacattgtcttttgattcattcttattattctagttaaaattagaattggagttacaacctcggtaaaatagaattactgggtatgtgtgtgctacttgcaactttgagaactcttgtgattttttttcccataaggtatntgtgaaaatgctgtaatgaggaaaattg

SEQ ID NO: 68923 - DNA, 385 bp, Glycine max
  unsure (1)..(385): unsure at all n locations
  Clone ID: PAT_MRT3847_33250C.1
ggccaacagcaacctccctcgaagaatcatcaaggaaacgcagcgattgctcagtgagccagcacgtggaatcagtgcctccccctcggaagagaagatgttttttttttangagangaggcnggggccnacccagncgccnaaagaaggaggcgcccgccagagagaaagagaaaaggcagaagaaaaaaaaaaggccgcaccaaaggggagggagggaagaaaaacagagcaaccgaacagggagaagcgaggcaggaaaaggcaggaaaagcagaaagaaaagcggagaccggcacaacagagacgcaccggagcgagaaggagacgagggacaaggagaggagaaaaaccagaggaaagacgangcgagaacactgcaagg

SEQ ID NO: 68924 - DNA, 392 bp, Glycine max
  Clone ID: PAT_MRT3847_33251C.1
tttataaccaacacaaaataagaaccgcctattcctaaagataaaaagaagacgctcatatgaaaatttcttcaatacatattacaatgggatacttcttacaatatgaaatgagggccaaaaatctgctgactcaaaacagagaatgaccacactactcttaaccacaatgaatctcacaaccttataaggaagaagattccttgtctaactgccaagtgagttactttccctctattataagtcatcaagaatgaagttaaagcatgcagaccatggaattgggggacctataggttgcagtttacaattgcacttatcgtgttcgggcatgaaccaacaaaattgcccaacgagcacaccaggagaatgagctcacagaacctataatg

SEQ ID NO: 68925 - DNA, 228 bp, Glycine max
  Clone ID: PAT_MRT3847_33252C.1
cagagaaatagaaagatgctatatatttattgggtcgagtagcaaatgggaagaacaacctaagatttcaaagggagaaatcctatattacaacctataagcatcattttggaaccttattactaattaacggggttttagcctaatgacaaacaaaacaagtggtccacaccacacacaatttttcccagagattctggagtctaacataacatggaatcttatttt

SEQ ID NO: 68926 - DNA, 421 bp, Glycine max
  Clone ID: PAT_MRT3847_33253C.1
aaacggaaaaggttttttcatactgaatagagcgtgtacatttggatgttttgcatagaaagattcaagatactggtatttttcggcgaaagtgaattcaacaaaagcatatctctgagtgtggaacgggagatccaatcacactagtgaacattaattgggtcatatgctcgcccaaattctccagagagaattgcatgaataaaaccccctgctgaataatccccgaaggtgctgtgaacttcatatattatataacatattggcgtgagaccaaaaagggtatttattgaaatttagtacaccctatcggaatgaattttttgcccaaagccgtggcttttatttcagcaacatcgatcccttagatgttctccggtgtgtaaaaaccaacgacagggtttgggacccacgaaaccta

SEQ ID NO: 68927 - DNA, 251 bp, Glycine max
  Clone ID: PAT_MRT3847_33254C.1
ccgatacatactcctggccaaggctatgcgattttgcgtatacgtatgttccgttattaaggggggatgcttctggggcagtttaacaaatactgtgccgacctcctctgaacaacgaagcctgaacaactaaggtcacagacacatcggaaccattattaaaacgtccattgactatatgatcttagatgtactattcgacaatatccaatactatatggatgcgactaccaccgaatgatgaggcacca

SEQ ID NO: 68928 - DNA, 317 bp, Glycine max
  unsure (1)..(317): unsure at all n locations
  Clone ID: PAT_MRT3847_33255C.1
tntnaaaacccttacctttgacaagggaaaaaaggaatttttttttaaaacacaggagagctccaaattttaactttttttttatgggccttttagggggactgggacccctgagtaaatggccccaaaaaaattaaaaaacttgggcccatgatttccaaaaccccaaaatgataaacctttaaaaggccccaaaaaaaaaataacccttaaaatgaaatgccctttgcatggccctttttttcaaaaatacaaaaaaacatttttggaaaaacctccctccccctttcaaaaaggcttaattggcccgcaaattc

SEQ ID NO: 68929 - DNA, 223 bp, Glycine max
  Clone ID: PAT_MRT3847_33256C.1
acgtaagctaggatcctctagagcggccgcttttttgttttttttttttcattttactttgccccgctcattgaaatccctgctgccaggtaggagaagacgcacccttctgtggtcctttctcacactttccatgctttcttcttctcgcaaccagaggactcgtgtgtcctcctggtattttcaaaccagtgccctcaggcaaacaatcattatcgatagt

SEQ ID NO: 68930 - DNA, 251 bp, Glycine max
  Clone ID: PAT_MRT3847_33257C.1
cctccaccgattcggctcaggaccaatactattactactacacctactatccctttctcgctaactagcactgttgcactcttcttctgttgggggcatttactaagttcaattgagagagcagtgatgagcacttccacaagggcaacttccaacatccttctctctctgccactgccctctcctaaggcggcgcctccttcgtgcccagatttgtatggcaagcgtcgcgaaatggccaagattcagat

SEQ ID NO: 68931 - DNA, 192 bp, Glycine max
  Clone ID: PAT_MRT3847_33258C.1
gttttctgctacttgtgcgcgtgtgcatgcctcgtcccgtcatagcgagttctagtcgtcgtagactcggtgttgtgggactcacccaccaccacaacaacccctgtccctcccacgtgcacagagtcaaacccaaacctctcgtgtgctctccagacccaacaaacaaacaacaacaagagcagagcttcc

SEQ ID NO: 68932 - DNA, 329 bp, Glycine max
  Clone ID: PAT_MRT3847_33259C.1
aaaagggggcattgaaacaagccccccctttaatgcttttaaaacaattttttttttttcaaccccagcaaaccccctgtccggtttgagaaagccacacccaaatttagttttacaaatgcttgtaaaaatttgtgagggcccccccttaaattaatatctcaccttcaccctgggttatttaaaacaactttgcttccacttgtctaatcataaaaacttgtgatggggggcaaaatttccggagttatgttgcccacacacttcctgagggaggggtgggcatactttttttccccaaaaaaggacctcaaaaatcctggctttct

SEQ ID NO: 68933 - DNA, 271 bp, Glycine max
  Clone ID: PAT_MRT3847_3325C.1
agtgggacctgtacagcgcctgaaaccataaactgatgaaggtttcgaagagctacaacaaaaaagcgtgaagaggcttatagctgttacagagaggggagtgagcgagcatatcacaacccttgaagaaattgacatgaattacaaggaattgactctagaatctgcaatctataatcggtcacgagtaccggccctcggtgataccacatgcttgattacaccactagcagatgaagtaataaaagctctccaatcagtaacagcaata

SEQ ID NO: 68934 - DNA, 266 bp, Glycine max
  Clone ID: PAT_MRT3847_33260C.1
agctatgtcgatcgaactgtccaaggtcctgtcacacacaatcttcagaacgtgcaggggtgtccttattaaatattgatagtcaagataccctctccgtcgctatagtggctagtaacagcctcgtcatgaagatccgccaagataggcttagcattaaccgcaaacatcaaaatccacttcgcaaaccagcacgcatagccgctaatccatgatcggtgagccacgtcggccatattctgtgttattggagatacgcgtttatg

SEQ ID NO: 68935 - DNA, 1315 bp, Glycine max
  unsure (1)..(1315): unsure at all n locations
  Clone ID: PAT_MRT3847_33261C.1
ccacgcgtccgttggaattatgtttcagaataatagttgaaaatagaaagaattattccagaaatattattctgcaagacaaaacaccatggcttgcattcttaacttccttcaatggcaacgcagaagcgaaggaggagggggaggacgttctgactcgtgaggagaagaagatgaagtcttgggagaagtagttgccgtcatgggtgaaggaggggctatggcaagagtagttcccacacaaagaaccgttgatatgctaaagcagtggctgcgtgtgcagtgttatgctcaaactcttccactagcgctataaggaagatgagtagtttctcgcctgcgtttcccaagttcatatccgtagaaggcgcagacatacattccagaactaaacctgacggcttcagattcagtcttgtttcgtataacattttggctcaggcttttgatttgtaatgtcggcttatgtgaagagctccctgctcccacactctccttccccaagtctcaaatggaagcttcgttcagacactattttggcagttctcaagaacttgggagctgattttttctgcctacaggaagttgatgaatttgacagcttttacaaagggaacatgcaggacctagaatattcttctatttatatgaagagaagtgggcaaaagcgtgatgggtgtgggctgttttacaagcataaccgtgcagagttggtcttagaggagaaaattgaatacaatgatcttgtaaagtcagttcccgatgggaactcttcaaataatgatgaacacaccaatatccagacagttcagccagataaacaaaaggatgtgccccccaaaaatggatctaaatcgaattcaaaagatcgtggagatcccaatgatccttgtgtcagactaaagcgtgattgtgttggaattatggctgcattcaaactcaaagatcgctctcatcatattgttattgtggccaacacacatttctattgatgatgaacacgccaatatccagacagtccagtcagataaacaaaaaggatgtggcacccaaaaatgaatctaaatcgaattcagaagatcgtggagatctcaatgaccctcgtgtcagactaaagcgtgattgtgttggaattatggctgcattcaaactcaaagatcgctctcatcatattgggatcctnngattgggctganntgtcaagnncttgcacaanngctaaatatttcttcttatcnnccggattagcaanannatttaaaaccactttgatatttcagatagaaatatgagtgcattacncnnngaagtcatt

SEQ ID NO: 68936 - DNA, 272 bp, Glycine max
  Clone ID: PAT_MRT3847_33262C.1
ggctcgagctaaaatgcatttttttactaaatcggggccaagtattgatctatatttgattctgggaagggaatcgtttttcatgactgacttcagctaattaaggcaaagccactgactgaacacattacaccaccgggcttggggttgcggctatagatagaaaacctgatacatggaaagtttctgagagtgcatatgatgatcatcccaggactgcaaaaaaatgtcgtgcattatgtacaggagaaaatggtattagtccatcatac

SEQ ID NO: 68937 - DNA, 693 bp, Glycine max
  Clone ID: PAT_MRT3847_33263C.1
ctcggaaattcggcttcgaggaagaaagaagcgaggatatgctaaaagcagtggctgcgtgtgcagtgttatgcctcaaactcttccactagcgctataaggaagatgagtagtttctcgcctgcgtttcccaagttcatatccgtagaaggcgcagacatacattccagaactaaacctgacggcttcagattcagtcttgtttcgtataacattttggctcaggcttatgtgaagagctcactgttcccacactctccttccccaagtctcaaatggaagcttcgttcagacactattttggcagttctcaagaacttgggagctgattttttctgcctacaggaagttgatgaatttgacagcttttacaaagggaacatgcaggacctaggatattcttctatttatatgaagagaagtgggcaaaagcgtgatgggtgtgggctgttttacaagcataaccgtgcagagtgactgagttggtcttagaggaaaaaattgaatacaatgatcttgtaaagtcagttcctgatgggaactcttcaaatgatgatgaacacgccaatatccagacagtccagtcagataaacaaaaggatgtggcacccaaaaatgggatcctgattgggctgatgtcaagcttgcacaagctaaatatcttctattccggatagcaaaatttaaaacact

SEQ ID NO: 68938 - DNA, 262 bp, Glycine max
  Clone ID: PAT_MRT3847_33264C.1
caagcattgcatccctcttgatttgtagtttgaattgggctttagattaaagggatgacggatcaatatgggttttaagaacattgagcgtgacacgcaacaatggctaagttcttcactgctatgatcttggcactctttgacatatgcatacttgaaacataggtaatggctgctcatgaacaaagaggccacttcgatgacaacatgagcctatatggaactgtaagtgtcaagacttaccaatgcccatgacaatgct

SEQ ID NO: 68939 - DNA, 587 bp, Glycine max
  unsure (1)..(587): unsure at all n locations
  Clone ID: PAT_MRT3847_33265C.1
tttaattgtaacgggctatggagccactattagaccctctcaaagatagagctatcaaatcagtcaaggcacccccacatcggcctcttagtcggcaattgatgttcccagaccgtcttaagaataaaccagattggaaagttataagagatcatcttcagaaggaaggacgtatcgacaaggaggaccttataaaacttatcaacgatgctaacaagcttttcaagagtgagggaaacttgatctacgtcgaagatcccctaacagtagtcggagacatccatggacagttctatgatgccataaagattgtagaaattggtggagatccagcaaattcgaaatacttgttcctaggtgactntgtggatagaggttctttttcgattgaagtgcttgtcctgctatactccctcaagataaacttccctaaaacaataaatatgcttcgaggcaaccacgaatgtangcagatgacgacattcttcaacttcagaaactgatgcctttacnaatatgatcaagaaatctatgnattattcatggactcattngacctgatgcctctagcctgtatcatcaacgga

SEQ ID NO: 68940 - DNA, 447 bp, Glycine max
  Clone ID: PAT_MRT3847_33266C.1
gggggcggcgcccacgcgtacgagtgaagttgagggcggggatgagagtgacaatgaaaagatagaggaatctagaaggaaaccactgatccaactaagggaccagacagagactatgattatgaagagtgcgaagaagtagacgttcttattagggggagtggaatggcgaaggaagtgatgcatagacaaaagcaaacatagatagagacataccgtctgaaattgactaagaagagactgatgacgctacaaggaagatgacgacgacaactgcaatgatatacatgtgggagaccgaacagatgcctcggacgctgaagaggaggaagctggcaaaataaaacgaaagcataaaaggggtggaagagcgggggacctgcttatgccgacactaatagagagggcatctaatggaagatgaagaccagactgagaggaaacctg

SEQ ID NO: 68941 - DNA, 557 bp, Glycine max
  Clone ID: PAT_MRT3847_33267C.1
gaggagagaagggcatcggcagaggcaaaaaggggaaccaaagtggcaagggttttggagattgctagtctcatgagagcagttggaagacctcctgccaaaaaatccttcttctaataagctgttcaatatttcatattttcaacttttgaaacacatttttagacaaaaaggaaaaaaataaaataaaagcaaaaacagaatgagagaataatatttatgggcataagatatgccatagtctatataacaggcccttttctttttttaagtagctaaagggtgcaagatggattgcagtaagcagcactatgatgaaaaaaaaaaaattgaagatgaggcatatgtgtcatattatgtgagggaccaattggagtggttttaagtgattggagtgtttgaatgaatgtgataagtggtgtcacgcttatttgattgtgctggttgataaaaaaaaaaaaaaaaaaaactcgagactagttcgctctctctctctctctctctctctctctctctctctctctctctctctctctctctctctctctctctctctc

SEQ ID NO: 68942 - DNA, 678 bp, Glycine max
  Clone ID: PAT_MRT3847_33268C.1
cccccgtactaagcggggaattcggctctagctatcatcttctctcagttcgacgtcagcgaagccttcattgtttgttgggggcaattcgattcgatttcgcagagtagaatgtttgggacggcgattcgatgtttggcgaagaaaccgaagccgaagatgggacccgtgatcctgaaaacgccgccggagcagaggcagacaatcacaagaaccctcttcgatataattaaggagcatggtcccatcactgttgctaacacctgggaacgtgtccaggaagttggattgaaagatttgacaagcaagaatcacatgaaaatagtgctgaaatggatgagagagagacagaagattcggctcctttgcaaccacgttggagcacacaaacagtttctctacaccacttggtttaccaagccggttacccctcccaagaattcctcttgaaagttgaaacttcatcatcagttggttgctgctgttttgtaccatgtcttgtcaagagtaataatttcattttagaaccgttaatcaatagagatcgaaatgttttgccttattttccattgtttctgtctctgtgttcttcactctcaactcacacacctattaatgtgtatttggatagcctctaaaattagaccatggtaagatgaattaattttgattttgacc

SEQ ID NO: 68943 - DNA, 560 bp, Glycine max
  Clone ID: PAT_MRT3847_33269C.1
tcctcccctctagcttccaagagacaccaatgttgcctccccttccttctatttaccacctttacatttaaattctgtatctcctttcacaattattccgccctatctttcacaattttccccaacagaatcagcacccgaatttcccggatccgagatacccagaaggaaaagattaaaactttggtgttttcatcgatctctggggaaagatgtgttgtggggggagaatttgcatgctttgcacgtgtctggttctggtggtgatcgccatcgggttggtattcgggttcggagtgttcaagcatggattccacaagatcaaagacactgttagtttctgcgattcttgcggcggcggaggaaggcctttcatcggttatgcaccgccgccattgttctagttctcagcatcctcttgttccatttcgttcttgttaattgttctggggatttgtttgtttccttttataaattagtattcgttagggttcatatttgtaattacctgcttcttgggattcatgtttgatttaatattcaattgtctttgttaaaaa

SEQ ID NO: 68944 - DNA, 759 bp, Glycine max
  unsure (1)..(759): unsure at all n locations
  Clone ID: PAT_MRT3847_3326C.1
tnagaggcaaccaaataacacatgtggatcctctctgttgtcaacattaaatagctttcatcaagaacaagttccgaacaaaataatgttcacatgtcactattgaatttgagaacctgatgtgtttcagtttttttttttcacaaaagaatgtcatagattaaaaaaaaaaggaagattaggtatcaatttaatacttctaaaccttgttttggtgcatgttgtcccaggcactgcctgtgagtcccatgcggattaaaaacttgaggatgtcaagaggaatataagtaataatgctgtagatccagattacaccagcccatctccatccaactccattgattcttgcaaagtcccaatgtgcatacacagcaatgacagtggcaaccagctgcgcacaaatgaaggctacacagagcattatgccagggcgttcaaagtatgaccagctccgtgacctggtcacaaagatgagtgcctgactaatgatgctcacttgaaggtagagagcagagttcagctgctcctcgctttctgcaattgggctgacaccaaaaatgttagagaaaaaactagtgtcatgaacaacataaaagaagactgcggttatgatggccatgtatgctccaagaacaattccaggggcaaagatttccttaagcttccatgagtcaggcaaaggagatggcttgaccctgtcctttgagatggtcatgatggttccatcgttcaagattgctatgatgagaaccatgaagg

SEQ ID NO: 68945 - DNA, 325 bp, Glycine max
  unsure (1)..(325): unsure at all n locations
  Clone ID: PAT_MRT3847_33270C.1
tccaagccagtccaattggcaagcctgatcttgataaatttggctagttgtattgtatgcaccaatctactacttactgcctttccttttccttgaggccatttcacctgggcttgatgcaggcagcaggctcaactaattatctttactactgtttgggaacgtgcgatcttataaaggagaggtttanttccttatacannggatttgtccttgttgttttgtgaagaatgtcaatannttatgttcagagcttaaaatgagaacattccaaaacctagcacttatatttgttgcttttgcattttttcttctccccctatac

SEQ ID NO: 68946 - DNA, 387 bp, Glycine max
  unsure (1)..(387): unsure at all n locations
  Clone ID: PAT_MRT3847_33271C.1
atctcaagctggatcccctcaactaattagcactacctcgaatcttcatccccagattaattctttagttggagtaatggaaatgcctaaagccaaagctagtgaaggatactccaattgcatatataattatgactactcagcttacaaagttccttcaatttgtcctccattgatcaaaaaatgtaaacgctctcgttaatcaattgtatgtgaatnttgttgcanaatattagctaattttgttttcttcgagatttgaaagtccttttttgttctcttaaattcttcgtaattcttttttctcgtcaaaaaaaaaaaantnnntatttntttattattatttattttaattatatgttaataataaaaaaatttaattataat

SEQ ID NO: 68947 - DNA, 418 bp, Glycine max
  Clone ID: PAT_MRT3847_33272C.1
cccactcgtccgctcactcgtacaagtacctttttacaaagtccaaattttatagctccgcgaaaccataccaaacctaattggcaacatcctaagcctcatccatgatatcaacaccggccttatctgcatccatccaaaagctccatcatttgaagccatccaacgtgtgctttcaaggtcttagacccctctcaagggtcacctaagccttctcaaccatagtgagcaccaccacctaaagggtcattccaaagcggtggtgttagagctgaactcatactcacaccttgctgataagcctcagcactggcctatgcctctacttgggaaggtgcgtgttacttaacttgcatagggagaacgtggcaaatcatgttcctgatcagaacggcctcacacacttagaggctggtga

SEQ ID NO: 68948 - DNA, 305 bp, Glycine max
  Clone ID: PAT_MRT3847_33273C.1
atgcaccacaggttcttcttagtgggtcattggatcatactgtcgacttgagggatggaacgatgccatcacattctcgctacaaatggtcagacacagctgatgtaaaaagcttggcatgggatccgcacactgagcactctgttgcggagagtcttgaagatcgtattgtcaagggttacgatatacggactgacaaatctcattactcgagcgatacgacttctacttttacacttcatgcacaatacaaagctgttaccttaaaatcctataatccattggcactcaatcttcttgtcact

SEQ ID NO: 68949 - DNA, 895 bp, Glycine max
  Clone ID: PAT_MRT3847_33274C.1
ggtttaaaattctgagataagtgattctctgccttttcaattttcattttaaaaaaaagaaagaaaaaaaaaagaaagaagaaaattgtgcatgctggttcttgaatgatcttcgtcctggattcagaattttcggtgacagatctctgctcggacttccataaatgcatatctgtggatgtgttccaccttggctctgtcagattctcgcttgcatgggaggttgtctgggatgcttcccaaatcctaaaggccaatcaacaaacaaagacaacagatcagaagatttttggagcagcagtgcatttgaaatagatcagggtgcacttcagtcccagaaaagcatctcatcaattggcataccttctgatcctcaaagtagtgctgacattcagattgattctcctgaatatgtcaatcatggtcttcttctctggaaccagatgaggcgacagtgggttggaaatagaaggcgtgagaataagaaacaagttggagaacctataataagttggaatgccacctatgagagtctaatggggaccaacaagccttttcaccggccaattcctcttggagaaatggttgactttcttgttgatatttgggagatggaaggcctatatgactaagcagacaaatcaggttttttttttccttagagattttcttaggagagggaaagggaggtagaatttgttcatcctactataaccccactggattgttgtacatacatgggctaattttttttttcttaggctaaatggggaaactcttaactaattggttttgctttttcttccgggggcgtcatttctacgtgaagtatatttacaccaaattgtgttttgataaaaaaatatattacatcatttgtataattctctgacta

SEQ ID NO: 68950 - DNA, 244 bp, Glycine max
  unsure (1)..(244): unsure at all n locations
  Clone ID: PAT_MRT3847_33275C.1
cccacgcgtncgaccacgcgtccgagcacgcgtccgaccacgcgttcgtacggctgcgagaagacgacagaagggctactaatggatctgactgccctgcatgaagtgatggacaaaactgggtatcaacatgaccattgtgcagcaacctgagctttcattcccgatgtggacgaaccacatgctggaaacattgaacttcaggaagaaaggggacgcttcttttctgcacagagattttaaa

SEQ ID NO: 68951 - DNA, 915 bp, Glycine max
  unsure (1)..(915): unsure at all n locations
  Clone ID: PAT_MRT3847_33276C.1
ctggaaaatgagtccaaaaataacacctatagatacggagcaagatcttatgaatttaatgggagctatttttgctgctgttttctttcttggaggctccaacacttccactgttcaacccatagttgcaattgaaagaacagtcttctaccgtgaaagagcagctggaatgtactcagctctaccttatgcaattgctcaggtggcaatagaatgtatttatgttgcaatccagacatttaccttcagtcttatccttttctcaatgatggggttcctttggcgagttgacaagttcttgtggttctacttcttcatgttcatttcatttgtctacttcacactttatggcatgatgactgcggctctgacaccaaatcctcaaattgctgcaattattatggcattctttatagtgttttgaagcgtattgtaaggtagaattatagcattatcgttttccatactgtctggaaattttcacttgtgggtaggttttggtcattgttcatctcctgaagtttggcacctacatatccttccaaagtgtacaaatgataaagactgcttttgcagaatatttaactttaaaagtttgccttgaggaagagtcctgctatgaatatggcttccttggagttgttgctgtggctcatattgcttttgttgcattttttatttttgtttttgcatatagtatcaaggtctttaatttccagaagagataagtaacacataataaatgaacaaagtaagcacaaataataataataaaaaaaagcatagagaaagaaattgaaaggtttctgtagaatctggatttttcacttgtgtagttttggtcattgttcaacatctgaaagttggcatcaacatatccttccaaagtgtannnnnnnnnccgactgttgtgca

SEQ ID NO: 68952 - DNA, 627 bp, Glycine max
  unsure (1)..(627): unsure at all n locations
  Clone ID: PAT_MRT3847_33277C.1
cggccgctcgagccggccgggcgggaaggtacaaaaacagtgtgtatattctccttttccattctatatgtttgcacccttcttttctgtttttctctcaaccacttttattttgtgatcttatgacaaatgaagtctattatttgttgggttaggtgtgcaaaagcaaaagaatgcagcatcagctggagcaaaattgttttgctttcctggcccttctcttatacagatacagctgttttaacacgagagacacctagacccaagtccgcatgtgtcccatctgaaaaatattctgaaactagtgaacgatcgacccaagtcactcaacctagctggtatgcatcacaattacaatgatcaccttcagagttcagaccaacatagaaaagactaaatcataaagtgtatatatatggctgttataagggaaggattattgctgttcccctttgtgttggggtcacgagagcaacttctatgtgtcaacttttctttgggcatttatcaaatgttatgcgagtgaattaatttttatatatagcacctttggcattaatattatatgatatatatcactcttttttgcntcnnnnnannnnnnnnnnnnnnnnannnnnnnnnnng

SEQ ID NO: 68953 - DNA, 254 bp, Glycine max
  Clone ID: PAT_MRT3847_33278C.1
atctttttctgcttgcgaaagccgtcatgctgtcctgagaagatatgggaagctgtgccacactccattccactgcactgagagcttctaagccttctgaggtgaaacataactccctaacaaatgtatcacagtaccaaacatttttataagaaacctatcgcaacaatgaaagtcaattaccaagcgtctaccaacttatgggattcatggtacggttaaagacccttagaagattgttgagagattctaag

SEQ ID NO: 68954 - DNA, 184 bp, Glycine max
  Clone ID: PAT_MRT3847_33279C.1
gacagaaggagacctacaatggtggcggttactagtaaacacctacgggacatcctcattgcatgggcaacagccatatcatagactgatccgctaacggcacaatggctgatggatgaatacacgcatatcgagtcagagtcaggcgatacggaacaacggttggagaaatacatggttgacg

SEQ ID NO: 68955 - DNA, 702 bp, Glycine max
  Clone ID: PAT_MRT3847_3327C.1
caaacgcgcagcaacaagaatcaaatccacagacaagcttgaaaccatttcagggttttgttcgttctgatacgagttttcttatttcttatcatctgccttacatcattaacaaacaacaatgaccacctctttccctcgctcgctgtcctgtgtagtcaacactgctctccgccacaccaaatccgtttccaacgcagtgacacggctcctctgctcttcttcaactcagccacaacatgaaaaccctgtcagggaacaaacacagacaccacctcagaatctctccatgatgagaacaaacaaagatatgagcccaaagaagatgacggagatggtgacagtattaacaaagaaaccggtgagattggtggacccaaggggcccgagcccactaggtatggtgattgggaacgcaatggtcgctgctctgatttttaagtataaccattatagtgtgtttggatccactttatacatgcacatctcaaactaaaatcactcaaattgaaggaaagacgagaatagtagctttcactttgacgtcgatccaaacgtgcagatgataaattaaatttcactaatattgtgccattttttctttagttctgatttgatgaccttatgattaatgattaagggtgtgtaaaaatcgaattgaagtgatttcaaactgtcttaaccggtttgattttatattcc

SEQ ID NO: 68956 - DNA, 867 bp, Glycine max
  Clone ID: PAT_MRT3847_33280C.1
cgaatttctttttcagagaactacgaaaattggagaaaaattaacaatatgtaaattaggaaaggatacgtgaattattaagggattctagtaaaattggttaaacagcttatgtttaatagtagagtttgactccacctttttcaataaaaaaaatgtcaattaatagattgcattagctaattttaagtttatgatgaaatcaatgtttccaaaaaattgtgtacaacgaactattcctctcttttgaatcaatgacgatttttttattcactttttgtatttgttttctttttggtggaacagcctttgtttaaaatggtaaaagtctaaaaatataaataattggcatgtgaagcacatcatcaatagggatagaggtgtcaacctagttaaaatttctgtccctattgtgatgttaaatcatgcctccttttgattaaaaggaaaaaagaaaagagtaatttaatataaagacaactatttaacagagttagaaaatatatatatcttatgtaaatattattatggcttgtttttgacacattcaagccttattttgtattgagtaaagttcttttagcttaaaaaaaaatcaaagcatatgtttaaaaaaaatactaattatgaaattttttgaaaaaaatacaagaaaataacttattataattctctctttattttataattgtttttttttttcgtgcatgatcgtgatagtgacatatgacaaggttttcctcaaacatgaaggcaagtgtaacattgagttttgagatgtaacccaattttcgccacaagttggtgaaaaaaaaaaagatcaagaaaaaatggtctttgggaacacaagcatggggacgatgatct

SEQ ID NO: 68957 - DNA, 443 bp, Glycine max
  Clone ID: PAT_MRT3847_33281C.1
atcaaaaaaagttttttttaaaaaaggggggggggaagggttttttttaaaaaaaaaggggcccgttttttaaggggggatttttttttaacaaaccccaggggggttttgggttaacagggggcccggcctaaaaaaaggccccgggaaaacccgttaaggggggttttcctttggcccaatttaaaacccggggggggggaaaacaacggggggtaaaaaaaatttttttttttaaaaaaaccccgggccccgggggtccccccggaaattcggggcggggcccggggggggccccacttttcccaaagggggggggtttaaaacggggggggatgcggggccaagggggaaacccggggggaaatgggtttggggggcaatgccgcccggaatacggcccggagcctaaagggagaaacccgggggggcgccaggggggg

SEQ ID NO: 68958 - DNA, 259 bp, Glycine max
  Clone ID: PAT_MRT3847_33282C.1
aaaagaccaccgaaggggggaaatggaatcagtggactacatcagttcttatgattgtctactctggaggacatacatctatcgttcacctttgttaatcataatggtttaaactcaccgtgttgacactcaactcataagtcactaaatttcgatgctcgccatattaccgttacaggactagcatccttaacaaatttgactgggcttacataactggaattgtatggtgcacgacgaacagactttggaacaaact

SEQ ID NO: 68959 - DNA, 263 bp, Glycine max
  Clone ID: PAT_MRT3847_33283C.1
gctgcgagaagagacagaagggcatgtgacatgcatgacagacaaatatccaaaagttagtggagtgattttttttcctgggaaacactgtgattacaaagttgtgcatccttcccaaatagttatcattggcttggcttcactggaaggaagtgccaaatagtagccttaagacttgaaaggatggagctggatagacacattccataataatctaaaacacaagaatcaagtagtgagattctaccttccccattgtcatc

SEQ ID NO: 68960 - DNA, 1437 bp, Glycine max
  Clone ID: PAT_MRT3847_33284C.1
gaatggagataggtttattactctgaaaaatggagtaggttgtgtcaataaacttgtgttcacagataattcgagatggattagaagcagaaagtttaggttgggagccaaagttgtgccaccaatttctattgaagccaacattaaggaaggtagaagcgaaccttttgtggtcaaagattacagaggagaggctttctagaaacaccaccctccttccttgaatgatgatgtttggcgtttagagcaaattgccaaagatggaaaaatccacgatcggctatctctccatggaattcacaccgttcaggatctcttgcggttatacacaacaaacccttcttcattacttgagaaggttggcaacattacgaagaggtcatggataacaattattgaacatgccaagacttgtgcgatagatgatgacgagacttttgtctaccacacagcagaacaatcgataggtctacttttcaattccatttacatccttgtaggtgtgacattcgatggccaaaattacctctcgcctgatattctcaaccccaacgagaagcatttggtggaaacattgaagcaacatgcttacaaaaatacggataatttcaaatcaattcatgagacatcattgagctgctcaaaaccattgacatttctaggagtagggcaatctgatgctacagagcaaagtctgcaacggttcaatatctctacagaacaagaaggtcatcaaggaacatgggttggtaatggtcaaccatatgcctcaacttcatatacagatgaaagcgtacatagttaccaaatctatgctgatccagtgccagacataacagacatgccactgaacaatccttatggtagcaattcaatgaaggattttttctctggattgtgcattgaaggggatagttgggtcccttatggataatatttgcatcttgtgcaagttaatctttcaaccgagaatgagaatacactgattcaattctcaaaatttggggcaacaaaatggcttttacattgcctcttctgatggagaagacttctgtcgttctcatgtgaatatgtcaagtagtggaaaacccaaaagcgctatagtataagattcagaattttatcaaatgtgtcatgtcagtcaaaactcaaaagggatgcagctgccagatggaatgtgaagctgtataattataactattagtctcttgttttgagcaattgagcctttggttggttcccttagccagaacgtgtttgcaagctccatagatgtcatagaaacaattgtgtttatgttcctggtggtttacgaacttcattgtcaggtgagcagtgaagagatccacaacatggggtcctcatgcccagtgttagtatgcacaatttgttgtaaaattaattgagcaaattacataaatcctccttcaagtttag

SEQ ID NO: 68961 - DNA, 358 bp, Glycine max
  Clone ID: PAT_MRT3847_33285C.1
tcctgttctaatatgactacggatggggagcccattactcatctgaagattgcatctagtacaagggagagagaggagcatcaagctactagcctcatataaagtgagacattgttgtccaccttcttgtacacaccacgagattatgagtgtctcacaacgcattctgtgaacatcgtaccagacatagtcaacaacagggactaaccaatgaatcggataatgtatgtggcaactgagaaggtgacaccatctacaggaacgcacgagcattgtctaatgcacttgcttgcacaccatgcattatatgaaagactaagaattcatctaaaatacgaatgctatgctcgtgactgat

SEQ ID NO: 68962 - DNA, 154 bp, Glycine max
  Clone ID: PAT_MRT3847_33286C.1
agaaaaaactccccattctctgttcctcttatttctctgatacgcattcagatctcacttcttatggggcgggtttattatctcgtttccgagaccccattattattctcttttccaatacctctgaacccaatctcttcatacatcgattgtt

SEQ ID NO: 68963 - DNA, 1019 bp, Glycine max
  Clone ID: PAT_MRT3847_33287C.1
ctattcagttcacagcatatgaggagctacgcaaggttattgttgattttaagagtaagggaagtacagtgcataatcaaaaccctgataaattgctgaattctgttgattatgccgttcttggagcaacatcaaaactggctgcagtacttctaacctatccatttcaggttatacgggctcgattgcatcgacccagtggtgatggggttccaagatatatggacacgttgcatgttgtgaaagaaactgcacgattttgttctgttgcagatttgaaagtatccgaggtttttacaaaggaattaccgcaaacctcttgaagaatgctcccgcttcttcgataacatttattgtttatgaacgcctccgccggcgccgccgccggattcgccaccgtcgccgtcatgcatcccctcgatgttgtccgaactaggttccaagttaacgatggtcgagtctctaattttcccatttacaagaacaccgctcacgccgttttctctatcgctcggtctgagggattaagagggttatatgcaggctttcttcctggggttcttgggtcaactatttcatggagtttatatttcttcttctatgacagagccaaacagagatatgcaaggaacagggaggggaagttgagcccaggtctgcatcttgcctcagcagctgaagcaggagctatagtttccttcttcacaaatccagtatggatggtacaagacaagattgcagcttcaaactcctcttcatcagacacgaccatactctggggtttatgatgcatttagaatgttattgttgattaaaccagcaagaaggaatgactgagtatttcattttccttcatgattctttcctttctccttgtgtttaatctcctttcttatttgatattttttgtagcattgaaaaattgctcatttttcccatcactttttaatgatgggattctacacaatctaacaacgtggatgcagcaatttctggagataaaaatcatggtttttttt

SEQ ID NO: 68964 - DNA, 402 bp, Glycine max
  Clone ID: PAT_MRT3847_33288C.1
cgtaagctcggaattcggctcgagaaagaattgatagttgcttgcaccgttagctgagttgtttgctttccaaaaacgatgcataccttcaacaaccactctaccacaaccacacctaaatttggaggcaacaattacctcatgataaaacccttacagctaaaaaaataattaaatgttgcagtgcatgtgagttgtgccaccacccatctgagtcaaacctatccaactaactaacatcacgacaatgttgtccttcttcatggcaccttcgccatcataaacctttccttttctctcgagggcagtacgaggcaaggaaagtgctccttttttggcagttatatgacacattactattagtattggctgttttcagttttcacgcctcatgctttacac

SEQ ID NO: 68965 - DNA, 395 bp, Glycine max
  Clone ID: PAT_MRT3847_33289C.1
cgcgtgcgaccacgcgccggggccataggggccatagcctccccttcttcaccaccctgctgtgagccactttatttcactcgaacgaattcatatcctaacgttcttgggagagtcccatccactttgtctctatctttcgtctcttgctcaaatcaacaaaatctgaaaccgctagcgagattgcgagaagatatgaggctgggacgaaggagcctcctactacagcgaccaagcgctcgacggacacgacagatacggtgcccgctgcgaagacggcaccgatgctaaccactttgttattcagaaatttacggtatgcatgcgaaacttgtctgccaccaacactgtctagcattacagggagagtgtcctacataaccctaaggtccttc

SEQ ID NO: 68966 - DNA, 253 bp, Glycine max
  Clone ID: PAT_MRT3847_3328C.1
ggaattcggcacgagggtgaaagacgtgctgttgaggaatgacagagcagttctcctttggcagagagaacatgcacaagcattcttctgatgtgaggaaaatggacagtgaagaaattcaattttaattacgtgacgtggaagtggaaaatagcagagattttccaagattatgcccttcacatgaaaagcatccacaggaaatggcttgtctgtggaaagtagccacaagaaaactcttattcaatatcat

SEQ ID NO: 68967 - DNA, 438 bp, Glycine max
  Clone ID: PAT_MRT3847_33290C.1
aaaggatcagtataacaagtttcgttttagataaaaattccatgcttattcatccacttccatttgaatttatgacagatcatgtgtttgtatggtatgatggacgaatttgcaagcagataatggaactagttaaagagaggagagccattagcagtggtgatccaaagcttagatttaaattcttcattcaaacccgacataaccaggaagcagtgaacataaaagagtgtggatttcgttggatttgttcctttgaagaaggaggatgcaagcccgagagaagcagggaaattcatgaagtagaagccaatgtggtcacaaataaagtggagggctctgagtctaatgagcaaaaagaaacttcacacttgaaagcagaagagaccaaaaaacttgagttatcgtcttgaagaaatcatgcatattggatttgga

SEQ ID NO: 68968 - DNA, 235 bp, Glycine max
  Clone ID: PAT_MRT3847_33291C.1
aagccgaatttcccttctatccacaaccaaccacgaaaccctttccgttctcaaaaactctcttttccctcaatcacaccaatccttctacttcaccttcaatggcaaacccctccccgacaaaacccctctatcccaattcccacctctatccaccctctctctccgctctcgtctacttggcggctgcggagacggcggcgccacaggagccgagtctcacgactgctacctc

SEQ ID NO: 68969 - DNA, 1646 bp, Glycine max
  Clone ID: PAT_MRT3847_33292C.1
tcgcgcaggcgtacgcccacgcgtccgtacggctgcgagaagacgacagaaggggggggacttcaacatctcttaataaagattagaaatcgacatatggggggagcaaagagttactcttgttttgcagtaatagctgtggccttggttttgctacttctgaatgtggctgtggtttgcaatggaggcaagacaagcacattcattaggaaggttgagaaaactgaggacatgccccttcatagtgatgtatttgttgccccttctggctataatgctcctcagcaggttcatataacacaaggtgaccaagtgggaagggccatgatcgtgtcatgggtgactgtggacgaaccaggaaagagtctagtgcattactggagtgacgccagccagcacaagagagtggccaagggaaatcatgtcacatatagatacttcaattattcttctggttttatacatcactgcacccttagagatttagagtttaacacaaaatattattatgaagttggaattgggcatactactaggcaattttggtttgtgactcctcctgaagttcaccctgatgcgccttatacatttggtctcattggtgatctgggtcaaacttttgattcaaacaagacccttgttcactatgaatcaaaccctcacaaaggacaagctgtgttgtatgttggagacctctcttatgcagataatcacccaaatcatgataacgttaggtgggatacgtggggaagattcgtagaaagaagtactgcttatcaaccttggatatggactacagggaaccatgaacttgactatgctcctgaaattgatgaaacagaacctttcaagcctttccgccaccgttactatgtgccttacaaagcatccggaagtactgaacccttttggtattctgtcaagatagcttcggcacacatcatagttttggcttcatattcagcttatggcaaatatactccccaatatgaatggcttgaggcagagctaccaaaggttgatagaaccaagaccccttggttgattgttcttgtgcattctccatggtataatagttacaactatcattacatggaaggggaaaccatgagggtaatgtttgagccttggtttgtgaagtacaaggttgatgttgtgtttgctggtcacgtccatgcctatgaacgaagtgaacgaatctccaacactggatacaacattaccaatggtcgatgcaggcctttgaaggaccagtcagctcctgtatacataaacattggtgatggagggaacattgaaggcttggcaagcaacatgacaaatccacagcccgagtattctgcatacagggaagcaagttttgggcatgccattttggaaataaagaacagaacacatgctcactatagctggcaccgaaatgaagatgaatatgctgttacagctgactctatgtggtttttcaacagatactggcatcctgttgatgactccacaaccaagtgaactaataggatagttctgcagagttttcctatctaaaaatatccgttttataatgtattgttgggtgatgtacacttgttattgaagtaaattcaatgttttctttggtaaaccttgttttgttgccccccaagagaaaa

SEQ ID NO: 68970 - DNA, 447 bp, Glycine max
  Clone ID: PAT_MRT3847_33293C.1
taaagaaattccatatagtcacgataaattgtgttttctaacagggacagcatacctacaagcacgacttcgtgtttatcacaaagcttgatccattcggcagcaaaacatcatgcctacttatccctcacataaaatctctgctactgatggaaccgaagtctgagtatccatacacaatacaggaatcattaagacaatgaataagacttgtcctcgaaagccgacccaatttgtgagatatcaaaaaagtcgatggaatctattgcatacactaggccgccccacagagacagaattgaacctgcaagaagctggcatactttgcacctaataaaagccgctggatgcaaagcagtgcatttgaagtaactccagcattgggatgattaattagctggatcactggttcttttgccttaaggtctgacccaaagatccgtccag

SEQ ID NO: 68971 - DNA, 606 bp, Glycine max
  Clone ID: PAT_MRT3847_33294C.1
ccacgcgtccgcggacgcgtggggagttctgctgaacttttgatgtaatacttttttactatttatttaatgatgttcttatgtgttcattgcttctatctatgcttatttttacatgcttgtgacttgatcacccatttgtatgtatagttatgatttttagcattggaaagtgctttaaagccttagaacttgataaagcaagctagaaagttgtatgtctaggaatggagtgcagtgatttagtctttattatgttataatcttaatgcaactcatttaaactaagtttgttgagggatcaagtgcgaggtttaaatagagttaggcccattcactcgagggatcttggtttgggtaatttctcaccataagaacactaaaacaacgttaaatagagaaaaatatttagcaacatcaaagcaagttcagtagaatgacccaacgttttttacttgactattttttacttctcaactgctagatattttagtttgtagttaattagattttcatataaaaatcccatttaatatctacttgctttaaacaaatgtttgcttattgaacacatattttctgaatgaaacaaggtcgttccctggg

SEQ ID NO: 68972 - DNA, 861 bp, Glycine max
  Clone ID: PAT_MRT3847_33295C.1
ccacgcgtccgcacaatagtatatattactatttgttaatatgtgaatatataattacagatgagcaaaaaactattgtcgataccattatgtctgtggttaacactcaatcagctgcagtttactttctctatggatatggtggaactggcaaaacatttgtttggacaaccttatcatctggtatacgctccaatggtggaattgtttgtacagttgcttcaagtggaattgcttcattactattgcctggtggtcgaaccgcacattccaaatttgctatactagtccctgcaacagaaaattcaacatgcaatattcatcaaggtagtgagtgagttagctgaattattaaaggttacaaaactaatagtctgggatgaagctccaatgtgtcacaaatttgcatttgaggcactagataaaagtcttaaagacatcatgcaaaacaatctgccttttggagggaaaattatggtttttggtgtagatttccgacagatcttgccaattgttccaagaggtaatcgctcagacatcgtccatgcaactataaatgcatcatacatttgggaccattgccaaattcttaaacttacaaaaaacatgagattgctatcaaatgctccccaacaacccaacaatgaagaactcaaacaattttcacattggctacttgacataggagatggaaaaattggacaatataatgacggattttcagaaatcactattccagatgagtttctcataaaaaattatgatgatcctatccatgctattgttgaagccacctatcccagcttgatagataactacagtgacacagattacttgcaaaaaagagctgttcttgcctct

SEQ ID NO: 68973 - DNA, 418 bp, Glycine max
  Clone ID: PAT_MRT3847_33296C.1
gctccgcgacgcgtcgctgaaaaccctccactctttatccaaactctctctacccaaaatgggggcggggcatcatctcttcagcttgctcattcttttccttgcagcaattgtagctgctcatatctattcatcagaagcagctgggtccaaaggatcttttgaggacaatctcagcatactgtggtctgaggaccattctactacctctaaagatggacagaaacggcatctctcacttgacacatacccaggatttggatttcaaaccaaacaacgcttccgatttaggtggatccatattaagctcaactttgtaaccggagactcctcttgtgttgcaacaacttattatatctgctcaaaaaattgttcgggaccataaagaaattagcttgatttttactttttggggaac

SEQ ID NO: 68974 - DNA, 371 bp, Glycine max
  Clone ID: PAT_MRT3847_33297C.1
ggattgggcgaagacgaaaagcaaatcagcgaaggagtcctccagttttcgttagagacactgtgtcctgttttctctgaacctaacacagacccgattgctacgaatggcatccaacaggggtcaaggtggaattcaacagttgctggctgctgaacaagaagcgcaaagaattgtcaatgctgcaaaaaaatgaaaaattggctagactgaagcaagccaaagaagaggctgaaaaggaaattgccgagtatagggctaagttggagtacgagtttcaaaagaaagtgtcacagagtagtggagattctggtgctaatgtgaagagacttgagcaagagacagaagaaaagattcatcacctgaaaact

SEQ ID NO: 68975 - DNA, 605 bp, Glycine max
  Clone ID: PAT_MRT3847_33298C.1
agcaatgtaccaggtgccgtgcaccaaccgggacaactcacaattcgtctccaaatcatccaacatctcctcctcatcaccgtcttcctctggagctgtcgtccaaaatgtagtcatccggattgtgttcacagactggttcatctcaagtgtaccttccacaacggtgataagggtcttagtgtctggtttcatcaccttacatgtggtcatcatccgtgtgattctcttcgtcagcgcgagtgtaacctatagttcgcccgggtccaacaccacacacacaaaagggctccaggcggacatgcgtacaactgcatctgccacctcgctatctatctcctctaaaatcacacctggttctgctctctccgccggtaccgctgcggtggtcactactggtactgatcatatcttagtcttccaatctgcagcctcctccaactacttctccacttgcgctcctacgtcctcctctgccaatcccaactccaacctcctccatcacaaccaggaccggacatggacactatcgctaccaatgcaatcctatcgcctctcgctttcgcagccacaagtagcgctgctctggccatagccagactagc

SEQ ID NO: 68976 - DNA, 414 bp, Glycine max
  Clone ID: PAT_MRT3847_33299C.1
ctcacgcgttctgccacgctgtcgtgttactggttatctcgttgattcggatctacagtcttttttcactcttgagatctccatgttgcgcttcgctgtcctgaaactatggttttcacttgcgattcattcgatagtacttaaagatgttctgggagggcaccgcagacgatcgatcttacgaggtgctacgaaatcctcggcgtctggaataacgcttctcacgatgatctgaagaaggcttacacagacagccggcatctagaatcacgctgagcagggcggcgatcccgagaagttgaaagagctggcacaagcatatgaagttctgagtgaccttgagaagcgtgagagtctgatcagcattgcgatcatgcgctaaaggaacgaatcggtggtggcagaggccatgat

SEQ ID NO: 68977 - DNA, 1248 bp, Glycine max
  Clone ID: PAT_MRT3847_3329C.1
ctagccatttcatcatggtccttcgccatgcagtccggtccattcgcaactttgtgagactggttgtggatgagatgagatctgcaggttgggacattgatgctgcagtcgacgccatcgaacagaatgtggtttatatggcagaagatcacaagtgtttcgcaatggaggcctttgtttgcagggaaatgtttgatgcattccacatccctaacttctccctttcaagtgagtctcctctagaaaaaaacaggagacaacagtggttctttgggaagttcaatgagatgaaatcaatgaaggcaaagtactacctagccgagaagccaagatcatcgttcgcaaagttttgccgggtcaagtattcgagacttgtccatcccaagatggagtcatcgttttttggcaaccagagtcataggaaccttgtgaatgcaggagggtttccagacactgaattctttgcctcattcgccgagatggcgaagagggtgtggcttctacactgcttggccttctcctatgagcctcaggcttcaatcttccaagtggggaaagggtgcagattctctgatgtgtacatggaaagtgtgaatgatgaagtcttcctctattcagaagtggaatcagatccacaagttgctttcacagtagttccagggtttaggattggtaaaactgttttacagtgtcaagtgtacctctcacagcaccaaaccaaggttaaaaaaaaaataacttcaacaaagcaaaggtagttgctgcaagcacttactgaccccacaactcaggtgattgaactggaaggcaattcattattttcttagtgaaaaagaaatttttggagggaaatgaaggggccttgttgtggggactgtgcctataggctaactcactggggcatctttgtccatttgtattttggtcattttgaaaagaaaaagccattggaccgttgcattgggaactgcccttttctttggattttttttttaattttatgccagatttatcaaagagacatccccccaaaattttattattaggccggtgacagggattgtctagctgttatgcatcttttagtaaacactgcattttataatttataatatgtacataatgatatataggtgggaattttataatcctcttttccttttcttttttatattttattttattaatctttgttctgctcaaaaaaaaaaaaaaaaaaaaaaaaaaaaaagcggccgctctagagga

SEQ ID NO: 68978 - DNA, 376 bp, Glycine max
  Clone ID: PAT_MRT3847_332C.1
atccacgcgtccggtaatcttacaagtttaatttttatggggataaatcaatgcagaagtgggaatttaacgcggaattcctaacatgcacggctgatcaaatcgagatcattacatacatgccttgtgttctcacctaccgttgatggaacaggttgaatggacttctgaaaacttcggattgagggaacctgtgaggttgcctgactccgaacacttgacaggaccattgaatcttatcgatcaaaggacgggatggacactgggcatctacgttgaccacgcgagctgatcactaatgcttactaagaaatcgtggttgtataccaacatttgcaatgatctatcccaattacgatgaaatttcgtagattac

SEQ ID NO: 68979 - DNA, 268 bp, Glycine max
  unsure (1)..(268): unsure at all n locations
  Clone ID: PAT_MRT3847_33300C.1
tggttacatttccgaataccattgtgcagattnaancagacatganttcaaggtttcagcttntgagtaccacnancantggtgatncggcncaaggagnanatctccgcnntggttaaacnnaatnnatcannnncctgctgttggcntgccatcacnntaaccntccacctccattgttggaatctggtttgcaaaaanncagagggtaattngcggagnattttggaaggatgtnttanggntgctcataacgttaatcagcccc

SEQ ID NO: 68980 - DNA, 193 bp, Glycine max
  unsure (1)..(193): unsure at all n locations
  Clone ID: PAT_MRT3847_33301C.1
gccgccggaggagcnggcggccgccggcagcagaacgccgacgcccaagacgacggcggggaagcngccgaaccggnnccgggagaacaaggagacggcggcgacgcagcaggngggagaacacgagcaaagggcaaacacgcaccacaacgagccaccggggcaccccagaacaccagcngccaaagacgag

SEQ ID NO: 68981 - DNA, 330 bp, Glycine max
  Clone ID: PAT_MRT3847_33302C.1
aaataaatatcaattttgctatgtattatggagcagcataaccatacgtgtccatgaccttggtacttacatgtgattgtccctcagaaggccccaattttgccaaaccaaaatctgagatctttggattgtaattctgtggaaaaaaaaacaatctattatcaaaatgatctgccaaattttgcattaaataaatatcaattttactatttattctggagcagcataaccatatgtgtccatgacccaggtacttacatgtgattgtccctcagaagaccccaattttgccaagccaaaatctgagatctttggattgtaattctgtag

SEQ ID NO: 68982 - DNA, 1375 bp, Glycine max
  Clone ID: PAT_MRT3847_33303C.1
ccacgcgtccgctcactctctctttctctctgttttctggtaattcatcaattgattcaaaatgcagaggctcaaactgcaactagtgctattcctctcaatctcaacttgtcacactgttttctccttcactgatgggttgttgccaaatgggaacttcgagcagggcccaaagccatcacaattgaaggggtccgtagtgacaggccacgatgccataccgaattggacaatttcggggttcgttgaatacataaaatcaggacaaaaacagggtgacatgttactggttgtgcccgagggtgactatgcagttagacttggcaacgaagcttccattaagcagaagctgaagctgattaaggggtccttctactccatcacgttcagtgcagctcgaacctgtgcacaagaggagaagctcaacgtgtcagtggttccaaccaccgagaagagggactggggcatcatccccattcagactatgtatggtagcaatggctgggagtctttcacttgtggcttccgagcagatttcccagaagctgaaattgtcatccataaccctggcaaaaaagaggatccagcttgtggtcccctcattgattccgttgccctcaaggtcttgtacccacccaaaagaacaagagctaatttgttgaaaaatggaaacttggaagaagggccatatatatttcccaactcgtcttggggggctttgatcccaccgcatatagaggattctcacggtcctttgccaggatggattgttgagtctcttaaggcggtgaaatacattgattctgatcactttgctgtgcctgagggaaaaagagctattgaacttgttgcagggaaagaaagtgcccttgcacaggtagtgattactacagttggcaagacttatgacctcactttcgccgtgggtgatgccaacaatgcatgtgaaagttccatgatggtagaagcatttgctggcacgaacaccgtccaagttccatatcaatctaagggtaaaggagggtttgtcagaggcaagcttcggttcaaggccgtctcaacacgtactcgccttaggttcctaagcacattttacaccatgaagagtgataactctggttcgctttgtggacccgtcatagatgatgtaaaattgcttggtgttcgttatcctacacttgcttgatgatgagattccacacctaatacaatcaaaacacatgtgcttgattcgtgtagttgagcatgtatactacagtatttgagtattgttgagcgacttttccaagtttcatatttatgtatctatttttccatcaaatcaaatggcagtgatgattgggagttccttcaaaaaaagggcgaatgctctaga

SEQ ID NO: 68983 - DNA, 712 bp, Glycine max
  Clone ID: PAT_MRT3847_33304C.1
acatgcaaaaaaaatcactttagaacatcatatataatactcaaagtacgtataccattgaattttctttgtatttctcatactacaaaactttacaagcctccattcctcataatttattcaataggaggaggattagaccaccttcttttcacctctgatttccatctcacctctttgagctttccatccaacccatagtctctctccatcacaaggttgatcccttcatcagagtaccaaccaactccaatacaaagaatgccatccttgttaatgtcaacatagcatgtcacgcccccaggaagccatagcatggtcacatcctgcatgtcaagccgctcctcctcgccaaagtagttggtgttctcggggaggctcctcttctttagattttccatacaaaggtacacatatggggcagcgttgccttcttccgtgctctcctcatcatacacaggagttgcacttacctcaaagactttccatgaccctgttagctctgatggcttggttcgttttctttgtgaaaatggctttgcatcgaactccgtatcactctggtcatcgatggaagcaggactgacccattcttcttcatacaaggcgactctcaatatctgtatatctgaaccaccattgatgaattctatggtgtggacaattcggatcctcttgtggcagcctttaaccaagcattgttccgacttga

SEQ ID NO: 68984 - DNA, 1561 bp, Glycine max
  Clone ID: PAT_MRT3847_33305C.1
gagagagagagagaactagtctcgagttttttttttttttttttttttttgatatggatagagtattgtgttgtatttgattgcatttattttgacggatgaaagatagagacgtaaatataaaattcacatgttgtctcctacatcacgtgcacaagcatgatataggtatatcatcatattcattgaaggaactccccgtcattactgcatttgatttgatggaaaaatagatacataaataaatgtgagacttggtaaagtcgctcaacaatagtaaaccctcctattattacaagaatcctgtggtatatatgctcaactacatgaatgtagcacatgtacgtgttttgattgaaacctcatcatcaagcatgtgtgggataacgaacaccaagcaattttacatcatctatgacgggtccacaaagcgaaccagagttatcactcttcatggtgtaaaatgtgcttaggaacctaagacgagtacgtgttgagacggccttgaaccgaagcttgcctctgacaaaacctcctttacccttagattgatatggaacttggacagtgtttgcgccagcaaatgcttctaccatcatggaagcttcgcattcattgttggcatcacccacggcgaaagtgaggtcataagtcttgccgattgtagtaatcactacctgtgcaagtgcactctctttccctgcaacaagttcaatagctctttttccctcgggcacagcaaagtggtcagaatcaatgtacttcacggccttaagagactcaacaatccaccctggtaaaggaccgtgagaatcctctatatgcggtgggatcaaagccccccaagacgagttgggaaatatatatggcccttcttccaagtttccatttttcaacaaattagctcttgttcttttgggtgggtacaagaccttgagggcaacggaatcaatgaggggaccacaagcatgaggggaccacaagctggatcctcttcttacaatttgagcttctgggaaatctgctcggaagccacaagtgaaagactcccagccattgctaccatacatagtctgaatggggatgatgccccagtccctcttctcggtgtccctcttcactgacacgttgagcttctcctcttgtgcacaggttcgagctgcactgaacgtgatggagtagaaggaccccttaatcagcttcagcttctgcttaatggaagcttcgttgccaagtctaactgcatagtcaccctcgggcacaaccagtaacatgtcaccctgtttttgtcctgattttatgtattcaacgaaccccgaaattgtccaattcggtatggcatcgtggcctgtcactacggaccccttcaattgtgatggctttgggccctgctcgaagttcccatttggcaacaacccatcagtgaaggagaaaacagtgtgacaagttgagattgagaggaatagcactagttgcagtttgagcctctgcattttgaatcaattgatgaattaccagaaaacagagagaaagagagagtgaggttggttggggtgtcgtt

SEQ ID NO: 68985 - DNA, 277 bp, Glycine max
  Clone ID: PAT_MRT3847_33306C.1
ggcctaacgagctatgtaaaattaatgtttttaactcgggttccaataaacggggggacactgagagccattctgcactcatcacagaatagaaaatgtgctgacgctccattgaactttatacatacggaaattaccctgtgatttcctgaaacatatctgcaaagaggtttgtgaagattgggcatatctccaacataatcttaaccgtaaatccgataccatctggcattgaattcgtactctttgaaaatcttcttcacactgcatatgcctt

SEQ ID NO: 68986 - DNA, 132 bp, Glycine max
  Clone ID: PAT_MRT3847_33307C.1
ttcggctcgagttatatttgatgattacaagtgaaagatagctcactttaacctttctaatacgagccgctcgcctggactgacatattcattcatctagtgcattggacacttttaatcttcatgctccag

SEQ ID NO: 68987 - DNA, 227 bp, Glycine max
  Clone ID: PAT_MRT3847_33308C.1
ccactcatccaattcatttacattaatatccaaactcaaccttgaacagcttttttataaaaactacacctccaccccaatccttcacctctctttccaaatcaccatccccctccctcactctcaaatctttttctttaaacacatccctaccttcaccacaaccaaaaccttaacacaccatccactaatatctttccccaatcatcctctttaactccatctac

SEQ ID NO: 68988 - DNA, 288 bp, Glycine max
  unsure (1)..(288): unsure at all n locations
  Clone ID: PAT_MRT3847_33309C.1
tcncanncacncnnacntaatctcnnaattctnctcnannaaaaacatcactanacantactcatnannnnctnnaatntcnnncnnccancnnancaaacacnnnnnttaannanaaacnnacnnacncacacaacannanaaaaccnannnatnnnnannntnctnnnaatnnnannctacnacancncnacannacnctcaananaccacnccaanannnaannnnaaancactnnancncccaacannaannnnnnacanncnncncccnnnnnnnnnaccann

SEQ ID NO: 68989 - DNA, 773 bp, Glycine max
  unsure (1)..(773): unsure at all n locations
  Clone ID: PAT_MRT3847_3330C.1
cgcataacctagggttttcccaattccgaattccgattactcggatcgatctccgattgttgctagggttagggttgttgttgttaacgatgtcgctgaggccgaatgctagaaccgaggttcgccgcaaccgctacaaggtggcggtggacgccgacgagggtcgccggaggagggaggacaacatggtggagatccgcaagagcaagcgcgaagagagcctccagaagaagcgccgcgaaggcctccaagctcagcagcagttccccactcctctccaagccgcctccattgtcgagaaaaagttagagagtcttcctgcgatggttgctggagtgtggtccgatgataacagccagcaactggaagcgaccacgcagtttcggaaactgctttcgattgagcgcagtcctccaattgaggaagttattcaagctggggttgtgcctcgatttgtggagtttcttgttagggaggatttccctcaacttcagtttgaggctgcgtgggctctcacaaacatagcatctggaacttctgagcatactacgtggtgattgatcatggggcagttccgatatttgtcaagctacttagttcgcccagtgatgatgttcgggagcaggcagtgtgggcattggggaaaatgtgctggtgactctnctaagtgttcgtgatctttgttctcagccatgntgcccctgatcccactgntggccccagttgaatgaacatgcaaaaactttcatgttgagaaacgcgacatggaccct

SEQ ID NO: 68990 - DNA, 648 bp, Glycine max
  Clone ID: PAT_MRT3847_33310C.1
gctggttaggtttttatatataatttaaaaaattaatatcataacttgaaactgaccaaagtgttcatataattattttgcatttgtagactgaaagcttactttgaaatttgtgatttaatatgatgtatgctagtttatatatatagaggtagttatttatattaataatttatgtaaataatattgtagagtgttatagtatgattccaaaaattattaagtgttggagtttgagaatattatggttaaattttatgaacatgtgtatgttgtaccttatgaatatcattgagaatgttataagatggttgatgtgatgttatgagatgttaaagtgtggacatgatattcgattgtgaataagtggatgtgtttaacacttgatgttacattaattatattgtgagctatgaattatacaataactcgaccagtgtttatgcgcagtgttaaagagaaagtgtaggttcctagttaggaaccagtgttaaattgtagcgcaattgtgttaaacatgtttgaaacatgagtgtgaggtcgtggtattgtataattcatgagtagtgcttataaatgaaatatgtgatgaattgtggaataatatgttgccttgagattataatattgttattgagattgagtaaa

SEQ ID NO: 68991 - DNA, 485 bp, Glycine max
  Clone ID: PAT_MRT3847_33311C.1
ctagaagccaagccatgacctctgtgtgtgagttcttgtatcagctttatgccaaaacaatagttctattaacctacatgctcatagaacttatcctcatcattcagtaccttaagtcagatacacgtccaatttcaaccgcccaatacctcaatttcattgaagagaagaaccccacaattcagttcactagaagattgaaggcagagaacatagattgcagggtgtgcttatctgaattccaagaaggggagaaagtgaggaatctcaattgcagacacacatttcacaaggattgtttggaccagtggttgcagcaatactgtgctacttgtccactttgcaggaacaaggtgctcccagatgatgttgtggccaaccacaacttgcttcaaaatcaggcagaatatgatgggaatgatgaccaacttatctttttgttatctgcattaaggggtggtagcactttgcacagatatctctga

SEQ ID NO: 68992 - DNA, 180 bp, Glycine max
  Clone ID: PAT_MRT3847_33312C.1
cttatgcttccgaatcgcgttacattattctctacaccttaatgctgctcaaccttatatcaaggcgatgcgagatcaagacgggcacggagatcattcaccttaacgtgtatcatctgatcccaattaacctgttttcatattggctctctcttgcattctactactctagacttcaag

SEQ ID NO: 68993 - DNA, 423 bp, Glycine max
  Clone ID: PAT_MRT3847_33313C.1
ctcgagcccaatcagactccgacggctgcccaaagtacaacataatggctccactttccaacacacaaacacatgcattgtactatcactggtggggtgtaattcgctcttttgagttatcgcacgctcaaatgcatcatcagttgatgcgactagccttcttgaggtgcatttctacttcctaatatcaaattgccttttcaaatttcttacatgtggagacctgtattgctgctgatttcctaaatcatttttatacattggttttaaaactctattactgtaaattatatgcccctgtttgaattcttacaaaccagtttactatagcacaaaaagaaatcaactattttaatcggtcaagctttcacaacttatttgacctaccaaattcaatttattcaacctttttaaacattattt

SEQ ID NO: 68994 - DNA, 409 bp, Glycine max
  Clone ID: PAT_MRT3847_33314C.1
gaatgactcactttttgaggctgggaagtatatataaggtacttacatcgcacttggatgtatgcctattcctaatgaatctgcagaaaattacattggtacctggaagctttgttagtcccaccagatgcaagaggtctatgtcaacactaacatgctcctctatgaatacacgcctaatagcttaggcctttttgagaaactgcatgacattggtattgatagcgcatcacaggacttgtaaacctcggaatctaaacccttcggccagaaccttaaactctttgtatggtgtctgtatcccacctggattatgtgccaacatgatcacatcgattggaaccacacctttatgggccaagctatagtatggagccactgcaagaatgcatgctggcacagattacct

SEQ ID NO: 68995 - DNA, 243 bp, Glycine max
  Clone ID: PAT_MRT3847_33315C.1
tagcaaacacgttcaactgtcgtctttgtaattcattcccatatcgtcaaaggtggggaaatttgcttccacggcagcttcttcagcagataggatttaggttgaagccaatacaaatatggccgatttggagaatttgctattggaggctgcggagagaactgtgacagctgggagatacgacactctcttcatcttcaaggagaagacatgaaggcgcctattcagatggtgggagtgatt

SEQ ID NO: 68996 - DNA, 790 bp, Glycine max
  unsure (1)..(790): unsure at all n locations
  Clone ID: PAT_MRT3847_33316C.1
cttgcatgcctgcagctgcctcttctacctgcgcccgaatgttcaggatattgttctgtttttaagttccttctccagctcataccacaattcaccttcagtgatgtcatttacaacagaagaggtaatgtgctcgttagcatcaatcagttgctcctcttcatctatggcatcaagtccagatcttccacttgagtagtttggttcatccttattcagcacaggcacactttcagtcaaaagagatttacttatatttttgggttccagagaagattcggccaagttatttaatttagattttggcaatggtccaatattctgacggtgtgaagccatagttttgacaacagcttcgacaacactttgtgcatgcttcatcacaacctgcgagtaataacaggatttctttaagataatatatgcattatatatgatagcgaaaggcccatgcataaaggagatatacatcataaaaacagcttgagcactaggattgctgcaagtgccgtgcatcagctatcccttatatatagttggacaactgctctgtaactgcaaactatggccagtaatctcccttacatccctgaagcgcacttcgtactttgaaagtcaaatagagacaaagaagcttgaaaattacctgngtgccactggtcacaggccgtagaatagcacctacaccagctaccttgtcttttgcactagatatgaattgtaagtgagatccaagtgcagttgctgagttgtggacggctttcagacctttgtatgctccgcctgatcc

SEQ ID NO: 68997 - DNA, 435 bp, Glycine max
  Clone ID: PAT_MRT3847_33317C.1
aaaatgcagttagaagtattcgaagtgtccataaattgaaatgagtatggcatgaaaacgattattattttgaagtattcaaagtgttttgattctttgacgtatttttggagtatcagaattgactcgcaggtcttgtcattttgaagtactcaaaatgcagttagaagtattctaagtgtacataaagtgtttgacaaatatgtgtgtggcaggagtatgccacgaacaattattattttgaagtattcaaagtgttttgaagtatgagagttgactcccagttcttgttattttgaagtattcaaaatgcaattagaagtattctaagtgtccataaagtgtctgataaatacacatctgacatgaatataccatgggcaaaattattattttgaattattcaaagtgttttgaagtatcagagttgactcc

SEQ ID NO: 68998 - DNA, 924 bp, Glycine max
  Clone ID: PAT_MRT3847_33318C.1
caaggtgattcaactatacccaattaactagccatggaaatgtttcccttgttgccttactttctcttatcatcccttgtttttcttctcacattcaagctattattttcccaaagaagaaaacacaaaaaccttccaccaggtccacctcctcttcccataatcggcaacctcaacctcctcgaacgccccctccaccgtttcttaacccgcacttcaaaaacatacggcgacatcttttctctctggttcggctcccgcctcgccgtcgtcgtctcgtcgccctccgccttccaagaatgtttcacgagaaacgacgtcgccttggcgaatcggcctcgctctctctcaggaaagcacatcttctacaactacaccaccgtgggatcctgctcctatggtgagcactggcgcaacctccgccgcattacctcccttgacgtcctctccacccaacgaatccactccttctctggaatccgaaaggacgaaacggagaggtttatacgtatgttggccaaggactcgtgcattgactatgcacacgtggagctgagttccatgttccatgacatgacctataacaacatgatgaggatgttatcagggaagaggtactatggtgatgagagtcagataaaggacgtggaagaggcgaaggagttcagagagacggtggaggagttgctgcaagttgcgggggtgtctaataaggcagattatttgccctttcttcggtggttcgattttcataacttggagaagaggctcaagagtattaataagaggtttgatacgtttttggataaactcattcacgagcaacgcagcaagaaggagagagagaacaccatgattgaccatcttttacatctgcaagagtctcagcctgagtattatactgatcagatcatcaaaggcctt

SEQ ID NO: 68999 - DNA, 462 bp, Glycine max
  Clone ID: PAT_MRT3847_33319C.1
caatcttgtgcttcaactacaaagcccttctttttttttttgtttggactacaaaccgttatttttaacaaatatcccatgcatgcgacaaaaaacgagtgttgccctctcctcaaagctcaggttactgctgcttcgagaaagtgctatgtataaatctcaccattgaagtttattccaacacccctaacgtaaaacggcaaagacttggagcccgactatcaatcttgccaattgggggacctagaaatggcatctgttatgaagggggccggtgtgcataattttttacacccggatgtttagagaggtgctaagcttctacctcacttacaaaaataaaggcctaggtagagacattttcttgaccgagggcactaaccactacccacattgtaatggattgtatcagtgacaagatcttcctctgatgtgacagaaagatctattgatacatgcttt

SEQ ID NO: 69000 - DNA, 1872 bp, Glycine max
  Clone ID: PAT_MRT3847_3331C.1
acgtaagctcggaatccgttccaggtattagtccaccctgctttttcgcttcccctccgccagctatcagtattggcgcagcgttccaatctttaacttgcacatcctggacttatgtcgctgttggtgagtttgatctatccggtagctatatccccaactttcgctgcagttggacgttccttctacagttctggcttcccattagttgggacgcgtagtgggatccgtgccgtacaaatattagtggttattgttttttctctttatcttcgtaaaatatctgttcttggacatcgcatatttctaatatatgcagttcctttgggtctggcaattacgtgggcttttgctttcttgctgactgaagctggagtttacaactacaaagggtgtgatataaatatacctacctcgaatatggtttcagagcactgcagaaagcatttctcaaggatgaagcactgtcgggttgatacttctcatgcattgaaatcatcttcatggtttaggtttccttatccattacaatggggtactcctgtctttcactggaaaatggctattgtaatgtgtgtggtttccttaatctcatctgtggattcggttggttcataccatgcttcttcattattggtagcatccagaccgccaactcctggagttcttagtcgaggaattggtttggaaggtctttctagtgtcttggctggtctctggggaactggaactggatctacaactttaactgaaaatgttcacacaattgctgtgactaaaatgggaagccgcaaggcagttcaactgggtgcatgctttctgatagtgttatctcttgtaggtaaggttggaggattcattgcttcaattcccaaagtcatggttgctggtctcctctgctttatgtgggcaatgctcacagcattaggattgtctaatctacgctatagtgaggctggaagctctcggaatatcatcatagttgggttatcattgtttttctctctttccatacctgcctactttcaacaatatggcatctctccaaattccaacttgtctgtgccaagttattttcagccctacattgtgacttctcacgggcctttccacagcaaatatggagggttgaactatgtcttgaacacacttttttcgctacacatggtgatagcgtttcttgtcgcttttatcctggataatactgtacctggcagtaagcaggaacgtggggtatatgtttggtccaaagctgaggttgctagaagagagcctgctgttgctaatgactatgaattgcccttgaaagttggtcggattttcagatgggtgaagtgggttggcctgtaaaactagggtttctttggctgacatattcactttgttaaatgctctcaactgctgagggggggggggggggtatgtcttgggtggattcaatgattgagagagtaataggtgatgttacagagttcattagtatcaattgggaatttgtagggcctatttgtgttgtaatttattagattaatctagtatttccaggtatatatatatatatttttttgcttgcttaaaggtgagacatttgacaaatcattttgacccccccctcgtttgaagtctggattcacatcttctggggcgcaatcatgagtagtaaaaagtgggtcatgttacagagatcatttgtgtaaattgaaaatccggaggggtctatttgtgttataatttattagattagcaatgtatttagttttgattaattcaaaatctccacatggaggtttttcttccttgctttaaggcggcctttgacaaatcttcgtggttatgtatatatatatatatacacatattatatacccgctc

SEQ ID NO: 69001 - DNA, 200 bp, Glycine max
  Clone ID: PAT_MRT3847_33320C.1
ctcgattacttaacgactacctcatcatacacatgggtggccaacgacacttgctgatgctcacgtaaacaagtacgatgaagcagacggcatgattcatcgatgccacaaaagccggacagcatttgagttgtaagcacggatttggggatagatgtcggtaaaccattgttagattaacggatctcaataaggattgg

SEQ ID NO: 69002 - DNA, 171 bp, Glycine max
  Clone ID: PAT_MRT3847_33321C.1
gcttcctcctcttacgagcctttcctttcagttcattgattcggtgggtagccgttgcagcgaggcggttctaaaccctgatcggtgccaacacacacaccgtgaacaatatgattgtctgggtggccgcaacaagggaacaaggcctttgagttttaagacgctgctgct

SEQ ID NO: 69003 - DNA, 254 bp, Glycine max
  Clone ID: PAT_MRT3847_33322C.1
gggaaacacggcttctccatttctaaaattcttaaacaaacacctttgtattacacggggggaaccaccctacttggtacatggcttgtcctaaaaagggggccccctggcccttgttttaaggcacgacccataaagcctttttgggggggccaaggggaataaaaacagggcgcagcaagggagagggggtaacaccagcttgacttaattggcaaacccgggacccgggggtcaccccggaaatcccggac

SEQ ID NO: 69004 - DNA, 352 bp, Glycine max
  Clone ID: PAT_MRT3847_33323C.1
aaaaagagaactccactataatttggttggtgattaacattgaaatttcctattcaaatttttgtaatgggttaccgtttaaacaaattgtggggggcaaaaataaccaatattttgacaggtgctgttggaccctgtaaccatttgccaagatcaagtaattggataagccgcgggactaaaaaggaaaattccaacatttttgtccaaaaatccctccatataatataatatttccaggggcagatttcattattacttgatttcatattcttggccttttccatccactttttttttttatccaagctttttaaggggcctttccatttacaacctggcttttgaaaaa

SEQ ID NO: 69005 - DNA, 379 bp, Glycine max
  Clone ID: PAT_MRT3847_33324C.1
gggccgagccacgcgtcagtacaacctgtcaggacaacagtccgggagtcgtcatttcaattttcaatgtggatattccactgtaaagcatcaagacttaactcgaaccctccccgtcacaaaagaatatcctctttgtctgattatcgtcgtcaagatgttggatctccgtctcgagcaatgctcgctcctgaagaaagttttggaatccgtcaaggagctcgataacacgtatacttcactgcaccccatgtgttcgactccaagcactggattctactacgtgaacctcattgctcaccacaatctatacgcaggtttctatcagtacgactgcgacagcaacatctccatgggcatgaatctcaacaagatggcc

SEQ ID NO: 69006 - DNA, 197 bp, Glycine max
  Clone ID: PAT_MRT3847_33325C.1
ggctcgaggccaattcggtccactctcctctgatattgcctttttcctctcctccaaagtcccctgcggttcggggggttattcttctaaccgcagtctgaagtttacaactcaaaacttcaccgtacgcatttcattcaccaatttcttccacactttcgtatcacatcaatcagccctatcccgtccttgcaggt

SEQ ID NO: 69007 - DNA, 406 bp, Glycine max
  Clone ID: PAT_MRT3847_33326C.1
aattcggctcgagtctctgtctcgtttacacatctctccaacctttcactatcgtttttcaggtttattcgaatccctctatcaaggtccttttcaaatggccaggggggaggtgggacagcaaacaccaacaacagttacagaaattgaaacaaccgaggcaagcaagacccagtaaacaaccccagtcactgaggcttctgcaacagaacaaccagcatctgtggttgctgcagcagaacaaccagtcgctgaggctcctgccccagaatcaaccaccgaagcaccaaaggatgaaaccaccgaggcaccaacagaaacagttgataaagcaactactgaagtagccctagaggagcctaaagaagttacaggtgagacctaggaggcggtggcaaaggataca

SEQ ID NO: 69008 - DNA, 442 bp, Glycine max
  Clone ID: PAT_MRT3847_33327C.1
agaaaaaccaatcattaaatttcttggattcattttcaggcaaaaactaacatcaacataaaatttatatagtggtataaggtatactcaaatggaattggacttcatggccataaatgtggtttaaagcttcctggtttagcaacagtcagcaccaaatttctggttcttgaacaacataacggcttccttcttaaacatggcatggttaaaaatcaagggtccatttctaaaaaaaccatttaaaaaaattataatatcctccatgtaaaaaaagcaactcttttctcactctatctggtatccaaggatagctgaccaagttcaataaggatgggttaataaatcccggccaaaaatggaatgaccatcaccttaatggccttcaaaaactaaaatttactgggggccacagaactattctaagtacaaccgattttgt

SEQ ID NO: 69009 - DNA, 743 bp, Glycine max
  Clone ID: PAT_MRT3847_33328C.1
ggcaaagtgaactgcaaacgagctgagcgtgaatagcagagcagcaagtaggacaaagacaagaacttactcattaggttcatacattgccgaggaagcctagcgaaaggttgaagaagaaaggaaatttcaaatggaaagaaaaaaactcgaggaagtgtgtcatttcagttttcaaattccaaccttgaggacaacgttgatttttaggaagggtgtattgttaggatataaggagaatggaaagttagttagcatagttagactaataataagttagttagttagaggggtttattagatataaataagggaagaaggataggagagattcagatttggataatttgttatggaccagcagctctttgtgaagggaaaattgttagcacccatgctactagttttagaggaaccagaacctctagataaagagggaaaaggcacagagaaagaaagacacaagaggagtaatgaatttgttagtgctgtctccctaaggcagacaacatcaagcaaggatattcctgattcgtggtgtctttgctgattcaccaatcttcctcagatgtagtcactgagacaagtcattgttcataaactgtggaggagatcaaggggtgtttgaaggcaataactattttggtgacctccagcaaaatgggatttcaaactttgttctttagaatgaagcacattgggcttatagcagcacaggagtataatttgggaatgctgatgct

SEQ ID NO: 69010 - DNA, 1762 bp, Glycine max
  Clone ID: PAT_MRT3847_33329C.1
cgacaatttaagataaagaaaacaagattgtttagtgtttgggttgtttcagactaggaccaaattattggatacaattttcattgttgatatttgttcttcttgtaattcaggagctacaagagtggatttgtgtggcatgatctgtgtgaagatgatataattctaccagctcatggaaatgagtatgttctcaagggttctgagctctttgacgaatcaaattcagatcgtttcagtcccattagcaatgttaaaacacaaagtgtgaagctgttgccggggccagcttcttctcggagcctggatgagggctcatcctcttctagcatgaatgggaaggagacaagaatctcccaagatgacgagctttcccaagatccacacactggttcctctgatgtttctccagagtctagagctgaaaagagtgatgctctaattcggcttgggattgacagagtacaaaatttataaaactgatggattggcagatgcttcaactcagacagaagaaaatgccagcagatccagagctcagaaaacttgcacaaggggtgtatcaacggaggatggtttgttagaatccgaatgtcatgaaatttgtcaagctgaagctccacgagtgaaagatactccacgaatctgtagggatgccgtgtctcatcctcagttaacttcaatttcatcagcaattgtaggacagaatgtgacattggattctctgattcgagctgatgccagtgaagtgaacagctttaggattctggaggaggagggcatgcatatgccgaccaacacgaggatgaaagcttcaaatttgctgatgcaactgatctcatgtggctcaatatcagtgaaaaaccatagttttggccttattccttcctataagcccaggttttccagttcaaaatttccttccccgctgttctcaacttcttttgtgttgggggagtttgattgcttagccgagaatccaaagctgatgagtctcagattggaagacaaagaatattttagtggaagcttagttgagactaaactgaaggagggagatggacacaatgttctgaaacgctcttcttcctacaatgatgagaggacatttaaagaccagaaaccacaagaagacaaagaggaatcatcctcaggacattcaaaatgcattcctcgatcaattaaggcttcattgaccaagcatccccgaagtgaatccatgagatctcctgtctctgacgtaccacggaactcatcagatagaattgatggctcaggcatatcccctgtaacatctaatggtagcagcaaaaggatcacagaacctttgacggggaaaaaacaatccaagaggatagactcatttaaagaagaggaggaggtgattaaaattgaagaaaggcttgcttcaggagctcgggttataatccaatccaaaccattttcagacacagcatctagcagctgttgaaaattcaagcttcagatgttagacacctgaaaaactgctggtttttcagctttagtttgaattcaacatgattgtatatatcttggtaggtccatgtgacatttccttaagcttacaaagtaaaattattttgagaatcgacacaatgcaaagggtgcagctactagagcaggtgtggtcccagtggtccatttccttgaatatattgtgctggatagagagggactgctatcctgaaatgaaatgattgcacattctgctgtaactcctgatgcaatatcttccttttgc

SEQ ID NO: 69011 - DNA, 461 bp, Glycine max
  unsure (1)..(461): unsure at all n locations
  Clone ID: PAT_MRT3847_3332C.1
ctccaaatcaataagccgccagctttcttcctgcttgaatactgaaaagctacatcgttcatgatagtagacaggctgctgctgcttttgctgctcctctagtggttgattctttccaaggttcatgataagcatgtcaagatgctccttctgtatgttgtagatgccggttatacttaaggtctttaagcaattgcttctttggcatagtgttttcacggctcctagaactccttcaggggttatgccagtgcatgctggtatatgcaactacactccaaacgaaaccagaaatgagacaacacttcaatcgtactatgttggcaacacgatccaaggtgaaggaggaaaccagggctactaattttgcttagttaaagaaaagtgttgaatcagaagagcaaaagagaaaaatctaaaatatgtatgggattggttntaccttggtaatgagaggattt

SEQ ID NO: 69012 - DNA, 1538 bp, Glycine max
  Clone ID: PAT_MRT3847_33330C.1
ctccaacgtgggttttgatttaatttcatcacgcgaccctcaatggacgaagaagcagagaccgagagagttccccatccacactctccaaaactagggtttcccctcccctccgccgccggtgacgcaaacctcctcacagccctcagcaccatcctcgtcgcgtcgattcaggacgccaaagaccgcatctcgcagatcgagtacgtcttctgctcccagctctaccctcacttaaaacccgacgacgcatcaaaacgctgctgcatcgaacagctcaaacgtgacgccgacgagaacgccaagcttctactacacgccgaggagaggcgaaacgccgcgtttttgaaatcggagagctgcgagggcgacaaggcgacgctgctggcgagaatcgccgagttggacgagacattgagattgaagacgcgggagattgaggaggcggagacgaagcggatcgaggaggaagggaagctactcgagcgcgtggaggcgctggcgtgtgagttaagggatgagaaggctaagaggaaccgcgtgacggaagcgtacaagaggcttaagtctcagcacgtttaccttcgaagaaaggttggtcttggtgaggagaatgtggttcaggaaaagaaattggagagtggaactgaattgggggtgcatcagagtccagtcgtagaacctggtcttgcatttgagaacccaaatatgactatggatgctggtgatagtgatacagctgaagggaggaacgaaatcccagaggaagattttggaggccttgaaacgaaaactccagatgtgtttgttgccacatgtgtcataaggagagtcaaggagaagccatctgagattgacagagggtgtaatttgagttctccatcttctggttttcgtgatgtcccaaaatgtccatccaatacaaaattagtctctgtatctagtacaaagcgccctgtatcttcctggaggcaaacccggtcccatcaaagtcgagcaggtcctgatccccatgatgattttcttgatacttctcttgagaatatcagagaaaatttcaataaggatttgaataaggaagaccaaccatgcctgattcagaaagacattagtgtggacagctcagatgatgaaacacaggatatgaatgccaaaagcagtcctcagaagaagcaaaagcaatcttctgttacagtggccaacacaagaagtttcaagtacgttgaaccagttaggaagaaagctgagcgcgaaaatttaaaaggagttgaatgcaaacaatgcaggaagttctatgatgctgttcttcctaatgctgctggcaaggatactgacagtaagcagaacttccgctgtgaacaccttgatggtgtttctcggcatcgatataggtatgttccgcccatgactcctgaaggattttggaatattgggtttgaatctgaaatgtaagaatatattatagagagattactatttgatttataaatggattctatatccaattaacaaatttgacaaacttttagttttttgtt

SEQ ID NO: 69013 - DNA, 1335 bp, Glycine max
  unsure (1)..(1335): unsure at all n locations
  Clone ID: PAT_MRT3847_33331C.1
ctgactcaaggagggtgccatattagtagagttattcgcatgtgactcatgccaagagagattactggtgagacaatggggggagggaacgcacatgaatccacgcatcattcatccaaatttctcaaactcaagctagcctttgggggatatgatagagaagaagacacagtgtgagaaaaaggaaaaaatggaaggtgaagaaactgagatgaaacaacaatccaggttcaaaaggatttgtgtgttctgtggcagcagccctgggaacaagagtagctataaggacgctgctattgagcttgggaaagagttggtgtcaagaaatattgatctggtttatggaggaggaagcattggtttgatggggttggtttcccaggctgtttatgaaggaggtcgccatgtaattggagttattcccaagacactgatgccaagagagattactggagagacagtgggggaagtgatggcagtagcagacatgcatcaaagaaaagcagagatggctgggcactctgatgcctttattgccttgcccggtggctatgggactctagaggagcttgtagaggtgataacttgggctcaccttggcatccatgagaaacctatgcgctctgatgctgtcattgcctaacccggttgctatgggacacttgaagaactccttgaggtgataacatgggctcaacttggcatccatgataaaccggtgggattgctgaatgttgatggatactacaatacctttttgtcttttattgacaaaccggtggaggaaggcttcatcagccccactgctcgccatataattgtatctgccccaacaccaaaagagcttgtcaaagagatggaggaatatgtcccaccgcgtggaggcgttggctcgttgcttggctggggaggctactgctactttaggcccccctttgcctttccctttggtgcttttgctgttgctggtgagggtagtctgcggagcggacttcaatctagctgtgaagccgaactcctcgtctcctctatcctaggtgaccacttttttctggagccagattctttgtgctctgtcctctccctgttagtgtaaaaaaagggcggccgctcgtacaacatggttccaccaatattccctcttaaaaagtcacgtatcattagacatcaattcaatattatgcactatctaatctacataaatttggcacattaaataaaaattacatcatttagatgattatgcattcttagntaaatacananaacacccatcatgcattattaaacctgttgatttaatttgatttgctcttcaaggacaatgtggtgtac

SEQ ID NO: 69014 - DNA, 565 bp, Glycine max
  Clone ID: PAT_MRT3847_33332C.1
ctttgatctattctattcttcaatatcttagggttccgacagattccccatcaattcaaccacttgccgtgttagttgatccattcttataaaaagatcaaagactcattatttatagccaaaggccttctgggtcgtcgtgaatctatcttgtgtttgagagattaagacaaaactttttgctttgcaaatggctgctgcaactgctgcaactgcttcttggatgcgattcaaaggcggcaaggaaaggaagctaaccaagatgaataaatccaggattaattgctcttattcttcttcttcttctgtgatagatccttacaagaccttaagaataaaacgaggtgcctctgaatctgagtaccatccagatgtgtgcagagggagcaattgtggggtgcagtttcacgaaatcaacgaggcttatgatgttgtgatgtccaaattgagaggagaatcaaatgaggcagaatcgtatgaggcttattatgatgctggaggcatcgatgagccactgaggggaatgaacgatccagattgggacatgtgggaagagtggatgggg

SEQ ID NO: 69015 - DNA, 257 bp, Glycine max
  unsure (1)..(257): unsure at all n locations
  Clone ID: PAT_MRT3847_33333C.1
gnnagtttcatttcaaaatcttgtnggactcgagactttatccctgtattattgtggaattcttttgttacnaagtngcattgtcaagatgcctanactgncctcattgaangctctcggncgcaagnggttccaatgggtaaantcagncncagggtgatganaaagtgggaatagtagatgacttcatctgtcgatggttgcaanctgtatgatgatctnnattcaanaggtttcatgcagcntcatcatntgat

SEQ ID NO: 69016 - DNA, 562 bp, Glycine max
  Clone ID: PAT_MRT3847_33334C.1
tcaaccacttgccgtgttagttgatccattcttataaaaagatcaaagactcattatttatagccaaaggccttctgggtcgtcgtgaatctatcttgtgtttgagagattaagacaaaactttttgctttgcaaatggctgctgcaactgctgcaactgcttcttggatgcgattcaaaggcggcaaggaaatgaagctaaccaagatgaataaatccaggattaattgctcttattcttcttcttcttctgtgatagatccttacaagaccttaagaataaaacgaggtgcctctgaatctgaggttaggaaggctttcagacagctcgctctgcagatgtgtgcagagggagcaattgtggggtgcagtttcacgaaatcaacgaggcttatgatgtgcgttatatataatataccctttttctctaaatttcagttgcatgaattattttcttttttgaactttatttaaaccctgcctaattggctaattgtgatttggagcacaggttgtgatgtccaaattgagaggagaatcaaatgaggcagaatcgtatgag

SEQ ID NO: 69017 - DNA, 1174 bp, Glycine max
  Clone ID: PAT_MRT3847_33335C.1
tacgaatactgggtctgcgtatgctttcctttgatctattctattcttcaatatcctagggttccgacagattccccatcaattcaaccacttgccgtgttagttgatccattcttataaaaagatcaaagactcattatttatagccaaaggccttctgggtcgtcgtgaatctatcttgtgtttgagagattaagacaaaactttttgctttgcaaatggctgctgcaactgctgcaactgcttcttggatgcgattcaaaggcggcaaggaaaggaagctaaccaagatgaataaatccaggattaattgctcttattcttcttcttcttctgtgatagatccttacaagaccttaagaataaaacgaggtgcctctgaatctgaggttaggaaggctttcagacagctcgctctgcagtaccatccagatgtgtgcagagggagcaattgtggggtgcagtttcacgaaatcaacgaggcttatgatgttgtgatgtccaaattgagaggagaatcaaatgaggcagaatcgtatgaggcttattatgatgctggaggcatcgatgagccactgaggggaatgaacgatccagattgggacatgtgggaggagtggatgggatgggaaggagcaggaatccgtgactactcgtctcatattaatccatacatttgagaaatttgttaataattatattcctagccttttcagtcatgattgtgcatcatgtccccacccaaggtggttgctttggtgttctttgtatatactccaagtgaggcctctctgcataattcaagctgaggaaatcactctttaatccttaaagacgaatcataaagcttccatgacatgagttccatctgatgatattattattaataataataataatgtttgaacattaaaataattagaaatgtattgcatataattgatgctatcttttactttttttttatttttatattagacacgcatttcaacatatatttactatatacttaaataattaagggggcccaactaaaatttaattaaaaaaaaaaggtttccccaacgaaaaggacaaatggctggcatgaacagtgtgcagtgtgctctatctctttccagtctccacataatctatgatgactatccaaattgaaagaaagggagtggtagag

SEQ ID NO: 69018 - DNA, 1961 bp, Glycine max
  unsure (1)..(1961): unsure at all n locations
  Clone ID: PAT_MRT3847_33336C.1
gttgaaaccgcgaaaattccctcttttctctctttctctttcacacgtctttgttttacaaagcggcttcgatttatttttgtgtttgtttcttcccctttccctcttctctgttttcaccgacccttgttttctatctgggtcggcaaatggttttcaattagtgtttctgtgttgtttcttcattgttgctttctctcgaagctagctcaacccgagatggatctgagagaaagtttggtacttcttgttgtggggtcgttcgtcgtgcaattttgttgcaatgccaatgcgaatttggtgttccccgttgtgcgcaaattcaaaggtcccgttgaaaacctcgctgctatcaaagctcatgatgctggtcgccgaggtagatttctctcggtcgttgatctcgctctcggtggcaatggccgtcctacttcaactgggctgtattataccaaaattgggcttggccaaatgactactatgtgcaagttgatacaggaagtgacactctgtgggtgaattgtgttggctgcacaacatgtcccaagaaaagtggtcttgggatggagttgaccctctatgaccctaactcatcaaaaacttcaaaggtggttccttgtgacgatgaattttgcacttccacatatgatggtccaatttctggctgcacaaaaggcatgtcctgcccatacagcataacttatggagatggaagtacgacctctgggtcctatattaaggatgatcttacatttgatcgagttgttggtgatctccgtactgtgcctgataataccagtgtgatttttgggtgtggttctaaacaatctgggacattgagttcaactactgatacatcccttgatggaataattggttttggacaagcaaattcttctgtgctttcacagcttgctgcagctggaaaggtgaaaaggatattttcacactgccttgacagcattagtggaggaggaatatttgccataggggaagtggtgcagccaaaagttaagacaactccattgttacaaggaatggcacactacaatgtggttttgaaggacatagaggttgctggggaccctatacagctccccacggatatatttgattctacaagtgggaggggaacaataatagatagtggtacaaccttggcttatcttccagtctcaatttatgaccagctattggagaagactttggctcagaggagtggaatggaattatatcttgttgaggatcagtttacttgtttccattattccgatgaaaaaagtcttgatgatgcatttccaactgtcaagtttacctttgaggaggggcttactctgacagcttatcctcacgattacctattcccgtttaaagtaaaaaaggctgacagcagtcaaatcacaggcacaaaaaaggaagacatgtggtgtattggctggcaaaaaaagtacggcacaaactaaggatggaaaggacctaattcttctcggagatttggtgctgacaaacaaattattcatatatgatcttgacaatatgagcattggatggactgattacaattgctcttccagcatcaaactgaaggataacaagactggaactgtatatacaaggggtgcacaggatctttcttcagcttctactgtgctaattggaaaaatattaacgttctttgtgttgcttattaccatgctaagcacttaactgaatgatattattgtatcgagagatggcatttaatttattttgttgtaacataattccttgaatggtgagcttgatgcgaataaattaattatttatcgtcgtgtttggagagggaaaaaaaaagaggggtggcctcttttttgttctaaaaaaaaaaaagagaggggtgnctttatatttccctccccccccccggagacatataattcttcctcggggggggggggggggggggggcgcccaaacaaaaa

SEQ ID NO: 69019 - DNA, 933 bp, Glycine max
  Clone ID: PAT_MRT3847_33337C.1
cacacgcataagcagagggaaaatttcagtttaggctacacagcctcaacatcattgacatttgataatggcaatgcctctgtttgcttctgtatgattcttctcagcagataatcgatcgcgctctgttgattcgatcgaaatcgaagaagaaggcgagcttcaaccctagcgtttgcacaatctattctgatgatatatttgcgttggtgtttgcctgaggttttggggcgattccaagtgatacatatcttgacttgattgtggtcgatactaactggacaggaataatgcatcgcaattcacttaaaagatcaaatgatagtacccggattatcatcacagctattatgggaattgcctttggattttttattggtatttcaatttcatctgtgcatttgactaagattagcttactttcatcacctgtagggaattcttttgatgtacctgtagctgaatctgaaatagacagattttcagctgaagtaaacagatctcctgctgttattgacgagtcttctggaaccaaaaatcttgaaaccctagggtcaattagattaccaaagatatttgttgcatcaaatcctcgtggagctgaatcactaccccctggaatcgttgtatcagaatcagatttttatttacgaagactatggggtgaacctagtgaggtctgattcatgcagttatttatgatgcgagaaattatttgtggcatgcatgttgaaagtctcatatatgatatagtactacaaatacaagacttaaacaaaccccaaagtgcctctctctctctcatttgcatgtgttgtctatttttgtgatggtgggtgtggcatgggaaaacagagagccatatgtagcaatgtttctttcattcttccatttaagttgcacatgacataggaagcaaatcataaccatgtc

SEQ ID NO: 69020 - DNA, 1479 bp, Glycine max
  Clone ID: PAT_MRT3847_33338C.1
aataagcattgcacttgttgaagttggaccatcaataacattggccagtgtatcagaggttttagcatttgcagttgggagttttatttccatgcctgcaattcgtgtgttctccatgtttgctgcattggctgttcttttggacttcctcctgcaagttaccgcttttgtagctctgatagttcttgactccttacgggcagaggataagagagttgattgttttccatgcataaaagtacatgcggaccctgatataggaactggacgaagaaaacctggtttgttggctcgatacatgaaggaggttcatgctcccattctgagtatttggggagtaaaaatagttgtcatagctatttttgtgggatttgcattggctagcattgcattgagcactagaattgaacctggtttagagcaagaaattgttcttccccgagattcatatcttcagggttatttcaataatgtttcagaatatcttagaattggacctcctgtgtattttgttgtgaaaaactataactacagctcagaatcaacgcatacaaatcagctttgctccattagccattgcaattcagactctcttttaaatgagattgctagagcagcccttgtaccagacacaagttatattgccaagccagctgcctcatggcttgatgattttcttgtgtgggtgtctccagaagcatttgggtgctgcaggaagtttacaaatgggagttattgccctcctgatgatcagcctccttgctgtgctcctggggaaagctcttgtgtttcagtaggaacatgtaaagattgcacaacgtgtttccgtcactcagatctccataatgatcgtccatctacaacacaatttagggagaaactgccatggtttcttagttctctgccatctgctgattgtgcaaaaggtggtcatggagcttacaccagcagtgttgaactgaaaggctatgacaacggcattattcaagcatcgtcattccgtacttatcataccccactcaacaagcaggttgactacgttaattctatgagggctgctcgagagttcagttcaagagtttctgattctttgaagattgagatttttccatattcagtgttttatatgttttttgagcaataccttcatatatggaagactgcactgatcaaccttgctatagctattggtgcagtatttattgtgtgcttgattttcacaagcagtttatggagctcatcaataattttgttggtgttggcaatgattgttgttgatcttatgggtttgatggccattctgaatatccagttgaatgcgctctcggtggtcaaccttgttatgtcagtgggcattgctgttgagttttgtgtgcatatgactcattctttcactgtagcaagtggagacagagatcaacgtgctaaggaagctttgggtacaatgggtgcttcggtgttcagtggtatcacactaac

SEQ ID NO: 69021 - DNA, 558 bp, Glycine max
  Clone ID: PAT_MRT3847_33339C.1
tgataatgtttccatgatagaaaaagaatttgagaatatgtacgtctgagaatcaacactgagaaagtcccatacttcaattgattccgaaactgttggtagttgcatgagtttctgaggaccaataagtcacgagtcaacaaaaatattggttgaatcattgaaaatcattagcatagacagaaaaagaactctacatgatacacacaaaaggaagtattatctcaaaataaaggtacactcatatccaatatctttcctgcacacttatatccaacatctatcctgctggtaacagaatattggtgatcccagttctatcacagtactaaaaccagataatttattcctctacagaaaaaacaaaaagttaattaagaatggaaatttaaaaatcattaaaaatgcatgcctaccaattagccaaagtaacaattaggtaagagaaaattatgtctcaagcaatagtgtataaacacaacagaaaaggacaagccaaacaaaatttatccaaaagtgtgttctaatgccatgcattgggtagtgggagggaggaac

SEQ ID NO: 69022 - DNA, 610 bp, Glycine max
  Clone ID: PAT_MRT3847_3333C.1
tttctactcatcgagtcttattaggtcccaagaagagaaaagttcatgagccctttttttgtcgaggagaacaaattcaagcagcgggtttggattcgtggaagtcgaccggaggaagaggagatatttcaatttacaatggctcagaaggttggtggatgctgggatggttactggttaacagagtctctgcttcacgatactgatacatttgctggtggattagcatattaaaaagacaccatttaatgcaggaatcaggttcatgatgaggtttcactatcaaaagcatggaaagatctgcatttctgcaatcactatcctaatctgtataatttgtgtacatatatatgtaagaaattcagctgttaatacgtgttgaataaggggatataattggttctcgctaatcaaatgtaaacattcttgtacattttactgaatatcttgcaggagctgccatacatacttttagagcttatgctcacatctgcatatttgtgcacaccatcttgtgagtgcatcttaatgcaccctctggttcatttatactatagaatggttcaaaatttgttgccccctggttaatcaaaaccgtacgttatatccc

SEQ ID NO: 69023 - DNA, 493 bp, Glycine max
  Clone ID: PAT_MRT3847_33340C.1
ccacgcgtccgctgcaacccaaatcttctgaaatcctaaactaagtttctgtgctaagtgctaaccctaattcgttatggcagatggagcggtagcaagagggaggtgacggacgcttttcggagacgcaaattgaggagtagccgcaaagcccagaaaacgccctgaaccctaattcgtggaagacatgggttcagcttctcttctaaatccttctcaaccaggcgttaagaagaatgacaagagcaaacagaaatcggtcgtttccaaaactgaagaggaagttatgtttaaagataaacaaaagaaacggagtttgtcggagagcagtgagcagactgctgctatgcgcaaaatgccaaaacgtgctgcggcatgtaaaaatttgaaggagaaatcctttttgatatatgagaagtcctgcctcattgaaacagagaaggatcatattgtagaagaagaaagtctggctgtgcgcatgacaggtggacag

SEQ ID NO: 69024 - DNA, 186 bp, Glycine max
  Clone ID: PAT_MRT3847_33341C.1
gaatgatcaccaatcggccccttgctggtgctgttccaagagggaaagcaccgaacgaagatctcatgtgtggagaaacatcttttgtatgatgaaaagctttgtgcagagcacgtgcagctagttgcttcggcgagatatgatgttggcgaggcctccaaaccagtttctgcttcaactgaaaag

SEQ ID NO: 69025 - DNA, 1651 bp, Glycine max
  Clone ID: PAT_MRT3847_33342C.1
cccgggttcgacggtggttactgttataggctaaggctaagccccttcaccgccactaacaaacttgctctgcttccactaatggctgctttctctgtgaccgccaccacttcaccttcttacatatcttgttgaacggtggttactgttataggctaaggctaagccccttcaccgccactaacaaacttgctctgcttccactaatggctgctttctctgtgaccgccaccacttcaccttcttcatgccttcttcaacgacatcgtttctccaccccttctttctatctacatggctcaccacggccacaaaataagaaaattgggattttcggaccattttccttcaatttgaggaggagaactttaatgtgtgcagtcaatcaagatgcaatggaagcgatgaaagacactggtgaaactgatagcctcataggtgtgctcggagaaacagattcacaccaagatggaagtagaactattcccaaggtgcggaatgaaagtattgaagcatggtcacaatttgctaaaagagcatctggtgaatgggatggatttggagcagacttcagtaatgaagggaaggcaattgaactgccggagtcggtagtgcctgaaacataccgggagtgggaggttaaagtatttgattggcagactcaatgccccactctcgctgaaccagaggaacgtgttcttcaatacaaatccattcagttacttccaactgtaggatgtgaggctgatgctgctacacggtacaacgtggatgagaggaaagtgggaggggaaaataatggacttactgcctttgcttaccaatccagtggttcttatgttgctatctggcaaaagaaggataacttattagagttggagtactgcttgatcaatcctcaagattgtgaatctcgggttaggattattcagcttattgatgtattaaataacacagagattgtgctaaagggtattaaagtgtatcgtgagcagtggtatgggccattcagaaatggtgatcaactaggaggttgtgctagccgggaatccgcatttgctcctactgcacccatgactgctccagatgttactgggatctggaagggatctaaagctgtcgccgcttccggcactcctaacactgtccgggagatatttcaagagctttttgatgacaaagtacagaactctgtcagagatggagataacaatatattgcttcctaagcagctgtggtgttctcttaaaaaaagcaaggaaggtgaaactctaagtgaagtgggatggcttttagatcatgggcaggcaatcacatcaagctgcttattctcaagcactgcaaagccacaggaaatatcaatagcattagaaactagagccttggaatatgcatagccttagtggcaatccattctgatccaaaaaaatttacattcctaaaaggtagtactatccaaggtgatttattcaagtacgaataatgttatttgcactacaaattttataactaagagagaaaaagagaaaagtatgagatgtaataaataatgtgttagagaaagataaagacaacaaatgctgtataaattgttatatattttttatcagtgtataaatatgacaattttgtagcaaaaaaaaaaaaaaaa

SEQ ID NO: 69026 - DNA, 226 bp, Glycine max
  Clone ID: PAT_MRT3847_33343C.1
gtcttgctgcaacggtaactgcggaagctcaagctcctgcaagaacggctacggatgctgaagcatcaacacgtacccaaacttcacctacactaacaccaccaacacctagaccttggtattggcaccggcacctgctaaagttcaattcgatgaaactgaaatgcccgctcccaatgataactatgaatgcaaaccaaaaccaaactgctcctgctacccctgc

SEQ ID NO: 69027 - DNA, 549 bp, Glycine max
  Clone ID: PAT_MRT3847_33344C.1
tcctctagagcggccgcttttttttttttttttttttttttttttgggatcacggatgttcctaatttattaaattagagacttatcttatttacaattaataaaaatcttaagagaatcacacattattagaaaatacactttcaacatcagttatttagaacattttacatcggttctaaaattgatattgaaagtaacgatgttgaatgcatgaatgttaacatcggttttggagaaccgatgttaacatacatatgacaacatcggttctctaaatatccgatattaaacacaatgagcatcagcaaaaaaaaatgtacgcatgatgaacgttgacatcggttttccagtaaaactgaagttaatatgttagtttaacattggttttctaaaaaatcgatgtcaacgttgatgatgcatacaattatttggtgtagttctttgtgtataacattggttaattataaataaccgatgttaatattcaaatattcacatcgattatttataattaactgatgttaatgtacaataagtgacatcggt

SEQ ID NO: 69028 - DNA, 278 bp, Glycine max
  unsure (1)..(278): unsure at all n locations
  Clone ID: PAT_MRT3847_33345C.1
aaagggtcaaaacaacacatgccatagtaacagattttttttcttttcttgtttttgacttgacattctatctgatgtttctttgtgtttttttttttttttgccactctaatataatttttccaagtacttgaggttgagattttgtggaacattagagtaatcatgatatctttgcctcggagaatttttaaatttgtagttatatttcccgggatgatatncttgtagctttttggttattgagagattacatcattgtcctagtattttgttta

SEQ ID NO: 69029 - DNA, 152 bp, Glycine max
  unsure (1)..(152): unsure at all n locations
  Clone ID: PAT_MRT3847_33346C.1
tgtcgagccgattcgggctcgagacgggcttgcgaagaagacgacaatagnggggaagaggaagttngaagaagttggcattgactgttcctgttcttcccctgacatacgtggttcaggttctggcacttgttgccagcatcttggtcgtg

SEQ ID NO: 69030 - DNA, 299 bp, Glycine max
  Clone ID: PAT_MRT3847_33347C.1
ctctctctgtgaacccagaggattccctctctttcggtctcgcgctctgctgacactatccatgagactgcacctgtggctccggtgctctcccatatccaacccccaacaccaccgtcggaggcgcgagtggcgccatgcgaggctaccggggaacacactcgcaggccttcctgtgcgcttcatacaacagccatctgcgagtacctccgacagggccttaaccatcgccgaccgtggtcgacactcgaggaccggtccgctgtctcaacgcccctgtccttgtgcgtatcgcccct

SEQ ID NO: 69031 - DNA, 1051 bp, Glycine max
  Clone ID: PAT_MRT3847_33348C.1
cggccctttgccctttctcttgagggctgtgggcgccggctctctgcaaaatgcaaatcgaaattcaattcttgctgccaaagccaccaaaacaaaactgagtcctttccttgtttggttctgcaaaagcaaaaatggaagcagagcatcatcaccagacctcaaacgctggtggtattattggaggcctttacgtcaaagttatgaccgacgatcaaatggaactgctcaggcaacagatttctgtctatgccaccatctgtcaacagctcgttgagatgcacaaggccgtaactatccaacaggacctcgcagggctgaggctgggtaatttgtactgtgatccgttgatggcgtgctctggacacaagataactgcgaggcagcgctggactccaacacctttgcagcttcaagtacttgagcgtatttttgacgagggaaatggtactccgagcaagcagaagatcaaggacataaccattgaacttggccaacatggccaaatatcagagacaaatgtttataactggttccagaacagaagagctcgttcaaagcggaagcaactcactcccgcactgaatgttgtggaaccagaagtggagacagaagttgaagttgagtctccaaaagagaaaaagactcgtgcagaaggctttcaggttcagccctatgagaaatcatcacctcataggatcaaggatatgtacatccagagtcctgacataggatttgaccaattgatgagtaaaatagaagttgcaggctgctacagttcttattttctttgagaaatctgtggaatggatgggttgaagacttaaattcttgattgcagcttggtggactcaagtttgttgatgatactgttagatatatgggctttttgtccaatatgttgatgaaccacacatgatgtggtataactatatattgtataaattgttttgcttaggtgctttgcagtgctaactgttgacaaccgttactgtgtgacatgttataattttacaagtttaaacatgattgcttctcctagctgctgggg

SEQ ID NO: 69032 - DNA, 512 bp, Glycine max
  Clone ID: PAT_MRT3847_33349C.1
attttatcatcaaaagaaagggtggaagcctttttcggtgtgagcggatacattcaaagctggtgcctttgatcatgacagcttcaacaacattattcactcccatcaccacctacttcgacgcgtttttgacttcaaaagcattaccttgtgtgttgatactggtggcaacgaattagcgttgctttgagaatgttgaaatccttcacaaatctgagtttatttttttggatctacgctatttttcggatctgaaattggtgagagattgtgtgtcgattctggatttgtaacttgaacaacgatggttggtgatcattcttgtttgagtcatcggggctgcaagaatgcatatgccatcgtgatgcgacaacacatgcatcgtcgatgctggtggtggtgcgaaccatcgtgaaaggctatttcggtgaggaaggacttgccattgtaggggaaaaatccccagtttccagtgaaagtttctagatggtggggcaggatgggaggaagaa

SEQ ID NO: 69033 - DNA, 395 bp, Glycine max
  Clone ID: PAT_MRT3847_3334C.1
gagagagagagagagagatctagtagagaggctagtaggtggtcctcgaacgaagatgttggcggtgttcagcgggcaggtggtggaggtgccggcggagctggtggcggcgggcagccggacgccgtcgcccaagacgaaggcgtcgcagctggtggggcgcttcctggccgcctccgagccggccgtgtccgtgcagctcggcgaccacggccacctcgcctactcccacaccaaccaggcgctcctccgccccaggtcgttcgcggccaaggacgaggtgttctgcctgttcgagggggtgctggacaacctgggtcgtctgagccagcagcacgggctgtcaagcaagggcgccaacgaggtgctcctcgtcatcgaggccctacagacgc

SEQ ID NO: 69034 - DNA, 546 bp, Glycine max
  Clone ID: PAT_MRT3847_33350C.1
ccaaaaaaggttctctttgttagaaaggaatttttttttttattatggaaaaatattttaaaaaaatggaccaccatttttaaaaaattaatttttgaaaaccaccccctaattaaataaacctggccaaacctttatttttaggattggaaaatttatagatatgggaattttttatggtttaaccatttaaattttttaggatccccaaaagggagaaaattttttatgaaataggggaaatatgatattcccctccttggaaaaaaaataaaaacatttctttacttttaagttaaaaaactccattttaatatccaaaatttatttatttttaaaattatagataaggagagctcccttggagggattctttgaatggctggcgggaaacccctggggggattcctaattcctcaaggagttgttttgggaaaagggggagggcttgccttcaaaattaataaaaaaattttcaactttggcagggtctatcattccccttttaccaatggacacaggctggactgaaaaacttaggggttt

SEQ ID NO: 69035 - DNA, 343 bp, Glycine max
  Clone ID: PAT_MRT3847_33351C.1
cctgtaacaggaagacagaaagagaccctggttactaaatatcaaccagaagagttttgtttacatggacccagattccaacagaagtctttaaaaaataaaattttccccagacatccgtcactccttgggttgaaaaaaaaaagggacccccttctagggcgacactaccccaaatgtttgtacggggggctgttacatacctaaaacgactttgaggaatatgattgctttctaacccattcatgatattcttgcagcatttgctgaagaagcagaggccccagctgggccaccaaaggttggataattatattcccaggaccctaatcggatgaggagg

SEQ ID NO: 69036 - DNA, 289 bp, Glycine max
  unsure (1)..(289): unsure at all n locations
  Clone ID: PAT_MRT3847_33352C.1
aattcggctcgagaccctccacaaattcccaaccctaaaaccacgccacgttttcactaccaccgccgncggcaccaccattgatttctcccccctgcgacgggaggcgcgccaccaaatacccctnttaatccaccccatgatgcccaaggcctacttccatttggaccaccccacaaaatggaacaacaaccactctttatccacaacggatcataacaaaaaggggttaccctctcttaaactcgccctccctcgaaaaaactccctccgcctcttcctcaaactc

SEQ ID NO: 69037 - DNA, 517 bp, Glycine max
  Clone ID: PAT_MRT3847_33353C.1
ttttttttttttgggataaatattttcgataaacatatataatagggggtgagaagtttaaaccacacttatattttttaaattaataattatacctatactttagcttttaaaaggaatgggattttattaaaacgtgattgacacgtaatgacaattattaagctgtaattttacaattgagaatttaattcaaatacattaatagtataaaaaatcatcaaattataaattatcaccctaagatcgtgtaaacctcatactaaaataaccgaaagaatagataacgatttaataaaagtgatttagtcatacgaataacataaaataatagtaatttaataattaggtttaatgtcacttttgatttattatgcattataattatttcactttaatatattactttaatatattaagctttaaagaattctttatgattttctatatttttgaaaatattattttgattattttaaaaatttttgttataaacgctaatattttatttaattgt

SEQ ID NO: 69038 - DNA, 278 bp, Glycine max
  Clone ID: PAT_MRT3847_33354C.1
tatcgagccgctcgagccgcgcgtcgctccgcaccagtttcaccgcacgaatatcttcgttgtactggacgcgattcgcgagaataaacttctgtacaaccatgtttggtttaaccatgaacttccttacaggtgatgagcttctctctaattctttcggttacaaggaaattgagattggaatgctgtgggaagttgaggggaagtgggttgttaaaggagcagttgatgtagacattggtgcaaacccttctgctgagggtgaaggagaaattaag

SEQ ID NO: 69039 - DNA, 381 bp, Glycine max
  Clone ID: PAT_MRT3847_33355C.1
tgggctgatttatgtgcgtgcatggtcgtgagaagtgatagacggggggagaacaccggggagaagacggccataccgcggacttggaagaaatatgggcggcccacggggagcgcgcgggacgaaccaccctgtcctacatttaattaaagaggaactacaaatatcggcgctcgtctgtgccaaaggctactgaagagccgactatctcttctcccgagttgcaaaggcctaacataatgagcgtccgcccctccagggataagtaccgcatccacgcacgacctcgcgcaattacgagctccttatgccgcatcaacgcgaaaggtaaaaacaaaatatagaataagcctgccccctctaaacaacgcgaacgtacca

SEQ ID NO: 69040 - DNA, 2460 bp, Glycine max
  unsure (1)..(2460): unsure at all n locations
  Clone ID: PAT_MRT3847_33356C.1
ctcgaggcaagtgttgaagataatactttagttagcaaggaagagccactagcatttgattctgatgaacgagatgccaagaggccaaagcttatgaatgcaggtggtccaagtcgcagattcactagaagcatgataaaaagaacgtgtaatgtcgtgtaaatagtgttataaccaccctgctgctactaacactatttacacgacattacacgttctttttatcatgtaaatagtgttagtagcagcagggtggttataagcaaattaaatgttaatatatgaaagcattaaccgcaaaccaatgacgtaggagaaaaatagctcaaaaaggttttgaccgtccacaagcatgtcatgatctttagtggatgatactaagggatcacccttgatctcttgcaaattgtgcatgaggattcaattgagagtggatgtgttttgctggaatatttagatgcttttctgtaatcaattcgaaaaaaatttgcacaattcattaaaagtagctgttctacattctcaaggaattgagtctctatatcatctttctgatcgatatctatccagaaccttaaattttgggaatgcaataatttgggtagtttatgttgagagttattgaccttttacactggtttacaacaatttttatctctgactggggtgttttctcatcgtaatgaattgagtatcgagaaatgccttcacatagaaaagttgctgttcgccagggttagtgcctcaacttcaaaacctggcgtctatatcggtagaggactgcgaatcaataaaggagatatttgcgggagatagttccaacaaccattgcacttcccaatttaaccaaattgcaactacgctatttaccagaattacagacagtgtgcaaaggaattttactctgtaactctgaggatatattttgcatcaaagattgtcccaattatgaaaaacccagaattggtggtcttgtatgattgatttctgttgattcagatcatggtacttattttatgtggcttactctttgtattcgtaattcttgtaaagaaaaaacaaaatcataatttgctttttgttatactaaattttttcttatgagtttcatctcacttgagctgcctcagcaggaaaatttatatgattgtggcctctttttgctccactatgtggaacgttttctggaagaagctccaatcaactttaaccctttcatgataacgaagtcctccatctttttgaacagcaattggttccctccactggaggtttctctgaaacgatctcatatacagagcgtaatttatgatatatttgaaaataattctttgcaagcacctcatactgattgccttgacaaagatcttcttttagaagaccctgccattattgtcaatcccaaactggaagaagattccctaaggggttgctgttatccaacagcttcacccataagagttgcatcatgtttgacaggacctggacttgtttccaaggacttagtggctgttgtaacttcacgttctgcttgtctgcagatgtcagcatgtcatcagaggggcttcctgtcaccattagaggaaattgaagagtctagtgaggagactgttttatcattagagagagaaaattctcaagttggtatattggcatatgatttcccagccacatatgtcagcaatgatcatggagcatcagaaacatttcaggttgggttctctgtaaattttgtggaagctgttgagagccattctcattcaagaacatctactggtgtatcctggatcccatcgaatacagctactcatgaagaccagcctcttgagaaaatcgaagagtccagcattcctgataagacagcgcttgagtatttatcaacctcagtctctggtgaggagcttacagactacactgttccggattctcctgtcgcaaatgatgttgatgtgagtgttgaatctcattcctcattccggaataatatgaattcagtaacccatcaaatatttgatctgactcacaatacgagtctcgaagataatactttagttagcaaggaagagtcactagcatttgaatctgatgaacgagatgccaagaggcctaagcttatgaatgcaggtggtccaagtcgtagattcactagaagcatggtaaaaaaagcatgtgtaatgtcttgtgaatagtgttagtagcagcagggtggctataagcaaattaaatgttaatatattaaagaaagcattaaccgcaaattaaaaaggttttggtcgtatcaacatagccccgaatggtggagcattttgtgtaaaccccttgcctcaccactgcaggatgacgtataaaaatgtataattttggtgggactgtttaaataatttagacaaagccgctcatatttcgtcattgtgtaaatttgaaagtatcgtttagccctttcnaaaaaaaaaaaaaaaa

SEQ ID NO: 69041 - DNA, 242 bp, Glycine max
  unsure (1)..(242): unsure at all n locations
  Clone ID: PAT_MRT3847_33357C.1
gnatgaaagtcacgtgatgtggagccgagtgaagagtgacaactcggcgaaagcttcgcggtgtgtccggtcgtacttgtatccttcaacacaccaaaataaccgacggttacaagaatattcctgcttccacttcatcaaatccanaccataatctgataatcataatcacaatcatgagagagaaataccacaacaacatctccantttctctctangcatcgttgcctannataattca

SEQ ID NO: 69042 - DNA, 182 bp, Glycine max
  Clone ID: PAT_MRT3847_33358C.1
gaagcaggagtgcgcctagagcaccatcaggaaaaattatcagcaaaagccctgttagagtattgagtaaagagtataaaccgcaccccagtgagatcacctgcaagaagtgtgagagccgaagctctggccaggttccttcaaagaaaagcatcaatcgaagcccggtcagagcacctagt

SEQ ID NO: 69043 - DNA, 760 bp, Glycine max
  unsure (1)..(760): unsure at all n locations
  Clone ID: PAT_MRT3847_33359C.1
aagtaaatgatgcagaagagcatcaatcagaggaaatttcttaatggagaagcaccacaccccaaaaagccttacagaattgagctagttggtgtggtttgtgatggctatcttgctgttgttagaggcattaggagagctattatgacagggagcgcagtgagagtgaattcacaactgaaatctcacaaaagatttgctaatgcatttccaagatattgcaaacttgttgataatgccagactctattgcacaaatgctgttggtggtccaccaaagcttatagggcggaaggatggtgatcacaatctactagtggatcgtgaagagatcaagtgcttggaaacgttaggcagtttgaatgctggagctgattccatctacgaacttcacaaagaacccagccccataatggaacctggttctgtttggaatgatatagttatgtcaccttcaaggccaagtgatcaaaaagaattgaaggaatctattcagaaaatagagaaatccatccgaaaaatgtaaccaatattgttgcctgatacgttggagcagtatttggctatctctggaatatatcgtgttttgttctatatctttaatcgtatgattttacttgacaaggaagattattgtgtcgttttcctggtatctatatgtaaagtgaaatgcttggaacatatattatgtaatatactcttgagttttgagcatattttttttttgtnnnnnnnnnnnnnnnnnnnnnnnnnnnnnnnnn

SEQ ID NO: 69044 - DNA, 351 bp, Glycine max
  Clone ID: PAT_MRT3847_3335C.1
ggccagggacgtttcaaaatcttaaattataataagtctcatcggaacagacgaaactatgcacaggagagatagtttcaaatgccacggtaagaacaacaactcatgaaaagacctattcatccttagccccgcttactgaatggaaatgaactaccacgctgttttagagtggatccctcaaaacgtctacgacttggcggacgtgagccaacgaacatgcccagttcatttttccatgcagttttctttggtgccaccaacgaggcgactgggtgggaaaatggcggaatagaggctttttgttagggatacgggctgggattggggttggcgggtgggctgggtgtg

SEQ ID NO: 69045 - DNA, 1872 bp, Glycine max
  Clone ID: PAT_MRT3847_33360C.1
atgctccttgctccggaactgcttcataagccttccaccgagaatctttaacaatggtatggagagttggtagccatttgtgattctgaaaaacccatcaagatggatcaagacagttctattgggaaagttttcaagttcacacatgttctggctgcctccttcgccggttcagttgccgccgccgccgcctcaagctaccggcgggcaccgtccacggtggtgggagagcagaagaaggttattcccgagctacgtaggacggaatctgggcgtctcggggagatggaaaagttctcccactatgttgcaaggcaaatggggtttgaagatgctgatgaggttccagagctatgcatattggcccaagagtatttgaaaaaatccaaagggtgcgatgaaagcatctttgaatatatttccagtggcaatgtggagaacactgattctctatatgcgaaattagttgaggagttagagagatgcatcctcagttatttagcatttcactggaaccaagctacatctgtcattagtcaggttttgggagtggagtctcatcagagtgcaaggatgagttggactatataaatactggagatgaatccatcttcgaacttcaaaaagaacccagccctattatggaacctggttctgttaagattgatatagttatgtcaccttcagggccaaatgataaaacagaattgaatgaatctatacagaaaaaagagaaatccattccgaaaaaagagacaaagaatgttggtggttctgttcatggggggtgtggtgggagctggaaaaagcactgttcttaaagacatccttaaaggatcattttggtctggagcagcttcaaatgctgtggtggttgagccggatgcttttaaggaaaatgacgtcatatatagagcccttagctccagaggtcaccatgatgacatgctccaaactgctgaattggtgcatcaatcttccactgatgctgcatcatctctgctagtgacagctttaaatgagggtcgagatgtgatcatggatggtaccttatcatgggaaccatttgtggagcagactattactatggcaagaaatgttcacaaacacaggtaccgaatgggggtaggatataaagtatctgaagatggtacaataattacagaagattactgggagcaagtaaatgacgcagaagaacatcttcaatcagaggaaaattgtaatggagaatcacgcacgcgaaaaccttacagaattgagctagttggtgtggtttgtgatggctatcttgctgttgttagaggcattaggagagctattatgacagggagggcagtgagggtgaattcacaattgaaatctcacaaaagatttgctaatgcatttccaagattttgcaaacttgttgatgatgccaggctctattgcacaaatgatgttggtggtccaccacagctcatatggcggaaggatggtgatcagaatcaaaatctgcctgatcgtgaagatatcaagtgcttggaaaggataggcagtgtgaatgctgaagctgattccatctacgaacttcacaaagaacccagccccataatggaacctggttctgtttggaatgatatagttatgtcaccttcaaggccaagtgatcagacaaaattgaaggaatctattcagaaaatagagaaatccatccgaaaaatgtaaccaatattgttgcctgcatatattatgtaacatactcttgagttttgagcatttttttttaatcattctctttcttgattttgcagttttcaacaagttattaaattcattgaaaaaatgtttgaaggatgtgttagatagtatattcctagcaatattacatgc

SEQ ID NO: 69046 - DNA, 886 bp, Glycine max
  unsure (1)..(886): unsure at all n locations
  Clone ID: PAT_MRT3847_33361C.1
agcgcttgatttcaagcagattacctctttcactgaaggtgtaatctccttgaaggcacatggatttcccagtggcactgacattgttattgaactcttgtttgctgaagatacagaggaacagggtacctcctggagaagagtaaatactgctccgcggttctcatccttattttcttttacagttgttatcccttcatctaaatcatgtttctctggaagtggcttgaattcaagccttcgacccattgggccttgctgatgacccagaggcttttgctgagcttaaggtgaaggaactcaagaacggacgattggccatgttctctatgtttggcttctttggttcaggccattgtcaccggaaagggtccattggagaacctcgccgatcaccttgctgaccctgtcaacaacaacgcctgggcctatgccaccaacttcgttcccggaaaggcaactaataatcacacaagaggaaagaancaatatgacaacaaaattcgaccattattatcactgtcatcgaattccaatttcttctcctcactaaaacaggtatgtatatgtaattgtaatttctgaattttgaagtttgatgcttgctcctgttaaaaggatgttaaaattagaccaaactttattaccagcaatagaatctcatatacgagaaagtactttgggttctcccatcttccttcactccagtggtagccagaattgtccctcccaggatagcagtgaaccatctcaatatttcccaagaatttccaaaccatcacgacccttctcaaacagatcacatcactacatgtaactgaggcaacaccccattttcttattactctttagctttgttgtttaattttatgatattcatctttct

SEQ ID NO: 69047 - DNA, 712 bp, Glycine max
  Clone ID: PAT_MRT3847_33362C.1
ccggaattcccgcgtcgacccacgcgtccgccaaaaaccctcctcactcactcttatccatcgatctggctccgtcaaccatggcatccttcgctgcccccaacaacattggcagcgccgtgctaccctctcgccagagaaaaccctctcgaccccctcccctcaaatgctcccttctcccttcttccaacaacaacgattcactctcaaacccttcttcctctcacactccgccgctcttcaaagccatcgccatctcctccgccgcctccatcctcttgcaatgcacccctctctcccccttcttccctaaccccctcaccaaactcggcggaggcggtaacaccggtggcggcggcggagatgatgggtggttcggcggccatggaggaggcggcggcggcggaaatggagggttctggtccagaatgttcgccgcggtcgccgacgaaaaccagcctcaggagtgggattcacacggtctacccgccaacatcgttgtccagttgaacaaaatgagtggcttcaagaagtacaaggtttcggacatctccttcttcgatcggaacaggaagacaaaagttggcaccgaggattcgttcttcgagatggtttctcttcggccgggcggggtttacaccaaagcgcagctccaaaaggagttggagactcttgcgacttctgggatgttcgagaagggtgatttggaagg

SEQ ID NO: 69048 - DNA, 433 bp, Glycine max
  Clone ID: PAT_MRT3847_33363C.1
atataaatgcggcacattggctaatgagacctgaaggccgaactggatataacaggcgatgcacctatatgagtacttagcgaatatacacatcacataaggtaacattagctagcatacctactgcatctcttgcattagtgcgattaagtgtgccttattgcgtatagcactgagtggactctaactataatgcatatagagacgaagtgctcctggatgtaaagcaactgatgcctgtgcttactgtatctgctagaagctaggtgaccttctatgagaaaagtaaatgagtctagatgaactgcatcaatggactatgcctgtcccaacggattttacttgaaaacctttgtgagcggaagcacattggcacctgtgggtcgagcataccttgagagagattgctcgaatacggatataccagcttctt

SEQ ID NO: 69049 - DNA, 918 bp, Glycine max
  Clone ID: PAT_MRT3847_33364C.1
ggtatctcaaaccaagtcacgccaaaaatgtgatagaggttcctatttccgagctcttaaatacatctattttgtgcctttatctatctgcttgtttgttgcttggacaacgtgataactttagtgtgggtcattctgttgtcgtggtctatgactcctggagtcctggttttttgatagcggggaatgcaaacctgcagcacttgtttcatttattttcatattgttcttaagaacctaagaagtgtggacttaccgccacttcccaagagaggtttggctttataacatcggattaggtagtcttgtgtacaacgttgagaagatttgtgatgaatctggtgaggatccggattgcagcaggtcggtgactgggaatagcattgctgatcacttagtctattatggcgtagacatgggatcagatgagcctagttcatgcagaattgttatggattctcatgttcagaatactagcatcagagattcaagaggaaacttaatcttgtccagagatcctgcaacccccctcatcaaattgggtggagagggtgacaatcaggaaaatcccattaatgttgattgaattggcattagatatctcttgcatgatatgttccagaggtttgctgtggggcattatacttcagatttattttttcttcatggtccatacagctgaacaattttattgaattggctagggctggaaggagtttgtatagtcttggactcgtgtatatatgttcatccttgtatatataattaataattatatattttttactgcataattaataattcttgatactttgtcaattgtataatttcactttcaaattctactgaattccactcctcatttgggtgataattctttttacccattgtcgtatccaaagtttaattttacgcaaa

SEQ ID NO: 69050 - DNA, 425 bp, Glycine max
  Clone ID: PAT_MRT3847_33365C.1
cgcgtagcctggctccggctcgagctggagatcatgaaaatgaacagttctatgggttatcttataccatgagcaggatctgaggctattacttctggctcaggttctaatataactggcatgattgtgggtgtgagtgttggggtggttggtgctgtcgtcttggctggacttttctttgtcctatgcatgaaaagatgaaggttggtgcatacgcaggcaaagacatgggttgctctatccatacatgatggaactacttctcattccatgggaagtaaatattctaatggctcaacactgagtgcttgttcaatctttgatttccgcgccccttttgtggcggttcatgaggctacaaataatttctatgaaagatgggttattgggataggtgggttcggaaaaatatacaacggagagtt

SEQ ID NO: 69051 - DNA, 178 bp, Glycine max
  Clone ID: PAT_MRT3847_33366C.1
aaggacaaggcaatttttattggtacattacggaaaatataatacattttatttataaacttccaacagagaatggtttcttacaaatgacaatatggactctctttttctttcttgacaaaataaatcttttacctttctattaactcaacaaacactgggtgggaatggacatttt

SEQ ID NO: 69052 - DNA, 303 bp, Glycine max
  Clone ID: PAT_MRT3847_33367C.1
ggctcgagctttaagatcttccatgcccgctactttgcgtaggcgaattatagcatgttgacccggggaacttgagactatcaattccctttcatcactgttcctatgccacatatgtctcatcgtgtgccatatacacgaatgctgagtggactgccgctgtctgaagccagacaactttcagaagaccgttgcatgcggacgagatcttgaattgctctactttacacctcaagaacatgcccaataggctccaaaaacgcttgtaccgagccacgcacactttcgatcagtatcccactg

SEQ ID NO: 69053 - DNA, 444 bp, Glycine max
  Clone ID: PAT_MRT3847_33368C.1
ggggaaaaaaaaccttggaatggaaacaattaaattttggggggggcttttttttttgggataaaaaccctggaactaaaaaaagggttaaaacttttttttaaaaacattttttgatttttttttaaaccaaccaacaaaaaacagccccttcccaaaaaaacaagcttttcttttttttccaggaacaacttgggaaaatttcctaattgaaaaaattttccagggggggaattttttacacatggggtcggttggttttattggaaaattttggggccaaggggaaatgggggggtttctttaaaagggccccgaatttcccccaaattttttaaaacaacttttagggggtttggcaacccacagttttttaggaaaaacaaaccaggggtttttttttcaccattgggttggagggggaggatttccctggtaagggtt

SEQ ID NO: 69054 - DNA, 175 bp, Glycine max
  Clone ID: PAT_MRT3847_33369C.1
ttttgtttgaggtgctattgctgagcatgtgtaaatagattgtatgtgtatactttcctattgcatgcaacaaaatactttgtatctgtaacggttattaatgaaactgaagcagcccgtgatgtctctagagatatggtatcgtagtcgaaagcacaatgagctagagtgatat

SEQ ID NO: 69055 - DNA, 266 bp, Glycine max
  Clone ID: PAT_MRT3847_3336C.1
aaacggcttttttttttgactttgcggcttttggcgtggtctgtcctctagtttttgagtttccccaaagctgctgtgattaaaaagtatgctacctatggaaagaggatttatgacgacttattattgtccacgcctggtccataacgaccggagccactgggctctgctcattttcctggtagcccaaaacaggtgacatttatgcctccttttaatacctcactttctacaccgtctgattccttcgcaatatgagacctgca

SEQ ID NO: 69056 - DNA, 169 bp, Glycine max
  Clone ID: PAT_MRT3847_33370C.1
gagaaaccctgaccgagacttgccagttggcatatgaatagcgtaaactatatgttgcattctgtctatgctggtatcagcggatcttgttggcttacatccatatgataagttgaactctgataccccaatctgctcggcattttctacctatgcgatgcaatgggca

SEQ ID NO: 69057 - DNA, 455 bp, Glycine max
  Clone ID: PAT_MRT3847_33371C.1
agctgatctaatttgcattggtttagatgaacatagtccgaggaacagcctccatatgtgtggcatggagttcctatctatgttggacggacttgacgaggaacggtgcggtgactaaccgcggcattattctgtcaagaggcttcgactaactgtgctacaagtgtacgctatgtagaagaactttgactgagataacacgcttgcacctgagacgaaagtgaagcttgcccaagaacttgggttgccacctacaccagtagccatttggatccaaaacctccgaacccgatggagaaccatactgttggagagagattatggagacctcatagccaatgatgacgctcttaagcttaactacggcactctcaatgaggacaacctaatcttattatagcacgtagaataatcatacaacatagtataatatgtagaatagttgattatgagtc

SEQ ID NO: 69058 - DNA, 267 bp, Glycine max
  Clone ID: PAT_MRT3847_33372C.1
gggggctatttaatggcaggcggattctataatacaataccagaacaaccccatttacacgcatagacacgaacgcaaagagtgggacaagaaaaaaataggggggattgcaacaagcaaaagatcctgtggcgaagttaaaaaagaacttggctatgccacaatggatggaaagcgcgagtatgagcaagctaaactgcgctgcgttctcaccgatgaaaaacagggactggccacagggaggcaagagctaaaagttttcggcca

SEQ ID NO: 69059 - DNA, 2171 bp, Glycine max
  Clone ID: PAT_MRT3847_33373C.1
gcaacaaatcaatctttatgtgatacaagcacctctctctcccctctcttttcctcaaaccaataaagccaatcaccccccacaccacacttcactctgtctccccaaaacaaaacaaaaaatggctgaaactctaaacctcccattgctactctcagtctgcatcatcttcacaaccctctctcttacaacctctcgcacgatcacaaccccatcacacaccaatgttctcgatgtctcttcttctctccaccaagcccaccaaatcctctccttcaacccacaacttctagaagagcaatcttcagaaacagaaactcccacttcaccatcttcttcttcttcttcattctctctccaactccacccaagagaaaccctcctcaacgagcaacaccccaactacaaaaccctagttctctcccgactcgcccgcgacacagcccgagttaactctctcaacaccaaactccagcttgccctctccagcctcaaccggtcggatctttacccgaccgaaacggaactgctccgacccgaagacctctcgacgccggtctcctccggcaccgcccagggcagcggcgagtacttctcacgcgtcggcgtggggcaaccctcgaagcccttctacatggtcctcgacaccggctccgacgtcaactggctccaatgcaaaccctgctccgattgctaccaacaatccgacccgattttcgacccgacagcgtcctcctcgtacaaccccttaacctgcgacgcacaacagtgtcaggacctcgaaatgtccgcttgcagaaacggtaaatgcctctaccaagtctcatacggtgatggctcattcactgtaggagaatacgtcaccgaaactgtgtcgttcggagccgggtcggttaatagggtcgcaatcggttgcgggcatgataatgagggtttattcgttgggtccgctgggcttcttgggcttggtggtgggcctttgtcattaacttcacaaatcaaagcgacgtcgttttcgtactgtttagtggatcgcgactcgggaaaatcgtccacgctcgagttcaactcacctcgacccggtgactcggtcgttgcaccgttgttgaagaatcagaaggtgaacactttctactacgtggagctcaccggagttagcgtcggcggggaaatcgtgaccgttccgccggagacttttgccgttgatcaatccggcgccggaggtgtgattgtggattctggaaccgcgataactcggttgcggactcaggcctacaactcggtgcgcgacgctttcaagaggaagacttcgaacctgcgtcccgcggagggggttgcgcttttcgacacgtgctacgacctgtcgtctctgcagagcgtgcgggtgccgacggtgtcgtttcacttcagcggcgacagggcgtgggcgctgccggcgaagaattacttgattccggtggacggtgccgggacttactgcttcgcgttcgcgccgacgacgtcgtctatgtcgattattgggaacgtgcagcagcaggggacacgtgtcagcttcgatctagcaaactctttggtgggattctcgcccaacaagtgctagattagatagatcttgtaatttacatatttaaccctgttgttgttattaataatttatggtgatatatagcggtaggtttctattattaaaagcctaatgggacccactcaattaagtttgagaaggttttgcttttgcccttggaccttggattgtgtgggatcgtatgcaattgaattgaatactctctcgatggcttcgaaatttgatcaagatgaggccatttaggttttaagaatggagttcatgctttcatactgctttctagtactactttctgctgttggtgtaaaggcttgcatgtaggccacatggcaaacaatgtgacaatcatatgagatcaatttcacatgggcttgtttgttgtggagattttattttggataaataaaaaataaaggagaattgagggaaaattgaaaaaaaaaaaaaaaaaaaaaaaaaaaaaaaaaaaaaaaaaaaaaaaaaaaaaaaaacaaaaaaaaaaaaaaaaaaaccggaaaaataaaaaaaaaaaaaatggggcggcccccccttttgggccctttcccccctgaatttatttttggcc

SEQ ID NO: 69060 - DNA, 735 bp, Glycine max
  unsure (1)..(735): unsure at all n locations
  Clone ID: PAT_MRT3847_33374C.1
agcttgcatgcctgcagagtttgtttctgaatgaatggagtttgtttactgtcctatacaagactgttttgcagtagtaggggatagatttgggatcaaaacatatgtatacttttcttcccatattttggttcccaatcagacttatgctgcctgattgaggaaccatttttatggtgacttatactgttttttttttttggaaggcacaaaatatatatattattaataatctgatcaaagtagtacaagtggtactgaaaaacagatatacaagcacccctggtgctgccctccaaaaaaaaaccccatgctaacccaataaaaaggcaagccgacttaggttaaccaaaggattccgatatattggaagaccagtggttaaaactaatatcgaagcctttctctttagatttacaccaagaccaaagaaggtacaaggcctcatccatgactttatatggatcaaaaggtttttcttgaaaaatcaaaagattcctgtgttgccatatagtactagttagggcaacccaccaagccctccatctactctgatttatgtttgccccaaaaccatcacaaaattgagcaaaatgatttaatggggaggcggaaagagatcctacagccttgatccatcccattgattcccaccacagctttgttgtcctttcacaattaanaaagagatgccccacattctcctgcccttggccacatagagggcacacagca

SEQ ID NO: 69061 - DNA, 647 bp, Glycine max
  Clone ID: PAT_MRT3847_33375C.1
tttttttttttttttttttttttttttttttttttttttttttttttttttttttttttttttttttttttttttttttttttttttttttaaaacccaaaaaaattttggggtttaaggtttcccaaaaaatcattggcccaaaagggggcaaaaaagggggggggcctccacataaaaaaaaaaaaattttttttcatcggcccgggggggccccccggaaattcggggcggggaccggggggggaaccaattttccttatgggggggcgaataaaagctgggggaaaaaaggggaaaaggtgtttccgggggaaaattggtttccggtaaaaattccccaaaaaaaaagggccggaagaaaaaagggaaaacccgggggggcctaaggggggggccaacccacattaaggggggggggcccacggcccgttttcaaagggggaaacctggggggcccggtggtttaaagaaaccgccaccccccggggggggggggtttgctttttgggcccccggggggttttttttttacccaggggaaggggcaaaagcggattgcccttaacccccgggccccgaaagaggagaaaaagggggcccaccctgggttgccccaacggggaaaaatacttggtggggggggg

SEQ ID NO: 69062 - DNA, 183 bp, Glycine max
  Clone ID: PAT_MRT3847_33376C.1
aaaaagtatgaggtgtgcactcacgccaagaaaaatgaatttgacaatgggaccggaatgaaagaagagagagctggaggcgaggtgcacttgtggggtgctggttcatcatccctaatcacctcacaaataccactcccggacctacccggtacattaccttaacttctgattattcttatt

SEQ ID NO: 69063 - DNA, 602 bp, Glycine max
  Clone ID: PAT_MRT3847_33377C.1
cggctcgaggcaccacactatggcttgcactgataaaacggccaccgtcaccgacgaagctagcggcggcggagccactacaatcttcgccgtgcaccccgacataatccaaacccacatcctcacgtgcctggacggtcgcgcactcgcctccgtcgccagcacgtgctctcaactccacgcgctctcagaccacgagcctctctgggagaacatttgccactccacgtggccctccacgaactcgccacgcgtccgccacgtcatatccacgttcccatgcgcgtctcgctcctttttctccgactcgtttccttccttcgccgcgcgcgaaggttcgaacatcgatcgcgcgccggagctgatttccgcggtggacatcttccaccggcggcgggtggtgctgtcgagagtggtggagacggagacggagtccggctggttccggtgctcgccgtttagaatcgatgttcttgatcagaaggaggcggtggcgacggcgatggagtatccactgagcgatggagcatgtgagattcccggtgaggatttgaggttgagttggatagtggtgaatccgaagggaaagcgtgcggtgaatg

SEQ ID NO: 69064 - DNA, 448 bp, Glycine max
  Clone ID: PAT_MRT3847_33378C.1
agataacactgagcatcgtctagctatctcgatcgaactgtccaaggtcctgtcactgtgaggtggtggtggttgtagatgggatcggttgtaggggggtttaactgtgttcgcaccgtgtggtgatttgaaagttcaatttcaaggtccgggtaagtgtacacacacacacacacacccacacacacaaatatgcattgagtgtctacaagtcataattatggtgtatgtggtaagtctaatgcacgtgggcagcccgttcacgaggtattattacatttaatatgtttgaaattagcctccccgtgcgccagcctaacatcccagagtgggatggggccaagttgcacatgaagcgtatttacgagcacaccgttagttgtacgtgtactggtttacgtaacggggtggtacgctttactgtggtgcgttaccggtaataagtagt

SEQ ID NO: 69065 - DNA, 454 bp, Glycine max
  Clone ID: PAT_MRT3847_33379C.1
aggaacccttttttgttgagtataaggaatgtagggtttcatgtgaatcatgtccatgctacaaagctgtcattgatcagtcatccgatctaataaagacaaagaggatcctaatctgagaaattcttaaccaatttcacaatgaatatcataccctttcttgatttaacaagggtacaacttacaaaccagagcaataaagaacactggccaatatgctccaaagaaaataaagaaaaaactcttaaacaatgacaaatgatgattacctcaaacttaaagcaagaaggtaaagggtggggagttactatttctaagttcctagctataataatgggggcttgggcctttagtgataatgctttaaaaaactcaaatggcagccttgtctcaattgcatatgacatccgagtaaaaggctatggttcttctttcacagttttgtacgcttaat

SEQ ID NO: 69066 - DNA, 288 bp, Glycine max
  Clone ID: PAT_MRT3847_3337C.1
gagccacaatacatgcggagggctataatcggactgatcaacctgcaccacaggccatatacgtacactccacatagattacgttgctgaattcatattccatcaagactcggacgcactggccactgacagagcgtattacagcggtaacgtattggtctccgcatatgctccatcgctgcgggtctcgaactcgctgcacaggtatgcatgctatggatcagtggcgaaacctcactcgttgaccttcgcgggtctcatcatcgcatagcctgcatgggccactac

SEQ ID NO: 69067 - DNA, 874 bp, Glycine max
  Clone ID: PAT_MRT3847_33380C.1
atgttggtcaagtgagaaatggttattattttcattagaagatttctctagttaatatacatttttcacttgattcatatatttgagcatatatatctcagccacaataaattgttctagaaatcgaatgtgagggtagagaccacaatggggctccgaatcacatgcttcaagtccgtccaagtgagatacccaaaagcgacattcttctctttcttctttcttggaccttcaattctcaacttgtaactctgcttctcattcttctccttgaacaccaatttcttggggataacgctcacgtggtaccctttgacgggtgtaacgctggcaacatagattgtctgtccctccccaacattggtcacggttctctcaaattcttgtgttgtacttgaactgttgctcttgaagaaagcaataaaagaagggtagttgaggtccaaagagggtttcgaacaatcattggaagaggttcctgtgataacggtgatgttcttttgggtgtagccaagtgcacagagaagattaacataatcttgaactcccacatcgtaaacaagtccagggtcaagggctctatttgggttgacatgaccagctcccatggctaaaggagtggctggtttgtaatcatcaccaacgtctttgatgagtcccatggtgttgtcaaacatgtccggggggggcataatggctgtcctaatggctgcaacgctccaatcagggtgtgctccgcgggacggtgctgccaccccccccccctgggggcctgccctgggtgtgccacttaacaaattgaagttgctgaaaatattttgggacccaaacacttccaccggaacattttgaggccatgcagctaagattgatg

SEQ ID NO: 69068 - DNA, 450 bp, Glycine max
  Clone ID: PAT_MRT3847_33381C.1
ggaggttaggagtgttttataattcgcacagtggactcacaatgtgagcaatgctatactgaaattatgttcagaagaatgagaatggaatctctaattctaacaaattgttcagaaattcaaatatattttcaagaaccaactaaatgaaaaatttaaggttttaggctgattggctgttgatttatgctttataatcaaatattgaacattttatctcccagttggctacaaaaggtctatggtttagtcactatattatggcagcattaattctaatacttctgttacagaaacatgctttgatttaactaccaaattgaaaaacattgtcggattttaaattcaatgattctttacagtggctgctattaacttatcatagctcctttgggttgagctttgttttcgagcatgataattttagtttatgatgctgttggagtggtg

SEQ ID NO: 69069 - DNA, 354 bp, Glycine max
  Clone ID: PAT_MRT3847_33382C.1
ggggtaaaattattggaaaatatgaattttcatcaacaaataatttataaagttataacatttatgattttataaggcaagtcagtaataaaaatttttttttttttgcccccggtatctttttatctctttatgaaggatagggcttcctactaaccttttttcaaaagcccaccaatattccccaatcacattttcattttcaaccccaccaacaaccaaaacccaccaccatgcatggtgtttggaacaggcaaacttttttttcacctaatttaaaaaaacaggcaagctacaaaattgaaattgtttgaatacaactttaaaatagaaatttacaacgaataaaaacca

SEQ ID NO: 69070 - DNA, 405 bp, Glycine max
  Clone ID: PAT_MRT3847_33383C.1
tataatttttaacatttttaaaatttattctttcaaaccacaggagccgggaactgcctatagttattatgatccacaacctagacacctctagtccaccctcatgcataaacaaacccctaaaattctgggatccaccgcaaggacagcctactcaggggggccactccacacacttcttaactcggagagcctgacccaaagattcacgaatataagaagaaccataaaagtttataaaaaaaccttgcacgaacccctttttttccacacacctaaacatatctcaatggccttaaacttaatttgaatcaacagaaacttgatcgggaccggggtccacggaggaaacaggaggtgtgggccgcatacggtttttaaccaccagaggggccgaaaacgctt

SEQ ID NO: 69071 - DNA, 940 bp, Glycine max
  Clone ID: PAT_MRT3847_33384C.1
acggctgcgagaagacgacggaggggggagtgagcgtcaacaatggcttcttcgtcttcagcgtcgggttcgggttcagcttcggcggtgacggagcgaagaggaataccaggggctcagttcgtggaggatgtccaaacttaccttactcaatcgggtctcgatgttggttcagccctcgcttttctccaagaaagacttcagcaatacaaggtagtagaaatgaagcttcttgctcagcaaagagatcttcaggcaaagataccagatattgaaaagtgcctagatgttgttgctacattgaaagctaagaagggtactggtgaggaacttattgctgattttgaggtatcagaaggcatctattcacgagcacgcatagaagaaaccaattccgtgtgtttatggctgggagctaatgttatgctggaatattcattagaagaggctactggtcttctacagaagaacctggataatgctagagccagtttggaagttgttattgctaatttacagtttgtgagggaccaggtgacaattactcaggttacaattgctcgtgtgtataattgggatgttcatcaacggagagttcaacatgctgttgctacaactgctcaagactagttaaaaaggagagtttattcaaacctagatccaaaattgaaaactcataccttttgcttagagtatgatttttatctcttgccaatttctgatttagataaattgtgggttgctcccttaatctagttccggttttaccacagtagacactagtaggagctttttcgtatatttatgttattattgtcttggtctcttgtaaaatgcccatatgttaggttgatgggaaagttttggtttggtgtgatcatatggatatattctactctgcaacattttttacttgtttaagttttctgttgctgttgct

SEQ ID NO: 69072 - DNA, 175 bp, Glycine max
  Clone ID: PAT_MRT3847_33385C.1
cttcgatatcgagggtcgtacctgcgacgtagtagaagcctatactttcacgactggctagcactgccatgctaagtgtcactttgctgtgattgatatatacacatgctagaagcttgaagatgatgtgcgctgttgacacaactgcgattgttggcacgtgaatcgttctgat

SEQ ID NO: 69073 - DNA, 478 bp, Glycine max
  Clone ID: PAT_MRT3847_33386C.1
gcacgccgtgaatctctttccatgacaagggccctgaatgccatagcttatgtggcacttatattccttgcatttgcaatgagctgcagcacttcaactcgaatcctggatgaagtagaaagaccagaagcagaagaagctaacaatgctgcagaatcccatgttgctgaccaacaccacacgctctcgtttttcatgcacgacattctgggaggctccaaccccacagcccgagcggtgaccggcgtggtcaccaatccggctctgaacgctcaagtggcattcgccaagcccaacggagcaaaccttcctctgaacaacggcgtcccacagaacaacaacaacggcggaattctcaacaacacaaccttcctttcctcaccggcctcggcggcaccacggccaacgtcttcaacaacggcggcaccggtttcccggtcaccaacaccaaccagctcccggcgggaatgacgctgca

SEQ ID NO: 69074 - DNA, 1526 bp, Glycine max
  Clone ID: PAT_MRT3847_33387C.1
ccttgtgaagttgaagggacacctcacccacccgaaacaccatccattctcagccaccaccctctctctcaaacccttagtttccattctcaagagtgaagctcttccaactatatatacatacacatatctcttcagaacccactccctcacttctggaatctagccataaaaatcataaatttccctctttcacccgaatctctataccgtatccatctgaatccaacaaattttcccacaaatagaaagttagaagccccccaaaaacacaaacccccttttaagttttaatttccccaacgttgttgtaccatgtcgtcatctctgatcgcgaatccaactgcggatcggtcgcgtgactctcaccgcacaaagaagaagaagaaatcccttaagcaacaccaactacagcatgagcagagccacgccaaatggaaatcccacgcgcaacaacagctatactcctccaagctccaccatgctctggcgcgtgtcaacatctccggcgacgcgccgcgccgcggcagggcggtgcgcgaggcggccgacagggttctcgccgtcgccgcgaaggggagaacgcggtggagccgcgccatcctgactaaccggctcaagctgaagttcaggaagccgattcacacgaagcgaacggttgttgttgggccgggccggcccaagaaggcccggttcagcgttctccggctcaaggggaaaaccctgcccgcggtccagaggaaggttagggttctgggccggttggttcccggttgcagaaaagaaccgcttcccgtgattctcgaagaggccatcgattacatacccgcgctcgagatgcaggttcgcgccatgcaagctctcgctgacttactcttaggctcttcctccgcctcaacctccgccgccgcgccgccaagttgatctcactttccggcgaatatgccacgtgtcatatattttttttcctcttcttgatttttgttattatttgcctcgttttcactttcgtttatgttaattgtccagtacatacatattatatcttcttctatttcctcttcttttttttaaatttacctttcgagcaaaacaatctcatacttaattagcttggaatgtttatccatattatatcttcttctattttctctttttttttttttcttcttcaaatttaccttttgagcaaaacaatctcataattaattagcttggagcatttatcagaatattgccttttaatagttataacacttagcctcccccgtgtgagttcatctgcccccagccgctgctccttttcctcttcttcccgtcgtttcctcaggtaatcaatccgcctgtagggctccctgtgagactttgagagcatatatatgtattagtagttccgaaaacagcaaattagaattcaatcaccaagtggatatctcgattccgaggctggccgcctctacgtttcgagatatccacttggtgattgaatccgaggcttggcacctttagaactcgagccgaatgcc

SEQ ID NO: 69075 - DNA, 104 bp, Glycine max
  Clone ID: PAT_MRT3847_33388C.1
ctagagcaggtatttactctgttctgcatgttggttctggcagcgactcctccccgagagaagattattcaatatctttggttggaggaaatccggtatcttag

SEQ ID NO: 69076 - DNA, 640 bp, Glycine max
  unsure (1)..(640): unsure at all n locations
  Clone ID: PAT_MRT3847_33389C.1
cagcaacagtataactctgttttgtagcaaatgctaaatggtgagtctctattgacatagtgacgatttaggtgtcagatgccttgctagggtcaatggatatgctattcaagttactcaaataaaatttctgtaaaatcttagaaataactaccaacaaaagggatgaaaataaagtagctccttgcactataaacctaaaatattgacaggaaggactatgctgattacattctgtctcccagtgataatgagcggccaaaacattagtcctatccagtgttatcaatggtggatggcagaatatggtggaaggccaaaactctgacatataaaccattgcagcctatagcactgccatagcgggcctcccatcacaaattgcctatcgcagttgacaaaaaacccaccatgccattccgccatggcggtcatagcgccaccatttaacaacaccggttcttctatcaatttcacaggaggagatttctaactgaacttggtcacccaatccaacaaagaagttaccaaaccacagtatgacctggattnnngaannagctcctcaatatctgaaccgctnnctaatactctcaattctatgtggannnnntcgancnngaactnnnnnnncagntnc

SEQ ID NO: 69077 - DNA, 553 bp, Glycine max
  Clone ID: PAT_MRT3847_3338C.1
cccccccccccccccccccccccccccccctccccttctttttttttttttttttttttttttttttctttttttttttttttttcacaaggggaaaactttaaattccagggcataaaaaggacccccaaaaccgggaagggggcccaaaaaaaccccaaatttttcccaaacccccccccccgggatactaaaaaaaaaaaaccaagcctttggaattggattcaaaacccacccccccaccccaaaaaaaacaaattttttgctccccgggggacccccaaaaaggaaaggaaaagggtgattttgccaaaaaaaaaaggggcgggggccccaagggccccataaaaagggaaccccttgaccagggtgccagggcccaaacccatttgccccgaaaaaatcataccccccttggccccataaaaagcgggggcaggaggcccaaaagggaaaaacctctgcctcccccccggggggatgaaagaaaaggggggggggaacaaccctgggccaaggaagcaaaaacccttgcccttctgggacccccaaa

SEQ ID NO: 69078 - DNA, 641 bp, Glycine max
  Clone ID: PAT_MRT3847_33390C.1
ttattccaattgccgtctaatctactggccagctaagtacatcctgatatggagaaagaagaaagtgaagaggaagatgacaacaattcaaaaggagtatcaaaaaggcaattcataaaggcttagggaaggcaaagcctttcttccaggttcaattcacgaagctgcacctgtactggtgattcaactaactaaggttttaaaaaacagtctgtggccgtgatttcggttgtaacaccaagatttttgtggtgtccatgatcacaacatgaccacaatcgtagccgtatcaatgacacatgttcacaataacaaagaacactacaaaaccacgtccacaatttaaaaccttgcagctagctaagccagacatgcacagactgtagtttcatcttaaaatcaatgtttgtgtttgttgctatgtagctcatttactgttctgtttctttttccacctattcttgtcacaattgtcagtttgaatggttgactcaggtagggaggtagtgagtgagtgatttgagataaatgtaatattttcctggtgttttttgttggaagccataaataaagaggtgaactctttgttggcatcaagaaagaaaaatgaatattgtcattatttactttgttctgtctaa

SEQ ID NO: 69079 - DNA, 336 bp, Glycine max
  Clone ID: PAT_MRT3847_33391C.1
gaccagagccagcgcggatagcctctaactttactgtatgaatgctatagacgtagcaaaaataagaaagcaactgggctggggtcactcgctgattgcacgtaccgacaatacgcacgaacttgtatgtattgtggcattgacgagcatatacgctcccgaagcgatgaaaatatgatgttgtgtaacagagacatgaggtgatcggaatacttagatatatgtacgatctgccctgttccttatcaagctaatagatgagagaggattttggacaacacaatagcccgcaacgtccatagggcacactgtagtgtcagagatcctagcatgctt

SEQ ID NO: 69080 - DNA, 202 bp, Glycine max
  Clone ID: PAT_MRT3847_33392C.1
tcgtgtccgatggtacgcagagacaaaatttggtcattctgcacccttatgtcatccagaggcggcgggcccgatgaagcgcggagataccttacggttatcagcaccgttttgtcatccagaggcgtcgggcatgatgtcaagcagcggccaatgtggtcattctgcacctttcgtcaatcgcgaccgacaagcccgatga

SEQ ID NO: 69081 - DNA, 392 bp, Glycine max
  Clone ID: PAT_MRT3847_33393C.1
cgagtcgaggctatgttagttttgctggaaatggaattgaacttaggcgtggttactctccatcaaattcaccaaaaccaacccaggatgaactaaggcagcagaaggaggaggatatggatgattactgttcgcaggtccctgttcgacacttggtatttatggttcatgggattggtcaaagattggaaaagtccaatttggttgatgatgtgggcaatttccggcatattacagcaagtcttgcagagcagcaccttactccacatcaacgtggcactcaaagggtcctctttatcccatgccagtggagaagaggtttgaagctgagtggtgaaactgctgttgaaaagataactttggatggagtgcgaggattacgtgtcacgctg

SEQ ID NO: 69082 - DNA, 425 bp, Glycine max
  Clone ID: PAT_MRT3847_33394C.1
atgtggtttaactttgcacatttaaggacgttgttccctttcccttttgtgataaaacataccaaactcttattgtatctaccttctacttctcgcaaacgttctttgccttggtttctcagaaactaaacacggtgtcatgttgatgtttacttgactatgctaatggacttcacttgagtttgaatatcctagtcattggtggctatacttttgtgaattgtaactcaattgatgtataagatcgctaagcaaatcattgatccttgcctttcctacttacataacgtcaggaggaggacagtaagtagcttatccgatgtttgaacttgcatgctttaatctattgatagtgcgaagcttacctgtactgactgcatgctcatgtaccttaatcattaatgcatactgacacaaatttgtga

SEQ ID NO: 69083 - DNA, 734 bp, Glycine max
  Clone ID: PAT_MRT3847_33395C.1
gtgtgaggtttctacccgaagctgttgccttctcttcgttgcccgcccaccatggccaccaaccattcaaagtccgtctttgattttactgtcaaggatgctaaaggcgatgatgtggatcttgctacttacaagggaaaagtcttgctgattgttaatgttgcttccaaatgtggcatgaccaactcaaattatgtggagttgaatcaactattcgagaaatacaaagacaaagggctggagattctggcatttccatgtaatcaatttggtgaggaggaacccggaagcaatgatcaaattcaggagtttgtctgcactcgctttaaatctgaatttcccatctttgataagattgaagtgaatggagacagtgcttgtcctttgtataagttcttaaagtcaggcaagtggggaatctttggggatgatattcagtggaactttgccaaattcttgattgacaaggatgggcaagtggtagatcgctattatcccaccacatctcctcttagccttgagcgagacatccgtaagttaattggtattgtctgaatgcaaggattcagttgggaagagaggatgttgtgaatgccaaagcaccttttcttgactttattatgttcacttttgtgaagtatgatgttgtgcttaaaggttttgactaaactgaacaagatctgctcattggcatggacaacatttacatgatgcctggttttattgggattatg

SEQ ID NO: 69084 - DNA, 280 bp, Glycine max
  unsure (1)..(280): unsure at all n locations
  Clone ID: PAT_MRT3847_33396C.1
ttggtttgtntggggtcctgtggctgcacatatccaaccttaacttcggacgtcgaatctttgctggtcattngttgtttttaattctttcanaaatttcnaaacacnacccaaaatctctngggaatngccagnttcagtgntactcctaggcagcagatttngggttcttctgacccaanatncannttncccaantggnctgttgaatttttatnggggttntanattccntgccngtngattttaangtcatanccngggtccccttctggataca

SEQ ID NO: 69085 - DNA, 835 bp, Glycine max
  unsure (1)..(835): unsure at all n locations
  Clone ID: PAT_MRT3847_33397C.1
gggccggaaaccccttcgacccacgcgtccggctgttgccttctcttcgttgcccgcccaccatggccaccaaccattcaaagtccgtctttgattttactgtcaaggatgctaaaggcgatgatgtggatcttgctacttacaagggaaaagtcttgctgattgttaatgttgcttccaaatgtggcatgaccaactcaaattatgtggagttgaatcaactattcgagaaatacaaagacaaaggttgactctttatgctttgggcttgcgttattatacttatcttacctcaaaggggagaaacctggttttggagtttgatattgtgatgttttactctgtgaagcacggtatttctttttattattttccaaaagcttgattttgattaatacaaatgagtgagtttaatggcttcattagggctggagattctggcatttccatgtaatcaatttggtgaggaggaacccggaagcaatgatcaaattcaggagtttgtctgcactcgctttaaatctgaatttcccatctttgataagattgaagtgaatggagacagtgcttgtcctttgtataagttcttaaagtcaggcaagtggggaatctttggggatgatattcagtggaactttgccaaattcttgattgacaaggatgggcaagtggtagatcgctattatcccaccacatctcctcttagccttgagcgagacatccgtaagttaattggtattgtctgaatgcaaggattcagttgggaagagaggatgttgtgaatgccaaagcaccttttcttgactntattatgttcacttttgtgaagtatgat

SEQ ID NO: 69086 - DNA, 614 bp, Glycine max
  unsure (1)..(614): unsure at all n locations
  Clone ID: PAT_MRT3847_33398C.1
cgtaaaaaaaaaccacggccaaagggangccaaagctngntaaaaataatcaacagnnncacaanaanccannnnaatatcantacnatacaccctctancnccnacctccncctctcaccccctctcnaaccgctttnnntcncngcnncnncttcccaaatcccnncnctcccacacnaccccncntnctcccgnaannacgcaccancctnagccncacnctccnnacntcnnanncntncncncncntcctccttccctttcacccnnactncctncnggntacancntcaccctccnaccntccccnnatccnctcaaccaccccnctcaanccntnctcactccanacnnccactcagntnaaccacccatgcnnannaatcctccccccgntcccatctcactcgcaccnncatccnccccgattcancaccctnntcccncatncctcnctaantactntcnncatcactctcnnaanctcancctctnnattatacataacaactntccctngcactcncccnntcccancttanntctctccnngctatnnaacacccacgtcctcatncctcatacctcacncctacctcnacaccatccttc

SEQ ID NO: 69087 - DNA, 477 bp, Glycine max
  unsure (1)..(477): unsure at all n locations
  Clone ID: PAT_MRT3847_33399C.1
ttcatcttgtccgcggacgcgtgggtgcttatgaattatacaatacgcacaacctcacacttatgtttcaaacacgtttaacacattgcactacaaatttaacaccttaggttcctaattaggaatcctacactttccgtttaatactgcacataaacacttttctcaaggtaaacaccagtcagtttattgtataattcataaccaaatttcacgtccataattttaacatatcacaacatcgcaatccaccatcacatatttatgtgtatctcataactcaacacattcaatttatccattacacataatttcaatcacaatttcatgatctcaatataacaatttattacgctaatataataattttgtccaaaatacaaacaaattatacgaaaatgctttttacaacatgaggagtaaaacccctcaaacaatntacatgatcatatggaagaattccataaataaacatct

SEQ ID NO: 69088 - DNA, 1384 bp, Glycine max
  Clone ID: PAT_MRT3847_3339C.1
cggccgctcgagccggcgggcgggatctatctatcaaaaaacacttagtaacagaaaacacaagacattcattcttaatttcttatccttataccaatgtcatcgacagaagaagcacccaatccacggggatatcttaccgaggccatattctcgcacgtgccactcatccaccttgtgcccgcctctcaccgtgtcgaattcctggaagcgtgcggtcgtcctcctccctccgcccacgtcagacccatcaagccatggttaatagtcctcacccagagcctccgcccctcgcacgtgacaactctccacgcctacgacccccgctcgcacgtgtggctccaaatcaataactcaaaatactgtcacacctcccccgtgcgatcctcacactcgacgctcttctacacactcaccccatccgagttcgccttctccctcgacgcgctgcacctcaactggcaccacgcgccctccccgcgcgtgtggcgcaccgaccccgtggtggcgcgcgtgggatcgcgcgtggtggtggctggcggcgcgtgcgagttcgaggacgatccgctcgcggtggagatgtacgacgtaaatagccaagcctgggaggcgtgtccctccatgccggcgctgctgaaaagctcgacggcgtcctcgtggctgtcggtggcagtcgccggagaaatcatgcacgtgacggagaaacactccggagtgacctactcgttcgaaactatttcaaaaacgtggaaaggaccgtttagtttgaggcctcatgagagtgttttccactgtgtcaccggaaccctatgagagaggttgatggtggcggggctgatagggaaagttgggaacgtgaaaggcgtgaagctgtgggaggttcgggttcgggggggattaggttcggggatggaggaagtgggggagatgccgaaggagatggttcggaagctattcagtggttcggagttaggttcggtggaggtgacgtggattggggactttgtttacgtgaggaacacttccgaaccggaggagctggtgttgtgtgaagtattgaatcatttgaatggggttgggtgcgagtggcggagtgtacggaacgccgccgttagatgcggtgcgaggatggtgttttgcggcggtagtgtgtgcatggaggatctgcagagggcggtgatgtcggagaatccgacattttccatgaaacatgtgtgaattgataataaaaaaaagtgtaaccaatgggttgcgatgaataaccctcgtggtactttttttttattattattaaaagaaatgcttttctttgtgggattgagatgtatggtatgattggaataattttcgttgcattggcaaacaagcttttcgattttttttt

SEQ ID NO: 69089 - DNA, 674 bp, Glycine max
  unsure (1)..(674): unsure at all n locations
  Clone ID: PAT_MRT3847_333C.1
gtgaagnangnnnttgttgtnnaagttatgggtngtantgggtntagggggnaggtgantnaggttagagtgaagtttttggatgatnanaanggannnattgtggggggggtgangggannngtgagaganggaganattntnanngtanttgggtgtganngagaagnangaaggttgggtttgnggatntnttnntggtttgggtnagganttanngagaggatgggtgtttttggtggggntnggggatgggngntggtggttggggtgggngtgggttgtgggngtagtgtggggggngttgtggggttgtggtggggggtgggttgtgggtggggggggggggggggggggggggggggggggggntggggggtgggggnggtnggggggggggggggggggggggggggggggtgggggggggggnngggggggggggggggggggggggtgnggggggggnggggggggggtggggtggggggggggggggggnggngggggggggggggggggggggggggggggggggggggggggggggggggggggggggnggggggggggggggtggggggggggngggggggggnngggggggggggggtngngggggggnngngggggnnggggggggggggggtgggggggggtgggggggggtgggg

SEQ ID NO: 69090 - DNA, 516 bp, Glycine max
  Clone ID: PAT_MRT3847_33400C.1
acccgattttgttttctctactaatgcacacaattgggtgtggggaaaccttgaaacctgatataggttggtggtggttcacattctgcagaagattttactgtaccagaggatgaagaaaaacccaaaaagattgaggccagatcgcgacaaagaatagatcctcaacacaatgaggttcaggctcagatggaaacaaatttgctgaaatggactcttgatgatgttgaaactcctaacggctccatgctggatcttagaatttctcaatcggaagttgcacttcccaaaaacacaggtggaggaaccattctgcgctgtgatctattggcaaattttttgacagagggcaattgtagagcatgtgtcgattcgcagcgcactcatcgtattaaaggaatgactaacatggtggccacaggtggtattcctgaaaatacaggtatatcattggcctgtgctatgtatagattttttagggggcgcgccagctttgatatttacaccatttgctct

SEQ ID NO: 69091 - DNA, 373 bp, Glycine max
  unsure (1)..(373): unsure at all n locations
  Clone ID: PAT_MRT3847_33401C.1
cccaaaccacacaganacacgggggggggcgnanctanagggggagggggggagaaagaaaaaaaaaaacaacggacaggaagcaccaaagagnaagacagggcccaacccagagccaacggggagcngaaccagaaccagcagaaggagcagaggaaacaacaacagcagcagggccagngggcggcggcggcgcagacgaaccaanancagaaaaaaagaagggcgaagcaaaaaccgcccaccaaaagggccacgaagcaacaacagangnngaggaacccgcagcannagacgcccaaaacccacccncaggaccaaaggccaaagagagaaagggccccccncccaccaccaccaccaccacaaacag

SEQ ID NO: 69092 - DNA, 271 bp, Glycine max
  Clone ID: PAT_MRT3847_33402C.1
cttcagtattcacacatgatgcgaacatttcactttcaaggctagtgatgctaataggctcctccaaatgattgtcaccagaatttctcagagtaacttcaagatcattaaatgggtccaaccttctaagtagagaagatctttcttgaaacatttcactaagttacaatgtctttttttctcataagttttgagaagggctgcattgccatgtaatgctctatttttggtctggtttagggcactggcactgctataggtatcaccatat

SEQ ID NO: 69093 - DNA, 362 bp, Glycine max
  Clone ID: PAT_MRT3847_33403C.1
gtgagctaaataaacatgattgtaatgcagatcttagaaccatactgaaagaaaatgcaaaattatacttaaagcatatatgtgtgcataaaaaataataacatcaaaatcacattatttaactaaacaggtaaacttaaatttgaatattcatacccataaattcatgtacaagtcataataagtactgaaagcaccaaaactcagagaagagagacctgataactagagaggttggaatcagaatacaaggcaaacaaacaaatggcctgaagtcagaatccaagaccaaaatgcagttgcagatgggtgaaatcagcagatagacaaggcagagacacagatggccgaagtaaacaccc

SEQ ID NO: 69094 - DNA, 448 bp, Glycine max
  Clone ID: PAT_MRT3847_33404C.1
tcgcggagtgtttgtttgtatttgaaacttattatgagcttctattgacatgagaaaggaaaggggaaaggggggaaaatggtgtgcataaggaaggctacggtgaaggacctactggcgatgcaggcgtgcaacctgttctgtttgcctgagaactaccagatgaaatactacctctatcacatcctctcctggccccacctcctctacgtcgcccaagatggagaatgccatggaacagccatcccattatctctttccatttacaaattgcaaatgtagcggcgtgtcttgacttgggtgattcatgctgctacttgtaattaattactagggatgatagtaaatgaggatgaatatttacagtaccaagttacctattaatgaactgttattgccttgctttggatgaacttaatggtaaggatgagtattttcatttctgatg

SEQ ID NO: 69095 - DNA, 488 bp, Glycine max
  Clone ID: PAT_MRT3847_33405C.1
cggcatcatgttggggtttatacaccgcttctatttatgccggatgtgattatatattgctatatattggaggaagccctctgaaagcaattttttctttaagattttcaaaagaaaactcattatggtggatacaaacacaattgtacctttacacttttatctttttccttttcaacatagggttgtatcacaattatgtgaattgtcggctacatcacaattacatgaattattttttattattgtaaagtccgggaatgactataacaagaaagtatacataaagatgtcatacacttctttagttatggattattgcgttggattttcaattttttttggcattattggttaattgatatacatgattagcgatgctagaataaatttgtgatagctttattcacagatgcgatatttacttattggattttaagtataaatcaatgatagagttaaatataatttaaggatataatatttac

SEQ ID NO: 69096 - DNA, 166 bp, Glycine max
  Clone ID: PAT_MRT3847_33406C.1
cagagggggataagatacgtaaggatccggtgggagaagacgactgtagggcttggctgctataagatgacttgactggccactgactgctacaagaagacctacggggcactgatagaaaaggacgaaacaaggctacgagcagcaagaagacgactgaggggca

SEQ ID NO: 69097 - DNA, 776 bp, Glycine max
  unsure (1)..(776): unsure at all n locations
  Clone ID: PAT_MRT3847_33407C.1
gggcagttggcatagcagttgggtcgcacttaaagggaaggagacaagtctactctctccaaatccgttgcagtcagtaatggatcgtcaatggcgtcctgctcctccacccaatgtctgcccctcttgcttccacccccacttccccttttgccctcctccacccccctattatcaccctcacccccccttcccttacgccaacttcaagagaccccgaatcgacgacaaccctatcaatttctccgacgacgaacgcagattaaagctcattcgcgatcacggattccacacttacgcgccacaccctaatcacaaggacttccctccccacaatgctcaattcagatcttcccctcaccccttccatgcttacccggacccctcgcagcaccgcgttcccgacgcttaccatcacgctcacgctcctcatgttgccatgcacgaagggaaccaccagcacaatttcaatggaagagtagttcactatccttatccctaccctgctgcgggtaacaatagcaacgataataataataataataatatggagccttcgagattcttcaggggacagcctcagcctccgcttccttcttcgccgccgccacctcttcccatggaaccgtccatgaatcaattgaaaccgccttctctttntcccgttgccgaatctcaacccatgtctcagccctattatcacccctctgcttttcctttcgagcagaagcatcgaagcagcagtacttgggagattcccaatcttttttcgttaa

SEQ ID NO: 69098 - DNA, 521 bp, Glycine max
  Clone ID: PAT_MRT3847_33408C.1
gtgactccccctcaattgcttgtgccttggaatgatgttttgactttcaactatatgccatttggttcagttttaatgagttgatatcattttgtagtcttgagccctactgatccatgaaatactcaacctgattcaatcaatctgtccctttctatgagtgaaacataaacaggtgattttggttggtttgcagaacctagtattagtttatgaatagttggacacctgtaattctcaatgtctttccataatagttaaattatggcaactttctgcttatatgctacttgtgcttctttctgcaaatcgtagtgctctaaagcttgatgctgagggtgctttgtttgatcggtcaactcatttttctgagtagtgcgttacacttttattatttgttcatttcaggttcaacactgtagcatatttgcagcaaatatggtggtttgaggtggatggggagttcagcttcccttttcctgctgatatttatactctctcctttaggcttcaccttggac

SEQ ID NO: 69099 - DNA, 374 bp, Glycine max
  Clone ID: PAT_MRT3847_33409C.1
ccgataacacgggtaaaggttccatgttggatcttaaaatttctaaatctaaaatgtgcactagccaaaaacacagttggaggaaccattctgcgtagtgatctattggcaaatgtttttgacagagggcaattttagagcaagtgttgattagcagagcacttatcgtgttaaaggaatgcctaaaatggtggccacagtcggtattcctgagatgacaggattatcaatgggctgtgctatgaatagatcttttagggggcgtgccagtactgatatttacaccatctgctctcaagactgtgaattatggaatcctggtcgcacaaaaggaatggctatgttatttatccaaaatcctgttctgatgcatg

SEQ ID NO: 69100 - DNA, 587 bp, Glycine max
  Clone ID: PAT_MRT3847_3340C.1
tgccgggcagtttgccgtgctagcatgtgtggacgtccaccttctttgggggggggggggggggaaggtgggagggagcaggaggatcggggggtgaggggtaggaaataacaccaaagaaagtgagccacctgagctagaaagagaagagtatggaggtagtattggcgtgatatatagccagtggaaggaaaagctaaaggggcaggagacgacaagaagtaaaggtgaactacaacaccgaaacggaaacggcctatacggcctcgctgttaacaacacccactccaacttaacttggcaccgacttaacgtaaaggcgactagcggcggtgttaatgcagcgctgttaaggcgcaggcaacgaaggccggcacaagaatttattataaagttaatggcccttcgatggcccgtgccagttactagttataaaatttaactaaaggatagtaggacgagatattaggcaaggtctattaagcagctgttatattatggtaggtgctactatgacagggagcgtacctatactagcctttaggtggcgacatgcaagcgtgggccggctaaactaacgcttaaag

SEQ ID NO: 69101 - DNA, 328 bp, Glycine max
  Clone ID: PAT_MRT3847_33410C.1
gctctagctcgagagcctacgctactcaggatccaactttacagtacacggcctttctaggccttaaaggggctattgtgactgctgagaagaactcactgaccggcctttcataactttcaaggctactacaacccatgtcagagacccaactcaaatggccgtagcaacacatacactgtcaacacttatcgaaataacgaagacagtcctaccagatcaacgtttcgaaccatttcgcaggctaagtaacgaataggacgcgcaccagatcgtcgacttatactgtgctaatgtcgatggttacacgcactatctaccactacac

SEQ ID NO: 69102 - DNA, 384 bp, Glycine max
  Clone ID: PAT_MRT3847_33411C.1
tcgttatcccaccataaccattaaccaccacctcttaaatatttttccacaaatcaccaaaatttcccatttttttcaccctctgaatcacaatttttttctttctaactaaaatcgcctctacacacaaggattcagggaatggtgaattatgatattttaattcttgattggtagcatgtcttggctggaagttggataactgcttttgattctcagaggctgaaggtaacattacctcgttagtaaattgatgtcgacatctttttcttcgatggctgctctcagtgaaaggtggtttgaccgacttctgttcttcttatttgtactggtctttctccaccagttctgtcttctacgttaaggtctctatatttttctttt

SEQ ID NO: 69103 - DNA, 328 bp, Glycine max
  Clone ID: PAT_MRT3847_33412C.1
aataaattgtggatgtcacacaactctaaggtgggtgctgattatcaagggctcgtttaccaaatgacaaacttgatttttccccatgaacaaaggaccaaacttggtcttgccttagaagaaaccctatagaaagaccaccttctaccgaaggcgacccggttacgctaagccacagattcatagtgggaccaggtgatgctggattctgtaaacctgaaagagcaactgattgatgagggaaaccggcttccaacctatgactactcacttttttggaacaggagttggttacatcgcacctttggggaagcctggtaatgctaac

SEQ ID NO: 69104 - DNA, 520 bp, Glycine max
  Clone ID: PAT_MRT3847_33413C.1
aatcccaaaatcatcataatataaatccactataaaatcctaaatacaaatttattacgttctatttaattataatttctatcctccgtggatcttatatccaccactatccctttcaaaattactaatactcccataaaatatttacacatcaactttacataaaaacattttattccccaatcttcccttttatgattacaattaatccttccctttaatccttcccacaaatttctcaataaaacctaatccatacccttctaatacaattaaatccaataaatcctcatccactttacagtttactctcataattaatttacaatcctaacaaaactaaccccctccataccaaaaaccctatctttacattttcccatattctcaaataaaacttccccactataaaaataccattccattcaatattatctatttcaacctccaactaaaaataaagaaccagcctgacatccaacactctacctatcattctccacttcttcactaccatata

SEQ ID NO: 69105 - DNA, 250 bp, Glycine max
  Clone ID: PAT_MRT3847_33414C.1
gccacacgtacggccacgcgtacacttcattatgaagcattagatcctttagaatgaatcggatgtaaccttggccactgcctattctggcacggccgttatactagcacgcacatatcgtggatccagcactcacgggcctataatctgactgcaccatggctatcctcagcactcaacgaagctaccaagcgcaaccattatgcttttcggggctactcatacaactccgttatgtaaaaccagctta

SEQ ID NO: 69106 - DNA, 520 bp, Glycine max
  unsure (1)..(520): unsure at all n locations
  Clone ID: PAT_MRT3847_33415C.1
ggctcgagctttttcaccttccccctttgtttctcaacatcattctcctcattcccctacctacccccaattttcccttctgtatttctctttttcaattctcgatttcccttctcccttttgtggcttcataatccagatcctctactggctctacgtcttgtcatgaactaactccctctcaatcccctaccctaattcctccaatttccccatttttttttctaattaatcagatttgcaaaatcctaatttctctatcctaacaaaacccccaaattcaaacaaatccaatggcttcgattccgcgtccggctgcgatggacgagagaaagaggaagcggatggagtcgaaccgcgagtccgactgacgatcgcggatgaagaagcagaagctgctcgaagacctatccgacgtancgagtcgccttcaaggcgagaacgtgcgcttagcgcagagcataaaggcgaaggagggagcgtacgttgagatcgaagccgcgaacgacatcctcagagc

SEQ ID NO: 69107 - DNA, 831 bp, Glycine max
  Clone ID: PAT_MRT3847_33416C.1
cccacgcgtccggtgggaaacagttgctaccaattttgatgaatttcaggatgtttctgagaagcttttcacaagtaaaaacagaacggaggcatctgtagggaagaaggtgaagatagacatgctccctgaaatcgagaaagttcacaggagaaaggagaagttgctgaaaaaacaacacagacaagctcttcttcttgataatttcttgggtgttgatgggcttgcccctgggcgttcacttcgtgatagaaaacctgttacctacacttttgatgattacgatcgatccatcagtgctgtaagtaagattgaaccaaacggaaaccacaccagaacctagcctcctgaaaagagccagtagccaaacaggtcaggaagttgagggcactgcaaagcgacgcttccttgatttgaatgagcttgcccctagctcaggttttgatgatggtccaaatacaacaacactgaaagatgaaggcaatgatgataactgaagctaccccttttacttgaaagcaatcaaggaagccaagagacatgtatgataatagaaatataaattttgttatgtgcctcaggaagtttcggctagatctcttcctatggcaatctaagcatcccttggtgcatgagtttgccaccagaagcagcagcatatgagttatgtagattaggtagtcattttttagtatttagtatttctacatcaaaagggtccacggaaaatgaatgagaatttattcttgggcgttatttggcccatgcaatcggtgtacaataactgttaacaagtactgtaactttaaatagatatggcttttgattatc

SEQ ID NO: 69108 - DNA, 1274 bp, Glycine max
  Clone ID: PAT_MRT3847_33417C.1
cggctgcgagaagacgacagaagggaacctcactttttttctctataaaatccaacctaaacactctaagagaaccttctcccgataaacctttttcaccttccccctttgtttctcaacatcattctcctcattcccctacctacccccaattttcccttctgtatttctctttttcaattctcgatttcccccttcttcgttttgtgtcttcataattcagatcctctcttcaatctagggttcctggcttaacgaacaatcaaatgtttaaggaagaatttctatgacgattcgcaaccccatgcgacgaatccgtctcctccactccttctccgtcgtcttcctctactggttctacgtcttctcatgaactaaccccctctcaatcccctaccctaattcctccaatttcccccttttttttctaattaatcagatttgcaaaatcctaatttctctatcctaacaaaaaccccaaattcaaacaaatccaatggcttcgattccgcgcccggcgagttcgggatcttcggagggaggaggagatccggctgcgatggacgagagaaagaggaagcggatggagtcgaaccgcgagtccgcacggcgatcgcggatgaagaagcagaagctgctcgaagacctatccgacgtagcgagtcgccttcaaggcgagaacgtgcgcttagcgcagagcataaaggcgaaggaggaagcgtacgttgagatcgaagccgcgaacgacatcctcagagcacagaccatggaactcgccgaccggttaaggtttctgaactccattctcgagatcgccgatgaggtcggcggcggtggtgaatccttcgagattccgcagattccagaccctctcttcatgccctggcagatcccccaccctatgatggcgtcacctgacatgctcctccatggaaatcaaggcctgtttgcttgatagtacttcaattaggctaggtttattgttgatgttccctagtgttttggtgaataaagaaagggaatggtgttagatgtttatgagttatatcgtgtgttggtgtgctgttttttttttttaagatctgtgtttatgttttgtgtgtgcactatcgtcgttatatagttgaattgaatgtatctgctttgtcgtagtgactggtattgtggtgttgcaaattgcggttgtttgtatgaaagtctaaaattgattttgaagagaaagggattatgcttagatattttattataaaatcaaagaaacttttcagctatgg

SEQ ID NO: 69109 - DNA, 172 bp, Glycine max
  Clone ID: PAT_MRT3847_33418C.1
gggggcacaaaatagactacatcatcctggtagtccaagatagatcttggtgtaataatataattaagcagggtcggtccatcaacattttttacatggttatttgaaaatgtcgagataagacttcacattaagattggattaaattgacattagaaaacccaaatcgaaa

SEQ ID NO: 69110 - DNA, 320 bp, Glycine max
  Clone ID: PAT_MRT3847_33419C.1
accacacgtacgtccactcgtccggcagaggatacgaaataagagaaaggaaaggagtctctgtctctcgagataagactgagaggcctcaaacgcatatatctgtccctttcccacctctatctactaccacccactactcttaaggcaaagatggtgaatacaaataagacgatgatggtacagccaccgacttgtttctcaacagacacatacaccatcagttgcatatccattatattctgattactcctatggctacccatctgatctcatttactataaattttatttggcccaccctcatattgaagactccc

SEQ ID NO: 69111 - DNA, 512 bp, Glycine max
  Clone ID: PAT_MRT3847_3341C.1
gataactgtccaagaaagcaattgtcttcggaacattcattcaatgacattgctagcgtaaatacgtaatatacaagatgggatacataatatttatacaattattttgctgtatatatcccaatgtggaaacctatacaaaatagttttattaacttggaaagtaatactcagacgggcgaggaagtgttttgatgtgtactgctcttaaatgatcaatttcagtctggcgaagtgtgcacatcaatgctaaatgggttccaaagttgaacagcaaaagtaaggaatcttgttattgatcactgctaattgtagtgtcctgccatgctactctctgcttgcttcatttttcttgatcccatgatattctgcacaatggagtgtgatttgaggtggtgtagaggaagagagtggagggacatcttggcaatttcggagacagcagcatctcggacgctccgaacatcagaggacatcgaaatcctggagagtggtagaatcgaagaaaaatt

SEQ ID NO: 69112 - DNA, 523 bp, Glycine max
  Clone ID: PAT_MRT3847_33420C.1
gatcactatctcttcattttttggtttaatttttaatttttataatataatttttaaaaaatataataattgatgtgaaaaaaattagattaaaaaattaatttttaattattataaaagtatttttcatctaattcatttattcatttcaccctcttccttttatttttagaaagttatattacagtataaatttaggaatatagttttttatttataattattatttttataattatttataaaatgtcagattattttattattttattttgttattttttttctacaaaataattataaaataaaagaagatatattttgtaattatttataagaaataaacacttaaaaaaaaattttgaaacccaatattgactcagcggatgggtattattaggagcaaagagaggtccctcatccttctttaactctttgtggtggcaaatatagtatattttactggtcattatttaagattatctttggatgataataatttaatatataacaaatcaactga

SEQ ID NO: 69113 - DNA, 435 bp, Glycine max
  Clone ID: PAT_MRT3847_33421C.1
gccaaaccttacgcattccattgctctctatacgctgtgtccagagcaccttacgtggtgcgcacgcggagtgcaggagaccgtgtccgtttcagtcgaggatttgcatgtccaggacaccgcagcgaccggcgactagggcggcgcatggtaggagggctccttgaccagtaggagaagagggtcctagagactaatgtcctgcgcctggtgaaggtggggacaatccggagcctggagcaggtctacctacactcgctcccaatgcaacgagcaccagattattcgcaccctcggggggcccaccttgaatgacgaggtgatgaacatcatgcccgtacagaagcacacccgagccggcaagggaaccctggttatcgttttactcgtggtgcgcagactacaaccggcacgtccgattgggagtgaagtgcg

SEQ ID NO: 69114 - DNA, 1040 bp, Glycine max
  Clone ID: PAT_MRT3847_33422C.1
gtcgacccacgcgtccgcggctgcgagaagacgacagaagggtacggctgcgagaagacgacagaagggggacgaagaagaaaatgatggcaacaaccgcgcctgtgcggtggcaaccaccaaacattaggtttaggattgagccgaagagagcgatgagagtgaaagcctttggtaagggaggcagggatatggatagggtttggagtgaggcgtggcgaagtgctaacgatgggtttgagcggttcgtcttcgaagcgaagaagactgcggagcgcatcgaccggcgctattccctttcgcggcgtctctcctccgtggcgagggcggccgcagaccgagcccgcgagattgatcgtgagtttgagattggacaacgttaccgcactttgagcatcgatttccaaagaaactggcccaagtacaggaagcagctcaaggactttctggatagtccgcttggaaagagctttgctacactgctgttcatctggttagcactgtctggttggcttttccggatcctgataatcgcaacatgggtacttccatttgcaggacctcttctaattggaactttggccaacaccttagttattaaggggacttgtccggcttgcaagatgcaatttggtggttacaagaatcaaataatccgatgtacaggctgtggcaacattgtgtggcaacccaaaggtagaaccaactccaaatctaataagtcagaccccgacattattgatgtcgactttgaggagaggtgacactctcccagcccattcattctttacttctacactttgtaaagttaccaacatttttccatgcccaccctctccatctattctgttggacttcatatttctctcatgttttcaatttctttgtttctttcccaggcataacttgaattttattacccgtagtacactttttcaatctcgatgcaaaaaaaaaaaaaaaaaaaaaaaaaaaaaagcggccccactagaggattattcatatatttcactacaatttctgtttttaaaaaaaaaaaa

SEQ ID NO: 69115 - DNA, 321 bp, Glycine max
  Clone ID: PAT_MRT3847_33423C.1
gattttattattgcttatatatacaacacaatattgtaaaaaaatacacatcataatattgtaagcaaactactccattttcattacattattatatttaagtttcgcataaaaaaaataaaccaagccattttaattggtttattcttttttttaaatcaacttcataccaactaatttgattaggttacaaagttttttttcttcttcacaaagtcaaacgtcaagacaagaagtaggtttgctatcaccatcagcctcgggtttacctcgtgaaatggaagaatcgagcacaaaaaagtccaaaacagtaccttgaag

SEQ ID NO: 69116 - DNA, 801 bp, Glycine max
  Clone ID: PAT_MRT3847_33424C.1
tcccatccaagagcttccaggacatactcattggacttggactgtcaagtgtaacccagagtatgatggaatgatcttggttacacttgacagttcaactgtcaacttgtggcttgcctcaacaaatcatgatgagttaacaactgaaagacaagtcgattcatctgcccgatgggttgatccgttgcttaatacgtacagtgattatgaagacagcatttatgggctcacatggagttctcgtgaaccatggatctttgcatcattatcctatgatggcagggttgttgtagaatcagttaagcctttcatctccaaaaaataaagttcagcaccaattgccatgttgccatcatttgtcatgtcatcttcttgtgtatgtcagtaatttcctgcctctcgggtcttgagataaatagatctgaaagaccctaatatttattccatcatgtcaccgttgctgggtttgacgaggctgaacaggtttaatgttacatgtgcattacatctttgacgagaaagcattgatagctcagaaatcaacatttttggttttatcttttttatctttcaacgttgaatggttttaggctggattatgtgcaagtttattctttgattagacatccatgctatgtaattcgtggagtcgttgtatatctatggaactacaagttcatacaagttctttctttgtaaaaagagtttgtcctctaatatgtcttcgtggaaaggtaataaatctactgtaattgggaaacagaaagttgctatatgaaattggctgagtgtcgttatagc

SEQ ID NO: 69117 - DNA, 578 bp, Glycine max
  Clone ID: PAT_MRT3847_33425C.1
cttaaaaaatatttacatttttgggacgtaaacggcataaatatattgtcggccacactggtatcgaccatgtgatactatatataaaacaacctcccaagctaatgctagtacaatggagggggcagcattcaaacttcaaagatggtttttaagaaatgatcaaggacctgttggaccatagtctgagaatccgtaagagtaagaagccaacacaaatatggcacagactaccctctttatagacatgctacttagccttctgaagtgacctgtgtctcccgattatggtcctctcgagtatccaactatccaactcctaactttcattgctgatgctccatacccgacaagttccacaccatgatctagatccgtgctagaatcaccatgtgctactcactcggattacaactggacctaatctccgctctacgatgatgtctgcagaacccggtcggctagacacagatttcatcaatgcgatttgatctgagccaggcacgttctggtgcgcatccattgatgctcataggctatattccttgagcgcaattcatgttccattttaccctgtg

SEQ ID NO: 69118 - DNA, 1541 bp, Glycine max
  Clone ID: PAT_MRT3847_33426C.1
agctcggaatcggtcgacctcgagcgaatcggcgccacacgaaaagaaagagcaatgcaagctgcgtttccaggtttacggctgggagcagacgacagaggggggtgtgtggattgaggtgtcgcacggtgggtgtagcagtagattccgcctccaagaaaagaaagagcaatgcaagctgcatcttcaggcatcggatacggtctaaaatatcaggctagatgcatatccgatgtgaaggcagacacagatcacactagcttcctcgctggcactctcagcctcaaagaagaaaatgaggtacatctgattcggctttcgtcgagtggaaccgaactcttctgcgagggattgttctctcatcccaacgagatctgggaccttgtttcttgcccctttgatcaacggatcttttcaaccgtctactctaacggtgaaacgtatggggcagcaatatggcagatccccgagctatatggcgagttaaattcacctcagctagagagaattacctccctcgacactgattctggcaagattaaatgtattctatggtggccatctggaaggcatgataaattgatcagcatcaatgaggaaaacctgtacttgtggaatttagatgtttcaaagaaaactgctcaggtacaatcacaagattcagctggtatgctgcacaagttatctggaggggcatgggatccacatgatgtgagttctgttgctgcaacttgtgaatcgtatctccaattttgggatgtcagaacaatgaagaagactatgtcaatcgagtgttcccatgtatgcagtgttgattaccatccccaaaagcagcacatacttgttactgcagaacatgagtctgggatacacatttgggatctaagaaaacctaaagttcccatccaagagcttccaggacatactcattggacttggactgtcaagtgtaacccagagtatgatggaatgatcttgagtgctggtacggattcaactgtcaacttgtggcttgcctcaataaatcatgatgagttaacaactgaaagacaagccaattcatctgcccgatgggttgatccattgcttaatacgtacagtgattatgaagacagcatttatgggctcacatggagttcttgtgaaccatggatctttgcatcattatcctatgatggcagggttgttgttgaatcagtgaagcctttcatctccaaaaaataaagttcagcaccaattaccatcatttgtcatcttgttttgtatgtcagtaattttctgcctctcgggtcttcagataaatagatgactgaaagacccaaatgttgcattgatagcttagaaatcaacattttggctttatttttttattttttttttatctttcaacgttgaattgttttaggctggattgtgtttctagcttattctttgattagacatccatgtaattcatggagtcgttgtatatctatggaactacaagttcattcaagttaaaaaaggggggggggggggggggaaaaaaaaaaaaaaaaaaa

SEQ ID NO: 69119 - DNA, 756 bp, Glycine max
  Clone ID: PAT_MRT3847_33427C.1
cccaattacagtagatttattacctttccacgaagacatattagaggacaaactcgagatacaaagaaagaacttgtatgaacttgtagttccatagatatacaacgactccacgaattacatagcatggatgtctaatcaaagaataaacttgcacatattccatcctaaaaccattcaacgttgaaagataaaaaagataaaaccaaaaatgttgatttctgagctatcaatgctttctcgtcaaagatgtaatgcacatgtaacattaaacctgttcagcctcgtcaaacccagcaacggtgacatgatggaataaatattagggtctttcagatctatttatctcaagacccgagaggcaggaaattactgacatacacaagaagatgacatgacaaatgatggcaacatggcaattggtgctgaactttattttttggagatgaaaggcttaactgattctacaacaaccctgccatcataggataatgatgcaaagatccatggttcacgagaactccatgtgagccctgtaacatgaataaaatatttgtgaagaaaagtttgtgtgtgtgtttgaaatgatgttttgtatgtatgttagagcttaaaaccatgtcaaagttggcaaaagaagcaaaagctaaacaaaactaaagatggattgaaaaacttgaacctcttttacataaatgctgtcttcataatcactgtacgtattaagcaatggatcaacccatcgggcagatgaat

SEQ ID NO: 69120 - DNA, 601 bp, Glycine max
  Clone ID: PAT_MRT3847_33428C.1
attcggctcgaggagaaacccaatgtggatctctcagcaagaaaactcttcaagttggttcttcctcccagttgttaccttcatcatcctctttcttttacgtactttcctcaatcttttatccaaccggaacaatgattccaaaaaaccctcaccaccatctcctccaaagcttccaataataggaaacctccatcaacttggtacccacattcaccgcagtctccaatccttagctcaaacctatggttctttaatgctacttcacttaggaaaagtgccagtccttgttgtctccacagctgaggcagctcgtgaagttttgaaaacacatgaccccgttttctccaacaaaccacatcgtaagatgtttgatatcctcttgtatggttccaaagatgtggcatctgctccatatggcaactactggaggcagacaaggagtatccttgttttgcatcttctcagtgccaaaaaggttcaatccttcgaggcagtgagagaagaggaaatctccataatgatgggaaaatattaggaagtgttgtgcatcattgatgcctgtggatttaactggcttattttgtatagtggccaatga

SEQ ID NO: 69121 - DNA, 627 bp, Glycine max
  Clone ID: PAT_MRT3847_33429C.1
ccggtccggattcccgggtcgacccacgcgtccgcgataatcttttcatttcctcgagaaaaaaacttgtacggtgaaattggtaggttttccgggatcccaagcccccatcttgggtcaattcacgtaccgagaccagagaggagcaacctcacccgtcgttgaatcttctagttgtatcaattcatgtagagagagaaagagatagactcccacttggaataataccgcttagagagagaaaggtgaagtgaggttgtttaaagtttgagactaggagggcgaaaggtgaaagacgactgatgtcgtactgcatatatacgatgcgacaaatagaggattcactaaaaccaacaacaccaatggttcagatcaacatgatctttattgatggtattgttcttggtatcatttttcacaacgccaaccacttttttgttatatgatgaatggtcattagtgttctgagaacaagggactggtgcttttacattgccttctagaaagaatccaatgtcttcttatgctgaattcattgctgtatggaaacacaaactgtaccattgtcaaggtaaatgaaattctatgcacaactctgctgagactcgccatgcgatgttcatatga

SEQ ID NO: 69122 - DNA, 314 bp, Glycine max
  Clone ID: PAT_MRT3847_3342C.1
attttgattctgggtagaacagtgtaattttttatccaaatagctggtcacttctagtagaataaggctttgttgttgtagctatggtgaggatagcaaatagggaccataatttttttcatacaactagctggtcccttctagtggcataatttttatcagtgtaatgcaaccatcctgaaagtcactaataatttctttatcccaaatgatgtggtactccaaatcaacattgccaagtcatcaatcaaatatttataataaattacaaatttacagttataaaaaaaaaaaaaaaaaaaaaaaaaaaaaaa

SEQ ID NO: 69123 - DNA, 210 bp, Glycine max
  Clone ID: PAT_MRT3847_33430C.1
ccatcttcgagatttttcgttgcccttattgttgggctctgaaggtaagtttcacatttttcctgttgtaacgctgttttagttgttaaaaactactttcaatgctcaaccttgtcgtagtaccagcagcagccttaagtctttgaaacgaggatgtattaaaatgatgccccaacagatttgcggaagttgcgaagataatttctttct

SEQ ID NO: 69124 - DNA, 437 bp, Glycine max
  Clone ID: PAT_MRT3847_33431C.1
tggcttggaacctttgggctgatttatgtgcttgcatggtcgtgagaagatgatagaagggggaaacttaaatacgcatcgaaacgtaggctgcttcaagaggccgccggcccccgccaacttgcccggcgagaagaaacttgtcatgaagacccctgtcgaataagcgaaattctcccccgaagacgtctacacttaaactatagcctaagaaattaagtattagtcttacgtaaaggaagccgtctgcctgtcaggcaccatcaaacatgacgggaccgcccgcgccagcggagacggaaccccggccgaagccagtcctaccgttaccatatccgccgtatcacccgccactactactccgaatgctaccgctaagcctggggccaacaacataaaataacgactacaacaacgactagactatatcttcccct

SEQ ID NO: 69125 - DNA, 880 bp, Glycine max
  Clone ID: PAT_MRT3847_33432C.1
ccacgcgtccggtgcaagcagggtatcattgtttttgcatcagtgatggctaccttggggctgcagattttgattgaatctggctgacaagttatttccaaggctaagccccacatggatccaacaaaactgcattggatgattgggattatggtgtctgtgaccgtagtgaagttcattctcatgatctactgttgaagatttaaaaatgaaatcattagagcatatgcacaagatcattttttttatatcattactaattctgttggatgctgtgctagctgtcaagttctactggtgaattgatccaacaggagctattgatgggaattcatgactacaatagcattgtatacaattaatacatgggccaagactgtcattgagaatgttggttcactcattggaagaacagcaccacctggttttccggccaagttaatttacctcatatggaatccccatgagcagatcaagcacatggataatgttagagcatacacctttggtgcacattactttgtggaagttgatattgtgttgccagaagacatgcttctccaccaagcgcacaacattggtgagacactccaagagaagctggagcagcttcaagaagttgagagggcttttgtgtacatagattttgagttcactcataggccagagcacaaggccgtagtatgattatatgccatgggacaatggtgtttatacttgctacccctgaatcatacttagtatgttttaattcataatttagttggctcaaaatataagtaacgaaggggatctacccgagttagttgagttgagtgagtgttgtaaactctcttatactttggttaattcttatggataaaaaaataataataattat

SEQ ID NO: 69126 - DNA, 246 bp, Glycine max
  Clone ID: PAT_MRT3847_33433C.1
gcaacgtgaagatgcaggaaacgggttgtatcattacaatggatcaatgatgacttctctggagttggatgaagattactactggaaagaacttgcacgttctcttttaccgtcacccagctgttagtacttgtatgatatattaattagtatttgtgcaagtaataatcaacaaattgttgctactgcttccactggcagagctagcaaggtccatgagggaaccctatttccctccttattata

SEQ ID NO: 69127 - DNA, 1063 bp, Glycine max
  Clone ID: PAT_MRT3847_33434C.1
gttactgccactggagtggaagagaaggctttccattgctttggatgttgctagaggggttgagtatcttcatggtttggcccaacaaattttcatccatagggatataaaaccatcaaacatcttgctcggggatgatatgcgggccaaagtgtcagacttcggattggttcggcttgctccagaaggaaaggcctcatttgagactaggcttgctggaacatttggatatttggctccagagtatgcagtcactggacgagttacaacgaaggttgatgtatacagctacggggtgattctcatggagatgataacaggaaggaaagcaattgacaacagccaaccagaagagaatgtccacctcgttacatggttcagaaggatgctactgaacaaagactctttcacaaagctcattgaccccataatggatgttgatgaggagaccttaccaagttttaggactgtggccgagttggccggccactgttgtgcgagggagccctaccagcgccctgacatgagccatgtggtgaatgttttggcacctcttgtcgagatttggaagccttctgaagcagatgatgatgacatttatgcgattgacttggatatgaccttacctcaagcactcagtaagtggcaggctattgaaggaaagaacacctttgatgtttcatgcacttcatcaatgcttactagtggagatactacacagtctagcatactaactaggccttctggatttgctgattcctttacttccaatgatggaaggtgaagtttgatttacatttacattatacttgtctatgttttttttttttacttcaccaaactttggagatctttataggcttgttttatagtgtctagttagcatatattacaccctgtactcattaaacttccttactgtatcttggtattttggtctattggtttttaatttagtagtgtctgggatgcaagaagacagaagctaaacacataggtgaacttgtgttttccttcttttagacttcattctaatgagaatgagaaacaggatttggttatt

SEQ ID NO: 69128 - DNA, 132 bp, Glycine max
  Clone ID: PAT_MRT3847_33435C.1
cattcaatcacacactaatttctaacactttttatccaaaataatcattattctactaatagccatttccactatactttttaactctaattaaaattcaatccataattcataccatatttatctcataac

SEQ ID NO: 69129 - DNA, 347 bp, Glycine max
  Clone ID: PAT_MRT3847_33436C.1
ctaaacctttcatccaacctttcttattttttttatatcataatccatcaccaaatcggaatcgtcacttttattcacttactttaaccctaaactttttaaacaatatttatttccacgatctattttttaatccccttttcctcacaaatataaactctcttatttatattttatttattatacttcacttattcaacaatacaattctaacccccattattctttcattttattattttaatctttttttaaaaataattattatttccttttttatatattattatatttataatctatttttttttattttaataatttatacttaatttttctttttattt

SEQ ID NO: 69130 - DNA, 508 bp, Glycine max
  Clone ID: PAT_MRT3847_33437C.1
ctgcatcatattgcacacagagatcgtgatcgaaaatggcgacgttgaaggttcctgcacaacttccttctccattggaagacagtgagcaattgcgaaaagcttttcaaggttaccttacgaccactcattcatttctttcattttgttgacaattattttgtaattgttagatcatcgatctgttttacattttttcgatctatctcgtttgtatttaagtcttttggtgtgtccacgatctgattgcgcggttttattatatatcaactgttaataattagatcatggaatagattattgtgtctggtttatgaaatcactgttagtatttctgcttgacgagtgctggaacggtggaaccgcatccggtgcagttatatttttcatacattcacgcagtcagtaaattgtgaccgttggatgaatatcagacaactcacgcctataataagtgttataagttcaatctaccagatagaatacagctatacaagccttccgatct

SEQ ID NO: 69131 - DNA, 418 bp, Glycine max
  Clone ID: PAT_MRT3847_33438C.1
gctgacgtttattatctctcatctagctgaatgtcattggtttgacaggctttaaaggttgattcaacaaggatgctcattgctgaaggtggagtcaacaatcttgcttctttgcacaataattatgccaatggacccaatacctcatctgaaaaaggcatactagttaactatactccgactgcaaatcattctaactcagatctagagaagctccaaattctttcagattcaaaaaagatattatctcaaactgccctagctgctttgatacgaaagatgaatgaattggtaaaacttttcattgctttcttctaattacaagaatgattatactttatatctattctcagtagctatgcatgggcacactgaggacatacacttgatatactagaagaacatatatacatgttcc

SEQ ID NO: 69132 - DNA, 309 bp, Glycine max
  unsure (1)..(309): unsure at all n locations
  Clone ID: PAT_MRT3847_33439C.1
gcgcccacgccctccgcaccgttccgagtttttctgttacttctcatagnnagagttcgaccgcggcnggttgctagatatatagatatgcaagaaatgaactctcaacaatcnnncgagtcccaaccactttggatgcttcagaagaaagctttcgagaaatcgacgaccgatctagaaaccttactgagcccattttgtggaccaagaaggatcttcacagnnngaggtcagnncggagaatgcacctttggtgaaggaaaatttaagggcctattgtcttttcaaaattaccctggaggttgtgac

SEQ ID NO: 69133 - DNA, 226 bp, Glycine max
  Clone ID: PAT_MRT3847_3343C.1
ttgatagaagagtgcatcggataaacttgcacgattatcctctgagatgcctacccgagcttgctatggaacatacacagcatcccaactggctactcgatcggatgcattcccaaaaggacaagcacttctgaaccagcgaacatatacgccagatatgcctgcaaatatgacagctgggccacactatctagggcggcctctatctgaacctcatgggatgcaa

SEQ ID NO: 69134 - DNA, 733 bp, Glycine max
  unsure (1)..(733): unsure at all n locations
  Clone ID: PAT_MRT3847_33440C.1
cagctagtaaaaaccaatgcgtggaacatcaagctcccccaaaattgtgttcagtttatcctctgtactatggctcgagcaacaacatccaacttggcaattcacaacatcatcatgggttcaaagtatcacatgtatctgtttctcacactggtggacctgcccttgtgggtggtgatggtgctaggaatctactagcccataacttaaaaaattcttcaaatgggggatcccaatcattcattattaatggggattttgagaatccatgcacaagaaaatgtgatctatcattgaggttaggacccccttaatgtaccatcgacccctagttttgaaaatggtcagattcaggaaactgaagttagaaacaatctaatttgttcggacctctcagaacggtaaaaagttggagcttcaaggacaattatgtgagaatgcaaccaacaacggtacaattaactgaacgcagattttagatgttttgcttgaagcctaagatagtgtgtactaactttgagaaaactgtgatctctagtgtgtgatttgctatgcttcttggaaagcctaggcatgtgttactactaatgggttatgtaaataacaactactatcagaagtataaccgtggattagcatgtgtttagttttgagtaaattattcacgtgttgttaaaaaaaaaaaagaaaaaaaactggagggggggcncggtaccccattaaaccattaatg

SEQ ID NO: 69135 - DNA, 123 bp, Glycine max
  Clone ID: PAT_MRT3847_33441C.1
acagaccccttcttccttttcatcaggtttattccttttctgttggttcaattttgctgaatggagaggtgcagaatagacaaatggttaagtcttctagtgtgtgtactgctattgcttaag

SEQ ID NO: 69136 - DNA, 1481 bp, Glycine max
  Clone ID: PAT_MRT3847_33442C.1
cggttcagaaccctttttcggggacccacgcgtccgcgaacttcttaatttcacaacctcccctccctctctcccttttcgtggaacccatttcccattttcccctttccaaaagaatgaatgcataaagtttggtggcgactgatcctttttcgatcccacataaccaaagagaatgacaatatcactggtaggtttgattatttaacagaaaaggactgctggaaaatgggaggttgctgttgttctgccaggaaacctcacctgcatggaacaccagtgtattactattgcccaccaactttagaagagcgtgagtctttaacatctaatgatggtagggctatgtccctcactactggattgctggtaggcttgaacctggaaacttccacacctgatacataccagccccctcccgcacctctaccttatgatatggtcctgggaggtccagcatcaacagattctgaatcaggtcagagaaacagttagtggtagtagctttgaaacattaattacatgcaaagatcctgaagaatctgactgtaaagttaaagctaattcagcacctatatctccaagcaaggctggattgtcaaaatctgaaagaatttcatgaattagaacagaagaagaggacggctgtccaatttgtcttgaagaatatgatgttgagaatcctaaaactctgacaaaatcacaactttcatctgtcatggttatcattcttgagtggatggaaagaagtgactcctgtcctatatgcgatcaggagatgatttttgaccagacaatgaactagttctgttgtttaaaaaaagaagagttttccaaactagttaagtgtaaggaaaataataaagtatttgatatctgggttctgaagagtagaatgtaatcacatacttaatatttcttaatgctttaaaaagttgttgttttaatggacccattcattgtgtgtacaatatgttgagaagaagaatgagaaggttttgacagaatgctacaccacattacatgtctctgagtgcaatttctcatgtcagaactcacctattatcaaagtgaaagagtgaagcttttctcaagaagaaactcatgttcccagaatggcttcccctccttccccacccccatgtcgctttgctgctctctctccattttcttgtacaaatttctcaatatttatttgtttttctatgttattttctgagaggaaaaaaaaatgcatactggtcttgtaaatcaagtctgctttacattttgccacattttcaatgtatatatcgtggtggatgttgttggggatcccttcttttgttgtatacactggacccctttgttttaaattgaaatctcttctgcttggtggcaaaaaggggttattgtgaacattgttaatcagtgtagattctgctggttttgctgttaaacagtgatctcaaaatttgttgttttcctatggtggaagttgg

SEQ ID NO: 69137 - DNA, 397 bp, Glycine max
  unsure (1)..(397): unsure at all n locations
  Clone ID: PAT_MRT3847_33443C.1
acttggcactgacagatccttcgtatactatgaccatgattcatccatcccatattggaccaggataaacagtctacctagagccatagcttatgccacatggacaatcctgtccttgatatatgatggtgcttgatatccacttgatattgaattaagctgaccacgtccagatggagatgattcgggttctgagagattagaggcgttgcctgcctctgaaggtcttgataattcaatctggatattgtccacggctgacgttatcgataatgactcttgggatgatcacctcgtgagccatgggacctatactcatgcattgatagaaccattagtcataccaaccaatacgcatctcagtgtgctacaccctatngatgaacttctttatcct

SEQ ID NO: 69138 - DNA, 280 bp, Glycine max
  unsure (1)..(280): unsure at all n locations
  Clone ID: PAT_MRT3847_33444C.1
gcaaatctttgggaagacttggaccggggaagacaatcaccctgggggggaatcctcggacaccattgataatgttaaggccaggatccaggacaaagagggcatccctccagatcagcagaggctgatgntcgctggtaaacaacttgaggatggaagaaccgttgctgattacaacatttcagaaggaagcacctcttcacttgtgctgcgtttgagaggtggcatgcagattttngtgaagactgtgacaggaaagaccgtcaccttcgcggccgac

SEQ ID NO: 69139 - DNA, 179 bp, Glycine max
  Clone ID: PAT_MRT3847_33445C.1
cttttaccaagaaaatgtgaaggttggcacatatgatggtggcactatgcacaacaatcagtccgttctgatgttcgtaggaaattgtagaaaacgtcttggagataccttggggatcgatcatctctccttgacattcatctaccttgtactagtaatgctttacatttcctggatac

SEQ ID NO: 69140 - DNA, 335 bp, Glycine max
  Clone ID: PAT_MRT3847_33446C.1
gttcttgaatgcggggagggactaatccaaagggctgaactctctcgtggtaacacactaacaccatgggcacaacagaccagagcccgtcggatactgcagatgcttgcactaactggagctggcatgtgatacgctgggtgcttacgcttctgtgcaccctcaggtgacgacactgctggaattataacgctagatccgagattgtactactacatgcatcgggggtgaataacattcatttgcgaaggaagtgtaggtgattaattatgggtcatgagtaggctaaaaaactgtgattggaaaactctattatgctgtaagcgcatggtctg

SEQ ID NO: 69141 - DNA, 525 bp, Glycine max
  Clone ID: PAT_MRT3847_33447C.1
aggcactttgttcagcgatggaattatgccaagaggaacaaagctccatatgagcaagcaattccattacttatgcctcagcatcatatggttattccacattacttgggaagaagcagagagatacagattgaaagtaggaacactgacaatcatagagttctcaagagagaagattcattttcctcatcttcccaagaccaagatattcctctacttttgcctcaggagcctgatgggttggatactcatgaaggagaccaaaaattgaatggggtaatctccttttcacatcaccttgacaagccaagaaggatcagcagtggtcttccgttctcgttccggaaggccaaaattgtagcagttggtccagatacaccaatgaagggctttgtagatgatctagattctgagcatggtcttgagaaaatgtctctggatagagtggctcattttgatttacaaagtacaaagccacaatggtgggaaacgcaagaacggggtgaccaaggaggttttgctgaa

SEQ ID NO: 69142 - DNA, 432 bp, Glycine max
  Clone ID: PAT_MRT3847_33448C.1
ctcgagcctatcatgatcgatctgtgagttaaacatcactgatatccctgctaacggagatagtgtgaccttaagcatgtgttgaacgggaggtgccatttcaaagacacatttctgtggggacagctggtactagggaagagcctcgcgtgcatctatccgcgaagcttacggtagtagatgcaacatcaaaagggtcccctataagatgaagagctgccatgcccgtaagagctgctgggtcagagtcagcgtgaaagcctgtgctggctaactcgacctatctgacatcacacgctgcacaggcttgatgtgctcaattacgtaagcttgccaggaggctgggactgactgtgcagttgcgagcgccgactaatccctaagctataggcttgaccacgactagaaagactcgcggactgttaataattg

SEQ ID NO: 69143 - DNA, 375 bp, Glycine max
  Clone ID: PAT_MRT3847_33449C.1
actgtaatcaatgggttttttatgacggccctcgacttctaagaggcgtgcattttggtagcaggatatggccatgctgacgatatgttccataatcgagtgaacactgcctatagggcccggactcctgaaagagaatgcgcaagttgcaggctggctgtggaaccacacaacatcttttgctttgagaccatttcctgaagagtgcgttgaagctacaaaggaatacatgcatggcgaacaatatagatcatgctccaaaacatgcttaccaacatgcttacttgtattccagagacctcgtagtccatcccaaggacacatttgttgacagcatatttggcaccgtaccctcttatattccatactacataa

SEQ ID NO: 69144 - DNA, 269 bp, Glycine max
  unsure (1)..(269): unsure at all n locations
  Clone ID: PAT_MRT3847_3344C.1
tatctgaattgtntatncattcttggcnccatggtcaagncctcctccgttgtgctgtcantggnngcttcggccatggctgcttcaacntgcacatggncgtcatggaaacatgtcaagaacctcntcgtctncggtgacagntatacgcaaactggttncgatcttcaacggngatccagngcantgctgagaagcccttcggcaacccagnntaccctggctggacatccgccaaggccccaattggangattnctcgccacnaca

SEQ ID NO: 69145 - DNA, 899 bp, Glycine max
  Clone ID: PAT_MRT3847_33450C.1
ggaacccggccgatcttgcaacgattaacaatggcttcaaccgacaagtcaccggacccaacgccggcgaagggtccggatccaactccggggaagccgatgagtgttggtcagcacgtgatcgacaagagtgcaatgatggtgcagtcgctggaccccattaagcagatgagtcagcacgtgtgctccttcgctatctacagccatgacatgtctcgccagatagagacacatcactactgctccagactccaccagaacttcatacaatgtgctgtctatgattccgatgaatccaaagctcgtctcctcggggtggagtacatcgttcctgctgatgtctttgaagcctttcctccggaggagcagaaactttggcattctcatgcttatgagattaaatcaggcctgttggtgaatcctagagttcctgaggttgttgccatgccagagctcgaaaaccttgcccaaacttacggcaaattctggtgtacatggcaggttgacagaggggataggcttcctatgggtgcacctgccctgatgatgtctccacaagcagcgagtcctggtttggtgagggcagaactggtgcttgagagggatgccaagtacaatttttcctcaaagagcctgaaaagctcaagattggagattcctgagccagagatgatcaaccccttggctgattattggaagcaacatggcaaaggatttgtcattgacatcgaggagactgagatgaagttgaggccaccttttccttgaatatatataactctttgtctgattttgagtgaataaatcagaattatatataaatatgtatgcaattaagtggataagttaaataaattaaatatatgaaatgtttggccgtgtgcctttaaaaaaaaaaa

SEQ ID NO: 69146 - DNA, 475 bp, Glycine max
  Clone ID: PAT_MRT3847_33451C.1
ctggcacattgagagtgtgcagttaaatggtttaacatcaaaggcaacagatcatgtgatgtgtgcaatcaaaaagttcagaacctacctgttagtggtgacatgatgtgtttgtataacagactgctcatttgatgtattgttgggactcactgtctgtaattggaggatcagtactggttagtgattaattacctactgattacaagtgtcacggttttatagaaaggttgagtgaggctcattttgaaagaagcccaagttcagaacacgtgatgtatttttcttcatttgtttattatgatagagcaaaactgacaagagtagtgcctttgtttgtaggccatgaaaggatgagatcagtaattgtagtattgagttggatgcttaccactaaatcattgatatgttggctactctgtctctgctatttggccagtctcaaattttaaagtttggcgtgactgttggttct

SEQ ID NO: 69147 - DNA, 493 bp, Glycine max
  Clone ID: PAT_MRT3847_33452C.1
attcggctcgagcttgcaacgattaacaatggcttcaaccgacaagtcaccggacccaacgccggcgaagggtccggatccaactccggggaagccgatgagtgttggtcagcacgtgatcgacaagagtgcaatgatggtgcagtcgctggaccccattaagcagatgagtcagcacgtgtgctccttcgctatctacagccatgacatgtctcgccagatagagacacatcactactgctccagactccaccagaacttcatacaatgtgctgtctatgattccgatgaatccaaagctcgtctcctcggtcttctttttttctctctttctgtttcaattgctttcactagtctcaattgttttgcttctaaatattattttagttgtgttgtgggtgtgtgataggggtggaggtacatcgttcctgctgatgtctttgaagcctttcctccggaggagcagaaactttggcattctcatgcttatgag

SEQ ID NO: 69148 - DNA, 305 bp, Glycine max
  unsure (1)..(305): unsure at all n locations
  Clone ID: PAT_MRT3847_33453C.1
cggcacgcgtacgtaagctcggaattcggctcgagnacggctgcgagaagacgacaganggggggaaagaangagttctnnanagggnactggagacanttntngnttggcatccgggcacaangccaccttgttnctnngtccgtgctctgcnncttnntntncagctattccnantggnntccntntccangcnnnnaacnncaaatcnanttnntnccggatcaanggcgctgngcccncgagnttntcgtgtcctcaccttcaaaccntcttccatcgcgtttaatcactaaactnancta

SEQ ID NO: 69149 - DNA, 179 bp, Glycine max
  Clone ID: PAT_MRT3847_33454C.1
ggaaggaggttgttatttattatgctttttgcttgcagaaattggctggcctgccaattccctctggcattagaatttgaaattgagacgtcacttattgctttggggcatatgtatattcaggatctagtcggcattcatggctcatgaagtctggtattattgcttttgcacatatt

SEQ ID NO: 69150 - DNA, 298 bp, Glycine max
  Clone ID: PAT_MRT3847_33455C.1
caaccgaaaccgggtccaacttgttccaaaatttaaaaagcaattggtttaatggttcaacccctgcgcaatcaataaccatgattgggaattgccctccctttaacaataaccttggggctggttcaagtcccaagtttaacctgcaagcgtccttttaacaatttcctccttttctgaataaagcctggtgtgctttggtaagtggtcaagtttcacataaattcggttgaccgcgtggataaaatagacgctgaacacactagtattcgtcgtgaatacatggacctaaagaaaa

SEQ ID NO: 69151 - DNA, 352 bp, Glycine max
  Clone ID: PAT_MRT3847_33456C.1
catgcttaatcctggacagagagactggacgcgctaccagccatgggagccggtagaggaaatcgaagcacaccctcagagcacccctaaggtttgaaattttacctccttgtgtgttatgttatctgtgtgagatcgtccttacccgcaattgttagacattatgtgatgattgtgggaataaaagtggtcgactggattctgttgagttgaagcagctagccttgctgaacctggaatgaatgtaaaaactaacatatcctgtaagcttttctgaacttgtgtcaatgttccttacttgcactaaaaaactctatgccaccgcaagggtcaccgtccccgaggcctttct

SEQ ID NO: 69152 - DNA, 511 bp, Glycine max
  Clone ID: PAT_MRT3847_33457C.1
ctcgagccgagtcggctcgagccttacccctctctttgaattagcttcacttcacagtcgcaccaacctctctcccttactcgcacgcgaacgatcacatacaacacaaacagtactctgcctcttggtgcaaatcgaacctagaaacctcaatcccttacccttccatggcggcaggactctccaccgccgcaaacttaaagccctacaatctcctccaacccccaatccctatatctaaaccaaccccaccactcttcttcaaccccttaagatgtttccgtcgcagtacaatccttcgagttcgacccagaagaagaagaatgagtggcttcaccgtttgcgtcctcacggaggatcccaaacagataaaaaaggatgaacaagaagaacaagtgaatcctcaagttgtgtcggcacgagtggcagataaattggcgagaaagaagtcccagaggttcacctatctcgttgcggctgacatgtctagctttggcatcacctctatggc

SEQ ID NO: 69153 - DNA, 357 bp, Glycine max
  Clone ID: PAT_MRT3847_33458C.1
agagaaaacaagagtaactcattttgctgcatatttcatgaaatcataaacaggctggacagatccaaaataaccattaacacccagttttgacagaaagcggcccaaaagatgaaagagaacacttagctcagatgctaagaacaatttctaaattaggaagtatataaaagggacaatccctagatacttcagcattgttcctaatgacaacttaaacccgctgacaagtgaaaaacatacatgtttcaatggttttaaaggggatgtgtattggaaatggaaaacctgcttaaaaaaacaacaagacaaactttggcactatagcttatgcttggcagtccttcaagctttttt

SEQ ID NO: 69154 - DNA, 374 bp, Glycine max
  Clone ID: PAT_MRT3847_33459C.1
tttattttttgttcttttttttttttttgacgaaaaacctcatgagatggtattatgggggtatcccggtgagtccagcttacaagattatcctatgcgaaggacagagagaaaaatccaagttgtccgcgctcttctacgaaatggctctctaaccaatctgctggaacgttggcgacctgtccacggtattttgactttttcccatgaatactggcataatgactctgcacagatcaagaactaccactgaaacctcaagagattgtcatttttatcatttgcatttgccttgaggtttgagggcatctgcccttcactacttgagccggataggcccataaccctctcgctgtgaagcgcagctgcgccca

SEQ ID NO: 69155 - DNA, 402 bp, Glycine max
  Clone ID: PAT_MRT3847_3345C.1
gcacgaggtattgcggcatagacactgaaatttcgtttttgtttctttaattaattaattaattaacacatgcttgcttctgattttgtttcttcggaattaattaattttttttaataaaaataagtttataataagttttgaccaatttttttttttctgatttaacattccagcgaccaggtgcgagaaccatagctgccccacttgatgttgatgtagtatatttttgtaaaaaaaagagatgaatcgaactcgtatgtactgctttattggcaatttgtcatgtttagggattttaatattgggcgaaatgtaataagacagaataaaggtaaggattaggaaagcgcgatggagtaatctctatagggttgccgattatgtgaaaagtttttataa

SEQ ID NO: 69156 - DNA, 265 bp, Glycine max
  Clone ID: PAT_MRT3847_33460C.1
gcgtccgccactcgttcgacattcgataagacgacatattgttgaggctgcattgtttcaaacctggtggaggtgaaaagacccattttattgtaatgtataattagtgttgctcgtagttccattttcacaatagttttgtcctctattgtacttcttatgggttatttatttataaattattgttaacttattttctattctattcctgttatacatcctaatcttaagtttttcttttctattaaatagttttggtttttat

SEQ ID NO: 69157 - DNA, 500 bp, Glycine max
  Clone ID: PAT_MRT3847_33461C.1
gggagtcccacatagagctccaatgggtggtgcccttattataaatacaactaattaatactaatgttacataattaagcattggtaggtttatgggttaaggtgacttaacaaacaataattacaccgtgaaagatacaacagttgttgccagtgccacttccctaagtggcaatatggcatcattggacaatatatgccttgtaaaagttacaataccagagccactgttcattgaggccggtgttgggaactgcttcactatcttgtatgttgtatagtacaaaatataggaggaaaatcccccccacccccaaaataatcataaaggaaaaagtataggttaaaaattgaaataaatatagaatatagagggggggtaatttacgctggtgtaactcatatcatatgtgttggtatcagatgcgcaatgtacaaagtggcttgtagaaagttgttgtattttacacaataaaagtctttatcgtgattattaaaaa

SEQ ID NO: 69158 - DNA, 384 bp, Glycine max
  Clone ID: PAT_MRT3847_33462C.1
tttaacctgatcaagccagtgtgcgggggcgatgctaaataggaacacgagaggacacaccggctcccggctcgctgtttatgaatggctagaatgttggagcgagcgttgcaaagctgattgcgaaacacatggatggatggacgtttagaggaatatgcaacactattctgaatgcaaagcgcatgataaatacatatgcactaccactgcccccggcctatgccgctctgctgcaagtacagtacgctaaaaggaatgataacgagtgggtggattatgatattcacatgccaaggggtctaccgtatggcaagacccacttggaagcgaatcacttggagcgcttattgagggggcacatacttaccataggtgatggat

SEQ ID NO: 69159 - DNA, 373 bp, Glycine max
  Clone ID: PAT_MRT3847_33463C.1
tttgcaagcaaaatttttggatctttttatttcatttttctgatggacacagataattctgcgaaacatacttgatgccccctaaaaagcactacactaggtataaggggtgaacttgctctcctactcatctgtgtgtacaaatataatagccctcccacctattcaattcccttgggccccaaattcagcccatatggcactcccttgccttttaaacggtggacctttttgcgggcatatgtcaccatttttagatagggccagcccgcaatgtggcccaaccttaatgtgttataacccattatctcgtgcccctccctgtaggccattccatagaccgggctttcactaccctcaccctatcaggggc

SEQ ID NO: 69160 - DNA, 495 bp, Glycine max
  Clone ID: PAT_MRT3847_33464C.1
aattcggctcgagccgtgatggacggagatagggaaaaggagcgcgagagaagagacaaggataaggagagagagggggaaaaagaggcgagggagagatccacaaggagcaggattcgctccgagagggacagagacagggagcgagatttcgaaatgcgcgatggccggagatttagggttaagaaagaggcctcagaacctgaggctgacccagaaagggatcagagaactgtttttgcctaccagatgccgttaaaagcaacagagagagatgtgtatgagttcttttcaaaagctggcaaggtgagagatgtccgtctgatcatggataggaactcaagacgatctaaaggagttgggtatattgaattttatgatgcgatgtcagtgccaatggctattgctctctctggccaacttcttcttgggcaacctgtaatggtgaaaccttctgaagctgaaaagaaccttgttcaatctaatgcttttggt

SEQ ID NO: 69161 - DNA, 241 bp, Glycine max
  Clone ID: PAT_MRT3847_33465C.1
gaaccataatgataatgggtttagctttttctttcttttttgtatgttttggggggaccaagttaggctgagagtatagctatagggtgaaaggaataaccaattgttcagcaattctgtaaatgactaaatgcttgcttgtcattgtggagggttttcgtttttttaacctgtgtcatatatgcctcataacaaatatgcggttcgttagtaatggaacaaagtatgacttgtgataaaa

SEQ ID NO: 69162 - DNA, 273 bp, Glycine max
  Clone ID: PAT_MRT3847_33466C.1
gaagtcaagaagctttcaaatttaatcagccaaacttttaagtttctggcctaagtgtgatacgacaacaaaaatatggggaccatcggacactagaagaattggacctgtgactaacaggggaggtatgaacttagatccatgaagaaaaatatttgaatggcaggaatttagtatatgggttaagctatatgttgaactggacacaccccacactaggatgtggatggggtctaagattatgttgggcgattaaaaggaaaatgtttacaa

SEQ ID NO: 69163 - DNA, 165 bp, Glycine max
  unsure (1)..(165): unsure at all n locations
  Clone ID: PAT_MRT3847_33467C.1
ttaagagttattcaaggggttttatntaagtgtgcatgggttctcctcgccttacaaggtcaaaatctgtggtacggtagttcggaacttttggcttttagccctcctaactttgattatcattagaccagatggcaaaacttgacattctaaagtttacgaggc

SEQ ID NO: 69164 - DNA, 1310 bp, Glycine max
  unsure (1)..(1310): unsure at all n locations
  Clone ID: PAT_MRT3847_33468C.1
gtcgatgcaatttcaattctgatcatgtcaattttctcttttctctatactatttcctgttgctgtttttgttacaaaattgttgctttgtttttgttttttttgttttcattttatctgttttgtggttgatgtcggcgtcgaattacgaattctcgcttgggtttcttcaattttctagaattttgttatggaagttgtgaatctattttaaaacttgtcaaattactgatactcattttgaaataatttgttggtatgattaatttttgtcaaatttggctgcatatgcatatctacgtgaagttgttgactttactcgcttatgccttatggtttaatttgcattgttttgttgttgctgggatccgtagctgcattcagagtgtttgagattgcccttataagaattgttcaattttagttttccaaatattggcactcacatggctcgaggaattttttaaagcgttagcgcacacgtcaatctccccgtcttaattgacctttcctcaatctttcactcttttgtgtcaggtcaaatatgcaacctcaatttagccagattaacatctctgttacatggaggggaaagaaatttgttgtcgagatgaatataggagccaatgtgaaggatctagggcaggaattgcaaaagttaacaaatatcaaagaagataccatgcggttcattgttccacagatttctgccagaacgtcaaaacttctggcccccttttccaaggaacatgcacttttaagtctgcaggaaacttcaattaccgaggccaggtcaattataatgatgggtgtaccaacaaatgaggttgaagaggttttacaaaatgcaaaaacagatttaagaatagctggatttgaggacgaggagaagagacagaaacagagaatttcccatggacctcatatttcattgaaacttccacaagggcagtatatattttgtgattttcgtacacttcaaattccaggaatagagctgaatcctcccccttccgaagcacttaaaagaatgcacatgcttgctgcagatcctggaattgttgctgtcatgaacaagcatcgttggcatgtaggaattatgactgagatggctcccattggttatgttggtgtgagcccaaaatgcattcttggttttaacaagaatcacggagaggaaatatcattgcgccttcgaactgatgacctcaaaggttntaggaaatatgaaagtatcaagaaaactctactgcatgaacttgcacacatgatatactctgaacatgatgtgaacttttatgctctgtata

SEQ ID NO: 69165 - DNA, 2693 bp, Glycine max
  unsure (1)..(2693): unsure at all n locations
  Clone ID: PAT_MRT3847_33469C.1
ctttggttcagggggaaagatcccagttttcagtgacccttctaatctttttatcttctcttctctgtccctcactccttcctttttcctctctcacacatataaatatatagcttctggatcttcttccacctcttaacggatctcagattccaaaatctatctcctttaggctctccaaatttttacttcagttcttaatctcctgaaattctgttttttttttgtgtgtatgtgtgtgtgttcgaacttcaaaaaaaaaaaaacatgagtgaaagcatgcaactttgtagtcaaagagtgaacggcacatagcagcaagttttcagctttggaaagttcacttagctaattgttttttccccctttagctgctttatatttttccttttagtctttgacaataggcttttctctttaagctcttttcggttcaagtggttctataatttgcttaatcggctcgaggttcaatttgttagagtattcctttttccttggtcactttaccatgatttaacatggtggtgattgctttgaattctcatagttgatccataagggagcttgaaagttagtctcttttttattttatttttttggtctttctatttttgagctgaggatggagtgtaggagaaagaaggagaatcaaaaatcaaactccactttccctgatgaggtgttggagcgaattcttgggatgttaaagtcccgcaaggacaaaagcacggtttctttggtttgcaaagagtggttcaacgcagagagatggtcaaggaggagtgtgttcataggtaactgctactctgtgtctcctgaaatcttaactcgcaggtttccaaacattagaagtgttacactgaaagggaagcctcgtttctctgacttcaacttggttcctgccaattggggtgctgatattcattcttggcttgtggtgtttgctgagaagtacccttggcttgaggagttgaggctcaagagaatgactgttactgatgagagcttggagtttctggctctcaaattccccaatttcaaagccctttcccttctcagttgtgatggattcagcactgatgggctggcttcaattgccactaattgcaagaatttgactgaacttgacatacaagagaatggtattgaggataagagtggcaattggttgagttgtttccctgacagcttcacatcattggaagtattgaactttgccaatctgcacaacgatgtaaattttgatgcactcgagaaacttgtcagtaggtgcaaatcattaaagactttgaaggttaacaaaagtgtgacactagaacagttacaaaggcttattgttcatgttcctcagttaggtgaacttggtactggctccttttcacaagagttgacatcacagcagtgctcagatcttgaaagtgcgttaaaaaattgtaaaaatcttcacaccctttcagggttatgggtagctacagcacaatatctcccagttctgtactctgcatgcacaaatctaactttcttgaattttagttatgctcctcttgacagtgatggtcttgctaagcttcttgttcactgtcctaagcttcagcgcatctgggttgtggacactgttgaagacaagggactagaagctgttggatcacactgtccattgcttgaggaactgcgtgtttttcctgcagatccctttgatgagggcattgttcatggggttactgaatcagggtttattgcagtctctcaaggatgtccaagacttcactatgttctatacttttgccgtcaaatgaccaatgctgctgttgctactgttgtgcaaaactgtcctgactttactcatttccgactctgcatcatgcaccctggtcagctagattacttgacgcaagaatcaatggatgaggccttcggagctgttgttaagacttgcactaaactccagaggcttgcagtatcaggttatctgactgacctaacttttgagtatataggcaagtatgcaaaaaacttggaaactctttcggtggcttttgctggaagcagtgattggggcatgcgctgtgtgctggatggctgtccaaagctgagaaaactagaggtaagggactgtccatttggcaacggagctcttctgtcaggcttggggaagtatgagtcaatgagatcactgtggatgtcagactgcaatttgacaatgaatggtgttagattgttggcccaagaaatgcctaggttgaatgttgaagtcataaaggaagaaagctatgagactcatcaggctaaaaaagtttatgtttatcgatctgttgctgggccaagaagggatgcccctccttttgttctcactctctgaaatgctatctctactcctactttgaagttcaaaatgtccttggtgggaggaagaaagggggattctgcataaactatccaggaagtcactgcaaatgtgagctaaattaatggattcctgagcaattattgtgaacaatatccatatgcatgaaaaatattgcattgattacagacagaaagttctataattcaagaggataatgtattcatggcagaagcctgtacttatctgtggctttttgttctgattgaaatatctattcaacaaaatgcaacattcccttctgaaaatggcgaaaatcatgtcantngannagatnnaataaaag

SEQ ID NO: 69166 - DNA, 227 bp, Glycine max
  Clone ID: PAT_MRT3847_3346C.1
cggtcgtctttttaaaattctgattagagcgcttttatggggtataaaagcatgatcgcattccaaacgatctttataagaatgtcttgtctcaagtgctcatttaattaaacagcacaagctttattaacgtgtccggtttacatggcttccgccactatgcacaagaaatgacttaaaatgtaactaggccttgtgggtgagtaacgcatccctttttttgttta

SEQ ID NO: 69167 - DNA, 725 bp, Glycine max
  Clone ID: PAT_MRT3847_33470C.1
agtgatgggggcatgcgctgtgtgctggacggctgtccaaagctgagaaaactagaggtaagggactgtccatttggcaacggagctcttctgtcaggcttggggaagtatgagtcaatgagatcactgtggatgtcagactgcaatttgacaatgaatggtgttagattgttggcccaagaaatgcctaggttgaatgttgaagtcataaaggaagaaagctatgagactcatcaggctaaaaaagtttatgtttatcgatctgttgctgggccaagaagggatgcccctccttttgttctcactctctgaaatgctatctctactcctactttgaagttcaaaatgtccttgtctttggttgtctccacagatggcaaaaatccatactgatattcaagactcaataatatggcaggtgggaggaagaaagggggattctgcataaactatccaggaagtcactgcaaatgtgagctaaattaatggattcctgagcaattattgtgaacaatatccatatgcatgaaaaatattgcattgattacagacagaaagttctataattcaagaggataatgtattcatggcagaagcctgtacttatctgtggctttttgttctgattgaaatatctattcaacaaaatgcaacattcccttctgaaaaaggcgaaaatcatgtcaatggatgagattaaataaaagtgattcatgcttgattgg

SEQ ID NO: 69168 - DNA, 568 bp, Glycine max
  unsure (1)..(568): unsure at all n locations
  Clone ID: PAT_MRT3847_33471C.1
cccgcgtccgggtttgtgtttttcttttgttattgaggaattattgtttgctatcagtggataattggtgtttgtgtaatggtattttgttgcttcagatctgttgttcagagggtttaagttttgataagggtgttggtccaaataccagaaaaaattaagcaggtgtggagcgatggcaaagaagaagaatccgctggtgtttatggatgtgtccatagatggtgatcctgttgaaaggatggtttttgagcttttctatgatattgctccaaagactgcagaaaatttccgtgcactatgtacaggagatcactacactacaagggttctttctttcatcgaataaaaggctcctttgcccagngactggaggagaaagcatatatggttccaagttcccagatgagtcacctaggctaaagcatgatggtccaggccttctatcaatggcagttgctgatcgtgacatgcttggttcctattttacccctcactttaaagctggcccccctcttgataggaaacaatgtagcctttggcaagcttgtgcaagggcatgatgtat

SEQ ID NO: 69169 - DNA, 292 bp, Glycine max
  Clone ID: PAT_MRT3847_33472C.1
gaataaaacaaaacattttatacggaaggaaaaatcatttcttggcatataaacaactattactgacagtgtaaggattgccccctcatgttaaaaaaagaaatgctaagtgctaaacgctaaacctacaacacaaacaaacttggagctattgggcctattttttcattgaaattcatgatgctacaaatttataaactcgttacaacgcccattcgggttccatacgaacttcatccttttacccaggggtgaagacattgttgattgtgaatggaaagacaattcactg

SEQ ID NO: 69170 - DNA, 478 bp, Glycine max
  Clone ID: PAT_MRT3847_33473C.1
aattatttttttttttttttttttttttttttttttggttaaaaaaaggaattttttttgggtttaaaaaagcacttttaccctcaatttctgaggggaattggaaagctatggttcaaagccctgagtaagaaaaaaaaccaagccccaaaaggggcctaaaccaagtggccaaagggcagtgggaaataataaccaaagcaccccttttatggcaaccctaataaacccaaaggtgggggggggaataaaaaaaaagggggggtggaggggttgaaattttaaaaagtccaggtcttaaaatttaaaaaaataaagggttttggggccaaaggaaaaaccagcaagggggccttggaaaccccaaaaaaaattttttgaagggggggcacctaaaacatttttttggggaccaggattaaaaatctcttgaaaccagggggcatcattaaaattttaaagcttggggaaaataaaa

SEQ ID NO: 69171 - DNA, 315 bp, Glycine max
  unsure (1)..(315): unsure at all n locations
  Clone ID: PAT_MRT3847_33474C.1
ctttcttcttctcgtttttactttgacggtttctagagagaganngtttgttatagagagagaaagcgcnnnnnnnnnnnnnnnnnnnnnnnnnngacagtgagaagagagagagaagcgtcttctccgtaccgtttctagagagagaaatgatggccggnttaatccgaacggcgtcgcgattttccggngactcnaacgcaggcggacattcattcatacaacatattcggacactcttcgagttaggcgaatacgtctccgatcctgctgtcggcgggcggtatgaatcgttncccgtgtaatacgaanatg

SEQ ID NO: 69172 - DNA, 1475 bp, Glycine max
  Clone ID: PAT_MRT3847_33475C.1
aagcatatgaagctttagaaaaccgtgcccaggccagaatgtggtataaagctgctataaaagcggatcctttatgctatgaggctttggaatgccttattgagaatcacatgcttacatgtgaggaagaagcaaatttgatctcatcattgcaatttggtagtgaggatggatggctctcttcattttattcttgtttgataaagaaagtatgacaaagaaaatattgtagtagccaagttcagagatcttgagaatgaaagctgtaaaagtgaccaatcagattcttcttttttgcggacactgaaatccaatactgatctattggcctgcaaagctgaatactaccatcagtgcggtgaatatcagaaatgttttgagttaacaaatgatttgcttgagaaggatcttttccatctaaagactacgctagtacatctggcagctgctgtggagcttgggcattcaaatgaactctatctgatgtcatgcaatttggtgaaggattatcctcagatggctttatcatggtttgctgttggttgctactactattgtatcaagaagtatgatcaatcccgccgttattttagcaaggcaactagtctagatggaacatttccccctgcatggataggctatgggaatgcttatgctgctcaagaagagggagaccaggctatgtctgcttaccgcactgcagctagattgtttcctgggtgccatttagcaactctttacattggaatggaatgcatgcggacccacagttataagcttgctgagcagttttttacgcaggccaagtcaatttgctcctcagatccacttgtgtataatgaacttggagttgttgcctaccatatggaagagtataagaaagcagtgtggtggtttgagaaaacattagccttggtaccaaccactttatctgaaatttgggaatcgactgtagtcaatcttgcacatgcatacagaaagctgaagatgtaccgagaagcaatttcatattatgagaaagcacttgcattatcaacaagaagtgtgagcacttatgccggtcttgcatatacttaccacctacaggatgatttcaccacagcaattgcatattatcacaaagccttgtggctgaaaccagatgatcagttctgcactgaaatgttaagttgggctctaatagatgaaagtcgaagaggcgttgaccccagtcttgaattccgttgaagtctgatttgaatatgatggtgcagccatttgcacttgtaaatgtgtaacaatgagtgccgagttgatgtattgccaatgtgcaattgttaattattattatcagttgtagataatctgtattttttttctgattaatgtttgattttattatatctctagcaattttatactagttaaatattccgtgacttcacaggtattaatcttaaaatttgtaatttttaatattattgtaacttaataac

SEQ ID NO: 69173 - DNA, 108 bp, Glycine max
  unsure (1)..(108): unsure at all n locations
  Clone ID: PAT_MRT3847_33476C.1
atggccacttggtgcggaagaatgacagaattgcaggaccgagtcaatctcatggtctggaatgcatctncttataacctgntcactgcacaacttccacaaataggg

SEQ ID NO: 69174 - DNA, 1534 bp, Glycine max
  Clone ID: PAT_MRT3847_33477C.1
cgtgaaccgggattatgaaatgaatgcagtagcaagagaagtggatagtcctcgttctttaaggccaagaatcacaatagaacgttgtgaggaaaaagggtactcagtggtcagtgtcaagtgcaaagatagggcaaaactcatgtttgacattgtttgcactcttactgatatgcaatgttgttttccgtcccatttcatgttacggaccagcaaggaaaaaagataacagatagcaaaaccatcgacctcattgaaaaggctctaggaccaaagagcaagagcacagaaggggtgaaaaattggccgagcaaacacgttggagtgcattctgttggtgattatacagccattgagctaattggcagagaccgcccaggtctcttgtctgagatttcggctgttcttgccaacctccattttaatgtttttgcagcagaagtttggactcataacaggcgaattgcttgcgttctttatgtcaatgatgcaacaaaccaagttgcggatgatccaaaaagattatctcttatggaggagcagctcaacaacatcttacgtggatgtgatggtgagaaagtagccaggaccagtttctccatgggttccacccatatggatcggcggcttcaccaaatgttgttcgctgatcgggattatgaaagttatgcagtagcaagagaagttgatagtcctccctctttaaggccaagaatcacaatagaacgttgtgaggaaaaagggtactcagtggtcagtgtcaagtgcaaagatagggcaaaactcatgtttgacattgtttgcactcttactgatatgcaatatgttgttttccatgccacagtatcatcagatggcccttatgcattgcaggagtattttattcgacatatggatggatgcacgcttgatacacaaggagagaaagaaagggtcatccaatgcattgaagctgctattcgaagaagagtaagcgagggtgtgagccttgagctgtgtgcaaaggatagagtggggttgctgtcagaagtaacaaggattctacgagagaatgggttgtcagtgtgtagggcaggtgtatcaacaagaggggagcaagcactgaatgtgttctacgtgagggatgcatcagggaaccctgtggacatgaaaactatggaagcactttgtaaagaaataggtaaaacaatgatggtggatgtcaagagagtgccaagcaataccaaagcacctgagactcgaggatgggctaaaactagtttcttctttggtaacttgttggaaaggttcttgacctgatgatgataatcatgcatatggtctggttccttagtaaaaggcacatgattatgtatagaagaataaagctgttttgtatctcaaacatggactttgacctattgttaaatatcataacaataatgcttcagtaatattccgccttctacacttttttcatctctcatgtatcctgttttaattctctgcccccattacccttctccaatcataaatgatattttagcattttaat

SEQ ID NO: 69175 - DNA, 481 bp, Glycine max
  Clone ID: PAT_MRT3847_33478C.1
ttttgttttttttttttttttttttttttttttttttttttttttttttttaaaactataggggttaaataatataaaacataataggggtttcttttaaaaggaccttggggaaattttgcgaatcccggttgattcttccttaaaaaagcccccttgggggtttttccttccggtaaataccttcattggggatgaaaaagaaaagattttttttttcctcaaaaaattcccactttaatgacaaaaaccaaatggggaaatttcttggtgataaaaaaggattaattccatctggacaggggtattcaaaagagcttacttgatagaaacaatttaccatttgaacttgccccccaacccccattttatacaggggtggtttcttttgggagcaaaagggggaaacaagtgctgcgacttttttttttattcgaactcaattttccccttattggggttgggcctgggcttttttggg

SEQ ID NO: 69176 - DNA, 370 bp, Glycine max
  Clone ID: PAT_MRT3847_33479C.1
cattgaacctacttaattttctccatccattgcacattcaattatatcaatggactctttcattcgtgatgtgtctatcagcctgataagccaactcggtatttgcgttactattaaaaaatgtacgatcccacagaacagatcttttgtgctgtgaacacaaaactaaggttgtcgcacaaaaaaaaatgtgtacagagttgaatactacaaaaaatgtgaatcactttttttcccccagaatgtaatacagtaacttgggatgcataatttgcctttattcctctcgaatctatcattttaattcaattggtggtgcgttgtgataacctattcattcgggtcagcatcctgaaccctttctgcatct

SEQ ID NO: 69177 - DNA, 391 bp, Glycine max
  Clone ID: PAT_MRT3847_3347C.1
ggtcggcggcaggaggacaaacatcacgtaccacgttgaatcggttcaatcatggttggcactgagcagactttagatactgatgcacttaatggcagtgctgtcgatctgttactaccgcataacttacttgttactggaacctccaacagcgccattgcttttgatgacccgagcggaacttagttatattggtgctctgggtctttaaccaaaccttccggtggctggccagtgtcaaggaaccttatgaccgagaaactgtcgatggattagaaactgcctgggcttgacatctttgtgtgcacgctggatccccagaaagaacccacccgggagggaatggacaccattatttacccggtgggcaaggattacccctcccacaagc

SEQ ID NO: 69178 - DNA, 507 bp, Glycine max
  Clone ID: PAT_MRT3847_33480C.1
gcaagttcagaaaaaagaaccgcaacgttaactcatataccagtgaacaagatcaagacactgatatagctcaagaaaaccttgccgagtcccctccttcttccactgtgttcaacatcgatggcttagtcccctcccccacttcctcatcaaagagaaggttagtactccttagtccttcttgctatctacatatatacctaattaccttccgtttaaaatcgaaacattacatataaggaaattaatactaggaacgaattctcaaaggaacaacaacgatatgagaaattgcatatatatactctccaaaatttaagattttggtattgatattgagaaattttctcttcttctttcttttattagtgtgtaagcttattcaactattgtatcaaaaacccttagatttctctagttaaatgacaattcttgatatgagaaaatctattacttctaacaacacctggctagttagggtgtatttatagctatggaattttgaga

SEQ ID NO: 69179 - DNA, 678 bp, Glycine max
  Clone ID: PAT_MRT3847_33481C.1
accagtggcggaaccggttcgtttcgaccggattttcttcggttcacttctcgagccgcgcgtacaagcaggccagcatgttgctcgcgctttttgcgggtggggatgggtatagggtggaagagaacaatggttgtctcatgttgggatggcacactaggcccttgattgccacctccgcgtggcaactcgctgcaactcgctgagtcgactcgccgattcctcaaccagctttttttttttttgttttaattttattataatttctattcatgcccaccgaaaaaaaaaagggaacttgtggggatgagagggcagtgtgtaaatgtgctatgctgagctgtgagcactgattgcattagactgagacccaccattgtctattttcctgtcccaacttatgtctctctctctccaacccttaatttacctattttgcgtttgcctgaggattttcagattttgattttctcctctttttttgtaaaccttgaattttactttgctttcttttgggttgggatgggtggaatctcttgtaatttttcagggttggaaaatcaaaaggcttaatgtgtatttattttattatggtttaattaatatattagtagtattatgtagcttactggtgagtggtgatatactaataaattagaatctatttttaaaaaaaaa

SEQ ID NO: 69180 - DNA, 340 bp, Glycine max
  unsure (1)..(340): unsure at all n locations
  Clone ID: PAT_MRT3847_33482C.1
tctcaacattgacaaagagaaagcacaatgtgttgttcatgagcttacaaaaggtagactatccaactctctgattcaagctgtctctctgctaaaacagagaaatcgggaagaaataatttcttcactcaataacttactgacatatgacaaagcantaccctcacagcgagtttcataaaaaataccaaaaaaactttctaatctatacaccatatacttaaagagtaatccaactgctaaaaatttatctcatttacaatatgtgttagatataaataattccacatctactactcttagaaagattagaaatagattactcaatactactagcgaa

SEQ ID NO: 69181 - DNA, 291 bp, Glycine max
  Clone ID: PAT_MRT3847_33483C.1
agctttttcattctaatcctacatatgactatcgggggtacactattgccatggatgcttacaagctccggacaatacagggcctgcaatcgtctattgtggactacaaaccgtgatgattctgttacggacaccagctggtgttcaacctttgcatatagagggccaatttatgcctgaggattatcatgttgatgagaagctcgcagactaagacagggaacgtatacaataacgcacagtacatgccccgggagctaaaacaaaaaggccctttgaggccacacatga

SEQ ID NO: 69182 - DNA, 350 bp, Glycine max
  Clone ID: PAT_MRT3847_33484C.1
ggctcgagatgacactaccgttggtcgttgactgtccattgccagaacgaaagcaaagttattattgctatcagtcttgagggtctgtaatagagtgataaccgttgggcgaatgatcgaagaacatattgaatcctccaccctgattgttgtggcgggtatcggcgcctaaattcgaggaggttccaccggctgggcgcaacatgcgaccctctgccatcctgtaccgcatattgagaggccttgcgcttatgctctgcaatcccatgatggctaggcaaggttctgtgaacctgaggataaaatgtagctcatatatgtccaccatggggactgtgcaccatacgaat

SEQ ID NO: 69183 - DNA, 244 bp, Glycine max
  Clone ID: PAT_MRT3847_33485C.1
gtggtggcgatgagggtgtgatttttgaaaggacacaccttctgtcgccttgatgtacaaggatggcaaaatagtaaaaagatgcttggagagtagaaagtggaattccttctgggattccgctcacagttattcgcaatagcatttattaatgagatgctcattttatatagctatgataaataactgggccaggctaaagctctaaagatgatcctacaaaccttcaaaaattttgtttttt

SEQ ID NO: 69184 - DNA, 960 bp, Glycine max
  unsure (1)..(960): unsure at all n locations
  Clone ID: PAT_MRT3847_33486C.1
tacggctgcgagaagacgacagaaggggagcgctaagcgccccccatcagtaccagtcgattaagaaaacgcgaaaatcatcgctgaaaaacaaacatggtctgcctctgttagcagcaaatattaggttgtttgttccgaacccaaccatggaagagttcagatccaaatcgtacggtgacggaaggatgcagattgaggcctaccgtggaaccaacatgcaagatctccggtgctacagcgcctcctacgcctcttcggtgcacccaacaacaacacagcaaacccagatgggaaataacgacgccaagtttaagaagggaaagtcaacgaatgggtccacatccaaaagttggagctttagtgaccctgagttgcagaggaaaaagagggtcgctagttacaaggtctatgctgttgaaggaaaactcaaaggctctctcaggaagagtttcaagtggttcaaggacaggtgcaacagagttgtctatggctggtagttattacaacaacaacaacaactatgggtgttttatataatgtaagaataataattttataatttatttggctttgtttatctatttgctgcacttagtgtttcttttctgtggctgctaaagtaccacataaagggtgtaatatggaagagaaattgtgattcttgtgttcattttggtccatgtaaagagtgcaatcaccttgcttgcttgctgttttcctcactcttgttggttctaggctgaaatttttaataattgattataattttggacaaaaaactctggttgagggagttggagtttcatttcnntctagactgaagtttataatggttgcttataatttggacaaaattagtgcatctatgttcaatactgatagctttcaatcggtgcccccctcnttttgatgtgtcgagtgaatatgnnnnngnnnannnngttcannngttgtcca

SEQ ID NO: 69185 - DNA, 590 bp, Glycine max
  Clone ID: PAT_MRT3847_33487C.1
cttagggggggcaggactttaaaaaatcccaatttttttggggggaaaaatgggcccaaacatttcccagactttaaacatcccgtttttcggaaccccaaaaacaaaaggggggaccctttttttccaaaaccccgaatttaaaagaaaaagctaaaaaggggttgggcccaggaccacccacaaaaacattataaacccctaaaaaaaaccaaacggaaaacccccggttggctggggacaatcatagaaatacccccggaaataaaaacccaattggtaacccttttaagccaaagcccataaggcaaatccagccattccaacaggggagcccacccgattggcctaaaaaaaaacggggggggccatggcctccgggaagaacagggaaaagtaaccgtaaaaaatcaggggggcaacaacaaaaaccgccccggaaaggaaaacacctttccgaagggcttcacaggaaaagtttggagcataaatcatcccacggtattggggggggaaggcatttttgggggcacctgctatcaagcaagcttttgctaccaaaaaagggccccaagaaaaaagaaaatttt

SEQ ID NO: 69186 - DNA, 373 bp, Glycine max
  unsure (1)..(373): unsure at all n locations
  Clone ID: PAT_MRT3847_33488C.1
tgcgagggtgagtttcaaaatgagcttgnnagtcggtgccttgagaaagcttgtgttttgcgcactctcnntcttgtcaagatgaaacataggggaaacaaattttcttggccgggagggtcctaaccaaaatcaattggaaactcttgaattgtttaaggaattgattttaaccattattaaaatcctgtgctttctcaaatcgttaaggatgctcactcaactacacatcctgagagcagaagagaattctcttgaagtcccaccaagagaaatagctgataaggggagctcacgctgttgcccaacacatgtctgatcttgttgagaagagggaaaaaaaagatgttaacgcacaccctctaacacaaaa

SEQ ID NO: 69187 - DNA, 381 bp, Glycine max
  Clone ID: PAT_MRT3847_33489C.1
tcgcgcgcacgcgcgcgtgcgcggagtgccctctagagcgggcgtttttttttttttatttttttttttttttgcgcctaaccaaataaaaacattttttttggccaaggacaaatcttattgttcaatgcttacatgctgtcatcatatattgctgcaaaggtgagaactagtggtaaacgacatggtactaacatggatgcttgaagaagaggctgtttacataaacgaatgcttgatttcaatgctactttctccgttccttctaactgtaaggcccgtaaactcataaattgaggggggttcagttatcttaccgccaataacatccatttgtgcggagagcatcttgaccacagaagacattgatggccgcagctt

SEQ ID NO: 69188 - DNA, 944 bp, Glycine max
  Clone ID: PAT_MRT3847_3348C.1
cggcttgagctttaacgcgccaaattacaatcaccatgtcctcttcctcttcctccttcttccccgcccatatcaccaccgaccaagaattctccctcatcgttgccgccctcaccaacgtcgtctccggctctacctccagctcctccgtccctgaattccgcttcccgcactcctccccgcctctttcttccgccagccttatgccgccacccccgcctagcatccacacgtgtcgcgagtgcaacatcgcaggatgcctgggatgcaactttttccccgaggaacaaaggaagaaatacagaggagttaggcagaggccttcgggaaagtgggccgccgagattcgcgatcgtcatcgttcggcccgggtctggctcggtacattcgaaaccgccgaggacgccgcccgggcctatgacaaggcctcgttcgagttacgcggcccacgggccaagctcaatttccccttggtcgacgagtcgctcactctccagccggagatggctgcaacagaagagcagattaacaacgaggataatctcaatcaaggcatgggaatggactcgcacgaattctgggacaggatcaacgaagctgattttcatccgttcatgatgatgatggattttactggagattcttcagactctgctgccactgggtacactctcagttcctgaaattgatattcaattaaaccaaataattagttttgttaatgtgcgtttaacaattgtacaactcggctaagcgtatttgttaaattagcatttgctagctccactgcaatacattacactacatgtatttctgtaatatctttcttccgctaggtttttttcgtgaggaagttgctgcatagtacaaatcaagagttttaatgtttcatttcaccaccccaagagtatgctatgtataaagattagagtattattactgtt

SEQ ID NO: 69189 - DNA, 192 bp, Glycine max
  Clone ID: PAT_MRT3847_33490C.1
cggcacagacgagcagaaagcgacagtagggtacagatgtgtcaagacctcataatgtggatgattgtattagttagagaccatgatcctacctccaatatcataacaatgtcaaccatgcgatgtgcaatatctaagtcttcacacacactaaagtgtgataagaaggattacgatatgctctacatagct

SEQ ID NO: 69190 - DNA, 671 bp, Glycine max
  Clone ID: PAT_MRT3847_33491C.1
cagattctcaacataccttacaatcagacccttaaaccatcatcttgaaaaatagttctaaatttcccaccatggttcctagtgagatcagaggagtccactatctagcacctgaaaatccattcctagttccaccaaactttagccttctgcaaagtgacatccctaatctccatcttaacaccctcctaagcaactttccaaactgccacttccctccttcaggccatgaatttgttgttcctccctcttcatgcctcagcagcaactcaacctctgatgaagctgatgaaatccagttcaacatcatcgacgaaaggaagcaccggagaatgatatcgaaccgagaatccgctcgcaggtcaaggatgaggaagcagaagcacctggatgagctgtggtcacaggttgttaggctcagaactgagaaccacaaccttattgacaaactcaaccatgtgtctgaatcccatgacagagtcctccaagagaatgcacgcctcaaggaagaagcttccgctcttcgccaaatgctagcagacatgcaaattggaaccgcttttgcttgcaccatggaagatttggaggaccttccatgcaacacttctcaactcaaacctgatcccttaaaccaatcaatcactcctgcagacatgattcatgaatgaggc

SEQ ID NO: 69191 - DNA, 541 bp, Glycine max
  Clone ID: PAT_MRT3847_33492C.1
aaaaaaaacccccccttcacccatttttccaaaaataaaaagggggggggaaattttaaaaagggcagagcatactcaaaaaggggggcaccccaaatttccttttttgaataaaacaacccaacaaccaaaaaaaaacccaaattccaaatcatgcaaaggattccccattttaaaaaaatctggcaaaaccctgggaaaaaaaaaaagctggcataaaagttttacccccaatctaaaaattttgaaaaattcccaaaaaaaaataaaaaactggaaactgttggggattgtcaaaaaggaaacccaaaccccctgaagtttgatttgccccctcaaaactccacatttaaaaaccatttttaggcccccatcccttttttgggaaaatcaattcccaaaaagggggttccaattttgcccacttacatgcaaaaaaaggctctggactggggctgtttgaaaaaaacacttgtaccaatggggcccaaaaactccttttgacggggggattcccagaaataaaaattttaaccattaa

SEQ ID NO: 69192 - DNA, 482 bp, Glycine max
  unsure (1)..(482): unsure at all n locations
  Clone ID: PAT_MRT3847_33493C.1
atattgaaaaataaaattgatatatgaccgaaatcaccgtggattattggcatacacttgtcttctctaagaaaagacatatgcagaaactccacaatgatggccttaactgaccagcttagctttcacttttaatttaaaatcacaaagaactgtaggctcctatacaagaatatgaatattgatgtaaccaaaaccaacacaacttcaacaaaggttagggttcatgcatgcaaaaaatgatgaagccaccttcttcttcttccttcccctctcttctcaaaatcaagcctcggctctctttttatctcttcaccctcttaactttcattcttttcgcccgccttctatatgggccagaatttggntttatttttcggtccacgcctccattccacggataaaaccacacaaaaacttttctccacacccggggagttccctcgtaaatcaaaaaaacactttttccttctttctctctt

SEQ ID NO: 69193 - DNA, 1652 bp, Glycine max
  Clone ID: PAT_MRT3847_33494C.1
accagttttatcttttctctataaataaaagtcttcttttcgtaattcccatatgaacttccggaaccgctgaaccgaagcaatggctacgcaactttccgaccgcctcgagccatggcacaccctcgccggaaaagtcgtaatggtcaccggcgcctcctccggcctcggccgcgacttctgcctcgacctcggtcgggctggctgtcgggtcgtcgtggcggcccgcagagtcgaccgcctcgagtccctgtgcgacgaaattaacagcatggccgccggagacggtggccgaagccgccgcgccgtcgccgttgaactcgatgtcgctgccgatgaccccgccgtcgacaaatacgtgcagaaggcgtgggaggcgtttggtcacattgatgctcttatcaacaacgctggtgtcagagggaatgtcaaatcacctttggaattgtctgaggaggaatggaaccatgcgttcagaacaaacttaactgggacatggttggtctcaaaatatgtatgcaaacgcatgcgtgatgcacaaagaaaaggatcaatcattaatattgcttcaattgctggtttgaaccgtggtcaattgcctggaggtgctgcatattcatcctcaaaagcaggcgtcaatatgctaacaagggtcatgtcattagaattgggggcacacaaaatcagagtgaattccatatcacctggacttttcaaatctgaaatcactgaaaaactaatggagaaaaattggttgaataatgtggccatgaaaacagtacccttgagaaaatttggcacttctgatccagcattaacatcgctggctcgttatttaattcacgattcttctgagtatgtgtcaggcaacaattttgttgtggatgctggagccaccttaccaggtgtgcctatttattcctccctataaacaaagaataaattctgctctatccggtgttggacttgagctaaacaatttttttatatggtaaaatattgaggagtatagcattatgttgatttaccagtcgatataaaaaattgtggttacttcccatccaactataaaattaacgtaatcgaaatacttctcttttttgtattgagtatgtgtgcagtaattgaacccaaataaatttaggattgtttgttgggagaggtgtccacctttttttccccgtgatatcttgaacagaattgtctttaaagaaaaatatttgtgagaaactatatatatatatatatatatatatatatatatatatatatatataaagcttttggcagcacatgatattgtccagttgaaaagctactagaactttactacaataattccctttcctaaaagcataaaagacgaaggcatgccatgaactttactactctagaaacctttcggaaatcttctgtggaaacctcagatgcttgcttctcctttgttgatgtgctcctcaatacccacaaagagtgacatgacataagctgtaatacagagaaatgaggaaatatattactacttaatcattgcagtccttaccaagattgtgaattgttgtacaagtttatgacagcaacaaataaaattttttgctttgtaatttttttatttcaaataatatgtttgataaaatattgtttcacaacat

SEQ ID NO: 69194 - DNA, 510 bp, Glycine max
  Clone ID: PAT_MRT3847_33495C.1
cctcgtgccgtataattgagtttttattttagaagaaagtattaataaaaccccattacgtactatataaaagttgataagaatcatatatagtaacctgaaattatataataatttctcatttttaataagaaattattatatgattatgtgagtatgttcaagtttctttctttttttaatacacaaagaaagaaatcaaaacatcaagaaaaaagtaccactgaaattaaattaaattttcttaaataatatattgaatttaaattttgtagatgaaaaatgtaataagaagaaaaactataaaaaaaaatgactaatcaaattctcacaaacaaagtgagtgaatatttgtacgaataacctggatcataaaataaaaaagaaaaactttcatatgacatataattaaatttgttaaagttaattaagagaataataatacgaagattaagttggatcataattttttttctcaagaatcatttgagagtgaataatatcttagaa

SEQ ID NO: 69195 - DNA, 1230 bp, Glycine max
  Clone ID: PAT_MRT3847_33496C.1
ggaaaaccacaactttgtcacactttgtgtctccaactccctatactttctcgcttcaccctccccggtaacgttttcgcttcagcccacaacgagccatggaagcacaagagtttttccagaacaccttctgtccccaattcccctcagacagcaacatcactccctccaacgccaacccctccgccgccaccaccgaccacttcctcgtagaagacttcttcgacttctccaacgacgacgacgccaccttcgactccctccccaccgacgtcgactcccccaccgttacccctgtcgacaccaccaccaactccaatttccccgcctccgcagacgcccatttccccggtgacctctccgtcccgtatgatgatcttgcggaattggaatggctgtcgaaatttgcggacgaatcgttttcgagcgaggatttgcagaagctgcagctgataacgggtgtgagagcgcaaaacgatgctgcatcgtctgaaacgcgtgacccaaacccggttatgttcaacccgcaagtgtcggttcggggcaaggctcggagcaagcggacacgtggacccccatgcaactggacctctcgcctcgttgtgctctccccgaacacgaagtcgtcgtcgtcttctcactccggcgcggaaggcggcagcgaggggcggaagtgcctgcattgcgcaacggacaagaccccacagtggcggactgggcccatgggcccaaaaacgctctgcaacgcgtgcggcgtgaggtacaagtctgggcggctggtgccagagtacaggcccgccgcgagcccaacgtttgttctgacgaagcactcgaattcgcaccgcaaggtgctggagctgcggcggcagaaggaaatggtgaaggtccagcaccagcagcatcagtttctccaattgcagcatcagcagaacatgatgttcgatgtcccatcatccaacggtgaggatttcctcatccatcagcacgtgggcccaaatttcacgcacctcatctagagtaggaaacttccgctacttaatttgtagttagctcagttatttcttctcttctcttttcttttcttgcctaattttgttaggaatttgtttaatttctttttcagtttatgctatatgtagactggtctcatgtttctttcttcaagtcattttgaccgacttgaaaacccacaaactctaaattttcctaatgcattattcttttcttttc

SEQ ID NO: 69196 - DNA, 696 bp, Glycine max
  unsure (1)..(696): unsure at all n locations
  Clone ID: PAT_MRT3847_33497C.1
ccacgcgtccgctaaaacccaactttgtacactttgtgtctccaactccctatactttctcacttcaccctcccccgtaacgttttcgttttcgcttcttcagccaacaacaacaaaatggaagcacaagagtttttccagaacaccttctgcccccaattcccctccggtaccaacatcacaccctccaacgccaatccctccgccgccaccgccgaccacttcctcgtcgaagacttcttcgacttctccaacgacgacaacgacgccaccgctgtcaccgacgccaccttcgactccctccccaccgacgtcgactcccccaacgttacccccctcgacagcaccaccaagaactccaatttgccctcctcctcctccgccgacgcccatttctccggtgacctctccgtcccgtatgatgatcttgcggaattggagtggctgtcgaaattcgcggaggaatcgttttcgagcgaggatttgcagaagctgcagctgatatcgggtgtgagagcgcaaaacgatgctgcatcgtctgaaacgcgtgacccgaacccggttatgttcaacccgcaagtgtcggttcgaggcaaggctaggagcaagcggacacgtgggcccncatgcaactggacctctcgcctcgttgtcctctctcccacaccacgtggtcgtcttctactccgacgccgt

SEQ ID NO: 69197 - DNA, 840 bp, Glycine max
  Clone ID: PAT_MRT3847_33498C.1
gaaaattaagcctccattagtgtacccagaagatgagagattaaatgctgagaattattactatttgagaccattccgttttcatgacatagatttgtgaccgaggtcgttgatagaacattcttaaaatgttatcccgttttcatgtagaaataaaaaaaattcatgtaataaaaaaaatttaagtgtttgaacattttttccctgtttcttaagaatttctatacccgtgaaccttggctcttcgttacaatgggattttatttttttggattagatgttcggtactgacatgtctattttgaaagtagtgtagttttctgaacgtgccccagtgtattgttaaattggtaatcgacagcaatagaagatctaatttcctgttttcctgttggttatgcactaaagtcgttagaatgggataggaaaaaacaatttagacataggtgtgtctgtctctccctccactcggggcttgccccggtctcccctttgtttgggtgcaggactagcaagccctcctttgggcgggtcttggattcagaagcagacataagcccaagagaaggtggtacacatttctttagtccaaagacgtggtggtactagctccagttggccatttaaaactccattccgtcagtgtttatctatgaatgtcttataatcttttactcattgttttaggaaatgaattcaagtcgtgactgtttcattttcacggttgcgtgggaaacttcaagcaatcaactctttaaaatagctttacattactgttcattgtggatttgctatcaggacttatatttaataacctgaataaaaaaaattgtatacaac

SEQ ID NO: 69198 - DNA, 314 bp, Glycine max
  Clone ID: PAT_MRT3847_33499C.1
acgcgtgcgcacgctcggaatccggctcgagggaacatgccatggtacatattatgatgacagaatatccgacaatctcgattgttcagcggcagactagaccgaaattgagaaagaagaaattggtcggcccatagcactctgtctttcagaggcacataacacagggaaaaaaagttattgcggaccactctcaatctgaagatgatgaactgcgttcacttagcgactaggaagctgaatctgttggtgaagctcagccagatgaacacgaccatcatgctcaaatacagctgatgaagacaaacatcttg

SEQ ID NO: 69199 - DNA, 101 bp, Glycine max
  Clone ID: PAT_MRT3847_3349C.1
ggctcgagcgcaaacgttccactccattcacacaggctcgagcatccgaacccggcaatcagcagacacgggtactgttgcgcactcactctactccatgt

SEQ ID NO: 69200 - DNA, 268 bp, Glycine max
  Clone ID: PAT_MRT3847_334C.1
ctgtgagaagacgaccaacggggatgcacacatctaactaagaaagccttccgtggccccccaaaaatgaagagcaccatcttctttgatctctttctcttttagtgccttcaccacctgatacctaccttcagccatcggtgatttcaccgctcaataatgacagccaccctctcgcatatgcaggcacatattctatccgagacacgacacaacagaatttcggcggaatgagacctatccccaccggtaaatgaaagactgcccc

SEQ ID NO: 69201 - DNA, 864 bp, Glycine max
  unsure (1)..(864): unsure at all n locations
  Clone ID: PAT_MRT3847_33500C.1
agcgaattaagacagcctctgaggttttgcaggtaagttttattaaattcagcatgataatatattttgagaattagaattttgtatttaggtttgtagctgtgtagagtatctcctcaaaagttatggaagccttggataatcggcctctctctataagattaaagggactggaatgcatgaaaggttctttggcaaaagcccgggttctgtatgctcctgtggaagagattgccagtgagggtcgtcttttacgtgcctgtcaagtcatcattgatgcatatgttgaagctggacttgtcttagagaatgatgctaaacagaaattaaagctacacgccactgtgatgaacgcaaggcataggaaaaggaacaagaacacgtggacaagaaaggttgattcttttgatgcacggggaatattcaagcagtatggatcagaggactgggggcagtatcttattcgtgaagctcatctttcgcagagattttctttcgatgaaaatggatactatcattgttgtgcttcaattccttttcctgaaaatatgcaggtagaatgattgatgtcttgttcattattgcctcacttttgtgtggaatgaggagaaggatttaaatggtagcttcaccaaatatactaaacttatctacctgcaaaagaaattgcctggggtttagatcaatttttagttagtgttctgctcaacaattgatatggcctctttgtagacttcaacttcctaactggtggtagtttatcgctgattgtttaaggaataaacaagtttcacatctgttttgtttaaaagttcttcataaatataattaggtatcgttgacaaggctccnnnnnnnnaaaan

SEQ ID NO: 69202 - DNA, 587 bp, Glycine max
  Clone ID: PAT_MRT3847_33501C.1
ggcgcgccctttgtgtttttctttttgtcggacgcccaagcccccccccagtttcccacctttagcctccgtcaatgttccaaattacaagtgttggcacatgttgcactaactgtgtaatagccttccgggggaatatgaactcatgagtctcattcaaaccttaccaacccttcttctgttcttcggggcgggcattataatacaaatgccttcttttccttttattttatgttttttcagaacttgcaaagtaaacaaggaaaataacaaaatgctgttttcacccccacttttataaattttggaaatcaggacaaaaattaaaaaataaggaaatttttttaattcttggttaaaacatatcaattaaagtaaactaaatgcatcttaaattttgtcagttccttaaatttatagcatatatgatgatatgatgagatcctttataaggagaatggaatgaatttactaaactgtaaccccatcatagtaaatcatttgaatctgagtaatatttggtcatcatcagcttggataaaaggttaaatgagatcttggttgactggtttaattttctatttttt

SEQ ID NO: 69203 - DNA, 580 bp, Glycine max
  Clone ID: PAT_MRT3847_33502C.1
ccacaaggtttcatcaatgatttgtttgtttacccatgaaactgacaccttacgtcatatttatgcaattggagacaaaatgttagttaaatagatagagggggcaatattactcaaataaaaaccggtgcttatctgaataagcaccaaaagaaattatgaattgggaggaagcacagaagaaaacaaaatgggacaaaacactaaagatggattcccgttgttctgtctcccaagctggggacccttttatctgaatggacatggcatgcagaagatccataatctgttacaatagtcttttaatttctaatactaataatcattatcttcaatcttcatatagcttaatcaacttcattgattgccatgctaattagtaactagagtactagactttattaattctcactttctttgtctgttcaatagcaaacaatgattatgaaattgaaccaagatgaattcatgacatgatgatgatgaagatgatgatgattgcatatgaaaaaatcacttgttgctcttcttaaccttgccaacacgtaaaaatgaacccaacctaagagattgcacttcc

SEQ ID NO: 69204 - DNA, 596 bp, Glycine max
  unsure (1)..(596): unsure at all n locations
  Clone ID: PAT_MRT3847_33503C.1
ctcccataaaggtttcagatcgtctgcatcaagttctccgttggggcacttggatctgttgagatcctgttgactaagcattgtcctatatggtatggatatggttgtggcttgaaatggctggagcgtttttcttacataaactccatcatttatcctttgacataacttgccttaattgcctattgcaccttgccggctgtctgtcttctcactggaaagttcatagtccctgagattatcaactatgccagtatcattttgaaggccatgcctaaaaggattgctttgactagttcccttgaaatgcatctgggaggtgttgggcaacatgactgccggtggaatgagcacttctgggtcattgtgttgaccaagcatcatccttttgggtatttctatggttttctcatgaatctggtggaagtttacacaaacttaacctcgacatcttatcctgcggacgcacttgactttgctgaactctacaccttgccggctgcctgtttgttgatccctcatttgaccgtgcctgacattagcatatttgccagtattgttttcatggcacttgcaataaacancggctatgattc

SEQ ID NO: 69205 - DNA, 388 bp, Glycine max
  Clone ID: PAT_MRT3847_33504C.1
ggcccgggcaaaaaaacaagaaaatgggttaaacccatcgggaaaaaattgttttaacagggaaaaaaagggaatacaggcttcctgaaacgcaaccaggggtggtgcaaaaccaagttgacattaccttttaaacgaacgaaccccaataaaaagaaagacaaaaaaatcaataagaaaaaaaaggggggaaaacaaactcggatgcacaaatgcgggccagggtcccaaaaaagttatgccccccgcgtatggagcagaaaaacggcagctttcattttccatttgagcaaaccaaatttttgttggtgaaggccaacagcagtcacgtttccacaggggagaaaattccgcaaatataatacttcaacatcttaattttgttcgg

SEQ ID NO: 69206 - DNA, 111 bp, Glycine max
  Clone ID: PAT_MRT3847_33505C.1
ggaatcggggatgggatcagtgtgaaacaaatcaggcattgtttcttgtaaacagcacattctatgaggtcctgtatacaacaaagcttgagaaacggcctcacacaagat

SEQ ID NO: 69207 - DNA, 186 bp, Glycine max
  unsure (1)..(186): unsure at all n locations
  Clone ID: PAT_MRT3847_33506C.1
gntaaacgantctatctctcttcgttttgttcttccttgcgctcctcntcgttcgttcgttntccctcgcgtagatcggcaatgggcggagaaccgagangtntgntttcaaggctgagatcaacnagctcctcagtctcatcatcaacaccttctantccaacaaggaaatcttccttcgtgaat

SEQ ID NO: 69208 - DNA, 152 bp, Glycine max
  Clone ID: PAT_MRT3847_33507C.1
cggtcgtcctttttttggtcattaaactcaattgtaattatgtgtgatatgaaaactgatcaaaattatatgattaatatgagactatctaattatttctctccacctacacgataatttgtgaactcaatctagagagatgctgccattcc

SEQ ID NO: 69209 - DNA, 787 bp, Glycine max
  Clone ID: PAT_MRT3847_33508C.1
ctgtcgcttccatatctgggggagcttcatttgcctttatagtattatccttctttggattgaagggagctctacacccttctccccttttgtcacataatttagatttgatgattgttttttttttagtttttcatttttctcttttgccataatctcgttcttgctctggagtatccttgttcaaggtatgtacatgattagatccatactgaatttgtctatcactgaagtgagcctgatatatatggaacctatttgatcattttggaaagcttatttgttgctataatcaatttttttattgttgtatttgtctaattttaattaatttgctgcacgttctgttggatctggacatgcatgcttgaaaatatatggtctagcggagtttaggacactagattgcatgtattgtcaagtatgttagttttattgttgaactcagtgcgaatttcctaggaatttctcatccctaacattgttgtacggatgtatgctcatgactcttgctcttgctcttggctgtgtcgttgatttgtctacatatttattgattggttgatgagacatgtgacaagtcttgggcttatagatcgtacaaagtgcttatagaaggttcaagactgtgattcgtgcggttttgtgtaactaaagatgacaaaaccgcaaatactttggttatattatgatgatgtccccttaagataatttttgttggaaaaacaatgtgaatgttttactttacataatttaactgaattttttggattgtgataaataaatc

SEQ ID NO: 69210 - DNA, 245 bp, Glycine max
  Clone ID: PAT_MRT3847_33509C.1
cacccaaacaacccctcacattaaattaaattaaagggccccccaaggggagtttggaatcctgtcctcccccaaaaattaaaagtttctttgggaatttttctggctgcaaggggagggaaaaccgggcgagaacacttaaaggcccaaaactttggccctggattttaaaagagggggtaggggcccacccgggggtgggggcttcaggattttcgggggaaccaattttggtgccttttttc

SEQ ID NO: 69211 - DNA, 474 bp, Glycine max
  Clone ID: PAT_MRT3847_3350C.1
tataactcaagggggaatctcatatattgaaatcctatagtttgagtaaaactgtaaattacatacttaacaaaaataaaaattgtaaactatataacaaaagtaacattgtattaaaattttctaaaatgactagatcaaaatatgatataatctaaattagctttgatagtgaaagcataaactaatgccccaataacaatcagtgtagaccattttcaagagggtgcttgtagattgtagaagcagtcagcaatgccatatcttcacaccctcagttgtttcctttattggctccaattctggttccaatattaactggtcccggcatatggcaatagcatgctcaagatcaattgaaacctcctttctttccccacacaggttcagaatctacagtgcaattgcaactaaaatccaaatctgatgtgtttcatctgcatatatgttacatggatcactgttgcattggtt

SEQ ID NO: 69212 - DNA, 172 bp, Glycine max
  Clone ID: PAT_MRT3847_33510C.1
cacggggtttgtttgaggttttctgttcgtttcatttcatttggtcgcacagtgctgttggccactgtctctctttctctttcgcgcttcaactttcgtttatgcaccgattggtctaaatggttggatgattttgcggtacagtacagtccatgttaggtcttggttactt

SEQ ID NO: 69213 - DNA, 1291 bp, Glycine max
  Clone ID: PAT_MRT3847_33511C.1
ggaagtaaaaaaagataaagacaagaatcggacaaactccatccaagcaaagcaatcacttcactacaagattttgtgagtttttcctctttctttgttagctgagcttggtatctcaaggtctcaatctctaactaggacgacatgccttctctctccgttttcccatcactcccatcgcttcaaaaccctaacttgagccaacccaatttcttcaatttccgcttaccgtcgctctgtcaccgtcccctcgtcaaaagcactgcaacttttcaccgtagaatcctctgcaaagccttcagagattctggcgaggacatcaaggcggtgctcaagtccgacgacggtggtggcagcggcgacggcggcggcgacggtgggggtgggggtgaccgggatgcggagaagaaagaagggcccttgccggaatggttgaatttcagttctgatgacgcaaaaacggtgcttgtggctctggcaatttcgcttgcgtttcgaacgttcgtggcggagccgaggtacattccttcgctgtcaatgtatcctacatttgatgttggagatcgaattgttgctgagaaggtttcatactattttagaaaaccatgtgcaagtgacatagtgatatttaaaagtcctccggtgcttcaagaagttggatatagcgatgatgatgtttttataaagcgtgtggttgcaaaggcaggtgatattgtggaggttcgtaaagggcatcttgtagttaatggggttgagaggaatgaagagtacatccttgaaccacctgcttatgagatgaaacccacacgtgtgccagagaactacgtctttgtaatgggagacaaccgcaataacagctatgactcccatgtgtggggtcccctgccagccaagaatatcataggtagatcagtatttcgctattggccaccaaatagaattgctggcacagtttctaaggaaacttgcagtgttgaaaccacgcagacgcaggagagtgcggagactgctctaccatctcaatgaccactctgtccatcgattattgtagactgtacaacctttcccaatttttgtattcaaagatataggataggatgtttgctaagttaaaaaacatttgtaagtttcttcacattcttcatattggttcgtgtaaattatctattaattcaaatatccagtcatcgtactttgcttgaagaagttggttacaggaaaaaataccaccaacttttcttagaatatattttgctttaatgaatgaaaagtatatacattataacaaaaa

SEQ ID NO: 69214 - DNA, 114 bp, Glycine max
  unsure (1)..(114): unsure at all n locations
  Clone ID: PAT_MRT3847_33512C.1
tcctctgcgctagtacagccgtgggacacgaaatagggttctgctngcaactaagatcgataagaggacgaagcggggaacagcnaccgnngcgggcggccactttgggagggg

SEQ ID NO: 69215 - DNA, 483 bp, Glycine max
  Clone ID: PAT_MRT3847_33513C.1
ctggtaaccctctccgcctaactcgccgtggcacgttcgaagcagactgcccgggaatctaccggaggaaaggctccccgaaagcagctcgccaccaaagctgcacctaagagcgcaccttccgctggaggagtgaacaagcctcatcgtgacaggcccggtgccgtcgctcttcgggaaatcaggcgttaccagaagtccactgagttgctgatccgcaagttgcctttccagcgacttgtccgtgaaattgcacaggacttcaaaactgatctccgtttccagagcgctgcgattggtgcccttcaggaagctagtgaggcctacttggttggtctgtttgaagataccaacttgtgcgctattcacgctaagcgtgtgacaatcatgccgaacgacatccagttggcgcggcgaattcgtggagaacgtgcttaaattactggcagctgttttttaagttttgtttttaacactatatgg

SEQ ID NO: 69216 - DNA, 244 bp, Glycine max
  Clone ID: PAT_MRT3847_33514C.1
ggcagcagcttcttccatggatctctcatccccatccttggctggcaaggacatgaagctggtcccatcaacgcacagaattgcaaagggcgaacatgaccgaacatacgacctaaacaggtctccatcacgaagcccatggaaaagcccacaccgaatcaaaaacgaggggccattctctgaccaaccccctaactaactaacacgcgaactcccaagtcactacggctgggacactgctggg

SEQ ID NO: 69217 - DNA, 278 bp, Glycine max
  Clone ID: PAT_MRT3847_33515C.1
aattgtcctccgaagaacttgtcatatgcgagttatctcaaagttacattacgtcatttgggttccatggctcaaggaagaagttcaggaagcttgaggttctgaaatttgactattgtagaattttaacagaggtacctgacgtagctgttctcgtaaatttgaaagaactatcatttaatcggtgtgggaatttgattacagtacaccactcaattggttgtctaaatagacttaagatattgagtgcttatggttacagcaagctgaccacattt

SEQ ID NO: 69218 - DNA, 293 bp, Glycine max
  unsure (1)..(293): unsure at all n locations
  Clone ID: PAT_MRT3847_33516C.1
cggacatanagcattttccccttgnncactcagatccagtgnncgttttntganccancggtgctgattcgttcncgcggaatcttggctcggcgtcggcgtgtaagtcatctcggaatgcncttggngcnngatggcttgggtgaaatatgntaganctagatngtagaagatcgtcgagttgntgttcaacggttantgttgtcatgtctgtngctctgntgccttggttggggtntcgatgatgacatcatctncagtngttcctgggcgtaacggagacgaagnccagt

SEQ ID NO: 69219 - DNA, 232 bp, Glycine max
  Clone ID: PAT_MRT3847_33517C.1
cacgcactctccgcgcaagctataccgttactgccagccagtgatccagctatggtcaacgcaaactcaaagctgaacttcttggccactggaagcaatgccgagaacaagcagaggacatggctcgcacgttcgctagacaatgtgagaggccagatacctagtcgtgtacatgagcatgcaatcgctgaggctgcagacactgtcgaggaggcatcatcggaccatagag

SEQ ID NO: 69220 - DNA, 453 bp, Glycine max
  Clone ID: PAT_MRT3847_33518C.1
ccagaacatcccacaggatggtgagcatctttacaatcgcgctgtttctgctgggagcgggcaaagcaaaggaagtttgctatgaacaaatcggatgcttatctgacgcggagccctgagccgggacagcaatcatgcctctgaaagttctcccctggagccccgagagaatcggcacctgcttactgctctacaccaacaagaacccaaacaactttcaaactctgcttccctctgatccatcaacgattgaggcatcaaattttcaaacagacatgaagacccggttcatgatccatggcttcatagacaatggagaagagaactggctgctggatatgtgcaagaacatgttcaacgttgaggaggtgaactgtatgtgcttggactggaagaaaggttcccaaacctgatatacacaagcttacaacaactttttgattgtgggcgccc

SEQ ID NO: 69221 - DNA, 224 bp, Glycine max
  Clone ID: PAT_MRT3847_33519C.1
ccaggattgatttgacttctctgtgtgagagggtatgcatattcaccagactttaaggttaaagtgatctggtataagcattattattttgagaacaggaagcttcagactgactctggaatgtcttcatgggtagcgacgatgactcctttactggagaataatcaaacgttctttgctgcagattgaagggttcttcgaggaggaagaacgcgtggtgaggg

SEQ ID NO: 69222 - DNA, 497 bp, Glycine max
  Clone ID: PAT_MRT3847_3351C.1
gaactactgctttcgtcccttctaagcttaacccattgcattcggggtaccaagtctctccatttgcacacataacaccactaaggaagaaaattaaccaaccagttgctagattgtttgggccagccatctttgaagtgtcgaagttggaggttttattcttaggaatggaccaaaagaaacaccccgcggatcttccaaggacttacacgctaacccattctgacattacctctaaaatcactctctccatctcgcagaccataaacaactctcaggtattgaacgccttcagtcacggtgataaaaacttgttcaaggactacccagaattgcatgatgcattggtttgggtttactttcactcaaatatttcagaattcaacaaggtagaatgttggggtccattgaaagatgcatgtgcattcccgagtgggtcccatgaagtagttatcgatggtgcaccacagtcgtgccaagaaaattgtgaatgttgc

SEQ ID NO: 69223 - DNA, 709 bp, Glycine max
  unsure (1)..(709): unsure at all n locations
  Clone ID: PAT_MRT3847_33520C.1
ggtagtaagggcaatgaaaatagatatttgaactaacatgtgagtaataataaaataaaaaaagttgttgattcattgtatgctagttgtgagaacataaatttaacggcaggggaggcccatcaaaatttaaagaagcttgtacattggatactattttctgtatatatcttgtattgaagcaatgcaaactctatttccatcagcatgatttgaccaccggaagaactgtgctccacacaactgtaattatatttgggagtcctgcaacaacaaaagcatacagcaaaagcgtaaaaaagaatagctacaaaataaaaggctaacataagggatacaattttattcggttattcccaacaaaagcaatgatccaatagcaacatcacgtcactaaatcaattttagcaatgacaaacatctatcaggaaagcaaagttgttattatttacattgaagatcttctcacttttcttttctttttctaggaaggggaggagagggaggatgcanagtcgttagcaaaccaagaaaacagagattaatggaataccagcagaagcaacaaggaatcagggattcctgggacaaggaatggagacactgaaccatttttaaacgataaccatgtagtatgattttggtaaactcatacancagaaaccaatacgacagaattgatgaagttcatgcacaacactttcaactg

SEQ ID NO: 69224 - DNA, 669 bp, Glycine max
  Clone ID: PAT_MRT3847_33521C.1
cctcatcctcgagctgcgacaacacaacatccactgtctctctctctctctctctctctctgtttcagtgtttcacaaatcacacgcaagggcgatctgagtggatgagatgtgaaacttcgcagctgatcaccatcgccttcttcctccccttgtttctaaccaatcttcaaattccatgtttttttaggtatgaaactttatttccttcctttttatttttcgttttaactttttataatctttcaattatccttttttttccctctctcgagattatatgcaatgtttgccttgctatggattctccaatatttcagaaatctaactatctaactgtaaaatatgcttttgcatcccttttttccgtctttgggtttattaggcttcgattattttcatgtgaattaacttcataagaactatttcgtccataaaagaagagaaagttgtaagagcaaacaagttcactggagaacccaaagccgtcgattttgggttagcgtatgcaaattttactttggctgcagaaagaaatggttttgcttaaaagtctatttgtagtaaagtttttgtttcaaattttgtttcttaaatgtaagttgtaatcaaacttagtatgaaattttcaatccaatgcccacagtttttaagttgaacagttttttt

SEQ ID NO: 69225 - DNA, 363 bp, Glycine max
  Clone ID: PAT_MRT3847_33522C.1
cttattttcttgccaaaatgactcttttctataataatctatggggtattgttggtggatccgagaagcctttaacttgatttataaataaccgaaacctgtcttctgaggagtatgatagcactactttggctgctgctcaagcacgactatggaatgtgagggaagaacagaccaacctgaggaagaaaacaatagatagttgaacacctgaaaataaagggttggcgacctatttatcatggctgcgacatggtaaatcaatgtgcctgaatagaggaactcttagcatcctgctgtcacaaattatgacttgaccttgatgcacgagaagatgaactttcaaaatcaatcagctcatgt

SEQ ID NO: 69226 - DNA, 595 bp, Glycine max
  Clone ID: PAT_MRT3847_33523C.1
ctccggcggacgtgaccacgtgtttgtgctaaccggggtgttaaaattaaaataaaactgaagcgttgtttggcagacccggtggcgattttggtggttggtccagaggtggtggtggttcaaactgtggcgagagtgatgtggttccgcacacgcaagtttctgtgattaaagatgtcattgtgccgtacatgcatctgctgcccagattggatttgtcggaaaacaagggaggtataatcagagagaagttatgggatctattggttagtgaacctggtgttataatggaggaaggcttccctaatgcaactgggcgagagcaatcaattaaagggatgagaacatcagagttttgcctgcatccagctggggatacacccacttcatgccgactttttgatgcaattcaaagtctttgtatacccgtcattgtcagcgacatcatcgagcttccatttgaaggtatggtggattatgcagaattttctgtttttccagcagttaatgatgcccggaaacctagctggctaggcaatcatcttcaaagcttttccaaagagcagaaagacaggttccgccaaaatatggctca

SEQ ID NO: 69227 - DNA, 591 bp, Glycine max
  Clone ID: PAT_MRT3847_33524C.1
gccttgccacgccgtacgttaagccttcggtaatttcgggcttccgaacctttgtgttaccacccccaccccaatttttggtaagataggtcatcttccccctcccatggtcaaattgaagtttagaacttcaatgggaaaagcttttgggccctttttaacaaaagcatttttttataaaggaatgggttggggaaatgccattcttgcattttttcttttcttgatatggctctaatattggacccccacccccccaaaaaaaaaaaaattatttaccaaaaatggtctttaatttaacggatttgcattaagtttacaaataaaccatagcctacttgacatcacaagattgcttactatggttttattgaaaggttcctgtaaagactcttcagataaaacaaaaagctgtgatgggtaaagctgaaaaaaccccagttgttgctatcaaaaagcgattaatctttatcacacttgaggggagtgaggccacacaggccacaaacatatataatgggggcatctttaaaaatgggtcccaaccattttcaaattgaggtgtatttccatattttgctaacaaatgta

SEQ ID NO: 69228 - DNA, 2025 bp, Glycine max
  Clone ID: PAT_MRT3847_33525C.1
aattcggccgaagggaggagagagtcgcgaggctgcgaattttgattctgagcttagagagaaggggaggattctggatgaagcgaatgaggttatgaagaagcaggaggctgagcttgaggagctaaagagggtggttcgagagaaagaggaggagattgaggttttgttggttcagagggaggttgagagggagaagctgagggtggctgaggcgaatttggagaagcaggcaatggactggatgttggcgcaggaggagctgaagaggctgggtgaggatgctgcgaggcatgctgaggagagtagtgagaccttggaggatttcaggagggtgaagaagcttctcaatgatgtgaggtctgaattagtttcgtctcagcaagcgttggcatcttccagaagcaaaatggaggagcaggagcggttgttggaactgcagctgagtgagcttggggagcagagggcaagtgtgatgtcctacatggaaaatttgaaggatgcacagattgaagtggagagtgagagaacgaaactcagggttgcagagtctcggaacagagagcttgaacgggatctgaagatggaaaaggagcttattagtgagttggaggaggagctgaagaaagagagaacttctttggagcaggcagtcaaagaagtggctttgcttcaagaggaattggagaagaaaactgccgagtttagagaaacaagtgccgttcttcaggttaaagagtcagagcttgttgatgctaagctagaaatccagcgtttgaaatctgaaaaggcttctcttcagggtatcttggaggagaaagacttggagctttccagtgctaggaaaatgctgggggatgttaaccaggaaatctatgatcttaagatgcttatgcacagtaaagaaacccagctcattgaagcaaacagtatgctaagggacaaagatgagcatgtgaaggtaatccagaacaagttgaataatacaaaccagaaggcttttgaggctgaaactgtggtagaaagaattttagatctcacaaacagacttgttgcttccattaaggatgaagatatgaactcatcaaaaccactactagatgaaatgggtaaccaactacttgatcaactattggagaaacctgctaatgaattgaaatggcaacaaaaaagccttgagaatgagcttgagttggccaaggtaaccttaaaagaaaaggagatggaagttcttgctgcacagagggctctaacgataaaagatgaggagctgaagatgacactttcaagattggactcaaaagaggaagagttgaaaaaagtaagggaagaagtgacagaagactccaatgatcttaaaaggctgtatgcttgggcacaggagagaattggcgagaaaagcttaggtgatttggcaattgagaagcttcagcttgaggcagctcagcttgaagttgaagctgccaccaatgcactacaaaaactggctgaaatgagtcgacaacttctgaacaaagctatcatgagtgttgaagctgataactacatcagtgtccctgatggtaataaagcccccgatttgatccccgacaccaataaccctgaatgtttcgaagaggtaaaagcaagagttgctcgcctctcatctttgtctgagcagcttgtgatgcaggcgggtattgttcctgcaaactaagagagagaggtaatgaagaaagttgtgtgtgtgttggggggtattgtattttgatatctttttgctcccaaagccattgcaaggctaacttgtcccttggtagatcataaaatcttcccttagtttgcaagatatgtacaatgtacagatagtgatcacatctgtttttggtactctactacaagatatgtacgtacaatcattacatgaggagttactattttagtgttactcttaaaggattatctctcctcctctttattattattattataatatgtagtgaatttttcattatgtacattatgaataatatatttattatatat

SEQ ID NO: 69229 - DNA, 466 bp, Glycine max
  unsure (1)..(466): unsure at all n locations
  Clone ID: PAT_MRT3847_33526C.1
cctcgagccgaatcggctcgagggaagttctatatatgaatattagcagtgataacttgcatcatatcaaaatctttgggcaagatagggagcttaattaaagtcctaattaaggatcatggaatcccaaacacagtctgagctaccagttgtagacttcaccaacaaaaatctgaaaccgggtactgatgcatgggtttcagcttctcaagtagtgcgtggtgcacttgaggatcatggtggtttcttggcactctatgataaggtcagtttggagacatacgactctgtttattctgaaatgatgaatttttttgacctctcaataaaaacaaaacggaggaaaaccactgagaagcctatattcagctattccgggcagctacctgggattcctttatatgaatctgttggtatcatgaacccactcagctttcangattgtcagaaatacacacacgttatg

SEQ ID NO: 69230 - DNA, 366 bp, Glycine max
  Clone ID: PAT_MRT3847_33527C.1
attctatatgatttgtggttggttttttttattttttcattttttttaatttttgtgttattatttgatagttgttgtataattccttaataaaatactaacattgagcttttaggatttatatatacatgagagttgtggaacggggaaaccgggactaataaaaaggcaaaaccgggactagaatttatcaacctcaaaagaaatgcaaaattccctgtcaaactttggaagaaaaaaaaaattgccaccggaaaaacttgagcaaaaagaaccttgggttgggaagagaagcagtcacacaaatctctttccatgccaaattcatgcggaaaaaaaagcacccccacgaaaagtgcaacgccc

SEQ ID NO: 69231 - DNA, 488 bp, Glycine max
  Clone ID: PAT_MRT3847_33528C.1
aaaaaaaaaatatgggttgcaaaaataaaaaaagcttagggggtttttatttaaaatccggggttgttcccggccacaatcaacttaaatccctttggggggccctcccccccaacaacaaaaattttgagggggttgaagaaataaaaccttctccaataaagggctcgcataagggaagccctacagccccccttgattttttttattcggaaagaaagggtttaactggtgcctaaaaatcccggtgaaaaaaagaacaaaggtgtccatggtttgttaaaaacctggtgcttgcacagttgggggggcggttgattttgtaggggacattgcccttgcaaaaaccagggggggcctgaccaaacggggaattgaggttgcacctagcaacatcccccttggaacagttgcccacagtttgtttgtcaacgggggggacagcaaacccaaaaatgtttttgcctccgctgcacaaaagggttgaa

SEQ ID NO: 69232 - DNA, 609 bp, Glycine max
  Clone ID: PAT_MRT3847_33529C.1
ctatttggcataatccagaatggtgctgtatttggtttatagaaacgccaagccacaaaccattggaggagccaacgaaggttcaggaactaaatggtcatattattgacgttgtgaagccaaatcatgcaacaaaaaatggtcatgtgcctgtgattgagatagctagcagtgtgtgaaaatgaagcaataatgaatcgagtccaaagagaaagaaaaaaaatgaggccccaaaatatttaagctaaaagtacgattattacttaattactttgccaagtggggcctcatcttaacgcaagaacagtacgtgaagtttggtgtttagggttcttttaagtaacgtgtttgcctcaatttgtagcaataatatgttaggtggtcaattatgttagcatgagagtctctctttggcctcttccatcactctcactgtagtaaaacgtgtaacaacgtatcttctctacttctttccgtgtgtgcccttagtcaaactcctcaattcttgtacgcgtaatatatgttcatgtgatggaattaattattattttacaaattatgcaatttatgagactaaagagcacacttttatttgtttccatgtgctac

SEQ ID NO: 69233 - DNA, 431 bp, Glycine max
  Clone ID: PAT_MRT3847_3352C.1
gcattcaataatactaattactgaaatcatgctgcctttgcagacttaaacgctaacgggggcttgcagccttgccatgacctgaatctatcacacgggaaaaaattgtttttatcatagactctgcccagttgttttccctgaggcacccactctgttctacactaaaagacacgacctctgggagttcttgtgcatacttgtccaacgatacggctctttttaatccaacatagtgaagcctccatctgctgtatacacccattctttcctcatcacgcttgctgtttagagcggaaattcggaacattactaccttctcttgaatattattgactatgtgaaagctatcacaatggcaggaatgacagtcatagctccaataatgctgatgtatgcttgccccctgcgcactgtgagagcctctcatt

SEQ ID NO: 69234 - DNA, 568 bp, Glycine max
  unsure (1)..(568): unsure at all n locations
  Clone ID: PAT_MRT3847_33530C.1
ggcgagagagatagttctagtagagttcaaacannagtaaaaagaaacaaaaataatatatgttaataggtgaagaaaaatcnntccaagcaagcgcatgtgaaatacattgtgacgaagaagagggtgcgcgtcataataacctattattcnnccatcatagaaggaannngccaaagaagaatgttctgatgttaaatcataacccctgaagaaatactatctataagcgtgagaattatacnttcaggtaggtgtcttgaaagccagaaacagagctgaagaggtgctcgatgtaattgtaacctcaagcagaagaaaatctaaccaagaataccaaaatcagtttcacgaggataagaaacnaaaaaagagaaagagncttgaggtatatagaaagagtcnagatgaagagaaagcgggaattcagacccaagaagaaagcaggatcccatggtgaagaggcttttgctgaagaagaaaatatcccacaaggaagaatcaaaatgtatgatgccagaatagtagttcaaaaagagacagatggcatatgaatcaagaaggagct

SEQ ID NO: 69235 - DNA, 632 bp, Glycine max
  Clone ID: PAT_MRT3847_33531C.1
gcgggcccatctccccatgcccatcacaaacgccaaaaattccaaactgaaaattaggaatagaggtgggttaggtccctctggtaagcacaagtgttcaacatcgaagtatcaaccagaaatttgttgcctaatttttcatctaagataaaagagtaggctggaatagaattcataaccatttaccttctcttggccttcccgtatgggtttattcctagcatcaaggctcagattgaatttcattccagatatccattttccaaatgtcatgtactatggtcaagtattccaaaaacaaaagtgcactgcagcttttatcttacaaaatagccatcttcctcacatatcattttgaagcacatagtagcaaagagtgttccttattttgtgtggacaaaaaaaattgtcacagaaaaattattagaactatgatcaggacaaaacattttatacacagaataaccaaaataccaaaaaaaatggaacatacaagttaaaatgcagcaaatttttcaattaactatgcatataaaaaatagaacacacattgaatagcagtgggttgaaacatcagagaaagaagccataaggcataagcaaaatttaattcataaaatgtttaaggcttc

SEQ ID NO: 69236 - DNA, 554 bp, Glycine max
  unsure (1)..(554): unsure at all n locations
  Clone ID: PAT_MRT3847_33532C.1
tccaggtccgtcactggcagtgccagggaggcccggcaggggggttgcggatacgcaacagcgaaataaccgaccaacaaggtaacgaaggctgggttacgtagtgcagcccaactagaagtatagcgtaacattgcgattgtgagtgttgcgaaagacaactttgcggaggcagaggcaggtagtattaacggttgtacacaagcgagtaataacattgccggatggtaaactacacaagctgcactaccatatgcctcaggtaacaacgcggcggcgtacgaaccagcccccgcacagtacatggccccaagggtggtctgaagctgcagcttaatgagtgacccacacagaaaacgccaccaaatgattagtttaataaggtgcatattaatagacggcagcggcagcttagccagagcgtacaaacgagctanncactgagctagtcggttaagggccatagcacgccgctaaacggtncgacaaaacaaaggttttgagagcggggcttacttgggcgtggaagtaataggcaggtcntatgagtagta

SEQ ID NO: 69237 - DNA, 425 bp, Glycine max
  Clone ID: PAT_MRT3847_33533C.1
tggcttggaacctttgggctgcctgaccctctaccccggcaaaagcctgaggatcaaaaatacaacccgttttaccacgaagcgaagatgagcaggcaaccacacaagaaatcctaacccactgaatgcatacgactggactagaccacaccaatacgtaagactacggctaaccccattacataccgtatagccagccgccttccaacaattcgagcaaagagccggcaaaccccaactagatatattcactccgtacagtcccggaagtttctagacggctttgatgcataagtaaacgcatacggtgagtacaccccgacaagtacaacgtgcccctcgcagtcgcactttttgccgtaataatagtaagaatccgatttccgaacagaggcgacgtcttactataaaccgtataagtatca

SEQ ID NO: 69238 - DNA, 581 bp, Glycine max
  Clone ID: PAT_MRT3847_33534C.1
gaccatctcactagtacttcggccgccctatcttattgattcatgggatatgccaaagaacaaccctcatactggtggttaatacatacgatcagaaaataacagactacggttgaaacctaccccccttaacatgctagggggaatagaagctactatctgttctgcaacaaccacacgatttctgttcaaattggtaggcaccactgccgctctaactggctactttatcgccaacgtgtttgacatcgcaccattctacatgaacaaatttaaaccttcttgtaatccaaacaccctgatcaaaacctccaacgggatgaaacaagatcctttaacctgcaataacaggataaattcatggataagaccgaaaggatgcaccaaaggaatcaacgaccccactctatggacaaccgctaaaaaaagtatgcctaggaattattcatacctacgtactgccttaatgaattgtcgcaacctcttatatgcgtgaaacgattgtggaacgaaacaaagggggggccctaagacgaggctgaatccatacctaacctttctacaaggacctcaatatattc

SEQ ID NO: 69239 - DNA, 750 bp, Glycine max
  unsure (1)..(750): unsure at all n locations
  Clone ID: PAT_MRT3847_33535C.1
ttggttaagaacaagaatgatattctttggtttcggaaatcttgagccaaatggatcaaggatggagaccacgagacgggatatttccatggtttgacgttggttaattaggaggaagaaagataaatatgtgatgatccaagatggtaatgagagttggattgatgagccaaatgcgttggaggaatattatattatgggtggggagggtgcttttccaaagcttgagagtgggaggtttgggatttgggaaaaagcattaatgtgttactagggaggagattttccaaacgttgaagtgtatgagaagattaaattaaagatatcacgctatttttttcagaaccaataatggagggtgattggcaaagaatttcgtcttatgcctatactattcgtcagactatcacaactcaggcttttgcgcatgcttgtcataaccaaaatactcctccgatcctcatcaagaatatctcatcagcaatgagtagtgaggctcacgatcatcgtcctggagagtggggagtagtaaagctccaaactgtcatcatccatcacctcataatgtttcaagcatgttgttcagttgcattgcaatttgaagaataaaatgacctgactttcagtgtttggccccatgcatcaatcatattnnnacaaaaattactataataagcaaacaaccagaaaccaaaaaagatgaaataacaaagggtcacagnnnagtgnnnaaatgagattnnagtagtg

SEQ ID NO: 69240 - DNA, 413 bp, Glycine max
  Clone ID: PAT_MRT3847_33536C.1
gattataattagtgtaagaaaaaaaatttgtgtaaaataattgttattttaatttttatgtaacattaattatctttttacttatatatcttatatattaaccgtgaacaacaaaatttataaataaataatttaatgatgatttaaaattaagtacagctgagaatcctacttggaggtggtgggtcggtcccctactctaaaattggcatgtagatggttgctcacagtcataggcttgatgttgatgtcatgttttgttaaatttcccttcaaacagaaccacagaccagttatctgccaatgctaataacccattagtttgatcaagcagcctcccccacttgtggaatatctagaacagaacttcaaatcccattaaaaccttttctttagttgcatatgtgaaaaag

SEQ ID NO: 69241 - DNA, 468 bp, Glycine max
  Clone ID: PAT_MRT3847_33537C.1
gatagaacaaagtatgttaaagagtgtgttgttgacatttctcagtttttatatgatgaaatcctttgccatcttggatttcaattgagtggctgatttgattttcatcaaagattgacagctaaaggggaaatagttttgggtgttgaactgaacatccttgagaagctttgtttggtcttttaaataccaaaaccaccttgttgtgaattaatatttttgagaggaaaacagacattgtaaagcagcttaataaatgttaacattagaaaaacgagtggcccattttcctcctcaatttctgctttgatgtcatgttgtggtgtttaataagccactggcatattatacaattgtttttgaggataaggataaaatgttaagtgccatagcacgtgtaagttatttagttaatgtgtttagtttatgtcaatttatgtgatttcattcggaagggtaaaacatcat

SEQ ID NO: 69242 - DNA, 623 bp, Glycine max
  Clone ID: PAT_MRT3847_33538C.1
gaattcggcacgaggacacaacgatccaaaggcaaccctaaggctggtggtaaatccaacttcaaccctaaactctatgaaaagcctggccttactgaagacgaaatccttgaaattaaagaagcttttgatttgttcgatactgatggtggtggttccattgaccccaaagaacttaaagctgccatggtctctctcggattcgaagcccaaaatcaaaaccatctatcaaatgattagtgacttggatgccgatggaagtggagctattgattttaaggaatttttggatatgatgactgctcgtatgagtgatagagatacaagagaagatatcgaaaaggtctttaaattgtttgatcatgataaggctggcagaattaacattaaggatttaagaagagttgcccaagaattaggtgaaactatggatgatgctgaactcttggaaatgatcgaaagagctgatagtgatggagatggcctcgtttcccttgacgatttttataacattatgaccaagaagacttttgcctaattgttcaattttaaacttttacacttgatcttcatatatatcttcaagctgtaacaattatcggtttgtttcatgtatctcctcc

SEQ ID NO: 69243 - DNA, 166 bp, Glycine max
  Clone ID: PAT_MRT3847_33539C.1
acagccaacactacagactctaatctcttttcaccacaccgttcatgcttgataggctaggttaactttatacatgcgctaggaactttattacttcacatacttcgctaccactgctctctactcatcattttcatatactgtatcccattgtacccattcttac

SEQ ID NO: 69244 - DNA, 536 bp, Glycine max
  Clone ID: PAT_MRT3847_3353C.1
ttcaaactttcttcatcttcttctcacctcaccccttctcatttccgacatcaaccatggtgtctcaggtgagtgagggttcagggattgtttcgggaccgtcattttagtttctttttttttaacacgtgtcttggaccggttaggtgaccggttcccgggttaatgagtcaacccggccggtccgagccgggtttaataacactgcttcaaaccataaataacattaacataggatagaaagacaaggtgcaagatgtcgcaggttcagtccattaccttgaagcacctctcactaccaacccacactttcgttccttcaaagttcaaaattcctttgaaccgcaatttttctttaacacccagattcacattctcttcatcactctctgtcaaatgctaccaccccaacctcgttcaacccaagccattccctccactgccacaacgccctccatttgcagaattgccgcagcaaaggttgtacgtgggttactccgtttacacgaagaagggcatgctcaccgtgattccta

SEQ ID NO: 69245 - DNA, 265 bp, Glycine max
  Clone ID: PAT_MRT3847_33540C.1
gcggactctaactcacattctatcttcaatatcaaaaaatactcgcaaaacacgacctgcgcgtatttagtattcgatagcaatttatacatctctctatctatatatatatccggcatctgaaaaatttattgcagctagcgccaccttacacactcctactctcactcctaccacacctatctctctctgtctgtctctgatacagggcctcaaaactctgatcacggctcgtctgattctgtctgaaccacacagagtgacc

SEQ ID NO: 69246 - DNA, 446 bp, Glycine max
  Clone ID: PAT_MRT3847_33541C.1
ttttttttttttttttattctctcacactttttatttggttacttcggggaagaaaaaaacaattgttagattcaatcaggggcaaacaaaatcccaaaggcattgaacaaatttttgtcttgccggaggaccaaaaccaaattcggaactttagtgcggccccccctttttttttttccttaacccccccatataaaaaccccctttcagggggaatctttttttcccgggggggggggaatatttttttcccccccccccccacacaaattttttttttccatatcgaattaaaaaaaaaatctttggggtagagaaaaaatatccccccccttttttttatttatccccccaaaaaaaaaacaacacccttttgttgtgggttgtcccccaagaaattataatccctatttttttttgccacaaccccatcttttttttttat

SEQ ID NO: 69247 - DNA, 304 bp, Glycine max
  Clone ID: PAT_MRT3847_33542C.1
cccaacaaacagggggcaatttttttatcgcccatctggcttttacaaaaaatctttccaaagcctctgtgaaaaaaaaaaaaaaaggggcggcccccctttcttttcatgattgacttcttcagatttttttgcttaatgcggaaaacaccatggctctataaacttcataggccatgctctgtcgctttatagtgctgatggctacttgactaacccagctctgggccctgtggctagagccaacttatctgcaccgtatattgcacgcccccaaggaggcccaccttacgtatatgctttg

SEQ ID NO: 69248 - DNA, 298 bp, Glycine max
  unsure (1)..(298): unsure at all n locations
  Clone ID: PAT_MRT3847_33543C.1
agcaaatacggattcaaagagacagtgcggtannaatcatactttatgctgtttactatgatatttatcgttctttttcacactatagcaattcaaattctaatctggagatcttgctcccgttgtctgtacctgcgttctctcctttgtcacactattacatgtcggtgaggcactatcctccttatggttacacgtgcaaactgctgaagacactataagtgggttctctgtgtctgatctccttggtcctgaccccatccctgatttggggggtcgctactcccttataccaaag

SEQ ID NO: 69249 - DNA, 604 bp, Glycine max
  Clone ID: PAT_MRT3847_33544C.1
cttgcccctgtctgagcaccccactgcccactgatacaaaacttagggggagggttcacttcaataatacacactatttttttttgggttcaactctaatccagttctattaaattatcaacaattcctccttgaaaaattcttttttctgtccaaagtttcctttaaagccaaacactttgtcttgattacagtatgcaatgggattacatatcaaatgacttgctacatacaaggtcataaaccttgcactatcctttgggctgatttgggggttctgggaacactatgcactaaggtagctgctattttcacccaaaactatttgtttggttcttctagggaatgctagctgggccctgtgtccttctacattaaaacaatttcttatgattatgcataaaagcattgctagcactttattcaattctttcttcctttagttagagcttgttagaaattatgtaaatatgatactttttgaaaatggggatattatgacgccgtatctatcatatataattatgggtaatgcattccatgccacatttgctagtgacccggtggcaccgccaccacctaaggcaccccattccccaaagct

SEQ ID NO: 69250 - DNA, 619 bp, Glycine max
  Clone ID: PAT_MRT3847_33545C.1
aaaacaattccggtaacaagaaaaaaattctttttttcacattttggggacaaaaaggcctaaaaaaccttcctaaaaaaaaaaagccgcagcaattaacccaattacttttttttggtcccggggggggggagaaacttaaaagcggggggttatcatctttttcccatatggggaagcaattttcaagaggggccaaaactggttgaaaaggaaaaaaagtttttggcccacgggaaaagaaaaaaggtggcatttgaaccccctttggggggggagaagtttgttttttaacaacctgggatgctggcaaaagggggcaaaaaagggggggggccccggacccattataaacaccccctggggggggcccaaacttttaaacccgggccccaggggctgggaagggtgcaaattccctggaggaggggtttgcccctcccccacccctaaacaatgatgggggaagaggggcccccttaagaacattgggggaaaaggaagaattttctttttaaatttcaaaaattttttgtttaagggaaataaaagcctcacaaaccctgtctagttaaaccttgctttcactctcagggggcccaaacaagagggggccagg

SEQ ID NO: 69251 - DNA, 489 bp, Glycine max
  Clone ID: PAT_MRT3847_33546C.1
tttttggctttatcttttttcgacgtcttttaccggagaggacactctttgtttgctccttccggcgaaatacccgttagggagtttttctttttgaacgatactccagacagcgtttcgattgtgctgctattccgtgcccgactccgctgagtttggccgacccaatcttgcgggccaggggatggaggattgcccctcaccgaagaggaaccagtttcacccgtttgctccagattggaaaaatggttacactctacaatgtttaacccattctgtggtccctgtagcacactatcgtagatactagattcttcatccttacgaaacgaagctattcatgatattgataagcgtgcttctgacttgaaaacattggaacgaactgaccggagcggtttgccccttaataccatctaaactggagagaacaagacctctatcgagaatggccttcatttgcaaacaaaagaaaagatgcgggctgct

SEQ ID NO: 69252 - DNA, 232 bp, Glycine max
  unsure (1)..(232): unsure at all n locations
  Clone ID: PAT_MRT3847_33547C.1
aaactnattattcttcttaacaccattttcaacaacactttattttccctttccactccaacaccctagggaagtgttttaaaaggaatgtcgcggtcccaatcctctccttcttcaattacactctctatctcaaattcctctttttctcttcaaattcnttgcagcagcctcccccattttttttttttttctaccctaactccaacttctacttccatatcaacctttt

SEQ ID NO: 69253 - DNA, 363 bp, Glycine max
  Clone ID: PAT_MRT3847_33548C.1
ccaaggttcaatcttgccatcatcaatggcatcatgccctatgtgcgatcagaagcaacctatattctttagacttgtcactcgtcatttatgtttacaacgcctctgcttctagacttgacatagccgactttaaacagtgcaaggagcatagggattagattaacgcaatgctgcaacaagaaccaaatctcattcagcattccatacgttcagactatctggtgaggctgatgagtactcgggatggtacctggatctgggcagtggctaaacagcagagccttgtgtgtctcagatagaagggttgggaaagtttcaagggagaagtgtatcgatccagcggttacagacaccgtaagg

SEQ ID NO: 69254 - DNA, 409 bp, Glycine max
  Clone ID: PAT_MRT3847_33549C.1
aaaaaaggaaagcccctttgtaattagaggggaaagtccttcttaaaagagtttttgaaatttttgccccccccttttttaataaaacagtccttttaacccagttaacaaagacccccaaacacctttgaagccctgggaaaaaaaacaagaagcttttgggggcattccccttttttttttaaaattcaaaggggggggtccccaaagctttccccccttttttttggttaccgcaaatttgcaatttgacccaacatttttcccattttgggggctaaaaggagggcccttctgggggggggacaaccttccggttttgagggggggccatttcctttttcagggggggcaaaatgtcccccatgggggaccctttttgccaatttggaaaaaaaccaaatttttt

SEQ ID NO: 69255 - DNA, 311 bp, Glycine max
  unsure (1)..(311): unsure at all n locations
  Clone ID: PAT_MRT3847_3354C.1
cttgtaacccnattttaagngaagancngcagcgcactcttcggatcaattgaatgatttaaccggtggccacagttggaatttctgagaatacaggtatagcattggcctgtgctatgaatagttcttttagggggcgtgccagttctgatatttacaccatctgctctcaagactgtgaattatggaatcctgcttgcaccaaagcaatgactatgtcatttaatccaaacccgtgttcttgatgcatggagttctggaaatttcttatagcgtacccggattttcatttgtgtatattcaattttgtg

SEQ ID NO: 69256 - DNA, 154 bp, Glycine max
  Clone ID: PAT_MRT3847_33550C.1
accccatctcacattggtccaaagcaaccttcgcgacaatcgctcgcgcactcagtacccattctgaacatcgaaccattcatcgcccaacggcacaacaggtccgcggagaacgggggcggacattcacgaagcttatccgccggctcttcgc

SEQ ID NO: 69257 - DNA, 632 bp, Glycine max
  Clone ID: PAT_MRT3847_33551C.1
gcaagcagcatttcctatcccaaccctaaccctaacttcgaaccttcgtcctttctctcttcttccttcagattcatccgtaccgttagttactactggattcgcggttgattgctgctaccgggtttctcctctttcacgtataagattttgagttggtttctgaatataaatggacgccaaacggttcatccagctggttgaggagaagaagaagaaaattatggagagaaaggaagctcctttgaaatgggagcagaagctggaagctgctgctgaagctaaagagaggaagctgaaggttgcaaagcatacaaaaagatctggctctgatagtgacagcgattatgacagtgatgatgagagtagaaagacaagtaaaagatctcacaggaagcacagaaagcattctcactacgactctggtgaccatgagaaaaggaaaaaaaaagttccaaacggaaaacaaagaaatggtcctctgaatctagtgattatagtagtgatgactctgagagtagctttgaggaggagagaagaagaaagaagaagcaaagcaagaagctgagagatcggggttcaagatcagattctagcaactatgattctactgctgatgaattaagcaagag

SEQ ID NO: 69258 - DNA, 1508 bp, Glycine max
  Clone ID: PAT_MRT3847_33552C.1
tcgacagaaggggagacttttctggaatgaatacgggcaagcagcaagtcctatcccaaccctaaccctaacttcgaaccttcgtcctttctctcttcttccttcagattcatccgtaccgttagttactactggattcgcggttgattgctgctaccgggtttctcctctttcacgtataagatgcacttccggtcatcattttaccaacatgcagattttgagttggtttctgaatataaatggacgccaaacggttcatccagctggttgaggagaagaagaagaaaattatggagagaaaggaagctcctttgaaatgggagcagaagctggaagctgctgctgaagctaaagagaggaagctgaaggttgcaaagcatacaaaaagatctggctctgatagtgacagcgattatgacagtgatgatgagagtagaaagacaagtaaaagatctcacaggaagcacagaaagcattctcactacgactctggtgaccatgagaaaaggaaagaaaaaagttccaaacggaaaacaaagaaatggtcctctgaatctagtgattatagtagtgatgactctgagagtagctttgaggaggagagaagaagaaagaagaagcaaagcaagaagctgagagatcggggttcaagatcagattctagcaactatgattctattgctgatgaattaagcaagaggaaaaggcagcacaaacggcaacgcccatcaaaatttagtggatcagactactctactgatgaaggagatagtctagttcagaaaagaaatcatggaatgcatagcaaacgccatcgacaatcagaatctagtgaatctgacttgtcaagtgatgacgctccccataagaaaggccacagaaagcaccataaacatcacaagcgatcacataatgtggagctgaggttgtctgattctgattatcgcagtcatggtcaaagaagcagatcaaagtcattggaagaaaattctgaagatgaaagcaaaaaaagatcaatggataagaagtctggtcgccatcaccaccatcgtcaccaccaccatcgccaccaccaccatcgccaccacttggatgatgagagaaactacatgcagcaacactctcctaaattcaatggaaagcatggcgaggagttagacaaaactgaaactgagaaaaaggatggtggtcatcatgaaagtagagctatggttgagaataatgatggtcaaattttttgatttttgagaatctgtcctgctatctgtttgtggtgcttctgtactggaattggtaacttactatttgatattcaaattaaagttaaaggaacaatttcattatttatgtcggttgtaatattggcggcagttattgacactattgaaactttgttgggtcattgttggctgatgacattaagttgatccttattcatctataaacagttgtatttgaagtttacaaaaagaatactcttgagggttcttgagggtaaaaggggg

SEQ ID NO: 69259 - DNA, 743 bp, Glycine max
  unsure (1)..(743): unsure at all n locations
  Clone ID: PAT_MRT3847_33553C.1
ttggtcgcgtgggtttttggaaggaataggggcaaacagcaagtcctacccctaaccctaacttggaaccttcttccttcagattcatccgtaccgctagttatattactggattcggggcagattgctgttaccgtgtttctccgctttcatttataaggttttgagttgttggtttttgaatataaatggacgccaaacggttcatccagctggttgaggagaagaagaagaagattatggagagaaaggaagctcctctgaaatgggagcagaagctggaagctgctgctgaaactaaagagaggaagctgaaggctacaaagcataaaaaaagatctggctctgatagtgacagtgataatgacagtgatgatgagagtagaaagacaagtaaaagatctcacaggaagcacagaaagcattctcactatgactctggtgaccatgagaaaaggaaagaaaaaagttccaaacggaaaacaaagaaatcatcctctgagactagtgattatgatgactttgagagtagctctgaggaggagagaagaaagaagaagcaaagcaagaagctgagagatcgaggttcaagatcagattctagcgactctgattctattgctgatgaattaagcaagaagaaaaggcaccacanacggcaacgcccatcaaaatttagtggatcagactactctactgaagaaggagatagtctagttcggaaaagaaatcatggaaaacat

SEQ ID NO: 69260 - DNA, 460 bp, Glycine max
  Clone ID: PAT_MRT3847_33554C.1
aggaataggggcaaacagcaagtcctacccctaaccctaacttggaaccttcttccttcagattcatccgtaccgctagttatattactggattcggggcagattgctgttaccgtgtttctccgctttcatttataagatgcacttctggtcatcattttaccaacatgcaggttttgagttgttggtttttgaatataaatggacgccaaacggttcatccagctggttgaggagaagaagaagaagattatggagagaaaggaagctcctctgaaatgggagcagaagctggaagctgctgctgaaactaaagagaggaagctgaaggctacaaagcataaaaaaagatctggctctgatagtgacagtgataatgacagtgatgatgagagtagaaagacaagtaaaagatctcacaggaagcacagaaagcattctcactatgactctggtgacc

SEQ ID NO: 69261 - DNA, 832 bp, Glycine max
  Clone ID: PAT_MRT3847_33555C.1
gtggtttgctattggacaaggtttgtcaagttgcacactaatcaaagagctatatcttgtggggaacaagataagtgatgttgaagggctacacaggctattgaagctaacagttctagagttgagcttcaacaagatcacaacagcaaaagcattaggccagctagtggctaactacaactcacttaaggcccttaatctccttggaaatccgattcaaagcaatatcaatgatgaccagcttagcaaagcagtctgtggtctccttccaaaggtggtgtacctgaacaagcaaccccttaaggccaataggacacgcgaaatattaagcgatagtgttgccagagctgcactcgggaacagcacacggagctgtgaaagaagatcagtaagaagagttggccatggaggatcaaatctttccagagggaatagtagaaatgccagtgtttcccagaaaagcatgaaccggacaaggaggtgaaattgaacttgttagttgcatgtaaaaggaacaactcaatggaacacttttcatttggttcttctcaatgttatagcagaggaaactgtgttctagatgttgctgtctcttgatttgtttgtgagagatgtaaaatttcatttaaatagcttaaacgtttaagataattgtttcctgatatattaccgaagccctcataattatgtagtctcttcaaggccaagggactctatcatgaatgggtgtgttagaatttaaaatgaaagtcattatttgctttcatcctacagtttgaacttttggaacgtttgattcatgacattgttaattgataaaagtgttgaagta

SEQ ID NO: 69262 - DNA, 149 bp, Glycine max
  Clone ID: PAT_MRT3847_33556C.1
gctggtggtgatgaaccccgcacgggttaagttaatggtacatgtgctgctgaaggctcaacatcaatttccactaacactgctttgggggcaacttgtttgcaaaatagcataggtaatattttggccaactttgatatgataactaa

SEQ ID NO: 69263 - DNA, 427 bp, Glycine max
  Clone ID: PAT_MRT3847_33557C.1
ctaaattcttgataccgacagtaacagctgcattaccggatacaactatatacccgtggtgacaccacttgtgtccaccatatagcaagacttactctattctctcacacttttattcgattggcgcgcataccgtgtggtgctatttgacacacaatatggagtgggagatctttcgcggatacaaaccattgagatccctcgatcttctttgctatgcccgcaaagcactatccttgatggaacgcttgaccctatcatatttcactgggctgactcgagccatttccagactgagactctgcaccatatggggagccatactttaacttgtgcaactaacacatgccaccggcccgtgtgcttccagtgggcacaatgatcatatcatggggaacatgctaacttgtagatgtcatcggcgtag

SEQ ID NO: 69264 - DNA, 395 bp, Glycine max
  Clone ID: PAT_MRT3847_33558C.1
cgacccactcataacaatgtccaacttcataccacgttctctcattctctacttatcactaataaatcaaatccgtcactttctgtatcttatctagaaatctcaattctattatataaaatccacatcaaagacaacaaaaaatacacaacaaacatatgactcaacattaccacatgcaatctacttttacactctaacaacaccgatatttgaaatacaaaccgattctacacagacaacaaagaactaaagaacgatcaactccaccaagcaccctcaaaatttcgactgcacacctacactaatatactctttctgctcattatacatatgacaatccaacaccttacgcactctaagaccctcaaacatcacattaatgcttacaacta

SEQ ID NO: 69265 - DNA, 631 bp, Glycine max
  Clone ID: PAT_MRT3847_33559C.1
ttttttttaattagactgattctcggatctcatatttcttgttccttctcaaaaacaacttacaagtaacatgttataatgtactctcaacatcaaagctcaatccatctcttgaattatttcagatttccgaaccatgaagacagtttctgtcttctcctaatttaacctataactcagccgttactgttgtcaataacatggtacagtctgttgtcttcaacaaatgttgttaatggcagatggcggttcatggcgaaaagccaaaaatccgccataaaaatatggcggatggcgtagcaaaaaatggcggatggttcagccatttaaaagaggatgcgccacgacgttcgccttcgtgagggtgcagggtcggtgcggcatcgccttcgcagggtcatctgccggtgctcgtcgccgtcaagtgccggtgcttgtcgctactgggtcgtgcgtgcaggccgtggggtcgtcgctgctgggtgcacggtggctgctgcgtgcagggtcgctgcagggtgcggggtgtcgctcctggttgcgtgctgcgttctgtgctgcatttccccgctgcgcttttgaataaaataacaggtagggttgggtcgggtcagcccaactcctaccgtgc

SEQ ID NO: 69266 - DNA, 426 bp, Glycine max
  Clone ID: PAT_MRT3847_3355C.1
gcgccctctcgtgcgcccacttttccgcccacgcgtccgggaaaaagttgtattgaaattttcacaagaggaccttcttacagcttggtcaactaatgtgtcgttccgtacctatctttgttgccttatgggtgtgcatactagtatgctatgtggcatgatagttcagtgtctacaataccaggtgatttagtctttggtgttaagctgaccaccataatctatatgatagcatttgggctcaaatctgaaatttcagggtctcttctttagggcaccatttctattccattctacatatactgttttgaatcatatggcaacattgtagaacaccattgaatgtctgtttctagcaaacagagcttttgtaatattttattgaccttctcagtggtagaattctactgtacaaatctggggatt

SEQ ID NO: 69267 - DNA, 223 bp, Glycine max
  Clone ID: PAT_MRT3847_33560C.1
gaagcagaagaagatatctgagaaagaacatgagaacataaagagagcggaggacgcgtggtcgggaggaggcggagagacggaatgcgcggcagcctgggacgaagtggaggaggtgagcgagacggccagccacgacagagagaaacagaaacagtctgacccgctcgtgaatgactgcaagagaaatacagagacggatgagcgccgcacctatgagaat

SEQ ID NO: 69268 - DNA, 584 bp, Glycine max
  Clone ID: PAT_MRT3847_33561C.1
gcacgagataagaaatactcttaatcacttatatcttatttaaaattcacttcaataaatcatatgttacatttatatgcatcttacattaaataaagatattttagactatatatattgatattttatacttaataatgctcctcaatcagactggtcattctagatccaattttaattaaatatggtcgctttacatccaaatttatcctaaatttaaattaatccaactcatgacactcttagacaaatcatcacttataaatctaactattaaaaattatatatgtgtgcgttcacacacgcaataaattataattattaaaatttattataacccttttaattaaataattttttttattttttatttataaaatacacactcgtgttaaaaagaaaatattattgttctatattcttttaaaaaacaattaattaccgaacttccactcaccaccacccaaataagaaaataaaacaattagggaagggattgaggagtctgcttattatcgtggagttgattggtagattaattcagactgatctaaacaaatttatattgcaacagatcggaacga

SEQ ID NO: 69269 - DNA, 345 bp, Glycine max
  Clone ID: PAT_MRT3847_33562C.1
cggaggcgtgcgcccgcgcgtccggtgatttcagtgagtgattggtgttcacttgatctcatcataatcgtgagggtgtattgaagaagatgccgatcagaaacatctacgtcggaaggcctgaagaggcgactcaccccaacacgttgaaggcggctttgactgagttcatctgaaccttcatcttcgcgttctgcgtctcatgctcccgcatctcctacaacaagctcaccgacaacggcgctgacacccctgccggactcatctcctgcttcatcgtccatgcattacgcctcttcgtcgccgtctacgtcagcgccaacatctccggcggccacgtcaacc

SEQ ID NO: 69270 - DNA, 315 bp, Glycine max
  unsure (1)..(315): unsure at all n locations
  Clone ID: PAT_MRT3847_33563C.1
gngtcgcangcacgcgtacgtaagctcggaattcggctcgagcantcntnngcngnngacttcatggccangncagtgtccattgaggtatggnnnccaagnggcanatacngagnngtnagcaccaaancaatgcctgganntcgttggancnatcttctcgntcannatgatgtncgcctngaaatatgtnncgngaaganaacgatnctgtnagttgnagacatcattgctntgncnggngataagngtnatggattantggacaactgngtgaagactggggtagacantngtcnngacctttgagcaaaa

SEQ ID NO: 69271 - DNA, 342 bp, Glycine max
  Clone ID: PAT_MRT3847_33564C.1
gttgcgatatctccatccaaattccacaatcggtttctgaaaatcgaagcaacttcactaggtagttagcgtccaattccatagacacagatccacagtttttattttcccgagaaagtgtggggaagcaatggaaaagatgaacaaagccttcgagaaagtgaagattatggtgggaatggatgtcgaagacgaagagcaacaagctgcggcattggacaacagcaactccttcgccttcatggacgacttcaaccgcaactgcaccttgtccaccacacagtctatgcttgttttcttcaaaccaatcaagtttgcgatagcattcactcttggtaattt

SEQ ID NO: 69272 - DNA, 905 bp, Glycine max
  Clone ID: PAT_MRT3847_33565C.1
cttgttaaggttcttggttgctgcgtctagagagaggaaaaaatgttactctatgaatacatgcccaacagaagtctcgattcatttatttttgatccagctcaaagtaaacttttagattggcctacgcgctttaacatcttgtgtgcaattgctcggggacttctgtatcttcatcaagattctagatttttatcatacacagagatttgaaggcaagtaatattttactagacaataatatgaacccaaaaatttcagattttggcttggctaaaatgtgtggaggtgatcaagttgaagggaatacaaacagaattgtcggaacatacggttatatggcacctgaatatgctattgatggattattctctataaaatcagatgtatttagctttggcgtattgttgttagaaattataagtggaaagaaaaacagaacagtaacatatgaagagcacagtgacaatcttattggacatgcatggagattgtggaaagagggcattccagaacaattgattgatgctagtcttgtggactcatgtaatatatctgaacttgtacgttgcattcaagttggtcttttatgtctgcaacaccatcctgaagataggccaaacatgacaactgtggttgtaatgttgagcagtgaaaatagtttatctcaacctaaggtacctggtttcttaattaaaaatatttcaattgaaggcgagcaaccttgtggtagacaagagtcttgttcaaccaatgaagtaacggtctcactattaaatgctagatagaaatattagtttactcaaacattgtacatgaaattttttaactttcaagaacttggcacttaaactatttttagccatttagttatgtgtggtgaaatatgaacaatttttaaaaaa

SEQ ID NO: 69273 - DNA, 1085 bp, Glycine max
  Clone ID: PAT_MRT3847_33566C.1
gggaggattccagtgaagtggagtcgttgcgatatctccatccaaattccacaatcggtttctgaaaatcgaagcaacttcactacttagttaccgtccaattccataacacagatccacagtttttattttcccgagaaagtgtggggaagcaatggaaaagatgaacaaagccttcgagaaagtgaagattatggtgggaatggatgtcgaagacgaagagcaacaagctgcggcattggacaacagcaactccttcgccttcatggacgacttcaaccgcaactgcaccttgtccaccacacagagactatatggttttgccatatgctttgcttctggattaacttgtacgctattgtctatgcttgttttcttcaaaccaatcaagtttgcgatagcattcactcttggtaatttgctttcacttggaagcacagcattccttataggtcctaaaaggcaagtgacaatgatgctggatcctgcccgtatatatgcaacagccatatacattgcaagtatgataatcgccttgttctgtgctctttatgttcataacaagttactgacacttcttgcaattattttggagtttggggcacttgtttggtatagcttgagctacatcccttttgcgagggccatggtttcaaagatcatggtttcatgctttgacacagaattttaggttatatactcgagattatgacattgtatgttgaactcactgcattgacagcctcaatatccttgcagtcctgtagaaaagtttttttgctgctgaaatacacttgtggactatgattctctactgcttgctctttccttttgtggagtcttgtttaggttttactagattgttagacgtaaaatcttgttaatttgtattatgttgtttatgagctaatgtaaagattttcatttctttcaactagttgtcatctcattcttggtggaggctaagatgggagagttaaacatgtttctcaccatgggaaaggttttgtaaaccattattttttttttattattttgatccgatggatttttcttcttcaaaaaaaaaaaaaaaaaaggggggc

SEQ ID NO: 69274 - DNA, 482 bp, Glycine max
  Clone ID: PAT_MRT3847_33567C.1
ctcgattcatttcgtgtcaaatcccaatccctcgattcgttcgtgttgcagcaatgaggcatcaatggcgtcttctccaccaccttcttcgctctcgcccccgcattacctatcactctcaggtacttccctattcctcttccatccctcgtcgtttcgccgccaattccacgttcccgttaaaccctagtttccgtcgtttttcctccgaacccgttctcgcacaagccgacactgaccacctcctcgttgccgacattttctccaagcctgtggattccgaggacttcaaaaccctcctcgggtcgaatcgcgtctccattacccacgacgcggtcctcgcggttctggggaagttcgattccaacgtcgacgcggcgcggaggttcttccaatgggtttcggagaaccaccccgagaggttgagctccaagtgctacaactcgatgctgtgcgttttggggaccaatggtttcgttgac

SEQ ID NO: 69275 - DNA, 804 bp, Glycine max
  Clone ID: PAT_MRT3847_33568C.1
ttacaagctgttcccgagtccattctgaagaagaggaaacgccgggatgaacggaagcaacgccagttgttcagatcagttaaaggtaaccttaacagaatcaggaagcgtaggcagatcttcttgcgtgctgagaaatatgtcaaagagtacaggatgaaggaacgagctgagttgaaaattgccagagatgccaggaaacaaggaaatttctatattccaggagaggcaaaacttgcttttgtcgtcagattgaagggtatcaacaaaattcctcccaagccaaggaaagtgatgcaattattccgtctccgtcaaatcaataatggtgttttcattaagttaaataaggccactttaaatatgcttagaataattgcaccttatgtcacgtggggctaccctaacttgaagagcgtcagagaacttctctacaagagaggttttggcagaattcgtggtcaaaggattccaattacatcaaataggatgattgaaacccatttaaaacgatacaacatcattcgtatggaagatttagtacacgaaattttcactgttggtaggaacttcaagtacgccacacacttcttatggcctttcaaattgaacacgccaactggtggctggaagaggaagtccgtccactacaatgacggtggtgactttggcaacagagaagacttgatcaacaaattactcagatcgatggtttaattttatacttgtattttattttttttagtttttacatttcatctcatgttgacttccatcttgtcaataaacaaactgacttttgtt

SEQ ID NO: 69276 - DNA, 375 bp, Glycine max
  Clone ID: PAT_MRT3847_33569C.1
atcaaaaccacatttttttgaattgatcttcccaataaacgtctggggtcttaataatggtgttggaatgtcaagatctgattgggcaaatcaaacttcatggcatttgagtttccttattgacaatcccaaacagtctacagtttttgatattctcttgtgaatctctcaagattttgaaattgctggtaatactcttatgccagctttttctgttccacaagctactgccatattttttgaatatgcgaaattctctcattgatctcgaatttagttttctttgcttgtcccgtcgtcaattaaaaaatgaaattattcatgatcctctttttgctattctctgcctatttgaaaattccacactcttttaat

SEQ ID NO: 69277 - DNA, 114 bp, Glycine max
  Clone ID: PAT_MRT3847_3356C.1
aatgccctaatgggtcgggtggctttggttctttcccggggcccttggttaataaattcggccattccaagcttttcaactattattgcccccaagctttttttaaggggcccg

SEQ ID NO: 69278 - DNA, 241 bp, Glycine max
  Clone ID: PAT_MRT3847_33570C.1
aaagtagccgcgagcttgtgttttaactgagaaccggtgcttattgctgtgtggagagaaaaccatttccgtggcttatggccaaaaagatttcgtattatcttcccaaccgagattcatgtaatttttttgtctcccatatcggacgttaatagcattggaagaatgcacatacatataaatactaaatagttttttaggaagtgctcacgattatattaaaaaatcattctcttcactg

SEQ ID NO: 69279 - DNA, 127 bp, Glycine max
  Clone ID: PAT_MRT3847_33571C.1
ttataagcctgattcatctttgcgaaggaactttactgtgagatgcttatatgaaaatgaaacctatggaggaggaggagttgaagaggtatctgttggtgttgaagatagaacatcagcggctgaa

SEQ ID NO: 69280 - DNA, 361 bp, Glycine max
  Clone ID: PAT_MRT3847_33572C.1
gttgacgattctaacaatcttggtctcaggattcacaggatgctgaagctcggactcagggttgccgaaggtgctcctgatgcacatgctgacatgcctgcacatgaggacgctgatgcacatgctcatggtagcacgacggaacaagccgatgaacattcacttatttgcctatgacgttgatactctcaatcttcgccgcatcagtcattgctctatggatgaggtctactaactagtgaacaatcctgaacagttgtctacctatgctcaatgatgacgtagttgcgactagcggtatactattgaaaactacggcggacgttgttatcgatccaagactacggtcacatgcatgcta

SEQ ID NO: 69281 - DNA, 384 bp, Glycine max
  unsure (1)..(384): unsure at all n locations
  Clone ID: PAT_MRT3847_33573C.1
nagggggggaaaacagagtactatacggaatttgaaaaccaaggctcaagttttaataagagacatggagctctctgtggttgcaagaaacatggaagaagttgtgttgctggttgatgatttgagatcactttctgggatttctcgctgtagaatatgtcatgaataatactttgagagctctaaaaccttgtaagctccttgtgcttgttctgggacagttaaatttgctcatagagattgcattcagacttggtgcattgagaaaggaaatacaacttgtgaaatatgtctctagcaacatgaatccggatatacagcagccttagagagatcgcaagtagctgatgcagcactgatcattagggacagcatgcaaatttc

SEQ ID NO: 69282 - DNA, 358 bp, Glycine max
  Clone ID: PAT_MRT3847_33574C.1
cggcatccgaaacagtctggacgaaggtctttggctaccaatggaatgggctaaagtttcataacttgactcaggccttcaggttgatgctgactgctcttctataaattggaatttagaagattctgaagatgactgtacaggttgatgattctgccactgcctatggcgagccttcggatactcctatatagggctagccatgtttttgcagatcaccccactgctgaagctgggctaaacattgctgaatgggtacaccctgacggtaatttaaccgtcagagacgaaagtgtgctcatccagtgagccattgatactccttctctatgaagtgccacatcaagttgcacctaag

SEQ ID NO: 69283 - DNA, 216 bp, Glycine max
  Clone ID: PAT_MRT3847_33575C.1
atatagtacaagcgtcagaatgtgccgttgtggctcacattatcgacgcggcataccacgtggtcgacgatgaccacgacggttaattcagcctctacgacctgcgctcattctacgctggagtctgcggacaacgagaccacgtgatccgcgcattgatgacgctggtcggcactaccttggactggctcgtggagtactaggagttcgagcgcg

SEQ ID NO: 69284 - DNA, 175 bp, Glycine max
  Clone ID: PAT_MRT3847_33576C.1
ggctaaagatgttgaggttcaaaagcaacgacgagagctctctgacaaagactaccatcaccctcctccatcacctttgttcgacccacaggagcatacacaatgctccttctatatagccctcatcgctgagttgataccaacccttctgttgctatatgtaactgcgctcaca

SEQ ID NO: 69285 - DNA, 592 bp, Glycine max
  Clone ID: PAT_MRT3847_33577C.1
ttgcttgctgcctgcagatggacgatgcgtcggcatgatgggtcggtgctctatgcgatctgagcaagaggatttcattcattcttttacttgcatgggctaacttgaacccatatggttgtgatccatgtactggctggaactcaggggcggctgtacccataacaccggatctcacttgcttcttatatggggatagcaaccgacggaaaggagaagtcgtggaaggaactgccttccgtgctgatacactggcccctagggctagtattagatggcattctcttttacaccgggactattagtactactacaatattggctcgaagtaggccaaactaactaaacactcttcagcataggggctctgacaaagttgaatcattgcatttaaacctgtgaacaactacctaaccactgagatataggaattgccatgtgatcctatagaggccccacggatactagtaaaaacaacagatcaagcctccgctgagcgtgcaccacgcataatttaatgtcagactgcagaaccatagattaggaactctaaagctctgatactacctccggtactacaatgcatctagaa

SEQ ID NO: 69286 - DNA, 195 bp, Glycine max
  Clone ID: PAT_MRT3847_33578C.1
gactagttgtagatcgcgagcggacgaacatgacgaatgctgtgcttttaatgaggcgatatatagttggaaaattcatcctagacgtttatagaaaaacagctctaaagcttaagcgggctttcgttcatgcatgggctttgaaaaaaaaattgtgatacgatctctgaagacgctatcaacaacaataaattg

SEQ ID NO: 69287 - DNA, 500 bp, Glycine max
  Clone ID: PAT_MRT3847_33579C.1
cccacacgttgtttcaggtttttgccccagacaacacacaccagtgacggcactggggcctacgttggggaacttcacaatactgacgtgaagtaagccagaacagccgcagaaaaagaacgaggctggagaccaggtgaggcctccactccgatcaatcattcaggaattccacaaagacaaggaaccgaacattggggcggacacagcaaaggttgggatgacgatcaaagcacaagtcatgccataaaagaagttgtcataacgaagggtcgccggacaaacatatagcctggttggctaagaaatagccacagaagataaaagtagatcacacaacaaccaaccaggagcttgacacagaaggcccgaacgctggcaaacaaacaaatgtgaacgcaacatagagtcatataaccgccgccaaatggctacctaagtcagctgcgacgagccaaagaggttttgcataatcgacaccataagcaccatcaagggac

SEQ ID NO: 69288 - DNA, 247 bp, Glycine max
  Clone ID: PAT_MRT3847_3357C.1
ccacgcgtccgcttctctctctctctctctctctctttgcaaatcgatctcattctgattttcatgcctttctcaaagccttcattcgcctatgcgtgtcactatgattatgtccctttccatgtttggttcttcacaagccagctttcattgtcatgttgaaacccaccatgcccatccctgttatgttccctgggggggggtactcatgcattgtctgacacaaattttgcattttttccatttt

SEQ ID NO: 69289 - DNA, 241 bp, Glycine max
  Clone ID: PAT_MRT3847_33580C.1
agcatgaaagttatccgaataaaatttagcagatacttgttcatcattgtggtcttgtaccataaaagaaactttcaaacatggaaccggtcatgcggtcttataatttaccgggtcatacccatggccctaaaaaccatcctcggaacttcttctacgtatgctcacagttcccgacttactgtcatatgtggtttgtgtgccaccacgtgcctacattttaagtgtgaaattaaaattg

SEQ ID NO: 69290 - DNA, 345 bp, Glycine max
  Clone ID: PAT_MRT3847_33581C.1
atactattgtcctccaatttatgaaagatgactttgtttttctgaaatgtctttccctggtatgggcaacttatatcgggccggctgacccttcttttttccatttacatgacccaagttcacttctttggttgccctcctcgaagaccaacacatatattatgctttttgttatcaacagaggtaataagctattctttcaaatgttgacaccacatgctaaaaataaatttgatactattttcttcctaccaaacaccttttttgctcaatttgctaaagaagtttaataccctcttaagaagggaaggattcctttctttgaaatccaatttgaacaccgat

SEQ ID NO: 69291 - DNA, 496 bp, Glycine max
  Clone ID: PAT_MRT3847_33582C.1
ggacacatattccctttggcctgggttgcacttcccaaattagataatctaaagcaaacactgaaatcattccgtatgatatagcttctctctaaatctgagttcttaacttcctcagatttgatcccatcccagtcattctttgaatcccctatcagtgtcaatttctacaaactttataaggaagctggatcatgctatctagtttgaaatttggaggttgctagttaaagtgttcttttggatggtaaatttggtgcttcatgtctggtgaaacaggatctgagttgtgatcagttttagtccataagtaggttttcaccaaaaaaagaaaagtccataagtaggcagtgaaaggtatatttggatttgcattattttaaactgataaatgacgaggggaagatctgatggattgcaaaagaagcatttagatgcttcccgttagtggggtggcaatcttactggatttcctatatgagtacaatggatccat

SEQ ID NO: 69292 - DNA, 411 bp, Glycine max
  Clone ID: PAT_MRT3847_33583C.1
aacccccaaagggtttggttttattttaaaaggttattttttcccgttggttaaaaatcccaaaaaaatttttggaaaccctttttttaaaaaccctttgaaaacgggggggtttttacccaaatttggaagcaggtttttttttttgccgtttattcgggcgggggaacaggaggtttccaaaggatggccctttttaattcaacccgggggtggaatcttgcccctttttaaaaaaagggttaaaaaaagggggttttaatttttcccgaatttaatttttttattaaaaattttggcggcatttaaaaagggggatagggcctcctaaatccggaaattttggggccaaaaatccttcctcaagggaaaaatttttttttgtttttggaaaaataaaagaaaattttt

SEQ ID NO: 69293 - DNA, 550 bp, Glycine max
  unsure (1)..(550): unsure at all n locations
  Clone ID: PAT_MRT3847_33584C.1
tttttttttttttttttgaaaagttgtcacatttatttcaggtaaatgtacataactttttaagtttaaaggactatattgcaattatgtaacaggctacgttttggaattgtgaatacatatatatgcacaacttcccctgccttgtcaaaaagtcatgtaccatgcccatcagagtttttccttttctagatttgctagatcaaatcctgtaacgtgtaagggcactagtaccatcgagtccttttgctaaatagtaggcttcatagtcaccaaatgtaatgtccctaaatttgggaggattttcttctgataatagttcctttataggtccacaaagctttaaggatgtcttggcagatggactgaaaaagcatgcaacagatattctaggaccaacatcatttgcaagcactctgtgttcagcactcttgaatctatcgtttgttataaactgcaaaagatcgccaatattaattacgaaagcaccaggtacaggnggatatatacaatccactttgtcttcatatctttaccttggagggccacc

SEQ ID NO: 69294 - DNA, 325 bp, Glycine max
  unsure (1)..(325): unsure at all n locations
  Clone ID: PAT_MRT3847_33585C.1
ctaacccaatccggggggttctgttttgaggaaggaccaacaaggggaanaccgaancgaccaaggcataaccaacaaccggagggcaaaagaactacccccggggcacactacacaagtcccctggaaatgaaccgcctctgcannctggaattgcacattacctgggaatatcataattcaaatcggaccaaaggggggagcaaaacaagtccaggaataaaggacttaaaaataacccacttccctttattatattgctcccacaaaaacaagggacaatactcgcaattccttacggtttgaaaacaaaaaatgggaaaaa

SEQ ID NO: 69295 - DNA, 211 bp, Glycine max
  Clone ID: PAT_MRT3847_33586C.1
gacacacaactggtttcaaagaaacaggctcgggttggattacctctgggactggtgttaatggtcactcatgtcaaggcatatcggtttggaagatggaccaatgcacatgccaccttatatcgacgtagagatccttctgtcacaatggatggagcatgtcattatggaaatctacatagccaacgatatggaactgatacatcagaac

SEQ ID NO: 69296 - DNA, 328 bp, Glycine max
  unsure (1)..(328): unsure at all n locations
  Clone ID: PAT_MRT3847_33587C.1
atcgcacnaccgncgnaacncngaatcagtganncaanaaaatnagacacnanacacaaaaancaaactcccacnacancacannnnaccaanannannnaannccananaancnaaancacagnnanccnnnnccacagnagnccnagaannaaaaccnnnaacnannacnannnngcatnaccnangacnaacacacncnancanaacaacnaancnnnncaaacaancaanancanncacnagcnnccngnncatanaananccnanannnaaaancaannaccannaannnncnnnaaaacaannnncacnnanacacagntnn

SEQ ID NO: 69297 - DNA, 354 bp, Glycine max
  Clone ID: PAT_MRT3847_33588C.1
atatttttttttttttttttctttttttttttttttttttttttttttttttttttttttttttattttttatttttttatttttttttttaaaatttaaaaaaattaaaaaaaaaaaaaaaaaaaaaagtttaaaaacccggacccgtggggggaccggaggataaaccgccgaactcgggagcctaatgagagagcaaccaaaatttattgtggggagctcactgaccgctggccagacggaaacacaacgggccccctgggaaaaagaataccccaacccccggccagaggcggacagagcattgagcgccagggtgaatccggggggccccaaagagacggccaaaccca

SEQ ID NO: 69298 - DNA, 454 bp, Glycine max
  Clone ID: PAT_MRT3847_33589C.1
ctgtgcggcgctcaggcggcgggtgggatatatgtctcggatatattctcaatccccataccgaaagcgcgctctttctattatggattctatgctaaggggtttaatcgcatgcgtaacttacctctaactcctgatttgtgtatcctgttggtgaggcttacgatggtagctgctgaggaagttttggaatgattaatgatcttatcatatctatgcctaagaaaggttttcccatcgattctaacgcatcgacgctacgtagatagtggcacagagaaagaggaaaaaaccgaccatttcacatagtacgttttggaccaaaaagcaatctgatttttgttcgtactttttattctttgttgcaatgccgcacgattctacaggaccagaccttgagcgagttcacgcatgatggaagaaattacacgcgctaatgccctacggtctacga

SEQ ID NO: 69299 - DNA, 388 bp, Glycine max
  Clone ID: PAT_MRT3847_3358C.1
ggccttcaattaattttcttcccccgggtccattcttttaaaaaaaaatggttttttttattctaacttcatggccaaataaaaaattgaacctttaattttaattaaagaaccttgaatcaattgggcctaccactttttgggaagcccttccccctttaatttggaaataaccttccctcacccccttatttaaaaaaaattttaaaaaagaaaatggtggggccttttccttttggtttgggggttcctcccacccacctataggtccttttaaataaaaaccagggggccttgccttaagggataaggaggtttttcggttaattaatgggccttgaggcttcattcttttttatggagggggcccaaggtatggtttttttta

SEQ ID NO: 69300 - DNA, 434 bp, Glycine max
  Clone ID: PAT_MRT3847_33590C.1
gggagtttaaatccccacaaaattgcatcaaattgagccatagatcctcaaagacaattagttattagttaacaaaattttaacccaaagtttttacctgaatagctttgtgttctctgttagaagcaagacagtctgaacaaagggctccattcatacaatccgagcaatacgtgttgcattcacttttgtggaaatctgtgtggactttgcattgaacaaaaaaggcttgtttggagaaatggcctaagccatggtggccacttgttttcttcttcattctttccaaattccaattgttgaatatgctgtaaatttctagaatcatcacaatagaattttctacaagaaaatactacgctagacaatactctcagaaatagattaatctagaaagttcatgtatgaaagtcttaaaaactgagatcttgaac

SEQ ID NO: 69301 - DNA, 278 bp, Glycine max
  Clone ID: PAT_MRT3847_33591C.1
gtctttttttttttttttaggcaaagaaactaagggccttatgtgtttccgaatttacttagaggaccccaaactggtgttattagtaacaacttataccagatgagcattgtgatactaatgttctaaagcatgcacgcttttatagtgtttagtttgcacatcatacagttccaatgaactttttacaggttggaagggtcttctaacaagtgcgttagagggaaagcatttaaatacttcttttgttcacagggaaccttggtctttatgggatt

SEQ ID NO: 69302 - DNA, 446 bp, Glycine max
  Clone ID: PAT_MRT3847_33592C.1
aactagctagtgcattttgcgatacagtatagctgccatctgtgtttgaagaacactgcgatatggtggttttcgtttcctgcacaaaatctggtttgcctttgttttccaagggcaatgactggcaagcaactagactttccattcatcaagaagctgacgacgatgacgatgatgatgatgatggtgggatcgatatagcaccagcagcataatggatcaattcggatgaagtgctgcaaagtatgaagaaattaacttgagattgtgttattcatcaatctcacgcatgctgcacttgtatggcttatattatgacatggggtatttatctatatttatgtagtaaattgtgtaagcctctttagactttacttacactgatatttacataaaacataatatatgtgtactgtttaatgtttgcttacagctagcttacccat

SEQ ID NO: 69303 - DNA, 178 bp, Glycine max
  Clone ID: PAT_MRT3847_33593C.1
tctggctgactggaagtggcggatatggatgtcttcccaatgcacagtgacacagttatacacctgactcctgggtgtctagtatttttttagcaatttactgcatgcacaatcatatttaacttctctgaaagggagctctttttaaagataaaaaaagttaaaaaacattcatggg

SEQ ID NO: 69304 - DNA, 502 bp, Glycine max
  unsure (1)..(502): unsure at all n locations
  Clone ID: PAT_MRT3847_33594C.1
ccgggtgcggagttcccggggggacccacgcgtccgggcgaagagaagagaaaaattaatatgggggggggggggcgggatgtgtcncttggagcgaacaagttcccggggagacagccgattgggacgggggggcatagccaatacgacggggagggctaccaggagccggggccggggccactgggtgacccgacgggagtttacgtcatgggccttggggaggggggggtancanantttgtggccacttttctgtgtctatacatcactggcttaaccgtgatggggggcgccggggctaantctaagtgcgggaccggtgggattcaagggatcggttggggcttcggtggggtgatcttncccctcntttacggggccggtngcatctcanggggacacataaacccgggggggacatttgggctggttttggcgaggggngtggcnttgcccanngggattttctacattgtgatgcgatgcttgggtggtattt

SEQ ID NO: 69305 - DNA, 317 bp, Glycine max
  Clone ID: PAT_MRT3847_33595C.1
gggaaaagcatctacttaagaatggtgaaagtaaagaaaagaatcacagatcgaacgatactacatttaaccgcaactagtcataaaggaccacgtatactttgaacctcaagaacagctcccctgtttttgaaaaaacccactgagtcttggcctgcgcatacccacttgccaaccgtaacgccatgctttctgcaacttttgggatttccctgacggtggccaacaccgagttacaccccaacaagctttttgtgctgcccttgtgtttgccttccgggaacgccaaaatcatgatcattaataaacccatattt

SEQ ID NO: 69306 - DNA, 371 bp, Glycine max
  Clone ID: PAT_MRT3847_33596C.1
aacaatagttaaaaccgattatttttttttttttcagggaaaaccttacataaatggaaaagggggatcctttcttgggaacgggggaaacccaagccccccctaccaaacaaacatgggggggggaccaaaaaagccggcctaggccttttttgaaaaaaaaaccgaagggagaaccggtttttttttattaaccctttgggagagggaaaaaaacatataagggcttggggccccaaaattccggaaaaaaaacaaactggcccaaatttttaaaaacagggctgttttccacggggggataagccccaaaagccccaagggctttggggggggaaatctcaaacaccggatctccctttttttggtgg

SEQ ID NO: 69307 - DNA, 550 bp, Glycine max
  Clone ID: PAT_MRT3847_33597C.1
cccacgcgtacggtcgccgcctcacgaatcatctgctctcagtgtttacttctgcgaatctgaattcttcgtcggattctcctctgcctcgatcgaaggtaagacatgggtcagtggttgggtttagcacagattgatcagaccactgttgccatcatagaaaattgcggcaagtttagagaggctctttagcctgggtgccacttgttaccttgccgcatatgacagcaaattgctggttacctgtcactgcgtgtgaagcagctggatgtccgctgcgaaacaaagacaaatgacagtgtctttgacactgttgttgcatctgtgcaataccgtgctcttgctgacaaggcatatgatgccttttacatactaagcagcaccactgaacagatccagtcccatgtctgagatgcccttagagctactggtacgaagctgaacttggatgatgcatgtgagcagactaatgatcttgcacaggctgcatgagatgatctggagaaggcactgtgtgcatatgggtatgagattgtgccactctgatcat

SEQ ID NO: 69308 - DNA, 486 bp, Glycine max
  Clone ID: PAT_MRT3847_33598C.1
tgcttggggggtaggggggagagaactagagagcagcagagattagacaagagattcaggcgcgagataaacctagtgactacacagacaaacggaggcaaccctaggttgatgaacttacgctttggcaggttagagagtagataggtgaggacgattaagatccagaggagtaataaagaggtgacgtgaacgaccgatgctagggcaaaggcgtaagcgaggcagtgggtagcagtaatggaaaggaggtgcactagatgagaccatagaaaaccaagctagttgtgcaaggagtgtacagcgtgcttaagctcaggcaagtagatggcggaatgaaggcaacgcgtaagtagccaggagtgggatgaatacaacttgcgcaagtgtgcgtacagctgatatcgttacgtggtagcacgcctagtgcagcaagcgctgtgtttgtagagcgacctataaagcagtgtcccatagtgaggctgt

SEQ ID NO: 69309 - DNA, 598 bp, Glycine max
  Clone ID: PAT_MRT3847_33599C.1
ccgcgtcgtagctcgaattcgctcggctcaaccaaatcgctcgagctcgagccgttctttgacatgtgccggcatcgatctgatgaagtatagcggttcagaacaagagaatgctcaatataatgttatttctcaatggttgctgggccacttaactaggacaaggttatgatatctttaacattcttcagacgtagagccagcccgcttggcttattacatctcttctcttatctttaacttcatatctattgctttgtgtcacactaactaatcctgtggagctgcctccactgcacatattaacggccacctttggttttgttcgatgcatcaggtatgcaattgcattcctaatgcttacatatcctctatcataacattatgcaagcttggctgttctgtgactacaactgaataaattattcaccggctgaggccaaccttattttgggcatgattgacataatatgagtgctcgatgctatcaaagccatcatgcctgaagaagacgtagaacttgtttgctcatactcagatcagggatcgaatagggaagagtacgggtgctacatgatgagactgtagatctcatttt

SEQ ID NO: 69310 - DNA, 365 bp, Glycine max
  Clone ID: PAT_MRT3847_3359C.1
gccacgagaagaggatgaaccatatgattcatatctgaaactgctcagaagtatggacacatgtgtcatatctggtgatgcagatgctactctggaggtcgcccaccaagatactgccgcggtggctgatgatggttgtgatcaatatgttgctggcacccttcctatgtcacctgttaatgacgctctcaaagaatgtgctgagtgccccactgcttatgatcaaggcatcaataacggtgatgaccaccataatctgaacagtgatactgtaaattagaatcttgctgatggcgacatcgcacatgaagattactcgcatccttttgacgatgacgaaaaatctggtgctgaacgtgactcta

SEQ ID NO: 69311 - DNA, 265 bp, Glycine max
  Clone ID: PAT_MRT3847_335C.1
ggccgagcctaacccatttggttatatatggagacatagtgaaggccacagcccatagcaaaaggtttatcatgccgaaaaggggcttttaccccaaaacaaaaagagtctcccatactaaaaaaacctcacatttcaaacatagtagccttccactctctcggccgggaacaggtactgaacctgttgggctttgcgcttaacagggtgcaaagttatggaacgcactttattaggagaatcgtgtatagaacaatactgtgtg

SEQ ID NO: 69312 - DNA, 791 bp, Glycine max
  unsure (1)..(791): unsure at all n locations
  Clone ID: PAT_MRT3847_33600C.1
tacggctgcgagaagacgacagaagggtatgcatgaagtaaatattttggttttatgtttgtgtacaacattgcatgttcctctttgaattttgggttatgtacaggtaatgggtaattgtttttgaaataggagtttcttggcattttgtgaattgaaacccttatttttctccacatgtcaagttagttttgaaggttcgaattgaaagtgatagatttactcttggtgagaatttgagccatcatcatctattttattcggtgtattttgccccattgattgcttgcacaatagccttggcttgactcttgttgatacttcttgcttcacatgcatgttgggagatgatttaggcattttgttcgtataagcctctagccaaatgagcctaccttgaattaattcctttgatagcccctttgagcctatgttcccctttctttgttttgaagctcattacaagccttaagtgaaaaaaaccatgatttcaccctacccttaaggaattttggagctttggaattgttttgggaataagtgtgagggggggtatctttcattggatgatatgtttttgttggccatgcttgatgatgtattttggtcatgcttcatgtgtgtgtgtgtgtgtgtgtgtgtgtgtgtgtatatatatatatattgcttaattgttgctttatttttcaaatgctttcaattgctactgttcatgttcaaaagnaaaattcaaaanaaaaaaaaaaaaaaaaaaaaaaaaagcggccggtttaggggatccagctacgtcg

SEQ ID NO: 69313 - DNA, 448 bp, Glycine max
  unsure (1)..(448): unsure at all n locations
  Clone ID: PAT_MRT3847_33601C.1
tataagaacctgttttcgataactaagaaggagaagcaaatggcttcctcaatgatctcttccccagctgttacctactgtcaacccgtgcccggtgccctggcatggtctcgctccatttcacttgagccctctaagtccattggctttggcgttctcccaccgagataagacccaacctaatgaccatatacctctcatttgcgtagctaacccggtggaagaagtnngcaatgcatgcccaggtagtggccannccagtctggcaagaagtaaagtttgagacgtctttcctttacctgccagaccttgatgnatgcacnaattgggcaaagggaagtagaatacctttcttaggaaggggatggattcccttgcttggaattcgagttggagcacggtttcgtgtaccgtgagcacaacaggtcaccaggatactacgatggac

SEQ ID NO: 69314 - DNA, 273 bp, Glycine max
  unsure (1)..(273): unsure at all n locations
  Clone ID: PAT_MRT3847_33602C.1
gagaaaaagaacaaatgtcttgcggtttcttgaagcaattaatcagtaaatctctctgcatatttgcttccccatttctaattttgtgtaaatgtagtgttagtatgtganatggaaaatttatgtgctacaactttgttttgccaaattgtaggaggcctgacatttcagatggattganaagattaaaatgtcgtacacttatttttgttaaaaaanaaanaaaacaaacaaaanncncnnnaccaaaanaannggggggngcgnngnncc

SEQ ID NO: 69315 - DNA, 1792 bp, Glycine max
  Clone ID: PAT_MRT3847_33603C.1
caaacttctaatggatacatcaagctaaagattgatagagcaagagagtgtgaaagtgcttgctctagaaattgttcgtgcgttgcttatgcttattatttgaacagtagtatctgccagttgtggcatggtcaggtattgagtctaaagaacatctcaacatatttggacaattctgataataccaatccaattttttacctcagacttgatgcgtcagaattggttactgctgattcaaacccaacaaatgcaacagaactagcaactgattttcgcaagcatgaaaacttgctgaggaatctacttctgattgttatactgatcttacttctagcatttcttatattgggcctattagtttattggactagaaggcaaaggagaaaaggggaagatttgctacgttttcatgtaagcatgagcatgaaagtcgaagattctgagcttgctgaagcacacaggggtgcgaaagttaagaagaaggaagtcaaattgccattattcagttttgtgagtgttgcagctgctacaaataatttttcagatgcaaataaacttggtgagggtggctttggacctgtttacaagggtatattattgaatggggatgaggttgctgtaaaaaggctatctcgaagatctggtcaaggatgggaagagctgagaaatgaagccttattaattgcaaaactccagcacaataatcttgttagacttctaggttgctgcattgatcgagatgaaaagatgttgatctatgaattgatgcctaataaaagcctggatgtttttctttttgatgcaacaaaaagaaggatgctagattggggaacacgagttaggataattgatgggattgcacaaggaatcctttatcttcaccaatattccaggtttcggatcattcatcgagatttaaaggctagcaacatattgttggacaccaacatgaatcctaaaatatcagattttggaatggcgagaatatttggtgataatgaacttcaagcaaatacaaaccgtatagttggaacatatggatacatgtcccctgaatatgctatggaaggccttttctccataaaatcagacgtgtttagctttggggtccttctgttggagattttaagtggcaagaagaatactggcttttatcaaacaaattccttcaatcttcttggatacgcttgggatctatggacaaacaattcgggaatggacctgatggatccagcactggatgatagtgatactactagtagtagtatgcatacagtgccaagatatgtgaacataggacttctctgtgttcaagaaagtccagcagatagaccaaccatgtctgatgttgtatcaatgattgggaacgatactgtggcccttccttctcctaaaccacctgcatttctaaatgtgagaggtaatcaaaattcaatattgcccgctagcatgccagaaagcttttctttgaatttgatcacagatacaatggtggaagcaagatgagttactattaaactcttctcattgtaagatttaatagtaagacatttgttctgttgatgtttccactaccccccatttctccttatgtaccttattactcacggtctcactgaatcaaatgagaaaaaactgagtttgatttcaacagttaaagaatgttcaaaataatgtgttatattttagtttaatcaaataaactggcttgtactttattgggttaaaatgcttttggtcttgcaaaaaagtgtctttttcgttttagttcatgcagaattttttgagc

SEQ ID NO: 69316 - DNA, 334 bp, Glycine max
  Clone ID: PAT_MRT3847_33604C.1
accggaaccggaagtgttccgggtcagaccctacgcgtccgttcacgcgtttcgctcactcattctcttatgcatcgggcgaaacaaacacatatgagttgctaataatgggaactgatgtatctatatacacagatgcaaatggaagtttcatagataaaaattccttatttgtatttgagttaggaggactactaagtgaggcgggtgcccaatgatgcaaaaattgctcaaaatatttagtttactgatataagagctggtgatctcatgcgagcagaaatcaaatatggttgtgagaatggtacaatgattcagaatatgattaaagaag

SEQ ID NO: 69317 - DNA, 285 bp, Glycine max
  unsure (1)..(285): unsure at all n locations
  Clone ID: PAT_MRT3847_33605C.1
aagacaagaccgagcgagacgatggtatgagccgcgagagcattcccaccacctgcacgcgcccccacgcggaggacgaggacgacgtgatccttctcgaagcggttgacggggtgattttgcgagtngagaggtgtcatgttgcgtcgcagctgtgagtngggtctgtgctgtccatatgcatgacgatcctcgatagatcgtttgtncggcngggccaactggcggatggggtgcacgaatctagtcagccattcgtcgatgtcctcnaacctgacttccggc

SEQ ID NO: 69318 - DNA, 767 bp, Glycine max
  unsure (1)..(767): unsure at all n locations
  Clone ID: PAT_MRT3847_33606C.1
tacggctgcgacgacagaaggggaacaaacacttattatatattcatctttctcttttttagcttttcttttcctctaaaagtgagtccttccttcttcgatcacttgttaaattcacatatcatagcaatggcagcacgttcctacagccccatcatggttgccctctctttgcttcttttggtcacattctctaatgtagctgaggcttatacacgcagtggaacacttcgtccttcagattgtaaaccaaagtgtacttaccgttgctctgcaacttcacacaagaagccatgcatgtttttctgccagaagtgttgtgctaaatgcctatgcgttcctcctggtacatatggcaacaagcaaatttgcccttgctacaacagctggaagaccaaggaaggaggacccaaatgcccttaaaccccttaattgcctaatatataaataatttaataagcaatgtaatcctatatgactcttcatgagcaattttctatctctacatagataagcaatgctgttttaattgtttagttgatagcacctggggacacatttagttatgttcccttcagttttcagagggaaaactatatttttagcaaattgtattttgtgttgctatatattatatatatagtctatattttttaattgactttggcatccgggcatttgagactgacacgtgcaggcttccccccgtcagtcttctgggggagtgcgtcttttgtggctttgtgnnnntttgtgttgcnnnatat

SEQ ID NO: 69319 - DNA, 188 bp, Glycine max
  Clone ID: PAT_MRT3847_33607C.1
aatagaaaacatatccctccttttcctattttttatgaaagagaacgttacaattagagggatatgggtaccgttaggacagatcgttgtcttccctaccgcatacatggagctctcttgcactggtgccgccaactacatatagcatacttgttacatttttccatctaattgcacctatattatgt

SEQ ID NO: 69320 - DNA, 547 bp, Glycine max
  unsure (1)..(547): unsure at all n locations
  Clone ID: PAT_MRT3847_33608C.1
cgcgtacgaagcttggatttgtgagagcggccgcccttttttttcttttttttttttttttttaggggctgggggggccttgcccttcgggtcagtttataattttgcggaccggcccgtgagcctggttagttccttcttattgtattggttttatgggaggttcatccctcccatgatcgggaaanggtgggcggccgggcgtaacagcctcttttctattagcattattgtntttattccctgtattatatatgcgcctggaattcattatactcgtcccccaccatatttgcgttggcttaattatcttctgaccctctagtcttctgaggccacaggcttccttccttatccattgggctcgggccttctcttcttgggtgccttctacccttctatgctggaagggctttgagggtgtcatcgaaactgttctggtttgcgacttctcctgacgagaccgtgcctcaggcnccctcggctcaggacggttcttcgggccgccgttgtggtgtcgaattggtctgggggtttcttcctctgg

SEQ ID NO: 69321 - DNA, 416 bp, Glycine max
  Clone ID: PAT_MRT3847_33609C.1
acgaggatcaagtatcaatcaactaagtgtagagttgagtttctaagtattaaccgttatttttaattaacactcattgccataatttggccaaaataatcaattttctagcagttgattttcattttctggtttcagcttcttgaatctgaatcatattaatttactctgaacggtggacttattctctggttgaaatttactggagcatacataaaggatgcaattgctgaattaaaatttgccagagaataaaggatgactgataaaataggagataaatagatatgtgatataatccacagatgcaattgttaaactgataattcagttcgtttgttcataaaaatgaaaacaaataaaaacattgataactcgggtgttctgaaagtgaagaatgtaatggatcaacagtc

SEQ ID NO: 69322 - DNA, 564 bp, Glycine max
  Clone ID: PAT_MRT3847_3360C.1
ggcaaccaaaaaaaaaaggggcttttgccccccacaaaattaaagggtttggggaaaactttttttaaccattaggggaagggggtggacccccccaaaaaaaaggggggaaaaaaagggggaaaagctttttcaacacccggcccaaaacctttaaatttccaggggccccctaaaatttttcataaaaaaaaaaaaatccaggttgggaaaacttctccccccccaaaacttttttgaaaaaaaaaatggaaaacccctggggcgggtttaataccccagggaaacccaggggtttctcttttaacccctaatgggccttccctccccccaaagaacccaataatttaaaccaaacccccccccccaggaactagttttttcctggaaccccccaaaacgggaaagcctttttaagcaaggcccccaaactgggaattctttgggaaaaaacccattcctatggggctgcaaaatctatcccccggggatatgggaggggttttttaatccaccccgcaaactcttcagccccaaaggcttcaaaatcgtaatcaggaagcc

SEQ ID NO: 69323 - DNA, 264 bp, Glycine max
  Clone ID: PAT_MRT3847_33610C.1
cccacgcgtacggactatgtatttttttagttatccctcccacaacacaagccaaggcccgggcttatacattggattggcactttacaccaataatgcaagcccgccgctgtctacctccttcacgtttgacactcaaggtcccgaaaccacaggatacctaactctgataaagatcacatattataccatatgatggacctgctttaggttacaaaaatgtgttgatgagtcatatcatcactgatggcaacagacgtttct

SEQ ID NO: 69324 - DNA, 400 bp, Glycine max
  Clone ID: PAT_MRT3847_33611C.1
gagagagaactagtctcgagtttttttttttatttttctgattttacctttcatttggaagagagatgctagaggatgaaagtttgaggaccaagactcatgtgggaaaggcaaacttgttgaccatcttatgtaagtcttgccgacgcgctgaactccagcccgagaagttcctctagttgtcttgttcttcttcttcgctgtttttggtttgaagagtttttggttttattcggtttttattcagatttgaagcaaagacttgtttcgatttgtttgttgttttttttttttttgttgcaagtttcttggatcaaaatgaaatgtattttacatatgagaatatgaagatatgagcttaatcaaaaaaaaaaaaaaaaagaaaaaaaaaaaaaaaaaa

SEQ ID NO: 69325 - DNA, 164 bp, Glycine max
  Clone ID: PAT_MRT3847_33612C.1
gggggttcaaaagacaaagtcttttcttatgggggaagaaattaacttccccgatgaaaaccgggattgttcatttaaagaatcaaattattatcccaattaattggatgggctttcaaatgacaaagtttattcttatgggggatgaaattaacttcaccctt

SEQ ID NO: 69326 - DNA, 441 bp, Glycine max
  Clone ID: PAT_MRT3847_33613C.1
gctagagatgaggcaatgcagaaggctatggtggctagaagtgctcttgagattgcaaacaatgctttgagtttagtggcaaatagggaggagagtagtctgaatctgcctcccaagatggatgctgttaaagttcttgatggttccgagttgacttttgagttgcatccacgtttcaatagcttgcccaggatttcaaagagttgctgcttattgaatgtaagttacttggataccccaaagcggtggacctctagtgttgatttgtcgtgcaagacatcaaaatcaaggaatgctagtgatcgtgataagcatgaaatatccaacgattctgtaggagcagcattggatagtggttctttaactgatctgaatcttctctgcatgggcacaagtggcatggaaactggtttacgtgcagctgaatttggcagtgaaggg

SEQ ID NO: 69327 - DNA, 495 bp, Glycine max
  Clone ID: PAT_MRT3847_33614C.1
aattcggctcgagggtgaaactcacagttgcacatattttattcgctgaatgccaattttctggatagcataaatttatgggttgtgtgtccttttagatatccaatttttgtactcttgcagtcctcctttctattctaataaatttccctttccctacatgccatcacgatcatatataggaagacacaatccacagacagaagattgtgggaaacttgaaaagcttagtagagaatcagtaattgtaaagtctagttattgcaaggagggttaaaactaggaggaacacaaccttttgtgttgtgtggaaattggcacacatttataagataccctcagagatcagtatgagatgatttgttatttacttgtcagatatgcttgaatgaagtttttgggttgtaggcaattgtgttcatatatgaaaaaaattgtttgagatgtgatttctgtttgtaggagtcccctcaagctgctagagtaaaagtattt

SEQ ID NO: 69328 - DNA, 813 bp, Glycine max
  Clone ID: PAT_MRT3847_33615C.1
ggctcaaagtctcaagcccctcaaactactaatagaacactgtccaagagggccccttgatactgatgtggattctcccaatttgcttaaccctctagagtcgttcctttcactttttctgctacactctgcactctctctctctctctctctctctctctctctctctctacttgcttgctattgctgccaacacatcttccaatttatgtacctctcttctcctctttcttcaggctatacgccatgagaagaaaagcactactctacactggaaaataatagagtaaaaaagccttcttccttttgagttttgatcttctctctctctctctctctctctctctcttggttgggttcttcttcacatcacaacctgataaagtttcttcagaggactggcattcggatctcagttaactaaaattaaattttaccacccaagctagttttctcttttggatggggaatgacttcaaggggtggtgacatgatcatatgcattcatggcttcacttaattcatatcattactatacaaccacctccttgctcatcatacttcttctccatgatttgctctctctatctctagtttctgcctccaatcatcctcaatctgcaatttctccaagggaactgttatttggggagaaaaacaggctaggttcaattcctcccagctgtcacaacaagtgcaatgattgtcatccatgcatggcagttcaagtgccaactttgctaagtcatgactccaatcctccagatcttaccaaaactgctgcgatggcaagttttcttaacccttcttctc

SEQ ID NO: 69329 - DNA, 395 bp, Glycine max
  Clone ID: PAT_MRT3847_33616C.1
ggctcgaggggaggatgctgatgattccactaagctttcgcaaaactccctgtgtctctgtcacacacacacatatgtgttcttcaaaaatcatggtgggtggtggttgctaatgatgcttaccattccgtcttttctatttaatatgcatgatatgggatctacaacagtgtggccttacggcaacgttcaaggatcactatctaaaggagtgcaagcgatccagagcaggcgtccatactgcatgtcctggcatgggtcttacagatctgctcataagtggctcaacggtccgaaacaggcagaagttgaacatcatctgtgagctgcccgaaactgttgctagaacactatgtgcacagatgcaggttgttcatggaacatgcaaagctatc

SEQ ID NO: 69330 - DNA, 366 bp, Glycine max
  Clone ID: PAT_MRT3847_33617C.1
gctttttgccgactttcagcgcatgtgcacgtaggagatacactgagatctttgacaatcacgttcattgtttcaaagattgctaacggtaacaggtgtcaccattatgtactcgggatgagtgttagcctaagcattgaatctatgcaattaccatttgacttctgagatttcttgaagatactggattcagctaacttatacggatgcaggacaagacacctggcccttaaattgtggctgaagagttgagactacaacaacgtgatggacctagaccgcctattgattgcatggtttatctacaatgatatgtcggagtgctaaaacctatgaagcatggaaaatgcatagcggggagttcat

SEQ ID NO: 69331 - DNA, 159 bp, Glycine max
  Clone ID: PAT_MRT3847_33618C.1
aaattgaagggaaacgagaagtgtatcacacactactactagtattagtgggatactgtgcagactacccttaatgccggcctcatttgggaagaggatgcttactttcaacaagtgagtgatgatcattacagggaaagggaaagacaatttaaaaca

SEQ ID NO: 69332 - DNA, 416 bp, Glycine max
  Clone ID: PAT_MRT3847_33619C.1
tggtcgggggccctttcgttcttccttatagcttccacatctatattcttattacctcaaatggttttgctcatgcatgttccatgcccatgggggacatattcataccatctctggtatcccggcaccaggatctcctacccatgtacagaagcccttccgattaaaggaagaagattcccgttcgaatcattgactcctaaagggcgtcagtatcccctaaaatgtagggataggcccatacagtggggaaggtgtgagacatatctacccaagcccttggactgtctatggtcaaatgacctggacattgcaaatcctgggcgcttggagctgataatgtcgacacagtcacataatgcactggactggaggaggaatgtggtgttaccgtgcaagaagatagtgcccatagt

SEQ ID NO: 69333 - DNA, 425 bp, Glycine max
  Clone ID: PAT_MRT3847_3361C.1
cgaatccttgttttgccatggcctgaaactccatggctaggtgtgagtcaccggttcgaattctcacttctcgcgtgactgcgaggagcatgagactcgtcctacccgacaggcttcatcaaaaactactagaagagtttcaggcgatgagattggatgcaaggcaaatggggagctctgtgtggcttgtcatgtgtgtggatgtcctgtttgccagccgtgttatgagtataacatgagtgaaaggaaccagacctgtcctcaacgcaacactcgctataagcgccaccaaggcagtcctacagtagctggagacgatgaggacaactttgatgcacatgatcttcacgatgagttttcggttaagaatcattgtgatgatctaaatcggaaccttgatgatgatcatgtggcacatgccgact

SEQ ID NO: 69334 - DNA, 261 bp, Glycine max
  Clone ID: PAT_MRT3847_33620C.1
cttacgcgtgcggtttgagatcctggtcctttatctgccccttaatgagatttgcagagacggacccaagaaaggaccaaccaatatcgggtgcttttttggagataggtagagagagaaagtcccagtttttctctcttgtattgtgtgttgagggggggggtgcgtgcgtgggtgcatacagagagtcatgctaaacagtgagtttgagatagagaaagatggaggtccagattggcgaaaaatattgcttaagctgtc

SEQ ID NO: 69335 - DNA, 305 bp, Glycine max
  Clone ID: PAT_MRT3847_33621C.1
ctataaaacaaatgtttattatatttatatttaacaaaaattttgaagtaggcgtttataaaaaaaacaggcagggtaaaactagcacaaacggtggaaggtgaggatcaagtaaagaacttaaaaatacccaacacgaggggcgaaccaagattaaaggcacaaaaaacagccggacgagaaggtcgacccagaaagagcggacagaaacctggaggcgaaccaagtcaccctatagtgagtgcgataaaaagttggcggataaaaagtaaaaacagcttcctaggcgaaagggtaatgtgtaa

SEQ ID NO: 69336 - DNA, 209 bp, Glycine max
  Clone ID: PAT_MRT3847_33622C.1
cttaattattgccacttccttaaaccattatattggagcggtcacttttcttatgttgttgggtttgctcgctactctattcaaatcgcatcctctactatgctcctggcactctcaactagcgccgactcaacaacctttacgcgttggaacccgaccaccgtgttgagtccaaatgtggaccgatacacacatggcactctcatcac

SEQ ID NO: 69337 - DNA, 134 bp, Glycine max
  unsure (1)..(134): unsure at all n locations
  Clone ID: PAT_MRT3847_33623C.1
ggaagaaagtgaaggggcaaganacttntggcaggcataacccaggcatggagcatggaaagcttctttccaggctgctttcttccctaactccccantncttnccncctaactttctcaacaacaataggang

SEQ ID NO: 69338 - DNA, 645 bp, Glycine max
  unsure (1)..(645): unsure at all n locations
  Clone ID: PAT_MRT3847_33624C.1
tacggctgcgagaagacgacagaaggggggactgagaattggggaactcacataatgggcacccctgctgttccaagcagccacccagataacaaaaaagcagctttacaaagtggacaacctcaaccagttcaatactaccatgaccaacatcaacatccctacgtgcaacatagcccagttgacaaaccaagcaacagtcccatggagtcaatccttaacatgttcgattcatggagcaaaaaagctgaagccaccgcacacaacgtctggcacaaccgtgagtcttcctagctactctatttcatcctagttcaagatgaaactctcaataaaaatagcaaatttagtccctatttttacctttgtctttcatataataccatgaattagattaatcaatggtgtcaattttaataaaacattggaaagaccaaattttgggtgcagtttgttatgtatttttggtttggtgcccggcgtaccaattagaattagaattttcttttagtaacctatactgacctttaagaccaacctttattttaagaattattgatgtgaaactttaattctaattcgataaaaatcatgtagccagttctagagnnnnnnnnnnnnnnnnggttaaaccaancagcggaa

SEQ ID NO: 69339 - DNA, 1040 bp, Glycine max
  Clone ID: PAT_MRT3847_33625C.1
tctcgagccgattcggctcgagcggctcgagtagaaacacaacacaacacaacacagagaatgggtgagtgtaaacgctgctctctcacaattgccgccatagaacaaccttcttcaagccaacattccatttccaagaaaagaaaaaccaccgcttccttccagttacgctcttccgatacgcagtttcccgacactatcgtctcgccggaagcttccgtcagttctaccggcacggttgtttccggcgatttttgctccgatcgctcttgctgcagctccagccactttaaggacctccactccgtgccgtcagatctgcagaccaagggtttccaaacggtagaggactcaaccaaccgctacttcaagccgttcagtttgttgagtgagttttctggagactcggaggaatcggcgaagtcttccgcggcagtgcggaaattgaagacgccaccacaagcagagatcgaagagtttttcgcgatggcggaaaagtacgagcgaaaacggttcacagagaagtacaactttgatattgttagagatttgccgttggagggtcgctaccagtgggttcgtttacattgaatgccttcaatgaaagagagagagagagagagagagtttgcattttttagttttagagagagaaatggaggttgatgagagggtgagtttgtagtgtttagtcatttgagtacactggtaaggaagctaacctgacacgaggtaaaacgaaaacgagcgtgcaactttttttggttgctttgaaaaagacggtgctagtggtagtggtgatgggttggtttatgtatagctaactgttttctctttctttttatgtgggatacaacaagctagcttttctgcaaactctgcactcagaatagaactagtagaaccttctttgtgaggtgatgaagaaaaacaaaaaacaaaattgggttttgtgggaaatatacaaagaacacaagaatttccgctatgaatattggtgatctaaaatatgttaatgtaattgagagtttgagaccgtc

SEQ ID NO: 69340 - DNA, 380 bp, Glycine max
  unsure (1)..(380): unsure at all n locations
  Clone ID: PAT_MRT3847_33626C.1
gggggttcctatgattatcctcatactcaataattcactagaaagactcacagaactcactgaaagctattctactcaagtcacattgattacaagcaaagaatgcgaatcagaaccagccaagggaaagggacataggaaggaatctgggagggttccaaatgctaaacacccgtgtcctcggtatctgttaccttgccagcattgataagtaacagtatgacaaagtatggccaaccagggaagctaaccagtgcttcagtgtccagagtttttattgggacttcattatgtagaggtgattgattgaatcatttcccacatggttgaacttaacctncatacccctccccacacccaaagtcaggctgacatcacat

SEQ ID NO: 69341 - DNA, 294 bp, Glycine max
  Clone ID: PAT_MRT3847_33627C.1
gctgacgcttactcgtgtccgggcggggacactacagatggggactcctctgttgacactctcaaaaccatagagcggccgagcgagcgtgcatctttcggcaaccacagaccatgacattcaagcgcgcgactggaggtcagaacaaacacggccgaggccatgttaaattgatacgatgctccaactgcggaaaatgctgccaaaaggacaagggcatcaagacgacgttgggtcggaacatagccgaacaggctgcaactagagatgcgcaggacgcttgcgtctatgaac

SEQ ID NO: 69342 - DNA, 121 bp, Glycine max
  Clone ID: PAT_MRT3847_33628C.1
gatacacgaccggtttctttctattggatacatggctgagaacgattggtgtatggtctactgtgactgaggaggactagttattaattcaacagcgtagaaacctaaggaaatcacccct

SEQ ID NO: 69343 - DNA, 684 bp, Glycine max
  unsure (1)..(684): unsure at all n locations
  Clone ID: PAT_MRT3847_33629C.1
cccacgcgtccgggataatagaggagaaccaaaaacaacagcaactacttcaagagtttggttgatgttgcttcattatcatttatctctcatcatgatgaagaacatggcctattattccaataacaaggtcttcttcctctttgtcatgatcttctcttcatctcttcttgaccttggtatgtgcgatagtgcagcttctcttgatcagcttgtacctggcctagcacatggtgattttctacatgatgcacaatgcatgcaaaggcttcttccatgccaagaattcctgagatctccaaacagcccttctccggcttgttgtgaaccattgaaggcgatgcatgaaaataacacacaatgtctttgcaagatcgttaacaacactccgctgtttcagtcccttgatgcttacaaggatgagatcttgaagctccctaaagcttgcggcatcgatattgaactttctaagagcaacaacacagcagctggaggaggatcatcccaagaatcaagctgatcaccggcatcagaaagtgtatatgctgcatctgaagaggaggcatgtgaatcaacaagttctacaaatatgattaccggacatggaatcgcatattttggtgtaccttgctttgntgcatttgtgacagctctagtattttcttgatactaagcctatgtacg

SEQ ID NO: 69344 - DNA, 929 bp, Glycine max
  Clone ID: PAT_MRT3847_3362C.1
acgaggtgagtatatatattattctgccaaattttaatttcagagcttagctttttattttatttttatttattgctaaggtacgcacacggaagcttgtaataagatttggaataacgctcttgacgtctattagtttttccatattcgaagctgcaggctatgaagcttatggtactgaaactcctagctttcgtgttcctttggttgtggtggagtacttgtattcatgttaaagcagaaaatgatcgtttaaagcctggtgattcactgaatttttcacaatcactaatttctaaaagcggcaaatattcaacaataatttttcgtattcttgatgaggatgaatatcacttaggaatacagtcaaaagataaaaattttgattgggtcgaaattagaaaaccttttagcaaggattatgaatttctatcactaaacacctctggcgtgctgaaaatagaatctcgatacgggaaaaaaccaataatcctttattctccacctcaagctatcaataacactatggccatcttgttggacacagggaactttgttcttcaacaacttcaccccaatgggacaaacactttgttgtggcagaattttgattatcccagcactttgatccccaccatgaagctaggtgttaatcacaaaacaggccatcaatgggtactggtttcatctttgactgatttagttttgaatcccggtgcctttagtcttgaatgggaacccaagggacaagaactggtcataaggagacgcggaaaagtttgttggcaaagtgggaaactgagaaacaatagatttgagtacattccggaggaagcacaacgcatgttgaagtatactattgtgtctaatggggatgaagactctttctctttcactctacgaatgacaagcttacaccacggtggtct

SEQ ID NO: 69345 - DNA, 109 bp, Glycine max
  Clone ID: PAT_MRT3847_33630C.1
cgctcgctcatgagggtgcttgagttccattttttgcttatagttttagctattttatgcattcttacaaacccatgtttccattatgagaattcttctagcatgcatt

SEQ ID NO: 69346 - DNA, 117 bp, Glycine max
  Clone ID: PAT_MRT3847_33631C.1
tcctccttcatcactaactaccattattatttccaccctcactcactcgtacattgggcgtctatctgaaaattattttatctctgaaaaaactcccgcgtccatctttgctcattt

SEQ ID NO: 69347 - DNA, 430 bp, Glycine max
  unsure (1)..(430): unsure at all n locations
  Clone ID: PAT_MRT3847_33632C.1
gacagtaaggggctactttttctgttctgtatgctttganntaacttgtttaggttcgcatgttgataggtagggaagttgtaacgatggtgtgcggtgaaagagggtgcaaaactgggtagaagggtttgtaaagctcttccaaatcatcgagaactctcgtggtttctgagaattcgggaaagctatcaagtagctcatcttgttcagagaagaaataagaaaaatcagcatttgggtcatccatggtgatggcttcaccggtgcttcctcttacaatagcttccaaatcccaatctctcaagcacgcaaattcatccatcaaccaagttgcaactaattaagttataatatatcaagatatatcaaattaaaaatgaaaaaagaacttgagagggggtgttggaccgtgtgacttcaagattgcaac

SEQ ID NO: 69348 - DNA, 833 bp, Glycine max
  Clone ID: PAT_MRT3847_33633C.1
tacggctgcgagaagacgacagaaggggaagcacaaaccttattcaacactcatatccttatcctgtttctttcaatggaagtcatttctgcttctagcttgaatcccaacgctccgatgttcgtgccactcgcctatcggacggtggaggatttctccgaccagtggtgggacctcgttcactcctccccctggttccgcgactactggctccgcgagtgcttccaagatccccagttccaaaacgacgacgctttcgacttcgactttgacctagatctccgtaactcacttacttaacttctctccatttactactttatgtcttcttttttttgtttaattaatttattttatttggatggatgcagaagatgaagatgaaagggaacgaaaggaagggaaggaggtggtgtcgttggggctgctgaaatggcgaagctgtggaggaggatgggcccaggcgccgaggtatgtggaaaaggcccccaagtttgtgaagcccaaggtgagcccacgggctattcaccagcccaggtagacgcaagccggcccattccccaccagctatagctgtgtacataagcgcaaatgacttcagagctttctttctctacattttccagattttaattttcgtgttgacttgttgctctgatattttccataaagataaagtcagtttctttgttaatgataattgcttggcttgtgtccgtgttacagatcttaatatctgctgtaatttcagaattttatgtttacgagtttggctaagagataacaaaattgtgtatggcttgtgggcgtggcaaatcaattcgattatttcc

SEQ ID NO: 69349 - DNA, 155 bp, Glycine max
  Clone ID: PAT_MRT3847_33634C.1
gggggaccagacaattcctttctcttttcacaccatttctgtatttattcaccgcagaggaataggctttgcagatccctcttcacttcaccgcctaagcctcatcttcctggaccaccattatgctgtaactgtactaacactatggaatgcta

SEQ ID NO: 69350 - DNA, 197 bp, Glycine max
  Clone ID: PAT_MRT3847_33635C.1
ttttgtgtttttttttttttttttttttttggccaaaaagaaacacgaagattttttttattggtaaaaatggaccagaaggggccattctcaatagactgtagctggccagctttgataccaatgactaataccttagagatctaaggaaaaatctcttacacactttgaactttaaacaagactaatatatataa

SEQ ID NO: 69351 - DNA, 585 bp, Glycine max
  Clone ID: PAT_MRT3847_33636C.1
gtttgcttcaatggaagtgatttccgcttcgagcttgaatcccaacgctccgatgttcgtgcctctcgcctatcggacggtggaggatttctccgaccaatggtgggacctcgtccactcctccccctggttccgcgactactggctccgcgagtgcttccaagatccccagtaccaatacgacgacgttttcgacttcgactttgacctagatctccgtaactcacttacttgcttatctccatttatttctctcatattcaaatgcttttcttattaatttattttattcggatggatgcagaagataaagatgaaaatgaagggaaggaagggaaagaggtggtgtcgttgggggtgctcaaatggcgaagctgtggaggaggatgggccgaagcgccgaggtatgtggaaaaggcccctaagtttgtgaagcccaaggtgagcccacgggctattcaccagcccaggtagacgccacccggcccattcccccaccaccaccagctatgtacataaaaaaaaaaaagtgtcaagcgcaatgacttcgtctttagagctttctttacattttccagattttaa

SEQ ID NO: 69352 - DNA, 874 bp, Glycine max
  Clone ID: PAT_MRT3847_33637C.1
acttcactctcggaacggatatctcggctcttgcatcgatgaagaacgtagcgaaatgcgatacttggtgtgaattgcagaatcccgtgaaccatcgagtctttgaacgcaagttgcgcccgaagccattaggccgagggcacgcctgcctgggtggcaggaaaaacattattcctaatccttatcctgtttgcttccatggaagtgatttccgcttcgagcttgaatcccaacgctccgatgttcgtgcctctcgcctatcggacggtggaggatttctccgaccaatggtgggacctcgtccactcctccccctggttccgcgactactggctccgcgagtgcttccaagatccccagtaccaatacgacgacgttttcgacttcgactttgacctagatctccaagataaagatgaaaatgaagggaaggaagggaaagaggtggtgtcgttgggggtgctcaaatggcgaagctgtggaggaggatgggccgaagcgccgaggtatgtggaaaaggcccctaagtttgtgaagcccaaggtgagcccacgggctattcaccagcccaggtagacgccacccggcccattcccccagcaccaccagctatgtacataaaaaaaaagaagtgtcaagcgcaatgacttcgtctttagagctttctttacattttccagatttttattttcgtgttgatcttcttgttactctgatgttccataaagataaactcaagtttctttgatgatgatatttgcgacgctgtaagttctaaattttatttcgccaaattttaataccgatataacataatcgtagtatgatttaccttgcctagttcaagaccggcgctgaccgaaaggaagccggg

SEQ ID NO: 69353 - DNA, 989 bp, Glycine max
  Clone ID: PAT_MRT3847_33638C.1
gacaaacattattcctaaggacgggtgaactcatccttattcaacactcatatccttatcctgtttctttcaatggaagtcatttctgcttctagcttgaatcccaacgctccgatgttcgtgccactcgcctatcggacggtggaggatttctccgaccagtggtggaacctcgttcactcctccccctggttccgcgactactggctccgcgagtgcttccaagatccccagttccaaaacgacgacgctttccttattcaacactcatatccttatcctgtttctttcaatggaagtcatttctgcttctagcttgaatcccaacgctccgatgttcgtgccactcgcctatcggacggtggaggatttctccgaccagtggtgggacctcgttcactcctccccctggttccgcgactactggctccgcgagtgcttccaagatccccagttccaaaacgacgacgctttcgacttcgactttgacctagatctccaagatgaagatgaaagggaacgaaaggaagggaaggaggtggtgtcgttggggctgctgaaatggcgaagctgtggaggaggatgggcccaggcgccgaggtatgtggaaaaggcccccaagtttgtgaagcccaaggtgagcccacgggctattcaccagcccaggtagacgcaagccggcccattccccaccagctatagctgtgtacataagcgcaaatgacttcagagctttctttctttacattttccagattttaattttcgtgttgacttgttgctctgatattttccataaagataaagtcagtttctttgttaatgataattgcttggcttgtgtccgtgttacagatcttaatatctgctgtaatttcagaattttatgtttacgagtttggctaagagataacaaaattgtgtatggcttgtgggcgtggcaaatcaattcgattattttcaaaacgcggcaaaaaaaaaaaaaaaaa

SEQ ID NO: 69354 - DNA, 259 bp, Glycine max
  Clone ID: PAT_MRT3847_33639C.1
gtgctggccagactagggttagggattctgatcgatgtgagatgttccctgcattgatgataccgctcgcgcgctgctggaagccgttcgggcaaggtgacgatgccgctaatgccgccgcagtcgccggaagtcattgcaaggacggcctcctccagttccgcgatatcggaaacttcgccgccggcgaatttctccatggccgtcgtccaggccaatcatgtcctcgagcgacagagccagatcgagtccgtcgcct

SEQ ID NO: 69355 - DNA, 226 bp, Glycine max
  Clone ID: PAT_MRT3847_3363C.1
ctcgttctctgatattctaattgactcttctactctcatataatagacctaccaatggctcccgcataggcagagaataagtccgcggagatgaagccggcatgagaaggccccatcggagaagaagccgaaggcgtgataagaagatatccgaatgatgggaggacgcgtagaagacgaagcaagagatacacagaagagcggttgagacctacaaagatctaca

SEQ ID NO: 69356 - DNA, 308 bp, Glycine max
  Clone ID: PAT_MRT3847_33640C.1
tacggctgcgagaagccgacagaaggtttaaacaaatcgtgtaaaggcaaaggggagacattgttagttagaaattgaaagggaaagggaaacgaaaatgagtagtagggtttggtgtgtggtgatggtatcagcgttggcgttgatgtttaattggtggaaactattaagattcatgtttacaatcatttagaacaatacatgtcacgtgctacgtgaaacaaattgtatggacaccgtgagcttttgtttacgagggttttttgacgggattggaatgcgatcactttatttacatcttcaaattt

SEQ ID NO: 69357 - DNA, 1796 bp, Glycine max
  Clone ID: PAT_MRT3847_33641C.1
gctgcaaaagtaatccataaaaataaatcaatgaccattaatttaggaaacatatgataaatgttacaactgaatatggaaagacacccccctacaacataaaaaagcttctttcttcgtataaaaggtctccaaatatgtctagtggccccaagctctgcgagaaaatcacattgcagtagcacatattgtccttgataattaataataaattcctacttcttcataaaaatgcaataaataaggcatgggctacgttggctacattggctaccaaaaccaagggggaaattaccatgtatataaataaaatcaaccattgaactatatataagtgcccctataggcagaaacactcttctcaatgcaattcaataccatacaagtttaacttgccacgggctttgcaatgactttcttaacggcttcagcataagtcctgtgctgataggtgagagttgattcaagcaggtcccaaagtgaggttttaggattccagccaagctgcctattaattatggtcatgtcaggaattctcttgtcactatcatcatatccctcaccataaaattctttggagctcacatcaatagtaggtttttccagaggtgcttctccacttacctttgaataaacctgagtcatcatttcagcaagctgcctaactgtaacctcattgtttgggtttcccacattaaaaatatgtccattagccctggcgggattttcaatcatcaataagacagcttcaatagcatccttaatatacacaaaagtcctctgggattggccaccatccacaagcttgaggggctctccacggaggagattattgctaaagcatgccagaacccgaggaacaccctcacttgggccatcaatgccgggaatgaaatccattcgtggtccaatccaattaaaaggcctcacaattgtgaattccaagccattttcagcaccctcagcataaacaagcctctcaatcaactgcttagcacaggcataggaccatctctgcttttcaattgaaccaaaaatacaaggagactcatcctccttaagtacgtagtatgcaggatcctgacgaagaggactatctttggggaggaagcttccaatcgttttcccatagacttcacacgtagagaaatgaatgagacgcttgttgttctctgaacagtacttcaccacaggaagcgcgtcgatgaagttgctgtaaattgtgtcaagagggcgcgtgttgtaatccgcgggagtgcaaatggcagccagattaatagtcagatctgacattttgatgaggccttcgagacgggaatcgtgcttgatgttgaggcgatggaactggatgcgagaggcccaagggagcgtgtggggttccaagaggtgtttgatcttgtcattgtagacatccaaggcgaggacactgtgaggggtctccgacatgagcttctcgcagaggtgggacccaatgaagccaccggcgccaatcatgcaaatggtgatgggctttatggggttcccatccagatctactcgcgacgaagccattactcagaaacaatcaaatcgataagagaagaaattgggtcgctggagcttatataaggattgaggagagcgaatcctttctctcttccaccgttactgtcactgttgccgatgatgtgatggttttgcacgcaaagtatttggttttagtttaggatttaaataactttgtgtcttctggaatcgaaagattttatggtgctgtgattcagaattcattgcctgttaaaatggcggacgcgtgg

SEQ ID NO: 69358 - DNA, 600 bp, Glycine max
  Clone ID: PAT_MRT3847_33642C.1
caaaagactgtgtcagtattcctagcatttctcattttaataatctcaaaggtagagtagaacaaggaaacataccaagctgcctattaattatggtcatgtcaggaattctcttgtcactatcatcatatccctcaccataaaattctttggagctcacatcaatagtaggtttttccagaggtgcttctccacttacctttgaataaacctgcagaattgaacgaaaataaatgttgaatggtcccaaataccatgttgaaattctaataggtacagaacaatcaaacttaatcctctaacctgagtcatcatttcagcaagctgcctaactgtaacctcattgtttgggtttcccacattaaaaatatgtccattagccctggcgggattttcctgttaaaaattatcgttcacatttagttgaaccatccaacaagaataatagtttaaagatgaaattctacaatcagaacttaaaatatataaagttgcataaaaagattggatatgggaacctacaatcatcaataagacagcttcaatagcatccttaatatacacaaaagtcctctgggattggccaccatccacaagctt

SEQ ID NO: 69359 - DNA, 438 bp, Glycine max
  Clone ID: PAT_MRT3847_33643C.1
accatgcctaatctcatctctttctaaggttatactatcgtctatgcgtcgtgggatctgatcgaaaaccggctttcagcataacgacgtctatgaccactcaaccttttgtcatagatatgactgatcttaggtcaccaggttcatgatggcgggggagtgcgttgccgccggaagcagcatcaccagatcactaagacgacgagaggatgatggatgggaacccaagcgaaggatgtggcataatcttgtgacgacttggatggagccagagcgatacaaacgtggttagtggttgccattaatagatagactatgttgacatgcgaagacgtgaccatgccacacactgagctacataatgcctatgttacacatgatagatgatgttttcaatgcaccactagaagatactgatgcagcattagaagactgcac

SEQ ID NO: 69360 - DNA, 949 bp, Glycine max
  unsure (1)..(949): unsure at all n locations
  Clone ID: PAT_MRT3847_33644C.1
tttattttatatattataataaattaatataacaaaaaggtgatgcactatgaaattgctgttatgctntnnntcaacatagcgtggagaaaaaatgacattccagcgcatgcatcatggtagaattttaaaatggatgtttcttatggggcaatttttttagcgagtgaaatgaccgagtcagagtacgtagataattagacttggtcttgcctaggctggtcatagcaatagcaacgatagcgtcactgttgtgaaaccgcgtattgcctttatttattttttgcataagataaaacctcttcagacgcgtgggcggacgcgtgggcggacgcgtgggaaattattgaatcctttcattcattcccaattccatggcaccttttctcattaatcacctctttgttttccttttttgtcttcgagccataaacacactttccaccactgtttccatctctgaaacttccaattccaaccaaacacttatctgtgtcctgcaacatccaaaccaacaaggacaatcaaatctcaactgtaccagcttccctcaggctcaggctattacacttgatgtcaatcccaatgtttcttactctcagattgtgggcggcaacgggttcgtgtgtgctttaggaccgttgtcttcttccatctccgtcatgggctgttggagattctctgccaatgctacatacaatgttccgtacaaacgcatctaccgtggacccatcgtggaagatatcgacagtggcaactctcacgtttgcggtcttgtaagaaaaggaaataagaacaatagccttgagctggagtgttggcaatggcatgggttcaattcaagcatgtccatgcccatgtcaagcgttgcagttggagagaatttcgtgtgtggcttatcagagagaggggacgttaatgcagggaagaggaagggtaatgggagtag

SEQ ID NO: 69361 - DNA, 252 bp, Glycine max
  unsure (1)..(252): unsure at all n locations
  Clone ID: PAT_MRT3847_33645C.1
aaaaaagtgatttgtcacaaagacataagttaaaattacaaataactnntattcttctttaacttttaaactaagataaatatttctttccttgatttgtctttttnttttnattnnnnntnnnnnnnnnnnnnaannnnnnnnnnnannnatttttcttttccantnttnaatnntttttttnccaaaagcattccaaataaaaacccacatgcatattccactgttacagttttccagccaaatccctga

SEQ ID NO: 69362 - DNA, 290 bp, Glycine max
  Clone ID: PAT_MRT3847_33646C.1
gcacaaccactattttattggtttctttggggggaacgcggcctccttggataaattttcctatcttccagcggaggggttaaaattacctggccaagaaacaagggcgcctcttcccaaggccaaggtctttccaccaaaaaatgggtaattcacaaaaacggtgttttcaaaaaattcttaccccccaaaaatttttccccgggagagctttttgtttggcctttaaaatgcccaaacctctcggcatttccaaattttttttttccagggggggtttggggaaaaat

SEQ ID NO: 69363 - DNA, 372 bp, Glycine max
  Clone ID: PAT_MRT3847_33647C.1
ccacaaccccccccccctggggggggttttttcggggggggaaggggggtttttttaaaaaaagggggggggggtttttttgttttttaaaagggccaaaggcaaaacaaagagggggggggggcccctgggggaaggggaaacccgggccagggggggggaatgggggaaaacggggggggggaaaagaggggttagggggctcaaagtcggggtactgaaacgggggggcaaaggggcctcctaaaaggggggagggccttcaaatatttttaggttcaggttaagtttaagttgaaaaattgggaaacacccgggccgaagaggaggaaaagtcctgggggggaaaagaccccaacctgccgggggggg

SEQ ID NO: 69364 - DNA, 598 bp, Glycine max
  Clone ID: PAT_MRT3847_33648C.1
caatttttaagtcagcacctccatttctatttaaaacacaagcagagcttgtgttggcatgtgcagcacttcataattttcttcgcaaagaatgccgttctgatgaatttccagtggaacctactgacgagtcttcatcttcatcttcagtgttaccaaattacgaagacaatgatcatgaacccattgttcaaacacaagagcaggaacgagaagatgctaatatatggaggactaatataggttcagatatgtggagaaatgctaataattaggcgaacatgaagtgagaatcactttgttattatttttttaggcaataatgactttgttattaaaaggtttaaaatttctatcgtttttattttctttattcaaacattataatttatttatcatctttttcattcacttttgtaacttccgttattattttgtttaatctttcaaaatcttaaaaatccataaagtactttgaaatcttaaaaatctgtgttagaaatctattaaaatcttgggttaagaatcctgattgtaaaaatttttttaaaaaaaatcttttaaaatcccacaaaatcaatacaatcccacataatct

SEQ ID NO: 69365 - DNA, 242 bp, Glycine max
  Clone ID: PAT_MRT3847_33649C.1
atggagcttgatacatgatataatgcacttatatcaaccatttcatttaccaatctggcacaccaggaataatattacatcttgccagcacaggtgtttgtattctgaaacaattcgctatgcttgttatctgataagccgaataacttctgtccccatagtttcaaccatctatacatcacctgattcaatttcttcctacaacccctcaaatcttgatcttttcacccatatttcctgtt

SEQ ID NO: 69366 - DNA, 314 bp, Glycine max
  unsure (1)..(314): unsure at all n locations
  Clone ID: PAT_MRT3847_3364C.1
ctgttcttttttttttttttttatgattttttttgttttttttaggagaaaaagccggggggggtatgtataaaacttgcaaaatgccagttacaaaacactacacccggctaaaatttcattaatgggttagcccttaaaggaaaggacaaacttttggataacaaggaattaagtgacctaaaaaatgcccctatggagtccatacatattcagggggatgtttccttttcccagccaatgtccgaaacaaacacatattttntaacttttgggcatcttccagactaccatttttatggtgggttttattg

SEQ ID NO: 69367 - DNA, 419 bp, Glycine max
  Clone ID: PAT_MRT3847_33650C.1
gtcccatcgcgttcgtctggttgttatacgagacatgaatgccaacaatctatgacaatttttttgatagcatagttatcaaccccatccgaaaaatagaaagtggaatgacttttctatacccaacatttgttttccttaagaaataaggacactgtggaagtctaaaaaaatgaaaaaaattttgagggcttttttttccgaagtgaggaaaaataaatttaaccacacacgggatttttctcccttcaaaaaattccttattttgtgtacttcaaagggggccactgaagcacggttaattattggtgggaatctcacacgggtttgctcctttatttttcacactatgtccattttttttaatcccttatgtaggcttctcgcaggcgcacccttttgtggttttgcaaccgtac

SEQ ID NO: 69368 - DNA, 210 bp, Glycine max
  Clone ID: PAT_MRT3847_33651C.1
aggaacaccaaatacaactaatttagatgacgtcgcacaacaacatggtcattcgaaaagtgttaacagtgctacttttacctatcacatttacaaacgcactcatcgaacctaacattctcaaaactgatcagccatcaaattatcatgatgatcactattcaaaacacatctgcgatctctgaactttcacacactcaatacctcctc

SEQ ID NO: 69369 - DNA, 1472 bp, Glycine max
  Clone ID: PAT_MRT3847_33652C.1
ggctggaggtagccatcttcctgatataactgttattacacctgttttcttcaatgggaagttggttttttttgtggcaaatagagaggcgtccgcagagatcgggggtactacccctggaagcatgccgcctttttcaaaatccatattggaggaaggagctgccattaaggcatttaagcttgttgaaaaaggtatctttcaagaagaggggatcattaaacttctgcagttcccaagctctgatggtcgaggaaataagatagcaggaactcgcaggattcaagataacttgtcagatctgcgagcgcaagtagcagcaaatcaaagaggaatttctctagttctagagctcattgagcagtatggtcttgaaacagttcaggcttacatgaattatgtacaggtgaatgcagaagcggcagtaagagagatgctgaagtccgttggtcatagaatttcatccaagtcaaatgaactcgtgactattgaagaagaggactacatggatgatggatccattattcatttgaaactgagcattgattctaataaaggagaagcagttttcgattttgctgggacaagttctgaagtttatggtaattggaatgcgcccaaagctgtaacagctgcagctgtcatatactgtgtccgctgtttagtgaacgttgatattcctctcaatcaaggctgtttggctccagtgaagattcttattccagaaggctcatttctctctccaagtgatactgctgctgtagtaggaggtaatgtccttacatctcagaggataactgatgttatattcactgcatttcaggcctgtgcttgttcccagggatgtatgaataattttacatttggggatgatacttttggttattatgaaaccattggaggtggaagtggggctggtcctacctgggatggaaccagtggggtacagtgccacatgacaaatacaagaatgactgatcctgagatatttgagcaaagatatccagtgattctgcacaagtttggacttagagaaaacagtggaggagatggatttcacaaaggtggtgatggtcttctccgagaaatagagtttaggcgcccagtaattgttagcattctttctgagaggcgtgtccatgcaccaagagggctcaagggaggaaaagatggtgctcgtggagctaactaccttgtaaagaaagataaacgaaagatttatctcggtggtaagaatacagtcgaagtgcttccaggggaaattcttcagattttgactcctggcggtggcggatggggttctccattgtgaagtttgttttcttttgggagagaaaattgtagggagcagcttcatgtttgatgttctggttacgtggcgtcaaaagttgtgttgctattatggattcatatgcgatatatccactcttgcatgcacatcaataaaatttaaataattagatctccatctt

SEQ ID NO: 69370 - DNA, 363 bp, Glycine max
  Clone ID: PAT_MRT3847_33653C.1
ttttttttttatttttctttctttttttgaaaatcaatgttttcttttgagattcaatagtaatatatacaacatatacttttacaaaatgatatttgactagtcctagccaagcccaatttcaatttgccacattatgcagatcagacataaaattaagctgactaggaaagggcaaccaaaatgacatgcacccttgagacaaatcatcattcatcttcctcgggcaaaccttttgccaatagcaaaacttgttgatctgctagaatggctaggctaagactccatggttctaccaacttgtagaatcaggttgctcacgcttcttcctgaacccataactcccatcttgttgcaaatgct

SEQ ID NO: 69371 - DNA, 168 bp, Glycine max
  Clone ID: PAT_MRT3847_33654C.1
cactctcacaggaactgatgttgggtacccaggtggtctcagggttgacccactaagctctagaagcggttattctgatacgaccacggagttgataacaactgcgatcactagtgggctgttgctcatgtttgatgggaccgggacatatgtccagcgcatttacac

SEQ ID NO: 69372 - DNA, 544 bp, Glycine max
  Clone ID: PAT_MRT3847_33655C.1
tcttgataagaaattagaaaatcgtgatatcctaatttcttatcaagatgttcgctagcgacgcgtccgaaacacccttgtcgaccacaccaaaattaaaaacataaaaaagcataaaagcacaaaaagacataaaaaagggaaaataaaacattttgaagtcatatttgcacacttgattaaaggctgtcgtcccttgtgacggatgcgtggggtgctaataccttccctgtgcgtaaaaacaactcccgaactattcacacttaaagttcgtagaccacaccttttcaattttcccgacgctttcctcaaataaaagttggtggcgactccgcgcattttcctttcatggaagacgcacttgtgagtcccgcatcgccctcccgtcaaagggtaggttgcgacagtacttgccctcccgccgaagggtaggttccttaattgaattaactaataacaaaagtgaaactaaggctaaaataaactcacaaatcaagctttgtccataaaaatcacttaaaaaccattttgaggtccaacgcct

SEQ ID NO: 69373 - DNA, 238 bp, Glycine max
  Clone ID: PAT_MRT3847_33656C.1
tactccaaatgcaaaatcattcttggctcttctgtcagagacactgataaagcaagtatacgacattgttgcaatgcttgtagacctatggagcaatctcctcggcagtctcataggcgaatgcaggaccttttagcttcctaatcccctgtactacattcagtagttcctttccctctcaacaatctagcttgctcctatctatctatatgtaataagatgcgttcaaataggggct

SEQ ID NO: 69374 - DNA, 386 bp, Glycine max
  Clone ID: PAT_MRT3847_33657C.1
ttttaggctaatcaaactcatactgttatcatgttgctcagattcaccatgtaacacttggtcagttgtcaaaagttattaaaaacagtttgcccacaaattatttacagactaaaaggcaaagcccacaagggaataaggttataaacacatgagaaaacgccataatgtcttacttgaaattccaggttaccgagccatcagtttctggaattccagcattgttagtcctttgataatctgaactccaattttctttaaatgtatccgaactcaacccagtaattccctctgaaggatgatccttccctgccaaaaatattcccaaaaatatgcagacgactgagaataaaacaggtgtgagaaaagcaggtgcaacccgattt

SEQ ID NO: 69375 - DNA, 562 bp, Glycine max
  unsure (1)..(562): unsure at all n locations
  Clone ID: PAT_MRT3847_33658C.1
cggacgcgtggggggaacaatgcatggaggatgtggtggtcctttctgtacatagctcttttcattgctattttcttgattcctcgctctattattttctctagtttttcattcattatttggggttttacctgttttttctttcggccagtcacacctattttttttctttttggcangccggnaangaancaagcaacancaggaacagccgnngaacaggngaaccagnnngcngcacaaggggcncanggncaaaagggncanncancngnagagggagccgannnnaacacncancanaaccaaagcncancnaacnngccagnncagaagaanggagcnaggnnacangnnaaaaaancncaggcccngaaggagagagggnnacaagggagcacaagaagcagnccaagngaaagggcacagggaancagagcagggaaaanngcngacggaagngangcacagncnncnncncnncacgccgnngaaaccagacagcaaacacaagccancaaagnngnaccccanaaccggaaanccgcgacggaancagcag

SEQ ID NO: 69376 - DNA, 206 bp, Glycine max
  Clone ID: PAT_MRT3847_33659C.1
ctcaaagataaggcttccactctactgattctaagacaagaaggaccttgtttaacctggggaacttgcaaagaaacttgagtgggatgagaaatttactgactttgatgaggctatacctgttactgccaaatatggttcagggggtggaggatgttatcggacgggatacttgtgataccttccaaatggggccgattgttatg

SEQ ID NO: 69377 - DNA, 301 bp, Glycine max
  unsure (1)..(301): unsure at all n locations
  Clone ID: PAT_MRT3847_3365C.1
nncgngnagtangncgnaantnggntnnngnnnnnnnngncncgnanggnccaggnnncgangnncnncnnngngnngnnctgnggnnncgngcnngncgnaggncacggacgcaantgnggcagntnngttnnnntgcgngtcntggngtgnggntnntnggnagtngntnngtagnggctagtnngtggcaananacnccgggttgcnggaagggntgnagttattgggnggaanggtnngcacaggcnctgnctgtngnngtgangnttnatgatgagggtgggatcgcatggggttt

SEQ ID NO: 69378 - DNA, 325 bp, Glycine max
  Clone ID: PAT_MRT3847_33660C.1
gtttaatgttgacccagaagcagtcataagtcaagccttgcagacaggagggggacccaatgtttcagatgcatacaccatcaatggacttcccgggcctttgtataattgttcttctaaagatacatacacattaaaggtgaagccaggcaagacatatctgctaagactaatcaatgctgcactcaacgaagagcttttcttcagcatagccaaccacaccctaactgtggttgaagcagatgccagatacaccaaaccatttgacacagacacactcctcatagcccctggccaaaccacaaacgtgcttcttaaaaccaaa

SEQ ID NO: 69379 - DNA, 315 bp, Glycine max
  Clone ID: PAT_MRT3847_33661C.1
gttacttgtgggcggacgcgagaggacagcatggtagaccatgcatgtacgatgccgcacgatagaaccggaaagaaaggcgcccaggactggaatcacagacacattgaaggtctccctgctgctgggagcacaagaagacaggggtatgcaaaacagtctccgtgcggggcgccaactgcgcgagccaaaagcgctgacattcacagtgacttcgctgcacactcggctattagacatgagactgcgggtcacattgaagcatggacagctggtgtctcagttccccggccaacaaaaagtacaaggggggga

SEQ ID NO: 69380 - DNA, 512 bp, Glycine max
  Clone ID: PAT_MRT3847_33662C.1
gaaaaaattgcaaactgtcttaccaccatctagaggacatgctactggtatttctacctccggggttataatgtagcatcataatataactattgccacctgattttggtggatttttcctttgagttaacatgtgtatttctttgaattgcgattgaattatttatagtaatgctaattaaaatcaaagtcttccgagatatttttttattaaaatcatctatacatttttcaagtttatttatcctccgttaattttcttggaagctctttaaactaccaatatcctcagcttacccaagcatggatatttaagcctttattacaactcatgcaataaataactacttcactatatcccaaactacagcattaacatggtagcatttgaccaagccacctaaatatttatattcagccggagggcagtttgatttgtatgagctattggtagttggtgataattggatgaagctagaatctcattcagttggtaattttgagctagcaat

SEQ ID NO: 69381 - DNA, 724 bp, Glycine max
  unsure (1)..(724): unsure at all n locations
  Clone ID: PAT_MRT3847_33663C.1
caaaccattccaattctcaacactcaaactaactgcaacttgcattccctagagaacacacctctgttgccttccttcacttcagttagctgagtgtgttggtaagcactttccttctcctttgggtagttatgtcatcagcacctatgaccgacaacaacaaggttcaaaacaaaggccttttatcttcttcttcttcttcttctgtgaggatagaggaagagatcatgaagcagggcatcataaccattttgaactcaaacacaaacacaccttcttcttcttcttcttcttcttcttctctgcgaagaactctctccgcagacatgtcctcaaagaactacttgcatgcaaaaaccattgctgactcagaaaaagaagaagaagatgatgaagatgaagctgagagagagaggctggagatttggagctccatccaacggaacaagaaggaggagcaagagaaatcaggagcctttgatatttggagctcaatcgtatctctcaagggcaaagatgaaatctccaaatcaatgcctattacaccttatgttcaccctcttgtcaaaaggtccaagagttgtttgagtggcaagagcctcgaaatctgcactgagagtctcggctccgagactggctctgatgccctgttgttatcttctcactcttcttcttctgagacaggggatgcaacagagcaagaacaagacanagaacaagttaa

SEQ ID NO: 69382 - DNA, 477 bp, Glycine max
  Clone ID: PAT_MRT3847_33664C.1
gaagatggacaaactctacttgcatctacatatctttcattattaattattaaacagaagctcaaactctaacatagaaggaaaaaaatcaagcaaaacatttaaaaatgacagtatgacttttttgacagctctacaagaagcaccaatgatttgataataacattttacgttccatcaaattaaacaaaccataatatattcaattgaagcttcaatcctcagtgataaccaacatactacaatgttaaaaactttccaaagtgtaccaaagcataaacgagaaattaagcaaaggtcaaccttattgcaatttggtataagttcctgtaacgcacgcatcttctcattgatccggtctcttcgtctcctttcagatagattatgcacttcggctgaacggcttttcttggctccatttcgtcgtgcaggaacttccttgttgacaccaactgattctttctcaacatcctaaaa

SEQ ID NO: 69383 - DNA, 2228 bp, Glycine max
  Clone ID: PAT_MRT3847_33665C.1
gagctaaggttacgtttgtgtatgtattagattagattattagcaaatagcaaatacaacagataaatagcagtaggagtagtatatatgacaatacttttaaagtcattttttctgatcttacgatacaaatgaagtattctcttctcttctctctcactataacttttcccactcccttttctcctttatttgttagccaatagcaaatacaacagataaatagtagtagtaatagtatacaatactgttcaagtcatttttctgatcttacaaatacaagttaaagtattttcttctctccctatccttttctcccagtccctttttcctttatttgactacactaaacagatccctgaaagagttgaaccaggtagagataaaatgatgatggagtaataaatagtgttctgagcaatggattttggattagttgttgttgttgttgttattgtttgtgactgattcaggaggtggcaatgcaatagggttcccagaacagaaacgaccttctagaatccttgcaactcttcaaattgtgaaccaagtaatcaccattcttccctctaagaaccagcaactgctgttgctcccttgagaccaccttgttcatgtccccggacacaacaaccttgctcttcagtttctcttggtcaagttggttaaggttaacactagtaccttttgatgatgcagacttggtcctccaatagtattcataagcattgaaattgaaagaagcagctggtgctgatggaatcaaccttgccacccttggccttggaggcagtgattgtgctgccacattaacatcatcaaaattggtcatctcattgaacttctccgaccactttggattcctattcactaccccaattggcttattcttaatattcatcatcaaagccaactcatgaacactacttgtcaccccagtaggcaatagcggcgctttctctatcacactctcgtaccccatcagaacagaattgggttcaatagaggatacctgtggcttcgtgccaagaaagtattcctcttcctcttcatcttcaccctcgtcataataatcctcctcttctccaaactcaaaccctccaaagcactcttctcccaactcctccacatgatcaccattctcttcttcttcctcctcctcctcctcctcctcctcttggtgattggagaaagtgaggacaaggcgaccatcttggcgctgaatgctgaaattgttgtgagaaggaacagaaacagcttggagaaccaaccttccattgtcgcggtgggaacgcatgtgagttactgaagaacttgcttggtgatgagagagtgaaggaagtggtggagggaaagcgcgtggtggtgaagccgaagccgaagccgaagccgaagccttctttgtagccaccactgaagcataattgcataactcttcttcttcttcttcgttaacttgttctttgtcttgttcttgctctgttgcatcccctgtctcagaagaagaagagtgagaagataacaacagggcatcagagccagtctcggagccgagactctcagtgcagatttcgagactcttgccactcaaacaactctttgaccttttgacaagagggtgaacataaggtgtaataggcattgatttggagatttcatctttgcccttgagggacatgattgagctccacgtgtcaaaggctcctgatttctcttgctcctccttcttgttccgctggatggagctccaaatctcaagcctctctctttcagcttcatcttcttcttcaagctccttgttgttgttgttggcctcttcatcttcttctgagggagcaatggtttttgcatgcaagtcttgttcttctgagggagcaatgttctgagagagccagtagttctttgaggacatgtctgcggagagagttcttctcagagaagaaggtgtgtttgtgttcaatatggtgatgatgccttgcttcatgatctcttcctctattctcacataggaagaagaagaagaaaaagatgataggccttggctttgaaccttgttgttgttgtcggtcataggtgctgatgacataactacccaaaggagaaggaaagtgcttaccaacacactcagctaactgaagtgaaggaaggcaacagaggtgtgttctctagggaatgcaagttgcagttagtttgagtgttgagaattggaatggtttcgaacgcgtggg

SEQ ID NO: 69384 - DNA, 224 bp, Glycine max
  Clone ID: PAT_MRT3847_33666C.1
gacccacgagtcacgaaataaaaaactgacaatgaaaaaaaaaaataaaaaaaaaaaaaagaaaataaaaaaaaaaaaagaaaaaaaaaatgaaaggcaaccaagggggtctctcttcaggtggctcgacactaaaattagtcttgcagctaacgtcggacctctaaattctcgtcgcgggccgtcattttactggccttcgtttgggaacatcatgggtttaa

SEQ ID NO: 69385 - DNA, 1805 bp, Glycine max
  Clone ID: PAT_MRT3847_33667C.1
ccacgcgtccggaggaactgggaagtgattcattccattgctatgaagttccttcaatctctaattgctcaatcccgttatgcagcgcgtaccaggccactgaatcgggtctcggggctccgattcttctcggtttccacggaagagtattccaagagaaactatgcaaacaacgttgctgagtacaacactggttttgggttctctcactgcacaaagaaggaatttcttgctgagggatgtgtacgatgatatgatgcttgatggggtaaagcctacgcgtgacactttccattcccttgttgttggaaccatgaaaggagctagaatgcaagatgctttctaattcgcggaacaaatgaaaattaatggtttgcttcctgatgttgtttattctatctctcattgctcccgtcctgtatgccgtacgtgactttttactactttctgatttcgacttgtggtaactgcaacaactctaatgaagtccatgagaaactagacgagataaattgcttagaagaaaaccccaatatactaacatccctctgcatacaaagagcttgttgctcggagaggcgtatggaccgagtgtatgcgattgttcgtgatatgactgcagctggtctgggattaaatgagttctgctatgctgggcttatagttgcacacaagaataaaacacctcttcctgatgattttgctgcaaaagttattgagtttgtggagagatcgaagatgtggtcttctgttgaaaccaacagtgccaatgctgagaatgtgatgatgggtgtttcagatgaggagttatacagcttaccaacagcagaatatgctcataggcgtggaggatttgtagttagacaatttacagcatatcatactgcatttcatgctgctgcagacctcaaaaatgttgagttgacggacacacttttggaaatgctgaacaagcaggggaaaactcctgatatctttattctgatgcaagtaattaggtgctattgtcatgcaggagatattgagcgtggtcttcaaaattttgagaaccacctaaggcaggacaggtctgttcctgcagaactttttgtgactcttgcagaaggggcaatggttgggtacactgaaaaaggaatgcaaatggctcaagatattctggtaaggatgaacgagagaaacatttttttgaataacaaattgggaagtgagctcctatttacagctgcgggagaaaagactgggggatatatcactgctaactacatatgggacttgatgcaagctcgtggaattaccccttcgtttcctgcagtagaagcatattaccaaggcttaaaagatcgagagatacctgaagatgatcctagacttgtattggtttctagaatacacaaaaaccttagcgtgagattcgggaacaggacgaacataaatttatagagatttaggctcttcccttattgttaagaattctgctagctgcttatgagtttgctattttgaatcaagaatccataagttacctgaattatttgtttgattcatgtatggcatggtacgtagaatccatgtattcacacagggttttgatgttgtccagagtaagtttaactaagtgttggtattttaggagattatgtagagcattttataccttttcccaccatttgatggtttatgtttcttttctttctttcttttttcttttttgaaataagtatttgtttcagagtgtgaatacatgaggtagcattgatgtgaagttatttcaatgtcaatgaggaatacgttgttatttgtaattt

SEQ ID NO: 69386 - DNA, 170 bp, Glycine max
  Clone ID: PAT_MRT3847_33668C.1
gaaggcattacctcttcttagcattacatttatggacactctccgttcgacttgtggcttcaaatagatagttctcaaaaaaaagcatgcttagctcattggtgccacaaccactcctctcccttgctgacatctgatcatgaccctatttaacctcgcttatttcacac

SEQ ID NO: 69387 - DNA, 1664 bp, Glycine max
  Clone ID: PAT_MRT3847_33669C.1
tttaagttgacaaaaggcttcgcagcaaaagagtcagtgaagggacatatggtgaatgtagtaaaaggattgaagttatatgaggacattttcactgattcagaactgtgcaagctaacagattttgtgaatgagatccatgctgctggccagaatggggaactgtcaggtgaaacttttatattattcaacaagcagatgaaagggaacaagagagagctgattcaactgggtgttccaatatttggttaaataggcaaaatgcaatatagaaccaattccagcacttctccaaggtgtcattgatcatcttattcagtggcaattacttcccgagtacaaaagaccaaatggttgtatcatcaacttctttgaagagggggagttttctcagccatttctgaaaccaccacatttggatcaacctgtgtcgactcttcttctctctgaatcaactatggcttttgggcgtatacttatgagtgaaaatgatgggaactacaaggggccactcacgctctcattgaagcaggggtctcttttagtgatgagaggaaacagtgccgacatggcgaggcacgtaatgtgtccatcccctaacagaaaggtcagcatcaccttcttcagagtgaggccagactccaaccaatgccaatctccaactcctactatgatgccaagtgcgatgactgtgtggcaacctggtcaaggtggctctttcgatatgctgcgttagatggtactctaacgaaaccacacggggcggctatcaccgtgatctcaaaatgggcgccttttggagttaccatgcccaggtgaattcatacatgggcgagtccactgctcaaccccgaactgctgggtaaggataggtatgtttttagtctcaaaactgtcctagctataaaaagatctaactcgcctcaccaagttgagcgcaacggctgtgtggttaccttgcattgctgctaggcactatgattggcagaatagtgttctaaattgagatttttgtattgaaggatacaaagcacatgtttagttaagaaagcagccttggatttgaataaatgtgaatcaagatcggtggcttctactacctagctattttctttgtagtgttgagcattttatttagttgtacaaactcggccacaccccaggtgctgcaagagtagtttggttcattctttttctttctttttctttttccctttggatagagcagagtctagtggtgttcacaacggttttactatgtttgccaatcacggcaagagctttagtagagtagtcaagctttcaaatttgaagagtgtgaattatatctgacggtagcattttgtaagaatgatatttgaagttaatcatctacttaacacgcagaaaataaaaaacgccccccccccccaagtgctgcaatgaaagagcagtttggttcttcttcatcttttttccctttggatagagtagagtctagtggtgttcaaaacggtttcccatgtttgccaatcaccgcaagagcttagtagagtagtcaagctttcaaatttaaagtgtgaattatatctgatggtagctttttgtaagaatgatattttaagttaaaaagacaaatcaattcctcgtcagaatgcttacatcaagcttatcgataccgtcga

SEQ ID NO: 69388 - DNA, 161 bp, Glycine max
  Clone ID: PAT_MRT3847_3366C.1
cggggatctaaatactgctaggcttcttttttcattgccatcacattatacgggccgccagttatttcctggggatcctcaaattcttgcaacactccttgcttctaacaccccgtcttctgcatatgattacgctaacctccgaaaacgaaagagagaat

SEQ ID NO: 69389 - DNA, 270 bp, Glycine max
  Clone ID: PAT_MRT3847_33670C.1
ggccggaattcccgggtcgaccccgcgtccgcgtaacagttgcctctagctgtgatcagtatgcaactctttctctacctacgagcagactgtgaatttttgaaagacgtatactataacagcgaatcatctatttctcttgttactagtcattttcatccgaatactgacgaggaagttgaagcattgttgcttgcccgggaaccgcgcatcgatagatcttgtatacacgctttaggtcctatcactcttagtcaaggtctaggatct

SEQ ID NO: 69390 - DNA, 302 bp, Glycine max
  Clone ID: PAT_MRT3847_33671C.1
caacaatcacaacatttagctgccggctcagcttttatgtcgcaacaacaaatgcgacaacggccatcgtcgtcctgtcagtttggttcgatggtgacggtgccaccacaagctgctttacaacgcgtgacaccacctgtttcgtgcaattcttcttgcacaacaaccaatgttttttacccaggcgcgatttcttcatcaacaacaatgtcgacgacgacttcgacaacatcttctgcagcagcagcagcagcggcagcagttgcacttgcgacaaatgcaaggatgaaaggagatgtgat

SEQ ID NO: 69391 - DNA, 788 bp, Glycine max
  unsure (1)..(788): unsure at all n locations
  Clone ID: PAT_MRT3847_33672C.1
gtgccagaatagaattttgcttacttcaaatttgtacttggtttatcttttaacttagctaacctcacatagtgggataaggctttgttgttgttttatcttttaactggtcatgtgttctcttctgaaaaagtcagtaatataatttgcttaagctactgcagttgtactgtacagtgtatagtttttatattatttatctattcacctctactgtgttgcaatactctagaatttcgaggtatttttaacttcatcatctgtgtccatactgtacagtactaattgccaaattttgtcacagttgatagacaggagattagagtgcacatctctttcatgggaaggttatctttctaataatccatggtctgttggatcttttggaaggtaaattatatcaatgtatttggtatgctgtcagtcaaataattatggctttttcttcccatttctctttcatgatgcacctccttcccaaaaagaggaaacaattttggtaaaggatctatgtatgattaaagccaacatcttttaacctgcttcgctatatcatgagatttagctactaaagtaacccagtaaataaaattattgaaggtgaaggtgaaaatttgagttggcaattgaatattgccaatagatatgtcatggtgcataagatntaaattgtacctttacatatgcatttatattcttctagtttctaagngtctgcatagaactactaaaggtacattcatttgattgaaatcctcttcaagcaggctaaacattatcattctcta

SEQ ID NO: 69392 - DNA, 429 bp, Glycine max
  unsure (1)..(429): unsure at all n locations
  Clone ID: PAT_MRT3847_33673C.1
aagcttatatccttacttaaacctgatgttaaagatgttctaatgaatgaaatagacaaacaattgtactagttaatactttttctttccacttcacaaaatatatatatatatatatatatatatatatatatatatatattaattaagataaaaacaaataaaatattattaataaaaaaaataattaataattatctcaaaattttacaatcaaaaaggaagagagggagtatttcttcaaagcaaatgatgattaaaatattaaatcctgattcctctcatgccacagtggtcactaaggtaagcatcaacgacagcttggcgcaaaaggagtatntaatatgtttaagactaataaaatactataatatggcaagacacttcatgggagtcaattgagtgtggcgaatacgaacacgaacagca

SEQ ID NO: 69393 - DNA, 508 bp, Glycine max
  Clone ID: PAT_MRT3847_33674C.1
aaaaccaaacctggtttttataaccggccataattgttggaagccgggttgggaaaaaaaaaagaggggaaaacaatttttgggtggggccttacaaacaaaacctagcgaaggggggggggttcctttttggcaacccattaaagtcccaaaacaaaaatacccccgggggtttaaccaaatttgggaaaaatatcgggcaggaaaggcttaatttaggtccccaaccaaaaattcctaagagggttccctggggccccatttctttccaaaaaaaaaaagcaaaccctaagccccccccgggggggttaaaattttcaaaaaccaaccctttggaaggccgggggggggctccccagggaaagcggttttttacggaagctccccgggcaaggccctcaaaatttagggccgggccgggggggccattttttggcgggggcttaggcccccccccaatggaactagttggcaaaagggcccaaataaccaaacggttcaaagcccg

SEQ ID NO: 69394 - DNA, 979 bp, Glycine max
  Clone ID: PAT_MRT3847_33675C.1
tcccgggtacgacccacgcgtccgcgaagttgtccaaaacctaatcctcgtaataatccttgtataatccgaaattctccgtctacttttttttgtttggtttccggagattttgtcgtagagggatccctctggtgtaggattgtgtgtatcttcggcgatggaagctgtttcggatcaagacactagtatatgcactcactgtgatcgggctattcctgctgcaaatattgacttgcattatgctcattgctctcggaagcttgaaaaatgcaaagtttgtggtgatatggttcccagaaaaaatgcggaggatcactatctaagcacccatgcaccggtttcttgttcattatgcagtgagacaatggagcgtgatattttagatatccataaaggtgaaaattgccctcaaaggattgtcacttgtcagttctgtgagtttccattgccagcaattgatctggccgagcatcaggaagtatgcgggaatcgaacagagctttgtcacctttgtaacaaatatgttagactgcgtgaaagattcagccatgaagctcgatgcaatggcatccaagatagttctgtgggtacttcaaggaatgtgagggaagctgagagagagcaaggtgctagaagaaggccgctgccgccacagaatgacttctcaactaaacgccttcttttcacaatagccatcactggtattgctgtcatactgggatctttttttctacagaggaaagcagatcccagtgacgtgcattagcaacaaagtcaaaacattttaggatcctgcattttctgtataatccattcccctgcatcagaagccggatgagatatacttttgctaatgtgatgtattggaagtgtataacacatcggcattgtcattttataaaatatatatttaattatagactcattgaaaatgactgtagctctgcatttgatgacaataattgaaagttttagg

SEQ ID NO: 69395 - DNA, 924 bp, Glycine max
  Clone ID: PAT_MRT3847_33676C.1
agggaaagaaagaaagaaagaaggaaccgatagaagcaaaaatggcgatgttagcttcaccatctgtgaaactctcgctctcattccccctttcagcttccaaacccaaccctcgcaggcccttcaccatccgagccaccgagcccgaaaccccactctccggttcggacccatcccagcccgaaccggacccttccgacgacgccttcgacgaccgcatcaaccagctccgcctccggtaccgcagcggcaccggtaagaaggcggagctccgaaagaacaaaaaatcaaagaaaggaacctccggatccgggtcgggcatgtacctgccgccggtgccgctgaaggaaccggtttccggcggcgtgaaggtggagctcgggttcagccagtacagcgagcgattgaacggtcgcattgcgattctaggtctggcggcgctggtgctggtggagctcgcgacggggaagggtgtcattaactaccacacgccggctattattctgattcagatctatttcgtggctgcggttggagctgtctttgttaagtatgagaaggagaagatcagcgtttggccccaaactgattcttcaactaacaaataaagaaatgactttcaactaccagttattgcttgtggagctgaacgtgcttctatctttggctaatatattgtaaattattactgttgaaaggaatgttgctttttgggtatgatatgatactactcatacttgtttgagattgagagggtgcgcttgttttagcatttcaatccgttggcacgtgttctgatgtactattttgtgagaagcaacaaattgttatttctccttcaaaataaaaaacaaaaaaaaaaaaaaaaaaaaaaaaaaaaaaaaaaaaaacaaaaaaaaaaaaaaaaaaacaaaaaaaacaagg

SEQ ID NO: 69396 - DNA, 380 bp, Glycine max
  Clone ID: PAT_MRT3847_33677C.1
ggctcgaggtatgtgattcacatgttttatagggaccttcgttggctgaattgcaagggctgtgacagagggcaaggataatagagatcgatgcagcgcgggacattgacattgcactagcgcaaaaccgggtgtgggcaaggtttagccgagagaccaatgcatgattatggtcctagcatgtcagtcctgaggaagctatatggagtttgctgtatatgcacaataacgaccaacttatcacagtcatggtgtctgcatcagacaattacagtttggtacaatgccgaatttcatggattgaatagacacggagggtaaaaccgatggctggttttgctatattagaatcctagatatgaaagtggcctggcttatgt

SEQ ID NO: 69397 - DNA, 407 bp, Glycine max
  unsure (1)..(407): unsure at all n locations
  Clone ID: PAT_MRT3847_33678C.1
cttcccggattgaggtcctttctgggtccctctaataagactttcgctacctcatgaaaatagagaagattctgtctctaacatttgagatatttcttggcatgtagaaaccactcattcttgctctgtccaacccaacttcacaatctgagtgcacggctgaagaagcttatacatggagcangagaaattctcattatatcataatgcttagcaccagaaacatcatatcgcgaggtaaatgttaaagcagataaacaatcaaaactcctgtatgtgcagggtaaagcaatctgtgctagtggaagcccatttgatcctgttgaatatgaaggaaaagttttgttcctggacaggttaaatttaatacttgctaaagattttcttattcagcagactcacattcc

SEQ ID NO: 69398 - DNA, 437 bp, Glycine max
  Clone ID: PAT_MRT3847_33679C.1
caacacaaactgcaaccctttgatttttcatttaacaggaaaggggcaactccttttaaaatacacaaactggaaccttttgttttttcatttaacaggaaaggggcccctccttttaaaaaaacacaacaacttttttttcagttgcttcccaacatattataaattagtttcccaaccccattggaaaaaaacccccccggggggagaggtttcctagcctttttttttatttccttcaaatttttgggccccaaattaattccatccaaaaattggttaaagccttttttttttttctttgccataaaaaaaacactacccctttttttaaccactttaagcccccctggcaattaatatccccccaccatccaaaaaacattcagctgttgttctgcataaaaaggccctgtcaatattggtaccccaaacca

SEQ ID NO: 69399 - DNA, 314 bp, Glycine max
  Clone ID: PAT_MRT3847_3367C.1
attgccttttggcaatatatatatattttttggctaacctgtttattcacgttgcaacttacattatagttggtggcggttaaaccaaatagaagtgtttaaccgtattacacctctatatttttccaacaggatttgacagcgccctcaaataccagaaacgggcttcacatattggtgctaatgtaagttatcactcatttcaaatcctgatcaatggcacttagcacgtccttgaactgaaaggggggacactttgtccactcttttatgcgacatgcgacagtggcccaatattacaggaaatatttcat

SEQ ID NO: 69400 - DNA, 746 bp, Glycine max
  Clone ID: PAT_MRT3847_33680C.1
ggaattcggcaccagtaaaaaatgggaaatatacatacccaattttattggatgcagattggggttcaggaattgtgaaggatagagaagctctttgcttatatgcggcatcgtatggaaatgctgctagaggaactgtgaaggatagagaagctctttgcttatatgctgcatcatatggaaatgctgctagatttattaatcacagatgtttggatgcaaacttggttgagatcccagttgaagttgagggcccaactcatcactactatcattttgccttcttcacatccagaaaagtagcagcacaggaagagctcacttgggattatggcatcaactttgatgaacatgatgatcagccaattgagctgttccagtgcagatgtagcagtaaattctgtaggaatattaagcgattaaatagatccatgagatcgtcaagttcatgatggccattctctggtaaacagattttttggtctgatgcatgccatcgatcagtagtaacaagtttcaacctactgaattggtctctttttgtattttagttttcattattttgcttggaggttggatacaagttactattgacagccttctaaaaactacaaggcagtcatgggacagaataagaaaataacctctaggtgttaataaccccgaatagttctgtcaaatgccaatgtatgattctgcctctgggttttatgttgtgctgaatgcatgccagattaatggtttag

SEQ ID NO: 69401 - DNA, 409 bp, Glycine max
  Clone ID: PAT_MRT3847_33681C.1
ctaccactctatactatttgccttctgtgacacatttggtgccttgcaaagcgtgtttcgtcaggaaggtggtatggctaaggacgtggaggtggctgatcgtggctccttctctgcgaaggactaccatgaccctccaccagcaccactcattgatgctgaggagctcacaaagtggtccttttacaaggctctcattgctgaattcattgccactttgctcttcctctacattactgggctcacagccatagggtacaagcaccagactgacctcaatgaaaatggcgaaatctgaggtggggctggcattcttggcatcgcatgggccttccgtggcatgatcttcatacttgtatactgcactggtgggatctcaaggggccacattaacccagcggcgacattt

SEQ ID NO: 69402 - DNA, 318 bp, Glycine max
  unsure (1)..(318): unsure at all n locations
  Clone ID: PAT_MRT3847_33682C.1
acggctgcaagaagacnacagaagggaaattcatttattttactcctttcacacataaatttttattgagggtttacaaccagaaagaatgagtgaatgaagttttgtaaaaatttatgactagagtaactcaaaattataattttagaggttaattagttctgtgacatgaaaagtgtattctctgcatgaacttgtttacataatttattttcatttcgccaagtatttataaatatgatgaattaagaagaaaaaaataattaaacttgttataaatgaagaagaaaaataaagatggtataatttagaaagaaa

SEQ ID NO: 69403 - DNA, 668 bp, Glycine max
  Clone ID: PAT_MRT3847_33683C.1
cggattcccggctcgacccacgcgtccggtggaatgctacagttcttttcacagtttcagaagttacactgccactacagatataaggtaacagcgcattgtacaatttgctgatgccagaggggggaaaaattgttgacacagcttggaaactccaatggcactagaattcatgcgtgtgtttttactctgctggatgaaagctgcgcaggtgatatttgagaagcatcccttactcatcatcacggtcctgatgtgtctgacgatttgtagcgtatggtgagtccaatcaagggatcatgatctgatgttacagagaggtattgatacttaaatcaaatggcactgaatattgtttaatgctaatttgaaagtcatgatttgacaaagtgcatgaattgtgaccaaagatgatatttatgaattagatcacgcatcacaactcacagattcatgttgagcaaagtgattcaaatcaaataccaaagtatccatttttgaagatgtcttaataagacatacgttgaatataacacactctatgtgcaaacagataaatctgaatgaattgcatacttttcacaatacttagtgacaaataacttgcattgaacattacctcatgctcatcttgtatatacatcacaacatttatgatgctcgagtca

SEQ ID NO: 69404 - DNA, 254 bp, Glycine max
  unsure (1)..(254): unsure at all n locations
  Clone ID: PAT_MRT3847_33684C.1
gnaagagatgatggtgagagaagtaaggntgaaggggatgatgatgttggtggccggtcttatcacgagggtgatagtagtgatgaatctgattttggtgatgatctttataagaatgaggatgacaggcataagctttctgagatgactgaacttcaaagagagatgatattgtcagaaagggctaccaagaagcatgataaagatttattggggaagatagcatcaaagcgtgagangggaaagacaactgt

SEQ ID NO: 69405 - DNA, 310 bp, Glycine max
  Clone ID: PAT_MRT3847_33685C.1
ctttcttaatggagaactgagcgttttcttagtaacattgctaatatctatgtgaaagcgcatttttaaaaaaaaaaaaaaaaaaaaaaaaaaaaaaaaaaaaaaaaaaaaaaaaaaaaaaaaaaaaaaaaaaaaaaaacaaaaaaaaaactcccaaagcactatcatacatattaaccccagagagcgactcttgtgaatgcaaaaatacaaaaatatttcaaattataaaaaaaccaaaggatcttcctgtttgcacaccacacaacgagaaagcaaaacccctaaactatctaattccataaactac

SEQ ID NO: 69406 - DNA, 540 bp, Glycine max
  unsure (1)..(540): unsure at all n locations
  Clone ID: PAT_MRT3847_33686C.1
aaactgtcacactttgagacncgggcaagctgctcagaggagcgaggttgaaagatgcttggggcgccccacccccccgaagngcatgaagcacggctgcctagacactgcccgccgatcgcaggcaaccgcgcgacaaggagtgtcgaaggggcaaccccactcacgaggggaaccaaccgcccccgccaaagccgggcgcagggcgaaaacatgtgccattcgaaagcgacagacgccgcacgcggggagtcttacccggagagtgccgaacaggagtccggccttctaccagcgcccggtggccactggccaccggtttatgcccccagcgcggccccctagggagagaagcgacggcacacacccgtcgaggctgaatcacatctagcgcactgtcatgactaaggaagcactgacctgactcacgacggtgtagacccaagtcacgcctgctaagggtgggtgaacaatcccaccctaggcgaaccctgcttcactaagggagggagggccgacatggactgatccaagcgcaac

SEQ ID NO: 69407 - DNA, 169 bp, Glycine max
  Clone ID: PAT_MRT3847_33687C.1
acctgttgatcagaacagatatcttgaagagtctcgcaaaccaaactgtgaaaaccctttactgccctaccttacgtgctttaaaaggatacatggtgatgattctgggcaaaaacactagaatgcccaatatttcgattattggacttgtattgacacatgtgtgggc

SEQ ID NO: 69408 - DNA, 180 bp, Glycine max
  unsure (1)..(180): unsure at all n locations
  Clone ID: PAT_MRT3847_33688C.1
tagttctagatcgctagcgggcccttttttttttttttttttgggttttataaaagggggggggggtnngggaacctaataaaaaccggagtattaccactataatacaaaaatggacattggaactgaaacatcaccggcaaaactggaaaccctaatcgaagctgaattgccaacaaa

SEQ ID NO: 69409 - DNA, 408 bp, Glycine max
  Clone ID: PAT_MRT3847_33689C.1
cgtaagcttggatcctctagatctgccgcgggggggaaataccttttttttttttttttcagcctagtatacatcctacgctctccaacccccgaagcctcatacacagttgcccaatttagtgcatcatcatcttcaaataccaaatcatttccagcatcattatcattatcttcatccatctctcccacgagccattcattgcacacatgaatatcattaagagaatttgaatcaatttcatctcttgcattatatctttgcttcaggagtaggttgtatttgacaaacaccaaatcctgcaacttcttgagctcaagcctatttctttttatgggatgaatctacaacataacaaataaatcttgatctcaatctcaaatacactccaaataaaactggaccatc

SEQ ID NO: 69410 - DNA, 210 bp, Glycine max
  Clone ID: PAT_MRT3847_3368C.1
gtgctcgaagactaacttggctagtctagatgccttccctgcgtatgaaactgtgctggactgctatgcaatctattgatacaggattaattttccctatacaagagccgacatagcctacaaaaaaaagggcggcgccttttttttttttttaaacaaataccccctctgacctctgtttaaggtgataaataaactaagtggggcttt

SEQ ID NO: 69411 - DNA, 1671 bp, Glycine max
  Clone ID: PAT_MRT3847_33690C.1
tgaactgcaacaacgagaacacacatggaaacctggttcatcatcctcgtctccctctctctctgcatcctcatcagagccatcttctcccttaacaaaaaaacaatcaccaccccaccaggcccttccaacatcccaatcatcacaagcatcttatggctccgaaaaaccttctccgaactcgagccaatcctccgatccctccacgccaaatacggccccgtcatcactctccgcatcggctcccaccgcgccgtctttatcgccgaccgctccctggcccaccaagccctcatccaaaacggctccctcttctccgaccgccccaaagccctcgccgtcagcaaaatcatatccagcaaccagcacaacatcagctccgcctcctacggtgccacgtggcgcaccctccgccgcaacctcgcctccgagatgctccacccctcccgtgtcaagtccttctccgaaatccgcaagtgggtcctccacaccctcctcacgcgcctcaaatcagattcatcacaatccaacaattcaataaaagtcatccatcacttccaatacgccatgttctgcttgctcgttttcatgtgcttcggtgaacaactcgacgatgggaaagtcagagacatcgagcgcgtgctgcgacaaatgcttctgggcttcaacaggttcaacatcctcaatttctggaacagagtcacgcgggtcttgttccgcaaacgttggaaggagtttctcaggttccgcaaggagcaaaaggacgtgtttgttccgcttataagagccaggaagcaaaagcgagacaagaaaggttgtgatggcttcgtagtttcctatgttgacacgttgttggatttggagttgcctgaggagaaacgcaagctgagcgaagaggaaatggtgtcgctgtgcagcgagtttatgaacgcgggtacggatactacttccacggcgttgcagtggataacggcgaatttggtgaagtacccgcacgtgcaagaaagggtggtggaggagattagaaacgtgttgggtgagagtgtgagagaagtgaaagaggaagatctgcagaaacttccttatctgaaagctgtgattttggaaggcttgaggcgacacccgccaggacactttgttttgccgcatgctgtcactgaggacgtagtttttaatgattatttggtccctaagaatgggacggtgaatttcatggtggctgagatggggtgggaccctaaggtatgggaggatccaatggcatttaagccagagaggtttttgaatgatgaagggtttgatataactggaagtaaggagattaagatgatgccatttggtgcggggagaaggatttgccctggctataatctggctttgcttcatttagagtactttgtggctaatttggttttgaattttgagtggaaggttccagaaggattggatgtggatttgtccgaaaaacaagagttcactgtggtgatgaaaaatgcattgttggttcatctttctcctaggatctagactctgtacccatcccattatatactaaataatactgcctatcaatgataggttcaaaataattttataaaattaagatgatgtaatgatactttgatggttaatgcaaaaagtatggtttattggaaaaaaaaaaaaacgaag

SEQ ID NO: 69412 - DNA, 1179 bp, Glycine max
  Clone ID: PAT_MRT3847_33691C.1
attcggctcgagctcgagccgaatcggctcgagcccaaaccctagttttgtcagtagcacacttcacccatggcagtagcagcagctcgccctatcgtctccgtccaaaccctagagggcgatgcaacccccaccgttcctcttcccgacgtcatgaaagcctccattcggcctgacatcgtcaatttcgtccactccaacatttctcgcggccaccgcatcgagtccgtcccggaactccccctcgtcgtcagcgacaccgtcgaaagcgtcgagaaatccaaagaagccgtcaaaattctccagaaaatcggcgcattcacagacgcggagaaagctaaactcagtcacggaattcgtcccgggaagggaaaaatgaggaaccgcaggtatatctctggcaagggtcctctcatagtgtacggaacagaaggtgctaaggccattaaagccttcaggaacattcccggtgtagaggtggcaaacgttgataggctcaaccttctgaagctggcacccggtggccaccttggaaggttcattatttggaccaagtccgcatttgagaaattggactctatctatggatccttcgataagacctccgagaagaaaaagggctacttgcttcccaggcccaagatgatcaactctgacttggcccgtatcattaactccgacgaggtccagtccgtggtcaggcccattaagaaagatgttaagagagcacctctcaagaagaaccctctcacgaacctcaatgcgatgttgaagctcaatccctatgctaagaccgctaagagaatggctcttctcgctgagaagcagcgcattgtggctaagaaggagaagcttcataagaagcgcaacattgtctccaaggaggaggcttctgctatcaaagctgctggaaaatcatggtatcaaactatggtgtccgactctgattatgcagaatttgacaacttttctaagtggctgggtgtttcccagtaaaaaaattgagacccaagtccgcattagtaaaattttgttttgttaattttctttgcagttttcaaagttgcattctttgttcatttttttatgtttttactccgcatataatttgaacgtcatatttggattgaagtcctaatccttttttaaatgagattgaaaggctcttaatttcctatg

SEQ ID NO: 69413 - DNA, 475 bp, Glycine max
  Clone ID: PAT_MRT3847_33692C.1
tggtttcgtgcctacgctcgtaattcggctattgggctcggttcgctcttgcctccatgctttgtttatattgagtcgactatcctgtcagacggggagcggattttaatttcaaggacggcgccggacccttcaatacttacgctcaaaggccgaacccatccgcaaaaactgttgcaccgatatcataggccgtccctgcaaggttgtgccagttaccacttccaatactgtaaagctcggtcccgcttagtgccagtcttgtgggtatggatattcattctgccaacaatctggaagatatagtgccatggtctcacaagtgtgatgttcctcatgtgaatcggactgattaccagcttattgatattgctgaggatggattcttgagtctgcttactgacaatggtaacacttaggatgacctcaagcttcccactgatgacagtctgctcactcatataaacgatcgctt

SEQ ID NO: 69414 - DNA, 488 bp, Glycine max
  Clone ID: PAT_MRT3847_33693C.1
ttttgtggcaagaaggccaccctcggggtcggcaacgtgtaggccatacaatccatacccgaaggtgccgtcatgtgcaacgtcgagcaccacgtgggagagcgaggcgtacctgacagaggctgcggcgactatgatataggtataaggcacaaccgtgatatacgacacctgtaggatcaagcttccttttggtgtgaaaaaaattgagccaagtgtttgcaggccgatgattgctctacacgcaggtggagggaggacggagaagactgttatgaatgctggtaatgcttaccataagatcagagtgaataggaattgatggcctatggtgcgaggtgtggcgatgaacccagatgagcatgctcacggaggaggcaatcatgagcatattgtgcatgcgagcaccaagaggcgtgatgctccctctaggcagaaggttggtctcattgctgctaggaggactggacgtcttacggggcaagctt

SEQ ID NO: 69415 - DNA, 358 bp, Glycine max
  Clone ID: PAT_MRT3847_33694C.1
gtcggctgcgagaagaccacagaagggggaccccaagccttctactactatctttgcctctctcgctttaagcctttctgttcgtttcttttaattccccctggcttcaaatctctcttccgaaaaaaaagaacttcccctatgggtaatcgctacaagtgctcatcacccccgccggataaatggccataacaatagccttggctttttccttgcaccctcccccaccttcttttgcattggtaaacaaaataccgcagaaggattcaacccagaatcctaattccccaccggagttgattttcccgttaaaggtggtccattgaaaggcttttggcccccccaaccaccattttaa

SEQ ID NO: 69416 - DNA, 513 bp, Glycine max
  Clone ID: PAT_MRT3847_33695C.1
caacggcgagggcaacgtcgtaggttgggctgcctcgtccaacgaccccaacgccggtgtcgggggccacggctcatgctgcgccgagatggatatctgggaggccaactccatcagtacggcagtgactcctcacgcctgcagcacaatcgagcaatcgcgctgcgacggtgatacatgtggtggaacatactccgcagaccgctatgctggcgtctgcgaccccgacggctgcgacttcaacagctaccgcatgggtgtcaaggacttctacggcaaaggcaagacagtcgatacctccaagaaattcaccgtggtcactcaattcatcggcactggcgacgccatgcagatcaagcgcttctacgtccaaggcggcaagaccatcgcgcagcccaactctgctatcgctggcgtcgagggtaacaccatcaccaccaagttctgcgaccagcagaaggaagtcttcaaagacaggtacacctacaaggagaagggcggaactgccaacat

SEQ ID NO: 69417 - DNA, 1768 bp, Glycine max
  unsure (1)..(1768): unsure at all n locations
  Clone ID: PAT_MRT3847_33696C.1
tcnttggccggctaaagaaagaagttctaaggaagagggaatatgcagaatacaaggtgctagttgtctatttgcaataacaacatcagcgatccaaccttagtattcttcaacccagagagatttgtaataataaattacaacaacttaaacgatggcaggaggagcttatgtagattcgggaaatgcaaagcaatttgatgggaaggtcacggcattcgtattggttacatgctttgtggcagccatgggaggcttactcttcggttatgatcttggaataaccggaggagtgacttctatggaaccatttctcatcaaattctttcccggtgtttataaacaaatgcaagatgatgttggccatagaagccaatattgcaaatttgacaacgagctccttacactcttcacctcttccttgtatcttgctgcattagtagcttctttctttgcttccaccactacaaggatgatgggacgcaagaagcctcctaagaacatggaggcttgtttttccttgtgggggcattattaaacggcgtcagcggcaacattgaaatgataatcatatggaagcccatgtaaaatgcaaatcttatcagctatggaacttacaaaatagaaaacagctggagagattctttgggggtcttaggtagtcctgcgatctgcaaatcttttggagctcttttcttaggagtcacacattgttcacatatttaaaggcagccatgggaggcttacactaaaattttgcaaaaaatccgtggcattgataatgttgaagaggagctacaagagcttgttcttgcaagtgagtcagctaaagaggtggagcacccatggaagaacattacagcgccaaaatacaggcctcagctcactttttgcaccttgattccatttttccaacaactcactggcattaacgttgtcatgttctatgcccctgtccttttcaagactttgggctttggcaacgatgcttcccttatgtcttcagttatcaccggaggtgtaaatgtggttgccactcttgtttccatcttgactgtggacaaggttggaagaaaagttttattccttgaaggtggtgttcaaatgttgatttgccagattgctactggagtcatgattgctatgaagttcggggtgagtggcgaaggctcgttttcctccggagaagccaaccttattttgttctttatatgtgcatttgttgctgcatttgcatggtcttggggtccactagggtggttggtgcctagtgaaatatgccctcttgaggttcgttcagcaggtcaagccatcaatgttgccgtaaacatgctgttcacttttgcgattgctcaagttttcctagtcatgctttgccacttgaagtttggccttttcttcttctttgctgcatttgtactcatcatgaccatcttcattgccatgttgttgcctgagacaaagaacatccccattgaagaaatgcatacagtctggagatcacattggttttggtcaaagattgttccacatgctgatgatgatcgcaagcctgaggctgcccaaagttgaataaagaatgccaatgatatataaggagtgaaaatggaagaagaaaaaaaaaaagaggttgaattcctatgtatcacaagaaatgttgaattattgattagggaaagaatgctctttttcactcactaaaaaaaaaaagggcggagcctcggccgctactacaggcatccgatgcgtgcgcatgcgtgcacatagc

SEQ ID NO: 69418 - DNA, 985 bp, Glycine max
  Clone ID: PAT_MRT3847_33697C.1
ggcggctcgagaaagcaagaatttgaaggaagaggggatatgaatacaaggagctagttgtctatttgcaataacataacatcatcaagcaggatcatcgatccaaccttagtattcaacccagagagatttgtagtaataattactacaacaacttaaaacaatggcaggaggaggttatgtagattcgggaaatgcaaagcaatttgaagggaaggtcactgcattcgtattggttacatgctttgtggcagccatgggaggcttactcttcggttatgatcttggaataaccggaggagtgacttccatggaaccatttctcatcaaattctttcccggtgtctataaacaaatgcaagatgatgtcggccatagaagccaatattgcaaatttgacaacgagctccttacactatttacctcttctctgtatcttgctgctttagtagcttctttctttgcttcttccaccacaaggatgatgggacgcaaggcatccatgttcttaggaggcttgtttttccttgtgggggcattattaaacggcttcgccgtcaacattgaaatgctgatcataggccgcctcttgcttggtttcggtgtcggatactgtaatcagtccgttccggtgtatttgtccgaaatggctcctgcaaagattagaggagcacttaacatgggcttccaaatgatgatcacaattggcatcttaattgcaaatcttatcaactatggaacttccaaactagaaaacggatggagaatttctttgggtgtcggagctgttcctgccgtcttgttatgttttggagctcttttcttaggagacacacctaattccctgattgaaagaggtcaaaaggaagaagccaggaaaatgttgcaaaaaatccgtggcattgataatgttgaagaggagctacaagagcttgttcttgcaagtgagtcagctaaagaggtggagcacccatggaagaacatt

SEQ ID NO: 69419 - DNA, 373 bp, Glycine max
  Clone ID: PAT_MRT3847_33698C.1
gtctcttgattaaaaattttgttattcttaatatctcagaatttataaaatattatttttattcctttaaaatgaatttaaaagactaaaaaaaatataacttcaactccttttactctttaaagtgaaattgagagactaaaaacaatattttacttaggagtattcatatatatgaataatttataaactcaaactaatccaattaactaagtttgaattttttgagaattgagatgaaattcaacccaacttgtttacacctgttcaatgtatggataaggtaacacattgtgaatatgtggtttgaccaaactagtatcatatgattaaattgattatatatataaattagattattaaatataaaata

SEQ ID NO: 69420 - DNA, 131 bp, Glycine max
  Clone ID: PAT_MRT3847_33699C.1
ttggggcacggtgagagacctttctatgagcacgggacacccaacgtttcatagtgtacactatatacattctacaatatctgtacacatgctgctactactactaggaacaggtcaacacacatgcccca

SEQ ID NO: 69421 - DNA, 1640 bp, Glycine max
  Clone ID: PAT_MRT3847_3369C.1
attaccgtgtattctatttctgtgttactgaaacatggtctttctcattttctccacacgctctccctctccaaaaccttcacatataccccgaaacaccaacatccaacggagtgttgttaggttacgcttatttcaagacatgaagattccttgtttttcttgtttcttgccatcgaccactgaagaaaacaacaacaacaacgactacccagatgaagatgggagctttcgtttgttcacttacaaccaattgaaattagccacgtgcaattttcattcctcggagaaggttggagaaggaggctttggatctgtctttaaggggaagcttgtagatggatcttttgtggcggtgaaagtgctttcggttgaggtggaatccatgcgaggagagagggaatttgtggcggaattggctacacttgcaaacatcaagcaccaaaatcttgtaagcctaaaagggtgttgtgtggaaggtgttcatagatatttggtctatgattatatggagaacaatagcctctacaacgctttcttaggttcggaggagagaaggatgaaattcacttgggaaagaaggagggacatatccataggtgtggctcggggacttgactttcttcatgagcagcttaagcctcatatcgtacatagagacatcaaagcaaaaaacatacttcttgatagtaatttcataccaaaggtttctgattttggtttggcaaaattgctgagagatgaaacatctcacattagcactcgggttgcagggacattgggttatctagctccagaatatgcaaattctggccaggtttcgcgaaaatcagatgtttatagcttcggagtgttacttttacaaattgtgagtggcctagcagtggtggatgcctatcaagacatagaacgtttcatagtggagaaggcgtggacagcgtatcaaggtaacgatctactaaagctggtggatcccatgcttaatatgaattttccagaggaagaggccttgaaattcctcaagttagggctgctttgcgtgcaagaaactgccaagtttcggccgccaatgtcagaggttctagagagattgaccaaggacattgacatgatagatgttcacatttcgaaaccagggttcgtggctgatcttaggaacatcagaatcaaacaacaaaaccttaactcgtcccaggaatcaagttctgctggagcaacctttacaagctccatttggagttcggtcaatcttgctcgttaattatttttttcatgttttatcggcatcctcattccgtatggtaattgtcttccaattagtctataacgaactgggttcgatccgataaatgaacatacaagattgagcatgtttttaggattaggatcatgacaaattggtcaacctgtatagcagtgacaacaaggattcatcaagtgtttatagtctttttttttttcttgggttgcataggttgatttgtttctttttttttagatttgttttgttgaaatgctcccggagagaaaaagaaatatatgttgaaaaatattgtggctcatatgttatgaattaaaaaaaaaaaaaaaaaaaaaaaaaaaaaaaaaaaaaaaaaaaaaaaaaaaaaaaaggggggggg

SEQ ID NO: 69422 - DNA, 1112 bp, Glycine max
  Clone ID: PAT_MRT3847_336C.1
acacttaattctcaacatatgttacacatttgtagaattataacaatttttcctcatgacttccaaagctctgcatattattcatctcaacactgaaaatcttctcatccatgaataatactagttcatagttgcacacaatatacatatgttaaccgttagtaaaattataataaaattacaacagaactaggtataaaacataataaaaattgaaatggacctcactgtaaaaagcaaagttattttgtaaaggtagacaacaattcaaggatgcatgcaacgatagttgttatgttttggtccaaactgtttgaaatattcacacacaattaaattcagccgtctccctgtgaagaaacaagttcaaggtgtgacacagatcctgtattccagccatttacacatgaactagttcatgactcgagtgtcccatttgagtgctcctcacctgcaaaagtggaggttccatatgccaaccgattcatgctattggtagagtaatttgaatatggagaatgtgtagaaccaggactgggaccgcctcgtgaataccggttctgcgtggctgtgctgcttcttgtcactttcagacgtgccttcctaccctttcccatgcacttctccaaatgtggagcaaaccttccagccatgatggatcgaccacaattcaaacaatcaaatatttcatttgccacaggaggatgagtttgtccaaatatgtcaaccacatacttgccatttgcttcattactgttactaggatcagccaccctaaccctggcttgtgctgacagcttcaattcttcatcctcttcttccaaatttgaatcaagccccagccttgctactctgtgacactctgatgccacgtcgactatgatggaatcaaggagatccaagaaaaaataagaaagctgggaatatgacaagttttcctcattaggaacagacatgaatgagtcttgaccaaggcttttggatcctgctctgaagtctgaaccacagcaagagaagactgagagatcacagggaatcgtcgagacgagagtgctaacggggattctgtgattcacagtgcgaacccctccccttctgtcgcagcctgcgta

SEQ ID NO: 69423 - DNA, 484 bp, Glycine max
  Clone ID: PAT_MRT3847_33700C.1
attttgttttattgatttttttttgactattttttttatattttgtttttgggatcatgtccttttgatgattcttatagaacttactgatgtttctgtgaacgaacaaactgatacgggacaacggggacattattgacagacccctgaagaaaacaatggcaccagacagaagggacagacaaagatacccactggaagaaaaccaaaaagagggggccgtaacccaacgaactgccgcagcgcataaaggaaaaagaaggaacatcggcaacaaggaaaaaaaggaagcgcgtcccccccccacaggggcaagctaaagagatcagtccaggggaaaaaaccccctgaaagagatagggctgggacccccccccgggacaagaaatgagcaggggcctgacaagggggcaaagaccaggaaagaaatgccccagccagaggccccctcactggctacggaaaaaggaaaacctgattcgag

SEQ ID NO: 69424 - DNA, 282 bp, Glycine max
  Clone ID: PAT_MRT3847_33701C.1
gaaccggccccgcccccctccccggactccattccccagggagagataaagagcaggcgcatgcagaaggaggagtaggagaagagggagatggcgcaggctcggctgccgcacgcgccgcgcctcaccctcgccggcttcacccgctccagcgggagcaacagcattggcggcgtcgcttccggtgctcctcccaagtgcggcgtcgccggcgctccccgcggcccgctgacgtccggggtttggggcctctcccctcgtttcgaagactacggggggatt

SEQ ID NO: 69425 - DNA, 276 bp, Glycine max
  Clone ID: PAT_MRT3847_33702C.1
acgggtttaccttctggaactgctggaaccccaacataccaaggattgaaatagactttccactagggcagtctgaggaaccattaatacgatatattcaattgccctatccatttggcacatctccactctcacataaaggattgcttttgccgatcactcctacttttaaaggaatgatcaatacagcggccaccacagggcactccgccattactttaactacattggttcccgctgtgcagagactgtttccatggctggtggtgcaacata

SEQ ID NO: 69426 - DNA, 340 bp, Glycine max
  unsure (1)..(340): unsure at all n locations
  Clone ID: PAT_MRT3847_33703C.1
ctgctgccggtcgagcccgttgagcccactcccttgagttagatcgcactttccattctatcgttgaaacttccgaaacgcctactgtattacttaattggatgttcagagctctatctctcaaagatcgatctatgtaaaacctgaggcagcattcgtggacaaaccctattganatccctggaggatggtgttcattggccacaggagtagcatcttgttaggcacaagcatacgccgtggagagcgcgcttcactctcttccaggtgttcaaggtgatgttgataccagactaacttgtgaagaggagctggcatcattgaagggctcaaattggga

SEQ ID NO: 69427 - DNA, 459 bp, Glycine max
  Clone ID: PAT_MRT3847_33704C.1
cggctgcgagaagacgacagaaggggcctcctattttttaattaaaatatttatctcttacttttaaaatacacgtggttttagttgttgagaccaattttaattgttaatttgtgtgctttgttaacattaggggccaaatgtttgtttattaaatacatgaaaaatatttattttaattatttaattgttgataagcttaatttatatataaaagaagaaaaaagtacacggtcaatgtttgaaattggccatgaaaactaaaattgtagatttttaaaagtaaaaaatgaaatattataattaaaaaataaaacactaaaatcgtgaaaattttaaaagaacttctagtgcaagggagtaccagatcgagcttcaacaattgggaatcaatacagcaacacgaaatatctcttaaaaaataaggtatctgaaattatgaatttaaaagaatgtggg

SEQ ID NO: 69428 - DNA, 178 bp, Glycine max
  Clone ID: PAT_MRT3847_33705C.1
catcgcaccaacgatcccatgtcccaagacttctctacgagaagatcacagtgtcacatagggctaggcaaaatgtccgagggtaatgccaagaggggacactgcatcgccagcattggcgtctcaaccttattgtaggtgctatggtcgtggcgatcacaattaggtcggtccgcat

SEQ ID NO: 69429 - DNA, 271 bp, Glycine max
  Clone ID: PAT_MRT3847_33706C.1
ccatgaaaaaaaaccctaaaaatttgatttttaattgagaccaaccccatgatgtgattgatacatgtaataaccggccggaataaaagctattggcacttctctttttattcaaagtctaatgtctgggaactaaaaagcaacctaagccgtaagaagaacagccccgccgggttccttgttgttcttctgcgcgatcttccaaataagattggccttaacaacaatgggctggttttggggcaacacaccttttacctttagccgaatt

SEQ ID NO: 69430 - DNA, 499 bp, Glycine max
  Clone ID: PAT_MRT3847_33707C.1
tggtgccgtgccacggagagtgcggcgtctgagcgagcatcagccacagagggcaggcaacggaggtattaaaagggctagaaccccaaaatgaacctgaccgggccctgaagcccccttgtaactgttaaaagccagcagcagcagaacctatgttactgggcttcgcaaaccaacaaagggcggaactaactatggcagccctcggctgtggggctactggtgtagcgggtagagcgttacgtatggaaaacgataccaatactgggcacaaaaggtggccaattgcaacttttaaggcaagtggttggacatatggttattaagcttatattacactacttatggcataaaatttgcgtttacggtgtatgagtggtagtgcgcgtttcatctatgcagctactgcaaataggggtgttaatgtttgtgttgctgactgtgacgaacggttaactatagtagagcaaagggactacgacggtggtgaaaaccggca

SEQ ID NO: 69431 - DNA, 242 bp, Glycine max
  Clone ID: PAT_MRT3847_33708C.1
cacccatgaaatcaatacaaagcatatatgtatgaagggtatccattttccaaactagtttgtcatgagttttgaatgttacttttttgcccttttactttattagcactcagctcttcaatggtgcaagagagtcactatagttgatatgttatgcatgggaaaggtagaattaatgttaagctgtccatattatgttaaaagtttgtataatacataggggctgtatgcctgtttggttt

SEQ ID NO: 69432 - DNA, 423 bp, Glycine max
  unsure (1)..(423): unsure at all n locations
  Clone ID: PAT_MRT3847_33709C.1
ggtccggaattnccgggtcgaccacgcgtccgaaggacatgatgtattcctcgtttgcaaaagagcgatgctctctgtactgagaatatgacaaattcaaagtactgaacaaagcccttcgtaccaagactgaaaagaagccaaaggaaagtaggccatgtctgcgttggtaactccctgttctgtaaataatactatgtagcacacgttaatgaatcaagtgtattaatgtcatactgattgggatacatacaaatggatatgaactgcctagactgatctatgaactcgtagtgaaaagattaccatacatttcaacatctacacaacggttgagatatgaatgcttctacatcaaattatgattgtttgaccaatggggcatatgctatgaatgtggactgggagaactataaaaataat

SEQ ID NO: 69433 - DNA, 463 bp, Glycine max
  Clone ID: PAT_MRT3847_3370C.1
agaggtgagtttgactcatcagagggcgcgcacgacgtgactacgcgtgcatggtggacagcgagacgacgtcgacgcatagaaactggataacccctcatctcttctgatcagtcaggacgagcggggctattcgcatgagagccactcagcaacgatgcagttcgcacacacacgtactcatggcattacaaccattctttttcattcacgtctcaagtccaccgattgaatagtggctttaaatgacatcggactagttatctactgcatcgcactgtcgatttttaaagaagcatgaatcattagagatagtaatctatagggggttcatctgatgagaagtactttgtcactagtgtgtgatggaatcgtgggcgcgtttgtcaacgcatggataaaagaaaggtgatccccacaacaaataataaggtcgtgaaaatgaaacgactatgcgcctgat

SEQ ID NO: 69434 - DNA, 288 bp, Glycine max
  unsure (1)..(288): unsure at all n locations
  Clone ID: PAT_MRT3847_33710C.1
gtccctgcttctgcttctgctcattcttctccttccacagggatggcttatntnccacatggaaatgcaanttgcaactnctttattccacaaatttgcaaattcccatgtgggtatntcgnttnggantgtactgcnaaccggggaactaaaaatcttgtagcgtttttcaagcagaggaancactcattgcccctgtggcntaaaatggganagaggnagcctttgccttatcagganaaaggcntttaattggcaaagttttccaaagagaanagcagtttcacc

SEQ ID NO: 69435 - DNA, 501 bp, Glycine max
  unsure (1)..(501): unsure at all n locations
  Clone ID: PAT_MRT3847_33711C.1
tttgccgtgctacacgtgaggagtgccgcctgcttggggggggggggggggtacgggaaataaaccagcgcgccgcgagggaaataacataggctaacagtaaaggatagcacggtgaatacggcgaggggcgggaacactccaactagacagcagcaagcaagagtagttgtggaatgacaagtgattcactcgagactgtacggaggcaacttgtaggggtgcaggtggcactgcagggaaggagtcaggtatggcagttgcgggtttggcacggcgatgtttagcatgctagcgtgccaacatggttacggtgatgcggtagagaaaagctaccgggcctcccaaggcccacatggacacaagactgagggactagcactagaagccgacttagccggccgtgcgttctgaaagggtggcaatataaacggaattaagagccagatagtgcagtagggtagggtcgcaaggcggcnggaagcagccagtgataagagg

SEQ ID NO: 69436 - DNA, 922 bp, Glycine max
  Clone ID: PAT_MRT3847_33712C.1
aaaaatgaaagttgtgtacttccttgttgctatcttggctttggcatcctctcttgtctctgcccatgaccctagtcctctgcaagatttttgtgtggcaaccaaagaacgcgatggtgtatatgtgaatggaaaattctgcaaagagcctaaagatgtgaaagccgaagatttctacaaagaagtggagcctgggaatccttcgaatcaattggggtcagcagtgactcctgtgtttgttgatcaactaccagggctaaacacacttggtttatctttggctcgcatagattatgaatcaatgggtttaaaccctccacacattcaccctcgagccactgaaatcattatagtccttgagggaattcttcttgttggatttgcgacttccaatcaagatggaaatcgtctcttcagcaaaatgttgaagaagggtgatgtgtttgtgtcccctatgggtctcattcagttccaatataatcccgggaggggccgtgctgtttccatttctgcttttagcagccaaaatccaggaactgtcactgttgcaaatgctgtgtttaggtctaatccacgtatttcaaccgacattctcaccaaatcttttcaagtggataagaaagtgattgatgagcttcagaatcaaaactaatataaatcttgggacaattacaactaagatggctttgtttttttaatcatgtaccctacgcaacttacctccaaataattactattatacaaaataaaatgtatggggtatatgtttattttgtttggatcttgttggtttggttgatacgttgtttttctgtttagtaaaagggcctttacctttctcttgttgggataaaggattttccccagtatataaaaggtaatatgttattttctatttaatttattaaatcctttatttact

SEQ ID NO: 69437 - DNA, 254 bp, Glycine max
  Clone ID: PAT_MRT3847_33713C.1
cccacgcgttcgtagaagtattattatacttccattaccatttaaaagaaaatggcatagacgggtattgacacattcgaggacgatatcacctctgctgcggctcatgctactctttacaaagatgtcgttacagatgccgacaacattattccaaacgctcttaattcctttaacagtgaaggaaaccgtgagggaaaaagcagccccgggaccaactaggaaaaaaatttcggaaacaaatgatgaaccca

SEQ ID NO: 69438 - DNA, 1500 bp, Glycine max
  Clone ID: PAT_MRT3847_33714C.1
aaaagcattaattaaacaacatgaaggcatggaccattaattctctccctatcgatcactgatcattcactgcaattctccattcatccatccacggcaccaccatgcttcttcttctttacctctcccttctgtgttcccttccccacattgcattgtcatcccattgcaccgtggaaaccgccacgaaaacgtttaaaaaatgcatgaacctcccaacccagcaagcctccatagcgtggacattccaccctcacaactcaaccttagaactagtcttctttggaagcttcatatcaccttctgggtgggttggatggggcatcaatcccacatcacccgaaatgaccggaacacgtgccttaatagccttcccggacccaaactcaggccaaatagtgcttctaccgtatattcttgaccccacagtgaagcttcaaaaatctccactactctctcgcccactcgacatccacctcctctcctccaccgccactatgtacggcggaaaaatggccaccgtgcacaacggtgcagccatccaaatcttgggcacggtgaagctgcaaacgaacaagaccaagattcacctcgtttggaacagggggctgtacgttcagggctactctcccaccattcatccaactacttccaccgatctgtcttccattgttacctttgacgtattgtcgggttcgtcggctccacagcacacggatctcacgacgttgagagtgatccatggcaccgttaacgccatatcgtggggcattttgttaccaatgggagccatcaccgcacgctaccttaggcacattcaagcactcggccctgcatggttctatgctcatgcaggaatgcaagtgtttggtttcgttctgggaacagtggggtttgtgatcggaatcaggctggggcaactgtcgccgggagtggagtataggctccaccggaagcttggaatggcggtgttttgtctggggggtctgcagactctggccttgttatttaggccaaacacaaggaacaagttcagaaaatactggaagtcctaccatcactttgtagggtactcgtgtgtggtccttggctttgtgaatgtctttcagggatttgaggttatgggggcaagcagatcttacgccaagttgacttactgcttaggtctctccactctcattgggctttgcattgctttggaggtcaactcttgggttgtcttctgtaggaaatccaaggaagacaagatgaggagagagggactcattggaacttcccacaaacccatccacaattaacattcatcattattcttattatatattattacatttcattcctctttaatttctcttttactaatacattacattttctctccaattaatgccaaggtctgcaattatatataaagattaattttgtcgtttcgattcatgtttcttaccaaatagttcagacatatgacgcatgaatgaattcatgatcaattgggagttc

SEQ ID NO: 69439 - DNA, 509 bp, Glycine max
  unsure (1)..(509): unsure at all n locations
  Clone ID: PAT_MRT3847_33715C.1
tcacggccttaccttttctttaggaaatttaagtgcgagagtgagatagtaggtttgtgtttggtagcttcaagttcntggaaagctacaaatgagtccaccaccccctgaaggacctgggcctcaggattattcagtttctacatagtctgctgttgctggttgctacaagactgttttggtgcatcacctgaaccaccaccaattccagtggccccaccacaagctccgcctccacctgtgtctggcccacccggacctctcagtttgccgccatcactagctcctgatccttttcggcctcctggcactccaattgggcctcccaattgggcttccgatgggcctcctggtagctcatcagggactccaccgtcttattaagaaagaaaatgtgattttactggcaatcacatgacatctagtgtatttctttcacttataaccaagtagccaaccccaatgtatacagccaaagattttcttaagttatgaaactatgtattgtc

SEQ ID NO: 69440 - DNA, 566 bp, Glycine max
  Clone ID: PAT_MRT3847_33716C.1
ccggattaacataggtgttggcttgctcttccgcggcctcttcatacacgtttcgtagatgaccacttttctctcactggatgtgatctttgtcccttttgcttccctacgataggaggaaaaggcgtattcttcagtgtatctccatccgacattcttgatgactgcatggaccttactgaaaatacgcaatcaacctcttgtggtgttttctactgtaggcaattattctttgcgttggccagaaactataatgagtccgccgtggataccccttatgcatgtggttgatacttcgtatctactattaaatgtctctcctattgtcctgtcttgacacccgtcggtgcttttctgacattggtattcctcctttatatctacagcaatggtagcatttgtcttgacatcttaaaagagcatgggaccccaggattgacgacatctatagagttaggtgcttcattctggtccctattgattgatacatcaccgctatgaatacttgacgactgcaattgctcgtctgtaccacacttacacctataatgatgcaaattctgctc

SEQ ID NO: 69441 - DNA, 187 bp, Glycine max
  Clone ID: PAT_MRT3847_33717C.1
gtcctcgggttcgggtatatcctcttctgctttgccctacaaaaggacacctcctagctggctcaagatctcttctcaagatgtcgaacaatatatctgcaggtttgcgaagaaaggtcggaccccttcacacatctgggtgactctcacagattctcactatcttcctcacgccattagccttgct

SEQ ID NO: 69442 - DNA, 486 bp, Glycine max
  unsure (1)..(486): unsure at all n locations
  Clone ID: PAT_MRT3847_33718C.1
ctaggtagattttttttttccttaaccttacactaggggaaatatacatctttaattaattcaaagtttagttgaaaaataagtaaagtataataaaaaatattttcataaaaaattaaattaaaataatatttaaacgattcaacttaatttcagcatattaatcacttgtatataattacatgatttctcaatcgatattagtttcatcatatacatatggttttagatcagttgcaattatatattgtgactgttacaaagttgatatcaattgctaccataatggtccgaaaacatgacctcatgctcagtcctagcagtagttgcaactgagaaaatgttgtgaagtgtgaacattaaaaaagacaacaaaatgttgtccattttgatttgggagtatatatttttgagatatgtatgcacataaaagataaatataattgtatacagtgttacatgcggtatcaaataattntttaaagt

SEQ ID NO: 69443 - DNA, 594 bp, Glycine max
  unsure (1)..(594): unsure at all n locations
  Clone ID: PAT_MRT3847_33719C.1
tcggtaatttgttccttggtcatgttttatttctctaaatattgtgaaaagcgaaaatgatactccgctcagtcctttttataaaaaaacaagttttagtgtattttatactaaaacttgtttcttataaaaagaatttggaagtagtattaaattatctacccaattggtcagatcatccactattaaaaaattatcaggctggctagaatgtgtaccttgttggtatatagaaatgcaaggaaaactgtatgtttcatctatctatctatggttgttattgtattgtatatgcaaataggtttgtgacgattatcctaaatcaaaagagtatctcgaaagggcgattttggctaatcctgatgatggtcatattctgtccctctatgcggagttaatatggcaattagagaaggatgctaatcgagctgaaggatattttgatcaagccattaaaagtgccccatatgataggtaaaatatatgatcaacaattctacgttgattatggttttcattctttctgtatatttttctaattgtttacagaaattgaagcatgtgttaatctgntttttttatttttttttataa

SEQ ID NO: 69444 - DNA, 773 bp, Glycine max
  Clone ID: PAT_MRT3847_3371C.1
ggaaatttttctctcaacaaacaaacacaaaagtggattaggggagagcgaagctcagcaagtttcaaatccacacgcataacagatttcaaccactgaagaaatggcgctgccccattccatcattctgcccttctcgtccatcatttcaccatgttgtcttcccaaacataaacctaccaatttcacccgtcccgttaagctgaacgcgtctgacggctgcgagaagacgacagaagggagagttcaagcactcaaatctgatggtggtaaatggaagaagagagggcaagaagcatctagtgacactgatgacgacgatgacgatgacgatgcacctcagcggtttaataaaaatgacccttaccttatgagtcctgaggagagactggaatggaggaggaacataagacaggtgttggataggaaacctgatgttgaagaggagttagaccctctggaaaagaagaaaaaactggagaagcttttggaggattaccctcttgttgtggacgaggatgatcctgattggccaggagatgctgatggttggggattcagcttgggccagtttttcgacaagattaccattaagaacaagaaaaaggatgatgatgatgatgacgacaacgatgatgttgatcgtccagaaatcatgtggcaagatgataattacattcgtcccatcaaagacataaagactgccgaatgggaggagactgtattcaaagacataagtcccttgattattctcgtgcacaatcgatataaaa

SEQ ID NO: 69445 - DNA, 120 bp, Glycine max
  Clone ID: PAT_MRT3847_33720C.1
ttttaaaagaggggttgctttttctttaagcctttccgaattaagtacttggtctattttctctccaagcaagaaaaatgttcatctgacagtttcaagggtgcagagtcctaacgtgaa

SEQ ID NO: 69446 - DNA, 1250 bp, Glycine max
  Clone ID: PAT_MRT3847_33721C.1
aaatccgaaattaatgattagtatcctcaaataatgccttagtcgctaccgttgataccctgaaattaaacaagttgctgctaaactatagcgacactatttcccatacaatgacaagaactttgaaaaagacgaactctcaaaacacaaataccaccttatcactgagtctgacaggtgaaaaagacaagaacccataaatacatacatagctgacaaaagagccatatgtttgacctttcaaggccctagtacatttggagccataggtttatgtaattcactatcatcatctgttggaacatatgtaactacgaatgctgttgttgttgtccatggctccatgcagatgctctagtccttttccttcctgctccctttcgtgttaaaagattttagaaactgctttaaattaagagtagaataatactatattaaaggtatataacatagtgttgctctttaccccttagcctctgaatacaaaactaacattattcttaaaagatacaatgggggaagcctttttaccagcacaagaggcaccaaattaaagatgctttctcttagtatgatccaagctgctattcacaatagctgacaaaagactattatttacttacatttgtcatacaagtcacacaccttcacttaagaaacagtggtgaggtttctatggctgcagttaaatgaatgtgatggttagctccatgaaagagatcagttggatatgtatggctgtgattcgatttatttttacagtctttatcttcctcgtcttcttcggcatcccaaaggaaattagcatatgaagctaggacatagctatcatatggggcacttttaatggcttgatcaaaatatccttcagctcgattagcatccttctctaattgccatattaactccgcatagagggacagaatatgaccatcatcaggattagccaaaatcgccctttcgagatactcttttgatttaggataatcgtcacaaacctctttcaaaaactttgcataatttcctagcaaaagtgcatcactggggtttgcttcaatcatgttctggtaataagcttccgtcctatctctaccatgatcatttccttcatggaaaccccacctttttccatgtccaccacctgagcctcttccacttccattgcaaccaccacaaatccaaccaccattgtattttttaagagtagaatatataattaaaggaataaacaggtgctcttactcaaagtt

SEQ ID NO: 69447 - DNA, 783 bp, Glycine max
  unsure (1)..(783): unsure at all n locations
  Clone ID: PAT_MRT3847_33722C.1
ataattttcttctacgtggccatctccatcctatcaatatgctgttggctgctcaatcactagagatgaacatacttcctagcctattgtttttgtttgctgttgttctttttacttttgttattattaatttttcttttttgtttatgtttgtctgtaaacttctccagtctgctgtgcgagatctaaaagtgcaactcatttctcttcaatgcagtctaggaggttgttactagatccagctgttcatgaagagttcacacgtttaaaggtttgttattcaacttgatgcttacttttattgaataaagtttaatctccttctctgtcagacacatggaggtgtgaaaaattgagtgtgataactcatgtggcaataggaaaaggtcagttagtccaagtagtctactcaggttttttaccaagagatatagtgaagaaacatgttactgtgtttgatgaacagtgttctcacataatagcagttgcatcccttgttcactggggtaagagtaagatatttttgtattttagaggtcacaaaatgaaatgaaacagaattaacacaagatggaaaaggatagccaagctttgtgctatgggtatgtgatgccagacagttcttgtaacatgaggtaaagtgngggataactttgatggtagaggggtggttataaatgtgattttcagatggcatgttagggcaatttcagagacgaatccagagctggcttccttctgagatgtgtttggctcattatacagaagcttatagccgagctc

SEQ ID NO: 69448 - DNA, 981 bp, Glycine max
  Clone ID: PAT_MRT3847_33723C.1
ctcaaactttggaatctttacaaggtttcaagggcttgcagcaaattgcatatagatcccttctcgcatatatcttgaatttgaattgcaaataaatgtggtgttactggtaggaaatggacattaatgctcattaccattaagtggatggaaaatcaactgttgagaaaggagtgataagttaatgtgtcttgcaggtttgggatttgtatgagagtggagaggtagaaaaactggtggatgcttttctagaaggagacttcaatattgaggaggcagtcagattttgtaagattggtctcctttgcacgcaggattctcctcagctccggccttcaatgtccagtgtgcttgagatgcttttaggtgaaaaagacgtgaatgaggagaatgtgacaaaaccgggcatgatatttgaatttgtggaagccaaaagtgcaggtaaacaaaaatgcaaagctgaagtggatagtaaatctttgttggctgaagggaagcaagatgattcatcttcatcaggaaccatgagctcttttgctaccatgaccttcacagcaatttatgatagaagcgattagtttgactgtgactaggtagccttgtattcggccctcaatgattttttctccctctcctcccctctatcaaagttgccaatctttgctgcatttcttggttacatacaagagtgtaaatttgttttatatcttcttctcatactatattaatcaatggtgatgagttcaattttggaatccttcagtcgtacagatacgagcaaactttttttaagaaaggagtgtcgttggtctgtctaggccatatatcacagtattttgagtcaggggattgttgagttttggcttgtctttttgtggatcttttgctggtctttgcttaagaataatgccagctcatacaacatgcatgcctacagtatgcaaattgtaatcctctcaataatcttttcaaatgtagagt

SEQ ID NO: 69449 - DNA, 350 bp, Glycine max
  Clone ID: PAT_MRT3847_33724C.1
attccccgaattaacgagctgactcgaccaggggccgtagctcccttccgtccttttttgggttttttgtacgctactaaaactactacttacctgcacctaactagccagcgtgtccaaaatttttaaacactcaaactacatacaacatattaaaaggactgtttctccaatcattgtttctaaaagcgtaacaggctattaagtcagagttaatcaggcttcttgcatgcttgctaccctcagcagtcgaatcagcgttctcaacaggaggcatgacaggatatgattcagcagcatcctcatcaatgctcagtacaaggtccaccatcctgtgaatgctggcaccg

SEQ ID NO: 69450 - DNA, 352 bp, Glycine max
  unsure (1)..(352): unsure at all n locations
  Clone ID: PAT_MRT3847_33725C.1
tcgcccacgcttaccagcaactacaactactggcacctaccacttcgggcgccagctgttacaagccccaactctctaccattttctggttcttgttccccaacaccacgacgacagcaagtgctactgttcacaccgacaccactagagcgagcaagagcactgatcaatctcctcatacaagtgaaaagacatgcaaaaccacccgttttgaaaaccaaactcaagctactgctncatccagaagcaagagaccacgtgatcatcacactgcagaaccacctgatcatgttgtaaataaggaaccatgcagtggtaacaattatacgcacgtttctgatgaggataaagc

SEQ ID NO: 69451 - DNA, 313 bp, Glycine max
  Clone ID: PAT_MRT3847_33726C.1
cccacgcgtccgtacacgcgtgctatttttacttacaggcctctactatactgggtcggcttctgctctagaacagacaatgctgaaacatcatttcttctcctctctcattatccaaaccatcccttcatgcaaatggcaaaggcttatctgaattctctgacctccgaagctcatcaagcttccttaccttttctagaaaatcatcatatgatttccattctctcattgacttccagacctatgcatttggaagccgtggaagatacaagaatgctatgaccgaatcaaaactagatgtttgcataaacgg

SEQ ID NO: 69452 - DNA, 372 bp, Glycine max
  unsure (1)..(372): unsure at all n locations
  Clone ID: PAT_MRT3847_33727C.1
ggcaaaggaaaatttgaagcagctgggtcggatggttgcaaagttagctcatgccaaccctatgactgtccttcgaacaattgttcatcagattgaggcttatagagagatgattactcctgtagtggatgcatttaagtacttaactcagcttgagtatgatatattggaatatgttgtgattgagcgtttggcgcttggtggacgtgataagttaaaggatgatggccttaatttgtcagattggcttcaatctcttgcttcattttggggccacctgtgtaagaagtacccatcaatggaattacggngccttttccagtatcttgtgaatcagttaaaaaaggggcagggaattgagcttgttctact

SEQ ID NO: 69453 - DNA, 1217 bp, Glycine max
  Clone ID: PAT_MRT3847_33728C.1
gtttttggtaaggttaggactatgcgtgctaaagatcactatgagatgcgagaatataatattgatgtgcttgaagatggaaaagatttgtctttttttgctaaagagaggccatatcctatctacccttcaaaaggccgtttgaacccaatatttcttagggacactattgcaaggtttgtgcttcaaattcctagctttacaagccttgcctgtcaatgttgatccaattcctaaagatatcacacagcaatttggattaccaagtctgcatgatgcatattttggaatccacaaaccgaagcacataaatgaagctgatttggcccgcaagagacttatatttgatgagtttgtttacgtacagttgggacgcttattccaaatgctcgaaagtcttggttcacaaatggaaaaggatgtattgctagataagtatagaagaccagtaaataatgctgtgtgtactgaacaatggtcctctctcaccaagaaggttttggatgtccttccatatactcttactactagtcaacagcttgctgtttcagaaattatttgggatctacaaagaccagttccaatgaatcggcttcttcagggtgatgttggatgtggaaaaactgttgtagcttttcttgcatgcattgaagttattggctctggctatcaggctgctttcatggttcctaccgagttgcttgcgatccagcattatgagcaaattcggctcgagctcgaaaacttggatgaggtcgtgttcaagccaactgttgctttactcactggttcaaccccactaaaacaatcacggatgattcgtaagggtatccagaccggagaaatctcgatggtcataggaactcacagtttgatagcagacagtgtggaattcgcagccttacgtattactgtggtagacgagcagcatcgctttggtgtgattcaaagaggaaggtttaacagtaagttatactgtgcatcttcaaattcaaacatggaagatgccattacagatgattcctctaagagtgatgcttatatggccccacatgttctcgccatgtctgctactcctattccaaggacacttgcactggctttatatggggacatgacaatgacacaaattaccgacttaccttctggaagaattcctgttcaaacatttatcattgaaagaaatgacaaagggttggaggatgtctacaagatga

SEQ ID NO: 69454 - DNA, 630 bp, Glycine max
  Clone ID: PAT_MRT3847_33729C.1
aattaaaaaagcaattgacataatcaaacgcttaaccgatcagattgaatagataggctctagaagaaacacagaacccaaataaagcttagcaacaagccaaacaagtcatcagatataggttatataacaaagcaacttaagctgtcaacggtatataatacccaatatcatttggagatgtacattatttcaaatcatgggaactttcgcaagtcagaattacatttagcgcttatcccattcccagcacatagtatattacgcataaaacacaccttgttgtgtttagttgtagtagagttcgagacccatgccgtcatggatctcgtaatccttgagagtgatgtgatccttgtagatggtgtaccacttctggatgcggatcttgtcggctcttgtgccagtctgagccgccacaagcttcttcaggtcgccgatggtatcatcgtcgttgcacttcacgcgcaccttcttccccaatcgatcgttcaaaaccacctcaatcatcttcgccacgcgaataaccctaattcccaaatcccaacctaaagtccttcgcctatagtgttgcttttcccaggctgattaatatgcttaaactcagcgggtagcccggccctcgagccg

SEQ ID NO: 69455 - DNA, 244 bp, Glycine max
  Clone ID: PAT_MRT3847_3372C.1
attagtaggttgatgaactgtacttgtctagagatgattgatggggtgtgtattaggggtaagtcttgtgttaagttgcagtggcagcatcaggaatgttctctcccaatcacataagagagcggcatggtggtatcaggagtgtttgagcagggcatcgtgttgtggtggtttaatacgatcatggtggccatcagagatccagtatctcaatatccccagagcggcgcacgcatcaccatga

SEQ ID NO: 69456 - DNA, 533 bp, Glycine max
  Clone ID: PAT_MRT3847_33730C.1
ggcaaaaaccacgcaactttgagagaagaggtgatcgctatcatatcttttgattaggaaagcagcacataccaagtgtcaaactcacattgtataacctctaggagacaggatcaaataaaggcaaattaagctgcagagtcgcgcggtatcgaccggattcggcgcgtgcgcgacgacaagaggtaagcactgagcaggaagacaccatgttggcaaagaataacgtgattctaacaataataaggatcatatatgcttaatgaaaaagaaaagtttacatatttagctgcaagatatattttatgtaatttggctggttttcaaactgtcttattttgggttatataatgctaaagaggaggcagtttagtatcgaacaattgtgacattgacttatcatcatcaaggatcgatgtaaggttccacgttaacaatacaacatggaattctaagaggctgttgataccctctccatttaaaattataaaatatgaacaaacagtagaactacaaaatttgccgagcatggt

SEQ ID NO: 69457 - DNA, 256 bp, Glycine max
  Clone ID: PAT_MRT3847_33731C.1
gctggtttttctcttatgccagctttttctgtgccacaggctactgccagaccttctgaaaatgctgtatcctgcggatgatctggaatttgaattttatttcgctggtgcattgggcaaattgaacacaggaaatgacgcatgacccaattgtggagtatgctctccctagttgaaaatttgcacacctcttttaattgtcgtaatgatgtgtgacgtgagtgtcttttttaactatagaacatatcatagaatg

SEQ ID NO: 69458 - DNA, 711 bp, Glycine max
  unsure (1)..(711): unsure at all n locations
  Clone ID: PAT_MRT3847_33732C.1
aaagcagcttattgantaagctgctccaaataagctggtgcagaaacaagaattggaaaaaacacggaggtgggttaatgaaaattttggatgggactacccctgcttttaagagacgaagctttagtttacagatgtgtatggtggccatcctcgtcctttccctcaccctttccctcgccctcgagtggaggtgctcctacgaagcttccatcactgctccaatctagcatggcaaggcggatctgcactggtggacatgctggccagtggctctggttgtggcaatggctgagggaagtagagaaaatttgaattcaaatttgttcgcattttcccccaaatttcggagatcgcaaattgtcctcgccgttgcagagcatggaaagccctcacttatcgaaatccctcatttcgtgaccttcctcctttgtcatcgtgagctagctctaggcttccctccacaaaagtgttgttctttaggtgatgttgtatcaagtgatgataatttctcctctcctttcaatttcaattgtatgattatgggtctttgggtttatgtgtaaggctttaattggagactgttttggtttttagttagaagaaaggtattgaagattgagacattgttatttcttacttaattgaattgctttgtaagatgttgttgggtggattttaatcaaattgttgttagtttgtgcttccaaa

SEQ ID NO: 69459 - DNA, 478 bp, Glycine max
  Clone ID: PAT_MRT3847_33733C.1
gcttggaaccttggctgatttagtgcatgctggacgtgagaagatgatagaccgggaaggagaagtaaataccgaatccgccggtaccgaggaataataatagaggtagtaataggaagagtaattcccggaagcgtggaaacacagagtcgaaccgctcgaataagacacacccgcaactttagtaggccacttagccgcggctaatgtcattctagactcgaaccctcccgtccccggcactaacgttgacaataattagaggaatccatccgtaggcctgaaagataacgcgacaagttagacattcagctaagcgtatgagtccgtgcctttcgggctcgtaaaagacaccgagaattcaacaaagagttaaagcgagcttcatctcgcggacgtctagttctactagaaagaggaggggaatacgggaagaaagggcttcccgctcctaaccacgaaggtcccacatcgaaca

SEQ ID NO: 69460 - DNA, 367 bp, Glycine max
  Clone ID: PAT_MRT3847_33734C.1
gtgacgcgtgggcgacaaacaattgtacgggtcagaatatattcagtagctcatgccttgcaagaagcatcacacgcgttagcgcacatgtaacctccactagcactgacacggaaactagcacccctgctgtcgatgctgccagcaataccagaacctccactcaagactaacattcatcttccacaactgcattcttgaaagtgggatctacccctagagcaccaacaagtttacttgcgtcatttacgggctcacaaccgctagaaaacaagagtggcacacggagtgccattattggaagctctgctgctgcaattggaagcacagtgagtgacagtttttgggttaggaccgcagcagtgac

SEQ ID NO: 69461 - DNA, 479 bp, Glycine max
  Clone ID: PAT_MRT3847_33735C.1
aattttaaaacaataatcacaggaaatagtaagttataatataaaaagaataattttttcagtaacatctggaaattttgttttggctagttggaattctgatggcagattgaaaacaaggctctcttccaaggtcttctgaaccttcattccaaattttttaacctttatcattttattttttgttgttgcaatttggggatttctctgtcaatccaagctatccatagtctccaaacttattgattagcagtggttaacacattggttctgtttctcaagtgaaatagtgttgtggtgctagtgttgcgtgaactcacccgcacattgtttctgtataagtttttttacatatttgggagttttagtcagaaatggtataatttaatttaaattaaaaattaaacttagaagtgcatgccgtttgtcacatgtgcaatttttttaccggagttaatgcaaagagactaaaaacagag

SEQ ID NO: 69462 - DNA, 239 bp, Glycine max
  Clone ID: PAT_MRT3847_33736C.1
cctccgttctctcctgctacatacctctttaccatcgctaccctaaccctaaccattggttctttggcccataaagttctctatatttctctcgcactaaaccccgtgcaacctatctgagtctggctggctctatcaatgatttcgactgcaactgcaagaaatgagggctcaacgaggtgatacaagagatagaaactctggatgttagccacattcagaaggaagatccaccaact

SEQ ID NO: 69463 - DNA, 451 bp, Glycine max
  Clone ID: PAT_MRT3847_33737C.1
attttggaatgcatagtataactttccggaacaactcttccataactgcttaaatacgcttccagaaatcattatctaaaaaggaattttaggaaaaaatgatttggaatgcccgttctggaatctatagtatacatttatggaaacgctcttttgtaactatactaatgggttctagataaacttttccagaaagtaattttttttaaaaaaaaataaacatttggaattcccattccgaaatggtaaatatattttttgaaaaatgctttccataacactcctaatagccttccaaaaaatgttttccataacactactatagccttttagaaaatgcgttccataacactactaatagccttccaaaaacctttttccataactaccttccgaaaaagcattttccataacattgctaataacctttcggaaacctttttccataaca

SEQ ID NO: 69464 - DNA, 807 bp, Glycine max
  Clone ID: PAT_MRT3847_33738C.1
ccagaggtgatatatcttggagatcacctatttagtgacttaagaggcccctcaaaggcaggctggcgtacagcagcaatcatccatgaactagagagcgaaatactaatacaaaatgaagatacctaccgctctgagcaggcaaagttgcatattatacaggaactacttggtaaattgcatgcaactgcatctagtagttcaagaactacagctttcaattcacttcttgaagaacttaatgaggagagacaaaaagcacgaagcaagatgaagatgatgtttaatagatcttttggagcaacattcctggctagcacaggacaagaatctgctttcgcttataacattcatcagtatgcagatgtttataccagtaagccagagaattttcttctgcactcacctgaagcatggcttcatgttccatttgatgtcaagatcatgcctcatcatgtgaaggttccatcaagcttgttcaaaaccgggtgaacggttctcgaaatcattcaaactattagtggcattccgcagttctaataacggagtaatgatgagctgcaactggaagacaattgttgcagtagtaacgtgcattcaattttattcttgtcattgattccctcatttcatctcgacatagctaactttatctggtatgcttcaattaatagagaaagaaattagaaaaatgaaagccttctaatcatgtatatcaatttttcataaattggatatttgttgctatgctgtctaacaatgaatatttatttatattttaaataatatattacctatcaagataaa

SEQ ID NO: 69465 - DNA, 435 bp, Glycine max
  Clone ID: PAT_MRT3847_33739C.1
ttttttttaataaaaatagcaagcctctaaatggggtttccgatgaacctagggaaaattctgcagcaggtacaacaaatttccccaaatctagacaactaatggcaataaatcaaaagtaattacctaacaaatatggaaactctaagagccaaaacccctggggagggggcattgctctacaggctaaccaattaatttaggatcaccaacaggtgatgattgcaatcaatattttgaatgcagccacgtttgggagactacctgggtgattggtggataaaaaattgaggccgcaatggaatcaattgtacaagggcaaatccctcaacaatttgaaaaaggattaaacaaccatcaaggggggtggttaaacacctaaatttaaatatcaccgggggggggctttttccttttcttcttggacaaaacccc

SEQ ID NO: 69466 - DNA, 225 bp, Glycine max
  Clone ID: PAT_MRT3847_3373C.1
gttcggagagatgcatgataaacttgcattgaaattttcacaagcggcatttgttacagcttggtcaacttatgcgcgtcctgcaacaactctgctggctgatgcgtgtccatatttgtatgcaatggagcatgatacatcagtgtctacaataccaggtgatttggccattggtgtcaaggtgacaaccataaacaatatgtgtgcatatgggctcactcctgg

SEQ ID NO: 69467 - DNA, 924 bp, Glycine max
  unsure (1)..(924): unsure at all n locations
  Clone ID: PAT_MRT3847_33740C.1
aatgtgttaacnntnnnnngcnnactcaagaagcacatatagacacatttttttggaacatattgaaagacactgttatataacttctaaagacacattattatacatcacaaactgccataattaaacatagatgagtagatgactttgttaaacatagagcccattccacatattctttttgtccatggaccaaagaatcaatcctgcgtcagatagactcaatgccattgttgaaactgcagcatgcatgaacctaaatttcagagcactggaagcccaaatccgtttctatgaattttaatgcgttgataagtgagaaataatgcgagtttgtgcgaagtcagtagtaatttcaacaaggcccacatgctggatgattgggtgctctggtcccccatcgggagcaatgcactcattgaattcatatggcatattacggatatcaagaacttccagttttttcaagtgttgaatgccaggaggtactttcttgagtttgcgtattccccaaaatttgagctttttcagagaatggagtgctcctttatcgataatgatggattccaagttacgcaatcctccaagagacagttcccttagttgttgaaatcctccatcttcaaaatacaaactttctcctttataagccttgtacatgccgaggaacaacaaatatggcatattttgtagtgatttcaatggatcattggttaactctgagtattccaaagataattttacgagattttggagttgtggaacccactctggaagcttttttagcttcccaaataggctaagcttccgaagcataggcaaagatgaaataaaaggcaaatcaatgacttgaactccgtatgactcgatacgtagtttctccaagtttgtcatcacacttattgaggaacatagagcgcttcc

SEQ ID NO: 69468 - DNA, 227 bp, Glycine max
  Clone ID: PAT_MRT3847_33741C.1
cagagattcgtgtcggactttcggaatattgaagcatgctggatatatagctgagtcaaagtacttatgctgaactatctgataatgatgtatgattccacgactgtagagatgccgtctcgacgattaaattgtgtagttcagggtctctatactcatctgggctggtcttaaatgacacatcatgaccttgggctcagtgatatgtcgacatacgtatagactat

SEQ ID NO: 69469 - DNA, 384 bp, Glycine max
  Clone ID: PAT_MRT3847_33742C.1
gattagtatctattgcagtttatcttttatcgggagaatcaagatggctaagttactttaacaatcaaagtgtgacagttgttcacctaactgtgctgggaaattcaaagtcgttcaatgaacagtgaaagcttacttctaagtttgctggggcatgaaaaattcttcgtccaacaatgctttgagatcgttgtgggcaccaaattctttcggttcttgtgaattgatataactgctctcatgctttacaggattttcttggatctcagatacaacattccacaccctatggtattggattcttgcctctggatactgaaccagagacttcaccctatctaggggtttctggaacctttgctcggagagcttcctgcctttttt

SEQ ID NO: 69470 - DNA, 317 bp, Glycine max
  Clone ID: PAT_MRT3847_33743C.1
ctcgagccgaatcggctcgcgacgggtgcgagaagacgacagaagggggttctcctatcggcttgtaaacggtctcgaatttctccttgcacgtggttagcacttctattatatcctagctctgctaactgcctgaatttataattaattcattcagggtcaatcactactatattattacaccaaaaaatgaaagactatatatatacaacacattgatgaattaagcgtaacattagtgttactaactaacgaatgatagaacgggtttcagttgagaagaggcgaatacataaaaaagaaactgaccttgagac

SEQ ID NO: 69471 - DNA, 651 bp, Glycine max
  unsure (1)..(651): unsure at all n locations
  Clone ID: PAT_MRT3847_33744C.1
ctttggcgcgttgtatgcacacgtttctcatgtaccttgtaaccggacgtatatgttgttcgcaagtgagcgtatcgagaaaaactttgtaaacatgttggttgaccaggagctttttacaagggaggacgcttatctctgactccttgcgctaaaggaaattgcaaatggaatgctgtgaaaaactttcgggaaaagcattctggaatgaggatcttttgtctacatatgttcaaaccctttttatcttggtggcggagatgaacatggagtcgataattccttttaatgaggtgcctactattctgatctatgggggctagagatgggacatggtgtgttatggacaaagcagacacattgcttttggggtttctaagctggaaaaaatttgttattcgataacttgatagaaggatggagatgctagaattattgaggtaatggctagcagcgtcctgtatgagtacttgaagttcaaattcttataggtgacatnccatcgtgaatgaggttggaaatgaaatgatcatacttcaagggaatgaattgtgcatcagccaagataatgtaatgatcataggtcacagacgggaaaagccaagtgaccttaactagcatgctaaccactcatgtatttcattttccttt

SEQ ID NO: 69472 - DNA, 202 bp, Glycine max
  Clone ID: PAT_MRT3847_33745C.1
ttggaggaggccgccggagggggcagcaaaagcaactaattgagctgtgtttttgtaactacgtggaaggtgctggggtgggaatgaatgctctctggacatgtgggggaacccgctgcgatcgtgtaatggtgaatcttaaacagagtatttgacttaaatatatgatcctttgctgaacggacgctttgctgggcaaatt

SEQ ID NO: 69473 - DNA, 253 bp, Glycine max
  Clone ID: PAT_MRT3847_33746C.1
gtgtatttgctagtattaatctcacggacagtaaaaaaatacgagcacattatcatatgcactctatgtctgattgcctgtcatgcctttgacgcaaatcctgtaacacttagaatgttctcaattatgtgatctctgggtatgaagcagacttagttgcacaccgaagggagattgcactcatgaaactatctcttgacaagactgacccacgagaaataatttctgacgtactcaaaaatggtcatatggc

SEQ ID NO: 69474 - DNA, 235 bp, Glycine max
  Clone ID: PAT_MRT3847_33747C.1
gtctttctgcgggggttgatgtggttgctgtagctcctgtaagtgcggctgcggatgctgaggctgaactatgtacccagagcttacctacgctgagcctaccaccacctaaaccttggtcatgctagtggcacctgtttaggcataattaaacgtagctgacatgggtgtgcccactgaaaaccagggctgacactgttgaccatactgcttatgcaaccactgtacttgcaag

SEQ ID NO: 69475 - DNA, 368 bp, Glycine max
  Clone ID: PAT_MRT3847_33748C.1
ccacgcgtccggtctgcttaatattgccttgcatcttattcacatgctaggggccataacacatgatattaatgatcatgagcgcgcttctctattagtatcactagcgcatagatctgttcttagacacaaacagcaaaatgccgaatgtcaggagagagggttccgcggtacaatcgatcacgtaacttatgtgcatttggaacagatgcacgcttttcaacaactgatgtgccaacttgctgtgtggtggccaccagaaaaaaccagctaaaatcaccagactcgccattgcctgtgtcttgaggcccgtgtggatttgtggatccttcagagaccaatcggtgggctgcatattcaggcccatt

SEQ ID NO: 69476 - DNA, 782 bp, Glycine max
  unsure (1)..(782): unsure at all n locations
  Clone ID: PAT_MRT3847_33749C.1
ctccgactgcctgactgatccatcccatcccctttctccctctcatctctcctccacgcgtccgctcgctcttctttcacaatggtacaacctgcttcctcggctcttcaggtcacgcgtccgcccacgcgtccgtacggctgcgagaagacgacagaaggggttcgctgtctcgtcaatcgccgcgggaattcaattcgggtgggccctacagctctctcttctgacaccgtacgtccagaccctcggcgtccctcacgcatgggcgtcgttcatttggctctgcggcccaatctctgggctgcttgtgcagcccattgtagggtacagcagcgaccgatgcagatcccgctttggtcgccgccgtcccttcatcttcgtcggagccatcgccgtcgcaattgctgtgttcctcatcggctatgcagccgatataggacacgcggctggtgatgacctcacaaagaagacccgtccacgcgcggtggtggtctttgtggtcggcttctggatcctggacgtggccaacaacatgctccagggtccatgccgcgcatttctcggcgacctcgccgccggggaccaccgcaagacgagaaccgccaacgcattcttctcgttcttcatggccatcggaaacgtcctcggctacgcagccggctcctacgacaaactccaccgcgccttcaaattcacacaaaccgaagcgtgtgacgtgttctgtgcaaatctcaaagagctgttcttcttctcaatggtncccttctctcgtctttggttcg

SEQ ID NO: 69477 - DNA, 469 bp, Glycine max
  Clone ID: PAT_MRT3847_3374C.1
gacaatggaaactgattcttactatatccgtgataattaatgtacatggctcaatcaaaaaataataattccaaaggaacattatattaccttgttacaaactgaatctgacaggataatttgacagcgcatgcccatcatttcattgagatttggttgccgaatttctcaacttaaatcgacgggagatgtaacatcttatcctgtccaaaaaggagaatgcggttatttaaaatctgaccatcactgattttgttaaaccttctctgacaaattctaactccctggcattagctagtttcaaactgcctatgccctcaagcattggcaatgagaaacaaccctgaaactctatatttctgatccacccacgttttataaaatttatgacctccaggacttgatcatgaggacagagaccaacagggctaatttcataatatgaaccttcaggcacctgccttttaac

SEQ ID NO: 69478 - DNA, 353 bp, Glycine max
  Clone ID: PAT_MRT3847_33750C.1
aattccccgtctgacccacgcatcaggccacgcgtccgctcttccccaacttctcttaaaatccatctagcccgttcggtacgcaactacacacactggttgtctacatattcgtcgatgagatcatcgccctagtggctccagctacagtttgcagtcgtacattagatatcatcacacatgtcatgctcgcgagctacgaagcctgtggctcatgtctcgacggcttgtgtacatcatgcgtcagcaactacctcgtatatagctagcattaacgcaggagaggcaaacttgtttgcgcgtctgatagtctcagcttctgtcgcaactccgtgacagtcctacagtctgat

SEQ ID NO: 69479 - DNA, 531 bp, Glycine max
  unsure (1)..(531): unsure at all n locations
  Clone ID: PAT_MRT3847_33751C.1
aaaagttaacaagaattatatttgaatgatgatataaaatcgttttactcaacacatacataatctattttctcatattatactcattcgaccttcccttaaatttttcaaatgaggtggtatttggtgctgttaaatatcacctctccagtcaaagaaatggaatgaatctaaagcgttggattccctttgctgatcatcaaaaccttgtggtggagacaataggtttactgactgatccttttctatttctccaaattctgcaaacaagccctgatcaagttgtaggtagttattcatcttagatattggcctgtaataagggactccaatatcacagaattctacatcatccatctcaagctgcttctcttcctccctcacaaagacattgntatttactttattgctgtcactattgctctcctcctcctcttcttcctcattctttgaagcagcanatgttgttgttttttgatggttgggatcgagatgaaccagcgagagcatttctgtgtgttggccatggat

SEQ ID NO: 69480 - DNA, 305 bp, Glycine max
  unsure (1)..(305): unsure at all n locations
  Clone ID: PAT_MRT3847_33752C.1
ncacgngtacgtaagcacggaattcggcncgaggctctggantccacctcancccgnnnngggagacggnngnggaccngcnagcactacaggntgaccngggaacnaatcgaaagaatcnagancnacatnatgagatanggagggaggangnanctggacaaattgctaccnctatcggntnngngcatnccaagaagtgcttgaatggcgagnnnncncccnnggagatttnctncgggganccnnngnaaaatgcactaggggnctgcnccgcannaatgatcagcacagggtacgtgatg

SEQ ID NO: 69481 - DNA, 241 bp, Glycine max
  Clone ID: PAT_MRT3847_33753C.1
gccttacgtgatcgagcctatattcctatggggggggcaatactctgtttagaggtggaaacgcacggaactgtatcttacgttcttttgcaatgtaaaataatagcactgcattacaggttgctcgtgacttactcgcgaccaaaaactaggtctgcacatggtctctggatatgtcttttaaattctgcataaggttactttgtgaccctactcttccctttaattttacaaccgcaac

SEQ ID NO: 69482 - DNA, 418 bp, Glycine max
  Clone ID: PAT_MRT3847_33754C.1
tttttttttcattaattctaactttctattcctttcattattagtacatatatttgtgagaaaagagggtgtcacactttgctacgtgaggctgattgtaacatttatgtttatacaatattcttttctttaactcctcctaaaatccatgcaccttcctgccggccacttgcttttttaccaaatcatatgtatatagaagcggcatgtgatgtgattactccattctaatttccgaacttgccattcatgcatgacaaatatgtgaagactcttttaggtgtcaaatttaacatcagagcacttaagatcgtttgattagaaaatcctttgcttctcatatattgacaaaagcttctcagttagaatttcggactctaatctatgagttttttccacctggaaatgcaagttgtag

SEQ ID NO: 69483 - DNA, 2206 bp, Glycine max
  Clone ID: PAT_MRT3847_33755C.1
tcgaaacgaacactactgccgcacgtccgatcggatcttctagggtaaccacggcgccactcgaacaagtgcggcaattcccaacgcttctcttctcagggggagttcgaatcctgtgagctttcaatatgacgtcgttcttgaagcctgagaatgctctgaaaagggcggaagaattaatcaatgttgggcagaagcaggatgctttgcagactcttcatgacctcatcacctcaaaacgatacagagcatggcagaagacacttgaaaggattatgttcaagtatgtggaactttgcgtcgacatgcgaaaaggccgttttgctaaagacgggttaattcagtataggattatatgtcaacaagtgaacgttagttcactggaggaggtcataaagcattttatgcagctttctaccgagaaagctgaacaggcccgtagccaggcacaggcactagaagaagcccttgatgttgatgatttagaggccgataaaaggccggaggacctgatgttgagctatgtcagtggcgagaaagggaaagacagatctgatcgggagactgttaccccctggtttaagtttctttgggaaacttataggacagtgctggaaatattgaggaacaactcaaagctggaagccttatatgctatgacagctcatcgagctttccagttctgtaagcaatataagcggacaacagagttccgcagactgtgcgaaatcattagaaatcatttggctaatcttaataaatatcgtgaccaacgagaccgacctgatctttcagctcctgaaagcttgcaactgtatcttgatacaagatttgagcagctgaaaattgctactgaacttggactctggcaggaagccttcagatcagtggaggatatacatggactgatgtgcttagtcaagaaaacacccaagccatccttgatggttgtttattatgtgaagctgacagaaatattttggatatcatcgagtcatctgtatcatgcatatgcatggttcaagctctttttattacaaaaaagcttcaataagaatctgagtcagaaagatttgcaattaatagcttcatctgttgttctggctgcactttcagtgcctcctcatgatcacacccacggtgcatctcatttggaactggagcatgaaaaagagagaaatttgagaatggctaatctcattggctttaatcttgaaactaaacctgaaagcagagaaatgctatcaagggcatcacttcttgctgaactggcatccaagggtgtgatgtcttgtgtgactcaggaagtgaaggacatttaccatcttttggaacatgagttttatccctcagatcttgcattaaaagcactgcccttaataactaaaatctcaaagttagggggcaagctttctactgcgtcatctgttccagaagtgcaattagctcagtatgttccagcactggaaagactggctaccatgaggttgctgcaacaggtgtctaatgtgtaccaatctatgaagattgagaccttatcggggatgatccccttctttgatttttctcaagtggaaaagatttctgtagatgctgttaagcagaagtttgtatcgatgaaagttgaccacatgaaaaatgctgtgatttttagtaaaaagagtctcgagtctgatggcttaagggatcacttgggcaattttgctgaacaattaaataaggcaagacaaatgatttatcctcctgatgggagaccatcaaaacttggagctttacttccaactttgacagaggttgtggccaaagaacacaagaggcttcttgctcgaaaatcaattattgagaagaggaaggaagaacaagaacgacagcttcttgaaatggaacgggaggaggagtcgaagaggctaagacttcagaaaataaccgaagaagcggaacaaagaaggcttgccactgagtatgaacagagaaagaatcagaggatccttagggagatagaggagagagaaaatgaagaagcacaagctttactccaggaagctgaaaagcgtattaaaaagaagggaaagaaaccaatcatagagggggacaaaataaccaagcagaccttgatggaattgactttgaccgagcaactccgggaaagacaggaaatggaaaagaaactccagaagttagcaaaaaccatggattatttggaaag

SEQ ID NO: 69484 - DNA, 470 bp, Glycine max
  unsure (1)..(470): unsure at all n locations
  Clone ID: PAT_MRT3847_33756C.1
ggacgggaggaggagtcgaagaggctaagacttcagaaaataaccgaagaagcggaacaaagaatgcttgccggtggggatgaacagagaaagagggagaggatccttanggagatagaggagagagaaaatgaagaagcacaagctttactccaggaagctgaaaagcgtattaaaaagaagggaaagaaaccaatcatagagggggtaagttgaagtctgcctttcgttaaactcctgatttggtgggtctgcctttcgttaaactcctgatttggtgggtctgcaaatgttgactataaaccctatatctgtaggacaaaataaccaagcagaccttgatggaattgactttgaccgagcaactccgggaaagacaggaaatggaaaagaaactccagaagttagcaaaaaccatggattatttggaaagaggaaaggagaagaggaagcanaaagggaggaagaaa

SEQ ID NO: 69485 - DNA, 522 bp, Glycine max
  Clone ID: PAT_MRT3847_33757C.1
tcccacgcgtccgcggacgcgtgggagtaaacaaccatcaaggatggcttgggtgtttactatgtgaagctgacagaaatattttggatatcgtcaagtcatctgtatcatgcatatgcttggttcaagctctttttattacaaaaaagcttcaataagaatctgagtcagaaggatctgcaattaattgcttcatctgtcgttctggctgcactttcagtgcctcctcatgatcgaacccatggtgcatctcatttggaactggagcatgaaaaagagagaaatttgaggatggctaatctcattggctttaatcttgaaactaaacctgagagcagagaaatgctatcaagagcatcacttcttgctgaactggcatccaagggtgtgatgtcttgtgtaactcaagaagtgaaggacatttaccatcttttgaacatgagttttatccctcagatcttgcattaaaagcactgcccttaataactaaaatctcaaagttagggggcaagctttctactg

SEQ ID NO: 69486 - DNA, 1753 bp, Glycine max
  Clone ID: PAT_MRT3847_33758C.1
gaaaaaacatagaactagtcaattttatttgaaaaaatgctattcatccagccacacagatcgaggagcccccttttttgacgaaaaagtgtggtccaagagtcataaatatggtcattaagattaatatctacacattgcaagtgatatgctataaaattgaaacttcacacgctgaactgcggagagcaatcctctagcttatgctcacaatggcttcgtcatcttgttctgctgccaccatccacttcatcctgctttcaatatccctcttctcagtttcctctttaccattaccagatgaatcaacttccaaaccaaaaaaaatcttcttcctgcccattaagatagacgcagcaaccaacatgttctacaccacaattggcattggaactccccaacacagcacaaatctagtgattgatcttggcggagaaaacctctggcatgactgcagcaacagacgctacaattcatcatccaaacgtaagatcgtttgtaagtcaaagaaatgccccgagggtgctgcatgcgtttccactggctgcattggcccttataaaccaggctgcgcaatcagcgactgtactatcacagtaagcaacccattggctcaattcagttccagctatacaatggtcgaggataccatattcttgtctcatacatacatccctggctttcttgctggctgcgttgacttggatgatggcctctctggcaatgctttacaaggtttacccagaacctctaaagggatcataggcttttcacactcagaacttgcattgccatcacaactagttttgtcaaataagcttattcccaagttttctctctgcttcccttcttcaaataacttgaaaggatttggtaacatcttcattggagctggtggtggccaccctcaggttgagtccaagtttctccaaaccaccccacttgttgtcaaccccgttgccaccggtgcagtgtctatatacggtgctccttctatcgaatacttcatcgatgtgaaagcaattaagatcgatggtcatgttcttaacttaaactcttctctgttgtccattgacaagaagggaaatgggggtaccaaaattagtaccatgactccgtggactgaattacatagttcactctacaaaccctttgttcaagagttcatcaacaaggctgaaggaagaagaatgaagagagtggcaccagtgccaccgtttgatgcatgcttcgatacaagcaccattaggaattctatcaccggcctagctgtgccaagtattgatctagtgctacccgggggagcacagtggactatatatggagccaattcgatgacggttatgacaagtaaaaatgtggcgtgtcttgcatttgttgatggagggatgaaaccaaaagaaatgcattcgattcaacttgaagcctctgttgttattggggggcatcagttggaggacaatcttttggtcatagatatggcttcctcaaaattaagctttagctcctcgcttttgctccgcaacgcaacatgttcccatgtttgagtcttttattagaccctgagattaccactgttcaatagtgctccttctatctatctttcgcccctgtacatctcgtgtacaataaatcaagcctcctgtagtactgtgacttcaaatttcaatacttataatttgtactgtacaccaattcatgtttattctgccattgtattttccaggactagtaaaataaacatattgaacgg

SEQ ID NO: 69487 - DNA, 380 bp, Glycine max
  Clone ID: PAT_MRT3847_33759C.1
tgggtagtgaagctcgaggggagacgaaaattaagcagcgagaaacgttgacttttggtgtataacttttaaacttattggccactgcttcttcttcttcttcttaagaactcatggctactatgatattattctagtgcacaaaaggatgggagttccagagagagaccctgctgcacaagcgagtcaggctaccgggtgtaggtcttaccccacagatgatgagcgtttggttcaggtcctttgccgcaaggctgctggccatcatttatctgttgcagtcgttgctgacgatgacctgtacaagtatgatccatgggctctttcaggataggcagtgtttggagagaaggagtggttctttcttagaccaggagaca

SEQ ID NO: 69488 - DNA, 207 bp, Glycine max
  Clone ID: PAT_MRT3847_3375C.1
gcaattagcagtatgtacttttaaataaaatagtctctccaaattgctaactcagtgccaaaattgtaattctgatattgactacaagccacaaggaccttcataagtgctgcagttgctcattctttattctacaattttggcactgagttagcaattagcagtatgtacttttaaataaaatagtctctccaaatttgcattggt

SEQ ID NO: 69489 - DNA, 165 bp, Glycine max
  Clone ID: PAT_MRT3847_33760C.1
gcggctcgagcccagcggcaagccacaacgcaaccagcaatcccctacaaagaccagaccgccagacacgacggggcaggacccacaccaagcgcacagcacagacagccaccacaccgccgagacggccgaacaccagagacgcagggacgaaccgccgggaac

SEQ ID NO: 69490 - DNA, 326 bp, Glycine max
  unsure (1)..(326): unsure at all n locations
  Clone ID: PAT_MRT3847_33761C.1
tttgattgcttgtgataattctatnattttgataaattcagatnttggagtagtatttttnatgataaataaacaatgttgtctttttattacatcactactttgtcaagtttttggtgttaagtcgctggaatttggttgatgattttgattattttttatgtnttttagctattaagtttctggtgtgaagtttctanatttgatgattttnaatattggttgtagtaataattatgaggattctggctgcaaatattgtttagttggatcntcatttcattataaagttggcatactaaaatnagtagttcgcgatgcgcaac

SEQ ID NO: 69491 - DNA, 400 bp, Glycine max
  Clone ID: PAT_MRT3847_33762C.1
gagagaactagtctcgagttttttttttttttttttaatttgaatcccatattatatgtaatttatggaacaaggatcataaataaccataacctaggtcaaagccaaagcaacccaaaaaaaaaccaaagccaaaacaacccaaaaaaaaccaatgacagcatgtatacattccctacccatatagaaacctattacgaagcctaatagttgcatcaagcaccctaccatccacgttcttgacctaccaagcactcatcggcaaaacaaaaccaacctcaatcaagccattgattcttgtaagagagtttctatcgggccctcgataatttgggcaattttgatattattaattttttaactaatcaaattacatgttatattcttattaattattttt

SEQ ID NO: 69492 - DNA, 827 bp, Glycine max
  Clone ID: PAT_MRT3847_33763C.1
ccacgcgtccgattttaaacaacagtttctgtcggttcagtaatttgggagcgtgaagcgtggtagctagctatattaaatttgaacgcattaattaccctctttacaattcacatgcatgtaggttttatcacatcaaaagttgcatgctgtggtcaaggaccttacaatgggattggactgtgtactccggcgtctaacctgtgcccaaacagagatgtatttgcattttgggaccccttccatccaagtgagagagcaaacagattgattgtggacacattcatgattggagactccaaatacatgcacccaatgaatctcagtaccatgttgcttttggatgcaacttcaaggacctagctaattattatcttcttcctgttagggtcgtggcatacattctgcactagattttgtgttatacattgattgtttaagctatattgttacaaattatttgaaaccacgggatttctatgattttttctctctcaaatctctgctttgagggaggaaaaatagagaaaggaaagttcattgtgtcattgaatgtaccagtttaggaattgtaacttgtgagccatgtatcgtttgggtgaattgggtcagataatttgtgggtagaggctaagcccaaaaactggttgggcttgaagctttaagtgtgataaatttaggtatccgagatgtattagtaatttacaacaaaaattattccatgcaaaccttagcttaaatccatattgttaactcgttgttcgcaacaaatttgtcatagtaaatgattcaaaattgaaaaactccaccaaaaaaaaaaagggcgg

SEQ ID NO: 69493 - DNA, 458 bp, Glycine max
  Clone ID: PAT_MRT3847_33764C.1
cgggctataattactaactcgacccacgcgtgctgttacttgatcttacgctgtaagaaatgacttgtaaaacaactagaaacattcctcacataaaaaaaaaaaaaaaaaaaaaaaaaaaaaaaaaaaaaaaaaaaaaaaaaaaaaaaaaaaaaaaaaaaaaaaaaaaaaaaaaaaaaaaaaaaaaaaaaaaaaaaaaggggggtcccctttaaaaaatcaaaattaactatcccatcattgcaacttattaactttttattagttccaccaaaataaatttaattgccctgcttttaaaaacaccttaactgaaaaaaccctacctttaccaattttaaaatccccttgaaaaaaatacccttttcccaagttgtagttatatgaaaaaggcccgttcaaatcgccttttcaaaaatttacgaaccctaaattgaaaatggtaccccccctttaac

SEQ ID NO: 69494 - DNA, 367 bp, Glycine max
  Clone ID: PAT_MRT3847_33765C.1
aacggtgaaaatcgatccccacatagcttcaaagaaaaatatctaaatattgatgccgaagcatcagcaagatcacctaacaaacaccttggactcagataaagaaactaggtgacctaattctctacatttcaatgggcaacccaacctaccatatacgttgttaaaagcgtatcagaacagatagattctcgtctctatctcccgtggggacaaacgattgggacacttagagcgctgcaaaataatcacacggcataccatctcacgccccaaataagtcgcaattgttattggaaaccttgttgatcattgacaaaaatcatttgctcgtgtgacttgtttttttcacgctactgcggtggaa

SEQ ID NO: 69495 - DNA, 391 bp, Glycine max
  unsure (1)..(391): unsure at all n locations
  Clone ID: PAT_MRT3847_33766C.1
acccctgccctcaagtgttccatcaggtactccagtaatatctacaaatgttcctattaatacacatttgagcagcaactcttcaataacaaatagttatcaaactatagaggttccaaataaagcagctagtaactcacattcttatgcgtctagtccaaatactgatagtccttcaattaaacctcccccaataattacaaacaaaactcctactcctcagcctaccaccaacaaagtctacttaatttaaaataataaaacaatatccataagaaaaaaaagaatatctgttccaaaatatcaagtgcataataaaagtagccanataagtcatactacctctttaatagataaagttactggtgcatctaaccaaataagtaagctt

SEQ ID NO: 69496 - DNA, 541 bp, Glycine max
  Clone ID: PAT_MRT3847_33767C.1
tcgaccacacttaccagcaactacaactactggcacctaccatttcaggcccttcagggatcacttgaggataaagaatatatggggggatcaatttcaaaacggaggcttactaagcaacatgagccaaatcttcttcctcggtatcagcagcctgatatgccacaaagccaagataatgggtctgtgaggcattatgggtattcacctcacacctaaggtggtggtcgagctccacaacacggaaagagcttggataggaagcatgcaaggataggtgacaattataagagcttggaccaggtaactgatgctctggcataagctggcttagagactgcaaatccgatagaagcgattgattgtaccaaaagcaatcagtggacaggtggaaggtcatatcacaggatacgcctgcatcacattgctcatgaacataattcatatgaacaagctatatctatcattggcaaaacataggcttcctctggtgaggatcacttaattccctgttttggttctggagatgcatcaacacatg

SEQ ID NO: 69497 - DNA, 373 bp, Glycine max
  Clone ID: PAT_MRT3847_33768C.1
gactggttgttctctaatgacaacaaaaatgaaaacagcaaccataaaagaagacacgtatatcctacaactcaaaagagtgccaccatacattttggcactttagtacgcaggatgccgcaatcgatagcagcttaaaaaggagaataatataatcacaataacgggagagagagatacgaacaaaaagccatgccaaaaagcttcacaagctgggtaatgccgacataaagaatgagcgaaaatgtgatgggaagagaataaaaactgggaattacactttgggaacccaccaaagagaaaatgccggttgctaaggcttgagaaaaagaagcctccagctgctggctgtgaaggagtgacaccagactta

SEQ ID NO: 69498 - DNA, 519 bp, Glycine max
  Clone ID: PAT_MRT3847_33769C.1
aattcggcaccagttaagattgccctaattttggattttgtgttatccatggaccacatatgttgatacatatgaagggtacgtttacctgtttgattgaaattgaaacctgtaatataggatagctatggatgcatgaaagaagttattggatccaactttaaatatactttttatttagttggaagttataagtcaaatgattttgtggatgtatctgtatgatcatatgcttatagtcatgtaatgaaacaaatcagtatgtattccaacattcagttccagatatcttttgttgttttttacctaatgcaatgtaatggtgaagtcaatgtgtattgtgaagtcttctggcttgatgatgtctgtgctgacattgtcttgggtgtgatctttccttaattctgtaacttgtggtcttccttctgtaatatacatatttagtggtaatattaacggtttaaactgctgatttgaccttgctcttttgtttataatatttttttctaaataaaaatt

SEQ ID NO: 69499 - DNA, 307 bp, Glycine max
  Clone ID: PAT_MRT3847_3376C.1
aaattgcattcttatttgggggggggttttggaagcacaaaccatcaactttatactttctggtagaatataatgcatttaatcatatttccccaaaaacatggtgcgttttggagtttaaatcaataagccccagggtttaaatggttgccgtctctgactttagggcataaaaacaaattttgtaccaattccatactttttggatggatgttagtatgtttctcatttgccacatggttcatttggtgttcatgaataaatgttaagggaaatgtgctgattgcctaatggagggtcattaaaa

SEQ ID NO: 69500 - DNA, 237 bp, Glycine max
  Clone ID: PAT_MRT3847_33770C.1
ccgaatcgtcgaccacgcgtcgagcagagcaatagctctcttgttaatctggacccttggctggtgcataaaggcaccagcaaactaaccaagccattatgctgcaccctataggagtgtttcttggttcattggaatagttgagtacatgaaggcagacttgagcgagccaagtttggacaccttctaacagaccggagatgggacataggaggagcagcatgatttatacgtcag

SEQ ID NO: 69501 - DNA, 347 bp, Glycine max
  Clone ID: PAT_MRT3847_33771C.1
ccccggcccaggaattcctttcgacccacacgcgcgcgaaatgacaaacatggggctcatgaaagccacacggatcaaatttctgctgctgacaggcagattcctactaaggatgataggaatgcagaaataatctaccttagacaaagagctgccggtgaacaaaaactccgcctgaaggcaaggagattgaggggaaccatgtgcctgtactctaaaataacgcaggggaaaatcacgttattcaggtacccgtaacggaacgcgacgaaatgcggtcttatagggcaagcacttgcacaactgcgatggtgagtacaaatagaaagccttaagctaccgacatg

SEQ ID NO: 69502 - DNA, 502 bp, Glycine max
  Clone ID: PAT_MRT3847_33772C.1
ctgcttggggggggggggggggggggggggggggggggggggggggggggggggggggggggaccgtagaaaagccgccgaggtattaaaggcggaaaagctggagcctaaagcaaccggggttgcgggtaaaatgaccataggttataccttgcaatggatagcaatggcagggaatattgcatacgctattaagggacccagtatagcgcgctaaagcgctgatgttgtgggcaatgggaccagcacaatagaaggcgcaaaataattgttgggccccccaaaaaaccgggcctgttgggattgcctatgcgcaaactactataactagggctaaaagtaacacttgtttggaagtggggtgtagttggagaaagcccaggcgcaatacttataagctgtaaaacgttgttgataaaccaagtaatgctgttaaggcccctaaggccggttattgcaaaattgccaatttagttgggaaaccttggccgcgaacagtgat

SEQ ID NO: 69503 - DNA, 209 bp, Glycine max
  Clone ID: PAT_MRT3847_33773C.1
cttcactacatggtgcattcaagggaagctacgagatggatcagtgtgtgtgaaaaggctgtggacgtagcatgcattctaagaggaagcatactgacgccggttctgattgaaacacttgctgcagtgcttcaaatggatgaaatactatatgagctgaaagagcatctgctgggtataaactgcggacgttgagattactatttcag

SEQ ID NO: 69504 - DNA, 854 bp, Glycine max
  Clone ID: PAT_MRT3847_33774C.1
gccattctcttgtcggctattttctatggcaaggtcatccacacacttttgtttctctcttcctcttctatggctgtgtctgatgctgtggtgagtaacctaacgctgctctatgtggcgctgatcctctctattaaggcctacggcttcctgtgcggacccagcttcagcggctgctttgtgctcgttgcgtccaccgccgcggtggcgctcattctcgttgccacgctgacgtgggacgtgtctcgcaaggccacgtatgcatttgccgccgttcagcctcctcctcctcctccgccgccgccgcaccacacccacgaaacgtgcaaaggtggcatctgctggcacggcgtggcggtgcgatcgccggcgtcgcaggttcgcttcagactaccccagaatcttccttacacaactttgtaattaacaacttctcttgattactggatcaatacaatatgcgtgcgacacacaaaaaacaggggggtggggttagttaaaaaagcttcgtaccccattgacgagagcctcatagctctttgctatgcgaaggtatgggtgggattagttaatttctttttcttttgggttgtcggtttccgttattttatatatggtatacatatgatgcattaaattttaccaacaacttttttgagaaggggacgagaattgaaacttgagagtggtggtatatgcagttagttatatgtgtgtgtatagcttgtaatatatgttgatatatatctggttagaggccggatttgtgtgaatagtaaatggatttttttttttaagaaaatatatatataatgggaggaaaatataaaaaaaaaaaaaaaagggcctagggc

SEQ ID NO: 69505 - DNA, 260 bp, Glycine max
  Clone ID: PAT_MRT3847_33775C.1
gcgctgccaaattatataaactctctttctctatctgaagaagaagaagtactgaagaagcatgtgtggaggtgctatcatctcagactccattggtgggaaacgttgccgtaacctcttcgcgcatgaactgagggacgagcttgaccctttctatgaccttcttgacttcgataccaccaccaccaccatcaatcaaccaccccttgcagacaaaaaaggggtgttatcatgtgagaagaagagaagaaaagtgtgag

SEQ ID NO: 69506 - DNA, 937 bp, Glycine max
  Clone ID: PAT_MRT3847_33776C.1
attcaaagggcatttggtctctgctcttgaattcttctatgatatggtagcaaaaggctttgagccaaatgtgatcacatacacaatattgataaatggtttctgcaagcaagggcgattagaggaagctgctgaaattgtgaatagcatgtcagccaagggtctgagtctgaatacagtacggtacaattgtttgatttgtgcactgtgcaaggatgggaagattgaagaagctttacagatttttggtgaaatgtcaagcaaaggatgtaaacctgacctttatgcatttaattctttaataaatggactttgcaagaatgataagatggaagaggccttgagtttatatcatgacatgttcttggagggtgttattgccaacactgtaacatacaacacgttggttcatgcatttcttatgagagattctgttcaacaagcatttaagcttgttgatgaaatgctatttagagggtggcatgtcgacaatattacagagtctgaatacagtggggtacaattgcttgctttgggcactgtgaaaggattgggattgtttgaagaaatgcttgggaaagggatttttcctactattatctcttgcaatatactgatcagtggcttgtgtagaactggaaaagtaaatgacgctctaaaatttcttcaggatatgattcatcgtggtttgactccagatatagtcacttataacagcttgatcaatgggctttgcaagatgggtcatgttcaagaggcatcaaacctttttaacaagttacaaagtgaaggaattcgtcctgatgctattacatataacacactgatcagtaggcactgtcatgagggtatgtttaatgatgcgtgtctgcttttatataaaggcgtagatagcgggttcattcctaatgaagtcacttggtcaatactgataaat

SEQ ID NO: 69507 - DNA, 474 bp, Glycine max
  unsure (1)..(474): unsure at all n locations
  Clone ID: PAT_MRT3847_33777C.1
tatgacgtcgcatgctnacgcgtacgtaagnnctcggaattcgggctcggagggtttttcaattaaaatttttaacccaaatttaaggaaaggggtggtttggaaggaatgtgttagaaagacatgagcctatacatatagaattatagatcccttgcataatctatgtaccacattcaattgaataagaaagcatttcccattctcaaaattctgtctatgatattcatttctatctttctctaaatctccccttctaaattcaacatctatgtggatataagaacattttgtaactttaacgttagaagcatacatagtttgagatggtgatgattttaattctggattttcttgctttaggatagttatattgcacaaaagtgcttacatatttttgcaactctntctttctagctaggggttttcattttaagaattaattangtttgacttttgagaaataatacacac

SEQ ID NO: 69508 - DNA, 343 bp, Glycine max
  Clone ID: PAT_MRT3847_33778C.1
cttaggtgacacactatctacacatttttcctgcatttggaagaggcgaggatctctatatgtaggcgacagcatactcaccatgtgggtgtcagcctcgtgtctgtttttgaggattggacattccatcaagcggcacacaacacttgtcccgtgtgatacttctagattccacatggataaaaacattggcggttgcctgaggaacccaaaactcctgttttagcatcttacctacaactcgctaatcttgtgaacttccaaaatgcttctcaaagccgtgttactgtgcgtgattgtcaccaaggaaactatttccccatgaaaatacggtgggccattc

SEQ ID NO: 69509 - DNA, 1902 bp, Glycine max
  Clone ID: PAT_MRT3847_33779C.1
gcaactgccaagagccgtacatttgctttttctctcatctccatatcactaagcatataaacaacgagagaaccctccatatactcatacatagtggatatatcagcgtgtgtgtaagagacagaacaacagatgaagcattttgccttggtgtttcttttggccattttggtccctcaggagtgtttccatgtcagtgtggaagcaagggatgattttgtcagaactagaggcatccacttcacgctgaatggatacccttactatgcaaatggcttcaatgcctactggttaatgtacacagcttctgacccatctcagagattcaaggtttcaaatgcctttagagaagcagcaagtcatggccttactgttgctagaacttgggccttcagcgatggtggctatagaccactacaatattcccctggcttctataatgaacaaatgttcacggggttagatttcgttgtatcagaggccagaaagtacgggattaagctcatactgagcttggtgaacaactacgaaaattttggaggcaagaagcagtatgtgaactgggctaggagtcacggccagtaccttacttcagatgatgatttctttaggagccctgttgttaagggttattacatgaaccatgtgaggactgttctcaacagatataacagatttactggcatgcattacaaagatgacccaacaatcatggcctgggagcttatgaatgaacctagatgcacatcggatccttcagggagaactattcaggcgtggatcacggaaatggcttcgtttttgaagtccatagacaggaaccacttattggaagctggactagaagggttttacggacaatcaacaccacaaagaaaaacaatgaatcccggtttcaacatagggacagacttcatcgcaaataaccgaatcccggccattgattttgcaacagtccactgctaccccgaccaatgggtatcgagctcaaatattcagtaccagctttcattcttgaacaactggttgagtgcccacttcatagacgcgcaataccatataaagaaaccaatactggtggcagaatttgggaaatcatttaagggttcgagttcctacgagagggatgaggtgttcaattcagtgtattacaaaatatacgcttctgcaaagagaggaggtgcagcgagtggagcactgttctggcagcttctaacggagggcatggagtctttccaagacggttacggaatcattcttgggcagagttcctctacggccaatctcattgctcgccagtcccgcaagctgtacctgattcggaagatcttcgcaagggtcgcgaacatgcggcgatggcaaagggccagagccagaggattttctggctccggaggtggaaacggaggcagatacattgacaactgagaacatgtttggtttgcagtttcaggattttatctgttaaatttacattgaagcgcgcgtcacagtatttttaactgaaaagcttgtttgtgttgggaagacagacatctttcatatacgagtttctctaccgagtgtttggaaggcgatggaggagggcccaccggaaccaacggaataccttggagatgaatcataatgttttcttataactacgttgacatatgttttcattgtttcagcttctctctcttttttttgtttatacagagcaaagcagctggtaagtttttccatggcgtctacttgtaggttactcaacctcactttagtttttaactttggaaagaatgttatttgtgtttagtacttgatatctgtagaaaaagaatgcaaaacaaagcgcaaatgtaagtttgaatcaaaataagttataaactcaagtttatactaacaagatttatgtttagattt

SEQ ID NO: 69510 - DNA, 294 bp, Glycine max
  unsure (1)..(294): unsure at all n locations
  Clone ID: PAT_MRT3847_3377C.1
cgcaacgancgaccttatncgtttctcgcaaagtttaagtcatcatgggtacggaaacgcctnacatcaacattgtcgtcattngacatgtcgcctctgggaagtcaactaccactggtcatttgatctacaagcttggaggtattgaccaagcgngtgattgcnggntcgannangnggctgctangatgaacnagaggtcattcaagtatgccngggngcttgcacaagctcaaggcngagcgcganagnggcattaccattgatattgctttgnggcagtttgaaaccaca

SEQ ID NO: 69511 - DNA, 243 bp, Glycine max
  Clone ID: PAT_MRT3847_33780C.1
gacaaattaagggccaaaagatatttaagggttcaagcaggacccgggaaatgtacattaagacgagaggtgctctatacagtcgcaagaatagcctattgcctcgctgttacataaacgcaagccggggctttgacagaatcaactaacatcgcatgcggatcgtatgcttactggactaacgatcaaatgggaacactagcgattacacggccagctagaggaccatcctgggcatggctc

SEQ ID NO: 69512 - DNA, 289 bp, Glycine max
  unsure (1)..(289): unsure at all n locations
  Clone ID: PAT_MRT3847_33781C.1
cccatgcgtagcatggcggcccacaagatggcaatttcgatttacatgtatggcaaaaccaaagacggtgaggaaggtgtgccacatatttaagaagcaattancactaccataggaatcatctgttactggacactctaaatctgctgcacttggagctcattctcttgacacacttgagattgtgataggacttgacgacgaatttcgtattactgtggaagaagaaatcgcccagactatcaccaccgttcaagagactgctaatatgatctataagcttcttgaa

SEQ ID NO: 69513 - DNA, 284 bp, Glycine max
  Clone ID: PAT_MRT3847_33782C.1
gacgaatccgatatgggtcgtcaagaccagactacagctctctgcgaggaagaagcatatatctcccacattctactccgctacaccctctaaatccccccttcccggtccgattgccgcttctgccgctgccttgtcaaaagctggaccatcagcgacggccgtacctgcgcaagcgccaaccaaagccgctgcgaacgctataagcacgacattggatatagttcggaatgaggggttcaggggtctgtatagaagcatgtcggcgagttatctgggtgtct

SEQ ID NO: 69514 - DNA, 301 bp, Glycine max
  unsure (1)..(301): unsure at all n locations
  Clone ID: PAT_MRT3847_33783C.1
ttagttttctctaagattaatgagacatactcttttcttcttctttttaaaatatttttattagtttaattattttaatctcttatcatntaatatatttattgctttaatttttattagctatgtatgcagagagttaaagtaaaatttccaacatacttttcaagcaagacaaagttagactcccatagagcttaagacatttaatgtattccacttactaaaaaaaattaacatacccctactgccaaaaggctcctaccttgcgaaggtacattggagggttacttaaatgattttt

SEQ ID NO: 69515 - DNA, 1466 bp, Glycine max
  unsure (1)..(1466): unsure at all n locations
  Clone ID: PAT_MRT3847_33784C.1
gataaaaccaaaaccttctgctgataaatttatgcccattaacatccaaagcagtcccaagaaagaacagggcaaaaacagaacagaaacagagatgggttgcaatagctccaaggctgagccaccaccgttggaaaacaccatgcatcatcatcatcatgcagacgttgcagagttccaaaaacccaaaaccctaaaagaagaagtagtgctacagattccaggatgcaaagttcatctgatggaccaaggcgaggccctcgaactcgcacaaggtcacttcacgatcatgaagatcatggagcagaacgtggcactagcaaccattataaaagttggaaacagtgttcaatggcctctaacgaaagacgagccggtggtgaaggtggatgctcttcactacctgttctctctgcctgtgaaagatggtggggagcctcttagctatggtgtcacctttccagaacagtgctatgggaacatggagatgttggattcttttctcaaggatcactcttgtttttctggtttggaaaggaataagaagagtgatcttaaatgggaggagtttgctccaagggttgaagattacaatcattttctggcaagggcaattgcaggagggactggccagattgttaagggtatcttcttgtgcagcaatgcttacaccaaccaggtccaaaaaggaggggaaacgatcctaaatactgctgcagaaaagaacaatggtggcatggtcacagaaagtatgaaccacaggagtgatgccacaaagaataatgcaacgaacgataacctcaaacgtgtgagaaagctgacaaatatgacagaaaagttaaccaaatctttgcttgatggtgttggaataatgagtggatcagtgatgactccagtgctgaaatcccaaccaggacaggcattcctaaatatgctccctggagaggtgctgttggcttcccttgatgccgtcaatagagtttttgaagcagctgaagctgctgaaaaacaaaccttttctgccacctctcaagctgcaaccagaatggtttctaacaggtttggggaagaagcaggagaggctactgagcatgtgtttgcaactgcaggacatgctgttaacactgcttggaatgtctctaagatacggaaggccatcaatccagcctcttcagcaaatgctgcaggagcactgagaaattctgccaaaaatagaaatgttatatattaaattcctatcatgtactgctttatgtttgacaatggtgaaggcataaaattttgcctatacatattgcaatatcattttggttgttatatgtaagtattaatgtgtgtattggtcatcccaaagcagaccttagaagaaacaaactataaaaagtgtccacatgaaaaagctcctaatgtaagtaagatagcattattatgctttcccnnnnnnnnnnnnnnnnnnnnnccnaaaa

SEQ ID NO: 69516 - DNA, 486 bp, Glycine max
  Clone ID: PAT_MRT3847_33785C.1
ccctcgcgtccgggccagcacctccagaattaagaggaagaagatgatgaagaggatgaagaaaggaaaagataagtatcgaaaattctcattgcctgcttgtttattacatagctttatttatagtgcttgctaggctgccccctgaggatagacaacactaaggcaagcgaggacccccaagctttgtccatttcttcacacgtagtcactgagggaataagtatattttgtccagatgcgtcattccttgtcaaaatggataaagtcaaaggaaaaccgcaaagtttggtattctctcatgggagggagaagagagagcataatctgcgtggctgttacgtccgcgaaaagctcaaactggttaaaaaagaaaaaaaagctgaagatagtgcttggaaaggaaaaggaaggagagcaatgtggcttcaaaagaaccattgggacaagtaggatggggtgaaaggaatagtggcagcggcaata

SEQ ID NO: 69517 - DNA, 229 bp, Glycine max
  Clone ID: PAT_MRT3847_33786C.1
attcactctagcttccaagaaaacatgtaattttatttcctatctacaacaacacttttgtcttattaacaacaggcacctcggacttcatatataaacatttttcttaataccaaatttatattttcataattgaatatacttccaccttacaatcctacttaaaatatgggattattacattatcaatattcattatacattgtctattcttccttcttttcctaca

SEQ ID NO: 69518 - DNA, 937 bp, Glycine max
  Clone ID: PAT_MRT3847_33787C.1
agtgggtaaagggtgtggatttgttcaatttgcagacagaaagaatgctgaggaagcaattcacgcattgaatgggacagtaattggaaagcagacagtgcgactttcttggggtcgcagtccaggaaataagcattggagatctgattccaatggaggctattttggtggtcagagttatggaggccatggatttgctgtgagacagaatcaggatatagccatgcaacctgcaactgcaattcaaggggcttcctaacggggcctagtaaaactgtgtgttgaagtaggatggattttattgctctcctctaaactgtagtattattttaaatttgtagcttggttgtaaggtatcccaggcgtgtcttaagattgtattaaaatgtctgaaattttggattgaacccgattatatattatgactcaggtatttttttttaaaccctcaaaacatattggtagcagacagctaagattattttaaaaaaaaaaaaaaaaaaaaaaaaaaaaaaaaaaaaaaaaaaaaaaaaaaaaaaaaaaaaaaaaaaaaaaaaaaaaaaaaaaaaaaaaaaaaaaaaaaaaaaaaaaaaaaaaaaaaaaaaaaaaaaaaaaaaaaaaaaaaaaaaaagggggggcccttttaaagggcccaagttttttcccccggggttgggaaaataaatttttttttttggggccccaaaataaaatttccgggcccggttttaaaaacccggggggggggaaaacccgggggttccccaaataaaaacctttgagaaaaatcccctttttcccggggggggaaaaacaaaaaagcccccccccaattcccttttcaaaaattttggcccccccaaaaggggaaggggcccccccctttacgggcccattaaaccgggggggggggggggttccccccagggggaccctt

SEQ ID NO: 69519 - DNA, 171 bp, Glycine max
  Clone ID: PAT_MRT3847_33788C.1
cccaggcgtccggaaaagggaagtaactgattttgttgatatgaagggcgtggtggtaaagggtggggcaccgtcctatgctgagaggacactaatgcagggtagaggtgagatatatgctgcgcagtgcataaattgcttgaaatggttagagattgactcacaggaaga

SEQ ID NO: 69520 - DNA, 718 bp, Glycine max
  Clone ID: PAT_MRT3847_33789C.1
ccacgcgtccgatcactttctccttttcctcgtgttcacaaaatcacgctgcttaattattccttcaactaccatcatatcataccttctcaacagaaaaataaaaataaaaatgagatacatccttggagaacacaacattctgttcctcaaaagcttcgccttcacgatattattccttagttgcatagccattcggcttaacttgtgtctttccagcatcccttcttcactgaaatcaattccccttgaagggcatttaaaatttgatcaagttagcctaagccatgcagcaagggactttggcaacaggtaccaatataatccaatggcagtgctgcaaccagaatcagtttctgatattgtagccaccataaggcatatctggctgatgggtcctggctcccacctcaccattgcagcgaggggccacggccactcgctgcagggtcaggctcaagcccatggaggacttgtgatcaacatggaatcactcaaggtcccagaaatgcagatacatgttgatgagggaaacaagtctcctccatacgtggatgtctcaggtggcgagttgtggataaacatattgcatgagactctaagatacggcttggcgccaagatcgtggacagactacctgcatctcacagttggtggcactctctccaacgctggtgtcagtggtcagacatttatgcatggggcccagataagtaat

SEQ ID NO: 69521 - DNA, 411 bp, Glycine max
  Clone ID: PAT_MRT3847_3378C.1
gattcaatgtaaaaattgaaagtggtgagtgtcgagtccactcgagcgccttagctagtctcaaacactgtcgtccctttacctctgttgcttgtgttatccctttagctctattgcttgtgtcatggtggtggtttcatcgtcatcgtggtccgttcatcaccgtagtgttgttagaaaccctcgtgttgctgtccacgtcgatctgtgaaccatactcctccaccactgtgttgagaaatgtgtcaacaacctcagtattgagttcattggagatctcacgtgccttgcccttaccctagaaccccccctgtgccttgcccttacctctcttgctcttccgttccctttacctctgttgtagttgtcgtcatggtgcttttatagtcagcgcttaacaacatggcggac

SEQ ID NO: 69522 - DNA, 228 bp, Glycine max
  Clone ID: PAT_MRT3847_33790C.1
gggtgtttttttttttttttttttttttttttttttttttttttttaccctgcccaggataaatgtaactgtttaaaaggaatatttgaattttctacgcaaaaaattcatcaaattgaacactggctttacaatattgtaaaaggcccaaacaacgcagaaggggggtcaaacaaacaaaattggccggtacaacttacaagggaccactcaattggccattttctc

SEQ ID NO: 69523 - DNA, 1202 bp, Glycine max
  unsure (1)..(1202): unsure at all n locations
  Clone ID: PAT_MRT3847_33791C.1
cggtccggattcccgggtcgacccacgcgtccgattaacaccaaaacccattccatttcgtcctaaacgtccggaaatttcggaccctaaccgcgtgtgtatttaaaatcctcaaaagcggggaaaggaagattggattctgggactttgacgttgtttcaattgtggtcgtgtcggtgcccgatctcaaacgacgatgtcatctttatatagaggagaatccaggaggtacaacaataaaccaagaggacgtcataatttgacaacgcagaagaagcaggagattaaggaagcctttgagttatttgatactgatggctcaggaactattagggcccttggatttgagatgacagaagagcaaattaataaaatgatagaagatgtggacaaggatggaagtggagcaattgattatgatgagattgagtacatgatgacagccaaaataggagaaagggacactaaagaggagctcatgaaagctttcaatattattgatcatgataaaaatggaaagatatctgcattagacatcaagcgcattgcaaaagagctaggacaaaatttcaccgacagagagattcaggagatggttgatgaagcagaccaagataatgatcgagaagttagtgcagaggagttcatcatcgtctgaatttcactcaagttattatcaataaaataaaatagcgaagatgtgtgaaagtggtagtagagtcacatgggaaggttgcagcgtcttgctcgatatcaacgatggtgaccgtctcgttttcgctcgtctctccccctctgcgaaattgaagattgggaataagaactgctctctgcaaccgttaatcggtcgtcccttcggtactgcttttcaagtcgatggaccttatctctctcccgcacaagggtgcctctctatttgcgatttagttaatggtaataatgctgaagaattaagagatgttcaagtaagtgtcaagtcgagggacaaagttgaggataattatcctgaagaagagagagatgttcaagcaaatgttgattcgagggacaatcgagagttggttgacaataatacggcacaaagactgactggtgaagatatagaagccatgcgaaaggcaggtgcgggaggtaatgaaataattgaagctctcattgccaatagccgtgacatttgaaaagaaaaacatatntctcacagg

SEQ ID NO: 69524 - DNA, 346 bp, Glycine max
  Clone ID: PAT_MRT3847_33792C.1
ccaaatcatcttcaaaggttgcaggatggtgcatttacctgaatgggaaggattggaatgggccatcagatggaaaatggaacctgggaacgtcagctaggatgaaggtagaaggagtgaaaatatggaatgcttgctcattatctaacttcatagcaaggaatccctggagcatatgtcttggggcatcgcccattatatcgagctttaaggactgacagagctccgaactttggatggtgaagcttgttttacctgctttacctaggatactggatcttaactgcagtagctacttccatagctttaaaaggaaaatccttgacaggcatgctgccagtcatac

SEQ ID NO: 69525 - DNA, 738 bp, Glycine max
  Clone ID: PAT_MRT3847_33793C.1
aagccaaaacccattcaatttcattttaaacggaaagaaatttcggaccctaaccgcgtgtgtatttaaaatcctcaaaagcggggaaaggaagattggattctgggactttgacgttgtttcaattgtggtcgtgtcggtgcccgatctcaaacgacgatgtcatctttatatagaggagaatccaggaggtacaacaataaaccaagaggacgtcataatttgacaacgcagaagaagcaggagattaaggaagcctttgagttatttgatactgatggctcaggaactattgatgccaaagagctgaatgttgccatgagggcccttggatttgaaatgacagaagagctcattaatcaaatgaaagcagatttggacaaggatggaagtggagcaattgattatgaagaatttgagtacatgatgacaaccaaaataggagagcgggacagtaaagagggaaagatatctgcatcagacatcaagtgcattgcgaaagagccaggtcaaaatttcactaacagagacattcaggagatggttgacgaagcagaccaagatagtaagttattccaatcttatccttgtcaacattctaattttacagcaaaacttttacttctaatactgtggatttttattctgaggtttactgggtgtggatgcatgggagtgatgggaccatggacttcagattttgctgacataatgtgtgtatataaaaaaaatactatc

SEQ ID NO: 69526 - DNA, 391 bp, Glycine max
  Clone ID: PAT_MRT3847_33794C.1
gtatgaactaaaggtatatcgcatatcttctatggaccgacagtgcccgtctttgctgctaccctttgttcaacaggtggtgggttatccttttgcgggattgtatgcccttatcagctatttcgctgatccttcggcctgggccgacctcaaccatctcatatcaaagcttctggcatacatttcttcagctccacatgtccatacctacctaggacatgcgcagagagtcagactcatcgctccatcttagaggatcactattacctggacccctggaatagtgcaatacatgaatgggcaacatgatgttgagcatgccgtgctaaattcatgccttcgacactcaatggaatctatttttacaccaggacgatcgatttcactagct

SEQ ID NO: 69527 - DNA, 269 bp, Glycine max
  Clone ID: PAT_MRT3847_33795C.1
ccaagttgtaaatgggatctactttcgactcatcgtcgccgccggcgatgatcagtcctcctccaacaattaccaagccattgtctggaatttgccgtggacggaaaattacatgaaccttatttcctttatccctgttcatgatgcacctcctagttactattaataataatgtatgttcctgtcctatactatgtattaattagcaatttggacccaataaaagtttatgctaaggtacacaaaacaaaaacaaccaccataagaaa

SEQ ID NO: 69528 - DNA, 541 bp, Glycine max
  Clone ID: PAT_MRT3847_33796C.1
tctacaacatcttgacctcgttcggcgccgttgctcgacaggtccatcaaaaggtcatctcttcggattacaccgccttgaaatcatccggcagtccaacgcagttcccgtccttgtcggtgaacttttcgcggtcataccggacttgaacgagctttacattcccaccgcagacctacaaggccgagtcccagctcgacctctccaaacgaggccctcccgtttcggctcgggcacactgcaggacaggttcaacgtccgatctccccttttatctcgtcagatctccaatctttccctcgaattgcacaatggccgttgcacctatccctcccgtgccccggtggaggaagcgacaagaggcatcttcagcagtcgcagcatcttccgctcccgccgccgcttcgtctgaagcgcccgtttcgagcgctgcccctcagtcgtcggctgcccccgctttatctgaggccccaacatccagtgctgcgcctcagagctcgcaagcggctcagagctctgctgcaccgccgacgagcacgac

SEQ ID NO: 69529 - DNA, 798 bp, Glycine max
  Clone ID: PAT_MRT3847_33797C.1
gcgagaagacgacagaagggtacggctgcgagaagacgacagaagggtacggctgcgagaagacgacagaagggtacggctgcgagaagacgacagaaggggaataatagtcccttttctgaaattctcctaactctctctctctctcaacaatggctcgtacttttgttcttatgttggttgctgctgctgcattgttgttgagctccacgatggctcaatctccagcttcttcgccggctttatcaccgaccaacacgccggtggccactccaccgaggagggcgttgtctccgtctcctgttcctgctgcggtgccaccgtcgtcttctcctccggctccacctacttcttctccttcggagcccccaattgcagctgctactccgaacatccctccctcgaccatctcgactccaccatctgaagcaccaggaccagctgcaaacggtgccgttttcaacagagttggcggatctgctctcattctaatcatcgcttcggccatgctcgtatagaacaaattctgtgggattattcatgaatacttgagttttttgaactccagtacttttttttcctggtgtcgttgaagacgattcatttattttaattattttatttatttattcattcatatgattgatgcatacacacatatgtataatctctttgcgattataacatatatgatagatgtgcattagcatttgtcatttgtaactatttaattaattaattaattgctcgtattttaatacgatttcgattagaaaaaaaaaaaaaggctaaaagccg

SEQ ID NO: 69530 - DNA, 321 bp, Glycine max
  Clone ID: PAT_MRT3847_33798C.1
ggctcgagcaatgagcaagatatgactatgactttttatttgactggaccattctaaaatatcaggaggcgcatcagacaaagaaacaaaatcaatcatcttcttcaacatgccgtgcctaacaacatatagccggtcgctgtggaaatgcataaaggaggaaatgaggcagtgcatggtactggcacggaactggtgctcaacttcatgaggctgggtggactaagagatctttataagccaactaatgtggataatttgtaagccacaaattatattgggatatacgggaggagcgatagaacatgtaccttctaagcc

SEQ ID NO: 69531 - DNA, 196 bp, Glycine max
  Clone ID: PAT_MRT3847_33799C.1
tggagctggcaaggctgctggaaaagtgcgtcctgcgttgaatggaaacttgactggtatggcattccgcgttcccactgtggatgtctatggtggggacctcccagcgaggctggagaaggaagcctcctactatgaaattaaaaatgctatcaaggaggaatcagagggcaagtagaagggaatgcttggttac

SEQ ID NO: 69532 - DNA, 561 bp, Glycine max
  Clone ID: PAT_MRT3847_3379C.1
ggctcgagaaaaacatgaagaactgaatttatattttcatgacggcatgagaattaaagatttaattaaattaataattcacaactgtattctatcctaaatgagcaaagaaattcatgatttgatcaaagctccaccttcataggttaatagcgtgtttgaatttctatttatacaactcacgtgaatcacaaatataacttttaattgcttttagtctatcttaatgtgaaaatttaaattacaaattttaatctaaaaccacactaatttcttgtgttaggtcgtagataaatatcataattaattgtgcattccttcatttttcaatttcaacttaatttatcacgtgattggtcctgtgcaccacagcactgatgtcttgtccgtagtcaagtcatgaatttatatcaatatagaaattttttgtttttcttaagatcaccatgttcgtttgatttttattgaaaaacatattcggctaggcaatatatggctcactagtccccaccttaccgactacaaaacagtggctacatgatggtattaaaccatgatttt

SEQ ID NO: 69533 - DNA, 320 bp, Glycine max
  Clone ID: PAT_MRT3847_337C.1
agaaacagagtttggttcctgtcacattctactttttgttcatcctcatctcttacattttttcatcggcagaagcgggatcaactcggaataagactttggaagaattgcggacgacctacctacaccgacgaaagcggtggagcttattaagaggtacgggctgaaccgagtgaagctgtacgacaccgactccaccgtggttaaccgcgctttgccaactcaggaaagacggtggtggttgccatgccagaagaacttctttttcaactccgtcgcggaacaggtcttgaacgacacgtgggttcaagccaacatat

SEQ ID NO: 69534 - DNA, 202 bp, Glycine max
  Clone ID: PAT_MRT3847_33800C.1
aaagttcaaagagctaaattgcttgtcctaatcctggtcacaaaccactacttataattggggaaatgaaaacgacttaaacggggtccaagaaatataaaaagttccactcatcttagaacatttcccagtatctgggataaagaaaggtcaaaagcttttaggggacaaaatgaagcctgatgacatcttacaacaggaa

SEQ ID NO: 69535 - DNA, 161 bp, Glycine max
  Clone ID: PAT_MRT3847_33801C.1
gtcattgcttacttatgcctaattcaccaaatcccgtttgtattcgtacgtcacggaatggttgttccacattagctaggatttgaaaacttgctatgggaaaactgaacttcttaaaaaaaataaaataataaaaactagcaagaaataaaatgaccatt

SEQ ID NO: 69536 - DNA, 204 bp, Glycine max
  Clone ID: PAT_MRT3847_33802C.1
aacaaaaacattttcatatatgtcaactgctggttgttggcgttatacaaaaaacttacgcccaatgactttgaaatcgctaaatagaccaatgagggcatcatctgtgactagggtgccagccaatccttgagctaaacaaagattgaacttttgccgctatatcagtgcaggctatctactggtgatacacatcaatatcac

SEQ ID NO: 69537 - DNA, 333 bp, Glycine max
  unsure (1)..(333): unsure at all n locations
  Clone ID: PAT_MRT3847_33803C.1
gncatctacaactagnaacaaaganccaacaagcagagcaancncncncncngncncccaagcaaaacagacangggnnngaaggaggannnngagcagnangcngagaaagcaaagaccccgccaccgacncaancaaacgaagacccgcnnanccnnnangganngnacaagcaggccaccgnnggaccngncaacanccagccgccgggaaggggcaacangagggacagagcnaaangggangcanggaaggcngnngaagggaaanccaaggacgaagcaangagggannacancacnaaggggaaacagcngcnggaagcagccggc

SEQ ID NO: 69538 - DNA, 339 bp, Glycine max
  Clone ID: PAT_MRT3847_33804C.1
gaatcccgggtcggccccacccgccggtctctctctgtggaatcgcttcacattactgctgattagcagccgccattaccatttggaggtctgtgacacttctcctgcttctaggctcagcccttcttaatgctgcaactaaacacgccaacgtgactacatagagtcctgtattgcctttcttattggctcgtcctaacacaggactttcttttattgtacaacaaccattgctctggtattgcaaatgatctttcaggttgaataagatctatggtgtgctaagagtgatggtgctagagaattaataacttggacccaggacaaagggtagagaaa

SEQ ID NO: 69539 - DNA, 488 bp, Glycine max
  Clone ID: PAT_MRT3847_33805C.1
cgatctatagggatgcctttttatttttgccataacctgctgaaatgcaacaaatatgagggcttttgcacgcaggagaccaaatgccttaaccccccagttgtgggagtgctactattgctaacctacgataaaagggctcaccaaatctttcactataggggcactgattgctatctgggccctccaaagcctcatgcctttctgtcttgcagagctctaatgtcaacctctgtcttggggaacttcttctatgcatgcactaacaccctggtgtaagtgcggcttcctgctaataacaacactttgtctgtgatgatctgtttcttcttgatgatggatggcaatgaaaactcagcgcggttgagcatcttgtacaactatggagaattttaactgaccctaatgtctctatatgtaattagtgcctcgcctgcataaatgaacaaaaccccctcacgacctgtatgctacccagaacacccaca

SEQ ID NO: 69540 - DNA, 423 bp, Glycine max
  Clone ID: PAT_MRT3847_33806C.1
gtcaaagaaactctttgttcttaagaggggtgtttgcggggtcccaacccacacttggggggggcacacggttaagtaaaaagccaattctgccgccgttggtcaggaggcgggttccgggagcaacagtcgcgagatgttggccggatatttcaaactttgtacgaaaaacaagctcccttttattgacgaccacgtagtccatataaaataccaacattgattgaaaccaaaatcctttgttgaacccttccgcaaaaattacttacaacccatgggcaactcttggtgacccaggccccggtaggaaaaacccattcattggtctagatgactcccaaaggaacattaagacttatgtggggaggggcaacctaccatgtgtaggatccccggcgagggggccaacaaccatgggtttgg

SEQ ID NO: 69541 - DNA, 296 bp, Glycine max
  unsure (1)..(296): unsure at all n locations
  Clone ID: PAT_MRT3847_33807C.1
ggggggttgcaatttaactgtccggccaaaaaatccatttttataagaaaacaaattccttcacatattctagtccattagcctattatgggctgaaagtgttggggagaaaaagggtggggaagnactagatagtattcttgtgtaagataagaataccaacaaatgagctgttatgaggaaaaagcacttcagttaaaacacaaaatacgaacagccaattttttgagttgttaccatttagggacgtgaggtcttcccaaacttttccttcaaacgggagatgagcttgaact

SEQ ID NO: 69542 - DNA, 406 bp, Glycine max
  Clone ID: PAT_MRT3847_33808C.1
accttctggggaaataggaaaagagagagaggactgatcttataagcgttgaagcgttcatctccgtttagattctgcagtttctgtttccgattctatgtctcgtcgagtgcgcccgcctagagaatactggtgcttgaacgagaaattaattgttaatgccgaaggtgaccactgtggttggcgggagagcgatgccacaatctatttccgccatgcaccaccaccggcagagctacgataacttcatgtccgacgctcacggaaggaggctacactcttcggattactcgcaggagctcaggactcgctcttcgagcttgatgataaacgacgttgatcgcgttgtaaccattggctagcttgatctgcatctctttcgattccgagcttttacctgagggac

SEQ ID NO: 69543 - DNA, 1012 bp, Glycine max
  unsure (1)..(1012): unsure at all n locations
  Clone ID: PAT_MRT3847_33809C.1
cttggtaacagtttgcagtacgttgagcataccagnagtnnctgagatggaaaacgggngatcatngttccaggaaatttcaaaggggaaatatgattgtcttttatttgatcttgatgacacccttttcctttgatttcgtacttctgagcaagtgaaaaaaaatattcaggagtacatgcttcaaaagctttggatatcagaggctaaagttcctgagttgtgcttttcattatacaagacttacgggacaaccatggccggtctcaaggctattggctatgactttgactatgatgactttcatggctttgttcatgggagattgccatatgatatgctgaaacctgaccctgttctcaggggaattttgctaagcttgcctgttcgaaaagttgtttttacaaactctgacaaggctcatgcaagcagagtgcttcataggcttggattggaggattgcttcgaaagagttataagctttgagacccttaattcctccaatgaagatggcagtgaatataaacaaagttccacagagatttttgatttttatgagtacattggcaggcctgattctgatatcgtgcttccaaggaccccggttgtgtgcaaaccctttcaagatgcatatgaaaaggttttcaatatggcagatattgaccctcaaagaacattattctttgatgacagtctccgcaatttacaaacgggaaaatccttgggcctccacactgtcttggtgggtacatccgttcgaactacgggagtggatcatgccttagagagcatccataatatgaaggaggcatttccagaactatgggaagccaatgaaaagcctgaaagtgtcgagtgttctagaaaggtttcaattgaaacatcagtaatagcctaacttattagtccaagttctgagacatttggtgtctagtactgtattggcaaatgatgttgattaatgcagttggaagaatttggtatattcataaataagtttatattcgccaaa

SEQ ID NO: 69544 - DNA, 310 bp, Glycine max
  Clone ID: PAT_MRT3847_3380C.1
cttagatatataccgatctagtttgagaatcacaacaatacaatgcaactaaagctcgtagccttaaccttgtcgatattttggccatggtggagctttgagggtgctgtaggagaccctcaactctttttcctcacatttgaatgcagcacagtctcggcacgcgacttgtccaacttgcatcaaaatcgaaacgcaagtttcgctgccctgagatcgcaggttagcaaccaaagcaagcacttttccgcggctcaatcaaccagtggatcagaccctgtctatgcaacgtttcaatgcaggaactacc

SEQ ID NO: 69545 - DNA, 202 bp, Glycine max
  Clone ID: PAT_MRT3847_33810C.1
cgccagaacccaaaccgctctcagtgagaagggaaggacaatcacggaacttacctcagtggctcataacaggttcgagattccccagaacagtgctgaactttatgctgaaaaggtcaacaatacgggtctttgcgctataacacacgctgagactctccgctaccagctccttgctggcctagctgtgcgcagggcttgc

SEQ ID NO: 69546 - DNA, 170 bp, Glycine max
  Clone ID: PAT_MRT3847_33811C.1
gagacctcaggtcacgcggggctacccgctgagtttaagcagatcaatacgcggaggagtcctgctgcatactacatgagatcattcgagcggccgctctataggatccaggggtatctagtcctgcatccgacgtcctatctctctctaagtgtcatccaatctcattt

SEQ ID NO: 69547 - DNA, 518 bp, Glycine max
  Clone ID: PAT_MRT3847_33812C.1
ggctcgagtagcagctcacgtgaaaaaacaacgactggtcacgtgccccgtgtgcaacgctaactggaaacaactgcttcaaaacgcagacgaaaacaaaccgcacgcagaactcaaaacgacgaagtcgttcaagccccacaactacaacgacgacgagcctctcatgtcgcccacttcagtctcgcgtttcaaccccattcccgaatccaacgagaacgaagaagaagaagacgaagaagaacaaaacgatgaacaaataaagttcaatctctcatcatcattggtcaagaccagaaacatcgaagcattcttctcaccggaggctgcgattgtggcgtccaattggagctccgagacgtacgttacggtgttgaatgtgaaagttcagccgcgtaacgcggcggcgaatcggccgccggtggatctcgtcatggtgatcgacgtccgaggtagtgtcaccggtgaagagctttggatgctgaaacgttcgatgcaggttgttatctcgtcgctcg

SEQ ID NO: 69548 - DNA, 254 bp, Glycine max
  unsure (1)..(254): unsure at all n locations
  Clone ID: PAT_MRT3847_33813C.1
ggacgacccaggcgtncgaaaaaagaccacagaagcaaacgagtgaaagcaccacacggggacgaagaggaacaacgggggaagggaaaggggggagtagctgagcgnacaatgaccctgttcaaaaacaggatggtatatccaatatcaagactgcccacacccagggaaacacattatgagatccgcggaagtctatggaggcaaccgtaatgaactttcggatgtgaaagctttaaagcacgctcacatag

SEQ ID NO: 69549 - DNA, 242 bp, Glycine max
  Clone ID: PAT_MRT3847_33814C.1
ctctaacctctcttccaaagatctttctttcagcactttggtggacaataaaaaaacagtgccttgggccgttttttgctgatcgtgccccatattgtagacaaacctatggcggccacttaagcataaagggctttgaaaagcgactttacttgcactcacgttgagaagctttctcttgattcatatgttccgcgcctatatcaaagatgcctgaatgtaaaagagaaaccagtgtttga

SEQ ID NO: 69550 - DNA, 848 bp, Glycine max
  unsure (1)..(848): unsure at all n locations
  Clone ID: PAT_MRT3847_33815C.1
cacgcgaccggaagaaggaaacttggaatttggaacttgcaagcacagccacagcccatggagaacattccagagtcttcatcgagagggacgaaacgccggcgagacgaagattccgatgccggaaacacctcctcactcgaagacgatcttacattcaccgacacgctggtcgcgcttcgaatcatgcgagctcagtttccccacgttcacaagtggtgtggtgatgcttgtttccagagttcggttgagccttttatattgaagtcacagttgtacagtattgtgaaggacagaacacaagtggatagggaattagagtctctaaggagggacaaagtactgcgtgttttcaaattaaatactggacaagatgatcatgccataatgtttttggatgactacctaaaccagatagatcatgttgtgaaaagaatggaagaaaaaaaaataggggaatgtgaggcttttgggtggttcaagacacatgttctagattcaaagctggaacctggcatcaaccatcaggagctttgctcactcttgtcacttggaggaaaggtgaaggacagtcatatctcccttctaattaatgctggcatccttactagacaacttattgatccaaatatgtattgggtttgcaattccaaatatcggctcacttcttaagggtcttgttcagggaagaaaggaaattatctctcttctcagccgccatagatataaggagnatgatgttagcctctttagaaaagaagcgtcttcgaatgtctncacttgatataagatttcttcttcgtgatttggatgggttctggtcatctcaaactgaccagactccaact

SEQ ID NO: 69551 - DNA, 426 bp, Glycine max
  unsure (1)..(426): unsure at all n locations
  Clone ID: PAT_MRT3847_33816C.1
agngaattcggcagcgagtcacaacactacgtccgagtggaaatccccaatgcccaatacanctcccaacttcacaagagccatgtactccaggctccttgtgtgtcgacgccttcccactgggaggttgaagcagagcacacaagcttgccctccgtgcgatagacgcaatccgcagttgaagaaaatccctaaccgcagggagganntgatgctctnccgttgtcgaggaccgtgaggggatgattgacaaaggacccgacgacgatgnatggacgacggacgacgatgnactgaagatgacacaggaagatgatgnctctaggtggtgnctgagggttcaaagcagcagcagaagtgagaangaagagtncgaaaagcaatgttgaagtctgggactaaaacctgtcanccggtgttagtagg

SEQ ID NO: 69552 - DNA, 415 bp, Glycine max
  Clone ID: PAT_MRT3847_33817C.1
cccacgcgtccgcccacgcgtccgcttgcaagcacagccacagcccatggagaacattccagagtcttcatcgagagggacgaaacgccggcgagacgaagattccgatgccggaaacacctcctcactcgaagacgatcttacattcaccgacacgctggtcgcgcttcgaatcatgcgagctcagtttccccacgttcacaagagttcggttgagccttttatattgaagtcacagttgtacagtattgtgaaggacagaacacaagtggatagggaattagagtctctaaggagggacaaagtactgcgtgttttcaaatttacttccattgttgattggtatgatgcattgtttacactagtatttttcagagaaaacattaaagactaaaaaaaaaaaaaaaaaagagaa

SEQ ID NO: 69553 - DNA, 242 bp, Glycine max
  Clone ID: PAT_MRT3847_33818C.1
ttttcattttctcaaacacacattaattgtgttatgaaaagcaaaataagtaaatcggggaatagacaaagaaacataatccctattcctatatctaagacgactttctccattcttgatacccaagaagacagctgaaaaatattaaacacctcagaagcacacgggaatattaacaccgagtgtccgaaagcagggtatctatttaacaatcatttcactaaaggtattgaaagcgagat

SEQ ID NO: 69554 - DNA, 246 bp, Glycine max
  Clone ID: PAT_MRT3847_33819C.1
atgggcaaccttgccatttctaacttggagggtggaatgcaccagtcataacaaacagagacgcacagctgggtagaatacaattaaatggcccccgcaaggcgttcgttccaacgctggattcagttgaagactcactgttaaacctggacacaagggatccatatatctcaagttcgttctaaagggattacaaccatacctaaactgtatgtgaagcgttctatcacccttatatatcatatg

SEQ ID NO: 69555 - DNA, 409 bp, Glycine max
  Clone ID: PAT_MRT3847_3381C.1
gacccacgcgtcagcccacgcgtccgtctcattgctcagccatcacagcctcgtcacaatttctaacgtcctctgcgctgctccatctaatcacagatcgcagagatcaactgcatgtactgcaaggttgtgaaagctagatagtaatgatatagctgagacgaatatcgagacacataccatagtactactacgcttttgtagtatagatatcatctaatatcgtatggtttcacgatttaataaatctcagaatctgccttggtgtgtgatggatcatagatacagataaggagatagatcggatcagatgtcagcatcagctaattcaccgtgcgcggcgtgcaagtttctgatgctaaagtgcatccatgagtgcgtgtgcgagccgtactttccgcaggatgat

SEQ ID NO: 69556 - DNA, 347 bp, Glycine max
  unsure (1)..(347): unsure at all n locations
  Clone ID: PAT_MRT3847_33820C.1
gggcgccgggaaatccaagtttacggccccataatttcaaagncaaacctcttttatagtgtcccctaaaataaatccattggcccccgttttaccacgacaagaatgaaaaaaccctgctgtcacccaatttaatcgcctaaacaaaaatgcccttttccccagctggcgaaataaaaaaaaggtccgccacacactcccttaccaacagtttcccaacctgaagggccaaagggcccccccctgtagaggtccattaagcccatccggtttgggggatacccccaatggaaccgttacatttgccaaaaccgaaacgcccaggcttttacatttcttcccttttt

SEQ ID NO: 69557 - DNA, 985 bp, Glycine max
  Clone ID: PAT_MRT3847_33821C.1
gttagctttagtttctcattatcatcagccatgtccaacaatctaaggtctccgagttactcttccctaacccgttcctacatggcaacaacaggctcagaaccttggtccttttttctcatcttcgttttcctgtgacctttttcttcctttcaaacacacatacgaaagtcctccttttttcttgtttccttttgtctttctttctttcttggtggcagaaaaaaatgggtattggagagaagagtccaagcaagagtttcaatctgcaccatcaccatcatcgtgaagggaagaataagcaacaagagttcagaggggtcccaaaagggtgcatggcaattaaggttggtcaaggagaagagcaacaaaggttcgtagtgcctgtgatttacatcaaccaccctctcttcatgcagcttctcaaagaggcagaggaagagtatggctttgatcaaaagggcaccatcaccatcccttgccatgttgaggaattcagaaacgttcgtggcttgattgatagggacaagtcccttcatcatcatcaccaccaccatgttgggtgttttggcttctgaattctggtcaaaagtccgaggttttagaaaacgatccgcgacaacatttaggttttcggagtcttgttcacaatttcccatgatattaagaatcccgatgaaactgcgaccgtaatttaaaatctgggttgaaaccatgaaagaaagaattgatctttggctagaattcaccacccctttagttttttttaaggattttctcatgtaaattcctagtttttagactctttttttttaaaatttttttcttttagtgtttggtttatgtgaaaggaaaaagccttaggtaggtgatggcgaggacaactgaacagaatgttgcttcttcttcttccaattgtacttactttttttttctctctaaaaatctggaatcgtaatggaaaaaaaatatgcttttcttttct

SEQ ID NO: 69558 - DNA, 158 bp, Glycine max
  Clone ID: PAT_MRT3847_33822C.1
ctgaattgtgagaccttacctgcctaaacataaggccacaactgcatcttaggagggagcttgcttgaggctggaagtgaggcaaacgaaacataatccgtgaaacaaggctactatatggcatgagaagatagaggagacctgttcaaagatttaat

SEQ ID NO: 69559 - DNA, 360 bp, Glycine max
  Clone ID: PAT_MRT3847_33823C.1
taaagaatgcaatcacaacaaatgattcataaacccttggtgtcattctgcaagcaaaagataaattttagattatttacttataatatttttaaagtctgaaaaaacttgttctatgtatggtaaggtattaatccatcccttgcataaaatatgcttgattctatgttcttaatattatttcataaattttgttttcattttggaaggtcttttaaaaaaaaaaaaaagagcctgtctttctaaaagatccaatcttacctacccctgcattcccaactcatatactttttctataaatttatgatttttttctcaaaaattcttcccctttttaaaaaaaaaaaaatttaaatttac

SEQ ID NO: 69560 - DNA, 553 bp, Glycine max
  unsure (1)..(553): unsure at all n locations
  Clone ID: PAT_MRT3847_33824C.1
aaactataagcccgatattttattaggtaacacattgtttacttacatgcagtcaactgtgtacaagaaccggaaggaaagattagtaaattgtgccagagcaaatgtaacagttcttttcacgggctccaccaggattcttcattaaaatgtttccaaatccttgaagttcctatcgtaaaaattaaacttttcatgtccactaagacaatatgtcctatatgcaccttgatctgggccattttgaatttcaaacatcaaaataactattgggcttagttgtcactatcttctgatatgtcaaacaagaactttgaaagtgatgcaattcggggaagttgaagaagcaactctcctaatgagtctttcctcggcatgcctagtgtttgcttgccccgagaaacatctctgaattcctcttcagaagccttgacatccattttaattttgttgttctgcattgattcaagatcatggctaagttgaatactttntccatcagcaggtccttcatcagcactttccttgtcatgtgaactctgcaatgctgcag

SEQ ID NO: 69561 - DNA, 275 bp, Glycine max
  Clone ID: PAT_MRT3847_33825C.1
ccgcatgcgcgccacgcgtaacgctattaattaaagataggagcatggaacaacacaaatcgacaacccaagctatcaatcccaatccatacctaaccatgatactccctcgaacagcaaacttacaaggacaggcttatcgagctacacgcggacaataaaacatattaaacggacattgctgatctaaagcaccaacgacaggcgagtgatacatcaacatcctatgaatggagctgaaaagctcaagaaagagtatcttgagaagctgaact

SEQ ID NO: 69562 - DNA, 236 bp, Glycine max
  Clone ID: PAT_MRT3847_33826C.1
atttcactcagccgctgcgaggcgaacagagagacccgaagccagatttcaagatgaagttcaacattgcgaatcccaccactggttgtcagaagaagctggagatcggtcagcacggtgaactacgaccattttgggacaagaggatctcacaagatgttgttggtgatgctctgggtgaagaatccaaaggctatgtctctaaaatactgaacgttgccacaagcaacgatttc

SEQ ID NO: 69563 - DNA, 250 bp, Glycine max
  Clone ID: PAT_MRT3847_33827C.1
ggctcttctttgcttggtgaggtccctttctcttctcttcactcttggtcttgccagataaagccgtgccagaccctaacatgtttggcttgctgtgtggtcacacactcccattccaagttcattgcgaaatctcctcaagccagtcccttccggtgttgaattcgctgatcacccttttcaaattgctgcaccactgtacccgactacctttttttctaatgaagaccttcttccatgcccaacaatg

SEQ ID NO: 69564 - DNA, 437 bp, Glycine max
  Clone ID: PAT_MRT3847_33828C.1
tcatcttcacatggatttccctccaggccaggccacttcttttggagtatttatttatttaaattagttaaatttaaaaggttatatgaactattcgcattcgcagcatattactagagttaagtctaaaaaaattgatttattatatttgaacatatttatttataaactaaagcttaaataaacaatttaaacgagatcagatgagatagattaatctttagtgggaagggaatgagttcacgggcagccagagagagtgagacgggagatttggtttggttgtgacatgcgtcaggtgtttctgtacatatatgttttgttgacccttgtgttgtgtcgtgttgtcttgtctgttttctactactatcatggtaattgctagctccgattccgattctctccctccctctcgctctcccctatttccaatgtct

SEQ ID NO: 69565 - DNA, 493 bp, Glycine max
  Clone ID: PAT_MRT3847_33829C.1
gggaaggtaactttattatacaactcttctatttaggttgtgcttcaatataaaatcaacattatttattaacattaatggctcttaacaatcatggtaatataattagtggtgctcaatatcagtttaattttaatttttttatccttcgggagaatcttgtttctttctcctatgtgagagtatcatttttaggattttaggtgacatattgttgctagggtttgtgtacaagtactgtggaaacacatatgaagggtttattgttgatgaacaaggaggaggattggctagtttttgatgtagagaaaaataatgacaacaatgttaaccttgaactctatttggtgggaaattttttgacaaaagaagtccttagggtttcgataatgaaagagagaatgtttagtatatggagaccgaaaagaggtgtatcaaggaaaatgctacatggacattcctattttaattttttcactaactggacttgatg

SEQ ID NO: 69566 - DNA, 421 bp, Glycine max
  Clone ID: PAT_MRT3847_3382C.1
attgttatttagattttatttattggtgcttagggtttattgtttgttatactgtcattttgtcaaattttgttatctgaagtaagaaatattatcttattcttatcatctaaaacttctaagttctcaatggcttatgttgttcgtgtaaaaactttagtattctcaaccaataaaaaataaccataaacataatttttaagataattattataaatatcaacaaatttatgttatacgatgatttgtgattaggtcatttaaactattttacattgagaatatataacctattctcaatttcttaatccaaatgcaatcctttgttctgactaaaatttaactctatgttttggtccgagaattgtgagttattcatgaatgttctaggcttctagagaaactgttgaatgtaaaatac

SEQ ID NO: 69567 - DNA, 792 bp, Glycine max
  Clone ID: PAT_MRT3847_33830C.1
acgcggggaactcacaagcaaagcataaacattactgatagttctcatccacaacacaatgatttccaatcccatgttaatgttactagttgtggtactactggtggttggttttgcaaagtcagatttaagtaaggacagagaagaatgtgcagacaaactaattgacctagctagctgtgttccttacgttggtggtgaagccaaaacccccaccatagattgctgcactggtctcaaagcggttcttgaccggagcaagaaatgcctctgcatcctcatcaaagatcgcgacgaccccaatcttggcatcaagatcaatgctactctcgctattcagctaccctctgcttgccactcacctgctaatattactcagtgtgtagatcttttgcatttagcacctaactctcctgatgctaaggtgtttgagggattccaaaaatctgccaaaacaaacagctccaccccagtttcagtttccagtggtgctgagaagggatcaagctcaagtgctcaggaaaagagtggtgctgtctccacaattacaaaggcacaccacctgttttactctatcttaccattaccattattatttcttgtttgaaccaccatcaagcttgcttgcttcatctatttctagctattattgtgtgctaaactgaaataaaatctatctatctatttgggtaatgggtagtaattatcaatatttcttcttgttggaaaaaaaaaaaaaaaaaaaaaaaaaaaaaaaaaaaaaaaaaaaaaaaaaaaaaaaaaaaaaaaaaa

SEQ ID NO: 69568 - DNA, 361 bp, Glycine max
  Clone ID: PAT_MRT3847_33831C.1
gaacaggaatgatgacacagtgaattcacttatggatacctgttagggcgacgatgacaaatcgagctgggccttctttcacgaacgcattgcccaagctcctgaacaagtgtcgaagtattataggaatactaatgccatcccattttggcctgtttctagtggtcgaccatccgatgctgatttacctaaatgccgatgctgaagtggaccaatgctctgtagaattgacattgtgccactactgctctattgctaaggcgttgacgacaaagtggactctctggattgagcttcaataatggttgttgcgtgtgatgccacttcgaaagcacgttggcctcacaagctagaatatgta

SEQ ID NO: 69569 - DNA, 154 bp, Glycine max
  Clone ID: PAT_MRT3847_33832C.1
tagatttggacaggctgatgtacttttatctgagttctttttatgcattgcccccaatactaccactgtctaaaggttctccgctaccacaacaaaaatgtgcggcttttgtgtaattgtgacagatatggagttcacttcctctttctgaaat

SEQ ID NO: 69570 - DNA, 301 bp, Glycine max
  unsure (1)..(301): unsure at all n locations
  Clone ID: PAT_MRT3847_33833C.1
cttcagaataatcagcatcgttgaaaagtggaaccgctcagaagaagctccccaggtttgaattacttaattggccatattatagtgtcatatgtagaacagttcattccaatggtcaatatttgtgaagtttatctcanattaaaagaaaattaattattttcaagttcaaacgtagtggacaaatctttttgctttctttcattcggtcaaattataatcatatgatcatatcatatatatactttggaaaaatatatccacaagcttcattaaacagttgaatgatttgagaactgta

SEQ ID NO: 69571 - DNA, 357 bp, Glycine max
  unsure (1)..(357): unsure at all n locations
  Clone ID: PAT_MRT3847_33834C.1
ccacgcgtccaaccacgcgtccgatccaggtatggcttctaaactcatcttgaacgaactcaaagatttncccgtggatccttctacctcatgcgttgcaaaccctatnnctgaagacatctttcacttgcaagccacaatcattggacctgctgatatcccatatacacgtggtgtttttctaatttcaattcattttcctcctgactatcccttcaagccaccaaaagatgcttttcttactaaagtgtttcacccaaacatcaacatcaatttcagtatatttctttacattctcaaggagcaattggaacccaaccctaaccatttccaacgtcctttttttcaaatttcctc

SEQ ID NO: 69572 - DNA, 217 bp, Glycine max
  Clone ID: PAT_MRT3847_33835C.1
gtacaatcagacagaacctcacgacaggattccgtttggtgttcgatagggcaaacaagaaaccagcgtgctcacgctcacattggcacgatctgaatctcggcaataggatgcccctttcttcaaatctgacttcctgaaacccattgcctactgatgagcatctaataacggacggtcatgcatgctatgaagctttagattcacgactcgtact

SEQ ID NO: 69573 - DNA, 426 bp, Glycine max
  Clone ID: PAT_MRT3847_33836C.1
cctcgtgccgaattcggcacgaggatcactcttgctggttgataccgccctgagtgatcaccattccctccaaatattgtcacgcgccgtgccccgcgcttcatgtgttaatgcattgcggcgtttacatattcccgcgtctctctctcacccctttcctgtgtggctcccccctccactactacgctgctctgccataggtcctgaagcttggaatgcttgctcgttgtagttgttagttgttggaaaccgtcaataaaatcccactgtgttgaggctgcatgtagggtgaaacatcttgcgcacgctgcggcgtgttgaaactcatcgcctgtgcttgcacgtctcacgctgcctaatgctgtgctgggtcgaacgctggaacaagtcactgtaacctccactgttcaaaaaaaaaaaaaaaaa

SEQ ID NO: 69574 - DNA, 285 bp, Glycine max
  Clone ID: PAT_MRT3847_33837C.1
ccttggttcctctaaacggccgcttggtttttttttttttttttttttttttgggcaaaagggtgttgttttttttgaacatggatggttttttattgactaacctttggtacctgattgtggcggcttgcggttagctgcgtttttcttactgcctgatagaagggggacgctttcgtatgtcccctgggggggcctggtcttgtcatggcacgccgaattcttctaaaatttagactgggcctttttgtaaaattcaaaaaagtcgttgtttacacttattgg

SEQ ID NO: 69575 - DNA, 436 bp, Glycine max
  Clone ID: PAT_MRT3847_33838C.1
tacggctgcgagaagacgacagaagggtacggctgcgagaagacgacagaagggggactccaaactgaacaataggagccagagattggaaaaggatgcacactgatagatatatcagagttacccattagagaccaaccaaacatcattcattttcatttcccttctcttttagctgccattaacgtattaaggaatcaggaatcattctagtatccatttctggactctaatacaagcaagaggaagaatatgacgagaaagaagatcccaatcaagaagatcgacaacataaacgcgaggcaggtaacattctcaaagaggagaaaaggtcttttcaagaaggctcaggagctgtcaactctctgtgatgctgagattgctctcatagtctttttcgccactggcaagctctttgagtacgctagttcaagca

SEQ ID NO: 69576 - DNA, 724 bp, Glycine max
  Clone ID: PAT_MRT3847_33839C.1
ccacgcgtccggtgtatcctaaaaagtttattgagatagaaattcgttttacaaaatgaagaaagtgtttgttgcaatttttcatctactagttgtatttgttctcacagccacagcttcagaaccagagccaccagttacaccttcaggaccaccaaaggcagggccaccaagagcaccaatttcaacttcggggccaccaaaggaagggcccccaagggtactgattacaacttcgaggtcaccaaaggcagggccaccaaggacactagttacagcttcagaaccagagccaccagttacaacttcaggaccaccaaaggcagggccaccaagagcaccaatttcaacttcgagaccaccaaaggaagggcccccaagggtaccgattacaacttcagggccaccaaaggcagggccaccaagggcaccagttacagcttcagaaccagagccaccaattacaccttcaggaccaccaaaggcagggcaaccaagagcaccaattacaacttcgggaccaccaaaggcagggccaccaagggcaccgattacaacttcagggccaccaaaggcagggccgccaagggcaccgattacaacttcagggccaccaagaacaccaattacaacttcaggatgaaaactttattaagctcatgattaaggcaaaggaggaaatagtataataaaaatgatgggtgctttgaagttgctttattcc

SEQ ID NO: 69577 - DNA, 234 bp, Glycine max
  Clone ID: PAT_MRT3847_3383C.1
ggctcgagattatctgctcacgaagagggcttccctttggcggtggtgcgttaagcccacgatcatatccaattctgtgtatagaacgggacgccagcgatgttatccagatatagaagagtttatgatttgcaattctctatatacagagacttgacctgttaagggttctgttgcatgacatgcatatagagtaatacctcagttactattccgcatgagtcgtgctgaaat

SEQ ID NO: 69578 - DNA, 466 bp, Glycine max
  Clone ID: PAT_MRT3847_33840C.1
ctcattcgttcacatcatcacctcaacactccaatcttgcatatcctttgctttcacaatgctccatcagttcacactcttcgctccgattttttccggcggaaacaacgccggccgttgctcgtttgccggaaattcgtccgtccgtgacgtgaggtcgttgaggtttatgaagcaagcatcgggaagacaatcgaacaatgaacatggtgtttttagcgagacaatggatcgtgccaagcatagggcaactactgcttatggtggtcgtgctcaagaaggtgttctcgaggaagaatcctccaaggtgatagagagcagaccatcatggaaagcttttccaggccagtcatttccattgggggtatcagaagttgacagtggcatcaattttgctattttttcacaaaatgcaactgctgtcacactttgtttagtccttcctgagaggtaaatttagatattc

SEQ ID NO: 69579 - DNA, 348 bp, Glycine max
  Clone ID: PAT_MRT3847_33841C.1
aaaaaaagggcaaggttatttttgtttcccttttaaaagtttttattggttccacccaaagggaaacaagggcctttgttattccctagggttccggtaaagaacttttggcaaattttaaccttgaaattggcccttttaaaaacccttattgggggccccggggaaaaattcccaatttttttacccccaaattccgaaaggggccctcccttgcttttggggggcttaaacaccttctttggaattaccgtttttgggggggggtttttaagtgtgggtaccagcttcccaaatgcctttttttaaaaggattttgaaacccccggggtttttttattaattaaa

SEQ ID NO: 69580 - DNA, 305 bp, Glycine max
  Clone ID: PAT_MRT3847_33842C.1
tgtgaagactcaaccgacgactctctctctctaactcgcattgtgttccgttgtgttctgtttcagatcgtggttcgtcacttcgttgttcgtgaagttggttcagattctaactgttctattccccttttaagagtcatgagcttgttctgaggtctgattagcttgctaattgggttggagaaatcattgagttaaaagagagaaatgggagctattgctggagaagagctgctgacatgggacaagatgcaaggagtgagcagtcgcgaagagaagattctggtgtcaataccactgacgcc

SEQ ID NO: 69581 - DNA, 1826 bp, Glycine max
  Clone ID: PAT_MRT3847_33843C.1
gcagttctataaagttatcagagaattgattgttagactaacctttgatcacacatcagaattggtcttatttttttagtcaataccgatttaccataactagtcttgaatgttgaatgccctatctaatcatttctggtagagggtatataatttcctttattaacagggccccttaatattaatggaaaaagagtatctgattattcaatactccccattcatgccatcctttgcggaaactcccgggccggacgcgtgggcggacgcgtgggcggacgcgtgggttgagctgttctaaaagtgcttgtcaagtagtatctgccactgaaattgtctgaaatgaaacattctgatcattagataacttatcacattatgcaggcagcagcaacaacaccactctatcaactcgtgagcttcaagccaaagcttcaaactttcccttcaaaatctcaactttgccccttagggacccctttctgcagactaggaatggcttctgtttctgggtttaggttgagacccctgagggctgtgggtggttcttcatcatcttctgcatcaggtgatgatggatttgtcacactgatagagtatgtggcgaaggaaggaatgaatgtgaaagatgatttggtggtgttgcttgatcacattcagtatgcttgcaagagaattgcagcacttgtggcttctcctttcaattacagccttggcaaacaaactggtcatggttctgttggttctgatagggatgccccaaagcctcttgatattgtctcgaatgaaattatcttgtcatcactccgaaaatccagaaaagttgctgtcatggcttcagaagaaaatgatgcgccaacttggataagtgacgatggtccttacgtggttgtaacagatcccctagatggttctcgaaatattgatgcatccattccaacaggcacaatttttggtatttataagcgccttgaggaacttgataatctacccacagaggagaaagctatgctaaattcactccagagtggaagtaagctgattgctgccgcgtatgttctctattcttctgcaactatactctgcatcacctttggttctggaacacaggcattcactcttgatcattcaacaggagactttattctcacaaatccaagcatcaaaattcctccccgtgggcaaatttattcagtaaatgatgcacggtattttgactggcctgaaggtttaaggcaatatatagacactgttagacaaggaaaaggtagataccccaagaagtactctgccaggtatatatgttccctggtggctgatctccacagaactttgctgtatggaggtgtgacaatgaatccaagggaccatcttcgtcttgtttacgaagcaaaccctcttagtttcattgtagagcaggctggtgggagagggtctgatggcaaaaataggattctttcccttcaaccagttaaacttcaccaaagacttcctctctttttgggaagcttggaagacatggaagagttagaaagttatggggatatccaacaaaaagttaatcctggttatgaggtttgatgctgctgtatatagcatcatgcatacaaattttgaatattcaaccatcatggtgcctgactaattgttccagtgtttttcacctgtgttttatgtacttcgttatccatcatctgtgttaacgtagctttaattctctgatcacacttctgctctgatataaacaaaattctgtcaagaagattgtatgagaaaatggatacaaatgcttttgctttgataaaagttcgtattcttttcaaaaa

SEQ ID NO: 69582 - DNA, 567 bp, Glycine max
  Clone ID: PAT_MRT3847_33844C.1
ctaggactacgtcgatctatggataggcaatgtacccaggtacctgtacacttgcattaggggtaatattagtgtaggtggggttggggtgtgtagagcatagcaagtagtgttcaacctatacgaagcagacgtatcgtgtattggttcacatttggggtggcaaccaaatgtgaagttattaaaagtggcttggggtggccgcaacaataataacaacaagaagattaagaagaataataataagaagaagaaagagaggaggcggcggaagaggcggaggaaaaagagcatccaacgctggtacggcttggtagttgtaactgcggtctcgtcgttagcgccgacgtgtatatttaagcagcccgtctatttaagggtttggaggaatctgttgtttatgcgccaacagtaaacccgccaaaggcaacaacaacaacacaaacaaacccaaacccacaaccagtactgggtgaggggcatttggggcaggctgatcggtaccaaagtgggcaggcccgctactattatgatagatggtgtggtggtggtggtggtggtggttag

SEQ ID NO: 69583 - DNA, 478 bp, Glycine max
  Clone ID: PAT_MRT3847_33845C.1
acggctgcgagaagacgacagaagggaatgccaataactaaataagttaagcaggaaatgtgtcaggcaatatgtgaatacttcagaagaatcagagggacaatcagatctctgttttactgcttcgcagtcaatttactaggtagcagcacgtgacaggcaaaaattaatggattcaaagtacaactatgtctctacaattaaaccatcattaatggccagccaggctaagaacaagaacaccatcttgtaagctagagcgttaaaatcgtttgtaatgtttaatgcatctaagaaataataaaactcttctcgtaaacaatatctggtttttacatgacatagtaactttttttacgcgatacaacctagattatcaaaggaggggcggtaggaggagggctactgctatctgctaatacaaatggcttaacaccaagaaaccaaaaatttctatgttgaagacaatataaggaca

SEQ ID NO: 69584 - DNA, 482 bp, Glycine max
  Clone ID: PAT_MRT3847_33846C.1
gtggaggttagatacactgatgttgactaccttgacttttctgatgctgctgctttaatggctgtgggcgattccccttataagagaaccacttatcgctattctcctttgcttgcctttcttctcattccaaattcgttcatccatcgctcctggggaaagtttcttttctcggcttcagatctacttgtgggatatttcatctattatattttaaagctacggaaggttcctgaaaatctgtgcaactattctgtcatgacttggctctttaatccatttaccttcaccattgggacacgtgggaactgtgaacctattgtttgtgctgtggtattgtggattattatttgtcttatgaaaggtacctgtcctaaggcagcattttggtgtggacggagagagaatttcagaaggtatcctataatttactctattcctataatcctggttcttgatccgaacttcttcccatctaatca

SEQ ID NO: 69585 - DNA, 514 bp, Glycine max
  unsure (1)..(514): unsure at all n locations
  Clone ID: PAT_MRT3847_33847C.1
aagaaaaaagaacaaaaacaagtacactaaaacaaaaagaaacagaaagagggaaagaaaaacattgaaagcacaactggagaaactgaaaaagtatgctactgtggttcgtgttttttctcattctcatatcaggaaatttaaaggggggaagcataacaaagcccatatcatggaaattcatgttaatgatggtagtattgcacaaaaagtggactttgcatacagtttctttnaaaaacancttcctattgatgcactgtcccacaaggatgagatgatagacatcattggagccaccaacggtaaaggttatgaagccgtcgtcactcgttgaagtgtcacccgtcttccccgtaacactcacanatactacaagaaagctactattattggtccctgtcattctacaacattttcattcactgtttccacggctggtcataatggattccaccccctaactgacctaaacaaaaaagtttacaagcttancaaacctagagatgaatcg

SEQ ID NO: 69586 - DNA, 207 bp, Glycine max
  Clone ID: PAT_MRT3847_33848C.1
acccacgctcgctaatgagcggcgttagggaccagcttatacctgctgcagctacttttatggcacctaaattaatactggcgcgttacaacgcggatggaaaaccctgcgtaccactaatgctgacaatccctttgcgctgcgtatacaagagccgaccgacgccttcaaagtgcgcgaagggaaggacccctgacgggcattaac

SEQ ID NO: 69587 - DNA, 672 bp, Glycine max
  Clone ID: PAT_MRT3847_33849C.1
agagttcacaatctggaagatgttgatccgcataaaaaagggtgttctgctgttgcagacctgctatgatgaaagaagtgacttatctgctgaagtacaagacacattattccatcaacatggactttgcatgaaaaaaggacatgcacttaatgcaagcattaaaagatcaaacgagctcaagactttagacaaagagtatagtaaagaatccaaccattgtgagacaacaaatacttgaagatgaagaccatatatagaagaagctttgaaaaaaacaagacacaaatctacttgcgaatagttcatttattctttcttgtaaagagctctctgtatatttttgtataaatacaaagctctcaaaacaccttgtaaacttttagagaaaagactaaaagtgttgagtgatatatccatctataagacaatcatacaatagtcattgtgcaaacttccaacaaatattattgatttgtttagagctagtagtggcttggtaggacaaagaatattgggtttaagtcaagcttggggtagagcttgcatgtgtaagagctagaagtggtagtgaaaaatacttgtaaccttgataagttagtggaaacttggtgagttaccaagaattggaggtagtctcgggtttgagatgaaccaatataattctgtatg

SEQ ID NO: 69588 - DNA, 302 bp, Glycine max
  unsure (1)..(302): unsure at all n locations
  Clone ID: PAT_MRT3847_3384C.1
ccggccggaaacccggncgaccgcacgcgtccgggattggataatgacaagtctgttaaataaatttttcgaaagttcctnnagaccatggttgtgtttttataaatgtgtggtttgtaacaaatattaaaatnnaatatatatttatttatattaattttttatatatttaataatttaatttataatattaaatttattttaattattttttattttaaaaatacttattaatataaacnatcttttaatgatttttttaatattcatatgttatttttaaattttatcctcttaaattt

SEQ ID NO: 69589 - DNA, 390 bp, Glycine max
  Clone ID: PAT_MRT3847_33850C.1
acagttgacctttggtacaatgatagaaaagaggttttgcaatggcaagaggagcgtaaaaaggaagctcgtgtgttacattgtgtttacacattgctagggcgagctcggcggttccctttgatggcccaagctaacacctatcaaaaaggtcatattgagcgagctgctattaatactccagtgcaggtccttagctctttctaataaacaaatcaatactgtgtctccctccctcatctatcaaactgtctttacactctcaagttagtaaataaaatatgtactgaattatttaacttgtgattcttgtctagtttggaacttttcccttttaagaacaatgaatgataagatcatattttcaaagcccacttgtaaaatatcata

SEQ ID NO: 69590 - DNA, 446 bp, Glycine max
  unsure (1)..(446): unsure at all n locations
  Clone ID: PAT_MRT3847_33851C.1
aaagaaatagtaaattattgacacataaatatctccttataagtacactgctaacacttaagaggtatccatcttgaacaaatcaagcagtacagtatgggataaggagaagaaattgaagtttaagaaagaaactatgtaattgggaccaaaaagttgttatccaggttacatactttcataatttatgaaatcctaaaggtgccttcaaaccagaagaccaaaaagagaagcataaaggaaaagacaacagttacacaagtaaccttttggccactgagcgagaacactctcttttaatgttgcaatactagtagctgcaggaaaacttttggggccaatatcagaaccatcagtcaaccgaaacttgatctcaaactgatcttgattcccagccatgctcaanaaaaaaaaaaaaaaaaaaaaaaaaaaaaaaaaaaaaaaca

SEQ ID NO: 69591 - DNA, 457 bp, Glycine max
  Clone ID: PAT_MRT3847_33852C.1
gaggcaaaaaattaattaaaaccccttcggaaacgggttaaaagggggtccgggggaccctgggaagaaagagccccccaaaaacggattttaaaggtgggacaaaaagggattttctcctctgaaaattacaaagagactgggctaaacccatcaccggggaaagaaggggggggtcccacagcaacccccggggggaattaaaatgggggagggggggtcaccggtccatccgaccccaatggacatcagttagagaaaagccaaaaaggggttggaagaataaaagggccctaggatatttggggaaatccatttagggggggggggggcaaaaacatctgggttaggggggcataacctaatatcaatcaaagggggcgggggagggaaccacaataatcgggcccaactattttaaaaacacatcggattcccccaaattataagaagccct

SEQ ID NO: 69592 - DNA, 384 bp, Glycine max
  Clone ID: PAT_MRT3847_33853C.1
gcagattggttaccatggttgtgggttgtgttgttgcctgttggcttgtttcgccatctcaagacaccttttgggtcctaagtaactgactggcttccatttgaggcatctcccaagttggagattctgcaataaagctttttggagcagatattcgcaatattcttcattttcccattaagccaaccactcacttcacagatttccaactctctttgactcagtgtgagattcagcgtctgcctcaacccatcatcatcatgaatggactcgaagaatcaactaacgatgaagtggatgttccattgaatgaagtatctagcaaacagattgatcctcaaaaagatggtaatagtgctccaaacatttacaaaaatcctacac

SEQ ID NO: 69593 - DNA, 394 bp, Glycine max
  Clone ID: PAT_MRT3847_33854C.1
ccacgcgtccgcccacgcgtccgcccacgcgtccggtacttacaagaaaaatgggactgctgctgcaattcaatatggtaccggagcaatttctggtttctttagctacgacagtgtcagagttggtgatatatttgtaaagaaccaggaatttattgaagcaactagggagcctggtgttacatttttggcagccaagtttgatggtatactgggacttggattttaagagattttatgtggaaaagcttgtttagtgttgtattactttgttttctatagttttattaagttaactatttttttatatttttattaatctaaaatatgttaatttattttttatttcttttatatatttttaataatattttttttataatatattattttt

SEQ ID NO: 69594 - DNA, 370 bp, Glycine max
  Clone ID: PAT_MRT3847_33855C.1
ctcgagtcctttaaaaaaaaaaaaaaaaaaaaaaaaaaaaggattatatataaaataaaaaaaaaaaaaaaaaaaaaaataaaaaattaataactataaaacaacacatttttttattacaaaaatgattacttttaacctcccacaaattctcttcttaaaattttttctcctataacactttttttttcttccctatcactttcttcattcaaattcaaatacctattatttttccaacttaaacaaatccttgtatgacttaaagccatcccctagacaatggaataggacatttaatgaatttatggctcacatacagtttcatagaagtcactatgatgactgtgtttacttcaaatttcctttt

SEQ ID NO: 69595 - DNA, 1383 bp, Glycine max
  Clone ID: PAT_MRT3847_33856C.1
gtggcatgaggtagagcaaatgggtcttaatgcgagaaatgagatagaaaggggaagtggcactggcgaatgagaatgagtgtagaaaagaaagtccatggccatgagtgtgggcgtggcattgccatccaccaccaccagtctcagtttccttcgctaccgctctcgctctccaattcaaaataaaatccgttttccccgtcaaattgtttctaaattaaacagtgcagaggtccaggttcaaacctgcgtgtgggattggaggggttactctattcgctatcaacattctggaaatattggccctgcactagttttagtccacggttttggagctaacagtgaccactggaggaataatatttcagttcttgcacaatcccaccgggtgtactccatcgatcttattggatatggatattcagataaaccaaatcctcgtcaaatcggagaccattccttttacacttttgagacctgggccactcaactaaatgagttttgtcttgatgtcatcaaggacgaagcattctttatatgcaattctattggaggagttgttggtcttcaagcggctgtgttagcaccacacatttgccagggtattatccttctcaatatatctctgcgtatgcttcatataaagaagcagccttggtatggaaaacctttcatcagatcgctccagagattgcttagggatactgatgttggcaaattcttctttaaaactatagccacaaaagaatctgtgaggaacattctttgccagtgctatcatgacacctccaaggttacagatgagctagtgcagatcatccttggtccaggtctggaacctggagcagcagaggtctttctcgagtttatttgttactctggtggccctcttcctgaggaactactacctcaagtaaagtgcccgattttgatagcatggggtgacaaggatccttgggaaccaattgatattggaagaaattatgaaaatttcgattctgttgaagacttcattgtccttcccaatgttggacattgcccccaggatgaagcacctcatctcgtgaacccacttgttgagtcatttgtggcacgccatgctaaatcctcaactagtacatcgcattgttaattgattcgccaacagttttttgatgctgctcaactcattgaaattgtgtacatttctccatttgcttccattaagaccgagtttcattttctgttcagtataagcattatgtccttgtatggttacaaattatgagcggttgatacaagaccctgtttccaacatgaatgccagccttagaaccctacatagttttgtaattgtctcctgtttcaatggaatcgtatttctcaatcaagaaaattttgccg

SEQ ID NO: 69596 - DNA, 420 bp, Glycine max
  Clone ID: PAT_MRT3847_33857C.1
gcttaaattaagatgcatccctagcctataccatgatacctttttgatcgagaagatttattcaactagattaggtcatctttttttccttgtttttctatagcttacatgatgtcctagcctcctagggtgcttgcatgaccaaagcacaagattttaccaaaatcaacatgttgggtgagcatacataagcttgaaaaggttaggtgatgcatgattcattgctcctttagtcctttctttctctcaactagaagaaatcacttcttcatgtcgtcagatagtaattattcacaggttgaatgctaaacttttacattttttttttaccttatcttgaaaaaatgtcatgaaaaatgaatatgtaccctccactttgtgtgtgatgctgttatctttagtcaagctgcaaataaatgt

SEQ ID NO: 69597 - DNA, 525 bp, Glycine max
  Clone ID: PAT_MRT3847_33858C.1
tacggctgcgagaagacgacagaaggggggcatgaggtagagcagaggaatggggcgacgagaaatgagatagaaaggggaagtggcactggcgaatgagaatgagtgtagaaaagaaagtccatggccatgagtgtgggcgtggcattgccatccaccaccaccagtctcagtttccttcgctaccgctctcgctctccaattcaaaataaaatccgttttccccgtcaaattgtttctaaattaaacagtgcagaggtccaggttcaaacctggtaattttgctttctgaatcacgtaattttatttttatttttctgttttttgaaacagtcttcaggccttgtattgtagcgtgtgggattggaggggttactctattcgctatcaacattctggaaatattggccctgcactagttttagtccacggttttggagctaacagtgaccactggaggaataatatttcagttcttgcacaatcccaccgggtgtactccatcgatcttgatggatatggata

SEQ ID NO: 69598 - DNA, 1071 bp, Glycine max
  Clone ID: PAT_MRT3847_33859C.1
aattactagttagtttgtagaaatatttttttaatgaaatgaccatgccaccaatttttatgtcatttccgaaagtcaacatagaggagtttacagaatctagtaaagaaatgactaaacaagtttaacattacaaatacaagcctttccaatcaaaacataaacaatagatgccgtgctatctgaattgaaaacctagattaagcaattcctacaggaattcaacacattcatgcagtcagtgaattgaaattgttggatgaagatttgggggttcaaatattgaatttattttaagtcaatcttttatgtctaatttaccagttaacatataagctgtatcttcatccaatagtttcaattggcatgagtgcgctagatttcctgttaacacacttccaaatatacttattgaacattacacattaggtgatgtttgcaatgttaggagtttactcattgcagcagcgatacatgtagaatttttccattgtttggccacattcagcacatgacactttgtctggtatcccgccactggttccggggagtatcaagcgattgcagtggtgaggggtttggagttcttttatataatcatccattgctggcaaaagtcctttatcttttgctgcgtctttccattgttcatgttcattcaggcactttagaaatgtgtctcctttgccctgtgccatctttcccgtgccttgactaatcacggcccatcccgggtcaccgctatcataggttaggattctcattacttcatgcattatgtggtcgttctctactgttttgctctgctgtgatttagagtgccacatgctctctagcctaacccagaagaaccaacttatggcaaggtcaggaagtacgttgctcaatttttctgtttgtacggcattgttgatttcttgaactttctttcctggattgcttttccccacataaatcatctctagtggtagttgcagagttcttgcgagggaatatgcagtgtttgtgaatttacggatccactcaatatcgtcacctccgtacaagcatatatatttgccttccgctcgt

SEQ ID NO: 69599 - DNA, 466 bp, Glycine max
  Clone ID: PAT_MRT3847_3385C.1
gacccataaagagtgaagttaaattacaactggttgttagtccacctccacaaattatacaaaaattgatttgatttacatcatacattccaaaattcgctgaacaaggcaacgcacaaaaaaatggagatcagggcttgaacttttgagtgagcttctcaactccttttttacaatcacctgcaactcgctttgcctcttctttgatagtaaatccaaattcaagagcactttgctgcacctcatgagctgacttgcctgcctttgagatggcagattgtttcaattcttcagcttgttttccagttttgcatgcccattctctcaatcttgatacaaattgggaaattatgtggataatcttgtcaatcatatctttggctcttcctcccacctttactgccattttttttagcttgtccagtaggtttttcagccctgtcaaccgtgtcttgaaccgataact

SEQ ID NO: 69600 - DNA, 375 bp, Glycine max
  Clone ID: PAT_MRT3847_33860C.1
gctggttctggttgtggtgcgctatccggaatacttgcggttgtcgcgcgagggcgcgggtttcgaggacagtccgctgggcacgctgtggcgctacgagatcgacctggacgagggcggcgtcacggagcgcgcgctggacgatgccggcatcgagctgccgcgcatcaacgaggcccggaccggccgcgcctaccgctactgctatgcggtggagcagcccaacaaccgcgagatgcgcggcgtggagcgctacgacctgtagacgggcgcgcgccagcagtatgcggtgccgcctggcgaccagaacagcgaaccggtgttcgtgccccggccgtaggcgcgcgacgaggacgacggctgtgtgcttgtgtg

SEQ ID NO: 69601 - DNA, 481 bp, Glycine max
  Clone ID: PAT_MRT3847_33861C.1
cccattttggtgatgggaatgtgggcaaataagtctgtgaatgacacccaagttcagcaagaaatttggtgaaaggtctgtattcacctccccagtcagactgaactgagtttgaaccatagtgtgaaactgtctgaaaactgttggtgtgtctgacttgctttttagcagatataaccaggtaaatccggaatgagcatcaacataagttacatagtaattgaagcccgaatgagaagtagagggtgcttgatgtgatcctgaccaggagcggatcacttgatacaggcaacgaagatttggatgacgccacttccggtgaaggaagataagtcagggtagacgccacaatgattactttgataagtctgagattggttcaacaaggaacccagagagacactctcaccaaattttatgaaaatgccaaaaagtcccctttattgaaaacaaaaacaaatacttatagtggatctggccc

SEQ ID NO: 69602 - DNA, 316 bp, Glycine max
  Clone ID: PAT_MRT3847_33862C.1
ggctcaaggctagtttgattacctattaaaactatattaacacaccgcaataatttctactatgtgtaatttcttccaatgtggggcctaaaaaagatataatcctgacttttggacccactggagccattttaaggcacatactctggtcaattgtaaatgcaggtaacccaacatttttgttgtttattaacacctccttctctaacaacaagttcaatctggtcaaagctgttaatcctaaaaccattgtatatcttatttatagcatttaaaatttaggattggggttaattcatctacattttaattatca

SEQ ID NO: 69603 - DNA, 747 bp, Glycine max
  Clone ID: PAT_MRT3847_33863C.1
cgacccacgcgtccgcatcaccatcccatcgcatgctcaaaagcccgctaagcatagcactctattcacattgtatgtggcgcattgcgactcagtaagcaagaagatggcggcgagtagtaccttctgcgtgctccactctcccctctaccaattcccatcttcttcttcttcttcttcttcttcttcttcttcttctgggctcagaaagttgcgagcttccacaacttcttcgtgcttgggccagcgggacaaagacccagtctggaacaaaagaaccattcttttggcgagcatcgctcttcttccgtgttcgccggttgaagcgggcccctgctcttgaatccccacctccacccccaaccccaacagaagaaactgaggtgaagacgcaagaggataaccaggaagccgagaaagcatctgaagtggaccaaccatcaaattcctttctgactctcctgaatggaattggaatattttcttctggggtggtgggtgctctctatacacttgctcagaaagaaaaggccactggtggtgcgacaatagaaacaatgagcagcaaactaaaggataaggaagaactgattgtttccttggagaagactatgagttgaagttactgagcaagcaggaggaacaagccaagctgggtgagaaggcaaaggaggaggcactgggattgataaaccaactgagatctgcgaacaggactattaaacgcttgggacaggggcttaaaag

SEQ ID NO: 69604 - DNA, 433 bp, Glycine max
  Clone ID: PAT_MRT3847_33864C.1
tcgcccacgcgtccgcccacgcgtccgctaaattcaaagttcaaaatatgtctactacgggttctttgacttttcctcctttatcactctctcttgttctataaatcttttctcaatcatcaaagccgccactaacctcatacacacgatagaaaacatggcatcttacgagggagggccattggtgatggaaatggaaggagaagaaggtttcgaagaagaagccggcagcagcggttgcgggtgcggatgcttcggcctgaagaaatggtggcaaggccatgaggaagaaggtaaagggctacttgttgatcaaaagggtgagggagagtcatgggtggtggagaagttaaggcaggcaaacgaggtttcagagtgatttgctgtccaaagtggaagactttcatttagaaagaaaagtgggtttgggaag

SEQ ID NO: 69605 - DNA, 496 bp, Glycine max
  unsure (1)..(496): unsure at all n locations
  Clone ID: PAT_MRT3847_33865C.1
ccacgcgtccgctaaaaagtaaatatactatgttattgtctgattaggctaggtctttttccttttaggagtgaggaaggcatatataaggcatagatcactaaaggaacctttcccttatatatgatagcaccagacgcgcccccgccttccttgttcaagtagttcaagagttaagggcgtaacaaagtttgtgggggagggtttccttgatctctatgacctctccgaagggccacacgatatgaatggctgcttaaggaaaagggccaaagcaagcaaaggaaagcgtctttctttccaagacactgactatcgtgacccaaacttttaaaatgatgtggctgagatttgcctgaaacaacctatgggctgcaatcctctttatgccaaaggatgttgagggtccggtatcacangccggaaaaagagaaggaggataaaatattaggcattatactctgactcatatattcaggtgaatttttccttatac

SEQ ID NO: 69606 - DNA, 1987 bp, Glycine max
  Clone ID: PAT_MRT3847_33866C.1
attcccgttctcgacccacgcgtccgggaaactctcgcacgtgcgcaacaagtttgtttagtcttcgtcctggtctactctcaactcaagtctgaaaacacaaaacctaaacgcacagcactttgtagttaaccaccctccaccgagccgtcgaaccacccccgtctgccggcgtcgcacctcgccaccgacaaccagcgtcggcgcaccactgcaccagagcagtaggccgtcgcagtcgcacgcggcaaccaccagccaccaagtcttcgtagcagatctgtgctttggctatggaaaattcagagaaggtggtcgctgtgatcatggtgggtggacccacaaaagggaccagatttcgacctctttccttcaatattcccaaaccgcttttccctttggctggccagccaatggttcaccatcctatttctgcttgtaaaaagatacccaatttggctcaaatatttcttcttggattctatgaggagcgagaatttgctctatatgtctcttcaatctcaaatgagctgaaattaccagtaagatatttgaaggaggataaaccgcatggttcagcaggcggcctttactactttagagatattatcatggaagactgcccatcacatatctttctgttaaattgtgatgtttgctgcagctttccactaccatcaatgcttgatgcccataaaagatatggcgggatggggacaatgttggtaatcaaggtttcagctgaatctgctaaccagtttggggagttggtttctgatccaaccactaatgagttgctgcattatactgagaaacctgagacatttgtcagtgatttgataaactgcggtgtctatgttttcacccctgatatttttactgccatccacgatgtgtatattaatcaacaaggcacacctaatctacgccgtgtctccaactttgaaacattccaatctgccacaaggactattcccgttgattttgtaagactggatcaagatatatgatcacctctagctggaaagaagcaactgtatacatatgagacaacggatttctgggagcaaattaaaactccaggaatgtcattgaaatgctcagaattgtatcttgctcaattccgatatacttcacttgatcttttggcgagtggagatggtaaaaagaaagctaccattgttggtgatgtatatattcatccatctgccaaagttcatccatctgcaaagcttggtcccaatgtttctatctcagcaaatgttcgtgtaggtgctggtgtcaggttaagcagttgtatcatcttggatgatgttgaaattaaggaaaatgcttttgtcacaaactcaattattggatggaagtcatcacttggaagatggtcacatgtgcaggctgatggtaactatgattcaaaacttggcacaaccatcttaggtgaagctgtaacggttgaagatgaagtagtagtgtttaactgcattgttcttcccaataagactcttaatgtccgtgtgcaagaagaaatcatcttataatataatctaataaagcgagttttgatgagtaagagtgaccagtaaaagaagcggcttggagcattttggttttaccatttctttctccaatttgtttgatctaggaatgataaagttaattggcttacatatggagttatgtacatttaaatatttattttttctctttccaattttattttatgtacacaaatggacaactaaatggacctatttttgtaaatcacatgtcaaactcgaaccttttacgagcaggtaataacataatatctggaataaatttgttgtttttaggtaaaaaaaaaaaaaaaaaaaaaaaaaaaaaaagggcggccgctaaaaggatccaagcaaaaaaaaaaaaaaaaaaaaaaaaaaaaaaaaaaaaaaaaaaaaaaaaaaaaaaaaaaaaaaaaaaaaaaaaaaaaaaaaggggggggccttttaaa

SEQ ID NO: 69607 - DNA, 366 bp, Glycine max
  Clone ID: PAT_MRT3847_33867C.1
attacgccttcgtggaagcacattacgcagaaccattttacttaaggaactatttaccgaattacattcagagggcaatgtttacctaggtgatgaacagtatcccattttttgtaactgaggaaagataaaataggcggactcagagggacattcatataatccacttattttactgcggtgggttctaaatctgtactaaacacgacaaaaaacttgttttgacaacactataagatatgaagactgttaaaaatagaggcctgcttgctcaagatctagcactgtgagcttaagaacaaacaaaacatgtggttcatgaaagtctgaaggatcaaatccctcccgatgacaagtgtgattcta

SEQ ID NO: 69608 - DNA, 377 bp, Glycine max
  Clone ID: PAT_MRT3847_33868C.1
attcggctcgagatccaatcgcaacggttttttttggctgtccacccaaaccctcagtggcgaccgtgttgccctgtatctccggcactaacggcaggcaaagatccggacctgtatccagcgagagtccgaacccaaacttgctgtgaataacaagggagccgccaccaaggcttggtaacctgccagctcggggaacgctataaaagaccctaaccagccaatgaggccgacaagagctgtcttcagtatcatggaagactgcaggaaggcatacaacaaagaacatcctgcaaacaaagcaaatgaccgcgtgctgggcaaatcctgctcagagcaacaaggacgaccatggacagatgctgaaaaagcacctt

SEQ ID NO: 69609 - DNA, 300 bp, Glycine max
  Clone ID: PAT_MRT3847_33869C.1
gccacgcgtacgcttacatctaaaatgatgtcatttgtggcccatagacctgcctcaaacaatctttattaagtatcggacgttgagcccttcccttcggctcacggtacttctgttctttcacagatgaagaccgtgtcaatactagcatcaagactgacaacactgatggaatcaatccggggatagctctgagggaaattctttatgcatcctgccatcaaacgtactggcaaggtcccataccactacgggtacaaacactgttgctaatgtcgatggttacagaactatttacca

SEQ ID NO: 69610 - DNA, 755 bp, Glycine max
  Clone ID: PAT_MRT3847_3386C.1
ggacctgacactgacactgtgctaacgtgcgcatcctctctctgtctgtcatcttcagtcccttgcagctaatgtttctttctttcttcattgaacacacatatcctaatccgacgtcgtttctcaaacacagctgtgctgtgcagggttaccttttccctttccccttttgctctcattattggcaaccactcttccaggctggctgacgtcataatgtgccttcccttttagggtttttactacttacttctccatctctccggttttttcttcttcctttcatcaacatgtttggcttttctcgtcgccgtatgaaacttggaagattgaaggtgcagctttctgaggccaatcccggaaccagaactcccgtcagacccccaaaacggaacggaacggaaattggagatgcagctggagggtctagtggtcattctgatgaagttgattgccagccttcaactgagataactagttgtggcagctcagagaactggatggtcttgtctattgccggggataaacccattcctagatccaatcatgcagcagcagtcattgggaataagatgatagtcgtgggcggcgaatcccggactggattgttggatgacgtgcacgtgctgaaatttgatagattttcgtggaccaccgcatcgtcaaagctttaacttgtcttcccagcagtctgtgccactgaaaaattcccagcgtgccaaggggcccataagtttgggtaatccctggggagg

SEQ ID NO: 69611 - DNA, 390 bp, Glycine max
  Clone ID: PAT_MRT3847_33870C.1
gttcttcctttctctctctcctcggtgtccttctttcccacttcccctcctccgcatgccccttcttcttcctcccttccccttctctggtatgtttttttctaatctttgtttggtagatcttttgttggtttgtttttaattagatcttcagttattggtttatcttatttttgttcttcgtcatctcatttctcgtgcattctaactgttcttcttccttcccgtgttttattgttactagatgaaccaataatttttgttaataacaaccatgcaaatctataaaattatttcccaagaattgaatctttattgttacatctggaaagattaaattgtcagcttaagatctggtccaaaatccaacattaaagatgctatattaaa

SEQ ID NO: 69612 - DNA, 348 bp, Glycine max
  Clone ID: PAT_MRT3847_33871C.1
ggcagccgacacaatgaatcaatatgagtccgaagaacaacatgcgggaactaaacgtgtgcacattgccactttaccatgtgggggttacagctgcacgcatggaactgagcttattaatgagagatcagtccttaagatatgatcatgatgagtattgaaaaccatgctgaagatctatcgatgtgtacacgcttaatggactggtaatgcagctgtcaatatcttatgctgaaatcatgccactcagatcgttagaactggatgtgcacacggttacagcctggacagcgtcagtgtcttgacaataacgactattgctacgaatcttgcaagtgcagatatcac

SEQ ID NO: 69613 - DNA, 948 bp, Glycine max
  Clone ID: PAT_MRT3847_33872C.1
attgcgatatttccaatgaagacggagctgaacaagagacacagagaccctccacgaaatgctgtctattattcctttggatatctcggtatcctcaactcttgccaaagtctcacctttcaataacagttttaagaaaccaacctctttcccatccaagctttcaccttcctctgatgaattctctctcctttctctctcccactcaggaatttgcagggctagtcaagttgttgatttgttcccaaccgtgtcccccgaaattattgtccgcgaggcaaggttggaggactactggggagtggcagagacgcactgcaagtgcttcttccctgaatattccttcccattagattttgtgctgaggatagacagattggtggtggctatgttagcagctatgttagccggattctttaggcctagagattgcagaaggatctgtttggtggctgttattgacagctcacttgatgagtcattttcatttgaaagtgagggtctcaagattggtggttttgatgggaaattcagcctcaacaagggctatgtggctggtatattaacagtagacaataatgcagactttttaccaagaaaggggccacgacgacatagaaggactggaattgcatacatatcaaatgtggcggtccgggaaaattttcggagaaaggggatagctaagaaattgatagcaaaggcagagtgtcatgccagaagttggggctgtcgtgccattgcattgcactgtgacttgaacaatcctgtggccacaatgttatacaaaggacaaggttacaaatgtatagaaaatccagaaggagcaaattggcctcagccaagaacctcaccagacatcagattcaacttcatgatgaaacttctcaaaaattcacttgggaggaagtaatatttattctataacacattatctattatatatat

SEQ ID NO: 69614 - DNA, 160 bp, Glycine max
  unsure (1)..(160): unsure at all n locations
  Clone ID: PAT_MRT3847_33873C.1
ttccgaaaaaaaaaaaaaaatttttttnnnnanttttttttggcccgccgttttaaaggttccaagcgggactttctcgagcattcaacgttttccttctcttataggggcccctaaatttaatgaactggccgtcctttttcaacttcgcgactggaaa

SEQ ID NO: 69615 - DNA, 1345 bp, Glycine max
  unsure (1)..(1345): unsure at all n locations
  Clone ID: PAT_MRT3847_33874C.1
cttttctgaaattttgtttcttccgttgagcttttctttcctcgaactccaaaatcttctcacgacaagcactttctataagatctgcaggtactattgaagtttcaagtccatccattccttcccaagaaacctcgtagcattctctcccttgaactcttcggctcttaatgatttctgacacaggacacttcacagggatctcatgtaaaggaaggttcagtccaacttcagatgaagttaaacgcaaattggcaaatcgtcgtaaatttctttcagctatatttggaaggatatacccatctgttttctctgaaggccactcaaagaatccaacacatatctgctggagtttagtacgttgaaatggatattgagcaagagccttgtgcacaatatctgaatctgcttggtgacattttggcttcatataagcattaattacttgtaaaatgttatcatccggccgtaaatcattcttacctccttttctttttttgacccatccaagtccttcagaagcaaatttcttcagaatatatttgtctccaattgatttgactatctgacaagccgactctggacccagaccatgaactccttgataatagtcactgccaagaagcaaggagagagcaatcaatgagtcccttccaaatccaagttttctttcaatatctgtcatctcataacaaacaacatatccaccatctccaaggcagatatccctatatacagtccttgcaccaaaaaggaatatgtctgaatctgaactgaaacacccatcgcataatgattcaaaattcaacaaagcacactgagcttcagcttcttcaatcccatttaaacaagaaatgccaagagccatccccaagaccttagcctctttgatcatgcaagaaaactcagaacccatgtttctctgtaatgaagtcgctttctgtaagttagtttcattttgtgctacctgtacctgctcctttccaacatttaagcgacgcctataggttgataatttgatggcaggaatagctccatctgagacgaagatgaggctgcaattgagcgcaatgagtgctctgagacggtgaaagagtcctctgagatagactttctccttgacgcaggcgtgcgacttgctcacgctgtgaagctgcaccatccagcacgacaggtccacgcacaccctcttgttctgtaggtggtgaaggggaaccgttttcttgcacgattcgaggacgntcccacangattcttcacgcccattggaanntggagnattgagacggttgctgatgagnaccaagattcttccggcgagagggaaaagcaaaggtagagtttt

SEQ ID NO: 69616 - DNA, 107 bp, Glycine max
  unsure (1)..(107): unsure at all n locations
  Clone ID: PAT_MRT3847_33875C.1
gctcggttcgtttcggggttgacgttgttcacaatcactttctgcgcgtcagtgggtcccttcgtggggtnngctagctgtgtcgaactcgtgcgaaaatgcgtgag

SEQ ID NO: 69617 - DNA, 462 bp, Glycine max
  Clone ID: PAT_MRT3847_33876C.1
ggctcgagggcatttcttgtttaaatgggattgaagaagctgaagctcagtgtgctttgttgaattttgaatcattatgcgatgggtgtttcagttcagattcagacatattcctttttggtgcaaggacagtatatagggatatctgccttggtgagtagacaaccttgttttatcattggtgaattttctttgcattaagtatgttttcatacgactaatgatgagttgtttattaatgagttaggagatggtggatatgttgtttgttatgagatgacagatattgaaagaaaacttggatttggaagggactcattgattgctctctccttgcttcttggcagtgactattatcaaggagttcatggtctgggtccagagtcggcttgtcagatagtcaaatcaattggagacaaatatatttctaagaaatttgcttctgacggacttggatgggtc

SEQ ID NO: 69618 - DNA, 391 bp, Glycine max
  Clone ID: PAT_MRT3847_33877C.1
cactacaggggggggatattatatttttttatatttttttatataaaaaaactggccgggcttttttgtattaaatattaagattaccttgggtacaagatggttttatattttccaaactgttacgggcttttgaaaaatatttgaacccaaattttccccttcactggaaaaaaaaaaaatataacccccctccttaatgcgccctaattttaattttttcgggaatttgtggacaaaataatttttgggggttggggtctcaaaacttttttccccccttattgaacaactctctttattggaataggggggataattaaaatcccacacctcctccgtgggggtgttctttccttgcttaaaaaagggttcctacccttttttttta

SEQ ID NO: 69619 - DNA, 802 bp, Glycine max
  Clone ID: PAT_MRT3847_33878C.1
cggacgccgggggggccgccgggggggacccccaaaaaattgaccggcgcctccagggggaccaccatttcctataataaggagtattaaaacaggggggaaaaaaggtgaaaaaagtttcctggggaaaaaaattattcccccacaaaaccccaaaacaaaaaacccgggagaaaaaaaagaaaaaacgggggggcccactaaggaagcaaacaaacaaaaattgtggggggcccactaccggcttttaaaaagaaaaaaaacctgtgccccccgcattaaaaaaaaagccaacaccccgcgaaaaaaggttttttatattaagcgccacgggggttttttttttttccaccgagaaggccaacaactgtttgtcctccaccaaccgccccccaaaaaaaaaaaacaaaaaggccccccctgtttgctccccccaagaaaaaaaaaaatttttgaaggtggtaaaaaaacggaaaaaaaaaaaaaaaaaagttttcctgaaagttctcgtatccccaacccaccaaaaaaaaaaaatgggccaaaaacaaaccaaaccaggaacatttatttaaaaaggaagggccccatatagtttcccacccaccccatcctatatttatttgtgcaacccaaccaattcattatgggggaaaaaaaaaaacccccacttaaaacaaaataatttgggtggggtgtgaaaaaaaaaacccatggggggttcctcccggccctcccctccccaccctattattgggaaaaaaaatatgggcggagaaaaaaaaatatccccccccacccc

SEQ ID NO: 69620 - DNA, 309 bp, Glycine max
  Clone ID: PAT_MRT3847_33879C.1
ccacgcgtccgaacacttcgaaaaggccaacaaaagcgggcgagaagaagggtggatcttaattcggcgccgggtggtattggtgcataacgcgaagatgatataaagtctacaagattagagagcgaatagtctgtctctaatgcacaagcctggaggagtgaccacttaaatatgcttaaaatgggtggtgcattgaacacaccagatcctgatcgtggcaagaagggaagccaggaattctgttgcagacagactctatggcattagggccatccttgttcagcgcaaatatgagagagatatttt

SEQ ID NO: 69621 - DNA, 462 bp, Glycine max
  Clone ID: PAT_MRT3847_3387C.1
tctctttgtacatgctttaagacaaaacttagatgttgtttttttatgtgtttttggtattacattagagttttatttcaaaaatcagcataaaaatgttttatatttacagttccgaatgttgtgaaattctacttctgtttgaaggaaagtataaaaaatacttaagatactgtatttaaattttgtcttgttctttattccacttatccctctcctcctgcacctgtaacgtgaagaagagagaaatacacgggattcaagtgagattaatctaacaaatgagtcttacctgtctttctttctcatcacaacatgtgcagagaggatcttgatctgttttcttctaattcattcaactaattctctgaatacttttaaagaagtattaaatgagaaaataatacatttaatatttagaaacataaaatgcattcaattatctcttttgtttggaaagta

SEQ ID NO: 69622 - DNA, 348 bp, Glycine max
  Clone ID: PAT_MRT3847_33880C.1
cccaagcgtccgacggctgcgagaagacgacagaaggggagactcccggaacgcggtggttctggcggcgctccaaaacccccttacagtggctcctcaatgggggacagctgaggctacgggaagcttcgagatgaagatgagtaggagggggaagaggatttggagcacgagggagaacaggacccgagagcgacaggaggaatgggagtcgaagggggaagaagaacccagaggaggagccggaaaccggaatcggagggggagccaccgactttaccccaggtttcgccatagttgtagcagagagaaaggaacgaaagaaaccctcctgaaacctaaggagtg

SEQ ID NO: 69623 - DNA, 220 bp, Glycine max
  Clone ID: PAT_MRT3847_33881C.1
gccaaagacccagtgtcgcgttctcgtcactggagcatgcagggcaatattgggtatgctacttgtccctatgattgctaggggagtgatgttgggtcctgaccagcccgtgatcctccacatgcttgacattcctccggcagcagagtcattgaatggggataaaatggaattggtggatgctgcattccctcttcttagaggtgatgttgcctcaact

SEQ ID NO: 69624 - DNA, 858 bp, Glycine max
  Clone ID: PAT_MRT3847_33882C.1
ccacgcgtccgaagacacaacatcttcaatttgggacgttcttcttcttctcagctgcaaggtccaaaaagtcagtgcagtgaaaacggacgatccgaagaatattaccctctctctataacattattcatcagatcagtttgatcttatgtaaatgaagtatttttagacaaaacccagattcactgaaaaacctcgaagcggagaaaaaaggcaacaacttttcatctctacgcaagtggttatggcggttgctgagaatgttggggccaaaatcggttcttcgagccagagcttggagaacgggttagtgtcagcggattcgggtgaggttgagaaatcgaaaaccaaaggcgatcagaatctgaacaacggcgttttcaaccatcaagagagagttcccggtaccatgccagttcctaacggcaatttcagctacaaggctcagatgcacgcaaatggggtgaacaatgatgggtatgggatgaatggggtgacgagtggggagaatgggggtgagagtttcaagcgtgatatgagggatttggaagagcttttgtcaaagttgaaccccatggctgaggaatttgtacctccatcactagccaatactcatggctttttagctggacctaatgctgggtttggttacactaacaatattatactgcctactaactatggaaatactaatggtcaaactaacaacagaagggtatgagtaatttggtttgatttctattagattaggctgttttcctcccaatattatgttactagtataaagggtttcagtttttttccttaaatgcaatgttatgtgctacagaggaagaatggctataatcctgggaagcc

SEQ ID NO: 69625 - DNA, 232 bp, Glycine max
  Clone ID: PAT_MRT3847_33883C.1
gggaacaaagcggccaaacaactttgaattcgtaaaattttttacttcggggccccaaaaaaaaacgttaaaagtctgcttggttaatgccctaaaattaaaaacctgggttaagcacctcccccagaacccttaccggaaaacccccccccaacccggtggcccgcttttccaaacggggaaacccaaatttagaccattccttttaccccttgtcctttcccggccccgg

SEQ ID NO: 69626 - DNA, 2093 bp, Glycine max
  Clone ID: PAT_MRT3847_33884C.1
aattcggctcgagatttaccatgtatccttggtgatgcattgcatgaaatgtatgatggatgacatgtaaaatgggcagttgcggaaattaacgaaattttgggtccattttttttatatattatttcttttataggttcatcatcatcatcaatttgggacgttcttcttcttctcagctgcaaggtccaaaaagtcagtgtagtgaaaacagacgatccgaagaatattaccctctttcatctctctctataacattattcataagttcagtttgatcttatgtcaatgaaggatttttagacaaaacccagattcacaggaaaaacccttaaagcggagaataaaaggcaacgacttttcatctctacgcaagtgattatggcggttgttgagaatgttggggccaaaatcggttcttcgagccagagtttggagaacggtgtagtgtcagaggattcagtgcagcttaaacagacgaatcccaagaatgcccttttcatctctctctacaataatcatcatcttccttcttcttcttcagtaaattattgtacctgacgatcttctcggtttgatcttatatcaatggaatttttttagacagaactcggattcacagggaaatctgattgcataggaacaaaaaagacaacacctttttatctctacacaagtgattatagcggttgctgagaatgttggggcccatagctgaggaacctgtcactatatcactagccaatacgcatgatcttttacctggacctaatgctgggtttggttacactaacaattttatactgacctaataactatggaaatactaatggccaaactaacaacagaaggaggaagaatggctataatcccgggaagcgaagaatgaatcataaaatggatatggagaaaagggaggagatgattcggaggaccgtttatgtgtctgacattgatcaactggttactgaagagcagctggcagctctctttcttaactgcggccaggttgttgattgccgtgtatgtggagatcctaactctattcttcgatttgccttcattgagttcacagatgatgaaggtgcaagggctgctttgaacctgtctggaaccatgcttggatattacccactgagagtgctaccttcaaaaactgccattgcaccagttaatccaacatttttgcccaggtctgaagatgaaagggagatgtgctcaagaacaatttattgcacaaatattgacaagaagcttactcaagccgatgtcaaacacttctttgaatctatttgtggagaggttcaacggttgaggcttcttggagattaccatcattcaactcgaattgcttttgttgagttcacagtggctgagagtgcaattgcagctctaagctgtagtggggtgattctgggttcactgcccataagggtaagtccatcaaagacaccagtgcgatcacgtgctcctcgtcctcctatgcactgaatcatcctttcacatgtttctggggatgatgctgcttggagatatatttacatatatatataacatagaaacagatatattctaagggtacccatggcgttttcttaatacgttgttccatgattcttgcagtactgtatctcttggtttcctgttggggagacgacttatggattacgctcgtagagctcgatgtgctttgagatatttaacttaattgtgaggcttgtcttgcagatagtgttctaaggaacatgtggcatttagttggtacttttgtcctcatgtcttacagtatggttactttgcttccccttgggggattatgggtctctgttttagcatgtagagtcgaatcgtacttcgaggatcttgatggcttaatttatgatgcacaatgtgtcgtgttgatcatgcaaggagagaagtttatggttgttgggtgtttctaacatctggaatttattttaaagaaacatgttacaaagccttcgttttcgttattcatgaggtgtttatcatggatatttgtttagatcgcgatataaaatagtgtctgattttctgtttgtctcacgtgtagtttatttaacacctacctt

SEQ ID NO: 69627 - DNA, 830 bp, Glycine max
  Clone ID: PAT_MRT3847_33885C.1
cgtgtttgtggggatcctaattctattctccggtttgccttcattgagtttacagacgaagaaggtgcaagggctgctttgaacctgtctggaaccatgcttggatattacccgttgagagtgctaccttcaaaaactgctattgcccctgttaatccaacatttttgcccaggtctgaagatgaaagggagatgtgttcaagaacaatttattgcacaaatattgacaagaagcttactcaagccgatgtcaaacacttctttgaatctatttgtggagaggttcaacggttgaggcttcttggagattaccatcattcaactcgaattgcttttgttgagttcacagtggctgagagtgcaattgcagctctaagctgtagtggggtgattctgggttcactgcccataagggtaagtccatcgaagacaccagttcgatcacgtgctcctcgccctactatgcactgaatcaactttccatgtttctggggttgattgctgctgagatatatttacatatatatatatacatagaaacagctgtgttctaaggaacatgtggcatttagttggtacttttgtcctcatgtcttacagtatggttactttgcttccccttgggggattatggttctctgttttagcttgtagtcggatcgaactttgaggatcttgatgacttaattatgatgcacaatgtgttgtgttgatcatgcaaggagagaagtttatggttggatgtttctaacatctggaatttattttaaagaaacatgttacaaagcccttcgttattcatgatgtgtttatcatggatatttgtttcc

SEQ ID NO: 69628 - DNA, 435 bp, Glycine max
  Clone ID: PAT_MRT3847_33886C.1
aaaaagagctaataaataacttacctttcttatataaaaaaaaaaaaggttacacaatactacaagattttactacagaagaatccatactcacagactatctaagcacccaatttttattagagtccaaacccaccattttacataagggcaactcatcatggaaggggtgcaaaaatgacagattcactcttcgcatcagggggcaacttttttgtctcagcacaaacatgatcgatcgttacgcatttgagttgctagaagcttggcaaaaacgaggggggcggcagaaaacaacagtaatagacaggtagacaaaatcccagatcatccaggggcttacatgaggcatgccaaataaaatttctaacacatccaaaatatttatcacatgggtgtctacatcaaaagagctaataatctatgggtaggacc

SEQ ID NO: 69629 - DNA, 259 bp, Glycine max
  Clone ID: PAT_MRT3847_33887C.1
ggagggggggaaaaaaaggggttaacggaatggaataatggatggattccggaaaatttaagaattaattctcttcaactttaaattctgaatggatatttggaggtgctcaacctggtataatttctaaattaaaatatacaaattaaaaaaataatctgtctcaatctgttcattattaaatggacattttaataatattttttttaagaatatgtatcctatctgggcaaacctgaaaaaaatgtaactcaattat

SEQ ID NO: 69630 - DNA, 152 bp, Glycine max
  Clone ID: PAT_MRT3847_33888C.1
aaaaatgaagtctcagccttagggatagaagtgggccggacctgtggcagcaacttatgctacttgcggagtccgcggaggaagaatgtggctactgtgctagtacaggtatctataacctcatctttgtgttatatagtgtgttgtcccga

SEQ ID NO: 69631 - DNA, 355 bp, Glycine max
  Clone ID: PAT_MRT3847_33889C.1
caaaactcgtgctttgttttatcaatgcacgcagcagatcgcgattttctcaagagaaacaataagaccccccctatacctactggatctgctaatttgcctgaggcgagattatggtcacaacttgattatgctacgacccataatgtaacatctgctgaagcttatcttgacaatctcgcaaatgtgttacgagaatcgtattggtacatgacacatgactctcgccaattgagaaggaaagctctctctcgtattgaatggctgcaaaaagctgatgtgcctaccatagcacaaattgacacgcaacatttgatcttcacgatgatgaatgctcctgattcaaatgataata

SEQ ID NO: 69632 - DNA, 659 bp, Glycine max
  Clone ID: PAT_MRT3847_3388C.1
aaggtatcttctatcattgcccgtggaagagcgtcttaagaaaatgcttgaggatcgtccacttcatcgtttcagtgctattaagcactttgctccagaatattccgagaatgaacttctaggattcctgcagcagcatgcaatattggtgtggggactatggactgcaaaaagttcattgctatatcctgatggtggtgtggaaactttggccagagattattccctactattgtttagcaagagtttgaaagttcagttttctgatgtgagtattcgaggaggtgaacttgttaatcgtgtgagaaactgcctgaagatatttggcgtggaaagaaatgatcttgataaatctactggaaaaccaaatccttactggaagttcagagagcttcctgacgagtcattcaaaaaactctatccagatattgttgaaaaacaggaagaacttttcaaaggtttggaaaaacagttatctggtttttcttcgaatgttggaaaacgtaaaattggtaaaaatgctgtagcaaaccaaggtgtgaacactgaggttcataaatcagaaagttcagatcaacgggtaacaagtctgggcagagtgcctcctgcgaaaatgaccctgtcaaatgaaacccgacatgctctgccaattgccctga

SEQ ID NO: 69633 - DNA, 264 bp, Glycine max
  Clone ID: PAT_MRT3847_33890C.1
aggtccgaaatatcactatcattatcgctgaacaagggtatttaacaaaagcctcaaccacaaataaaaacgacaacccggcttaccaaacattgtcacgttcaggataatacattcaaaagctatctaaaatctggggaacccgcattggcattaacacccttgacaatactattttagagagaaacatatgggccccatgcctactcaacatggccctaaccgatgctaacgcgtcaggagcccaacgatagaaaagctttt

SEQ ID NO: 69634 - DNA, 242 bp, Glycine max
  Clone ID: PAT_MRT3847_33891C.1
tggaaaggtcttgcctatgatgtgtcagacgaccatcaagacatcacaagaaggaagggcgtggttgattccctcttccaagctgcacaggatacttgagcccactatgcaatcatgagctcttatcagtaccttatcactggacttaaacagtacaacttggataacaacatggacggatttcacattgctcctgcgttatggacaagcttgttattcacatcagcaagaacttcatgacc

SEQ ID NO: 69635 - DNA, 193 bp, Glycine max
  unsure (1)..(193): unsure at all n locations
  Clone ID: PAT_MRT3847_33892C.1
gtcatnntttttnactganatcggttganccncagatggtgatctctcagnntnggatacttttgttggagacagttcnggaatagttggtcangtncgtcatanaccttnctaaggtcacgcatatagntacaggtgtcattctgcactnatgtcntatntgtgtagaactnatgtttccttcttgacntgg

SEQ ID NO: 69636 - DNA, 464 bp, Glycine max
  Clone ID: PAT_MRT3847_33893C.1
ggaattcggcacgaggatctcactgaagctacagctaaaggcagaaaggcaagggaggacatgatatgacagttctcgcctgagattgtggccgacattgttgcagaccacatacagaacatactaggacagtgaagactatgaagtttctggttctgtttctccactgctgttgtgctccaaacttttcttgtgattcactcacaaggagattgagattgtatgtagaagtattgttatttcttcagggaatgattgaggcacagtaacttaacctccggaagttttgcctaaaggtgacacaattatccagcaacctgccatccactcagattgttaccagtagtcgttggtctcaagggttgaaattgatcagaagaccaatctattatatctgcttctctaaaatctctcaagtattgcacctaattcctcttgttagtttaggcataggaacctttctt

SEQ ID NO: 69637 - DNA, 727 bp, Glycine max
  Clone ID: PAT_MRT3847_33894C.1
gaattcgagctcggtacccggggatcctctagagtcgacctgcaggaattcataccgttcaactttactgaattttattaatattgagtgataaggcaaaatctaatcgataaactgataaaaaaaaaaatctgagggtgaatgattttttgatgtgtcaatcttcttgctcaatcaagtaacaaagctatattaaaagaggaatattatttattggcttttcacaattatatataagagaatgttggaattgaaaaaatatataacattataagtacaactaaccatcatgcactagtaatataaaacaattatatatcaagcatgcaattacatatcactgttggccatgcatcatcattaagaaaattaacaaaaatctcatatatgataaattataattatacaataatgtgaaattatattacatgatcactttatacacttatgtttttttatcaagaatacattactctttatagttgaaaatatatatataatgaatttttttatacacaaaatttaaacacaaattttatttaagacaaataagatggatattgtctaaacacttgtcgaccaatcacaaatataaatttttgcattacaaaactgagtatataacattccgttgctaaaaaaaataaaaatttaaagcaaaactttttgcatggagtagaaagatggagaagggagcaccaaccattgcatggcacgtggacatgga

SEQ ID NO: 69638 - DNA, 115 bp, Glycine max
  Clone ID: PAT_MRT3847_33895C.1
cgtactagtacagttcgctgcctcgaaacttggcttctagcactggtccaaggtgccaaattgctgttcttgttggcacctggtactactcatatctcctgatctggcagtgctg

SEQ ID NO: 69639 - DNA, 611 bp, Glycine max
  Clone ID: PAT_MRT3847_33896C.1
ctcccgacccgaccggtcgttgggtgcgggtcgcacggaagaagaaacgactcaaccagagagagaaagtgtggaaataactcaacatattcgcatggtctttcaactttcaactcttaagaccagaccggtcgcactttccccattcccatagaacacgttgcagccccttcgttggaccaattcgccgcataagcaaaacccttccttcacgttaacccccaaatcataaccctctctctctctcttttttttttttttcccctcaccacttggaaactgaaatggtatataaagaaacaagttcatagagatttgccatgagaataattccctcctgttcttctgcacactaaggaactaattgccttcaattctgataaattgcgttgtaaggatctaatatgagtagcaatgatcaaacttctggtgctagtctctacattagggctttaatgctcaacgattctgctggtgcctctgctggggcaatacaggtacccgtggccttcccaaacaatagtgtcattacttccgaattgggccatttacttcacaatgggcagaaaggtagtgtcattatcacacgcttgcaaaatatagtaaggaat

SEQ ID NO: 69640 - DNA, 192 bp, Glycine max
  unsure (1)..(192): unsure at all n locations
  Clone ID: PAT_MRT3847_33897C.1
gtcttatntcgtgaattattggtttnctggccttagcaaaatgattatgattatgagatggnatgacnaaaaatgcccgtgntgttgtgatttaaggnattctanaaactcnatcctggcattggtcatagattccaagactgctcagttaccctatnacctaangactctggctcttnatttatntctncc

SEQ ID NO: 69641 - DNA, 438 bp, Glycine max
  Clone ID: PAT_MRT3847_33898C.1
gggcgttctgctcgagctttgttcataaaaaatcactctcgaggttccgtctgcgcattagcaacacatttacctgatgtccgtgatagggtaaactcctactcactaatctatctttgcgcgcccccatggatgcacagtttgagatggatgtcgttaccagtacttgtatactaagaatatggacgtactcacagctaactggtgcatgcaatctatgttgcctcagtcatatgctgatgaaatgcatatgatctcaaccaggcatcttgcgaatatctgcacgggagttacgcttgtttccacacttcatgtccatatacataggttacataaccgagacatataacattacatgggttacagctatttgctcatctactatcttaacccaacgctacctttccgctatcagacggacgaggactatgactatgt

SEQ ID NO: 69642 - DNA, 1567 bp, Glycine max
  Clone ID: PAT_MRT3847_33899C.1
caggtaccgtttccgggttccacggtcgacccacgcgtccggttagttagaaaaagagagagaaaaaggaaagaaaataaaataaactgacagtaacagatagcgaaacaaccaaacctacaaccgccatgaccgaagaagaccgctccgcccaggaaaccgtccacaatggcgtcgcctcgacggagctaggcggcgaggagatggacatcgctgaggtgacggccgccggaagagtgaagggaccgtggtctccagaggaggacgcgctgctgagccgattggtggcgcagttcggtgcaaggaactggagcatgatcgcgcggggagtgccgggacgctccggcaagtcgtgccggctccggtggtgtaatcagctggacccttgcgtgaaacgcaagcccttcactgaggaagaggatagcatcatagtttcagcccatgcaatccatggaaacaaatgggcagcaattgctaggcttcttccaggaagaacagataatgcaatcaagaatcactggaattctacactgaagcgcaggtgtatggaaatgggaagatatgtcccagcacatgctgatgtgatggaagatggtactggcagctttgataaaacaaaagcatcctctgaagaaaccatgtcaattggggatatcaattcaaagaatcctgctgaagtcagaaatgtcatgatggataatgaaaataaacctccaacaaaagatgatgctaaagtggaggaacatcctactcttcatcgaccagtagcacgtgttagtgcatttagtgtttataacactccaggaaggtcaacaatgggatcatgttcaaagatgttcccaaggcagagccctttgatccaatcccccaaaccagacgtaggatcctgcaagttatttgatgatattgattgtgagcccatggttccatcacaatgtggtcatggctgctgcacaggagactcgagggaaagccattcgcatggttcacttctaggtcctgagtttgttgactatttggagtcaccttcctctagtcatgcatttatttctatagctacagacttgaacaatatagcttggatcaagagtggccttgagaattgtagtactggagtaactgagaatactgcaaacttgacagcatctcgaggagttgccagtgctttgcaaacaaacttcttaggacaagatctaaagaatggctacgggcaatttgaggagggacatggcatgtttttgggtgcgatgcaagaagtgttgtcaacaaagatggctaggcaacattatgcaatgcctgcggaagtttaactctaacttaaggttcctcaattggattttttattttttattttgatgtgcaagtggatttcaatcttagtttgtggcattttgtggtgggtggatagatagatcatagatggtataagtttgtttcactacaatcaagcgcaccgtgtagagtgagtagctcttttcggttttcattgacttgcagagttcttgaattgcatcttggtaactataatctgaaaatatatataccaaattaccaatttgatcttgtt

SEQ ID NO: 69643 - DNA, 3663 bp, Glycine max
  Clone ID: PAT_MRT3847_3389C.1
cttttctatcttgaatttagtttggcactgtaagagtatgagtagtgtatatgagtaactaactcagtttactttactactgtaattagttaacagttagctttagttacttatatacactactcatacattctcttagaatgtgggtttgagcctaattcaaccccaaaagttagttcatacaactgagagttgccccccacttatacaccttatcttgatcttatctctagttgatgtgggacttaagttttacctaatacatctcttgatgcccaatacgtttgggcttggtgcatagataatatggtggatgacccttttaatagatctagcatagactctgataccctgtaggaactctagagagtgaaaaaaagagatttgtatatctcattatagattgtacaaaaggcactgagatctctgacaataacagtacttatactgttgagattcagttgagaaactgttgtaactgaaaagaaactgaagctaactgataactaactacaatagtaaactaaagtgagtttgttactcatataccctactcgtatactcttacaggtactaagtgcagtaggaaaatgcatacttttctggaagagaagatgataggttaactgacattttagttgcccttctgttccatggtatatttagggctgcaagtgatgatgatgcaaccttaatacctctagaatttgcaaaagacatgctgagaaaatgcacgatgagagctgaagctttaataccatgttattataggcgaagaaaatgatctttatttttctacatcgatcaaaattacctgagtttatactggaagagattgctaggagagatcctacacacacttattacataataaatacaaagataaggagaaaataaaggagaataaacaaatcaatttgaataatctgatctcgatcttaagtacttaaatcttttagaatccttatttttgagttttgaaataaaaacacaaacatgatacaactgtcaacgtcttttaatctgtatttgaaatttaaaataaaagcacatacaactatcaacacttgttttcaagttggtgcaaagatgtttggcatttccaacgtataaagaattctaaattaggtctaaacagtttttagtaagaatgtttgtgacttgtgaagtaggaacaaatggcatgcagtcttcatgaaccagttgaagctggatcatcacaagtttatgctaaactcagttatatcttaacttgttatttgttttatatttctcggaagaggtaatggagaggtacatgtatagactctgcttgtcaaaacttagtccccagacgagggaaactttcattaattttttaggtgttctgcgaagcaatacaatgttggtggaattcttattttttgttgggtgcattatttctaaagataaccgttacattgcttaatataattccctgaatttccgcatcctctatcacgtgtaaagcaacaggctggttataggctttcatatcaaatagttgactctttgatttggctcggaattcgagacatgattaatgatcttaggaagaaaaagttgaagctacgaccagtcacatatttaagtggctcacaaggctctgaaactgatgttccacatgcatatatatggagtcctcatcttgttcctaaaccaaaagattggggaccaaaaattgatgtagtagggttttgctttcttgatcttgcgttaaactatgaacctccagagtcccttgtaaaatggcttgaagaaggagacaaacctatttacattggatttggtagcctgcctgttcaagaaccaaaaaagatgacacaaataattgtagatgctttggagatcactggacagaggggcatcatcaataaaggatggggaggtcttgggaatttggcagaaccaaaggactctatatacttattggataattgccctcatgattggcttttcttgcgttgcaaggctgtggttcatcacggaggtgctggcacaacagctgcggggctcaaagctgcttgcccaacaaccatagttccttttttcggcgatcaaccattttggggtgagagagtacatgctagaggagttggtcctccacctatcccagttgatgagttttcacttcccaagttggttgatgcaataaaacttatgctggatcccaaggtaaaggaacgtgcaatcgaacttgcaaaggccatggaaaatgaggatggagtgacaggagctgtgaaagcattttttaagcagcttcctcaaaaaaaatcagagtctgatgcagatccgcaaccaactggttttttctctgtaagaagatgttttggttgttcctgattcaaatgcagtttattaaaccccactttttggtaattaatagtgtaaatcacaaatagttctgcatctataggatgtgctgacttgtcaccctgtcatgtgattgtataatttcatgcatgcttgtatttgtactatttaacttgagattcagtttgtatgtaaatttaatgttggattttatttgtattttaaaactacttttacatatatacctaaaataatatattattattattattacctctcccctccccctacaaacaggttccggctctaatattgggacactataggcacaggcagtcgggcacccacccactctctctctctctctttctctctcatttcttcagttcctctgaagccgtgcttgcggcggatctagatcaccggcaatggcggactcgccggaggattgttcgagggatcctggaaacggcaaggacatggaggacagtacatcctctgttgccaatggtacaagtagctcttctggctcaggcattcttggcaaagggttgtctaaagtgaccacattgccagcagacatatcacaagataaatcggagtcaagctcaagtaagtttaagatggaaaggtcaaaaacagagaggcagagacacctaagtcctgaagatgcagcacagatttttgacgacaaaattcctatccaggagaagctgaaattgttgaacagaattgctactgtaaaagatgatggaactgtagaatttgaagttcctgtagatgttgaacctgaggctatttttgctcgatccaaacaagtaaatcatgttgttgatgattcgcttgatgcaacagactttcattacatcccgccattgaatatagtcatgcttattgttggtacacgaggagatgtgcaaccctttattgcaataggcaaacgcatgcaggactatgggcatcgtgttagattagcaacccattcaaattttaaggagtttgttttgacagctgggttggagttttatccattaggcggtgatccaaaagttcttgctggttatatggttaaaaataagggctttctgccatcgggaccttctgagatacctattcagcgaaatcaaatgaaagaaattattaactctctgcttgtagtctgtaaagaacctgacattgattctggtgtcccatttatacctgtagcgtgcagatacatctgtcaataatatggccatgtagtttctaattctgtaatttcatctcttagcaatgttagtttgtggcatgctaggttgggtcatgctaattgtcatgttatgaagctagtct

SEQ ID NO: 69644 - DNA, 364 bp, Glycine max
  Clone ID: PAT_MRT3847_338C.1
atagacaataccaaagtttctttaaataattatcaaaataacaaaccgaaagttcattttagtccttccttctaaaaaaacaccaactttccttttctccttttctcactcaaataatacgacacttcgtttttttttttttcattcacgagaatagccacaaatttatcttttccaaattcgacacaaaaaaacgccgtttaagggggtccaaaaacgccactaagaaaaattttgtaccagcggctttacactgttccaaagttaaaatgaggaccacaaaatttaaatttttgcaaaggtagagggggaggggggcaatttttgattttggcaaccaaagggggggggggggccatggggg

SEQ ID NO: 69645 - DNA, 248 bp, Glycine max
  Clone ID: PAT_MRT3847_33900C.1
tacggctgcgagaagacgacagaagggcaaagacagaaagtcaggatctattggcggtcgccaaacaaatatgttcagtgatgattttgatggatcatcccagcagtcttataggaacagtagggggtctcgggaaaatgaccataatcggaagagttttgaagattttgatggaccgtctcggcaatcatatggttatggtagagggtcccgaggaaacaacggtaatggatcatcccggcagtctt

SEQ ID NO: 69646 - DNA, 461 bp, Glycine max
  Clone ID: PAT_MRT3847_33901C.1
ttttttttttttttttttttttttttttttttttttttttttttttttttttttttttttttttttttttttttttaaaaaaaaaaaaaagggcccggggctggcccaaagggccggaaaaaagccctccctaattaaaatcccaaatcccaattacaaaaaatccgggggggggtttaaacggggccccccaaagggccccagaaaaaaaaaaagctttttggatttggcccccctggaaacccccccgggggggttctttggaggtccaaatttggaaaaaccaccctttgccccccgggaaggggcaaaaccttttttcattccctgggcccccccagggcctggggggcctcaaaaaaaaatttggccaaaaccggttttccccccccccccccagccaagttaacccggggctaaaaattaaaaaagggcccggaaatggccggggccttttttgg

SEQ ID NO: 69647 - DNA, 1732 bp, Glycine max
  Clone ID: PAT_MRT3847_33902C.1
cggccggcgttcgggttgtcgttcaagattaggctgcccattatattctctcactctctcactctccttctctctcctattgcggctagggtttgggtttttcactttcagcctctccgttccttcaaccttcttcttctctttgatctctgatggagacgttccgtgtttagtagtaaggggtggttgtggccttgtgttttgaaacgtacggtgtcgttttggagttgggaaaacaaataattctgagagatggcaaccacgaacccttttgatttgttgggtgacgacgctgaggacccttctcagctcatcgccgccgagcaactcaaggcggcggctgctgctgcggcggccaccgccgctcccaagaaggcgccggctcagcagatcaagccggctcagctccctagcaagcctcttcctccggctcaggctgtgagggatgccagaaatgagtctgttcgtggaggccgtggaggtggacgaggtgggggacgtggatttggacgtggtcgtgggtttagtcgtgactcttcgaatgacgagaactcattccctaccagcggagctccttataatcaggtttcttttgaaggagatgctgggaagtcttctgaaagacgcagttatggtggaccacgaggtccttaccgtggtggtggtggtcgtcgtggaggtttcagcaatggtgaaactggtgaagctgaagaaggacgacctcgaagagcatttgatcgtcgcagtgggactggacgaggaaatgaattcaaacgtgaaggttcaggacgtggtaactggggagcccaaactgatgaacttgctcaggtaactgatgaggttgcgaatgaaactgaaaagaatttgggtgatgagaagcctgcagttgaagaagatgtagctgatggtaacaaggacagccctactaatgaaactgaagaaaaagagcctgaagataaggagatgactctggaggaatatgaaaaagtgttggaagagagaaggaaggccttccaagcactcaagactgaagagagaaaggtggacactaaagagtttgaatccatgcaggccttatcaagcaagaaagacaatcatgacatattcattaaactgggatctgataaagataagcgaaaagaggcttttgagaaggaagaaaaatccaagaagtctgtgagcatcaccgagtttctgaagcctgctgagggggaagcatactataacccaggacgtggtaggggccgtggccgtggttcacgaggcggaggcggttaccatggaagtgccaccaacaatgcacctgctccatccattgaagatcccgggcatttcccaaacttgagtgccaagtgaggccttcccagaacccttttgacatatccctgtcctattttcaattttgggttctcttatttgaacttaagcaggaaaggaactatggtaattggatttcctggattagaaggttcatttaattttatgccttaaaagtgtaaatttaggttgttcttcatacggtcatgtatcccttgaagcctgttcccccttgtgctttatttttaccgcgtttgatattttgggggaatatggtcggggtaagacataaatgttgttgagttcccttttcttcatagatagacatctcagttttgcatcaatttaaggtttctcatccccaattctagtctctatcaagaataacttacaataaatattagtggaaaccaaa

SEQ ID NO: 69648 - DNA, 293 bp, Glycine max
  unsure (1)..(293): unsure at all n locations
  Clone ID: PAT_MRT3847_33903C.1
tcgatttggtgaactcactaggaaaatctggcatgcacggnnctttaaaggacaggttcagttccacacgagtttcctacancgctgtncatgacngccagtacaaaaangtttcggctaggtggccaatctggaccggtngagttcatgtcntggataacttaatacgctcacctgcagatcctcnagactttcacagaagataccngcntnatatatgcantgttttcagggcgaacttnangtngtgcaagcagtncccaaccanaatgnacccnganaagaccgnnncc

SEQ ID NO: 69649 - DNA, 1002 bp, Glycine max
  Clone ID: PAT_MRT3847_33904C.1
aataattttcccgaatcgaggtgtcggttttgaaaagagttaacaatctcttctcttcgctcctgcacttgttgtttctttgcccttcatggcatctcaggctagccttctccttcaaaagcagctcaaagatctttgcaaaaaccccgtcgacggcttctctgccggtttggtcgatgaaaccaacatttttgaatggagtgtcaccataattgggccgcccgatactctctacgaggggggatttttcaatgctattatgagtttcccatccaattacccaaatagtccaccttcagtgaagttcacctcagagatatggcaccccaatgtatatcctgatggccgggtttgcatatcaattcttcatcctcctggtgaggatccaaatggttatgagcttgcaagtgagcgctggacacctgttcatacggtagagagtatagtattgagtatcatatcaatgctttccagccctaatgatgaatctcctgcaaatgttgaagctgcaaaggagtggagagataggagggatgatttcaagaaaaaggttagccgatgcgtaaggaagtcacaagaaatgttgtgattcgtcgcctatgcctcatactgctgctgctttttgtgaactggaggacatataaatgtgtaatggattggttctcctgttactgttgatccgtataagaatcgcattggaagtccacattcctcctttcttcagttccatcatgttctctgcatggccatttatcataacttggaaaacaaactgtattctaagtgtttttggccggtctttttgactactttattgaaaaatttactttgttcattcgcataaaagtttatattggatttcttatctaaaaaaaggtttattatttgagttttggtacttgtttgctcttattgcgatggctcggctgattttgcactatatagccagttgtagctctcaagttgagtgcggattgagttatttttcacaacagatcaacg

SEQ ID NO: 69650 - DNA, 647 bp, Glycine max
  unsure (1)..(647): unsure at all n locations
  Clone ID: PAT_MRT3847_33905C.1
gccttgcacctatctcgagactttacttgcttcacggagctatgaacttgaccgatgtcattantacatgaaaacgcttaaactaaaaaaagggagatattgcggaacaaaactagtagcgcttccatatttttgagctacactctcaaaagactggaggtgggacttcttttgcttgccggcgagtacacgtgaaacccggggctcagtgaaaaagctatcttggcagaagatgcaacgctgaaaccgctcaaataatataagacgagtgtgaaagagcttataaagattgggaatgctctgacagtgggcgttgttgaaggtagcagtctttaaactgtgatttagatgaaatgagtgagggttcggaaggggttggtgatttgtgaatggaagttgaaagacttctgatgtgaaaaaatggaattgcgatgggcgctcatattatctattaaggagagaaattgctcgttaatgagctgaaagggttatgtaagttcgagcagactttgatcatacagctcatgatagcggttaacaagatgaaagatttcatactggtgatgactgattctgaagctagatgactgggagacggcaaagcattagtgagcattacgatgatgtctgagaatgctgacatgatc

SEQ ID NO: 69651 - DNA, 465 bp, Glycine max
  unsure (1)..(465): unsure at all n locations
  Clone ID: PAT_MRT3847_33906C.1
atccacgcgttcgcccacgctttcgtctacgcgttcgcccacgcagtacacaactttacaacaaggcatcggttatggcaaatctgcgatcgaagtctgaaactgcttgtgatccggctccggttgaggctgtggtgccatggaactacgacgttgtttagaaagcttctgaaacaggggaatacaaagctatggtttctgtatcctagaagacaccggttcctgcagacaagcatttctcaagaggatcctttgatagaaaaatctctctggctgacttggataaagagaaagagttgttctatgtgaatgcatgggaagaaagggacaacgccaaatcagataacagaccttataaacatctctcatttatcgatgcttgggaaaacagttaaaaggcagcttttgaaactgagcttaaaaaattggacgaacaactggagaaaaagaaagcagaatttggng

SEQ ID NO: 69652 - DNA, 1918 bp, Glycine max
  Clone ID: PAT_MRT3847_33907C.1
tacggctgcgagaagacgacagaagggggtgaaaccaaagtggtgtctgacaaggcagtggagaaatttgactggaatcccttacattacatcaagaagtcatctgatgttggtgtggaaaacaaaactgagcagggggactcaatagccatgaaaggaaggattatactgtacacaaaactagggtgccaagaatctaaagcaattaggctatttttgcgtatgaaaaggcttagatatgttgaaatcaacatagatgtgttccccggtagaaaggtggagctggaaaagatttctggatctgcttctgtacccaaggtttttttcaatgaaatactaattggaggctggaatgagctaaaaaacctggatgagtctggtaaacttgatgagaaggttgactttcttattactgaagcaccattatttgaagccccatcaccacctctctctggagaggatgatgtgtccagtagtggaccacttgatgaattggcaattattgtccgtaaaatgaaagaatctattgctgtgaaggatcggctgtataaaatgcgcaggttcactaactcttttctcagctcagaagctatcgacttcttatcagaagatcaatatttggaaaggccagaggctgttgagtttgcacaaaagcttgctgacaaactttgatttttgctttgctttagtgaggatatatttgaagatggaaatcacttgtatcggtttttggatgatgacccaactgtggtatcacaatgtcacaacattactaggggcataattaccttgaagctcaagcctttagcagaaattgcatcaagattgaggtttctgtctcgtgctatgtttgaagcctatgtttatgaagatggacgtcgtattgattatacaagtatacatggaagtgaggagttcgcaaggtatctgagaatagttgaagagcttcaaagagtggaaatatcggattcgtctagagaagagaagcttgcgttctttattaatctttataatatgatggccatccatgcaatcttagtattgggccatccagatggagcactggaaagaaggaaattatttggagagttcaaatatgttattggtgggtcaacctactcactttcagctattcaaaatggcatattgaggggaaaccaacgaccaccatataaccttaagaagccatttggtgtaaaagataaacggttgacggtggcacttccttaccctgagcctcttattcattttgctttggtatatggtacccgatctgggcctgcacttcggtgctactctcctggaaatattgatgaagagttattggatgcagcccgtaattttctgagaaatggaggcattgcagttgatttgactgcaaaggctgtaaatgccagtaagatcctaaaatggtatagtatagattttggcaagaacgaggtagaggtgataaagcatgtttcaaactacttagattcagctgactcagaagtattgttggacctacttgctacttccgagttgaaggtgacatatcagccttatgactggggcttgaactgctagcatgggctaccaaagttctgtaaatatgtcacctagattactgattttccgttatacagattaccaccaaagtaatcaatgtcttatgttaacttttctgcccatttcacttgcctgtatagaatggtacacgaggaagacaaaaataggtctgaggaaaatatttctcttatttcctgaattcctgttctatatgtaccgtctttctacatcttttgctctttattgtttgatgcaacttatgatgatccattacatttactctgcttgaagagcttgaacttgtaatgcctttctcagcctattaaagaaccggttataagcattggtccttggaaattttgaaatggat

SEQ ID NO: 69653 - DNA, 177 bp, Glycine max
  unsure (1)..(177): unsure at all n locations
  Clone ID: PAT_MRT3847_33908C.1
tgaaagtnagacaatttcaattgcctcgagttataatatactcactacctaccactcatggtatttcattttgtatattagnnttagaatttttaagcggtttcagattaagaaaactaattttntggtgttattntatttacaatagttaggcaaaaatgttacatattatagtca

SEQ ID NO: 69654 - DNA, 271 bp, Glycine max
  Clone ID: PAT_MRT3847_33909C.1
ggcacgataaaagcgatacttctctaatgaattgtttctctaatcgatccaccaacattccattttcgtcatcatccggtaccgtgataattttcacagctacagcttcatctttatacatgccatggtaaagcctgctatgagcaccatgagcaaacctaacaccaacaaagagcttggagaggtcaacattccattcctcagctgtttccacagcagtaaccttctccctccatgatcaaagtactttgtccatcccaaatcctttcgg

SEQ ID NO: 69655 - DNA, 739 bp, Glycine max
  Clone ID: PAT_MRT3847_3390C.1
ggctcgagggaatttggcagaaccaaaggactctatatacttattggataattgccctcatgattggcttttcttgcgttgcaaggctgtggctagccaattacatggtagtttgtcttgggtgtggccccgcatcttacaatgtgagcatcgaaggttcatcacggaggtgctggcacaacagctgcggggctcaaagctgcttgcccaacaaccatagttccttttttcggcgatcaaccattttggggtgagagagtacatgctagaggagttggtcctccacctatcccagttgatgagttttcacttcccaagttggttgatgcaataaaacttatgctggatcccaaggtaaaggaacgtgcaatcgaacttgcaaaggccatggaaaatgaggatggagtgacaggagctgtgaaagcattttttaagcagcttcctcaaaaaaaatcagagttggttgcggatctgcatcagactggttttttctctgtaagaagatgttttggttgttcctgattcaaatgcagtttattaaaccccactttttggtaattaatagtgtaaatcacaaatagttactgcatctataggatgtgctggacttgtcaccctgtcatgtgattgtataatttcatgcatgcttgttttgtactatttaacttgagattcagtttgtatgtaaatttactgttgcttttaattgatattaagtgctcggcatatataaatcctc

SEQ ID NO: 69656 - DNA, 293 bp, Glycine max
  Clone ID: PAT_MRT3847_33910C.1
acgtccatgctttcgtcaagcattacattcttctctacatcttaatgctgctcaaccttatatcaaaggtacagctaaacaatactggctgggttaccattcaccttatcttctatcatctgaccacaatcaacgtctatacatattttctcttccttgcaatttaccactcttatcatcaagtacatctatttaaatacaattaaggcacactctatcactacacaaccatatattttaaaagatcatcccaaacacttcccttcccttactctatcattgtcaatatttat

SEQ ID NO: 69657 - DNA, 408 bp, Glycine max
  Clone ID: PAT_MRT3847_33911C.1
accgctagaagacgacaacagggggtgtactcttaaaacatgagtgctttatgaaccgttcaatcgtgggtatctaaggatgacagagaacagctatactttggcaactagctcatttactgtgggattcaactgacaatctttatctacaatactaatattgagacattcaaacgtacattacatatgtacgtagattaatctaattaatttgagtcgaatgggattgtggtagcatgattacatctttaacttaattatgaattaagtaaaatggtcacgcaactcatatatacggggcaggtcaaaatttatttttcatatgccaccattaagaatcttgagtagaagatatcgggtatatgcttaaagttagacctggttaacttcgtgatttgtgggtcaaac

SEQ ID NO: 69658 - DNA, 234 bp, Glycine max
  Clone ID: PAT_MRT3847_33912C.1
gctataccaatataatcatattactcacatagatccatctttcactgatacacctatactctgggccaaagagctacttctactcattgactgagaaaattacatccacccaaaattaattccaccatggacaattcttttatccaactatattatttaatcacttacacaacatctttaactcccacaaccgaaaccttttcacaaacgaattcctcaatcgtaacaattatt

SEQ ID NO: 69659 - DNA, 826 bp, Glycine max
  unsure (1)..(826): unsure at all n locations
  Clone ID: PAT_MRT3847_33913C.1
acggctgcgagaagacgacagaagggggtcacttaatccaaatacaaaagctatcctcacaccccataaaatcacaatgacaacaaaaacaacttctctcctcctccttcatgtaattctcctcgccacggcggaagccgccgccgccggcggccactggaaggtcctccagcaaagcatcggcattgtggccatgcacatgcagctcctctacaccgacacggtggtgatcttcgaccgcaccgacttcggcctctccaacctctccctccctgacggcctctgccgccacgacgccgccgagatggccgtgaaaaccgactgcaccgcccactccctcgaatacgacgtctcctccaacaccttccgccccctcttcctccagaccaatgtctggtgctcctccgcctccgttgcctccgacggaaccctaatccaaaccggcggcttcaacgacggcgagaagaaagtccgtaccttctctccctgccccaccaccgccgccacctgcgactggctcgaactcccctccgacaccctctccgcccgccgctggtactccaccaaccacctcctccccgacggccgccaaatcatcatcggcggccgaagacaattcaactacgaattcttccccaaaacccacaccagagccaaaaacgcttactctctccccttcctcgttcaaaccaacgaccctcacgaagaanacaacttatatcccttcgttttcctcaacgtggactccaccctcttcatcttcgccaacaacagagccattctcttcgacttcaccaaaaacgccgtcgttcgaaccttcccctac

SEQ ID NO: 69660 - DNA, 135 bp, Glycine max
  unsure (1)..(135): unsure at all n locations
  Clone ID: PAT_MRT3847_33914C.1
aattccctttgcagnnccaaagtgngnccccgagnnagtacgacgancgaacctgnctgccttttnacaccanccgancgcttacctacngttctacngcctnngccgcgcgtcgnacctgcctgctagcttcag

SEQ ID NO: 69661 - DNA, 338 bp, Glycine max
  Clone ID: PAT_MRT3847_33915C.1
agggatcactcattaatcgtgttaataagattcaagtgaggagctactgaatgcagaggtagtctactaaacatgccttgctgcgtctcgcacttcaatttctcgcggatgtctcccccatggctgacgctttgacatgcaccccaacagagtttagtccgtgtctaacagcaatcactttcggtgctaaacctttaaatgcttgctgcactaaactgaagcatcataaaccatgcttatgtggctacctcaaaaacgctagcttgaagcaggatgctaactctcctaatgcccgtaaaaccgctgcttctgcgggattccctttccaacttgttaat

SEQ ID NO: 69662 - DNA, 215 bp, Glycine max
  Clone ID: PAT_MRT3847_33916C.1
ggttcgagtttgggaaaagcagtagtttcgcatttacgcacctcttcatgggagaacactttcagcacattgagctcccctctgacaatgtcaataggaccaaatacaggtctcggatgaacatgaaacttaagttgccataaatgaagcaactgatgtagaaggacccaagcagagagccccgcgagacttatctgcaccaatagctcctgcaa

SEQ ID NO: 69663 - DNA, 531 bp, Glycine max
  Clone ID: PAT_MRT3847_33917C.1
tgcccgcctacgtatgctcggtattcggctcgaggaacataggagaaggtcaccaaatagaatgctgaaccagatggaatcatgtacaagtcccctgtcttcaatctatttggtgaacataggagaaggtcagagacttcacgttatctgcagcattgacccctctacaagcttgggattagagaccttccagtccttctatattgggggaggagccaattcgcactcggtgctttctggattcgaacctgccatccttgaaactgcatttaatgaatcaagaacggtggtagaggaaatcttctccaaggaactagatgggccaattatgttcgtggatgattctcatgcacctagcttatggactaaattccttcaactgaagaaggatgacaaagagcaacagctgaagaaaatgatgcaagaccaagaggaggatgaggaggagaagcaaacaagtaggtcatggaggaagctcttggaaaccgtatttgggaaggtgaatgagaagatagagaacaaagacactgc

SEQ ID NO: 69664 - DNA, 341 bp, Glycine max
  Clone ID: PAT_MRT3847_33918C.1
ggtggaaacaggggtaaatatcgccctttttatatcccctttttatatacatgggtcataacattttccctttgggcaaaagagggggggattttttttcctaatataaaaataaagccagggggggccaatggcttaaaagaaactacaaaactttcaacatttttggttatcaccattaaaaggtttggcatggtgggtcctccaaagggggggcatagatccaattttatcccatatgggaaaaagagatttttaaatttggcatctctttttttaaggggatcccacatggaagaaggttaaaatcttaccttttctaggggatcatagttttttcc

SEQ ID NO: 69665 - DNA, 415 bp, Glycine max
  Clone ID: PAT_MRT3847_33919C.1
ggggggaaacaaaaaagggttattggggtgtggaaaaaaagggggtcctccccggggggttttttcttataaaacgtagcaacccgtggaaagcccccgttttattttgttgaccggggtttttttaaagtttgggggagctttcccggggaaccacaggggggttgggggggttccccaaggaaaaaagggccctctggaaattttgaactcctgatatcaaagggggggggtacttggtgtacttttggatccccaaggggggccagaaagaaggtttttttccccccggggggaaaccccaaatttttgaaccccccccccccccacctggtgtttcccccccaggggggaaagaggggtccctccaccccttggcagggggaataaaggttttcggtgggggggggggccc

SEQ ID NO: 69666 - DNA, 3304 bp, Glycine max
  Clone ID: PAT_MRT3847_3391C.1
cttccttagcctggattcttttaaaccggccgccttttttttttttttttggccagaaaaaagggacctggtccaaagaaaaagggccatgggccaaaaaaaaaaggggccccttggccaaaattggtgccttcctttccttgggaaaaccatggcctaatggaagcctccaccttcctccaaatttttaaattggaaattaattcctatttttcttaccacatatttttggaacctatcaacaacccagttttgtgtcaaacctagtcaaccttatggcaaaagcctgaattgcaaaaggggggtatcgatagtccattgtaaacatatccttgccaaccttgccaaactgaaaaataatcttgggtgcgttactgtcgggtttgaacatggtggtcttcttctagattgagagagaaagagagttgtgaagcacaggatctaaaaacgtgttatctgacaagactttggaacatcacgctcctcacttttcaaaggtttcagttgtgacatcctccaagtgacaagagtggaacattcattcctttagtggcactttggttatatattaaattctgggcttgtgagtatattagaacaaatgtccttccgcagtatagttcgtgaagtaagggatggatttggaagcctatcaaggaggagttttgaggtaaggcttcctggccataacaggggcaagtcacgtagtttggtccacgagttgcaggatcagccaccagttatacagaacagccggtgggctagccttcctcctgagcttcttcgcgatgttattaatagattggaagcaagcgagagtacatggccttggtcgtaagcatgtggttgcgtgtgctgctgtgtgcaagtcctggagagaaatgtgcaaagaaattgttaccagtcctgagttctgtgggaagattactttccctgtttccatgaaacagcctgggtatagggatggacccatccagtgtttcatcaagagagacaaatctaatctgacataccacctcttccttggccttagtcctgccttgcttgttgaaaatggaaagtttcttctctctgcaaaacggacaagaagaacaacttgcacagagtatgttatatcaatggatgcagataacatatcgagatctagtagtacttatattggaaaactgaggtctaatattcttggcactatgtttataattgatgatacacaacttccttaaaacaatgttatcctgacgtcacctgtgccatcgcagaagtttgtcaaatatcggttatgaattgaaccttttttggcattttgggccttgcggagtttactgttgcattgactgagcccctgtgtccggggttaagcaagatggaagtgacagtgaactcgtttagtgcatattccacgcatcctaagattgattccctgagcatgtccttggccctgatctctgcaaaacatgaggcagttatctggatgcagttgcttaattatatctatgaagggtgagcaagaagtgcagtgaaaggatatgccttttagttctcaagaagaaatctcgaagggggcacgagaaggtggagtgttgttgcttcaactttaggggaagggtgactgttgcgtctgtcaagaattttcagctgattgctgcaacgcagccacctgcaactggtgctcctatgccatcatcgcagcctgctcagtctgatcatgacaagatcattcttcagtttggcaaggttggcaaggatatatttactatggactatagatatcccctatctgcttttcaggcttttgccatttgcttgactagttttgacacaaaactggcttgtgaatagtgacaatgagaggtatggtacaaagacaatagcattctatctccatttatgtattcactgcgaggtgaagctgcatggagtcattttacaccaaatggtttaactgtaaaggacagaacaacctttgctcaatgtgtttttttcttatatccttttccttttatgttagtcttcaacaaactatctgtcaaacatgtgttgcttacccgcagtgtaattggcttcttccaatggtaggctcccctgaaccaaaaaacacattagtatgctttgttgcttcatcattttgcttcatgaaatataaattggtcattaagatgtttaaagtggaatcactatctatcaaagttttataatattacatccaagttctgtaaaatttttaaagcaaattgcataaaacataattcctctgttagcaactaagtctgttttagcgctggagagagcacgaaacatactttcccttgttcagttggttaaagaagaaataattgataattcagtccagagtgtggtggacattgtgaacaagaaagatactcgagttacggctattatcaatttgttgcgtgatgcttttactacggaacttggtccagtctcaacaagtgcacagggaagaattgttttgccggatggattagttcttgaagaaaatctagatgacttacaagcaatatgtggtgatattgaactaccttcatcaagtttgtttggcgcaggaggtcctcaccttaccactactttggatgcttcttcatctaatcttctgaaaaatgaagagtcagggccattgaaggaatccacatccttgattgagcaccgtaagcggcatggattatattatcttccttcggagaagagtgagattgtttcagatgagtatcctcctgcaaatgatccaaagtctaacagtaatataaatgatgaagctgcagagctagtcaagctgacagagcaatcacttcttctcaagaaaaggacaaaccaaacaaagcccaggcctgtagtggtgagattggatgatggagatgtggcaccaattacagtcaaaagaccagagccattggatgattctctttctggtgccataaaagatgctcttctaggaagcgaaaccagaccaagtatgtctggaagcagtccttctgataagtcatcaaggaagaaagagaaaaagaaactaagcacacgtgttcgatctgaaatgaagaaaaatgtagttgatgcagaaaatcctgaacttgaaaacccaaattcaagtagcaaaaatcatggtcatagtcatactaaagagagaagacaccaaggaaaagaaaagattgttgagggggaagagcatgatcagagggaaaagaaaaagagtggccaccgccatgggaggcgaaaaactcatcaaagagcaaagtcacccttaaatgtggtttctcaaaccccagtaattccagattttcttttgtag

SEQ ID NO: 69667 - DNA, 418 bp, Glycine max
  Clone ID: PAT_MRT3847_33920C.1
ggctcgagactcaagttccactaactgtcaaacctgcgaagccagtgaagaatcctttgtatcaaatgcctcctccaacgagggaagagatcgagatattggattcgactccaaaggcagatatagggaaccttgaagagttgctcgaggaggagaacttgtacttgaacatagagaaaggagagcaaggacggttgccggtgatgatactgaagttgaagagaagtaataagcagagaaaaaagcggttgggatacttcgggactatccgcagatcttgcaccctacgcccagatccggttccttagggcgtgtgcttctcgaggatatatagcaattgcggttgattctcgttaccacggagaacgtgccaccaacacaaccacctatattgatgcacttatatctgcatggaaaa

SEQ ID NO: 69668 - DNA, 636 bp, Glycine max
  Clone ID: PAT_MRT3847_33921C.1
gttggggtatcaactgcttttacattgaattgaatatgttttcatcaaatacaaaataagagcagtatccaacattttacttgttgatatcataattcaattgctcgaaacaacaattacttgtacaagaatggactcatctgtccatccaaatcacacaccgaaggcactgtccttcaatcaataaatcaaaagctttgttgatatccttgaactccacctcatgtgtgacaaactcatccaaattcagttccttgtccatgtagcgtttaaggagaataggtacatcagacttgggtttgagtcctccaaataagcaccccacgaggctcttcccactatggaggacctcattacagctaaggctcaacatggatcccggcttctccactcctaaaactattgcttttccccaaccctttctacaagaagcatatgcttcctgcaccaatgttgccattccaacacattcaaagcaataatctgctcccccaccagtcatctctatgataacctggctcacagatttgttttcactttctccagcatggacaaagtcagtgagtccaaacttttttccagtttcatatttttctgggttgacatccacacctataatcctagttgcttcacaaa

SEQ ID NO: 69669 - DNA, 2924 bp, Glycine max
  Clone ID: PAT_MRT3847_33922C.1
gcgagagcagctcggaattcggctcgaaattggttcagagtttgttgaccagctcaaacctaattcatctagaagtagaagtctatacgagaacagagtgacgccaacgcaagaggcaggggcaggttctccaccacaccattctctctacgtgcaagtcaaaaccggcattcgcacgagtcacaaacttcaccgaacttccgtataaattctcttctcttccgtgattattactgaaagaggaatagaatagtcagcgatggcacagaagagattcatcatcgaggtcgagaaggcgaaggaggcgagcgaaggaaggccttcgagaggacctgtctatcgtagcctcttcgccaaggatggattccctgctcctatccaaggtctcaatagttgctgggacgtttttcgattgtctgttgagaaatatccatcaaatccaatgcttggtcgccgggaaattgtggatgggaagccgggcaagtacaagtggctaacatacaaagaagtatatgaccaggtgatgaaagttgggaattctatccgcagctgtggttatggagaaggtgtaaaatgtggtatttacggagctaattctgcagaatggattatgagcatgcaggcttgcaatgctcatggactttattgtgttcctttatatgataccttgggtgctggggctatagagtttattatatgccatgcagaggtctcaattgcatttgcagaagaaaagaaaatacctgagctattgaagacatttccaaatgcaacaaagtatctcaagacaattgtaagcttcggaaaggttacccctgaacaaaagcaagaagttgaaaattctgggttggaaatatattcatgggatgaattcttacaagtgggtcaaaatcagagttttgatcttcctattaagaaaaggagtgacatctgtacaataatgtatactagtggaactactggtgaccccaagggagtgttgatatcaaatgagagtattattactctcttagctggggttaagcgactgttggagagtgtaaatgaacaattgactgagaaggatgtatacatatcataccttccacttgcacatatatttgatagggtcattgaggagacattcatatggcatggtgcttcaataggtttctggcgtggggatgtcaaattgttaattgaagatgttggcgaactaaaaccaactattttctgtgctgttccccgtgtgcttgatagagtgtactcaggtttgacgcagaagatttcttctgggggcttcttgaagaagacattattcaactttgcttattcatataagcttaataacatgaagaaagggcttagacatggagaagcatctccacttcttgataaaattgtgtttgacaaggtaaagcaaggtttagggggtagagtacgtcttattttgtctggagcagcacctttatctgcacatgtggaaggttacttacgggtggtgacttgtgctcatgtcctacagggatatggtctgactgaaacctgtgcgggaacctttgtctcattaccaaatgaaatagaaatgcttggaacagtgggccctcctgtaccaaatgtggatgtttgcctggaatctgttcctgaaatgggatacgatgccctagcaagtacaccaagaggagaaatttgtgtaaagggaaaaaccttgtttgcagggtactacaaacgtgaagacctcactaaagaggttctgattgatgaatggttccatacaggggatattggagagtggcaacctaatggaagcatgaaaattattgatcggaagaagaatatatttaagctttcacaaggagaatatgttgctgtcgaaaacctggagaatatttacggtcaagtttcttctattgaatctatatgggtttatggaaacagttttgaggccttccttgtggctgttgttaaccccagtaagcaagcacttgaacattgggcccaagaaaatggtatatccatggacttcaattctctctgtgaagatgctcgagcaaaaagttacataattgaagagctctcaaagattgcgaaggaaaagaagttgaaaggttttgagtttataaaagcagttcaccttgactcaattccatttgacatggaacgtgaccttatcactccaacatacaagaagaagaggccacagttgcttaaatactatcagaatgccattgacaacatgtataagagtggaagtaaacccagtgcctgagacctgatttgggagataatttattttctgtatgtgatggtgtttgtctccgttcaattgtttccttttggtgactgtatatacgctgagtagttatatatggatacgtcatttattttgattttttttttcacgtcatattatctattctaccggacttatctaagtaagttgtctttcttctctttttctatctctaggtgtattacagtatccatgaatcatttttacatatataattattcagaaatggctgatgttcaactgcagacatgaaatataaaactattttttgtattatttagatggtgatatgctgatgtgtgcttctattgtgcgctgagtatttattggtatttctatgtctacgtattgaatgtttggtagatggattattgtagtcattattgagcttagaggagaatagggtatttcttgattgaagctttatttcttatattgaatatgtactgtgtggagagagttccacttcttttaattgttgcgctattcttaagatgtgccagatatgggtatcgctgctaccgtaacaataatgatgctgaactaacttcttacactagatggtttttaacatattggcaaataattgcaggcttgcaatgctcatggactctattgcgttactgtatatgataccttgggtatgttcaca

SEQ ID NO: 69670 - DNA, 567 bp, Glycine max
  Clone ID: PAT_MRT3847_33923C.1
cctcgtgccgaattcggcacgagggatgaacttctcgttcatagcagcagacaccatatcgaagttcatcatcatggtggtacttgccctctgggccaagtgcactcctaaatgcaccttttgctggtccataatcagcttctctttgtgcaatctcaccaacgctgttgttgttggggttccaatggtgaagcccatgtatgttttctaggtgtggaccttgtggttcagtcctcggttcttcaggccaccatatggctccctttgcttctctttgtgatggagttttggagaacgggaattgagggcaccaccaccaccaccgtaaaaccaagatcaaaaacaatgatcaataagaatgaaggtggaggagggaaagatgtggaggctgttgacgtgaaagaagagttgatgttggaagagagtgttactagtaggcttcctttttgcaaggtgatgaagcttgtgtggcgcaaacttgcaacaaaccctaactcctatggctgtgtgattggcatttcctgggctttcatatccaacaggtggaatttggagatgccaagtatg

SEQ ID NO: 69671 - DNA, 167 bp, Glycine max
  Clone ID: PAT_MRT3847_33924C.1
ttaaatgcaattaatcttgtgggaatgcttgggtgacattgaggcccttccttggtctggtcacaaggcttttggccggaattcattccctatgggggcaattgtaattttgttaaacaaggtgttgcttaattgtggaaggcttcaattggttctgaaggtgattg

SEQ ID NO: 69672 - DNA, 1338 bp, Glycine max
  Clone ID: PAT_MRT3847_33925C.1
tggaacatgatcttagagtgtaccagcacgagggtcatcctcagactaatatggagcatcaatttccttaatttggaaactctatggctggcttcggccgttgggtggggcagatgtgcaccctcacactccgcccgcggtggtattttatgtctgctctctgtgacggttgctttttgcgctcgtatgtgaatctgttggcgttgttcaagaaggggttgctgtgggtggagtcattgttctacttcgtttcctgcttcgtatacgactcagccgttggccatgcggataaaaatatttaccaaattcgaaagagctacactgcattgattgtccaagactgcctgactcttgggtgcgtagggggatgattattgattcagatctgcaacaagactcaactacaacggagaaggaattactatgctcggttaccaccacattcaaccaattatccgatctagtgctttcctctaaacttagagaacttggattgtctggtgttggagtaaaaggtcttttccaattccaaatcagagaacatgggagcaacacagaacttgctcctttaaacttggatctaactcatgctgacttgtgggatctacctgagctcgagttcatatggaagggccccacaaattttctaagcctccagatgcttgacgtgattaatgtgaatagatgtccaaaattgaaaaccatcttctcccctaccattgttaagcttaacaatggtgagaagatgactttcacaatctgatcgcgttggaaataaaagactgctctcagttacagaaggtttgagcttttgaatgtgaaactgatgacgatggtcaagaggggattgttaaggatggagaaaaagtactactacgtaacctgttatatataacactcagcagtttgccaaacttcaaagagattcaccatggattcaagtatgatgttatgcaacatgacataactgattgtcctaaatattctccaagtttatatctacacacagaagagtaaagaatgagcatggagcaaggcgtaggagtgtatgagtatgcggaagagaaagatgaagactaaagactccattctgctgccttactgactttgtgttctttactccattgtgatgagttaatttgtactttttaaattaacttcattggaggattaattccttgcttgctttttattcttcattttattatttggtgagcttctttctagacttgttttagtttgtagagttggatttcactggtggtttgttaccttgttgcctttctattatttattttactatggctaaataataggttcattatttattgctagtat

SEQ ID NO: 69673 - DNA, 947 bp, Glycine max
  Clone ID: PAT_MRT3847_33926C.1
gggggcgcgcgtccgtacggctgcgagaagacgacagaagggggttcaaaaggatttgtgtgttctgtggcagcgaggcgtgggaacaagagtagctataaggacgctgctattgagcttgggaaagagttggtgtcaagaaatattgatctggtttatggaggaggaagcattggtttgatggggttggtttcccaggctgtttatgaaggaggtcgccatgtaattggagttattcccaagacactgatgccaagagagattactggagagacagtgggggaagtgatggcagtagcagacatgcatcaaagaaaagcagagatggctaagcactctgatgcctttattgccttgcccggtggctatgggactcttgaggagcttctagaggtgataacttgggctcagcttggcatccatgataaaccggtggggttgctgaatgtagatggatactacaattccttgttgtgtttcattgacaaagctgtggaagaaggcttcattagccccaaagctcgccacataattgtatctgccccatcaacaaaagagcttgtcaaaaagatggaggaatattttccacaacatgaaagagttgcctctaagctaagctgggaaactgagcagatagattactcctcaaattgtggcatgtctaggtgattagatgattatggaagaatcgtgtagagacatttgttagtttaatggtttaagagactactactactattatggccacaatttcctttcttttattatgctattgcatttacttgttagtgtaaactacagagctgacttcaatctagctgtgaagcctaactactcttctgctcaatgtgaattctggttttttcaaaacataggaattgtaagatttttgttctccaaaaaaaaaaaaaaaaaaaaaaggaagggcggccgcaagcagtgagctc

SEQ ID NO: 69674 - DNA, 622 bp, Glycine max
  Clone ID: PAT_MRT3847_33927C.1
cattattgttttgagaacaaaatgatgctgtcaagacatttagtggcaatatgcatctttcacttggagctggtttgagtgctgcagtaggcattgttggtaggtcagttgaagctgatgttcgagctggtgatggtggctatgctgcttgttatacctacagctgcagtaaaggtgcatttgttggatgttcacttgaaggaagtatggtgactactcgcacacaagaaaattcccttttctatggcagccaatctattactgcaacagatatacttcttggctcgttgcctaggccacctgctgctgccattctctaccgtacacttgttgatttgtattcgaagtttgatgattaattgaatgactcaacatctcctttctccctttggacattggcgttaaggacataatttgtacagctgctaagtcacactcattgtaaatgttcattgtatcattatttgtcttgtaaatatgtacactccacgttgaccaagatggagggattggtgacctgctttaaggtgaattttatttggctagaactgcctttgataaaaaagattttttgagcctcaaaagttcctctactatattaaatgcaataaatttttttatc

SEQ ID NO: 69675 - DNA, 397 bp, Glycine max
  Clone ID: PAT_MRT3847_33928C.1
gaaatagaagaggagataaataatgttactggagatgatgttttactacacctcaagaatggtgatgctgaagaatttgcagttgcactcttaaggctaaaaaagttcatcaggggtggaaaactggatagcggtttaattaacgtggaagctgctgtttccattctttttaaccgtctattttcatgtaagacaggcaatagattgacaatcattcaattgctaagaagtgttgctttgcaaaatgatgagatgaaggagaagatgacaaagaatgagttattatcagcagtggtgaaatctctaacaagagacactgaagagaggaaggaatcagtgggactgttgctagaactctctgaccttccttgcagtagacggaagattggaaagaatc

SEQ ID NO: 69676 - DNA, 2155 bp, Glycine max
  Clone ID: PAT_MRT3847_33929C.1
acggctgcgagaagacgacagaagggggacgagaagaaagtcgaaaatattcagggtttgcacgcaaaggagacgtaaaaacctcgggggaactctgtattgataacacgccattgaagctctaattcgaattccatcacagacccttttcgtttgtcctctcaaagttttgttcttttggcctcgaattgatattcagcgcaaaattttctttttggctgataatatatgtaaacagtatatgcacatacatgccctattttggtctttgttttaggtgttccaatggagggcaaaatcttggattctcagaatcaggttaaatttgtggaaaatttatctgcaagggtttctagttgctcccttggcgacaagatatcctattccgattctcctctggatgatgaggtggatggtcggaggagcaattgtgttactaaagagtattgtgattcgtttttcaatgatagcactgaagggcattgtataaattcttctagattatatcttgaatcacccgaaaaacaaatggaaaagaataacgaggacatggagtcttcagctaatcttcagaagcggggaaagtacttctattatgatactccactgcaagaagatactggagtttggataccagtttctgttccaccaatgttggaagatgatcacaaagagtggaccaaaggttttcactcaaatggtggctattttcctgatgatgatatgggatggaatcaatacgttggagatgaaagggaattgactatgtgggatgtgctagcagaaatgttacttgtagctcgaggaaaagtgacttctttggcatcgggagatattcatacatgtaatttttcatggatatccagccatgtgcttgaacaagcttggagagaaatggcacaaactcttacagaggccaactttggtaatgtaaaggaactactggaagcagagcctccaaaatggttagcagatagtgctgctgcttcttgtatgctttgtggtgtgagatttcatcccatcatgtgctcccggcatcactgccgattttgtggaggaatattttgtggtgagtgttccaaggggcggagcttgttgccatcaaaattccaagtttctgacccccaaagagtatgcgatgtatgctgtgtccgacttgattcagtacagccttatttgatggatcatgtaagcaatgctgctcagttgccaacccatgacctgacagatctgagcactttgcgatcgtggattaattttccttgggggcagtccatggaatatgaaatttacaaggcaactaacactatcaaggcttataatcagataggttttctaaagctcgagaagtcaattccagatgccattctaagacaagcaaaaggccttgcaattatcactgtggtcaaagtaggagtgggggttacttacaatattggaacaggacttgtggttgcccgtagggaagacggttcatggtctcctccatctgctgtttccacctttggtgtagggtggggggctcaggctggaggcgagttgacagacttcatcattgttttgagaacaaatgatgctgtcaagacatttggtggcaatatgcatctttcacttggagcaggtttgagtgctgcagtaggctttgttggtaggtcagttaaagctgatgttcgagctggtgatggtggctatgctgcttgttatacctacaactgcagtaaaggtgcatttgttggatgttcacttgaaggaagtatggtgactactcgcacgcaagaaaattcccgtttctatggcagccagtctataactgcaacagatatactttttggctcgttgcctaggccacctgccgctgccattctctatcgtgcacttgctgatttgtattcgaagtttgatgattaattgaatggttcaacgtcgcctttcattcctttctccttttggacattggcattgaagacatagtttgtacagctgctaagtcacactcattgtaaatgttcatcgcgtcattatttgtcttgtaaatatgtaaatgttgatattgtacactccacgttgaccaagatggagggattggtgacctgctttaaggttaattttatttggctagaactgcctttgatgatttttgaagttcctcaactct

SEQ ID NO: 69677 - DNA, 269 bp, Glycine max
  Clone ID: PAT_MRT3847_3392C.1
cgttttggctgctgcttatgcccacgagctcccccgatatggaattacacttggattaaccaactacgctgctgcctacgccaccggacttttgttggctagacgagttctcaccaagctcaacctcgctgacaagtacaagggtatctgtcaacgtaactggagaggattacaacgttgaggagatcgatgatgctccccgacctttcctcgctttattggatgttggacttcgacgaacaccacccggatgcagagtcttcgctgcc

SEQ ID NO: 69678 - DNA, 110 bp, Glycine max
  unsure (1)..(110): unsure at all n locations
  Clone ID: PAT_MRT3847_33930C.1
agaacacnaccaacccagccgccgggcacacggcacaccgagccacgcccacgaccaagacggccncaaaccnagcanaggccgnggaanccagaagggcgcacgaaaag

SEQ ID NO: 69679 - DNA, 546 bp, Glycine max
  unsure (1)..(546): unsure at all n locations
  Clone ID: PAT_MRT3847_33931C.1
ggctcgagtttaactcctagatgatgttatcatcaaaatctaagattcagtgccctcaatatttatgtgaaattggttttacctcaaaattgattctttcattgtaattgttctatgtctgcattctgtttttctctccttggatggtgaaaggaaagcatttatttctttgcagtgagtattgtacatggcatacttatccaccatgtgttgatatttctttgggaatgaattcaacctaacctgttttattcttaatataatttctcaggttggtactgttggaggtggcacacaactcgcatctcagtcagcatgtcttaatttacttggtgtcaagggtgccaacaaagaatctccgggtgcaaattctaggctactggccaccattgtagccggttcagtcctcgccggggagctatcgctcatgtctgctattgcagctggacaacttgttaagagccacatgaaatacaacagatctagcagggatatatctacaattgtccaatgaactggccacagtacacttaaactngtgtcaga

SEQ ID NO: 69680 - DNA, 160 bp, Glycine max
  Clone ID: PAT_MRT3847_33932C.1
taaaattaactggagtaagttttattattgattttagtcaagactgttaatgaccattctatatatgttgtgactttttaattcttaaaaacatttttggaacttccttttgtcatattctcaatttgtattgggtaccgatactacacctgcatccatg

SEQ ID NO: 69681 - DNA, 378 bp, Glycine max
  Clone ID: PAT_MRT3847_33933C.1
acggggacactggaggtccacaactttagccaacaaagcagggatcgtatatgctttgctccattaacaacttacttaattaatttatacgggatacgcttattaagtattccaaatactggtggaaccctaaataaagaaaaaatacattaattttttccatagaacctggcaataagttaaacaaaatattatattcatatatatatatatatataggcctttatatttatatataaaaaatatatgggagggaaaacatttactactaccaatgacatgacctgaaattttttttaaaaaaagatttgccatggcatatagggtttcaacatgccccaatggggtatatagaatctttggccctactactttttt

SEQ ID NO: 69682 - DNA, 2644 bp, Glycine max
  Clone ID: PAT_MRT3847_33934C.1
accaaatcgcgcggagaatagaaaagcaaataagtgcgacaaaccacgcgtccgcgctctccgcgtgggcaacggtgctgcgcggcaacctctatctctttttctataaaaaaccttctaatttcaagctcttcctttcaactccaattcccacggatctcaactcccatttctagctccctccctccctctgcttttcttctcttctcattttccttcgaacctcctaatctctccctccagcttctgggttctccattttccctcgttttctgcatctgcatttcgtagattcagttctcatcggaaaatggacgttcaccgaagacccattccttcttccggcgaacaccgacaaacccagaagctgaagaccaccaccaccaccaccaccgattcgaaatcgcaatcgcaggcgcttctgcctctctacctcaccaacgccctcttcttcggggtgttcttctccgtcgcgtacttcctcctccaccgctggcgcgagaagatccgcaccgccactcccctccacgccgtcagccccgccgagaccgccgccatagtctccctcgtcgcctccgccgtctacctcctcggcttcttcggcgttgcctcccgcgcctccctcgacgagctatccgacgacgagatcatcctcaaggaggactcccgcgccctgggcccatgccccgcggcgctggcggactcctcctgcctgctccccaacaaaattcaaaaccaattccctctatcacccaaggccatccacagcgtgacgaaggaaccacaagtggacagcccagtccccatctcctcgttctcggatgaggacgaggagatcgtacaagccgtagtgtcgggctccatcccatcctactcactcgagtcgcggctcggcgacacacgccgggccacggccatcaggcatgaggtggtgcagaggctgacttcccgatccctgtcaggtttacccctggaaggtttcaactacgactcaatattggggcagtgctgtgagatgccgatagggttcgtgcagatccccgtgggagtagcgggaccactgttgttggacgggaaggagtacaccgtgcccatggccaccactgaagggtgtctcgttgcgagcaccaacagagggtgcaaagctatccacgtctccggtggggcctcctcggtgttgctcagagatggcatgaccagagcacccgttgttcggttaccctccgctcagcgcgccgcgcagttgaagttcttcttggaggatcctctcaacttcgattcgcttgctgtcgttttcaataagtcaagcagatttgccaggttgcagaacattcagtgtgctattgcgggcaagaatctgtacatgagattccgatgcagcactggtgatgccatggggatgaacatggtgtcaaaaggtgttcaaaatgttcttgattttcttcaggatgacttccctgatatggatgttattggaatctctggcaatttctgttcggacaagaaagccgcagccgtgaattggattgaagggcgtggcaagtctgtggtgtgtgaggccataattaaggaggatgttgtgaagaaggtgttgaaaaccagtgtggaggccctggtcgaacttaatatgctcaaaaaccttacgggctcagccatggctggtgctcttggtgggttcaatgctcatgctagcaatattgtgtctgctatctacattgccactggtcaggatcctgcccagaatgtggagagttctcactgcatcaccatgatggaagctatcaatgatggcaaggaccttcacgtttcggtgaccatgccctccattgaggttggtactgttggaggcggcacacaactcgcatctcagtcagcatgtcttaatttacttggtgtcaagggtgccaataaagaatctcccggtgcaaattctaggctactggccaccattgtagccggttcagtcctagctggggaactatcactcatgtctgcaattgcagctggacaacttgttaagagccacatgaaatacaacagatctagcagggatatatctacaattgtccaatgagctggccaaagtacaattaacttgtgttagagactaataagcgaatcatcagataacgacaaaaataactaaaaaaattggtattgatggtgggagggggtaaaataaagtgatgattggcatcttccatgagcaaatccagctccccagaagcatgtggttggttggttggcattcattgaatattggcttcgcatgaggcattttctgttatggagattgtacagagggacttgaattagagggtggaggtaaacaggagcctcacttttgggattagagttctctttgttttccaaaaaagggaaaatcagtttgtgtgttgtgttatcctcttgtttaaggcttactgcttcagtgatgtggtattttggcgtgttgtatttttatgtgttgtaatctccatcttgttaatttgtaattgtagcaagagatgtctcccattgggatgtagagttgttaataatagtttctggttgctcagcatttttccttcgtctctaattacgtctttttggcggttggtaaaaaaaaaaaaaaaaaaaaaaaaaaaaaaaaaaaaaataaaaa

SEQ ID NO: 69683 - DNA, 429 bp, Glycine max
  unsure (1)..(429): unsure at all n locations
  Clone ID: PAT_MRT3847_33936C.1
nttnncgaccnttnnntnnntctganttcnncgnnagancntgtgatnangtgngnagnggaaactnngcncaggtgngnnnagtagngtgcgcntnncangnggntgtgnagctatagatttagntcgtgttnnntgntgcggntagttncatngacnangttggttantcncagtgganngnnacntgcnnngtncccnngtgngcnnagctaagnngtgttcagtnagcatacctncannagtatncagagttanctcgangttanngatnttagagtgtganngnngtnaccatgtcgtngnnntgcncgctantctgagatcgtagancgtnntagtcagatntatgngagtagagntcggnnncgaanngncangagatntntgagnnngcttgtctgtccancnngtgtcngatgtgngttt

SEQ ID NO: 69684 - DNA, 377 bp, Glycine max
  Clone ID: PAT_MRT3847_33937C.1
aggcagaagaagaagaagaagaagaaaacgggaaaaacgcacgacaaacagaggaagatcgatcgagagcgtgactaagcgggtctgagttgaagaaatcaagaagcagaactagagcaactcaacggcctgataatagccaggctatggcagcacttacaaatggtgggcttccggacttgaatgggaagaagaacaaataggctgctagtggcttcaattgttcctgggggcagggcagacttgttagatatttaaaatattgacaatgctaaaagcaaaaggacagaagggaatgaatcggcgaacacgaaagacgcatatcatgaccatacccaagtagctttaggcctggcggaagacctgctcggaaagag

SEQ ID NO: 69685 - DNA, 331 bp, Glycine max
  Clone ID: PAT_MRT3847_33938C.1
aacttcatatggagaatagtgaagcagcccgtcttaagtttgtcaaatgtgttcggatcatgctaggttcattgtgcacactagggacacgcttagttgtcaagctatactcaacccaatctccttggaatggcctggtttgaccgatatatgactgcgtaatgccagcgagattctgtgctgcgattatgctagtgatgaccgatcgattaccaagcaagatgtgagcaagattgcacaactgatgtacagtctttgtagaggtgatgcacaattggtcccacctacgacacacctgctgttggcttgttgctcaaggatggcaatatgt

SEQ ID NO: 69686 - DNA, 296 bp, Glycine max
  unsure (1)..(296): unsure at all n locations
  Clone ID: PAT_MRT3847_33939C.1
gnagcangcacacgtacgtaagctcggaattcggctcgagggcatgttgtataatagaccatattcttgaacattctggacagattctctgggcttgtctgttttatcaatggcaactatttaccagttgaaaagtgggaagcaataatattcatctgaccagttttctcttaaagccatttccataatgacaataatgatgggactcaattatattttttatttcagtcactcctgataataaaaaattgaagaaataaaaatatccaaaaccaaaaaaaaaaaaaaaagggggg

SEQ ID NO: 69687 - DNA, 243 bp, Glycine max
  Clone ID: PAT_MRT3847_3393C.1
actaagtgacattaggcacagatcgttcaagcaaggtcttggattcaagagttgtgaatgaaaagaaaaacgtaattgtgagttttatagtttgttgattggagatatgagattgacttgatgattgggaaggggggcttaagggtgaaaggagaagggggaagagagaggtcgcgggttggaatacctcccactaactaacatttctaacaaaactaacaaactaatatttgctgattgaat

SEQ ID NO: 69688 - DNA, 561 bp, Glycine max
  unsure (1)..(561): unsure at all n locations
  Clone ID: PAT_MRT3847_33940C.1
ngcttaaagatttgtctttagttcggccaaatgaaagtttaatttttatccaaaaacaagatatattgtgatttattgaactcgagttcttgtgatgcatggaagagtatatttgtcaagagaagtcaaatgtcaagtttgtatgtatggaaagtagtcagttgaaatcagaggtcagttccttgaatggattcgtaattgtcgaccggaagatatgctagacacaaaatggttcttaagatgctagaatcagtagctcggaacctttgaatgatgaagatcaaaattgttagatggagatctcacacacttcaaatttcgagtgtgttttaagtttgagtactaataataactaactagttagaagttagaatatcggatataggtttttctttgtacaccaactcatttgtttgtggaacatatagaaagccaatgagaatctatcggtggatttgtatacttaatatagatctaacagatttgtttttcttttagaggggaaaaaatctgtaatagcgttagagggacggatttgctgaatttgcaatgtaatgtttt

SEQ ID NO: 69689 - DNA, 384 bp, Glycine max
  unsure (1)..(384): unsure at all n locations
  Clone ID: PAT_MRT3847_33941C.1
catgtcttgatgttatctacatattcacattagcagctgaaacccctgacctgttatatattgaagcttagctcgatattatatatctgagatcgcctgatagatttagncacacctgtgtcatttgccttgagaatactggacttgcaaagaggacaaggtgcattcatctttaaccatttgactatgcacgtatagtggaaatgatggtgacaagggagaacgtgaatatcacctccatactcataggacgagatgcatattcagcattatgcattctcaagtgaaacgtgtcgttgattcaccgagtaaccattgctgacctacataggaatcatggatgctccccgtcactgaccaggcgtagcctcattgcttaacatt

SEQ ID NO: 69690 - DNA, 125 bp, Glycine max
  Clone ID: PAT_MRT3847_33942C.1
tactcaaccacaactctcatctctgcaccaaacaactagagccaggccgcaaacaatttgcacaccctttacttatttacttaacaaagagcacaaccacactctctggactctccactggaata

SEQ ID NO: 69691 - DNA, 268 bp, Glycine max
  Clone ID: PAT_MRT3847_33943C.1
ctcaccaattcactcgagctaaatccgttttgagaacttttttggctttatgcatacctaacaatatagacatcggcacacgctagataggggtctgtgcatacacaccacactctttacgcttgatcatcctcttcaagctcatgacaaacatccatgctcacgaccatgtcaacttctaccgttacttgacgcaactgaaaaacaagaccaaaaacaatggtcaattcttttccatcaaacacattttagataacaaccccaccaa

SEQ ID NO: 69692 - DNA, 517 bp, Glycine max
  Clone ID: PAT_MRT3847_33944C.1
attttctcatcctcacagacattcaaacatgaaatttttttggtttcttcaagtcctgttcttcctggctatgcttctcatcaatccctctgttgctcccaatgcaccagctcctccttcaagtggtgacccgcatacagaaacactccggccaccgccacgcaaggtctctggttcatggccatgaagaatttattgataagcttatatatatataaagtttggttcttcaatatatatgtagtatctcttttcttctaaactttttctgcttgtgatcaccagaaataagctataatagtcctactctaatgtttttggctatatttgatctaatttcttattgcgtgtaatatttaataatgcctccagttaattaaatactaagaaaatattaaaattcctcaacatagcacggaattaaaattattttagtacatgaatatcagttccaagtgatgattaaacttaccttcaatagaaacaaaatattaaaaatacttttgttacgacaaat

SEQ ID NO: 69693 - DNA, 381 bp, Glycine max
  Clone ID: PAT_MRT3847_33945C.1
gagccccaaaaacccattgggctataaaaaaaaaaaggagcaatttcaaaggctataaccctgcaaagggttggcccattttttggccatggaaggaacaagatttttttttttttaaaaactggtacttctaccaccaccaccaccacgggggttttcaccatttttggaaacaacacctttatgttctccaacacctacaaaaggttcccctggcctcctaacacactaaaggatttccccttcaagggggctttacccaacaaacacatgggggccgcccccaagggctaaaaaaaaccttttttttttcccccttttatttctccaatttttaagaattttccacttccaactttttccccagccccccatattttt

SEQ ID NO: 69694 - DNA, 289 bp, Glycine max
  Clone ID: PAT_MRT3847_33946C.1
gttttagcttatactccttcccatcagattttaacattccaaaaattttctgactttttttttttgcttctgggtgtgtgcttgttgatcctgatctctctcctgtgtttgacccgtgtcaattgcatgtcttgtttcaatggattctgtatacttttggcattcgaaccctgaaattctagtgattgcacttgtgtctatatgtgtttcattaaggttgttgagtaatttttttcttctagcaatgattcagcaaaaaggaaggggaaggggggatgggattttgttt

SEQ ID NO: 69695 - DNA, 446 bp, Glycine max
  Clone ID: PAT_MRT3847_33947C.1
aaaggaggggacaccccccttttcttttttaataaaaaaaaaacccaattaaatttgggtttggggaaaggaaaacacaatagatcacttgccacccccttaaaggtttttatagtattaaaaaactttataaaggcgcattaacccccccaaaaaataactattaaaacctttaaaggttaattccctaaaaaaaaagctaaaattattatttttaagtggaaggattggtactattttaaaccaatttgggggaaaattaattaaacctcaacaattttagggggtttaacaacagctaggaaaaactcaagaaaaaagtttcccactgaatccaaaagattgggaaggcccaatgatttcaaaaccaaatggggtggtttttgccctgaaaaattattggtccaaatgggggacccatccttgggggaccattaattttaaaa

SEQ ID NO: 69696 - DNA, 608 bp, Glycine max
  Clone ID: PAT_MRT3847_33948C.1
cccacgcgtccgtacggctgcgagaagacgacagaagggtctcactctggagctaacaccagttctaccaaggagttgcaacgagacattacatattgaagaattgatggcagctttattggttgctaactatctatattctgccattgctatatctgcctttcagagctttattgtatgattaagttgagtaaaatgctactacgtcaacgtttaaagtagacaatatctataattatctataataaagataaaaaaaactaaatacattagaaaaaagaaatagaggcttggctcacgcgggaaaatgaaaaatataaaatatgactttgcaagttaacttttttttgtttagttctaagaatgttaacatgcaaagtcgtattttatatttaactttttttgttcaatttcttaaaatgtattttatattttgccatgaccaaactcggacttagggaattcaagattcattaatcaagtattcaaatatgatgtttatttctgatgtgacacattaacgtatatggttagtggcaaaatgatacactaattgctctgtcttgtacagtatattttcggtagcatgtgttagtatgttagaggat

SEQ ID NO: 69697 - DNA, 295 bp, Glycine max
  Clone ID: PAT_MRT3847_33949C.1
gtccgcaaacaaaatgattcattaattcattctgtttttttttggaaataaaaacaataaacttctaaacgcccaaattgtttctaacatatgctaaaaaagacaacacataaaaacaatgacgtatcttccaaaccagacttattttcacaaggacaaaataataaaaacacttaaggaaactaatattcctcatcttcctcattccaccactttaaaatttatctatgtaaaccacagtcactaatcttccaaaattttttgtagacaacacaaccacccatatcaagccctt

SEQ ID NO: 69698 - DNA, 399 bp, Glycine max
  Clone ID: PAT_MRT3847_3394C.1
ggctcgaggatgaatatgctgttggtcagctcaaggaatttgagggcaagaagcttgtctctgccaccaaggaagggctcaagcttgacgagagtgaagatgagaagaagaagcaagaagagtgaaggggaaagtgatggtccgatataagcggaaggagctttcggttaatcaataggactgcatgattcggtttctggcatgattttattttaagcagttattgttagtcttttctggttcagcttctatccaagttcattgtttatttaacaatggatatctagaatcttgattttgattttttattttgtaattctggtaagtgatttaaacttattttggttttgtgtattagatgctactgtgatgcaattagttactcgggttggttagtgt

SEQ ID NO: 69699 - DNA, 405 bp, Glycine max
  Clone ID: PAT_MRT3847_33950C.1
gggcgggcgggcgtccttttttcatgattctttattcaataaccataggagaaaatgtactgggctgacactgaggcctaatgaccaaaaaatatcgcagaatatcctggggaaacaatgagacaacaggagcaaaaacgcctcagcgcatgaaaaagacactaatgttaactatctaagtgtgacaacaggtgtcacaggaataccaggataaccacattaaaccggggaagcctgctgggtctataagaaacccaatatctgacatggatgacctaggtgcaccatgtgaatggggcacatgccactcactgaggaccatcaacagagcaggtggcgcatacatgcacacacgtgggattctactattgagtaagaaaagtgggtttttgtgataacctttcc

SEQ ID NO: 69700 - DNA, 474 bp, Glycine max
  unsure (1)..(474): unsure at all n locations
  Clone ID: PAT_MRT3847_33951C.1
tggcctggaacctttgggctgatttatgtgcttgtttatgtgcttgtttatgtgcttgtttatctgcttgcatggtcgtgagaagatgatagaggggtaagaataatatcctcaggcccgccgcaaaggtcctagacgagttcgtagtggtggtatttgttattgttatatttttagtcgaagtcgaagtcaaattaaagttattattcaccggttttaagagaggcgtcaaggcgaagacctccaggaaggaactccatcggcataaaggtattggcctagcggccgtcgccgactaggattttaatatctgtcatttcgccgcggcctgacctaataaagctaatcacgttaacgcactaataaataatcacgtcccggacgagactgcggaagctgaacgaacttaatccaaccgcaaccccgacatccgctacgtcactgtagncatcatcagttcaaagacaccccccc

SEQ ID NO: 69701 - DNA, 209 bp, Glycine max
  Clone ID: PAT_MRT3847_33952C.1
cccacgcgtccgatttgatactcttttccctctgagtttgttacataagatagaaaaatagctcatcatactaaactacattaaaacaagaaaaataaatcgatgaccaaaggaagagaaatatgattgtaaatagttaaaactagagcaattcctgtgctttccccaggcagaggaagataaaacaaacaaatggcccgtgttttaat

SEQ ID NO: 69702 - DNA, 538 bp, Glycine max
  Clone ID: PAT_MRT3847_33953C.1
caacccctatctcgcccacgtcgacatcacccttgatgactagtccctccgctgttgcatcaggcgcttgcactccattctacaacactcccaatgcctgcagaacatgacctaccaattactaggctcccaaaccgacctcacatccatccatagatccacctttccataattgaacttaaaggcctattactttgatcccgaaatcgtcccgaacctgatgtcaacctgtgctagacaagctctgcaacaaccgctcaactacgccagaaatgatctctctgaccttctgcaaccctgtggagaaagagatatatacctagattccgagctggctgcagatgacgacattgccaagactaggagcaccagctcatgttctatatccatcggtgcccctgaatactgccacgcccactttaccaggtgctacaccgaaacgttctggtctgacactctcttcgcgagggcatacactgggcggatgccatgctacttgcacaccggcgtgatggtgattgatctggtgctgtggcgc

SEQ ID NO: 69703 - DNA, 502 bp, Glycine max
  Clone ID: PAT_MRT3847_33954C.1
ataaatagcattaagcagtggagacggtcttttgtttaattcatccaattgacgccttgctttatagtaagttttaattcatccgaaatgatttaacctgaacaacaagtaggagtgccaatgaaaacaagagataaatagtacgtaaaagagagggaattaaaacttactataaaaactagagtgaaaaatgttttaggattggaatcttgagaacgataaagggaggtgtgcattatgtaatcaaggttttaagaaataaattaggaagggcagatcgagggagactgaaaacataggttaatgatgacaatctttttttgtgtgtgtaattgaggttttgatatgcaattaaggagaccataaatacctgaaaggattaattattagttttcagttgagaagtatcctattttactaaaaaaatattcataatagtaaatggtaaaattacatattaactttagcatttaataatcattcaattattaataaattcatt

SEQ ID NO: 69704 - DNA, 165 bp, Glycine max
  Clone ID: PAT_MRT3847_33955C.1
aagctcttgggtatttttagagttggggggaggcattttttacttcaaccaaacaatgaggcttgcacccaaaaaatttgtgtatgaggaaatctttggaaagccatagatcacccccaaaaagaatacggggggaacttttaaccacctaaatacatgacaact

SEQ ID NO: 69705 - DNA, 433 bp, Glycine max
  unsure (1)..(433): unsure at all n locations
  Clone ID: PAT_MRT3847_33956C.1
cccacgcgtccgagaatttcgtgggattatcagttttggatggatacattgcatggggttcagaatctaatgaggtgtactgttatcacaaatcactgccggtgccaattgctactcataaatttgagtcagttgatcctatttctggccatctaaatagtggtgataataatggacagtttgtttccagtgtttgctggagaaagaaatctaacatgcttgttgctgccaactcagttggaattgtgaaactgttgcagatggtctgacagaaatgagaaaatatttggttaacattgaagcctgaaaagctatttatttcctgacttgataatattttgatttagtatacctctcagaagactaagcgtgcattntatttgagacaaactcgcagaccagttctttattcangcttcaatgattaatgggg

SEQ ID NO: 69706 - DNA, 3023 bp, Glycine max
  Clone ID: PAT_MRT3847_33957C.1
aaacatactgtccattattatcaccactatttagatgaccagtttggggctagtgtttgctggagaaagaaatctaacatgcttgttgctgacaactcagttggaattgcgcaactatagcagatcgtgtgacacaaaagagaaaatatttggataacatttaagcctgaaaagctattcatgataagactcgagctcgttattgacttgattagatagccagattgctattattcttattactcaatgtttgacaaaccagagaactaaaacggagaaaagttctagaatggctttaagctccaaaaaactggatcaagtatccatttgtgtaaatgtgactaggaaactgttgctgattactgcatttcgtttttagtttcctttgttaagagcatgattctttttctttttttcttttttgttgagagcatgctatacaggtgctaatcactttttagtttttggcatttctttatttttcagattccattctagatccttgtgctaactttttttgccctggggctcccctggctgattcgctctttgccattgaatcccgcgggccgcaaaaagacgccatgtctgctttgtgccatagaagcttaccgactcaatgtctagcagaagatccatagagagctggatgttgatcctggctcttgcatactccagagttctcttggttgtgtacgatccttctttgaaggtttatgcaagtttgctcgttacagcaagtttgaagagtgtggcagattaagaaatagagatctgcttagttctgccaatgtaatgtgtgctctaagttttgaccgtgatgaggatcacattgcagcaggaggagtttcaaagaaaatcaagattttcgaccttaatgctattgcaagcgattctgttgacatccagtacccagtaattgagatgtcaaataaatcaaagcttagttgtgtgtgctggaacacttacattaaaaatcatctggcatctactgactatgatggtgcagttcagatgtgggatgcagacacgggtcagccattgtctcaatacatggagcaccaaaagagagcttggtctgttcacttttctctgtcagacccaaaaatgtttgctagtggaagtgatgactgctctgtcaaactgtggagtatcagcgagagaaattctctgggaaccatctggaaacctgccaatatatgctgtgttcagttctctgcttactcaacaaatcttctattttttggatcagctgattacaaggtttatggttatgatcttcgtcacactagaatcccttggtgcacattagctggtcatggcaaagctgttagctatgtaaaatttatagattctgaagcagttgtctctgcttccactgacaactctttaaagctttgggacctgaacaaaaccagctcttctggtttgtcatctgatgcttgtgccatgacctttaaaggtcatagtaatgaaaagaatttcgtgggattatctgttttggatggatacattgcatgtggttcagaatctaatgaggtgtactgttatcacaaatcactgcctgtgccaattgctactcataaatttgagtcaattgatcacatttctggtcatctaaatagtggtgataataatggacagtttgtttctagtgtttgctggagaaagaaatctaacatgcttgttgctgccaactcagttggaattgtgaaactattgcagatggtctgacacaaaagagaaaatatttggttaacatttaagcctgaaaagctattcatttcctgactcgataatattttgatttagtatacctgtcagaagactagttctttattcaggcttcaatgattaatagggtataaagcttaaatgggttcaccatttggcattgcttctgaggcaagcatcaatgtacaattgtgaaccaaagtaagctgaacaagaaatgtacatagcatgtacaaatgtaggcttttgaactgaagcactgatgaagctggagcatgcaagtctctctcaaatgcggtattgcacgctactagtggttttctctaatgtctgatccattacttctgtatatagcacgccctcctaagcagagatacatactaattacctttactttcagatcacttttagtttctcggaaaagtacaggagatgatctatgctttgcatttactttgacatatattaactgttgtagttaatatgatggttcaaatattaattttacgctttcatttctgacagaaatgagaaaatatttggttaacattgaagcctgaaaagctatttatttcctgacttgataatattttgatttagtatacctctcagaagactaagcgtgcattttatttgagacaaactcgcagaccagttctttattcaggcttcaatgattaatggggtataaagcttaaatgggatcaccatttgacatttcttctgtggcaagcatcaatgtctcctattttccatgcttaggtaatactttcaggtgctggttttcttaaaatgtgaaccaaagaaagctgaacaagaaatgtatatagcatgtacaaatgtaggcttttgaactgaagcactggtgaagctggagcatgcaagtctctttcaaatatcgtattccaagtgactagtggttttctctgatgtctgatccattacttctgtatatagcacacctaagcagagatacatgctaattacctttactttcaaatcacttttagtttctcagaaaagtacaggagatgatctatgctttgcatttactttgacatataaactgtcgctaatatgatggttcaaatattaattttacactttcatttaaaaaaaaaagcttaaatagaaaaaccatttggcattgcttctgaggcaagcatcaatgtacaattgtgaaccacagtaagctgaacaagaaatgtacatagcatgtgcaaatgtaggcttttgaactgaagcactgatgaagctggagcatgcaagtctctctcaaatgcgggatt

SEQ ID NO: 69707 - DNA, 652 bp, Glycine max
  Clone ID: PAT_MRT3847_33958C.1
aattcggctcgagctcgagccgctccgatatttttaatgtctacattatcttttggaaacgcaattcctccttagaaactggaaattggacacgtagtcctacacacacagaacataacactgcttctaataccatgttttcttcgtctccaccgtttccttcttcttcttcgccttcagttacgatgcttcatgaacaagctgctcctgcagttgcatcctggtcttctagttctgcagctcagcattttcctacctcagttcttttacaagagcagcgtgatgagtataagcccttactgcacgtgcataataaggagacaacactaaatacaaggcagatggatatgacctcagttcatgaaaaaggtaacatgagcaatggtgatcagttagtgcatgactttgtgcagcagttgcatctccggtctcatttacagaacttattgacttgttctccgacaaggggaattgctgcttcttcgattctgcaacctgttgatattgattctgagtggcctgcagatggtctgccagggaatgccatttctcttgcacagcaagctttggctgcctcaaagcaagcagtttcaaacaactggagagatgaaaatggattgaaatcgatgatgatgatcccactttcttttgg

SEQ ID NO: 69708 - DNA, 2183 bp, Glycine max
  Clone ID: PAT_MRT3847_33959C.1
cagacccacgcgcgtccgctttgactctccgatatttttaatgtgaaaacattatcttttgcaattgtaattcctccgtagaaactggaaattggacacgtagtcctacacatagagaattgaagatagtaactcagtgctgctaacaccatgttttcttcgtctccaccgtttccttcgtcttcttcgccttcagttacgatgcttcatgaacaagctgctcctgcagttgcctcatggtcttctagttctgcagctcagcattttcctacttcggttcttttacaagagcagcgtgatgagtataagccctttctgcacgtgcataataaggagacaacactaaatacaaggcagatggatatgacctcagttcatgaaaaaggtaacacaagcaacgctgatcagttagtgcatgactttgtccagcagttgcatctccggtctcatttacagaacttattgacttgttctccgacaaggggaattgctgcttcttcaattctgcagcctgttgatattgattctgagtggcctgcggatggtctgccacggaatgccatttctcttgcacagcaagctttgtctgcctcaaagcaagcagtttcaacaactggagagatgaaattgattgaaattgatgatgatgatccacttccttctggtctggcctccacaagtttgactgactcttcactaaaaaagaataaagttgtgaggtcaacacggattatagaaagactatctaaacagagaaaatcatcaaagtcaaaaattattgacgaagaaagttaccttgaaagaaagtctgatgtacagagaaggttacgtttagagaagaagttaaaagaagggtatgatccaaatgaccccctgcgcttgttcctgtcgggtcctgaatcaaggcaacttttgacccgtgaagaagagtctctattgattactcagttacaggatttatcaagattcgaagaagtaaagatcaggcttcaatctcagttaaggcgggaaccaactttggctgaatgggctgatgctgtgggccttagttgttatgccctgcagacacagcttcattgtgctaacagaagcaaagaaaagctgtttcatgccaatttacgcatggtagttcacattgctaaacattatcagggacgtggtctcagccttcaggacttatttcaggagggaagtactggtcttatgaagagcatccaaaagtttaaacctgaagctggttgccggtttggtacttatgcatactggtggataaggcatgcaataaggaaggctatatttctacattccaggacaatccgtttgccggagaatttatatacccttttgggcaagctcatagaagcaaagaaatcatacattcaggaaggaaatcttcaccccaccaaagaagaattagcaagaagggtaggaattacagtagaaaagttggacaatttgctatttgcttcaagaaatccaatttcgatgcagcaaactttgtgggtggaccaagatacaactttccaggagattactgcagactcagcaattgagatcccaggtgtgactgtctcaaaacagctaatgaggaggcacgtgcacaacctcctaaatatcttaagcccaaaagaaaagggcataatcaggctaagatttggtattgaggatggcaaggagaaaacattgtcagatattggcaaggtgtttggtttgaccaaggagagagtccgacagttggagtgccgagcattgtcgaagctcaagcagtgtctcgaaagtcaaggacttgatgcatacatagacttgcttgtatagatgagtagacaccaggaagttcgtcttacttggctgtgactttttttctggccatgtgcaaaagcaataactagatcaagcttttgatgagaaagctgacactcagccatggtaattgaggatgaaccggggtagctatttggggataagaaaattcaataaccaaaaacgcttatttataagatttgtccagcacctggcatgtgttgttgctgggtgctggacagtagaaaaccatttttttttcatttcttttttttaaaagcttccattgattttttttttttaaatccgtgctgatagcacgggccacacctagtttgtaaaaattgagaagccaaattatcaaaaaccatattttgattttt

SEQ ID NO: 69709 - DNA, 1140 bp, Glycine max
  unsure (1)..(1140): unsure at all n locations
  Clone ID: PAT_MRT3847_3395C.1
cccgcgtccggagaaaacacagagagaaacaaaacacttgcttctttgaacttgatgctctttgcactgctaatacttgtgagttgtgatatcttgattagaggaatgttttccattaagtggagttattcacattaaactcttgggctgttagtgcattgtagcaaatgtccttccgcagtattgttcgtgatgtaagggatgggtttggaagcttatcaaggaggagttttgatgtaaggatttctggtgggggcaagttgaatagtttggtccatgaggcgcatgaacgccagctagttatacagaacagcaggtgggctagccttccgcctgagcttctttgtgatgttattaaaagattggaagaaagtgagagtacatggcctgctcgtaagcatgtggttgcatgtgctgctgtgtgcaagtcctggagagaaatgtgcaaagaaattgttaccagtcctgagttctgtgggaagattactttccctgtctccctgaagcagcctggntcaagggatggaaccatccagtgtttcatcaagagagacaaatctaatctgacataccacctattcctttgtcttagtcctgcattgctagttgaaaatggaaagtttcttctttctgcanaacggaccaaaacaacttgcacagagtatattatatcaatgaatgcagataacatatcaagatctagtagtacttacattggaaaactgaggataaatggcttcctctccacactcttgctgcatgtggagaattttaccttttagattctctgttgaagcacaatgttgatatcaatgttctgaaaaatgaagattcagggccattgaaggaatccacatccttgattaagcaccaactagtcaagctgacagagcaatcactttttctcaagaaaaggacaaaccaaacaaagcccaggcctatagtagtgagattggatgatggagatgtggcaccaatttcagtcaaaagaccagagccaatggatgatattgtattgaattacaagcaagtgggaatgagaacattattgaaagtattctccttagttggctcatgttggagtattctcccttcttcctctgtatcttctaatggctatgtggtgttatcattattgaa

SEQ ID NO: 69710 - DNA, 762 bp, Glycine max
  unsure (1)..(762): unsure at all n locations
  Clone ID: PAT_MRT3847_33960C.1
ccacgcgtccgattctctttctcttatccatcaatctgtccgcgtcaaccatggcatccttcgctgcccccaacaacctcggtagcgccgtgctaccctctcgtccccctcccgtcaaatgcacccttttcccttcttgcaacaacaacaacaaccattcactttcaaacccttctccctctcaccctccgccgctcttcaaagccatcgccatctcctccgccgcctccatccttatgcactgtacccctctctcccccttcctccctaaccccctcgccaaactcggcggaggcggcggaaacaccggcggcggcggcggaggcggagacggatggttcggcggtggcggtggcggaaatggagggttctggtccagaatgttcgccgcggtggccgacgaatcccagtctcaggagtgggattcgcacggtctacccgcgaacatcgtggttcagttgaacaaaatgagtgggttcaagaagtacaaggtttccgacatctcctttttcgatcggaacaggaagatgaaagtgggaacggaggatggcgttcttcgagatggtttctcttcggccgggcgggngtttacaccaaagggcagctccagaaaggagttggagacgctggcaacttcggggaatgttcgagaaaggttgattttggaaagggaaaacaaaccctgacggctcaattgggggttaccatttccttcagcgaaagcacgttggcagtcggcagaatgggatttcgctgcatcat

SEQ ID NO: 69711 - DNA, 335 bp, Glycine max
  Clone ID: PAT_MRT3847_33961C.1
tttcgtcctttttttttttttttgataaatgggctccaaatatttatagagaaacaacttcagttcatatactggccaaaatggggtcatcattccattaactttgcgggaaaaacaaatgctcaacagggttatacactacaagcatgatgatacaacgtgtacaaagctctattaaactcgaggaggggacaatagatggagagcaatctaagttggtccggactctaggcaaactttccttgataatcatgttgatactgatattgagcctcatcttactactaatggtcatctgattccaagcagtacctaacgtttgcatctgaatctaa

SEQ ID NO: 69712 - DNA, 507 bp, Glycine max
  Clone ID: PAT_MRT3847_33962C.1
aattcggctcgagttcttgatcagatttttcgttgctgagatacgcgcgttttagggatgtaaagttaagaaggagcgaaattatttagttcttaacaaattgtcgctcacacccgcgtttcactcttctaaaaaaatttgattttagtctacccggtgattccagcaaaaagttggaaccatggagtagaagtagttggaacaaatcttatggatgaacttccagtggcaagtcacgctacgactaccttaacactaccttagcctagcgcaacgctacactaccttagccacagaatcgtacccctgcatagtcaatgaaataacacgtgccgaagtgtaaacaatcatttcactggattgctgactgaatattgtttcaacttttgattttttttttctgttattcaaacagttgaaaaaaatttgttttcctattagtgctgtaaaaactttcaccgacatattttttcgtggctttttttaaaaatggaaaaagattttagg

SEQ ID NO: 69713 - DNA, 824 bp, Glycine max
  Clone ID: PAT_MRT3847_33963C.1
gaagtacggctgcgagaagacgacagaagggggacgaatgaacaagattgaaatggcagctactattaacttgtccctgccccttttgtccctctgcaaaccccctaagtttctgaaacctccaacaacaagatttctgcaacatgaatacgtaaacagcctcagcctcagcctcagaagaagaatcactgaatcaaacacttgcagaaaaagaagagggatcgtgtgcgggttgccattgccagttgatccatgggcacctaccattgactcccagagcatcgcatcccagctcttcgcgttttccttgtttccatacatcggattcttgtacttcattaccaagtccaagaccgctcccaacctcaccctcttcggcttttacttcttgcttgcctttgttggagccacaataccagctggaatttatgcgaaggtgcattatgggacttctttgtccaatgtagactggttacacggtggggctgagtcgctcctcactctcactaacttgttcattgtcttgggtctcagagagggtctcagaaaagctgaaaattcacaacgtgatcaaaatgcttccactcccaattcaggcttggacgagtagaacaagaagaaacgtagaatgcagatttgatattacaagtcattctattgtcagtttctcactatcattatatacttatataatttcatgatcatgggctgtgttgtaaataaagtggatataagtgctggatatttgtgtaattaaatcatcaattcgaatgaaatgttacagagttttggccagcgtatcccaaaaaaaaaaaaaaaaccac

SEQ ID NO: 69714 - DNA, 194 bp, Glycine max
  Clone ID: PAT_MRT3847_33964C.1
cgagcgcgcaattctattgatagatcaaacggggagccggtctccgagtgccccatggagatctttatcaacagaagcatcctctcttacctatacggatgcatggctgaaaagccccgaaagtcaacccccgctctctgcggatgatgatgacggctaccatgctcgatggatcgccttccgaccttctaata

SEQ ID NO: 69715 - DNA, 492 bp, Glycine max
  Clone ID: PAT_MRT3847_33966C.1
acgaggttcagtactgtgctcttgcaggttctccttttcatgataacgctatggcctaatcaagtatccaactttctctctctcttctttctctgttttgatgtatgtaatgcagatagtaccactactatttttcttttccttccatatgatttgaagtttaatttggtgggagcgagaggtcatgctgaattcagatcagagatgtgcagtacctaataaatgttaatgattaacacaaagtgggcacaaccttgttgacaaatttgatagcattggagtcaaactaagtccagtttgagcacaatcccacaatcatggttgttgattgttcagctttttctctactctcaaaaacattgaatacacattcttcggttccatttattgaacacccagatcagaccctgaagtccttgaattgacactgcacttcataattgattggttaatctttttatcaagtgctcgtgaaattattccacctacttg

SEQ ID NO: 69716 - DNA, 671 bp, Glycine max
  Clone ID: PAT_MRT3847_33967C.1
gtacttttaaaattataagtaaatgtatcaaaggtaaaggtttttcatggacaaaacggtactttggtgatttagggaaaactttgagatcagctggctccaatatagcttttgcagttgtagctgaaatatcggattctgttctgaaaggtgcagaggcgaatggtttcaatggattggtgagtggctttcaccaaggaattctaaaattggctatggagccatcagttctgggaactgcattgatggaaggtggtccagatagaaaaatattgcttgatcgaagtccagagtcgatgagttatacattgaaggatatatccaagccatgcttgatacagtttatagacaagaataccttagagtgagagttattgacaatcaggttatcctgaaaaacctacctccaaatcattctcttatcaatgagataacgggtcgtgttaaggagttccttgtgagcaaggcattgctaaaaggagatccctcaaccacatcgcgccctttaagccgtcttcgtggagaaagtgaatggagaatagggccaacagtgttgacattgtgcgaacatctttttgttagctttgcaatacgcattctgcgaaggcaggctaataagtttatgttcagcataaaatggggaaagaagtcagaggatgttggcaatgatg

SEQ ID NO: 69717 - DNA, 212 bp, Glycine max
  Clone ID: PAT_MRT3847_33968C.1
ccgaacatagcgggagcttttttcacgctttaggggggcgatctaccgcatgttcgaatcaagccttgcacctatggggaacaccgcccggcccaagccctcatttttattgacaaaaaggtgttctggccagctgccggactggtgagcatctcctgtgatagatacaaaaagtgtactgttactgaaacataataaaatgcctgtgcccc

SEQ ID NO: 69718 - DNA, 169 bp, Glycine max
  Clone ID: PAT_MRT3847_33969C.1
ccaggcccaaattcccttaactcctacaaggtactgtccgctgcaaagatctcaccgatttcatcattgcagcgaatagttcacaattgtatcacactcgatttctgctcctgaaggggtattagaaatctttaccattttccctattgttcctatcgctatttggaaa

SEQ ID NO: 69719 - DNA, 411 bp, Glycine max
  Clone ID: PAT_MRT3847_3396C.1
aattcggctcgagggataaatggcttcctcttcacactctttctgcatgtggagaattttaccttttagattctctgttgaagcacaatgttgatatcaatgttctgaaaaatgaagattcagggccattgaaggaatccacatccttgattaagcaccgtaagtgggatggattatattgtcttccttcggagaagagtgagattgtttcagatgagtatcttcctacaaatgatccaaagtctaacaataatataaatgatgaagctgcagaactagtcaagctgacagagcaatcactttttctcaagaaaaggacaaaccaaacaaagcccaggcctatagtagtgagattggatgatggagatgtggcaccaatttcagtcaaaagaccagagccaatggatgatt

SEQ ID NO: 69720 - DNA, 370 bp, Glycine max
  Clone ID: PAT_MRT3847_33970C.1
aaaaaggggaaaaaaacccctttaggggggtaaaaaaaaaccccaaaaaataaaaataggtttggacaagaaactaaatggccaaaacagtttattggtgaaaactggataaaaaaaaacaaggggacaaaaaagggggtttttaaaccaaaaacatttaaaaacaggacttactttcctattccaaagggtaaaaaagggttccccacaccctgaaaagccaggggggaagctagccccaagttcttccaaagggttggccccattaaaggcccttgggaacaaaaggattttttggggaagaaaatctttccgccagcttaaccatggtgccccccggggatagtttttttggcgggttgaaattcaa

SEQ ID NO: 69721 - DNA, 508 bp, Glycine max
  unsure (1)..(508): unsure at all n locations
  Clone ID: PAT_MRT3847_33971C.1
tttttggggtacaaattaacattggggggtgcatattccatgggcatgggtttccactcccattatgtgacaatttattattcaaataaaaagagagagcaaaaaaagaaaaagaaaaaaaaaaggggccttaaaggggactacaaacacaaaaggagagggggaacacaggtttttatgggagtccacatacaccatttgagcatatatggggataactaactactcagggggattttcccggggggagtgagttcttaacggcgggcggcggagaagggatttggctgcgcttgggtgngtggtgtggggggggaatagtggtgcttttnggggggccaacttgatcaggaacttggtggggcagggcaagtgactttgcgaggggttcggcggcgagaatctccggcggaggagcctggaaggttggcggcgatgggcggacatggttttgtgtgcgtgactctgtttctttgtgttgggagagagagaaattaacacacaacac

SEQ ID NO: 69722 - DNA, 191 bp, Glycine max
  Clone ID: PAT_MRT3847_33972C.1
gatggcaagaatggtcattaagaagaccatttcgcggggtggccaacacttacgtcatggtggaggaaacatctccatcagcagcatcctgcgagaggcccatgtatgacggataggcttcacgctattgaatctcatcctatctgtccgctctctttatatgtcatggttaccatggatggggtagccac

SEQ ID NO: 69723 - DNA, 2466 bp, Glycine max
  Clone ID: PAT_MRT3847_33973C.1
ctcttttagtctactgctagctccttcaaataaagaaaaaacagaagaagcttctgctccctccatttccatttcccagaaacttgcacttgctgcattcatcttactggggagaatatattagcgtttgtttctcttagtcttattcagttcaaagtgttgctgcgtttgaagatgacggaggaacacgagaatggcgccaacgcaagcgaggaggaacaggtcataggcccgggcccggcccctcgtgcccggcccaagcgaccccttcagttcgagcacgcctacctcgacgccttaccctctgccaacatgtacgagaaaagttatatgcaccgtgatgtggttacgcatgtcgctgtttcagctgccgaatttttcatcactggaagtgccgatggtcatttgaagttttggaagaaaaggcctattggtattgaggtttccaaacacttcagatctcatcttggtccaattgaaggtctagctgttagtattgatggtctgctttgctgtacaatatcaaatgaccgctctgtgaaaatatatgacgtagtcaactttgacatgatggtcatgattcgcttgccatatattcctggtgctgttgactgggtttacaaacaaggggatgtcaaagctaggcttgccattagtgataggaactcatcttttgtgcacatatatgatgcacgagctggttcaaatgatcccatcatctctaaagagatacatatgggtcctattaaagttatgaagtacaatcctgtatgtgattctgtactttcggcagatgcaaaggggataattgaatactggagccctgctacacttcaattcccagagaatgtggtcgattttaaattgaaaagtgacactaacctctttgaaattgcaaaatgcaagacttctgtttcggctattgaggttagtccagatggtaagcaattttccattacatcacctgatcggagaatacgtgtgttttggttcagtacaggtaaactaaggcgagtttatgatgaatccctggaggttgctcaagatctccaaagaagtgatgctccattataccggttggaagccattgattttggtcgaagaatggctgtcgagaaggaaatagagaagacagaaagtgcactacttccaaatgcagtttttgacgaaagttccaattttcttatatatgcaaccttgcttgggattaaaattgttaatctgcacaccaataaagttgctcgaatacttggaaaggtggagaataatgataggttcttaagaatagctttatatcaaggggatcgaaatagtaaaaaagtaagaaagatcccttcagcagctgcaaatgctaatgagagcaaggagcctttgacagatcccactctcctgtgttgtgccttcaaaaagcacaggatatatttattcagtcgaagagagccagaggagcctgaagatgcaactaaaggaagagatgtgttcaatgaaaagccacctgctgatgaacttttggcagtatcggatattggaaagtcagttacaacatcacttcctgacaatgtgattctacacaccactatgggtgatattcacatgaaattatacccagaggaatgtccaaaaactgtggagaatttcactactcactgccgaaatggctactatgacaatcttatttttcatagggtcatcaaaggcttcatgatacaaacaggagatcctttaggagatggcactggtgggcagtctatttgggggagagaatttgaggatgaatttcataaaagtttgaggcatgataggcctttcacggtatcaatggcaaatgcgggcccaaatacaaatggttctcagttctttatcaccacagttgctactccatggttggacaacaagcacactgtatttggtagagttgcgaagggaatggatgttgtacaggctatagaaaaagtgaagacagacaagacagataagccatatcaagatgttaaaattctaaatgtcactgtaccaaagtcttgaaggtccttggtctgtatggctgatggagtcagtcatatcaatactgatgatacgctgctgaagaagtttcaaacagaatgatttcaagtttcatcctttagcttgataggcggcctatgaactgaggcaattattcttaaaaaggattgccgttgtttttcatgcatacactttcgtcacagttcaatctttatccgacttatggctcaagcttacctcggatgttggcttctgtgttctgctttgccagtgtaatgagctttgcatgccaaaggaaggcagttaggcaatatcacttgacatgtaattttttctgatactataccagatgtacgatatccctgacttattatcactatttttaaaagtggtataaaatggttttgccgaaaagtagatttctaaaaaataaaaaaaaaaaaactcgagactagttctctc

SEQ ID NO: 69724 - DNA, 237 bp, Glycine max
  Clone ID: PAT_MRT3847_33974C.1
cggctcgagcggctctacgtgtgtgcatggtgacgataacttaattagtgttcatgaatatgtcaagccttacttgagtggctctaaattgaagagctttctagctggtcataatatcaccattactgatggtattgacaccactagtgcaactttgcagtttacagagttagcagattgcgagtttctcaagagaaattttaagcagatgtctaatgctttgtgggtggcacctga

SEQ ID NO: 69725 - DNA, 187 bp, Glycine max
  Clone ID: PAT_MRT3847_33975C.1
ttcggctcgacctcgagccgattcggctcgaccggaccaagaggagagcacggaacagcgaaagcaacgccatgctcgccattatcgagctccctaacatgctaagcctacctctggcgtcaaacgccgtcgtccgcctcctcgtcgccgacgccctctggcaatgtggcgccaacgccccgctctc

SEQ ID NO: 69726 - DNA, 286 bp, Glycine max
  Clone ID: PAT_MRT3847_33976C.1
gggggaacagcgcaccctttttttccaacgaagaaatccttttttggataaatgtattggcaaacacagggcatatgacaattttgttaataaaccctataaggacacaaggtgtaccttggccaggggcaaaagggcccccacttggcctcccatgaaagctcagtgtggggaaatttctgaaaaccccattgagggaagcctttttttggtctcttaaactccccgtaagaggtttcctctgggcgaagaagcttgtaactgcagacctaattgccgaattggg

SEQ ID NO: 69727 - DNA, 490 bp, Glycine max
  Clone ID: PAT_MRT3847_33977C.1
gctagatgttgactacctgcaggccgatcatgtcttgcactgtaacaggctccaatgctgggagggcaggctggggagaggagcgcggccctctcaggatgggtgcccggcctgctttctgcctcgtgcccagagagcctacgggttagaaaacaactaaaggggcaggtgggagcacggatgggggatgtatttataaaatggcatccaacagttcatggcagattatgtgatagaagtatccattaccgggatatgaggaagagagtcccgcactctagtacatggcataagaagtttcttggagtgagcagaaaggggagagggtggacctgaaggttttcatatgattaaatccacccctatcaagagctgaagaatagccgctttttttttctgtactgacgtatagataaatatgtgaaccgtgaaaaagttataggagcgacctttgagacgatgcgtatgccaatgtttcatgggctaacat

SEQ ID NO: 69728 - DNA, 527 bp, Glycine max
  Clone ID: PAT_MRT3847_33978C.1
actacacactaccgatatacatgtgagaaagatggtacaagtaaaaccttcacggtcaactgtgttaacaaaagccttttgctgacacatttgcttgggatgagcatatctttctttcacagtttataatgaccattaccttcctgtggccgtttttctccaacaaaatgcacaaacaacacaactcactatactctggagtttataaaattcttttaccaatttactatgaaaggcattggggattgcacgctgataatactgaaccctctactgattgagatctagggattccatactcccgatagattgactcagaatctgtttatgtgagatgtatttccttcaaaagaggctaccctgtgctgacatgacttactaagagatcttatttgagcaccggagattttacaaagtgcttcttgactaacatccacggtgaaaggataagaatgctcacactcattgacaccagttgtatcacgactgctcgatacaacacctcggcttgtagagccacttgaacg

SEQ ID NO: 69729 - DNA, 548 bp, Glycine max
  Clone ID: PAT_MRT3847_33979C.1
ggcaattgggtggtatgacaagtgcatgttgcgctactcaaaccgctcaatacatggcgtcttgtaaactccctttttgttttatctgtcggaaataaccaatgcaacggacgtgtcacttcttctctcccacgctggggaacttgatgagtaatctaacgggcatagctgcatcaggtaactctcccctccccagtatgctctgcggcaaatgcaactgctccaaattctcaaaccatatatggtgctgcgcagtgcactcctgacttgtctgaacaagactgccacagttgcttggttgaggctttctcgagaatcacaagctgttgtatcggcaatataagtggtagggttgctgcacccagttgtaatattacatatgaaaacttccgcttctatgatgagcatgaacatgctacagaagatgcaccaccaccatcactttgatgccgcggcacttccaccatccacctattaccctaatgcaaaattatttaagtagatgcggctgcgctacaaataaaatatagtattctgttattattttt

SEQ ID NO: 69730 - DNA, 529 bp, Glycine max
  unsure (1)..(529): unsure at all n locations
  Clone ID: PAT_MRT3847_3397C.1
agatagataaagagagttgtgaagcacaggatctaaaaacgtgttatctgacaagactttggaacatcacgggtgtgggaaacttcgagacccacgtgttttaaggcttctcacttttgaaaggtttcagttgtgacatcctccaagtgacaagagtggaacattcattcctttagtggcactttggttatatattaaattctgggctgtgagtatattagaacaaatgtccttccgcagtatagttcgtgaagtaagggatggatttggaagcctatcaaggaggagttttgaggtaaggctttctggccataacaggggcaagtcacgtagtttggtccacgagttgcaggatcagccaccagttatacagaacagccggtgggctagccttgctcctgagcttcttcgcgatgttattaatagattggaagcaagcgagagtacatggcctggtcgtaagcatgtggttgcgtgtgctgtcgtgtgcaagttctggagagaaatgtgcanagaaattgtcagcagt

SEQ ID NO: 69731 - DNA, 448 bp, Glycine max
  unsure (1)..(448): unsure at all n locations
  Clone ID: PAT_MRT3847_33980C.1
attccgttccaggaaggtttcccgtcatcactgtatgacgtcctccttctttgggggggggggggggcgaagtagggtgggggcgattgacggggttcggtactagaatgttaagcttcaataagaggaaaaaagggtagaaagcgaaattacttgcgtaatgcacggaacaagtgtgttggtagtattgaaatatcccagattgggccagggacagaagaaagaaataaaggtccccgacccacatacccgaccccaaattgtgcgtacgtaccgatgataagggatgacgtgacaaatacacgataccgtattacgtattacaagggttccncgaaagcncgttaaggggggggggttggtagccgtagccgagggcttgcacgatacacacgtatagatagtagcggcttaactttcgcngtggataaagcccatatacaggtgg

SEQ ID NO: 69732 - DNA, 355 bp, Glycine max
  Clone ID: PAT_MRT3847_33981C.1
cttttaccaagaaaatgtgaaggtgtggcaaatattttggtggcactatgcacaagaatcagtcctttctgatggtcgtaggaaattgaagaaaacatcttggagataccttggggatcgatttctctccttgacattcatctaccttgtcttagtaattctttaagtttcctggatgcagaagtttccgacggaaatatttgaacttgtacaaggctaagttggattttcttcaacaagagcagctagttgatgatgatgttcttcgagatttggagcaaatggagaaagaatcagatctagatgatatattaaattatcgatctgctgcagaatatgaaatgcaggaatttct

SEQ ID NO: 69733 - DNA, 1851 bp, Glycine max
  Clone ID: PAT_MRT3847_33982C.1
aattcggctcgaggtgagtgacaacccttttttctccacaacaaggttttctccacagggcaagaggctggtttggtgtttgtttcatttcactttacatgaatacatatacatagaagtttgaagggttttagggatttgcatgatgctaggttcattacctatattgcccctccctgctcctccttctgatggaaatctaggtcctctgcctgagtctcaagtgattgatgataatgaggaggagcagaacaaatcaaattctgcttctgttccggcgccggcaacagttgccacccacaccataacgattggaattatacatccacccacaaacattcggtccattgttgataaaacctgatttctgcagaaagagattcaaccaagtttgttgtttctcctatcactggcgagttaattcctattagtgagatgtcagaacatatgcggatttctctcattgatcccaagtacaaagaacaaaaggaaagaatgtttgccaaaattcgagagacaactttggctgcggatgatgaaatttcaagaaacattgttggacttgctcggacccgtcctgatatattcggtactacagaagaagaggtctccaatgctgtcaaggcagagattgagaagataaatgatgagcaaccaaagcaggttatatgggatggtcacactggtagcattggacgtactgcaaaccaagccatgtcacaaactattggaagcgaggatcaaaatgatgcttttaataatgaagccaagaaccttctgggtcctgctgcacctcctccaagacctggtatgccttcaattcgtcctcttccgcctccacctggactggcattgaatcttccccgtgttcccgtccaatattctgttccccatagtggtgcccttccaatgcctccacctagacccatgatgccatctattcggcctgctcctcctcctccaatgtcgatgaatagtggacagcagtcagttatggcgggccaacctcacccaatgcatccatcaattcatatgaataaccaaggaattcccataccccccaccaccgggatctcagttcactcctgttccagttccgcgaccttttgttcctctttctgttccaccatcagttatgcctatgatgcacccaccacctttgcctcaaggagtgccaccgccaccgccaccagaggaggctcctcctccactcccagaagaaccagaaccaaagaggcagaaacttgatgattctgctctgatccctgaagatcaatttctggctcaacatcctgggcctgtttgcatttgtgtatctgttcctaatgttgatgaaggaaatcttaagggacaagttctggaaattacagtgcaatctttgtctgaaactgttggtagtctgaaggaaaaaattgctggggagatccagctccctgctaataagcagaaattgagtggaaagcctggctttctcaaggataatatgtcacttgcccattacaatgttggtggaggtgaaacacttaccctcacgttaagagagcgtggtggtagaaagagatgagcatattgcttgcgtttccattcaagaaggttgttgtaatctttgccttattatgaggcatatggattcttatggtattgatagactacatgacgttatttcctgaattttatgttgaatacattagatttattgtactgagacattttgaggtatttactgctgtcatgaaggctgatgttaattctggaatacagattttggcaccatggcgcttctctcttgaggggaatgggaagtagtggttcctttatctaaactgatcaattcaaattatttgcatctct

SEQ ID NO: 69734 - DNA, 692 bp, Glycine max
  unsure (1)..(692): unsure at all n locations
  Clone ID: PAT_MRT3847_33983C.1
tggtggccgctggtgccgtgcccatttcttcccctgacgaaatgtccatcatccccagacgcctcttcagcctccgctccgtctccacctattccctcaccccattcacgcgcccacaaccctctctccccctaacgcgcctcctcctccacgcgcgcccttcctccacctcaccctccagaaccccatcggagaaacaattcgagacgtgggtccaggccctcaagccgggcttcaccccctccgatgtggcccaggccctccaggcccagtccgacccagacctcgccctcgacatcttccgctggaccgcgcagcagcggcactacaagcacacccaccacacctacctcataatcatcaaacacctcatcgccggccgccgctaccaccacgccgaaaccctaatcgaggaggtcatcgccggcgcctgcgacgacgcctccatccccctctacaactccatcatccgcttctgctgcggccgcanattcctcttcaaccgcgccttcgatgtctacaagaaaatgctcaactctcgcgactgcagacctaacctcgaaacctattcgctcttgttcaattcgctcctcagaaggttcaataagttgaatgtctgttatgtgtatctgcacgcggttaggtctttgactaaacaaatgaaagctnnccgtgttattcctgatagcttc

SEQ ID NO: 69735 - DNA, 283 bp, Glycine max
  unsure (1)..(283): unsure at all n locations
  Clone ID: PAT_MRT3847_33984C.1
gtttttccacacgccgttacagcgctcgcaaattcccatggaccctgcacccgctgttggagtttgtgtcttcctattaatttcttacatgcccgctcttactcaaaccgtctacagctgcgtcctgctcgcaagccaccgtcagcactccacctggatctcctttgcgcggccatcttcacctttcgggtggcccccgtccgcctttttactccaccctagtaaccttaccacacctttctgtcccactcttcancatcctaaccggcgctcaccctctcct

SEQ ID NO: 69736 - DNA, 384 bp, Glycine max
  Clone ID: PAT_MRT3847_33985C.1
ggattgaattattttcctttattaaacccttaatggattccgggctttccaatttcctaaccaaccttttagcctggcctaatttattttcttttttagcctcctaggccaaggtcccacctttaattaaccaattttttaacccaggcttaaaaggattccatctactaatattcactgtaccacctgaggggcctggacatgattctgcttaacttttaatgggacaattcaaatctatgtttagaagaatggttggatgcatctccacatatcttttccttaggcttcccaatatccttggccagcttctctgcctaactatgggtatcaattacatggccaaagcaaatgtttctaccaaaagcctggtggttcatggcc

SEQ ID NO: 69737 - DNA, 442 bp, Glycine max
  Clone ID: PAT_MRT3847_33986C.1
ctcttttttttttttttttcattttattcaatgctttatttatatattaatattatttcgatgaatacaagattaaaagatactacatttaagaatttgacaagtgaaattataatatgttattaaatgattaatcactttttttctacctgctcctgcagccaaaagagttccatctgttcttgacatagcttccttcataaggacttctgcttccccactgaatgtcttggtagaagatatgacttctttgaattgaggtttattcgtgtctaaggaagcacgtaactcatcaagaaatttccttacctgtccaatttctaacgaatcaagataaccattcgttccagtataaatagttattatctgttcttccacggaaagaggagctgattgggaatgtttaatcaactcgcgcaatctgggacctcttgctaattga

SEQ ID NO: 69738 - DNA, 392 bp, Glycine max
  Clone ID: PAT_MRT3847_33987C.1
taattacgggagaccgctactagcggggacgcctttttttctttttattacataaattcttttttgatggaaatatttttatctcaagggaaagaatttacacaaacaagtggggactcagctttgcctaaatctttcaagccatttacagcggtaaatatcgtacaaggacaacatataaaaagatgttcacttgtatagaactaacgggcaactgcctcaaattaatcataggccgacatctgaggtttactgaggatgggcgggaccgctattggcagcagagactcaccagacccaaataagcaaagcttcgcgggtggcatccttgtgaacaattacctaaatgtatcataatgtgtctcatatgaatcctgtggttgtggcaattg

SEQ ID NO: 69739 - DNA, 240 bp, Glycine max
  Clone ID: PAT_MRT3847_33988C.1
gccggaacttggctgggtccgatcccacgcgtctggtttgcaaaaagacagaggggccaccgggggatcttcttgtagggctgcatcacgttgctcataacgttgatcagccccaagcgaaagattcgttggagggaaaatttgtcctttgattttaaatctcgctctagattggaaaaagtgtcctctactaaagcacatttggttagtggacaaaccttcaaaaatggcataatgggg

SEQ ID NO: 69740 - DNA, 334 bp, Glycine max
  Clone ID: PAT_MRT3847_33989C.1
gcaagctcttgaatactcatgacttgtaaccttctcagaccgggctacaaaacaaagtctagaacgaagagcactccaatctgcatttggacctctcaaaaaaacccgattttcttcgtaaggcagctgctcctccccctggaagcagagatcaaacaaacctttgtggttgacatcaaaactaagtatatcctacttggatagcatccttccgggagactatggatatgaccctctgggactttcccaccattaatgaacaagagggttcattcaccccaaatggctagcttttggtgagataatcaatgttcgttatgcaatgtatggggca

SEQ ID NO: 69741 - DNA, 725 bp, Glycine max
  unsure (1)..(725): unsure at all n locations
  Clone ID: PAT_MRT3847_3398C.1
ggctcgagcagctacctcttcatctaaatctattatgatgcgccttctgttctgtgatgccatgtttatggacgcacctttcttcttttaaatttcttttcttttttaatttttctccatttatgctatattttttttcttcgccgagattggggtatgggagacttcgagacccagatgttttaaggcttctcactcctcttaggtttcagttgtgacaacctctaagtgacaagagtggaacattcattcttttagtggcaatttggctatatatattaagttctgggctgtgagtatattagaacaaatgtccttccgcagcatagttcgtgatgtaagggatggctttggaagcctatcaaggagaagttttgaggtaaggcttcctggccataacaggggcaagtcacgcagttcggtccacgagttgcaggatcagccaccggttatacagaacagccggtgggctagccttcctccggagcttcttcgtgatgttattaatagattggaagcaagcgagagtacatggcctggtcgtaagcatgtggttgcatgtgctgccgtgtgcaagtcctggagagaaatgtgcaaagaaattgtcagcagtcctgaattctgtgggaagattactttccctgtttccttgaagcagcctgngcatagggatggacccatccagtgtttcatcaagagagacaaatttaagctgacataccacc

SEQ ID NO: 69742 - DNA, 351 bp, Glycine max
  unsure (1)..(351): unsure at all n locations
  Clone ID: PAT_MRT3847_33990C.1
gggtgtagggtattgacatttgcantactatccggcactaggaggaaaatgggtagtttttccccaatattccactttcttcttgccactcccttctcttttatacggcgtcggcaccaccacctccaccgtaacctattattactgtccacccattccctccccttatcttccttcacttttttttttaaacttcaagcctaccaatcccaagctttcgtccctaacaccttttcctgcccttgagtggtcctcatttctcttccacattttcttcggcgggtaccttccctgcctcccctaccaaacctttcatcggctctcccgaacgtttcttctacttcttttctt

SEQ ID NO: 69743 - DNA, 286 bp, Glycine max
  unsure (1)..(286): unsure at all n locations
  Clone ID: PAT_MRT3847_33991C.1
gnnatgatccagttgaggttnnnnacatgactgggatnccttaaganttcaattattgaaattgaataagtaaacaatttaattggattgggtcgaatggtatcaaaaanatggagtactaactcccatttcttattncattattgaattaaccgatcaacttgctttggttatcgaacatttctttttggatttccaaaaattttccggaaaaaatttggaatcnatttttatatgcgaatccatccctacttacttccnggtcctggaggtttctggcggctta

SEQ ID NO: 69744 - DNA, 336 bp, Glycine max
  Clone ID: PAT_MRT3847_33992C.1
ctacggtttaattgagatttgtatctggggatggagaagagatgacattgattacgggaaccagtgttgaagaggcttacaacatggttatagtggagcttgagaaaagtgttcctacatagggtggcattgaattgttccacggatgagaaacttcctcatgacaaaattgttgcaaacctaaaacgcgctgcttcactattctccctatggaggataattttgtggaccgtcagaagattttaaattttgcgaggtgtattatgaataaaagggatacgcttagttgtcatagtggaataacccattactcatggtacggactggtttgtgcaa

SEQ ID NO: 69745 - DNA, 461 bp, Glycine max
  unsure (1)..(461): unsure at all n locations
  Clone ID: PAT_MRT3847_33993C.1
gctggatcctctagagggcgcgcccttttttttttttttctccttgttcttctccatagtccatgctctactcagatgcctctgaagctgctcatccaagcttttcagatctatctgatccgctctcacataccccccactctcactcttcttcatctctctctctctgtctgtgtgacacacacacacacacacacacttgttgtgttcaaaattcaaaaaattcaccacaccccacttggctttgagctcaaagcacttggatataaaaatgtacttggagcagttggttgcaaaatctggggcctggcttttctacaacaacagtttgtcatatgtgttgtntggagctagataaaaactttttttttttttattttacacaggacagttccgcctgcgcctgcgcctgcgcctgtaccgatcgacgctgggcattctttaggtaatggaatgattgt

SEQ ID NO: 69746 - DNA, 657 bp, Glycine max
  Clone ID: PAT_MRT3847_33994C.1
gcgcgcactcttcatgtgaataacagtccctaccaatgagaccacaaggttgtgccgagatttctcgctgcggttgaggctgaggccccgacaaacgagcaaaccagtgtctcaattcgtgaagaagaaatcgggaaggccccggcatggaagagactgaattacgaagagcttgggattcgcaattcaatgattggaagcactacgaaaaaggttctcaacgggctgaagaaaaagggatatgatgtataccttgtaggaggttgtgtgcgggatcttattctaaagaaaacaccaaaggactttgatattataacttcagctgagcttaaagaggtgacgagaacattttcatggtctgagatagttggtaaacgttttcctgtatgccatgttcacatggatgataccattgttgaggtttcaagttttgatactactaaatgcaaggcgggtatggaattctctcatcatattgaagcacctagtggatgtggcaagaaggatcatcttcgttggatgaattgtttaaaccgagactttacaattaatgggttgatgcttgatccatatgcaagaattgcctatgattattttggaggaatagaagatattagaaaagctaaagtgcgaacagtaatccctgccgaaacttca

SEQ ID NO: 69747 - DNA, 243 bp, Glycine max
  Clone ID: PAT_MRT3847_33995C.1
ctgaattatgattctcttgttttctattttttgggggggggtttggttttaagttttttttcattcttttttttcgctatgcgcgaaacagggcgggcaaaacattacaggggaatccggggaagggaaaacctcaaaaaaaatccagaacattatcctcggggcgggggggaacaacctaaatcaacaacaaaccaccaatcgttcctgctggatgcggcctttgtgaataaccctcccccc

SEQ ID NO: 69748 - DNA, 172 bp, Glycine max
  unsure (1)..(172): unsure at all n locations
  Clone ID: PAT_MRT3847_33996C.1
aaacaataacttttctggcgttgtgcctgaagggttatggagtttgccttattagtatttcgcggagcatgcgataaggtgtaatattggggcggggcctgccacaaatttctattctctaatatttttctatgttgcanattacgataataacttattctaaatctaccct

SEQ ID NO: 69749 - DNA, 154 bp, Glycine max
  Clone ID: PAT_MRT3847_33997C.1
gtatacctttttctctgttgttaatttccgacgtagtcttaaatctaagtaaacggcattggtccgtaccacacatacgaacgacgcaatcttctgattcttatggatacaatttctctcttctattactaataaacgcgtacccaatttcact

SEQ ID NO: 69750 - DNA, 1881 bp, Glycine max
  Clone ID: PAT_MRT3847_33998C.1
gcgaagttcggtggagattttgtctcacccgcgaacctgaatacaaaggcttgggggcaaagctagttcaggccttgaattcgcactctcttcacacactccccatggacttcacccaagacttgcactgtctcctatctgagcaacgccgcaagctcgccgccgcagaggccatggaattggacctcgacttcgccttccgcctccagttaaaggaagccctcgcggcctccctcgccgcccagccctcctcctcctccgccgccgccgccgcgatcatcgaacaacccgtcgtcgtcatccacgatgacgacgtcaacgccatgacgctgcagcgcgaggagctggcgcgtatggagcgcgagatgaaggaccgggagcagagcgaggcggagacgcttaaaatgagagaggaactctgccgtcggatccacgacgagaaggtggcgagggagatttccgcgattcccgagaaggactggcagcagtggggagacaacttcgagaaaccattcggagagggctcgtcgtcttcgtcgctgagtagagaggaaggcgtggttagggtttacttcaagggtttggtgagcgaggaaaacgtgaggggacggaaggtcgtgttgtctgggattggggttgcgatttgcgaccttagcgataatttgatattcgaggtttctaagtcgctcattggaaatggcactagcaaggtcgctgcggagattaaggctttgatcgaggctttcaatgccgccattgctttggacttgaagcgcgtcgtttattgctgcgattattatccccttttccaattcgtgagtggaaaatggcctgcaaaacagcggaagattgctattttggttgatcaagtgaatctgcttcaaaggaagttttcatactgcaatccaaggtttgtggccagacatgatgtcaagtttgcatttaagcttgcaagagatgcaattgaatctcagtccacaagacttgcagaatctgggagtaggagtttgaatgaaacttgtgtcatatgtttggaggaaactgatgttggtcagattttttcagttgatggctgtcaacaccgctattgcttctcatgcatgaaacagcatgtggaggtgaagttgcttcatggaatggtgccaaagtgccctcatcaggggtgcaagtatgagctcctagttgacagctgccagaagttcttgactcaaaagttaaccgagaccatgcagcaacgaaaattggaagcttcaattcctgttgctgaaaaaatttattgtccttatcctacgtgctctgcattaatgtcaaaaactgaggtcttagagtactccaaagatatcactggtcaatctgaacaatctgaacccaagatatgcctaaaatgtcgtggccttttctgttttaactgcaaggtcccttggcatagtggtatgacatgtaatacttacaaaaggatgaatcctattcctcctgcagaagatttgaagctgaagtttctggcatcaaggagcctatggcaacagtgtctgaagtgtaaccatatgattgaacttgctgaaggttgctatcacatgacttgcagatgcggttacgaattttgctataactgtggagcagagtggaaggacaaaaaagcaacatgtgcttgccctctttgggccgaggagaatatttggttagatgatcatgaggaagagttggaagaagaagaagaagatgatgatgatgattatgatgattataggtctgattatcctgatgattattattattaagtatctggccgcttgaccaggttgacggttttacaactagtaaatattcatattcatatatctatatatatgtaagcaaaatgtgattgtcttttaatttcaa

SEQ ID NO: 69751 - DNA, 437 bp, Glycine max
  Clone ID: PAT_MRT3847_33999C.1
atggatttcatttgtaatcaagatgatgtatatccaatttttgtacaactaatgaatagatttatggaagcaatattcaatcttaccattttaaattactacttggacgaattggtgcacttgtcaataagttaacagtgctaggaagataattcagaaaagtgaaggctaatccaggaaagattgaatattgcttccatcttgattacaaatgaaatccatatggaagcaatattcaatcttaccattttaattactacttggacgaattggtgcacttgtcaataagttaacagtgctaggaagataattcagaaaagtgaaggctaatccaggaaagattgaatattgcttccatatggatttcatttgtaatcaagatgatgtatatccaatttttgtacaactaatgaatagatttatgaagagcaatttga

SEQ ID NO: 69752 - DNA, 282 bp, Glycine max
  Clone ID: PAT_MRT3847_3399C.1
gcccatcctagagctcataactagagaagccttgtaggtctggctacgggagaccataatgaacggcttcaaaaaacatggggcatattacatatccatctagtgagctgaaccgaactttaacactacaataacttacttgctaaatatatgtctgagaaaacccaccctaggtctgaactaaaaaccggccactacaaccgtaagagtcgccggaatctccatcaatgcgtggccagcgtcttgatcaccacctgtacattcaaggagaggcgctttcgt

SEQ ID NO: 69753 - DNA, 256 bp, Glycine max
  unsure (1)..(256): unsure at all n locations
  Clone ID: PAT_MRT3847_339C.1
agaaggctggcattgttggaaaatacggtatgtcttgttaattcgattttacccaaatctcgtaatgttttttcagctgttatgccgtttgttactgtcgtacatgttctcgggtttttagaagaatgattattgatgattaatgtattgtttttaaaattgggatgattggnttggtttgctaaaacactttttagtcgttcgtgtatgtnatgtataggtaatgaaaatgcngtttacaaaaaaatatgtttaa

SEQ ID NO: 69754 - DNA, 486 bp, Glycine max
  Clone ID: PAT_MRT3847_33C.1
cccacgcgtccgatctatatgttttaagatgcgttcaaataggggctctagcttcactttatgttgctacagatgtgtgtcaacaagtcatgtaagagacttcactatgttgttttctctttcgtggctttaataaattatgcgcccttgttccaaagaaaaaagataacacacaataaaaaaaaaataaaaaaaaagattatgcccgtatgtaacaaccaatttaatgtcaattgacaaccagcccggatctgggggccgggcgttcaagaggatcaaaagttccgggcccgtcctggcaacacaaagtccttatttgggggcacctaaaaacatttaattgaccggggtttaacagcgacaacaagggaaaacccctggggcaccccaattaaaacccttggcgccacttgcccttttatccagatggcttaattaccaaaaaggcccccccccttcccctttaaaaacacatgcccaccctga

SEQ ID NO: 69755 - DNA, 372 bp, Glycine max
  Clone ID: PAT_MRT3847_34000C.1
gtcgatgtcactagtggcattcgcagctccaaattgcaatttctcgcgcgaactttgcgaggtctagggttccccgactgccatggaccacgccggattaacctacggacaggttctgaggagggacatcccatgggagacctacatgttcaccacgctaatctgaggccccaaccttcaattattaaggtgctacaatcatctgccacagagtcacagaggacatttgctagacgattatggagcctcttatgttcgcgtgtatggtcgggttttgcgtgacattcttaaggaagataccgtggagatagtttggcactttatatatgaaatgcttgttgcaaaccctaacagagcatgactgttttatga

SEQ ID NO: 69756 - DNA, 682 bp, Glycine max
  Clone ID: PAT_MRT3847_34001C.1
gagcggccgccctgaggttctgccgaccaggtacccaagaattagccaccccaaacctggaagacgggacacccgggagacggatgggaacacaaaagcacaccgtacacaaacgacggaggcaaccgccaagcaaggagaccaagtccaaaaaaggagaaagagccaacaggaaaaaaaacgcgtaaagccacacagccaagaaacagcaagggacaacaaagaacccaacgacagacaggagccaccaaggggacacaaggaccaggaaagggagggcccaaaaacaacggggacacgaagccaaggacagcatcgagagcgcgaacaccacaactgaaccacacggggaccaggaccacaggcacaaagaaacgggcaagaaaccgcaggatagagagagaacgcgaaagagggcagaaggaagaccaaccacagaccacaaaggcaagccagggaaaacaagggaagcagaggaaaagacaagcggaaacggaatgaggaaaagggggagccaccgagggaagggcaaggagaaaagaggaaaaaggccggacaaaaaggaagggggcaagggggccaggggacacgaagggagggagacaccccaacaaaagaaggcgggaaggaggaaaaggaaccgccatgagagaggccaagagcggaaggaaaaaaacgagaa

SEQ ID NO: 69757 - DNA, 721 bp, Glycine max
  unsure (1)..(721): unsure at all n locations
  Clone ID: PAT_MRT3847_34002C.1
cacgcgtccgcaacaaactacaacggagtccctttgagtattccagcagcagttgattgtcatgatgatatagagcatttaacaaatgctgtgttgggggataaaagaaccacatcaaaccagcaggaaggagcacctaaaaccatgacagaattgtcccaggggactccagtatctagaacaggtaatgtcatggatcctccagaacaagtgcagcatttatctgtggagtcctctcctcaccatgatatatctggggaaatgttgcattcttccagacaacctgaactgttatctagtgcagttgatgttgcacccgctgatcaatccaatcatgtttcactgatcgtgaagcctgtggagcaggtgcaacaagtatcatctgcagagctcccttcttcccatctggattcaactaatttacctttcacaaccgaacttgaacatcagccaactgtggttccaaatcaagacgtgcaacctgattcaaatttggaagttgattcacattctcattcacatgaagtttttgtgcaccctgcctcanattcagaccctaatacagttacacctagtgaagtaagagtgcaatctgcagacacaacanatttgtcgactcctttggagataaattatcaaaatatgcaagctgaaacccattcatctttcagaatggtgcatttaaagctatgatccgctcaacaatgatttggatagaata

SEQ ID NO: 69758 - DNA, 458 bp, Glycine max
  Clone ID: PAT_MRT3847_34003C.1
gttttgatgtcaaatagtgttgaagaagaaatgggggtatgatcatttggtttgccttcaattttggcgagtgttgggttttatcttccttcatttcaggtgcctaaaattgagaagattgtggtgaactgtggtattggagatgctgcgcaaaatgcaaagggtttggacgcggcaataagtgatctagcactgatcacagggcagagacctattaagactcgggccagggcttctcttgccacttttaagatcagggaaggtcaaccgcttgggattgctgtgacactaagaggaaatgtgagcatttagtagtattcgatttatattgtttagtgaatatagttgatgggcatgggatgatttactgaatttatttatgctttttcttttatgactctggacattctcctattgtagatgatatttagaacaatgtgagtatcatgatgttactg

SEQ ID NO: 69759 - DNA, 157 bp, Glycine max
  Clone ID: PAT_MRT3847_34004C.1
ttttccgttttttttgacagtatcttgagtctatgtttttttggcacaaactgcatcgcattgccactctgtagcaacccatactgataaaaaccatagcggtgtcaatcgagacatatcgtggatatttgagtaccttctttgctattggatctac

SEQ ID NO: 69760 - DNA, 248 bp, Glycine max
  Clone ID: PAT_MRT3847_34005C.1
acacttataactttaataggcttgtgcccataaaaatgatttctatcccgattatctaaagtaataatacattcactaatctagtaaaacaaaaaggaactgttcctctacacatgagaaggtaaaagaagacaaaaggaaaaggagggagaaagtacaaaggaaataagagacgaccctgtacaaaaatacctctatactcgtctcttttcagaaaggcaaaatggttgtgtgtggtaggggggggg

SEQ ID NO: 69761 - DNA, 268 bp, Glycine max
  Clone ID: PAT_MRT3847_34006C.1
ggtagggccttaaatggtatttaatatgctttacattccaaaatcctagaaggtggcccaagggcttaacaagggcagaatttttgaacaatacaacccttctttttatactagtgagggcttgactccaactaaaaggggttatggaagaaaccttccaccccgcaaacaattagcaatactcccctttagggctccttcattcttgggtacttcggctgctacactggtatcagtctctgtgttactaaataagggcagatcgttt

SEQ ID NO: 69762 - DNA, 762 bp, Glycine max
  unsure (1)..(762): unsure at all n locations
  Clone ID: PAT_MRT3847_34007C.1
ccacgcgtccgggaatctcaacgagaggtgtacctaggagcttacttaaatcagtaagtaatattaattcaaccaattttaaataatgttaaagttctatgtacctaatacttgtttcttgtaggggacattggcaactggtagtactgtgtcctacgaccaattttgttgcatggttttgttcgttacgtaagaagcctgatactcatatcaaaactgcaattaacaagtaaatttttgtattgtccctcatatcatgcagtgtaatattttttgtcaaccatttcttatcttcgtatagacgttgatcatgctattattataagcagtgcaatgaagacagcaaacacaactgcggatggtacaaataatcaaccaactcctaagtggattgaagtcaaggttagtgatgcaattaatgattattttccagtattgatcttcaaatgataacctcaatacaattgttagatcgaattattattgatattgaatgtagagccatgttcaaagcggagggtatgagtgtggctactacgtgatgcattggatgtggaacatcgtcagtgggggtttaaagaatgattggagcatggtatgttcggtttaacaactttaaattactatttcagtagtattttgattgattttacatgttcattaaatacaccctttgtattcttatatttggnanngggtttcttgatggaacggcgttagacaacgaaacattacnacgatttggcagaaatgggcagcata

SEQ ID NO: 69763 - DNA, 387 bp, Glycine max
  Clone ID: PAT_MRT3847_34008C.1
atcttattctcttttacatttttaatttttttctctttaccgggcttactttaactattttactcccccttttccctaaaaaaaaaaaactctttttttcttaaaaaaaacatctacacacttccctatactctatttataaccaccttcacacctttttttctactcaaatcacaacatcaccatattatccccccctccttcatattaataaacccccctccttcaacaacattcttcaaaaaaaaaaaagtctaaccaaaaataaccataccccaaaaaaatatcatacaaaaattcctctaacacccaaacaacatttttttttattttaaaaaccccaactctactctcctactacaatattccccaaaatcaaaataaatc

SEQ ID NO: 69764 - DNA, 287 bp, Glycine max
  Clone ID: PAT_MRT3847_34009C.1
tttcgtccgactacgaatacaagaaggagaggaagctgatgcggaagctgaaagcgagtcttgaagcccattggggagggctcatcacatggatgagtttcgggaattgtatccaagatggcattcgttccccagtaggatccgcactagatgcttacctacacacatctgatcccacacttgcttccgacatttctagcgactacgctagacactaccatggcctctaccttactttccacctcaatttctacggctgggtctgaaactgcgagacccaaattgag

SEQ ID NO: 69765 - DNA, 393 bp, Glycine max
  Clone ID: PAT_MRT3847_3400C.1
gttgacctgtaattttcttggtctactgaacagtttctcaagtttgctcttctgggttctcttattagcttctctctttgcactgctaatacttgtgagttgtgatatcttgattagaggaatgttttccattaagtggagttattcacattaaactcttgggctgttagtgcattgtagcaaatgtccttccgcagtattgttcgtgatgtaagggatgggtttggaagcttatcaaggaggagttttgatgtaaggatttctggtgggggcaagttgaatagtttggtccatgaggcgcatgaacgccagctagttatacagaacagcaggtgggctagccttccgcctgagcttctttgtgatgttattaaaagattggaagaaagtgag

SEQ ID NO: 69766 - DNA, 432 bp, Glycine max
  Clone ID: PAT_MRT3847_34010C.1
aaaacaacccttaagaaaaaaaaaaaaattaaaaccttttttttcctgccaaacaaaacaaaaaaggggggggctaaaccttacaatcccacttttttggtggggtgaaggggggggggggcccccatcccaaatattggtgtgccggaccccccccccccccccaataaactttccttgcataggaaacccattgcatttgaagggccggaccccaccccccaccaaacaagcctttcttttgattaggatatgaaaaaaaaaaaaaaaattaatttagtccccccccccccctgggggctcccaggggaagggccccccccccactggaaacattacctgggctgcccccccaactccatttagattggaggggaagcccatttatttttgggttggggcttcctggaaagacaaggactgggctggccc

SEQ ID NO: 69767 - DNA, 205 bp, Glycine max
  Clone ID: PAT_MRT3847_34011C.1
gcgtaaggaaagcgaattcaaattttcgtctcgtaccatgcttattgaagaacatacgcacccatcaacaggtgcctgtgttgaaacatagcaaaggaagaggggttggactcaatcaaagccaactattttaaggtaccttatcatgaactctatttgactatagctggaaccagacttatcactcaactgtatttcaagagaa

SEQ ID NO: 69768 - DNA, 531 bp, Glycine max
  Clone ID: PAT_MRT3847_34012C.1
cttacatcttcttactgcagttatgaagtgtttctttaagcgaccacctgaaactcaaaaagcattaggagctgcattggctgctgggattgctactgattttcaccaggatgttcatgatagggccttattttattacaggcttctgcaatataatgtatcagtggcagagagtgtggtcaaccctccaaagcaagcagtttcagtatttgctgatactcaaagcagtgaaatcaaagatcgcatatttgatgaatttaacagtttgtctgttgtataccaaaagatgaacttggaaatctatctattagtgcagaatctgcagattctgttgttccagcccagagagtggaagcaaatgacaaggatctgcttctaagtacttcagaaaaagatgaaggaagagatcctggtagcaatggttctgtctataatgcgccttcctataatggttcatctgctcctacaacttcacaaccacttgcagatttggcatttccaagtactggcatatctggtcaagctcctgct

SEQ ID NO: 69769 - DNA, 408 bp, Glycine max
  Clone ID: PAT_MRT3847_34013C.1
aacagataaaatgttcaattaaataataattcttaaaatggcgagtttaacggaaggcaatgacgcctctcatgccacggtcatactattcagaacaaggtttacccgacaccataatgtgtatatatagctgtagacccctcgccctaaatctaaagttactgcgggactggcactttaccaattgaattaattgatcgtcgccatatccttttcggcgacgtacttcacttcgcagaatgaaatgctggatcttccaactgaatctgtagaacggacatatctaaggccagctttcgcttgatgaacgtatcccaatcgaagatactgtaggcattgtgattagcctcatgctggacgaccctagatgactcaaccctgcatgtatttgttcctgccgtgttcctt

SEQ ID NO: 69770 - DNA, 800 bp, Glycine max
  Clone ID: PAT_MRT3847_34014C.1
gacatcgaacatcatttgtgtattaagcaatcaactaataaagggtccagattcacatttcagcaccaacccggcacagaaattaaccactagtcaatcaatgcctatgacctagaacacaatgaacacttgaataaacgtcagaaaatcaacataaaacctctacaaacttacaacccaatgggttttctacaactgaatatttgatggatcatcacgataatttggatactgaacaactacaaaatcttttagccaatgcaatccccctgcatttttctgttatacaccgatctgaattttctttctttttttttttttgggggggggggggggcgggagtgtgtatggagtcgatattctccattcccttatataatcattctaggattgcaaaatttcataactgccgatttgtaagctctgaagacaccataaagattcaaggtaaaccaaatttggacaaggctgattggaataaagtagagaatgcctgggatgaactttggtcatcagcttttattttaatctgtgacttggctgacgatgtgttgattatacactctacaagatacattgatgctgcttctgctttctgagcaaagaaaaagaacttgaagttgggagactgaccaccggattcaatacaatgcattgaatgactttgcatgtgccgcagaagtgcatgaggagttgtcaacgatgcaactccttgaagacttagagaatattcctcagataaggatattggcagttgacgccatttctgctgaaatgtaccaggatccagtacagctttt

SEQ ID NO: 69771 - DNA, 2037 bp, Glycine max
  Clone ID: PAT_MRT3847_34015C.1
gggcatcaagcatcatttgggttttaagcaatcaactgataaaggggccaaattcacatttaagcaccaacccggcacaaaaattaaccaaaagtcaatcaatggcaatgacctaaaacacaatgaacacttgaataaacgtcaaaacatcaacataaaacctttacaaacttgcaacccaaactaggttttctacaactgaatatttgagggatcacgatgatttggatacaaaacaactacaaaattttttacccaatggaacccccctgcattttcctgttatacataaatctgaattttttttttttttcggggaggggggaggtatggagtcaatatcctccattcccttatatattcaatctaggattgcaacatttcataacagctgatttcaaagctttgaaggccccataaagatttaaggtaaaccaaatttggacaaggctgattggaataaagtagagaatgcctgggatgaactttggtcatcagcttttattttaatctgtgacttggctgacgatgtgttgattatacactcaacaagatacattgatgctgcttctgctttctgagcaaagaaaaagaacttgaagttgggagactgaccaccggatgcaatgcattgtattgaatgactttgcatgtggcgaagaagtgcatgaggagttgtcaacgatgtgactccttgaggacttagagaatattcctcagataaggatattggcagttgacgccatttctgctgaaatgcgccaggatccagtacagcttttgggtttaggttcaatggaggaggtgaaggcatggctgcagtctcaactggaaaatctaaaccaagcagatcatcaattgccaagctagaagcaggagcttgaccagatatgccaggtacttggaaatgccaaatctgcaagtggttgtgaagttgtaggagcagatgaaccattataggaaggcgcattatagacagaaccattgctaccaggatctcttccttcatctttttctgaagtacttagaagcagatccttgtcatttgcttccactctctcagctggaacaacagaatctgaagattctgcactaatagatagatttccaagttcatctgcaaactcaaatgtccctcggtgttccttatcagtgaacatataagaaggcttttggtatacaacagacaaactgttaaattcatcaaatatgcgatctttgatttcactgctctgagtatcagcaaatactgaaactgcttgctttggagggttgaccacactctctgccactgatacattatattgcagaagcctgtaataaaataaggccctatcatgaacatcctggtgaaaatcagtagcaatcccagcagccaatgcagctcctaatgctttttgagtttcaggtggtcgcttaaagaaacacttcataactgcagtaagaagatgtaagcgaacctcagcagaatgctcctcatcccagttttcaactaaactctccaagacatatggagcatcatgcatgtcctgagaatattcccccaacatccatataagagctgccttagccttgggttcttggacatttttactactgatatttccaacaacagcaatacaatcctgactccattgtggatattttcttagcagatctttcacaagcaccagagcttcagaagtaacatagtccttttccatctcaagaaactggagaagtcgatcaacaatagcattgacatcatactgctgcaatgctatcttcccaacagctcgaattgattcccttgcaatgggaatgtcaacatttgcagcatattcacataattctgtcactatctcataggtgttactttcatttgcaactgcagtcagcatttcaagcttcaactttttgacatatgatggctcattatactggcaatagaagtgtttgtagtctgaggaaaatatataaggtgcacgcatgaccaaaagatgcaggtggcttaaaactgcatacgattgttctcggacgcgtgggcggacgcgtggg

SEQ ID NO: 69772 - DNA, 381 bp, Glycine max
  Clone ID: PAT_MRT3847_34016C.1
acgagcacacacccattggattcagttcatacggttggcctgaaggttgcgttattgggtgctgagctcagcatgggtggggagaaagcacccctggtgcaagcagatatcacgtgcggtcatgggacgaatagcctgatcaattgcatcggttacctccagaacggaggaacgccgccgtcgggatgctgcaacgcacagaagagcctaaatgccgccgccaagaccaccgtcgaccgccagacggcgcgcaactgcctcaggtaagccgccagccaaatctacgtcttcaaagtcaacaacgccgcctctctccccggctgatgcggagtctacatgccctacacgatcagcacctccaccaactgcgctaccatcaag

SEQ ID NO: 69773 - DNA, 129 bp, Glycine max
  unsure (1)..(129): unsure at all n locations
  Clone ID: PAT_MRT3847_34017C.1
cattactagcacatacacacagttgtnaaagattataaganagtgatgaagaggaagttcatttcggtggttgtnctgggagtatgtttggnngctgggaatatcccaatatgttgatgcaagancact

SEQ ID NO: 69774 - DNA, 1321 bp, Glycine max
  Clone ID: PAT_MRT3847_34018C.1
ccgagcgtccggttgggattgaaagtttttgttataacaaaacctctggttgtagatgggaataggacgaagacggtggctggagtgttgagtcgttttcgttggaaaatgcttaaaaaaggtgcacaaagttttgtgtggtgcacgtgaacttccacctgggcctacacaaccggtggaggcgcgtacttgttccgcgttcgtgacgtattttccctcgaatctcgagctttctcccctcactctcatactcgcacactcccccaccacacttccgtgtccgttcccgttcattcaatctcgtgcacgcatgcctcaaattttaatttctctctccccaccatgacctctcacgcgccgccagaggacgacgacgcacctcctcgccgccggtgattcctccgccgacatgcttcgggagtccaaaaccatccacctccggcgcgccgtcgccgcctcgttcttcttcgccactgtttctctctcttgcttggtcctcctcggagacgttgattcgcaccggttcctatccagcttccattcctcttattctctgtctggctttactcgcatttttccgtccgtgtataacgatcccgtcgcgactagcaatgaatatccacttgaaaagatcctgaatgacgctgccatgaaagacagaactgtaatcttgaccacattaaatgaagcatgggcaactccaaattcagtcatcgatcttttccttgagagctttagaataggagatcgtaccagtacatttttaaatcatttggtaattattgcattggaccaaaaggcatttgcacgctgtcaggttatacatacccattgcttttctcttgttagtgaagaagccgactttcatgaagaagcatattttatgactcctcgctacttgatgatgatgtggaaaaggattgatttcctacgtactgttcttgagatggggtacaattttgtgtttacagatgctgatatcatgtggttcagggacccttttccgcagtttgaccttcatgcagatttccagatagcgtgtgatcatttcacaggtggatttgatgatgtacagaacagacccaacggagggttcaactatgtaaaatccaataataggtcaatagagttttacaaattctggtactcttcacgagaaacctatcctggataccatgatcaagatgtccttaacttcatcaaggttcatcctttcattactgatattggactcaagatgaggtttttggacacaactaattttggtgggctgtgtaaaccaagtagggatgtaaaccaatgttatacgatacatacagac

SEQ ID NO: 69775 - DNA, 597 bp, Glycine max
  Clone ID: PAT_MRT3847_34019C.1
ggctcgagttctgataaacggcctggcccattttcatttttatttgagagtagtagacatgcagcagtgtagttgcggttccaggagctgactccgtcactgcatttatgtaccaagcaaacggatgtaatcacgttggaagttatgcaacatgaaaaattaagtgtgattggtgtgcaacatgggatacatgggtattcactgatatctaagacccccgtgttctgtaaaaaacttggaagcttctactattagacaaagtgaccagtattgtaggaagtttgtagagacgtttaaggaacatgggtaaaggttccgatgttttggggtttgttgttcattgagattgaattatggcgttaaggaatatgatgaaaatttaaacttgttattaaaaaaggggatatattgagaaatttttcagagagagagagagtcaattgatgtgatttttttataaaatttttagtaatgatggctctctggtggaaaaaagcaattctggcatctggttttttgttcttataaaatgacaaacaaatattggtttaacttttaatctcgtttatttttgggtggggttttacccgaaatttc

SEQ ID NO: 69776 - DNA, 590 bp, Glycine max
  Clone ID: PAT_MRT3847_3401C.1
cccacgcgtccgcccacgcgtccgcccacgcgtccgtggtaggcagacattactggcaaatggtgtcaatttttctgggttacagatggcttggcctccgagtattttatggtgagtttaaatggtgctttgactatattatgcatttgtttttgtgctaacatatgttgcaggtgaaaggctggatcagtcatatagggctaaaaatctttactcagaatcatagattttgcttctcctagtttactttctgaaatatgtgcccaaagaaatttgcttgactgtactttaatttcttgacttttatatgattggtttaggataattacttgttctcctccatctccgcagttgggtcacaattagtttatgccatcaaactgcagaaactgacaaagagccaagatgataagcgttaatgaatggggaattcctgcttagagtggtgaaaaagcccatatatttgatgttttcttcgtccccgaaacagtttgtcctgattttgttactaagtcgaacttggaattatacactggtaatgtacttcatttatgtgtgtgaatatatataaatatagattttaatttctt

SEQ ID NO: 69777 - DNA, 431 bp, Glycine max
  Clone ID: PAT_MRT3847_34020C.1
tttttgaagttagtgaagagaacattactttcataccaatttctgcgcattgattcaatggaaacaaacccacacactccactgcattctgtatggcagataaacaccaaacgcggcccaatttctgtagggactataattttctttgccctcgtagaaagtggcaacagatgagtcgaatccctaatttcccaaattctcgggttggacatgcttgaatcactgggcattaccaatacgatcaatcaatgggtgcgatgaccgcgaaccggaagcgctccgaagaatgcatgaacgtaaaccacacaaattgcgattatgcgagaaaacgcgccagaatctcgatcaaactcgttccgtgcgccaccagcgccgaagcgagactctatcggtgcccaaaggctcacgcgccgttggcgagggaggttcac

SEQ ID NO: 69778 - DNA, 366 bp, Glycine max
  unsure (1)..(366): unsure at all n locations
  Clone ID: PAT_MRT3847_34021C.1
ggggaaaggagaatggcaggtctttctttttagtacccaaaattgntcaggggggaaactctgggggaggggggtgaccttcatttcttccaaaatcattcatcccatatggcagcattggattatcatgaaaccctccagatttttgatcaaacacccacatcttattcttacatcaaaatcacctgtgacgatctcattaagattgctgaacaagtctcaaaacaagctaccaccggtccaccttttctatttcgattgccctttctctattttctcttctatcactcccaaacttcattctttttatttgatttaagctgacaccaattcaatttattcataaacgaatgaaatcatttaaac

SEQ ID NO: 69779 - DNA, 304 bp, Glycine max
  Clone ID: PAT_MRT3847_34022C.1
tttcgggggtgagtacaaccatagtgaccactccactcaacgtagccactattcgtggaacgataggaaaagagacagagacagatatagaaatcctgacggtgaaattccctagtgcagaggctggtttacctgagggatgcgaaaatacagagtcaatcccctcccctgacttggtactgactctgtacagagagcaggatccaaccattttaatgatagaaattctggtgtatcatatacaaattctagggacagaacggattgaaaattttattgaataccataccaaggtttggtggcc

SEQ ID NO: 69780 - DNA, 1439 bp, Glycine max
  Clone ID: PAT_MRT3847_34023C.1
catagaaagtgacacatgttcatattaaaaggcaaagcagaaaaacaaacagtacgagaaaatacatatcctccacttctccatcaaatcttcctgttcctttctacaacctactaaaaacaaccatagttcttaatgttcgataccatcataggtcggacatcccttctccatagtttagacggcgtttatgcttgaagaaccattagaccataactacaatcgaagggaatgtaatacaaggtaaaattgccacaaactacaatccaacccaatggtttagccctttttcccctacttctcaatgttttctctagaacgaatgtacataatcaaatgctaattcccagacaagcaaacaatatgaaacaagaaccaaaaaaattatatataatataaaaacataaaaataaaaatcaaggaaaatcggggacaaaagttagcaatagaactgaaatgtgcaaacccgataatatagtttttacatgctaccagctcggcctggagtgggttttggcttcacttttgccatgtcaacaaggtctccaaataacttatcctctggcttggaaggcttcccagatggagcatacgatgtggtagaagcttggtaagggtttctcaaactactatcgtctctaacagacataccatacatttgccgttcaatatatggaactccttgttgctgataatgaactccttgtcgttgatcatagccgtatcccataaattggtttccgtacatctgttgaggatacatcacaggaccaccctgcatttgatgtggagccatgcccatgtagggtcctgcaacaccttgcatatgctgaggttgcaagcccatttgattgctcccaacatggttattcattcctgacatatggctgttagcatttggctgcatatacataccaacaccctggtcattgcccattgtttgaggccccataggatgtccagaattctgcatgtgtggatactgagcgcccgctaatggacttccattatctgctgctggttgagcttcccaaggaggtggtggcaatgatccactttgtgtgccataaacaggtgaaggtggttgttgctgttgctgttgggcaacctgaccattccaggcaggacctgtattttgtgtatacaatgattgctcatactgctgaggtgaacctgcatttggggcatttccattggggtaaaatccaccttgagatgtgactgtttgctgttgttgaaattggggagcatatggactggtttggccagcaacattagctggatggggtggctgggaattgacagatgtaggtgcattatttccattagaaaacatatcaaaaagaacaagggcattctgctgagaaacaggactggcagttggttgttctcctagaggaacaagagcatttctcgagccgattcggctcgagaacaac

SEQ ID NO: 69781 - DNA, 283 bp, Glycine max
  Clone ID: PAT_MRT3847_34024C.1
accggactcggaattccgggtacgactacgcgtacggtgacgattaaagcaatgacagtgacgacatcgtttgatgtctatgacgattgatggcttgcgtactccttctagttcaccgaatgcatacaccacctgatcaactgatatgaccatcttattctatactaatagcaccattctattactgtgtctgtatctctgtctgactctttttatggttatccaactttgcagggatcatacgagcaggactacagatttaaacttactagatgcttacaag

SEQ ID NO: 69782 - DNA, 287 bp, Glycine max
  Clone ID: PAT_MRT3847_34025C.1
ccccaggggttattaaataaaaattctcgaccaatatctggccccaacagaagggggcccctttgctttattctctcaagagtacccagaaaccccccaacctttgaaatttaggggactgctcattcttcatcccataaatcatcaaaaaaaggcttggttggccctttgatgaccccctcttgggggattccacttattttcttgaaaccatccccaggcagggaccaatcaaaaacccccaagttttgcttcaccccccctttggcaaaactcttaacaacaaa

SEQ ID NO: 69783 - DNA, 359 bp, Glycine max
  Clone ID: PAT_MRT3847_34026C.1
ttaatttttgttcctttgtgagagtatggcggtgattattaaatgagacgagaggaatatgtcaaggcttactttaatggctcataaattgaactgctttttagctgcccataattttaccagaacagatggactcgacaaacctagcacaacttttgccaataaaaagctaacaaattgtcgatttattcaaggaagaactctcctaaatgatataaggatttgtgggagagtccaaaggacaaggtgactttttcagctctctgtttaattgcaagatcaagctggcgaaaaatgggggaagtgcctccacacaattatgtgaaccattccgcgaagtgaactattttccatttctc

SEQ ID NO: 69784 - DNA, 442 bp, Glycine max
  Clone ID: PAT_MRT3847_34027C.1
ttttataaaaaaaaaattttttttttttttaaaaaattttaattatattttaaaaattataaatttaatataaatttttaataaaatattgcggtttaggttaattgacaggggggggggggtacaccgggaaaatccaatcaggcaaataggggccacaacaaatccaaaaaagggggttaaaaaaaaccatggggagaaacatggtaaacaacattaatgggaaaaaacagaaaacttaaaaaaagttccaaaaacatgccccccccgttcatagattaaaaccggggggtactaaaagagaggatcacactaaaaacttggggtacctaaatgatgaaaacaaagggggaaattaattaccaaactgaactaaaaaaattacaaaactagggggggggggcctttatataaggacacacagaaagaacactactgagct

SEQ ID NO: 69785 - DNA, 427 bp, Glycine max
  unsure (1)..(427): unsure at all n locations
  Clone ID: PAT_MRT3847_34028C.1
gncattcaccttcattttgtcattccttcttgcaaaaacaaaaaagtcacaattgattatttcaactgatcctcattgaattatggtcagttatattgtaccacttttgtttctgttgccatttgtcttttctttatcttctgtactctattctaaggctttttataggggaaatatcaaagttcatcttatctcatttcgtggacacaactcacccatcatttatatacctgtttggatgtgaagtgtgaactacgattttatgtctccattatggattcttctgaactacgtgttaaaaacgagacttataataatgagttgatgtatcaatcataaaatgtatttagaatagttgtggaaaaaaatatttttttaataacagcttatatgaaattagttttgtgattagatgtattatatgaaa

SEQ ID NO: 69786 - DNA, 224 bp, Glycine max
  Clone ID: PAT_MRT3847_34029C.1
gggacagggacaacacataataaagatgagttttaaaaaaaaaaatagcggtcgcacaagtggatttgatcgcacctattccttcatgcggtgtcagatgtcttcaatgaagtcaccttccttcaaattaatgactgctccatttcagagtcatgactggtatcaccctgatgctactcatcttacacgtcttgcagcacaacgccctttcaacagctggcgta

SEQ ID NO: 69787 - DNA, 535 bp, Glycine max
  Clone ID: PAT_MRT3847_3402C.1
ctccgtcaagaatttccagctgattgctgcgacgcagccacctgcagccggtgctcctacaccgtcatcgcagccagcgcagtctgatcatgacaagattattcttcagtttggcaaggttggcaaggatatatttactatggactatagatatcccctatctgcatttcaggcttttgccatttgcttgactagttttgacacaaaactagcttgtgaatagtgacaatgagaggtgtggtacaaagacaataggattctatctccatttatttattcactgggaggtgaagctgcatggagtcattttacaccagagtataactgtaaaggacagaacaacctgtgctcaatgtaatttttcttatatgcttttccttttcttctctgcagcaaactatctatgtgttgcttccctgcagtgtaatgggcttcttcctatggtaggctctcctgaaccaaaaaacacattagtatattttggtacttcattattttaattcatgaatataaatttctcattaagatttaaaaa

SEQ ID NO: 69788 - DNA, 311 bp, Glycine max
  Clone ID: PAT_MRT3847_34030C.1
accatgcacgcacacgtacgctagctatgggtttcgatataatacactacattgttttatttgcaccttattcaaagactatatttgtgactgagctgtttacacaagaaaggtgggtacttaactttacaccaattaaaaaatttcatggttgacaccctttacctaatttgacatattcaaaataatttgttttttctatttgattgggctaattccaaccacaactattatttcccaaaattttgtacgttattctgattttttaatcacaaaacttacatttattcttttttataaagctttttttt

SEQ ID NO: 69789 - DNA, 474 bp, Glycine max
  Clone ID: PAT_MRT3847_34031C.1
agatctacccaagatcttcgagacgctttgttcagcaccaaatggtgatcttccatgtgcccgatcgctgggggggcatacgacgggtaggtcgaagtaagcttattgacattgtgtgtggtccgcgaagatcttgtttacgaggaggggaatcgattcatcgtcggtgtatcgcttgactgagtatcctgctcaaaacggaacaaatcagtatgtgactacgtagtataggacgagatgacgaacccggcaagtagaacgcgtaggaacatgaggcgaacaatatccatagcaaccatatatgagggcagcttagccatcgcagccccatgtcggcgagaacccaagacggagcaggcgaacagtccagaatccgaagtggtcaagtatagtcaacgtggcggctagtaagggtaaggctaatatctctgcccgcagaagcgtgtgcaaactgattcaaatacgatacgacaa

SEQ ID NO: 69790 - DNA, 204 bp, Glycine max
  Clone ID: PAT_MRT3847_34032C.1
cccgaagttcaaaatgagattatgaagccattctcaccaagggcaaatcacatattacaaacaaggggtaggaaaaaatatttttgcaagaacattaatcgggaattgatcgaccagggaacaactgaaggaagtcagcatctcgaaagtttaccaccccctaaggggtggcatcaaaagcacccatatggggatttcaattgg

SEQ ID NO: 69791 - DNA, 387 bp, Glycine max
  Clone ID: PAT_MRT3847_34033C.1
attatcaacttattgtgttttttttctttttttctaaacccccgccaacagaaggttttgttaaaatttttaaaccagtgaatttttttgctaagctcgcttgggtggctaaacccacaaaaagggatgcgttacaacttctctaaaggacctaaatactcgtagaacatttaagaaataaagggcctggacaaaacacgcaatggtgcacacttcatccaaaattttgggcctagggacaactgggggaacggggtaaacggggcacggggggctgataaataatcaccaacaagaacacgggggaaaccctccatcccacgagaaataatttgtttgccgaacaccttgttttttgtagctttaaacctctagaagcccaaacaa

SEQ ID NO: 69792 - DNA, 2026 bp, Glycine max
  Clone ID: PAT_MRT3847_34034C.1
gtttattgagtccggtagattctggggtggttggttttgttctgttgttggattaaaagaattgttttttttaatgatttttgaaaaaaagaatatttgtgggggtaaccgattagaatgaggagttcaggtatagtttaaggttgcaacatgagcttcagagaggggaagatagaaggagaagatagggaatgtgaagaatcggtgttggggagcactgaatccaaatcagtgagggaaaatgggtctttagcaagcactcagctgacagttgatgagaatctattggttgaccctaaactactctttattgggtccaagattggagaaggagctcatgggaaagtttatgaaggaaggtatggaaataaaattgttgcaatcaaagttctgcatcgtgggagcacttccgaagaaagggcttcccttgaaaatcgttttgctcgagaagttaatatgatgtctcgtgtcccaccatgacaatctggtgaagtttattggagcttgtaaggatcctctcatggtgattgttacagagatgttacccgggttgtccctgcgaaaatatctgaccaccatacgccctaagcaattggacccttatgtggctataaagttcgcccttgatgttgctcgagccatggattggttacatgccaacggaatcatacacagagatctgaaacccgacaatctgctgctcacagaaaaccagagtcgcagtcatggtttatgtgggtgtagtagtttaatagtttttccaggtatggaaataaaattgttgcaatcaaagttctgcatcgtgggagcacttccgaagaaagggcttcccttgaaaatcgttttgctcgagaagttaatatgatgtctcgcgtccaccatgacaatcttgttaagtttattggagcatgtaaggatcctcttatggtaatagttacagagctattaccagggatgtcactgcgtaaatatttaacgagtatccgtcctaaactattagaccttgatgtggctataaactttgcccttgatattgctcgagccatggattggctacatgccaatgggatcatacacagagatctgaaacctgacaatctattgcttacggcggaccagaagtctgttaaacttgcagattttggtcttgcaagagaagaaactgtgactgaaatgatgactgcagaaacaggaacttaccgttggatggcaccagagttgtacagtactgtgacattgcgtcagggagagaaaaagcactacaacaacaaggttgatgtatatagctttggaattgttttatgggagctactaacaaaccgcatgccctttgaagggatgtccaatttacaggctgcttatgctgctgcatttaagcaagagaggcccggcattccagatgatatatcccctgaacttgcttttgtcatacaatcttgctgggttgaagatcctaacttgagaccaagctttagtcagatcatccgcatgctcaacgcgtttctcttcacactctcaccaccgtctcctcctttgccagtaccacctgacaatgaacctgaggtggctacaacaagtaatggcaccattactgagttttctgcccgaaacagaggaaagtttggctttcttcgccaattgttttcttcgaagaggaccaaaaactaacattgagcgctgaattttttttaaaattcccttttgttgtagatgaaaagagttgccattctatggtatacagttttaggacatttatgagttaaccatctcaggtgaccaaaaggatgtaacatgttccataaaagaaaagaatgttgtttatagacttttgaaagattaaggaaagaaaaaaaaggattgtttacattatctagtagatcttgctgtaaaggaacaaattaatttagacattttcctgctttgagaaaggtaattactgagcattgtaaagtagtaaaaaataaccgatgctaaaaaaaaacaatataaccaaatcatttatcaaccataaatttaaattggggtc

SEQ ID NO: 69793 - DNA, 222 bp, Glycine max
  Clone ID: PAT_MRT3847_34035C.1
caccgaagggggtgtcccagtcccattgattagcccttcttttgggaggaggccaaaccttcttttccccgttctttatttaattttaaccaccaacccattttttttaaaaaatggaggggggcttggggccacctgggccatccatcacttccccgcttggccaatgagataaaaaagcttgtgcttctccatggtttgccttaaaagctgaacttgaaa

SEQ ID NO: 69794 - DNA, 148 bp, Glycine max
  Clone ID: PAT_MRT3847_34036C.1
aaaggtaaagaaggcacgcacgcaggcacggacccggacggaccggcgggaccgacccacgcccccatgcgtgcgcccagacggaaacaaaattgcagaaagcgtagctagaagaagaaggccacagtaaaaacaccaacgaaaaaga

SEQ ID NO: 69795 - DNA, 247 bp, Glycine max
  Clone ID: PAT_MRT3847_34037C.1
gcctgactctttacctggactcgctgcagaataagtctccttctagaatagccagtggtcctcactttgatagggaatgtcattgggcatgaaactgccactattagcgatggatatctcgttggtcctgttgttacaatcggtactggctgtgttgttgcatcaggtgtcatgctttcacgctgcacaattatgataggttttctgcgtaacaagcatacttgcatatccaacagtatcatatggt

SEQ ID NO: 69796 - DNA, 301 bp, Glycine max
  unsure (1)..(301): unsure at all n locations
  Clone ID: PAT_MRT3847_34038C.1
cctctttcttcctcttcctcantagtgcgattttcgattctcttctctggcaactatgctaancctaaggtcttcttcganatgnccatcggcggtccaacctgccggccgcatcgtgatggagctctacgccgaccgtgnactccgagcnaccgccgaagantttccgcgacgctctgcacccggcgananagggccgccgggccgaangggaaannnccttccnncaganaagggtggnacttcnancggggagatnccgaanttcatttgccnagggnggggantttccccncnggaa

SEQ ID NO: 69797 - DNA, 585 bp, Glycine max
  unsure (1)..(585): unsure at all n locations
  Clone ID: PAT_MRT3847_34039C.1
atgcgcccacgcgtccggatttcattattgttccctttatggagttactcctgcccgtgtttctaaagttattccctaacatgttgccgtcaacatttcaagataagatgaaagaacaggaagcattgaaaaggagactaaaggcaagaatagagtatgcaaggttccttcaggatacagtcaaagaaatggcaaaagaagttcagaactcccgcagtggagaactaaagaaaacagccgaagatcttgatgaatttttaaacacaattagaagaggtgcaactgtctctaatgaggaaattttgggctttgctaagttgtttaacgatgaacttactctagataatataagcaggccacgattagtcaatatgtgcaagtacatgggaatcagcccttttggcactgatgcatacttgcgttatatgctaagaaaacatttacggaggattaaggaagatgataaattgattcaagcagaaggtgtggattctctttcagaagatgaacttcaggaagattgcagagagcgaggcatgcttggaatgctttctgttgaangaannatgcgccaacagcctttcg

SEQ ID NO: 69798 - DNA, 350 bp, Glycine max
  Clone ID: PAT_MRT3847_3403C.1
cttgaaacttttttttgttttcttaaaatccaaacggaaatgcttgcaagtccatctcaaatatgtatgaataacgggccccgttaaaaagagaaaaaggcccctaaaagccaataagaacagggcgtccctttagaaaattccagggggaggattccccgcaggggagatagctgctccagtgtgggcacatggcacaatctgcccatgaggggagtcttccaaagtaagggcaagggtggccccattgattgctccagcaacggccctgcttttgcaggcatgagctccccgagctttctttagcccatttgtgggacctgattccaatcccccagccactcccccct

SEQ ID NO: 69799 - DNA, 346 bp, Glycine max
  Clone ID: PAT_MRT3847_34040C.1
accactcatccgaaaacacaatggtaatgtgtgtatctttgaacgggacagcgatctctaaagctggcgttcactatgacgggggtattgaaggcttcatccaaggctatcaacaagtcttttaccaccgctctactgaccacatattaacccctgaatcccctgcaataacacctaccctagaacctgcttaatgagaaacatcttacagagccgcttacaagatcgcttcgaaagcagattcagaaacctcgttagtgtacttggaactatgggacaagcaatactacacgaaggattaccctgacctttatactgaccctaccgctacatcttcagccatgtt

SEQ ID NO: 69800 - DNA, 172 bp, Glycine max
  Clone ID: PAT_MRT3847_34041C.1
tcccaaaatcaaattataaataactccactagggtcactccttaaattctcaacagccgctcccaccttctctccctctctattagcagcataagagtcttcctcccaacacatctctggtcaccaagaggtaccaagtttcattagtcatcctatcaccgtcgttcagcct

SEQ ID NO: 69801 - DNA, 274 bp, Glycine max
  Clone ID: PAT_MRT3847_34042C.1
cacgaggaactcttcttccatttcatccgcgtccagtgatgcagtcaatgacgaacagaataagactcttctagaccaagcacaagaagatgatgatgaacaacaaggaccacacacgactccgaaacacttgaagcctaagaacaccaatcagaagagacacagagaaccacgattctcattcatgactgaaagcgaggtcgatcctccggaacatggatacacatgtagaaagtaccgcccaaaggccgtgaaaaaacctccccttccccag

SEQ ID NO: 69802 - DNA, 429 bp, Glycine max
  Clone ID: PAT_MRT3847_34043C.1
tcggttcaattttaaatccaaacaaattccaaggcgggtttttttttcttttattttccattccggctgagaaggaagaaaaaagtgtttcctttccgccattgaaggaaccgaccaacctgaaccgggccttgattgattcttggcctgggccaatttttggtggaatttaacggccagttacctcccccttcgatgttataaaaattcaattcagggttagcttagagcccacatcttcatgggcttattacggaacgatttggctgcagcatcaaatacactggttgtttcaagcaccaaagacattctagagaagaagcgtcaggggtttggcggcaaatggccgcatgctatgttatccatatcagcttacatttaagtttacacagtgagaacttgccttgttttcaatcaagatacattatt

SEQ ID NO: 69803 - DNA, 318 bp, Glycine max
  Clone ID: PAT_MRT3847_34044C.1
ggtcgagcgttagaacaattctgattcaagtttcacctttcttcgcaaaaagaaaaactcatggccaacggggaacctctgctattatcctcctccaactaccgatccgccaactttacataacggaactccatgcgggcccactggaacgacctgctggagacacgacggcccaccagacccctgtaacaggtgctgcgagtctaacaagactcatctccgaccgcatatcaaaggggctgacccgaacctatctaggctgttacatgccggcccgacaacgctccctctgacacaaacagcctgactcgtgaggga

SEQ ID NO: 69804 - DNA, 351 bp, Glycine max
  Clone ID: PAT_MRT3847_34045C.1
tttttatggttaaatcggacgaacctaaatgattatcacttgtttttaaacttacgttgggtgcgaaaggagtttcacatttgcaccctagtcttcgtcatacatcagtcgttcatcgatgcatagcaggtaatgaaagcaaccatcttaaccaaccatattctcactacttgcttcttgttcatgaatttctcgaagagcgttcatatattgcttcgtaaaattcgttgcttttttaatgtgattttccgtggagcagttttggagtggagtagaaagagtggtgtcttcaatgttgaagtcacaacacaacaaacaaatgagattttgcaaactttggttttggatgat

SEQ ID NO: 69805 - DNA, 119 bp, Glycine max
  Clone ID: PAT_MRT3847_34046C.1
cccggctgtgagaagacgactgagggggacaagaccagagctcatatgctaattctatgagctaccaaaactctcagcacaagaactttaaagtactaggcatgcctcaactatctggc

SEQ ID NO: 69806 - DNA, 476 bp, Glycine max
  Clone ID: PAT_MRT3847_34047C.1
ccacgcgtccggcacataagaaggataaagcagacagtgacagtatggagttaactgaaatccaaacctccaaagaaaacaaaaggtctgaagatgataatagaaaacaaagaaagaagcgtcaaagtcctgtgtatgaaatggataaagagaagactaagaagtcaagacgtcatgcatctggtcatgaatcagatgaaggacgacacgaaagacacaagagagaccaccgcagagaaggagatcttgaagatggggaatttggtgatgatcatgtggatagatggtagccatgttattctatttgaactcctattattaccttttgtttagctcaacatgtattatttttcaaaagaaaatattaaaatataaaacttttaagagaactcccttgtattccaaggttttgcactgaagaatttgctactagaatgaaaggttaagttctcacatccggcccctagtttctttcc

SEQ ID NO: 69807 - DNA, 591 bp, Glycine max
  Clone ID: PAT_MRT3847_34048C.1
cttggtttttgtggtgtttttttttttttttttttttgggtttttttttttttttttttttttttttttttttttttttttttttttttttttttttttttttttttttttggcaaaaaaaagaccccttgtttcccaaaaacccctgggggaggggggggccgcagggatccattgttaaaaaattttttttggggcccggcggcccccaaattaaacacctttttgtttaaggcatgggtgggcaaaaaaagaaaaaacccccctttcaaaaaattaatttattaaaaagcaaccctttggggcccaaccagggaaaaaaattggccttttttacccaaaaaccaaaaaggggggccttgttttgcaacccccccctcaaaaaaaagggcaatttgatttgctttttggactgggcttaaacggggggcttttacaaaaggggccccccccttcctcagaggggtgaaaacatcctggacaaattgtttcctggcaggataaagggcccgggtggcctcttcaagtttaagggtgggacccttttttaggaaagcccgggaaaaaacaattttttgttttttgcccccc

SEQ ID NO: 69808 - DNA, 224 bp, Glycine max
  Clone ID: PAT_MRT3847_34049C.1
cttttcttgtcaatatgggcagttagtctaaaaaaaaaaaaaaaattaaatgaaaaaaaggtcagtaaattgggacaaaagaaacaagaaaaagcaaaaaataatgggggcggcccccgctaatgggcgcgccctccccggctttggtttcggcgcggtccctgctgcggttcccctctctccccgcggggtctcttctatgcgcctcggtccgcgaagtgctc

SEQ ID NO: 69809 - DNA, 971 bp, Glycine max
  Clone ID: PAT_MRT3847_3404C.1
ctcgagccgctcgagccgattcggctcgagcacagacacggaaagggaaagagaaaacacagagagaaacaaaacattacttctttgaacttgatgtgtattgtagcaaatgtccttccgcagtattgttcgtgatgttagggacggatttggaagcttatcaaggcggagttttgatgtaaggctttctggtgggggcaagtcgaatagtttggtccatgaggagcacgaatgcctgccagttgtacagaacagccggtgggctagccttccgcctgagcttcttcgtgatgttattaaaagattggaagaaagtgagactacatggcctgctcgtaagcacgtggttgcgtgtgctgctgtgtgcaggtcctggagaggaatgtgcaaagaaattgttaccagtcctgagttctgtgggaagattactttccctgtctccctgaagcagcctggttcaagggatggaaccatccagtgtttcatcaagagagacaaatctaatctgacgtaccacctattcctttgtcttagtcctgcattgctagttgaaaatggaaagtttcttctttctgcaaaacggaccagaagaacaacatgcacagagtatattatatcaatggatgcggataacatatcaagatctaatagcacttacattggaaaactgaggtcaaattttctcggcaccaagtttataatttatgatacacaacctccctaccacaatgctatgctgtctccacctgcccgcagccgtaggttttcaaaaaaggtttctacaaaggtccctagtggcagctacaatattgcccatgtcacctatgagttgaatgtccttggtactagggggccacgaaggatgaattgcacaatgtactcaattcctgcatcatccatggagcctaatggcattgtcccgggccagccagagcttcttccccgtgcccttgaggattctttcggagata

SEQ ID NO: 69810 - DNA, 430 bp, Glycine max
  Clone ID: PAT_MRT3847_34050C.1
cttcgttctttttttttttttttgttctcaaatacatgttgacatattgggtgaaaccacagtacaacgcttggtatgctaacacaagactttacatgtacttaagggtacacgtgtagatagattgaataagacgtgaaattttattctgatgaactatagcagaaatgtgctattacgtcatagaaatctatttatttataaaaatacattagtggtggaaatttaattgttatgacatctagatggtgattctgtcgtaatacaaagaaatggtccacgaattggcaaagaatgggaccaggtggatccgtacataccttggttgtggatcgacatgcttgatgtgtgggaatcgatgcttatacagaccatttgggagtactgcctgccactttgatccagagaatggcattgttaggaatgggat

SEQ ID NO: 69811 - DNA, 279 bp, Glycine max
  unsure (1)..(279): unsure at all n locations
  Clone ID: PAT_MRT3847_34051C.1
ccagagntttagatgantacaacaagcgaacagnngaacgcgagaaaagagttccaacatgggccggcccccaaagacccaaggatgagaaactacctcgtcgcaaaatcaccgacaaacctaagacgcgcggctgcactattcaccctatggagtgcaatcaagaggcccgacaaaagtgaacaaacccagcgaggctcataatgaagaaaagggacaagctaagctgacaagttggaatcaacccacactccatggaatggactggactggccaaca

SEQ ID NO: 69812 - DNA, 417 bp, Glycine max
  Clone ID: PAT_MRT3847_34052C.1
ggctcgagaacgaccccacgccccatccccaggacatataaagtgctgacccgacgtatccgaattaccgtggggttcttttctctatagcggaccacagcacacatgtatcctataccaacatgagtgataacgtagccagcactatctgaatctgatatcacaagcttggctccatcttcaccttcaaggtaccaaaacgccgtgcgtactatgtgcgcagaccttcaagggatactcatgatgggaacggggatgcatcgatgctggcgattcctctgtgaatcaggcctatggagtcgacctgacattcttagcttgagggacactcgaggaactcttgtgcgagccgcttttcgaggattatccggacatcttctggatggaaagggagtacgacaaggaatgataaggggt

SEQ ID NO: 69813 - DNA, 335 bp, Glycine max
  Clone ID: PAT_MRT3847_34053C.1
tgcatgcacgcctactatagatgatcattttggtgaatctcaattctacattttcaagaaataccgaagcacagaggttcataggtgaattggaattattagatatattattaagcctatcctgaagccaatggatatgatatcggaatttctaggggaatttcaattccacattattaagaaataaggaggcaataatgttcatatatgaatagcaattatttgtgtacttattaagcctatcctgaaaccaatggaaatgagatcggaatatctatatgaattgcaatatcacattttcatgaaatactgaagcaaaaatgtgcatatatgaa

SEQ ID NO: 69814 - DNA, 346 bp, Glycine max
  Clone ID: PAT_MRT3847_34054C.1
ggatagagagaggtgaaaagaaacgtcgcataaaaaatcagataatgcgtgcggctctgactcaacccacctgggacctggctcggaagcgctaagaaagttacaaagctatcttctactttcttctctgtggtgtgtgtggtgatggtggttgtggcgccggacgggaataaaatttgctgtttgaaccgcccagagcagagacttatttgtatggtaccccctattctatttaatggactgtgttctggagcgcatcaagggagagtgagctcatacctagcactgaataggcctggcacgtgcatgctgtatctgatgcacatcgtggggcatagttacagag

SEQ ID NO: 69815 - DNA, 141 bp, Glycine max
  Clone ID: PAT_MRT3847_34055C.1
gtactttcaaaagatagtcaaagagtgcttttaatagtctttagagaagccgttttattctagttatttggatattctctatacttttgaactcctcttataattcacccaattattcataccataattttgacaaaacat

SEQ ID NO: 69816 - DNA, 315 bp, Glycine max
  Clone ID: PAT_MRT3847_34056C.1
ttcgtccgccgttagtatcaccccctaacttgacgggaggagggggggcctacttaggacccgggcgggaaggccttgcccgaggatacttatccccccgtttataggacagaaaaactctgaacctgttcggcaaccctaagatgcgatgcccagtaaaagaatccctagggtatctggatcccatgcagacctaaacaacagggtgcaaaacaaacctcaatgcctgagcttgctgaaaaaggaccagcttctaacaaccttccaacccctataaggacgaacagactaacataatgtaccccctccactaag

SEQ ID NO: 69817 - DNA, 859 bp, Glycine max
  Clone ID: PAT_MRT3847_34057C.1
cactaacctatagtctctgattattgatctcgctctgcacaagcttccccatattacattaggggactttatttaccactgcccccctttttcctagtttcgtagtatattctttgaaatttgccttagctaatgtctattttattacatgtcacatttatttgctgtcaatttcggttccaattccatggtgtctgattgatgacctatctcacccctatgatatatgtcgtgtactttatgcatattatcatttttttaattgttgtgcccgcacgagaaacgagctaataatggcagcgggaagaacttccttttattaggaatttattaagtgccgtggatataattgatgcccaattttatacttgtatgattctgcaactttattttttttgcttaataatttttcagatgtgcagatgaacatgtacctgagttagtgaattctgatccttagtcaatcttacataatctaaatttggttagggtttatcatcgttaattcgatttttaattgggtcttttgtcattgagggtttctgggtcacagtgagtggatgttaaggtttagatttcaacctggctgggtctgtgttgttttctaaaaggtttaaggttgaagctttttcgtgctgcttttgatgaaattattgctgttgtggattttacgtctcgtgggaacttggatcatttgattcctaaataaggagtggttttggggttagggttgggtttttttttaatgcagttgcccattgttagttgacagaaaatcaccaattttaatgtttctcactggtttaatttgttttagactcaacttttgcactaaaaaaatgatgttgcattttagact

SEQ ID NO: 69818 - DNA, 487 bp, Glycine max
  Clone ID: PAT_MRT3847_34058C.1
acctcccagctgtttggaaaagtggaaaacaaaatacgaagaatataggaaggatatgactgatgccttgaacttgaaggacaaatctaaatcccacgaagaggcagctgaagtcaatagaaaatataaggaggaattctatggtccaactcttgagatggagggttgtctgaagagtattggtgatatttttaacgaggctctggctgtgtataacgttagttatgaatacgccatgctaaagaaagaatcaaaagatgtggctttgcatggaaagattgcaggttcagctttgactaggctttatatcataaaacaaaatgagaaggctctgaattatgatccatctgtagtgcgttgagatttttccgtttatgaaacatgtttattaacttgttttttgttttttttaaggaatgctattaactgttgtttaatattatacctactctttattttcacccaaaaaaaaaaaaaaaaaaaaaaa

SEQ ID NO: 69819 - DNA, 274 bp, Glycine max
  Clone ID: PAT_MRT3847_34059C.1
tgttggttggttgagaacaatggcatgaggtttggtgtgtaggggcgtttgttggatgcagtgtcgtcgtccgtttttcgtgagaagctcggctttcgttgcagcgttggttcgttgcagatttcgtccgcggttttcgagagtcgtcggtttgtcacagaaggggccaaagtttgagatgtgtgagtttagtgtgatggttttgatggtgtcgtgtcttgtgcgtgatttgggtggtttatgatggtgtttgggtgttgaggggggggggggg

SEQ ID NO: 69820 - DNA, 932 bp, Glycine max
  Clone ID: PAT_MRT3847_3405C.1
catcatcgcccaccattatattaaaccctccttttgtattcaagtacggttgttgctataaaacacaactcctcctccaccctgttccttgttcaaacaattcccaaacattaaaagctacacttaatcttgccaaaaaggcctataaaggtatatatataccttcttttttttctgatcaggattcaaaccctagatcagttttaattagtttcctagttttattcatagtgtgcaagaatgggaaacagcttaaggtgttgtttggcttgtgttcttccatgtggagctctagacttgattcgaatagtccatttgaatggctatgtggaagagattacacgtccaatcacagcaggagaggttctcaaagcaaaccctaaccatgttctaagcaaacctagctctcaaggcgtcgttcgccggattttgatcctttcaccggagaccgagctcaagaggggcagcatctacttcttgatcccggaatcttcgctgccggagaagaaacggctagccggaaagggaagaaatgttggtggtgataatgatataaaaaagaaaccatcaacattgaaagggaacaagggtagtagtgatgatgattattcttcactatcacaagggtgcctcaataaagccactcacaaaggttctaaagagaagaaatcgtcgtgccgggatcgccggaaaggccgcatcggaatatggaggcctcatttggagagtatattggaagattagtcggttttttgtgtcgctggccggtggccggaatccaacatggctggaaaaaagaagaggagaaaaagaagaagaaatatgttaaattattgaaatatagcaacaggacttttttttttgttcccttttgttttataaatgtatgtgggaatttgattttgtggataaaaaagtttaccttactttcc

SEQ ID NO: 69821 - DNA, 263 bp, Glycine max
  Clone ID: PAT_MRT3847_34060C.1
cttatccggaaaacataaacttcaattattcaccttttttcttcatcgttcgttcatgatctttctcttcagcctcgttttgattatgccgtagtgtttctcctttctataatcttcacactttttctccctcttcttccctccccattcatgcttcccttttaatactgttcaatttcctactctatgctgtccaatttggttatgtgctagctagtttcctcactgaattaatcacgctgcaataaagttaccaatctaca

SEQ ID NO: 69822 - DNA, 308 bp, Glycine max
  Clone ID: PAT_MRT3847_34061C.1
cccacgcgtccgcttacaacagtttgcaaactacagagggaagggtattgaggagaggaaactacgggtagtcctcatgaacccaccatcttctacggtgttgcttgcactaaacggtgatctgaaccatgatccatccaaccaaattcatgtgcaaaaagatatgttgcccagaggagtctaaaacatacctactcattgtaaagattccgcggaggtttaaggtttggagccagcctaagatattactgaggatacagcatatgaagatattgtcccaagacaagctgagaatgtatgctacatga

SEQ ID NO: 69823 - DNA, 434 bp, Glycine max
  Clone ID: PAT_MRT3847_34062C.1
ggagttgggtagctgtcactgtcaacgctgattaagcactcaaggccaagataaaatacacaaataaaaaacaattctcactttacaagttgatgctgtaatgttaacttatacaatgggtagagataaagtgaagataaagtatatacatggggggcatcacctcgaatcagctgctagcagcattcttctgagctgatctattttgtttccaggattaaatagcggaaaatgctttataggaaaaaacctgtttattccattgcaaaatttgaccattgacagcatcccagaatcagaaataacaaccaagagattgtaaatagtttagtccattaatggctgcaccttgtctgctgaagcatattatttttggcttcttttattggtatcaatcagcttctcatcataaacccagttggtgacacgtgaac

SEQ ID NO: 69824 - DNA, 714 bp, Glycine max
  Clone ID: PAT_MRT3847_34063C.1
tgcatgcctgcagaaagaaaacagaagagtaacaatcaaatttggcattctatgaatctatgtaaaacccgttgagtcttcatctaacagctaaaacttttattaaaattggactttgatattgagttgggtagctgtcactgtcaacgctgattaagcactcaaggccaagataaaatacacaaataaaaaacaattctcactttacaagttgatgctgtaatgttaacttatacaatgggtagagataaagtgaagataaagtatatacatggagggcatcacctcgaatcagctgctagcagcattcttctgagctgatctattttgtttccaggattagatagcggaaaatgctttataggaaaaaacctaaagaaaactaagaaagtcattataatgatacattaatggactaaactaaaaaatgcaccctggataaggagaaagagaaaggacaaagtgaaagtgaacctgtttattccattgcaaaatttgaccattgacagcatcccagaatcagaaataacaaccaagagattgtaaatagtttagtccattaatgtctgcaccttgtctgctgatgcatattatttctgtcaaaaagaaatctctgtaatttattataggtatggtaaactcataccacatttgtgcagacacatgtaagttacggacaacacacactgaagtacatgacaacgagaaaaatac

SEQ ID NO: 69825 - DNA, 664 bp, Glycine max
  Clone ID: PAT_MRT3847_34064C.1
gcttgtggtaaagttcgtgtcctacaaaagatgcccaaaggaagagatgtggaggacgatgacttatttgtttttaatgatgggtttacagctcctctttaccgtataaaggtgaatgcaattcaattgaaggagacagtcgaggagaacacaagcaccaccgaaagagttttccatgaccgtcagtatcagattgatgctgctcttgtgaggataatgaagactagaaaagtgcttagtcacacccttcttattactgaactcttccaacagctgaaattcccaataaaaccagctgatttgaaaaaaaggattgaaagcctcattgacagggagtatctagagagggacaagagcaatcctcaaatatacaattacctcgcataacattttctgctttattttacatttaaattttcttttgtaaatgacatgggagagggtttgatgtttaatcccttgtcatatgtacagtaagcatgaatgattccttttttgatattttccaccctttcattgacgggaactgtactgtaattataaaacatgtttattctcttttaagttttactattttcttccaattagaagttactgacccaaacccatacacaaacatttggataaaatttaatgataaatattagaagttattagtcaaaaa

SEQ ID NO: 69826 - DNA, 3102 bp, Glycine max
  Clone ID: PAT_MRT3847_34065C.1
ttgaactagcctacaggcttcgggtctctggcatgggtgagtgtttgttcctttcctttcctctttagtttggttcgggtgacaaaacaaaacacaatggtgtgttgatcactctgtcttctctttctctctttccatttgatgtctctccccaccaaacggtcgagcaccgctggttcctccctgtcgccgccacctcctatgaaaaaggccaagtccctcctcctccgctcctcctccgacgaccacgacgccgttttggacccttcctccatgcctctcgacgacgatctccccaatgcccgcgccgccaatctcgcccgcaagaaagccaccccgccccaacccgccaagaagctcctcatcaagctccacaaagctaaaccaacattgcccacaaatttcgagaaggatacatgggcaaaactaaacttcacgaattgaattttattcatgaaatttccaaagtgttctgtctaagcaaatgctgtgtgaggcgtttgatgtggtaaaattctttaggatactgtgtaataatgacagagtttcctaaagggaaaaaggagttcgcagtctccctattccagagtgttgttcttatgttattcaatgatgctgagaaactaagctttcaagatatcaaggactctactggtatagagggcaaggaattgagaaggactctgcaatcacttgcatgtggaaaagttcgtatcctacaaaagttgccaaaggatagagatgtggaggatgatgactcatttgttcttaatgaagggtttacagctcctctttatcgtataaaggtgaatgcaattcagttgaaggagacagtggaggagaacacaagcaccacagaaagagttttccaagaccgtcagtatcaggttgatgctgctattgtgaggataatgaagactatgaaagtgcttagtcacacgcttcttattactgaactcttccaacagctcaaatttccaataaaaccagctgacttgaagaaaaggatcgaaagcctgattgacaaggagtatctggagaaagtgaagaacaatctgatcttattggatgcaagggcatagtttcttttcttaacaacagtggaaaaacaactatcttgaacgctatatcatttatgttcttgataagggctttgcaatgcttatggatgggaatcgtattgaagacctacagagaatgtgctcacccttaattgtgatcaatgctctcgagtcattgaggcaggccattagttcatatatcaggagaactggtcagggcattgttatggacgaggagaaagataaggatatggtttcatcccttttggaatttaaggcttctcttgacacaacatgggaagaaagcttttccaagaatgaagcattctgtaacaccatcaaagattcgtttgagcatcttatcaatcttcgtcagaaccgacctgctgaattgattgccaagtttttggatgagaaacttcgtgcaggtaacaagggcacttcagaagaagagttggagggtacacttgataaagtccttgttttattcaggttcattcagggcaaggatgtgtttgaggcattttataagaaagatcttgcaaaaagactgttgttgggaaagagtgcttctattgatgcagagaaatctatgatctccaagttgaagaccgagtgtggcagccagttcacaaacaaactagaagggatgtttaaggacattgaattatcaaaagaaataaacgagtccttcaaacagtcatcccaggctaggacaaaactcccatccgggattgaaatgagtgttcatgttttgacaactgggtactggccgacgtatccacccatggatgttagacttcctcatgaattgaatgtttaccaggatattttcaaagagttctatctaagtaaatatagtggaaggcgtctgatgtggcaaaattcattaggtcactgtgtcttaaaggcagagtttcctaaagggaaaaaggagttggctgtctccctatttcagactgttgttctgatgttattcaatgatgctgagaaactaagctttcaagatatcaaggactctactggtatagaggacaaggaactgagaaggactctgcaatcacttgcatgtggaaaagttcgtgtcctacaaaagttgccaaagggtagagatgtggaggatgatgactcatttgtttttaatgaagggtttacagctcctctttatcgtataaaggtgaatgcaattcagttgaaggagacagtagaggagaacacaagcaccactgaaagagttttccaagaccgtcaatatcaggttgatgctgctattgtgaggataatgaagactaggaaagtgcttagtcacacgcttcttattactgaactcttccaacagctcaaatttccaataaaaccagctgacttgaagaaaaggatcgaaagcctgattgatagggagtatctggagagagacaagaacaaccctcaaatatacaattaccttgcataatttattttaccttaaaagtttattttcttaaatgacatgggtaaagctagatgtttactcctttgtcatatatgtacagtaacaacagattctccccactcccctttatttttttcttttcctttcatttatggaccgttgtactgtaattgtaaagcatattatcctcccccttgaatttcttttcatttagttgagaattcaaaattgttcccaaaaatgatcgagaaattaaaaaggaattggtgattaacaaggtaggtttcttctcaaggactcaggtcatagtttttccccgttgcctaatttttaatgttcctctacacgtaaaatacttagagaacaccggttagtttattctttgctccagaagtataagaaattgttttatatgttcatgtttttctatgtgaattgataaaaaataaattaaaaagttaatactgagaatatttttcaaaactataccagatattttcttctctaaatttcagtggaggattcctatccctctctgaagagtattttgaagttatatttttttttctcattggcacgacatttcatgtattggctaattttattttt

SEQ ID NO: 69827 - DNA, 1018 bp, Glycine max
  Clone ID: PAT_MRT3847_34066C.1
tggaaggccgggcgcgcgtgttgccccggcgaccccatgcctgcgtccatatatgcactcgcatcttttctttctaactttacttcactcactctatgcatcactcttttgaaaggcttgcgagagagggaatcaaatatctttgattgtgtttttgcatggctgacaatttggacgacggcgagttttggctccctcctcagtttctcaccgacgacgacgacgacacgtcgttcaacaatgccaaaaacgacgccgtttcgaagtctctgtttttcagctcctccagcgagaccgagagcgacgaggaggaccaccacctcgccgagttgactcgccgcgtcgctctcgaactcgatctcaacaacaacaacaactctgcaaaacccaagggcgtgtttgggggtggttctccgcagtcaatcctgagcgcgttcgggagcagcgggaaagggtcgagcccaaacggcgccgttccccacgtgaactcctcgtccacgtgggatctgctgcgggcagccgcaggggaagtcgagaggatgcgcgacggttacagctttctgacgccgtctcccgttgctgctgctgctcaacccaacgctgttaacggcgtcgtgttgggattttactatcagcagccgcagctgcaccagcaacaaccgtcgcattctcagcagcagttacagattgcgcaatttgagatgatgaggaagcagcagcaacagaggcaaatggtccctcccaacagaggaaggaacaacaacagcagcaacaacgttgttagggtagggaacgttgttaatgggataggtttgtctgcttctgcatggcctcctaatgggtctggcatgagggccgtttttctttctggcaagagagaaagaagcaccggaaccggcgtgttcttgcctcgctgtgttgacactcgcaataataatgaatctcgcaagaagccagtgtgcaatactgtgttggtgtctgatagagtggcgcaggcgttgaatctggagggtgtggt

SEQ ID NO: 69828 - DNA, 258 bp, Glycine max
  Clone ID: PAT_MRT3847_34067C.1
tgcaggtcgctctagagatctttttgttcgacccacgtttcttttcacgctatcacacacctgaaggggggcgctttctttaacgttcttaccgtctcaatccctcgagaggatagaccgatcaagatggggcatgatgatattttgtgaggcgacaggggctcctcatatgtaacctagagcccatttgagagcctgacgacttcacgacgtgcacatgggcgcgtttagacatataaggctccctaatcacccatc

SEQ ID NO: 69829 - DNA, 262 bp, Glycine max
  Clone ID: PAT_MRT3847_34068C.1
ctcgagccgcaaagattgagccatgcatgtgtaagtatgaactaattcagactgtgaaactccgaatggctccataaatcagttgtagtttgtttgatggtatctagtagtcggataaccgtagtaattctcgagctagtacgtgcaacaaaccccgacttctggaagggatgcatttattagataacaggtcaacacaggctctgcctgttgctttgatgattcatgataagtcgtcggatcgcacggccattgtgccggc

SEQ ID NO: 69830 - DNA, 787 bp, Glycine max
  Clone ID: PAT_MRT3847_34069C.1
gtgcacaccagcaacaccacactccaagtctcggccacgatcccgaatttagctctccccacctagtcatccttcttcctcaacaccgcaaatatggatcaagcaaagttggcgcgcatgcaagcgtcagtgcgcattggcggcaagggtactccccgcaggaaggtcaagaaggtccacagggccgctggtaccgacgacaagaagctccagaccgcgttgaagaagctcaacgtccagcccatccaggccattgaggaggtcaacatgttcaagagcgacggaaacgtcatccacttctcggcacctaaggtccacgcctcagtacctgccaacaccttcgccatctacggacacggtgaggacaaggagctaacagagctcgtccccggcatcctcaaccagctcggcccagattcgctcgcatcgctacgcaaacttgccgagtcctaccagagcatgcagaaggagaagggtgaggacggcgagaagaaggacgacgacgacgaggacgatgatgacatccccgaacttgtcgctggtgagaacttcgagtccaaggctgaggtcgagtaagaagttacacaaaaagtagcttgacaacgactggaaagagccagggaggagtcatgtgcaatgacagcctaccgcatgtatattgatatggaggacttcatggatgcaacgaccgtgacggtcagcagtcgcggtgggtcttgcattcagataccggactggcgttatgtctcggaacagatatgaatgaaaatcttctagcacgctcccc

SEQ ID NO: 69831 - DNA, 211 bp, Glycine max
  Clone ID: PAT_MRT3847_3406C.1
acgagatttcttctatcaaaacatcaatgggattgtttaaaaaaataagagtaaaaatttcttataaatgtaatgttactcttatttaaatgaaaaaaaaaaactaatgcatttaacatgtttcaattggaacaaaatatatgtaactcatttgttagttgtaagaggatttgtaagaacgaaatacaggtgaatttagaattacttttga

SEQ ID NO: 69832 - DNA, 1234 bp, Glycine max
  Clone ID: PAT_MRT3847_34070C.1
aattcggctcgagcacacatgtatatatatatatatatatatatatatatttaactacttcaattcacttcatcatagttacgtatatgagcatctctatttctctcaattaccttaactagcattgtttcaattcacatataaaatcgtttcgtgctcaacctttgtttgtgtgagatatagagatggaagggttggattctaataattctacccacaacagcatagccaagggcaaacgcactaagaggatgaggcttttgtccccttgcggtgtcatcgttgctgccatcaccaccaccaccaccgtcacctcgagcacttcgagtgctaattcgggtgcctcgtccaccacaacctacgagagcgaagaggaggacatggcgaattgtttgattctcttggcccaaggaggggaatctcgtcatcatcctcgtcacgacaagcaacaagttgaagatcatggtcttgagaattgtgatgatggtgccatcaagacagaagaaaagggtaacagcagcaacgttaacactaccaccgccgcaacaacaactgctgctaataataataccaaagttggtttctatatttatgagtgcaaaacgtgtaaccgaaccttcccttcgtttcaagcactgggtggacatagggcgagtcacaagaagcccaaactcgcggctgaagagaaaaaacaaccactgccaccgtcaccgctaccaccgccaacaccgtctcaattgcaacacatgattgttaccaattatgatcggtttgaggagggtagcgttaaaagtggtcctccaatttcccttcaattgggtaataatggaaacaacaacaagggtaagattcacgagtgttccatttgtggctctgaattcacatcaggacaagcattgggtggacacatgaggaggcatagggcatccacaaacgccaacaatgttgttgacacaacaagttgtaacactgtcatcaccaccaccattaccgcggttccaccgaggaatattttgcaattggatcttaacctcccggcaccggaggatgatctccgagaggctaaattccaatttacagcaacaagtcaggtgctggttggtactccggctttggtggattgtcattattaagccagggtgggaattggaattaatttcaaagaattattattattattttgatatctcatcaatgtgaattattagcgttattttttaattttaattatttg

SEQ ID NO: 69833 - DNA, 535 bp, Glycine max
  Clone ID: PAT_MRT3847_34071C.1
ggaggactatatcaataccacatacctttgttatcctatggtgggcacacccaacgaaatataagatttgacctctaaattttgattacatttaaattaaattcaaaatgagatcttatagtttctaaacaattgttgcattaatttaaaaaaaagcacaataattttatttatgtacatattataccaataaaattttataaacataaatgtatacgaatattataatataatatcatatttaaatattataatactacaattttataatttattttaaatattatgacattataattttaaattattgatgtggtaaaaaatgattaaaaaaagttggaaaactatgttaaataataaattatataatttattattagatgtttttatcattatatttattggataaattttttttaaaacatatttaaaattaaataaataatacaaaatatgaattaacttttatagtagttgttagggttttatttcacgttagattcaacttattggtcaagtttaacacaatcatgat

SEQ ID NO: 69834 - DNA, 225 bp, Glycine max
  Clone ID: PAT_MRT3847_34072C.1
cccccttccttaacttcgaatttcggttcgggtcattttttacccaaaagtgttccacttgagtgaaaagtagtgtgttaggacctaaccaatttttcaatggcgtccaagaaccaagaggagcgagctgaggcagttgcaaaagttgttgccaaagaactcgaccaagtcaccagagaaggaaaaaaccgtgatttcggtgttgttgttgaacaccaccaccac

SEQ ID NO: 69835 - DNA, 550 bp, Glycine max
  Clone ID: PAT_MRT3847_34073C.1
gcaaaaaccacgaagttgaccggggggcaaaatttcaaccaacggcttgccaagacctagccacgggccaaaaccgaccaccgggcacatggaaaaacttaagcaatggctaaaccaagcagccccgcaaacttggcatcagccatcatttgtttctttgcctcaaagaagttcccccatagactaaaagcatcaccgggaaggttttgcaaggcaaaacccttcaccacaccctttccgtcatggtccatgttcatggatttttcaaagtctgccttgccgttggttgtttgtcacgaaatttggcgggcacattggatatattattggtggattgtctgcaaaaaatcacgccaaaattcattttctaggtgccctttttatttttttcggattttacgcatttcgccactttaaaaattaataaaaaaatattcccatggaaataaattacgagccttggggaactccgagataccatttttctaagggtgcctgcaaaaaatctcatcaaaattcgatgtctaggtcccaattttggccttatgtc

SEQ ID NO: 69836 - DNA, 339 bp, Glycine max
  Clone ID: PAT_MRT3847_34074C.1
ttttaatctttttttttttgttttttttttttttcttcttttttttggggtttggtttggggggggggcgttttataagttaccaagtgaaagcttccaaatgcaggggggatttatttcaactaaccatccaccaaccccaatttgtcccacggttcataatgatttactaaaaaattctggtttttttttgaaaaccataacaatttaaatatcttacaacaaaggttcgaatgttttcaccggggccgttccctggggggttggtcccaaaagtccataagggggggggggggaaatgcccccattgggcgggttttgaaaagaattttcttcttt

SEQ ID NO: 69837 - DNA, 165 bp, Glycine max
  Clone ID: PAT_MRT3847_34075C.1
atcacaatcacaataacaatcatcaccctctcttctttcctttctttctttctttcttcccatggatatacaacaacaactgttgaagttcatgatccacatcggaggggcactacctagtgaaccttttcgatcttttcaaagctttttaacgctacgaggttc

SEQ ID NO: 69838 - DNA, 287 bp, Glycine max
  Clone ID: PAT_MRT3847_34076C.1
ctcgtgttcgctttttttttttgttgttttaggggggggccctcaaggaacggaataaactttaatattgccagtctaaaattgacggctttttctttttagccccctatttttacctcccacgttaagtcccattttttttaaaagcttttaaaatttaaaacctaaaattgcttttttcatcccccatttatttgatcaaagtggtttttccttttcagagcccaatacctttccaggaacttttgtacctgctccattattttttttcaaatccaatctttttt

SEQ ID NO: 69839 - DNA, 438 bp, Glycine max
  Clone ID: PAT_MRT3847_34077C.1
ttcacgcgtccgatccattcagataagggatgttgaagaggaagacaataaccctgactgggtcaaaattaaggattggttggacaaacaagagtcatcatccgtggtttatatagggtttgggagcgagttgaggctgagtcagcaggacgtcaccgagttggctcatggtattgagctttctgggttgcgtttcttttgggctttgaggaacctgcacaaagaggatttgccacatgggtttgaggagagaaccaaggaacgtggcattgtttggaagagttgggcaccccagattaagatcttaggccatgcagctattggaggatgcatcactcactgtggtaccaattctctcgttgagatgcttaattctgggcatgtgctagagactcttccctatgtgctagaccatgctttgttttcgagggtgctaga

SEQ ID NO: 69840 - DNA, 274 bp, Glycine max
  unsure (1)..(274): unsure at all n locations
  Clone ID: PAT_MRT3847_34078C.1
canaaaatctctaacttataatgatttatcgcatggccttcataaaagtacaaaagtgattgagaagcatactacacaactctatggttcttgggaagactataaccagcctaactatattaaactaagtaaaggccttggtgcagaccacaatattatcctgctaacaatgcgaagtgcaaagaccctgagagaatgaactagttggtgcaatatggattgcaagaaaaaagcaaagagaattactggttgctcctatgtagttattaaggat

SEQ ID NO: 69841 - DNA, 316 bp, Glycine max
  Clone ID: PAT_MRT3847_34079C.1
ggacaaaaccgtagatgattattaatctgaatagctagcgagggaaaatgacatttgaccgcactgggggaatctatgaagattagaactaaatcaattattcggcaacggttgggggaacccctacatgcttactggctctaacaaaaaaggttttgtcgtaaattaaccaccctattctaggtctctttaatgcacaatccccagcccatatataaattgggggccttttttttttaaacaggtctttcttgaaaaaacatttttcttttgccaaaggtaaggaatgaaaaaggacccattctgggggggggaa

SEQ ID NO: 69842 - DNA, 688 bp, Glycine max
  unsure (1)..(688): unsure at all n locations
  Clone ID: PAT_MRT3847_3407C.1
ctcgagccgaacaaacttccacgaccatctattccctatatccgcttccaatttgttaattttcattctgatacgattctgggtatcgccaaatttctcgattttccgcatattttggatttggaggggtttgaagaaataaccgaactttggaaggaaaaacacaaccccatatgatgcaacgcttggttgatcatgttcttgctgttactaaagagtcattgaaggcaattacttatgagtccttaaataatattgtgaggctaatcaacggagtatcagcccttttgttggcactactacctgggaaagctaatatactagaaggtatccatggttgggaactcaagccaactttcaggggaccgcgatttccacgttggatggagaatggtgtatcctctttcaaccagttcatccacgaactttctgtggattctgataattcaagccctgaatactcatctggagaagaagatactgatagatatagtgatagattcgatttccctccatctcccgcatctcagagttctagaacctcagaagctggttttgccaagtacagtaggcatcagatggattggatccagtatatcatacttttgatttggtttcctgtaaagttattgctgtggattccacttcatcntttncggttagtttattatggggtgtcaaaagccat

SEQ ID NO: 69843 - DNA, 1845 bp, Glycine max
  unsure (1)..(1845): unsure at all n locations
  Clone ID: PAT_MRT3847_34080C.1
atatgagaacttctgtatttgtcatgactgatactaattgttaaatgatgtgatgagaatgtctttgatttcnccatacaagtacaacaatgattctttaaattccagttagttagttttttttttaaaaaaaaaagttatattgaacattgttatatctgaatatgatattttactttgatatacacactatagacaaaaaaatttgaaaaagaaaaatgggtaattagcatctacaattttcattcctctctagggatccatctgctccaccaaaagcttttccggcgtcttgtgagctcatccatactctcatttaaggttcttatagttcttataattttcctctgaagtttaagggctgaagctagagcatttcttggtgcactagccttctttttaggttcaatttctctcagttcctgaagctgagcttcggtgaatccaccatccttctgtgtccctgattttgccattagctgaataatccacctagcagcttctgaataatcctgctgagttgcacgtaagagctgcagtctcagtgtttgcatgaaagacaatgccaacaagccttctctgacaaagtagggatgagctaatgctgcttttgcactcagtctttgtcttgctttgtaccttaccattgatttcagaagttcccatcctattccaccatccaaatccaacaactcaagccccttcctaagttcagatcgagcctcagcggtttttctccacgggccaagtcatagtcacacctctttagttgacggttgaattgtatgaggctattatcagaacgtaaactggggaatgccatttgaaggaagattaaaccagcactatagatatcgaatctgtctggcaagttcaactgccataagactggcgaaagtgcagttgcaaccggaactgagggtgctgatggagtttgtgtgctcatgatgtactgttctggtgcagcatatcttggatccaaaagaaactccttcggaatgtagttgatgccaactcgcaggtctgtagcagctccaagatcaataattttgaatgtacgtgattcttcagagaaaataacgttttgtggcttaatatccctatgcacaataccagttgagtgaagaccatccagtgcaaacaagatctgcctcacaattgtttgtatgattctattttctctctccaatcctttgggcaagtcttggacctcacccaaaattaatgtttcaacattatatggaaagtctctactctgcatcaagtcagctagggtggcatccccttcaaaccgccatataagccagtattccgcggctttctttgaagagctctcaagaaaaccataaacaaaatctgcacagctgcttgcacaagctcttcgtacacgctcgttcatccaaatttctacagcaccatattcagttgctttcttcaagactaagtcaccttccttccagtgagaaccaaaaagaaccataagtcataattatacaggtcaagctgtctaagacagtgaaatctcacaagcacataagccatatcaacttgtgggttcctcattttgtttcctcaaaccatgagactcaaagcaatcaaaagtgaaaataacactaacacagacaaacaccagacatgacatggacaagggcaccccaatatgattaatgttcgtattctagaacaccgcatgacaaaagaaattaaatatcaacaggacaaaagatttaaattgacaatcaagatctgtatgttcacctccatatgattatgagtttcacaaaaaaaataccaagagacattagcttttgatactttcggacggcgtgggtcgaccccgggaat

SEQ ID NO: 69844 - DNA, 645 bp, Glycine max
  Clone ID: PAT_MRT3847_34081C.1
ccacgcgtccgctcatgttagaagcgatggttgctggggcatttctctcagcctcccttcaagtgacttttgacaggctggcttcaagtgacatcaaagattacttccatggaaggaaactcaaggatgagatgctcaaaaagctagatattgtgctgaattctatcaaccaagtgttggaggatgcagaggaaaggcagtacagaagccctaatgtgatgaagtggcttgatgagcttaaagaggctatatatgaagcagagttgctgttagacgaggttgctacggaggcgtcacgacagaagctggaagctgaatttcagcctgctactagcaaggtgcgaggcttcttcatggcttttattaatccctttgacaaacaaattgaatctagggtcaaagaattactagagaacatagaatttctggctaagcaaatggattttttagggttgagaaagggaatttgtgctggcaatgaagttggaatcagttggaaactccccaacagattgccaactacatccttggtggatgaatctagcatatgtggtagagagggtgataaagaggaaataatgaaaattttactttcagatagtgtcacatgcaatcaggtgccagtagttagtatagtgggttggg

SEQ ID NO: 69845 - DNA, 787 bp, Glycine max
  Clone ID: PAT_MRT3847_34082C.1
tacggctgcgagaagacgacagaaggggatagtagtcagcgccccactatcagtgccagtccattaagaaaacgcaaaaatcatcgctgaaaacataaacaaacatggtctgcctctgctgttagcagctactacctcgctccacaaaaaacaccccctttctcaaatcttaggttgttccaacgatggaagagttcagatccaaatcgtacggtgacggaaggatgcagattgaggcctaccgtggagcgaacattcaagatctccgctgctgcagcgcctcctacgcctcttcggtgcacccaacaacaacaacaacaacaacaacgcagacccagatgggaggaaacaacaacaacgaagccaagttcaagaagggaaagtccacaaacgggtccacatcgaaaagttggagctttagtgaccccgaattgcagaggaaaaagagggtcgctagttacaaggtctatgctgttgaaggaaaactcaaaggctctctcaggaagagtttcaagtggctcaaggacaggtgcaacagagttgtctatggctagtaatcacaacaacatcaactatgggtggggattggggtgtcttatatatgatgtaagaatactaattttataatttatttgtatttgtttctttttatctgctgcactttttagtgtttcttttctgtgcctgctgaagtacacataatgggtgtaatgtggaagagaaattgtgattcttgtgttcattctggtccgtcaaaagagtgcaatccccttgcttacttgctagg

SEQ ID NO: 69846 - DNA, 200 bp, Glycine max
  Clone ID: PAT_MRT3847_34083C.1
aagaacaagttggggggggattaaacaatcgtttgaaaagcccttaaatttccatttaaattttttttggttcaactgaaaagagataaggtattaacgccaattcaatcggtcaaaatgaaaaaattgccccgcaaacaaccttgtgtgggaaagacatatgggatgaaaatcttttccaccaaacaaataaaaagggg

SEQ ID NO: 69847 - DNA, 460 bp, Glycine max
  Clone ID: PAT_MRT3847_34084C.1
gaatatgtgtgccttcactgaagaagttacatcttaagtgtcatgataaaagagtgcaggtagtcaccccttctctcgagtaccttcaagtgcaggaaactaaagtccgtgactctttggttggtaacttgcctaacctgttacaagcacatgctgatatctattttgaccagcatgaaaaagagtatgtgtttaactttttcaatgcaattcgtcaaactaaattttttggggctgtctacttatacaatagaggtgaggttctttctgcagatcattttttttaccccatcacactagcaaacttatttattttcgttgttttatatgctattcttttaaaaggaaatgggtgatattataatcgattctttgttattctcatcctcatgtaggctctaactgatgctagctttggatttccagaatttcacaatttggatcatctacagctttgttt

SEQ ID NO: 69848 - DNA, 767 bp, Glycine max
  Clone ID: PAT_MRT3847_34085C.1
ccgttccaaggaaggtttcccgtcatcactgtatgacgtcctccttctttgggggggggggggggggcaaataaggggggggagggtgccgggctaatagagaacatatagagaccatagagcgattggagtatacgatgatgatgattgtgatgatgtaaaagtggagacgaagaagaagaagcagacgaggagaaaagtgagaaatgacgttttgaccgcaatgaaaattttgaaggggaatggaacacaagaaaacccagggggggggggggggggggcagatgataaaggaaaaatgtagggctaggccgagaagaagaagaagaggacaacagtgcaaagtacaactgtctattcttattagtcagtatagaataggctactggcaccgcggggtagtctgcaaaaacgcccgcgaacccgtgccaccaccagaacccgaaccaccagatagagaaggcatcctaccacccccttctctcgatagtaggcctgccaagtgcgtcggatttaggctctcggcggccggtagtagtctactacttagcgatgcggctgcgaatgcggcggcggcagctgctgctgctgctgctgccaaacccggattccctagtctagttccattgctcttggccaacaatttattcgtcggcatccccttccttccaactttggcaatcctcccaagcggccctagacctagctgtagcccttttataggacctttacatagaatcgccccattattatttagcggggccaag

SEQ ID NO: 69849 - DNA, 481 bp, Glycine max
  unsure (1)..(481): unsure at all n locations
  Clone ID: PAT_MRT3847_34086C.1
ccacgcgtccgttcacgcgtccggaccttccagtcttctccgtaggggcttcgctccatagatttcgccgcaaggggcaacggcacaccccaactgacctgacccacgagggatccgcagatgaagatcattccggtcccttgcctggatgacaactatgcctacttaatcgtggacgagagcaccaagaaagcagcggccgttgaccctgtggaaccggagaaggttctcaaggcggccggcgaggtcggcgcctacgtcgactgcgttctcaccacccatcaccactgggatcatgctggtggcaatgagaagatgaggctgcaggtgccagggataaaggtatttggaggatccctggacaatgtgaaaggctgcactgatcangtggagaatggaatgaaagtgtcacttgggaaggacattgagatactatgcctacacacgcctttgcacactaaaggtcatatcagctactatg

SEQ ID NO: 69850 - DNA, 242 bp, Glycine max
  Clone ID: PAT_MRT3847_34087C.1
cagctattgataaagctgtggctgctggagtgaatgtcctttccatctctttgggtggtggaatctccacatattgcagagataattcagcagtggcagcgttttgaccaatggacaggggtgtttttgcttcatgttctgctgtcaaatgcatgacctgaccctgccattctcaccaatgtgtcaccaggaatcaccccacgttggacgactcacaccggatacggattttccactggctc

SEQ ID NO: 69851 - DNA, 1078 bp, Glycine max
  Clone ID: PAT_MRT3847_34088C.1
ctttttttttttttttttttttttttttttttttttttttttttttttttttggcacacccaagccaaaatgcatttccactccaattataactatgtttcagtacatcagaaccaaaaaggaataaaaaaatgtttattctatgatatatgcacacccaaaaacaacaaagaggaatccaatttgccactggttaatctttttactcttttttttcttctttctctcttctatctatgtctctgttcattatatgtagtaggatggcgaattgccagtgtatacatacactcaggactactagtatcacactgcaaactctgtacaaaaaggcaaaccaagatcaaaagctggattggagaaaaacaaacccagaataatatcaaaacaaaccaaagaatgacacactaagcagtaagcacactattttttcggtgcaggtatcaagaaaggtaaccctttgaggaggagggcaagaaaaggacactgttagatgtgttgatgatcctcagaatgtaccgttacattctggaggagggtatggctttcaaaattttgggctgaacaaaattgcaatctttctcaaaccaggcagagaagaactaacaggccatattgccatgggtggggagaaagggttcagaaaggggaaaggacttgtaaaatgtttatatttcagatgaattagagattcagattaggagggctcttttgcagagtggcggttgtgaggggttggcacttggattgagcgacggagactccattccaagtgttttcataaggaagctcctttcctgaaaagaaaaaaaaaaaaacatataaaagaatgtcaaagaaaaaagaaaatatggttatcgttaagcaaaactatgaaacaaaccatttttaaaaaaataaagatcataaataattttaaccaccaagcagtccacaactcaacatagtccagcaagaacagacaaagcagaaacttaactaatgtgtggttgatgcttaagaatggtagatgtatgctttgtgttctatagatacatcagatgataaatgaagatggtgataacaactaacatcttac

SEQ ID NO: 69852 - DNA, 1042 bp, Glycine max
  Clone ID: PAT_MRT3847_34089C.1
tatttttgcttttaccaattcagacactacacccagaatggcggctccacaaggtggatccggatccggacccgagcgagacaaatccaccgctccctcctcttctccgatctccgtcgtctccgccttctggaaagattttgagttggagaaggagaaatctatactggatgagcaagggcttcgaattgctgagaaccaggaaagcagtcagaaaaatcgccgcaagcttgccgagaacactagagacttcaaaaaggcttcgcctgaggataagttaagtttgttcaattccttgcttaagggctatcaagaagaggtcgataatcttactaagagagcaaagtttggagaaaatgcttttctcaacatctatcaaaagctctatgaagctccggatccttatccagctcttgtgtcgattgctgagcaagatctcaagatatctgagcttgaatctgaaaaccggaaaatgaaagttgagcttgaggagttcaggacagaggcaactcacttgaagaatcagcaggctacaatacgaagacttgaagagagaaacaggcaattagagcaacagatggaagagaaagtgaaagaaattgtggagattaagcaacgcagtctggcagaagagaatcagaaaacaatggaagttttgaaagaaagggaacaggcactgcaagatcagttgcagcatgccaaagacagtgtttctactatgcagaaattgcatgaactcgcacaaaaccagttgtttgaactctgcgcccaatctgaggaagagagggcatctaagcaatcagaggtcaatcttctgatggatgaagtggaacgtgcacaatcaatgcttcttagtttagaaagagagaagggggttctccgaaatcagttgcaaacggcaaatgaagagactgaaactaagaatagtgataattttgacttaaatagcgcgctggagaattctttaaatgccaaaaaaaaacaaatctctgatttgaacatggaactacacaatattgaaacagccttatcaaatgaaaga

SEQ ID NO: 69853 - DNA, 617 bp, Glycine max
  Clone ID: PAT_MRT3847_3408C.1
caactacttaaagagaccgagaagtatcttcaaaagcttgggtccaagctacaggaagcaaagactgcagcaggacgttttgggcaggacgttgatgagacaggaaatgtcagttttcttgagaatagtgaaacagaaaatgtggatgaaagtgatcaggcaaagcattatatggaaagcaatgaaaagtattacaagatggctcacagtataaaggagagcattgcagagcagccatctagtttgctaggcgggaaattgagggaatatcaaatgaatggcctgaggtggctggtttccctatacaacaatcatttgaatggaattcttgctgatgaaatgggactgggtaaaacagtacaggttatttctttaatttgctatctgatggaggcaaaaaatgatagaggaccatttcttgtggttgtgccctcttcagttctacctggttgggactctgaaataaatttttgggctcctggtagttcataaaatgtctatgccggtccaccagaagagaggcgtcggctattcaaggaaaggattgttcaccagaaattcaatgttcttttgactacatatgagtatttgatgaataagcatgatagaccaaagct

SEQ ID NO: 69854 - DNA, 169 bp, Glycine max
  Clone ID: PAT_MRT3847_34090C.1
gaaaggttccaattaatttttggcccttgtccttaacctgggttccaggccaccctgttcctgtttggcttcctccatgggggaattctttgtttttggagaaattgggggttaaggccttagtcaaccagcctttcaggcctttccagaccaatttcaatcagccaaa

SEQ ID NO: 69855 - DNA, 317 bp, Glycine max
  Clone ID: PAT_MRT3847_34091C.1
aaaggacctttccaaaacccttaaacggttccggggcctttttaggcccaaactttttccggttttccttggggaaaccttaaccaagggagggccggattttttacccggtttaaagaccgtccccaaaaaaagggccccttttttcccaagggaaaaaaaaaacccccttttttaaataatttttggggaaattgaaaaggaaccccaaaaccgaaaggggccccccttttaaagggggggtccctccaaacctttttgggggcgccggtcccccgggattttggccattggaaaaacctggggaaccccccttt

SEQ ID NO: 69856 - DNA, 379 bp, Glycine max
  Clone ID: PAT_MRT3847_34092C.1
atttcattgaatatgttgcaaaaaccttaaaccgggggagttattcttggtctctaggtttgcgggcattctacttgtcatttcctcttgtcctttggatctatgggcccatacccatgtttgcttgttgctgcttcacatcatttattttgtacttcttggacacaaccactcaaatcgcacgggatcttcacactaaatcattcacaatgagggaaaccgggggaacgcaagcagcatagttccatcattctaactgctcttgaacttgataactattatcttttagcttgtagtaaagttcaacagtagattttctataatcatccccgtaatgatattattggtgaattattgtataatatttattttgaaaagt

SEQ ID NO: 69857 - DNA, 946 bp, Glycine max
  Clone ID: PAT_MRT3847_34093C.1
atacggctgcgagaagacgaccgaaggggtgacccaaagcgtgacaaaacccataaatcctctcaccaaataaacctcaatttattgcattgcataataccatgtcaatgaagttgtatgcttccctcacccttacggtgtggcttttcatggccacattttcgcgagcccaatacgttattgacacaaatggcgaacccgttgacaatgatgatgagtattacatcaggccagccataaccgacaacggagggcgtttcaccttgatcaaccgaaacgggtcgtgccctctctacgtgggtcttgaaaacaccgatacgccacttggttatccagtgaaatttacccattttgccctcaacgttcaagatgaggatataagggtgaacagcgacttgagaatcgaattcgtggaagtttccacaacgtgtgtgcaatccacggaatggagggtgggtgagaacgacacgaggagtggaaggaggctcatcatcactggcctagatgataattttggatccattggtaactattttagaattgtggaaacgcaaagtgttggtatctataacatcgagtggtgccctatggaaatatgctccgattgtggattcgtttgtagcactggtggtattttgcgtgaggatggaaggattttctttgccttggatggtactccacttccagttgtgtttcagaaaaaagatgattaatttgaagcactaagtttgaagaatattgtggccgtttagtcatagttctttttatggtaaatagggattaatatatgatatatggagctatcatccatttattttaggaagaaataaagatacgtgtattcagtattctgttcttgatttgaataaagctcctaattgttatgagtttgtaattcatttgctactttggttattatatattatacttcttttatttcatcttt

SEQ ID NO: 69858 - DNA, 199 bp, Glycine max
  unsure (1)..(199): unsure at all n locations
  Clone ID: PAT_MRT3847_34094C.1
cccgggaacgacccacgcgtctttttctgtncncactctgnctntccccgggtgggggggggcggagacaaggcgattcgcaactcgctcaccggccaattgctggcgccgcagctccggcgccggagcaagggtcatgccttcttccgcctcatgggggcggagcatcgagcccgctcccaaggatcctatcctcggg

SEQ ID NO: 69859 - DNA, 607 bp, Glycine max
  unsure (1)..(607): unsure at all n locations
  Clone ID: PAT_MRT3847_34095C.1
ggctcgagatactctttcagttttgttataaaaggcttttatataagtatggctgtcttgggcatacacttgaagcaatcatgcggtgcaatcagtcaaggaattttcgaggcactccctgcagtatggaccagcacatatgttgtaattagtagttagattagatcatagattgtactaaaccttggcaactatgaggatttggttgtattgggtgaggtttgagagctgagagattactccttgtaattttcattgatcatggtgaattatcactgttttatcggtggatgtaaacctatagtttgctgtaggttgaacagtactaatgtattattttcttagtgctatggtagtaaggacaaggtattccaagaatggaaatcaagttgccggtgacatacttgatatctaagagtggcaagcagagaatttacctccaaggacttttttcaccgtacctaaaaaggatgctattcaactagtctctaagtgacaatgtatctccttggaaagagatggctgccaagcaaggctacaagtcaagggagggattggaacccatncacatggatcactgaatgtgaacccgattacaataatttct

SEQ ID NO: 69860 - DNA, 1067 bp, Glycine max
  Clone ID: PAT_MRT3847_34096C.1
gggcgtccgcccacgcgtccgcccacgcgtccgtacggctgcgagaagacgacagaaggggaatatgattatattttcctttgggatgaggacctaggagttgagcatttccatccagataagtatgtttctattatcaaacgtgaagggctggagatatcacaaccagcactggatcctaaaaaaatcagaagtgcatcatcagattactgcacgtgggaggaggtcatcagtgcacagaaggacatataaagctagtaatgatggtaaagggtgtgataaaagcagcactgccccaccttgtacagggtggatagaaatgatggctcctgttttctcaagagctgcttggcgttgtgtttggtatatgattcagaatgacttgatccatgcatggggtctagacatacagcttggctactgtgctcagggtgatagaacaaaaaacgttggtgttgtggatgctgaatacattgtccactacaatcgtcccacccttggaggcatagataatactatggtttcttctcaggaaaaggatcatagagttgatgtgaggagactttcttaccaagaattagatgtctttagaaaacgttgggaaaaggcagttgaggaggataaatgttgggtcgatccatttcaatagccagtgcaggaattggagtggtaaaataagttctatgtaaactttgtacaaaaaaaataacatgttatttatgtaaagagaagaagtgctactggcagctaaagcaagtgttgaccatgggtatgacagaaagcttaagaggatcccaaggacaacatgactcctggaataaagttttatcttaaataagcaaggtgcattttagtggaaaatttttcacctttattggatcagctttgagggtaaataaaaagatgatgagagggtagttagaaactcgtaaatcagctagactctaagcgttgtttttcttgactaaacatcttactgtcaattttattttttttggattttgatttgagaaaattaattgatgtcaagtgcatttgaagacagtttataattattgatttaatta

SEQ ID NO: 69861 - DNA, 397 bp, Glycine max
  unsure (1)..(397): unsure at all n locations
  Clone ID: PAT_MRT3847_34097C.1
tatggacagtaccaatatcgatggctacatttccatgagtgctctaattgggtgaataccgcctgacgtaattttggaagggcctacactggtgaagcacggcttgaatgaggccattgttaaaggagggtgggacaaggtcgaggcagagctcttgggggggggtaggtgggacgaacgcgacatttttttttttaccaagagaggggagagagaggancatataatttatgcacttgagaacggagtggagaggtgtattctgggattggatatggaaggagaggactgtgggagaaagagtggggagcgaagtgcgataggaacagcgagtgaaattgaaggagtggcactctacatggagagcaaagacgggggggaagaagataagcgacga

SEQ ID NO: 69862 - DNA, 495 bp, Glycine max
  Clone ID: PAT_MRT3847_34098C.1
ctactattcgagcagcggagtcgaagcacgtaggtgcctgagctagaaatttactgagacctccttggcctacttattctgaccgaccagagaagatacgacagcggccaaagcttggtcctcatcaagcattggtcagctgaagagcctgaatataagaactgccagtggtgttgcatccacactgtacttttatcactcatatacctatgagctcactggaaatctggctaaaattcaaggctaccctccttgcatggcaccgaattgctaccctgcgccacgatgagctgggtcaggaaacccttttgaatctgtaactttataactacctaccctacaacctttatgaccaggcggagaagatgaggcctatggctccaagttgtgaggcacattcaaaccagcagttcttggcgctatgtcttctcctctgggaaaattctctcaattcacctggagcacaccgatgcataagacttgcgtttgcaggct

SEQ ID NO: 69863 - DNA, 363 bp, Glycine max
  Clone ID: PAT_MRT3847_34099C.1
cttgttcttaagtctcaacctctccactccactgcctattattgttgtgtcccattcaccagtcaccaccaagatggaagccagcgctggactggtcgctggttctcacaatcgcaacgagctagttgtcattcatggccatgaagagcacaagcctttgaagaacttggatgggcaggtgtgtgagatatgtggcgatgatgtgggactcacggtggacggagacttgtttgtggcctgcaatgagtgtggttttccagcatgccggccatgctatgaatacgaaagaagagaagggagacaagtttgtccacagtgcaagaccagatacaagcgtctcaaagggagcccgcgggttgaggg

SEQ ID NO: 69864 - DNA, 411 bp, Glycine max
  Clone ID: PAT_MRT3847_3409C.1
gactgaatcaagacattaatggcattatatatagtttgcatatctttgaagatatgggtttccattgtgaggaaaaggatagcatacatctgcaaccttgcgcagcttgcaggatgttacgccgcagatgtgacagtaagtgcgtacttgcttcatatttcccaaccaatgaggttgataaatttgctggagtgcatagagtgttcggtgctagcaacgttatcaaaatgattcagatggtcgaggaaacaaagagaggggatgctgttaaagcgatggtgcacgaggcgacggcaaggctcagagacccagtttatggcagtgctggagctatttatcagttacaaaagatgattgaggaactgaaagcacagctggagtccataaaaactcctgtgtcagaacaaaaag

SEQ ID NO: 69865 - DNA, 169 bp, Glycine max
  Clone ID: PAT_MRT3847_340C.1
tgtttttttccccacatttaatgtactgccacatcccccatagcatctggaaactcggctgttgacaccactatatttcgaggcttttccccacatgctggtgcagtcttggagagattcatgaaaaaggctgctttgaattctttacaagatgaatttcttacaactt

SEQ ID NO: 69866 - DNA, 262 bp, Glycine max
  Clone ID: PAT_MRT3847_34100C.1
tgggacaggacaggcaattaatatggatgagttcggagaacaacatggtggtgctaaaggtgtgtttgttgcttcttttccttgctggggttacagctgcacgcatggaactgatcttcttcaacagtgatcacgcatcaagttattatgatgattaattttcacatccatccttagatctttgcttgtgcacactctcaatgctttcctatttctatttgcccttatactactcttgaatttcatgccatcttatattcgt

SEQ ID NO: 69867 - DNA, 701 bp, Glycine max
  Clone ID: PAT_MRT3847_34101C.1
atgggagtgaggtttgggaactggtttgagcttcggaaatggtttgagcggtggaaacctcagtgacactttcaagaaccaccaccacgcccaacccatcgacttcggctgaattccatttccctaattcccgcaaatgggtgctagggttcccgtgcagcactacaatctcaactccccctcttccttcatcgagagccctctccacgtcctcaacgccgtcgacgcccgaaccgccgcctccgccatcgacaaccccaacgacgattccgcctccgccgtcgattgcatgaatgaatcgcataggagctgtttgccgcttcacagtgtggaggtagacgaggatcgcgctagtctagacactaacgagtcttctagaactacctcttatgatatcttgaccgctgaggatatttcgccaattgaatcagcaagggcaaggtttttgcaaattatcgtggatcattttattgatgaccgtgtgattgaggtgcctgattctgaggctgattacactggccaagacaaaatgagtaagaggaggacaagagagatccagtatgaaggagacccaaatttcactctgcctttgatgtatgtggcaaatatgtatgaaagtttagttagtgatgtgaataataggcttgcttgcttggatggtattcgggagaagacaataggggtagacccttgaagctgct

SEQ ID NO: 69868 - DNA, 438 bp, Glycine max
  Clone ID: PAT_MRT3847_34102C.1
tattatactcatttctcacaaaaaaaacaacagggggggtggagaaaacagaagcattttttagcccgaatgacaacaacacgagttatgactggggggaggggaagtaggccaagagggggcaccagctgaacactaaagagatgccttacgggaaccagtgctacgaccagcacttgatgtcatacatgggggaggaggttgaggggctggttcatactctcaccgtacatattggcgagctgctgcacgaaaaccactgagccggttggagaaagcaaaacgaggactagtaagtgcacaaccacaatcgagaacctcacttgctacacgcaaaactggagccagcacacagacgcgtggaaattcaatggggtgcgatgcaccaaactgcagtcgatcaggaaccagcagttggtgggcttgacctacacggag

SEQ ID NO: 69869 - DNA, 264 bp, Glycine max
  Clone ID: PAT_MRT3847_34103C.1
cttcttctttactaccaatcatttctctgttcaaggataagtgtgttatctgtctaaagacacaagatgggagctggggctacactctaatctttactacatcatacaatttcagtcattacaaatgatgtacgaaatatagttgcagtcctcataaggttttgaccaggctacaaataataatcttgataagacccatgaacatgtttattctacaaacgaatgtgtgcaacaactcgctcttggcttggacatcatactggg

SEQ ID NO: 69870 - DNA, 351 bp, Glycine max
  Clone ID: PAT_MRT3847_34104C.1
tactcctacaagaagactacagaaggccacatacctcatttttttcatctacacaactataaccattctgatgagtactatatttccttggattctgcgccaacacaaaatccacatatatccctttaatttacattccatatatcaatacaccaattaatttccattcctccacacacaataatttttctttaaacctaccaccttacctatcttacctaattcattactcatatattccataatctccctttttctaattaactaacttttaacctaacttacaccaccatttttaacttactaacctatttctaaacttctttatcaatcttcttattactattacat

SEQ ID NO: 69871 - DNA, 353 bp, Glycine max
  Clone ID: PAT_MRT3847_34105C.1
ttgtaactgtacagcggccaccataatatcgtactcttttttttatttttgacccaccctttaattccttaacctggggccgggtctttacaatcttacccattttccatttaaataaaacttttacaaattaaggtcataactgtcatctttgttaaatttttaaaactttaaactcctcaaaatatacaaaccataagcatccagagtcaaaactgtaaagcctaatgagccaactaactcaccttactcacattaatctcactgccctcattgcacactttaaacctgtcaaaccagctgcaccaattaaattaacaaatcgccccaagagccggtatacgcattttgcg

SEQ ID NO: 69872 - DNA, 1443 bp, Glycine max
  Clone ID: PAT_MRT3847_34106C.1
cccaatacactacactagggtcacgattcatccaaactgaaatggcggcagtagtatcagcatcttctcatctattgtttgttcttcgttcacaaccattatcatcatcaccctctttcatttctcttctcaaacctcttcttgtttcttccccctatgctgtatctacaccccttcggcatatccaagttccaccgcttcgaaaacctctcttctctacttcctcttccccctcccttaccgtttctcaagatagtgaagaattggaagaaaaagagattgcagacgatgatgatgaattggagactccaagaagagattttgaagatacccaattgggtcccacttgctcaccgttggagagaaagaggaaagagagtgtgaagttggaggttccgagtttgagtgtgaaagaaaggaaggagcttgcgtcttatgctcacagtttgggggataagctcaagacccagttggtgggaaagtctggtgttacgcccaatcttgccacctctttcattgagaccctcgaagccaacgagcttctcaagattaaaatacataggacctgtccaggcgagttagatgatgtggtgaagcagttggaagaagcaactggttcagtggctgttggtcagattggtcgaactctcatcatatacaggcccagtctctccaaaatgaaggcagaagaaaagaagaaacaagctcggaaccttattcttaaaaaacaagtcaaacaaagactagttaacaagagtaaggaacaagtacccaaactatcgtggcctggttcatcatggagtggaaaaaaacgtagggcataataaactctctaattgtgtcgaggtttgtcatggtgcttggcttgaattagcttgaggcttttgcatgcataaataccaaaggtcatggtactggatgtattattggcacaagaaaaggatcgaagaacgcttacatactatgatagaatgtgtttgtgaccacagctgaagaacataacgatgaattgagtttggctagaattgtttaaagaccaattcagtagattctattgtatttgcaattattacttaatatgaaatcttattgtaatattgtatgggtaaaaaaatagtaaacctaaataaactacatttccttccagtgatgagaccgcaatcgcagattcgcagtaaggttttaagaaaaaacgtgattgcaattgacgtcacatcagctgcatttgtctgcaatttttctgttgtattcggaaacaatgacgagactgcaacttttttttaccacagtgggatttttcgatttttgtgatgtttttagtttgctaagtattcgtttgaatttttagaggaaatgcatttttttttgtaatgtttttagtctgttaagtattcgattggattctgatactgtaaatactataactgatcaaacggtttctgg

SEQ ID NO: 69873 - DNA, 324 bp, Glycine max
  Clone ID: PAT_MRT3847_34107C.1
cattggcgtgggcgtagtcgctgcacgcacccaaccaaaataagtgcccacgagcatcacgtctactaggccgcggccgcccttttttttcttttggaaagagatacgatgcggtagtgaaagaaaaacctgaaaggcgagaggctgaatctggatctgtgtcagatctatgtgtggggcggcggcgtatataaccaccggattaccctatctctatctctctccatctggatagtaatctctgtgccggactgtgctgatgtgcggctgaggctaacgaattatatagatacttactatgcccatgcccatggctatggctgc

SEQ ID NO: 69874 - DNA, 346 bp, Glycine max
  Clone ID: PAT_MRT3847_34108C.1
gatatacagaggggtaagaacgagggactgcgtgaagagggtggctgatatacaacggcctaagaaccagaccagggtatggatgggaaccttgaacaccgactatgaagccactctggcgtactacaagggcgcacacaagctcgggggggactacgccaggttgaactcgaccaagctgcgacaccactgttgcgacactgggggcgacttaagggagtataaccctgttcattccgtccctgacgccaagcttaatgccatgagtgagggcctgtctttgctgcagatacaggtgacgacagggaatcctccgaagaaaacgcggtccaaactcaatagtgcg

SEQ ID NO: 69875 - DNA, 511 bp, Glycine max
  Clone ID: PAT_MRT3847_34109C.1
tttgtttttctttttttttttttttttttttttttttttttttttagagggacaactggtggttttatatttcattttaacaagacttgccaagagatttatcccttaaagccgagagcacttatgtttcgagtttgagacacctttatttattccacttgcatttgaaaaataaaaatattacattcaccaaactgggaaaggggaaatatctaagcgcatttaagtgaacccgggtagggattgttttcaagttttttcaaaaaccagaacctattcctttgggcctattgtaccaggttttccagggtggtaccaaattaccaagaaaaaaaaatggtgctgcgtattgtcaccacatttatttttctctctaataaatgctggctttttatggttcgttgcataaaaatgcagccggattcggaggaactgatgctgaaggctctgtctttctaaccagtagggcagaaaagcgcgcttgggcaatccattgctgggatccccaata

SEQ ID NO: 69876 - DNA, 423 bp, Glycine max
  Clone ID: PAT_MRT3847_3410C.1
gggaaaacgagggttttgcctgaatcctagtcctgataattgattaacagttaagaaagaatttagttaagaatttatttaataaattcatcataagattaatggtgaaatttattgaaatgagttaaaaagaagtctatgacacaatcgaaaatcccatggatttaaattgccgtcgccttgtggggagccaaaaaaatcttgcggaaagatacggttgatgcggctgcaattgcgatcgattacagagtatcaaaataccttgaacttggaaaatcctaagattgccattatctaaagacattccgtagttggcaagagcatctgctggtgcatttatctcctgaacaatatgtcggcagaaataggtaatagtaggctcgagcattgaattgatatatctaaccagagtagaacaggtat

SEQ ID NO: 69877 - DNA, 353 bp, Glycine max
  Clone ID: PAT_MRT3847_34110C.1
aaaaaaaaaacaaaaaacttttttatttctactttgaacaacagcagcgtgattgaattggttgcacaaccatgctatttttttattaaaccccaaattacaaggttacaaggagaggaactgggggggaaaatcaatatatcatattgttctatttgaaatataaggggtaaggggtgtgctccaaaaacaaatagagctttttcaactactacacaattttttaatcattgggttaaacttttcaacccaaattgaacttctcccccccccaaaaaaatctcaaggaaattatccaatcttttctttaaacaaggctgtgttttttggggccgcttttcccattttaagat

SEQ ID NO: 69878 - DNA, 510 bp, Glycine max
  unsure (1)..(510): unsure at all n locations
  Clone ID: PAT_MRT3847_34111C.1
aattcggctcgagcggctgcgagaagcgacagaagggggcgggaagcatagcaagtgatacgcaatatcacgttcttcgctctatcggttcctgctaaaaattcaaagctggttaatcattcaaggaagtaattgttttactttttgcatgccttcacacattataaacaggagaagctttgataggacaaatatggagcaaaagcctccaaggatgaagttaattagtaagctccctgggtcggaagtggaaaccataaagaagaattcacatatgcttgtgttaccaacaacatctcagaattctctcatgtcaccaacctctcaaaccataacccgaaataactcaaatgggaggttgaattgtctatgctcacccaccacacatgctggttcctttagatgtcgacaccatcgatcttctggatttcgtcgtggtaaatctgttggctctaaccttgctgaattggggtctaaagcangctcaatcagtgactcacttcatgctca

SEQ ID NO: 69879 - DNA, 371 bp, Glycine max
  Clone ID: PAT_MRT3847_34112C.1
ggaattcggcacgaggatcatattattcatatataccctgatatagcctatatacggcaaatatataaatataatagtctctacatactaatattataaatgttcgatttccacattcattgcagaaaatttgatatcatgaatttcttaaaggttgtagtttgtatgaactagcctggccttttttataaaatatccaaggtttggtgtgtttaactttaaactttgctcggattctggacccataaaaagaaatcatacccggaatagaagaaaacaaatagccactatttagtcttaatttgaaaactctagctatacgctggccgaaacgagttcaaacattgtgtattttatttgcatttagccca

SEQ ID NO: 69880 - DNA, 440 bp, Glycine max
  unsure (1)..(440): unsure at all n locations
  Clone ID: PAT_MRT3847_34113C.1
gcgcgcgtgcgcggacgcgtgggcggctgcgagaagacgacagaaggggaacctccgtgtatcaaaacncanccggggggggggtctggattctaggggtnggactctgaggttcggttcaggttttgatcaccatgagaggtaaggggaagaagaagcgtatgaggagggtgaagaggaagcgccgaaagatgagggagagatcgaaggagtgggcttggttccccagcaactattggtactaggtttggtttatttcagctatggttttggttccaaatgtgacgatacatttttattgggttctcttggttttggcttacctcaaaaaagatggtcttaccggaaattaatgagatttaatattgggatcgganaaaaaaaaagggggaggaaaaaaaaaaatttgtttganaataaaaaaagaaggagaataaaaa

SEQ ID NO: 69881 - DNA, 732 bp, Glycine max
  Clone ID: PAT_MRT3847_34114C.1
tgcattttcccgccacaacgcgagcaagaggctccatgttcccgccaaatgcaaagccctagttagcggcaaaaaaaaggaaccaccagccacgcgtccgattactctcggctcgagctctctttctgtttgttatcagatgattcgcttcgacaatggatttgagcgaggaagttagggcagctcacaagcgagaattctccgatttcttagatcaagatgttggaaagggcatatacatggacgaaatcaaaaccctaatcaaccacaagcgccaccgccttatcgtcaacatctccgatctccacaacttccgcgacttgggtaacaggattctgaggagtccaagtgagtacatgcaaccgttctgtgacgcggtcacggaggctactcgtgctattgatcctaagtatttgaaggaaggggaacaagtgcttgtgggatttgaaggcccttttgtttctcgccgtgtcacgcccagggatcttctctctcaattcataggttccatggtctgtgttgagggcattgtcaccaaatgttctcttgtaaggccaaaggttgttaaaagtgttcatttttgccccaccaccggaagcttcacttctcgcgaatatcgtgatattacatctaatttgggattgcccacaggatctgtttaccctacaagggatgaaaatgggaacttactcgtgactgagtttgggctgtgcaaatacaaagatcatcaaa

SEQ ID NO: 69882 - DNA, 505 bp, Glycine max
  Clone ID: PAT_MRT3847_34115C.1
gtcactgtcattgcaagtccgtcaccgggaaggatagaagaagaagaataagccgggtgaggtctgaaaatgtactcgtataggtatttctataataaacgataatatacgctacccctgtaaggagccacaaactaaggtaaacatacacacggtgctggcaatagtggtaatttagggtggtaacggtaaagggggttgtgtaaatttagtaagtgatccagtgtgtactggtaggagcggggctgcccaaggtggtctagccgtaaataccgccagtacagcagcatcgccgcaggcgactgctagagtcgatgcttagtgctaaactacactcgccccctgggaaccagatttggttacagcattggtggcttatacggtgcaacctgcgaagacacaaaataaagcgccatttgctgcaacggccacagaggcgtcgccctatacgatgcctattgccagtacagacaccaaggcacgctacaagcctgcatggggagct

SEQ ID NO: 69883 - DNA, 671 bp, Glycine max
  unsure (1)..(671): unsure at all n locations
  Clone ID: PAT_MRT3847_34116C.1
ccgtcccgtacgggcnntgcgagnaagnnacgacagnaagggggggcagnnnttcaatntccccaatatatntnnccattctncnntctgtgtnnatttcccttacccccctcccttcaagnnatgcagnatcttnncgtcaagacccctcaccnnnggcaagaaccatcanncccttgaggggtggaaagggctctgacccaccatcgaccaaccgtcaaggggccaagatcccaggacaagggaagggaatnnccccccggacccagcaacnngtctcattttcgcccggaaaggcaacttgagggaccggccgtacccccttgctgactaccaacattcagaagggagagtaccctcttcacctcgtcccctccgtctccgtggtggcnatgcnnagatcttcgttaagaccacctcaccggcaangaccanntaacccnntagaggttgaaaggctccgacanccatcgataaccgtcaagggccannagatccaggacaagngaggnngtatccccccggacccagcaacgtctcatttcttcgccggaaagcagnctcgaggaccggccgcaccctttcgccgactacaancatccagaaggaatcannacccttcacctcgtcccctccgtctccgtgggtggcattgcagnnnatcttcgtta

SEQ ID NO: 69884 - DNA, 726 bp, Glycine max
  unsure (1)..(726): unsure at all n locations
  Clone ID: PAT_MRT3847_34117C.1
gcaagcgtttgctgaccgccagagcagtactgtcgcggccttccagagcctgacaagtgagccaccttcgcagacgagcctattgattgatcaattggttctgttgtttcccgaaatgacgcgggatgagatcgccaagatcaagttgacgctggtgaccgacaaaccgtatgacgccagaaacgagggccacctggaaacacgtaccccgttgttgaccgagttgatccttgccggagaacctgaggaggacccttttttcgtggctcagcagtgggtgaatacgcgactttttggcgagaagaaatacgcattcacgcaccccactatctcccaggaaacctttgaagaaagaatcaagaagcttccacgtatcaagccgctggtagcgccggcagtggaccaatacctggccgacagtcgtcgcgcacaggaaacggtgatcaaactgatgatcgccaatgcaccgctggatgtacgcacagggttggagtccggcgatgtggagattttcacgttgcgtgaggaaaccggggaatccctggcacaggatcaggggagcgactcgaaggtggtcgaaaagagggccaagcagggtgtgttgttgcgctacaaaaacaaggggccagagggaggctatacctgtctcgaaatgtntccggngtccatgaaagtgtgcaagcgtaacttgctgttctctacgctaaagntggacngtgtgattga

SEQ ID NO: 69885 - DNA, 360 bp, Glycine max
  unsure (1)..(360): unsure at all n locations
  Clone ID: PAT_MRT3847_34118C.1
cacattccaacacaacaacatcgttaaagcagaaacacacgcacatattcgtgttcgaagtgacacccagagagaacacagaggagagaggaggagcgacgtatgtcttcggaggagacatacagcgtgttcttcttctggagacgggggctcactctggcgctgggggaggcgccgtcggagctcaaccccctcttcggggtgttctccgagtatgtgtacatgacacccgcgtatctcaaggtgtttctcgtgggtgtacagagacaagagagggccaccggaggagacgcacaccacatcatcgagatcttcagttatctctctcggaggggcggtgnncncactctcgatttttct

SEQ ID NO: 69886 - DNA, 405 bp, Glycine max
  Clone ID: PAT_MRT3847_34119C.1
cgatcgcaatgttaataatatggattgatgcttggtatctcttcctctcatgtatgtcttttgcacttttatattttgcttcattggatatgaatgtacgctctcgctttgcttgttcacatgacctgcactccagagctgacagtagagtctgccagattgaaaatcgcacattctgcatgattggtgggggtgccataaccgttgagtaaaattgaacaaaaacacttgactgattgtttcgctgaatgaaagttaaatacaaacatgcatgcaacctcctgttatcatcttcagaagttttgcgaaaaatggacagtcattttggttatgataggcaccatgagcgagccttgagcaaacctagaggaagatgggaaatgctcgcccggtaggttggaaacc

SEQ ID NO: 69887 - DNA, 444 bp, Glycine max
  Clone ID: PAT_MRT3847_3411C.1
aactagtctggttttataagatgtacaaaatgatttttctcctttagagtagatgatacaaattgaagatcctagaaaaattctcaatagatttgcgagtgtttggccatagttgtttagagacattttgacaattaagttccctgaaaaagctctcctttttgaagtaagacgcacacatatatataggctcattgtgccttttacaaatagtttgaagagatgtgtcttttcaaaaaataaattgaaactttttcactggtaatcgattacacaaaccaaaattcaaataagtttgtgtcgttattgcaatagtattggccttaaagtcttttatcaaaatttctttatcaggtttaatcagttcaaaagtaagatatttttgaactgggaatcaattaccaggtcctgtaatcgattaccaaagaaactataaacatgaat

SEQ ID NO: 69888 - DNA, 816 bp, Glycine max
  unsure (1)..(816): unsure at all n locations
  Clone ID: PAT_MRT3847_34120C.1
gcattattcgatttcgtattgcactctctcatctcatctcccattctcattctagctaacggccccttttcttcttctcacttgtctccaagttttttcttcacatttctctgcctttgatctgcacacacaacaacatccctctaaaaaacatagagggataaaataaaaacatgaagaaatttgtactcaagttagatttgccagatgacggcgcaaagcagaaggccctgaaaacagtttcaacactttcaggtgccaaatcattgttcaccctttttctttctaaatattctatgatatctagatttctggtttgggaatgcccaaatctggagaatgtcacaaaattttaagatctggtgaagaagagtgatagttaacctgattgctgacgcaacctccaatcattgtcacgtgacattggagcagagatctatatatatagttattttcacgagtttaatttaattatttttgtccagtaaaatattttagcactattttttaaatcatattatataatcttataatcttattgcagaattacaatttttttaatagttatcatgattgtgatattcaaacttgttgaatgtgtttcgtacatgatgatgtgataagagtataaaaaaattactctcaaaatgagtgaaacaatgttattgtaattattatattagatgcaaccatattaaatatttgggccattttgttacagagtactatgtcgtgtctttgtttagggatgaagacataccaaatgcgttataattaattatgatattttctaatnttttattctataataattga

SEQ ID NO: 69889 - DNA, 667 bp, Glycine max
  Clone ID: PAT_MRT3847_34121C.1
ccaaaaaggaagaggagaaaaaggaagagcctaagaaagaagaagagaagaaggaagagccaaaattcggcgcgaggaagaaggaagaggagaagaagaaagaggcaccaccccctccaccagacccagttttagagctggtcaaggcttatagggcttataatccccacatgaccacatactactatgttcaaagcatggaagagaatcctaatgcttgtgtcgtttgttaaataccaagctgtggaagaaaacatgaggaaaggaagacatatataaaaatatatatcaaactttctctatttgcaatggaatcaatcaggtcaatttctctttcatgaatcctgggagttcataatatcaagatagaaacaaacaaacaaactcctttgtatatattttggtggtggtgtctcctctagttttgttctgggacattagcaatgtgtagagagtaggaataaaattttgggagatttgttttgacaatgatcacaaatgtaatcatatactattatgttaatttccttttttttttttttaagttgctgcctgcatgtatacagtattagtggaatcagcaattagtaattttgtacgttgctgatgccaacaggaatttatgagaagaaaaaaagagaaagaaaaagccacacacagaacccag

SEQ ID NO: 69890 - DNA, 1849 bp, Glycine max
  unsure (1)..(1849): unsure at all n locations
  Clone ID: PAT_MRT3847_34122C.1
cggtccgnaatccccgtcgacccagcgtccgtccacttgttaccattacattattttgctgtgaatattattactcattacatagtactacatcttcatagttgttgatgttttcctcctctccctagctttttcttttctctctcctattctgcaatttcggattttccggtattaaaatgtttccaactcctcactctctgtctttttcaacatagagagcattattcgatttcgtattgcactctctcatctcatctcccattctcattctagctaacatccccttttcttcttctcacttctctccaagttttttcttcacatttctctgcctttgatctgcacacacaacaacatccctctaaaaaacatagagggataaaataaaaacatgaagaaatttgtactcaagttagatttgccagatgacaaggcaaagcagaaggccctgaaaacagtttcaacactttcagggattgatgccatctctatggacatgaaggagaagaaattaacagtgataggaacagttgatccagtgaatgttgtgagcaaactccgcaagtattggcagacagacatactctcagtaggtccagcaaaggagcccgagaagaaagaggagccaaagaaggaagagccaaagaaggaggaagagaagaaagaggagccaaagaaggagggtgaagccaaaaaggaagaggagaaaaaggaagagcctaagaaagaagaagagaagaaagaagagacaaagaaagaagaagagaagaaagaagaggagaagaagaaagaggcacctcccccacccccagacccagttttagagctggtcaaggcttatagggcttataacccccacatgaccacatactattatgttcaaagcatggaagagaatcccaatgcttgtgtcatttgttaaaataccaagctgtggaagaaagacatataaatatatatatcaaactttctctacttgcaaatggaatcaattaatcaagccaattctctttcatgaatcctaggagttcataatatcaagagaagatagaaagaaattaaacaaactcctttgtatatattttggtggtggtggtgtctcctttagttttgttttgggacattagcaatgtgtagagagaaggaataaaattttgggggatttgttttgacaatgatcacaaatgtaatcatatactattatgttaatttccctttttttttttttaagttgctgcctgcatgtatacagtattagtggaatcagcaattagtaattttgtacgttgctgatgccaacaggaatttatgagaagtgtattgttcaccctttttctttctaaatattctatgatatctaaatttctggtttgggaatgcccaaatctggagaatgtcaccaaattttaagatctggtgaagaagagtgatagttaacctgattgctgacgcaacctccaatcattgtcacgtgacattggagcagagatctatatatatagttattttcacgagtttaatttaattatttttgtccagtaaaatattttagcactattttttaaatcatattatataatcttataatcttattgcagaattacaatttttttaatagttatcatgattgtgatattcaaacttgttgaatgtgtttcgtacatgatgatgtgataagagtataaaaaaattactctcaaaatgagtgaatacaatgttattgtaattattatattagatgcaaccatattaaatatttgggccattttgttacagagtactatgtcgtgtctttgtttagggatgaagacataccanatgcgttataattaattatgatattttc

SEQ ID NO: 69891 - DNA, 501 bp, Glycine max
  unsure (1)..(501): unsure at all n locations
  Clone ID: PAT_MRT3847_34123C.1
cggctcgagatccacagttagatatcccaccacaggatagaaaacaagggcctcaccggatcttaacggatcattccctccatttttggtgggcagccactccttatagggagaggggtgaacccgctattattattttcaaccacctggtcaacttttgccaaaattaggaattcctgggacaagaaccttttttaaccttggcccgaatgggttggggattgaccggttttttggctgtttcttctagaaatattcaatgctggcaaaatcatcaatagatttacaaggattgcgggtgagattttcggcatgttgatcacagtcttgttcattcaagaggctatcaagggaatggtgggtgagtttagtgttcctgaagaaggagacccaacattggaaaagtacaaatttcattggctgtatgcaaatggattgctgggtattatattcacctttggcctctctacactttttatnaagcagaagagcaagtcatgg

SEQ ID NO: 69892 - DNA, 237 bp, Glycine max
  Clone ID: PAT_MRT3847_34124C.1
aaataactggcactacacaaattctgcatatcgagtgccctgatgacctgctagatgatgggttatggtgcgagtagcagcataaagggatgagggtggcaaggcaagctcttgcattacaattagagtagcataacttaacagctgaactctatgcaaaaggcaaccaaacagttgtaggtaataaaaaaaatgctggaggatgaaatgaaatatgtttgtttgtaaaaaaaaaaa

SEQ ID NO: 69893 - DNA, 357 bp, Glycine max
  Clone ID: PAT_MRT3847_34125C.1
ccgggggggtaacaggaccatttaatttcccgtgctagttactattaaatatggggggagccctttcatccatgcaaaaactgggattacttcctgaatttacattgactgcatctaaacttaaataggtttttgtacattgaataatcaatctgggcttgacaatagaagtcccatttttcaagctttcaccaacttaaaaactcccccctaaagacatttaagccttacaacttatttaaacaagttttctattgtttctccaaggcttgcaataatagagttgatccaacccttgtcacttgggggtgaaagccgcaaaaatagtagcctgaccctgatcttctaggtgagcaa

SEQ ID NO: 69894 - DNA, 274 bp, Glycine max
  Clone ID: PAT_MRT3847_34126C.1
ccacgcgtccggtctttgcaagtctatcagcagagttggagctaggaaaggagcatattggagatttagaggcttaatatttcttccaatattatcatgttgtatatacattatgtttcttcaccctctagactgttagaacagaaagccaattctttataggatatgttgtcatttgccacgctcttactcttttcccttgcatctcttaatatcatggatgcattttttttttgaaattgactattatgaaagaaattatttatttcagaga

SEQ ID NO: 69895 - DNA, 367 bp, Glycine max
  Clone ID: PAT_MRT3847_34127C.1
ggggggccccgggtaaaaaacgggggggttccaaagggtacacccccccataccccccaaaaaaacaatcgggtttggaaaaccggttttacaaaccttaaaccccccttgggtaaagggggggggggcccccccacccctttttctggtaggaccttgggggggggggggggcaccccttttgggaccttgggttaataccaggcccgggggcccccatttcccggggttcccggtttagggcatggggccccttgggagccataaggggttggtcccccccctttttttttaaagccttttggggttttctggcctctgggcttgcaagagaaaacccccacccagtttcaaaaggtgggggggg

SEQ ID NO: 69896 - DNA, 520 bp, Glycine max
  Clone ID: PAT_MRT3847_34128C.1
taattgctgtttgtgctgatgatcctgagtataggcattacaatgatatcaaggaccttcctcctcaccgtttagctgaaattcgtcgtttctttgaagattccaagaagaatgagaacaaggaagttgcagtgaacgactttcttcctgcttcagctgcctatgaagctatcaagcattccatgaccttatatgcggaatacgttgtggagaacttgaggcggtagagcttggaattttgtttggttgtgaagacatacatgctttcaaaggctgctattataattgcgattatgacgataagaaaacctttctatccttgtcgcgtgtgcatttggtctcagggctggcaacatgcatattctgcacatgtgcttaattttgagtgaatgatttttatttatttattaatatcaaagttttaatgttgtagctcaatctaccaaatatttggagcatatgggattcctatatatcttatatatatacataaaacatttttacaacaattatttcttac

SEQ ID NO: 69897 - DNA, 1198 bp, Glycine max
  Clone ID: PAT_MRT3847_34129C.1
tacggctgcgagaagacgacagaaggggatggcctgtgtctgtgaaacaacaaggagagcgggaacgcgttgcgtacacctcacatcctcctcctctacataagcgccctcgcatcccattctttgcagactcaacaagcattccactcacacctcatcgtttctctctctagatctctgtttcttctttttctccaaccttcgtttcaccaccacacttacattactttgtcgaaatggctccaccaattgagaccccaaacaaggtttccagctatcaacagtccccaaaccctcgtcttaacgagaggattctttcatccatttccaggggacacgttgctgcacacccgtggcacgatcttgagataggacccgaagctccaaagatcttcaactgtgtggtcgaaatagggaaaggaagcaaggtgaaatatgaacttgacaaaagaactggacttattatggttgatcgtatactttactcatcagttgtttatcctcacaactatgggtttattccacgtactatttgtgaggacggtgatcccatggatgtcttggttattatgcaggagccagttcttccgggttgctttcttcgggccaaagctattggtctcatgcctatgattgatcagggtgagaaagatgacaagataattgctgtctgtgctgatgatcctgagtataggcattacaatgatatcaaggagcttcctccacaccgtttagctgaaattcgtcgtttctttgaagattacaagaagaatgagaacaaggaagttgcagtgaacgactttcttcctgcctcagctgcctatgaagcgatcaagcattccatgaccttatatgcggaatacgttgtggagaacttgaggcggtagtgttgattcctgggtgcttggaattttgtttggttgtgaagacatacattacatgtattcaaaggctgctattataattacgattatgacgataacaaaagctttctatccttgtcgcgtgtgcattggtctcagggctgcaacatgcatattctacacatgtgcttagttttgagtgaatgattttttcatttattaatatcaaagttttattattgtagctcactctaccaaatatttggagcatatgggattcttacatcttatataaagcatttttacaacaaatattagtactatgttttgtgaat

SEQ ID NO: 69898 - DNA, 147 bp, Glycine max
  Clone ID: PAT_MRT3847_3412C.1
gtcgtagtatcagatgtgtgatgtggacatctgcagagatgtactgtccaacgcgacacggctatcatgggaggcacaaggtgtgtgaggctcgcagcaaggcctcataagacgcttctcgccgatcacatgcaacgattctgccag

SEQ ID NO: 69899 - DNA, 179 bp, Glycine max
  Clone ID: PAT_MRT3847_34130C.1
cccggctcgacccacgcgttcactaacccgtggcctccctagggccgcccttttaatctttaaatttatgagactatagtcaagggatggggtccgactaacacatcaaagttaataccaaaggctggttttaactcgccaggtgccaccgttacacaatgtacaggtccactttcatg

SEQ ID NO: 69900 - DNA, 331 bp, Glycine max
  Clone ID: PAT_MRT3847_34131C.1
gggttatgtgatttcccatgtttgtgtccgaacgggtggccctaaaagaccagctcttaaatgtattgttaatggtatgccatcctaccacggtcttatttaattcatatcttaacacgcttataggtatggtgcctaagagcaagctggaatgtatttaggaggcctcaagtgtctcatttcatactgggacaatgaggacatctctcacaaatattttgaggtcatgatgttggatgatgcccacagtgctgttataaatgatccaccaattaactggatctgcaacccagaccatatacacactgaactgcgtggtctcacttctgct

SEQ ID NO: 69901 - DNA, 279 bp, Glycine max
  Clone ID: PAT_MRT3847_34132C.1
ctgcgaactaccgctatatgaatgagagtatccaccgggccaacgctggggatactgagggccatcctatatttgcacacaggtcgatgtgggaccctactggcgtcaccctaattagaactgttctgcgacgcgcacagaatagatactgcagggacgtcaccgacaaagtctgatgtacaactagagcgtacggacttatactataacaaacgttcctgggggcgcataacgcgactcacagagctgataaaactataggccaccaccttacacagt

SEQ ID NO: 69902 - DNA, 198 bp, Glycine max
  unsure (1)..(198): unsure at all n locations
  Clone ID: PAT_MRT3847_34133C.1
gcgaggagtttttaggttatgttatcaagcactagagactttttatccccgtagatagtagtttcgctagagattatacttgttgtgcacgagnntcttttttcttggttatgaggggtaagaangaannngtgganaaccaganntggagtgagctttttgggggctgctttgcagttctgggtttgaggtaccctt

SEQ ID NO: 69903 - DNA, 126 bp, Glycine max
  Clone ID: PAT_MRT3847_34134C.1
cgcatcacggaaatacagcgcatgagaattgatatttatctggcgaaaagttgcgaaacgtgacacaatgataaaactggctcgtaaattaccttgttaaactggcaaattgcactatatttattt

SEQ ID NO: 69904 - DNA, 200 bp, Glycine max
  unsure (1)..(200): unsure at all n locations
  Clone ID: PAT_MRT3847_34135C.1
tncggtgtcccctttttttttttttttgtgagggaggtgaatagcctatatttatctttttttgataaaaaaaatattcaagagtgtgtatctaaatcattggcactggcaactctatgagattaatgaaatacctacttaatcaacaccctatttgacatggaaaaaaatatctacccaacaactggaatggaaccaaa

SEQ ID NO: 69905 - DNA, 527 bp, Glycine max
  Clone ID: PAT_MRT3847_34136C.1
tcctctagagcggccgcctttgttttttttttttttgttgagccactgcacacggtgcagtgtcagttgtagcattcacaacataccgagtttctttttaggaggtaaaactctacgagtctcacagcatagtaaaacgtagccagctattactagatacgagtagcattttttaagtcgcaaacaaaagggatacagtcccggcttaaggggtgtaaaatcagcttcactatcttcatgttcgccgcaacgggaaacagagcacaatcatctttgggtccaaaaatttacggcaaacctttgcgacgacgttgatttgtgaaccaatgacgagtttcctagatgacatactctgcttactgttgcgcgcactgaactctctgggcacctccaggcatctcatcgtcctcatcatacgcctcctgagcagcttgggctttcctgcgcatctcttcctcaatgttgttgacatcgtgcatcgtggtctcctcgcattcatctatctccatttctgtcagctgggatgc

SEQ ID NO: 69906 - DNA, 385 bp, Glycine max
  Clone ID: PAT_MRT3847_34137C.1
tgggcactagtataaatccaaaattcaagtattattatttttatgtataatagtgacaacgatgttttaatttaagacatcctgtgaactattcaaaccttcgctactccaaaattcaagtattgttacaaaggattcttctgctaattaagtgttagctgcctaattaatggttaataatttctaatagtgatctcttgactttcaaccactggttaaattttttaatagaaaatcatattactatttttttttttttaaaaaaaaatgaaaagatgaaatgaacatcgtctttctcttaccttaaacacctgctcttcctttttacaagatcttcctcctttgaagccaaaccctgatttgctagtaataatttacttaaatg

SEQ ID NO: 69907 - DNA, 311 bp, Glycine max
  Clone ID: PAT_MRT3847_34138C.1
agccaagagaattacatatatatactagcaaaggaaacgggttagcgagcgcgttaactcacaaaggagtctacatgagggatcagcctctgatcacagggacgcacaaacctatggagcaaagatacttattgccttgttcaggggcttgtacacttcttaatgggtggtgaacagactggttccattaacgagctatcgacagcattgaggactggacgatcagtataaccgtcagaatcctacgtcccagactgatgcacagggacacttggtagtgggatcacacgtccctggccctaggtactatc

SEQ ID NO: 69908 - DNA, 339 bp, Glycine max
  Clone ID: PAT_MRT3847_34139C.1
accagattaagccagaatgatactttctatttgcatatgcaatcctacggtctattccaaacaaattaggaggtgtactagctcttctcatatccattttgattctttttttattaccattaataaggaaaacaaaaataaaacaagggactcaatttaaagtttttgggcaaattatattctgaacttttgtaagaattttttatttattaacatgaattggaggagaaccagtggaggacccatttgttttaattggacaaattctaacagttttatatttttttgtcctgatgaatctgccgacaatataattttttttttttttttttagaataa

SEQ ID NO: 69909 - DNA, 478 bp, Glycine max
  Clone ID: PAT_MRT3847_3413C.1
tccaataaaaagcttcacatatattttaagacaacagagaatttacttcttcgatgaagggaagtaaaatacaattgaatttgggcgaagtgactaaaaattcttaagggcgttaatgaaacatgggcaagggttttgcagaaatagggagccttcctcctcccctttcactagaaagatatctcttcccaacctattgaagcactacatttcagcctaaacaaacaaatagaaatacaatctttggaagagataatgtaacatttctcagcagtgtaacctacaaccatacaggtctccgatgaacacttcggttcaccaatattcatgccttgtgtaagagccaacctctcgtagcatacaaagctagacagaaactgaatgcaggatacggctcgcctgagatagcggtttacaaagtagcatgagtgcacagtctactacatttggggaaaataaggtattgcacagcatgagg

SEQ ID NO: 69910 - DNA, 400 bp, Glycine max
  Clone ID: PAT_MRT3847_34140C.1
tcctgcttcttaacatccttactgtccgtcatacaattgtactcacatagtgtcggttaaatgctgagccctaccactgtcaatatacttctcactctccaaacgcctcaactgctgcttacgtacatttaaactcagtatactactactatcaccagactaactaacacacaattcttccattccaactcactattccagcatccacttctatgtattgatccccacctggtaattctaagtgcatctaagtattataccaattctaatcctcaagttaggactatctacagacacatccacatgtactaacgctatcgtaggaatataagaccacatcacttgaatatctcagttgctggagacaacagatctcttagaagaagcctatcatcatgtg

SEQ ID NO: 69911 - DNA, 1603 bp, Glycine max
  unsure (1)..(1603): unsure at all n locations
  Clone ID: PAT_MRT3847_34141C.1
tggcatggattgttgagcattcacatgcctgcatattctgattctattattaagggggtctctacagtcatggtttcatactccagttggaatggtgtaaggatgcatgcaaatcgtgatctagtcactggtttcctcaagaatacccttaagtttaaggggtttgtcatctcagattggcaaggtattgacagactcacatcaccacccagttcaaattacacatactctgtccaggcttccattgaagctggtgttgatatggtgatggtcccatttgaatatggtaagttcattcaggatcttacactcttggtcaagagcaatatcattccaatggagcgcattgatgatgctgtggagagaattttgcttgtaaagttcaccatgggtctttttgagaatcctctagctgataccagcttagtcaatgagcttggaagccaggaacacagagacctagcaagggaagcagtgagaaaatctcttgtgctgcttaagaatgggaaaaatgaaagtgcttctcttctgcctcttccaaagaaagtcccaaaaatcctagttgctggatctcatgctgataatttgggttaccaatgtggtgggtggacaatcaaatggcaaggattcagtggcaacagtgacacaagaggaacaactattctcaatgccataaaatcagcagttgatacaagcacagaagtagtctttcgtgacaaccctgacaatgagtttgttaagtccaataacttcgaatatgccattgttgtagttggtgagcctccttatgctgagactgctggggacagtacgacacttacaatgatggaatctggcccaaatgtcatcaacaatgtctgtgggactgttaagtgtgttgttgtcatcatttctggcagaccgattgtcattgaaccatacatttcttctatagatgcattggtggctgcatggttaccaggcactgaaggccaaggcatgacggacgtcctttttggtgactatggtttcactggtaagcttgcgaggacatggttcaaatccgtagatcaactcccaatgaatgttggggatcctcactatgatcctctttttccttttggtttcggactaacaaccgaatccgtcaaggacctggtagcaaggtcaacctcagctgctgttggtgcaagggcttgtatatttaccattatagtgaccctaatcatcagcttatacttacctggttaagcacaatttatgggagctttattggagcgggaggctagagaactaacttgggatacttcccggcttagtcttattctagtgtaattcattgtataccattgagacattattattcataaactagtaatttgagcacattctttttcataattggaacttggtttatcagactatttaggtattaaatctactaggcgttaagtagttaagttatttgttagagtactgcaaaaatgttgatttgtgttccgtgcctctactcgaatcaccggaattaattcttcaaatgcaagtcttttttgtatatagcccaaaatcaaaataattaggaagcaaatgtcctctaggattggtactatttccctnnnnggtt

SEQ ID NO: 69912 - DNA, 389 bp, Glycine max
  Clone ID: PAT_MRT3847_34142C.1
tttttgttaagaaacaaatatatttatagattcctacgagcacacgcaaagggggtattgttaaaaagcggtccgacggagcctcaaaccgatgctctaaaacttacaagcactaaacttttatttttttgtctttggattgtaacagtaccctcatccaaagaagtccaaacatgggacttgtcattgcagactatataaacgagccgcgtgaatttatgccagtcatgttaattcttaccctaggcaataataattactcgccgcgctcgatattgtcaaacccacaatttattaaaaattcaaaatccgctgtaagggtaccaactattgtctgaaaagattggtaactaatacgtatttgcctgaactttaccttattgggattt

SEQ ID NO: 69913 - DNA, 128 bp, Glycine max
  Clone ID: PAT_MRT3847_34143C.1
ggaaaaacggggaaaggtgggagtactggaggcgccatctatgagacttggaagtcactcgttgtggagcccatcttgagtgcagggattctagcaacccacgaatgatagaaggtgcatgatgtggc

SEQ ID NO: 69914 - DNA, 812 bp, Glycine max
  Clone ID: PAT_MRT3847_34144C.1
ctaaaatccatgtctcggggggcaaaaaaaaaaaaggctcgagggggtcaagaaaatcctaatcctcttgggctctttgtgtctgaagcttcactcgaaagtggaaacactgctctcatcgactcgaaagcggtttgcggtttccgtcatcggcgagacgccgccgccgtctggaattggaagaccgtcgcagtagtcgcaccatcgcagcacgcattggaaacggaaatgggttcttgtgctacatcatctgttctgactaatcaatttattccgtggtctacaaccaatactgaatctcccttggactccaaattgggcgtcatattttataaaatgtacagaaatacaaacaaaagacaactcagtctctcttttgcttgggatagttataaaatcaggagtattggtgcgattaaatcatacaaagatgtatcttattttcaaaccgaacaagtaggatcatgggaagatccagatactggaagtgacagtgagtgtgatgatgaagaatatgaggaagttgaagacgagaactttggatttgaaagtgattcagaagaggaagggatgaaggcttcagttgctactgatgttaatataacttcaggggacaactatgaagaacttattaagaaagagattgaacagcttctggaaccggaagaaagagcaatattgcaacagaatattactcctaacttggaaaaaatatcaactgaaaaatggagcccgctgcacactcttgtgctatcaatgcagatgagttgtgtggataagcttcttgaaatggtgttgatattgatttacct

SEQ ID NO: 69915 - DNA, 356 bp, Glycine max
  Clone ID: PAT_MRT3847_34145C.1
ataatcctggtccctcaggttctcgcctcctgggccccattcctcagtctattccacagcacactgtctggaatcaaatggcaacagcgagaacaccattgcacttcgattctagcaccgccagctttagccactgtcctattggccctctccagtggaggaattctactggacaaaactggagataggatcacactcatacaaaatctctccagttaggatcattgcgagagctgctggtcgacagaaaggctgattaatggctcagactgcgccgcccgggactgcaaccgactcctggtcagattgggcctgattggcacaagggttcttaacaatcagtcacagcacacagc

SEQ ID NO: 69916 - DNA, 786 bp, Glycine max
  unsure (1)..(786): unsure at all n locations
  Clone ID: PAT_MRT3847_34146C.1
gcagtggaggcggtgatgtcggtgcaggttgtgtcagcagcggcagccgccaaggtgcctgaggtggagctgaaggatctgagcccctccgaggcggagccccagttgggactgagcgcggcggccgtgggcgccatggtacccccagcgggtggcggggacccagaggctccagctccggctcccgcggcagagcggcccccggcccccggcccgggctcggggcccaccgcggctctgagccctgcggccgggaaggtccctcaagcgtccgccatgaagcggagcgaccctcatcaccagcaccagcggcatcgcgacggcggcgaggccttggtcagccccgacggcacggtcaccgaggcgccgcgcacggtcaagaagattcagtttgctgaccagaagcaggaattcaacaaacgtcccaccaaaatcggacgtcgctctttgtctcgttccatctctcagtcatctactgacagctatagctcagctgcctcatatacagatagctctgacgatgagacatcccccagggacaagcagcaaaagaactctaagggaagtagcgacttctgtgtcaagaacatcaaacaagcggagtttggacgcagagaaattgaaattgctgagcaagagatgcctgccttgatggctntaaggaagagagcccaaggagaaaagcctttggctggagccaaaattgtgggttgtacgcacatcactgctcagacagccgtgcttatggagacactgggtgctctgggggcacagtgccgatgggct

SEQ ID NO: 69917 - DNA, 208 bp, Glycine max
  Clone ID: PAT_MRT3847_34147C.1
ttcttttttttttttttttttttctatttttttttttttttactgatttacatagtttcgatctcatactacatgaaatttgacccggtgggacatagacaaggacagaggggaaccatacgagagcgtgcatgaaaaacggaccacatgggccacgctaacatagaaaacactataagcctaagaagtgaagccatataggaccaac

SEQ ID NO: 69918 - DNA, 495 bp, Glycine max
  Clone ID: PAT_MRT3847_34148C.1
gagcatgcaattcaacctttgtagagtatagagtaacagggagaggaaggaggtgtagaacactagaacagatggatgaggaaaaacaatattatcgggacaattgaacaagtgaatcgattgtatacacagcgaagtgaatgaaagaacaaaaatgaatgaaaaaaaaaaagaaagaaaaaagaagaacctttacaaattagaatgatcctactgatgcaaatgcaatttatggaatcctctaggacctctagactggtaaaggtccaacttggtcttggactccaacaacaaggcctcgattgcttggtcattagcaatggaggattgcttggaggcccattcaatgactccaagcacctcagcctgagcaagttcctcgctatcagggacgtgcattgcaatgtaggagagcagaaccagcgctggaatctgaaccatctctttccctccaaaatacaccagctgaatcaagtgcttggcccccgccgggga

SEQ ID NO: 69919 - DNA, 530 bp, Glycine max
  unsure (1)..(530): unsure at all n locations
  Clone ID: PAT_MRT3847_34149C.1
ctcgcacttgttaagtacgaatttgtcgttggagtattgctcagcgcactacttctgcttctgttttgtccacattccagcataacaacctcgttcacctacactcatacctcttcagacaacatggcagcacctcacaaagtatacgacgccatcatcatcggcggcggcccagccggcctctccgccgcccttggtctgtcgcgcatctgccgctcctccatcctcttcgattcaggcgaatatcgcaaccaaggctccacagccatgcacacgtacctcacgcgggacggcatcgaacccggcgatttccgctcgacagggcgcagggagattgagaggaagtactccgcctacgcgacattcgtcaacaacaaaatagtcagcgtaaagaacacggacatcttgccagactacaagggcttcgaagcggtcgacagctccaatactacgtaccggngccgcaagctagtgctcgcacccgaaccgaggatgttctaccatcagacattgaangatataaagagaac

SEQ ID NO: 69920 - DNA, 322 bp, Glycine max
  Clone ID: PAT_MRT3847_3414C.1
gcaaacctcggaatgcgcctcgcgaataaaaaaaattagaagtgttgatttaattgcaatttacaaaaatattcgatacacgatcttcaaattgcaattaggaaaattagaagtgttgatttgggacaaaaaaaaaaaacaaaaaagaaattaaatgaaataaaaaacaaaaaggataatgaatgcttttgaaaaaaatgaaatcttcttatatatataaaaaacaaaacattcggggggcacccctattttactacgatcccattccaaatttaaattcaagcaatactcttggctgtgaccaatttttttttaaaggggg

SEQ ID NO: 69921 - DNA, 209 bp, Glycine max
  unsure (1)..(209): unsure at all n locations
  Clone ID: PAT_MRT3847_34150C.1
gggtttcctttacatnncnngccactntctatatatccanttcataaataaccaaataatcagttactgactagctgacttcaaccggaaccaagggacgatgaaatagaagctgctgcttagggggaggagtagcgagtgtgggagtaacatctgncactggaagcgtngcgggggggcgtgtttggcaggggaaagggggagggggg

SEQ ID NO: 69922 - DNA, 483 bp, Glycine max
  Clone ID: PAT_MRT3847_34151C.1
aaaaaaaaaaagaaccctgggccccctttttaacgtttggggaggggtcaggcttaaaccccatcccaaagggaaaaaccccccgcttttttggggggggcccgaattagatggggccaaaaaaaaggggggggggccaacgggaatcagggggaaaaaacggggaaaaacaggggagaaaaacatcatccttttgggagggttttcctttaaaaccttaacttggaaacgggaattccccaaaaaaaaaaggggggttaaaaaaaaattttggttccccctttaaaaagggtaaacaggaccccaaagcccaccccactagggattaaggggttaaaaaaaaggcccgttggaaaggaaccaaaaaaaaggtgtttacccgggtaaagcccatttcaaaccatttacggagggggcaacgcaaaattgaagggtttagaaaggggtaaagctcaattttttttaaaaatcgcccaatttttt

SEQ ID NO: 69923 - DNA, 355 bp, Glycine max
  Clone ID: PAT_MRT3847_34152C.1
ccaaggttcaatcttgccatcatcaatggcctcagcaagaccttactccaatggtcttgctgaggccattgatgatggcaagattggaccaagggatgaccccaacgtgcgtctcaagatcttgtatgaagagttcgcttgggacaaggtgcttgccctgaagaactggtggtttggccctgaaacccttggtcccatcatggtggttgatctgagcctaggagtccaggatttgcttgaattctaggttttaccgggtgctggtattctgcggtccattataccaggtgcctcggctgattaaacatgagagccttctgctttgaatgttgcatgttgagctgtacgctgatgc

SEQ ID NO: 69924 - DNA, 350 bp, Glycine max
  Clone ID: PAT_MRT3847_34153C.1
atcggacttgaaactctacataattgaataatttaatttttaaaaatttaattatgtttcaagtctatcaatatttgaattttcctttacattttaactctattaagagcccaaaaataaaagtttaagtagtcctctaagtaacacatatcttcttttaaattctaaagaaaaacaaaagtaatatccataactttcccaaggagacatatggtccatgctgcagtttaacaatgtcctttttactatcaatgatttcaaggcatccatctggattgcactctcccaatgtcaccggtgtaaaaccacctcattccccttttctcaaccatgtatgattcttttgtttt

SEQ ID NO: 69925 - DNA, 465 bp, Glycine max
  Clone ID: PAT_MRT3847_34154C.1
ttttttttttttttttttttttctttttttttttttttttttttttttttggcgcaaaaaaaagcccaaggccctttttttactagtcatagaacgggatcccctcatttttttataaagcaaaagcccccaggggtcccaattttaaataaaattaatcccaagcaaatgggggtaattaattttggccccaatctgttgtcgcaatttgactgctggggagtacttacccaaatttttgggacaaaaaagggccccatttggggacaaaagaggaccaaactttgggggatatatgccctacccatgacttatttccatataggtaattagggtataaaccacaccgcccgggggcgatcttaatcccacatcaatatgaacccgggtccctgtataaaggaatcaattaagtggccataaagatggggcccaaccatgggcctggtggggcttttaaccaag

SEQ ID NO: 69926 - DNA, 764 bp, Glycine max
  unsure (1)..(764): unsure at all n locations
  Clone ID: PAT_MRT3847_34155C.1
gaaagacaaaaaacattatcttcaactcctttgctcgtgttgtgttttggatatttgagtgagagaacagtgaatgaggagttccaattcccatattcaatttcaaatgttcttctccatgcagcttctttgcttctacaagcacccaccaccactgtttgtacacaatattaatgaaggcatttttaagtacaagaggtttttcacaaacccttcttcttcttctcgtggcatagttcatgcagtgaaggaagattcacaatcacagcaatatgaggtagacccagataaagccagagaagcactcaaaaagcttgatgagcaaatccagtctctctccaataaaaaacaagtctccactccaaaactcagagtttcggacatgaagcttcccacagagcaagccagtcgcaatgatgagaagttagaaatttcagattcgttccttacaactttagctgctggtctggttctcttcactgtattttataatgtactattctatgctgtaattaagcctgccatcgatggttcataacatctccatatatggctcgtgtgtgtatacatagaagaagaaggttttatagcatataagaacctcgttgttatatatacatatgaaatggaagttggactatatcatttttctcacgactatatatacatacttactctcttgcatgttaccaaaactctaattgtgagttgtgagttaagggaatctaattcaattgttatttaagttattnnnattctttcat

SEQ ID NO: 69927 - DNA, 2518 bp, Glycine max
  Clone ID: PAT_MRT3847_34156C.1
gcgcccacgcgtccgtacggctgcgagaagacgacagaaggggggggtgttaaggagagggtgagatgccttcgtctaagcttgctcaaactggcctcgtctatgctgtattgggcagttgtggaatacaaagatctttgaacatctcctttactacatttttgcaacacctacccctttctctctctctctttcactcatcctaggtttgatttttccttctctcaattcccaacctcgcatctcccattattttattctcaaaccacgacaacaaaagcacaaacttggtttctcaatttcttcctctcgatcctacccgagttaaattaaaaacaagaggagagaaaacaaaacagaacaaaataaaggtttggtcttttgaagtgggagtgaggaatcagacatctgggttggttgcttgctaggttcggttaatgttagaatgtgggatctcaacagactcacccgatcagaggattaacaaggacgaggaatccgaagaagggtgttcttccctcaaaataacttccttcgatggagatgacgagaacaacaacaacaaaggcaaaagggttggatcttgtttccaattcaagctcttcagcagtagtcatcggagacgggtcagaagaagagtacgaggaggaagaagaagatgaagaaggtgttggtgttggtggtggaagaagtatgaagaaacgtagcagcaagattttcgggttctctgtgacccaaaatgaagaagagtccatggacagtgaccatccacctgtgactagacaattttttccggtggaagatgctgacgtggcggttgcaaccggtggtggtggaaccggtgtaagctcaacgttccctcgtgctcactgggtaggtgtgaaattttgccaatcagaaacacttggcaccggaaaatcatcagtggaagtttctcagcctatgaagaagagtcgccgaggaccgaggtcaaggagctctcagtatagaggagtcaccttctacagaagaacgggtcgctgggagtctcatatatgggattgtggaaaacaagtgtgtctaggtggatttgacacagcacatgcggctgctcgtgcttatgatagagcggctattaaattccgaggagtggaggctgacattaacttcaatattgaagactatgaagatgacttgaagcagatgagcaatcttaccaaggaagagttcgtccacgtgcttcgccgacaaagcactggatttccgagaggaagctccaaatatagaggtgtcactttgcacaagtgtggaagatgggaggctcgaatgggccaatttttagggaaaaagtacgtttatttgggtctctttgacactgagatagaagctgcaagggcttatgacaaagccgccataaaatgcaatggcaaagaggctgtaacgaattttgatcccagcatctacaacaatgagctcaataccgaatccacaggtaacgctccagatcacaatctggatttaagtttgggcaatgcaacttcaaagcctggcaataatcaagcgttggggaatcacgccacaaatgctgtaacccatgatcagcacctgccatctgagtctaattggcgtaatgggggaaacaagcctaagctggtgaatatactccccaaaccatgtaatagaagcaacaacaaggactcacatggaagggatgtgcacggggagagtgaaacactgaggatgctaagtcaaacccaccttcattctccagccttcaatgaaatgcaacaaagatatggtccctacaggtctccgggaggagagtctcaaatgcttcaaaattttgcgcacattcacccaccaaattttcattttcccagaagcagcattggaggccgaattgggagtgatctttcattatcagtggctgatcaacaacagtggcaaaccgggccttcacgttatttagcaactgctgcagcatcatcaagtttccaacaagagataagaccctcttctcaaggttggctgcagaaaaatgggctccacagtctcatgagaccctcatgatccctattataaatagagaattttctgcctcgccaagtactagttacattcaaataatcgtaatctgctccctaagtaatattattattgttacccttccagggtttcacccccaaaaaattattattttcttttcttagcatgtaaaataggatgcagtgttagattgtgtccatgtccaacccagacccctcgtcacacaaggccacaactttactattgaggtgaaaaagaaaaggataaaagaaaagaaaaaaaaaagaagagaaaatccaaattgggaacttactactggtctggggtcagtcaaactaacaaacggacgaaatctttaactagatattctgggctctgactaaaattttaggatcttatataactctgattttattgcttttctgcggttgtggtatatttatgacagcacctattcgtttcttgatttgggatgtattgctatcacatataa

SEQ ID NO: 69928 - DNA, 559 bp, Glycine max
  Clone ID: PAT_MRT3847_34157C.1
ctcgagccgaatcggctcgagcaaaatcatcctcaggaagcatttgctgatgacaatgccagaagaagcattgtcttcccaccttctcctaatgctggtgggtcaatgatgagaaccacatctcagttgacttatccagatgccaatctttcaaaagaggctttaactgcgattagtgtagtccagtctctaaatccagcttcaactattgctcacatatctggtattggtgtaaaagccatccctgctatttcacacttatccaatctccgctctgtcaacttgtcaaataatttcatagttcacatctcaccaggagttctaccaaagggtattcaaacacttaacttatcaaaaaacaagatcagtgcccttgagggcctcagagaattgaccaagttgcgggtacttgacctaagctacaaccgtatctcgagaattggacaaggtgtgtcaaggtgcacacttatcaaagagctatatcttgtggggaacaaattaagtgatgttgaagggctacacaggctattgaagctaacagttctagagttgagcttca

SEQ ID NO: 69929 - DNA, 264 bp, Glycine max
  Clone ID: PAT_MRT3847_34158C.1
ggctcgagcactctcgtgcatggggcatatttgttttctatttcggatctagatgtcttacctggggccgtctggctaaacgtgatgacgcaatgcatggcctatcatgcggcctatatggcaagctaatgcctctgtggcgcctacgtcttcttgcctggacctgcctgtatctggtgcgcgagcttgagctctgaccacctccgccttgattgaggtccacactgccgtacccgctgatcaggagaggtggatatggcgctt

SEQ ID NO: 69930 - DNA, 368 bp, Glycine max
  Clone ID: PAT_MRT3847_34159C.1
ttgtgtatatattagaaaaaaaaaaaaaaaaaaaaaaaaaaaaaaaaaaaaaaaaaaaaaaaaaaaaaaaaaggaaaaaaaaaaaaaaaccaaaaaaaaaaaaaaaaaaaaaaaaaaaacgggggccgcccaaaaggatcaaacctaacgtacgggggaaggcaacgccaaacccctccaaaagggcccccaaaatccaatccaggggcggtcgtttaaaaaggccgggaggggaaaaccccgggggtaaccaaattaaaccccctggaaaaaaacccccttttcccaagggggggaaaaagcaaaagggcccgcaccattccccctcccaaaaatttgcccacccgaaagggcaaagggaacccccc

SEQ ID NO: 69931 - DNA, 293 bp, Glycine max
  Clone ID: PAT_MRT3847_3415C.1
tcaattctatcagaagtatgatcaatactagttggctggtggtgttcaagcattcttaccaagagactaacaagtgtgttgatgctcttgctagaaatgctttggttgtgttcaagcattcttagtatggataagtttttttggtgtttcaacaacctccttctttcgttaaggagttgcttttaattgattcttctggagttgtaactcctagaatagttcctctgtagcttcttcttatttgggcttaggccccgtcttttatatatatataaaaaatatgaattatcaca

SEQ ID NO: 69932 - DNA, 710 bp, Glycine max
  Clone ID: PAT_MRT3847_34160C.1
ggctcgagtggatttggcaaaagggaaacggcccgatgagaacataagggattttcaagagttaatcagacaaaactacaagcaacatcctccatggattatgaccagcagtgtcactggaatgggtagagatgagcttctcttgcatatgtctcatctaagaaactactgggatcagtaggagaaaaagctcaaaattaagcaagatgtgagtatctatgagaaaacaggccatgcgggatcaaagttgaaattacaaaagatgcaactatatggaagaatcatgtgaaagagctatgggttgggttgagccttgaaatatttcagctggatctttcttcaggattcgggatctttgttcttcttgaactgcaacaagatatataacttgcttgggaatcaagtttgagttgtttctggataatgaatttccacatactgacactgagtattagggttaatggtcacgttatatgcaaatggggataaaacatcacaggaaatgttgtatgctttcaactgggatatagtatcgtgctggctttatttatccgtagttgccagaatacatattttggggtaccattgctttggcatttaagattttatggagcaaaactaatctttttgcaatatgtaaacattgtaaatgctttgatgtatttttaaaggctcgaataataatgttgccaagtgtgcgcatgtttgag

SEQ ID NO: 69933 - DNA, 411 bp, Glycine max
  Clone ID: PAT_MRT3847_34161C.1
cccaaaacaagggccttcccattatctttagaggccgtaaaaaaatagaaccagggggatataaaaaaatttccccacccaaattaaaaaaaaaaagggaaaaaaggcgggccgggtaaaccccaaccaaagcccaccgggagggtttttcccatccaaccaaagaaaacccctccgttcttttttttaacagccagccccaagttgactcggttgttggccggggggagccccaatttaattgactcggccatcctttgactcaggggtttaaactaaaaccccgccatgctaaaaccccccccccattttccaaacacttaacaccgttccacgcgatcttttccttcgcacccccccgagttatgcaattttcgactcagcccctcctcaagtctgactcggccaagg

SEQ ID NO: 69934 - DNA, 580 bp, Glycine max
  Clone ID: PAT_MRT3847_34162C.1
gcttgatcctcagagcggccgccctttttttttttttttttttttttttttttttttttttttttttttttttttttttttttttttttttttttttttttttaaaaaaacagcgcgtttttaaaacccaaacttaacaaaggaataaattaaaaccttcaagggcctcaatccaattccctgccattaccttttgtagggatcccaattttataaagattttttttaccctcggcattccctttcgattccgggcataaaaaacatttacgggaaaacccttaacatcaagcaaaagcttttttgcttaacctctccaatttcacgttacaagtttttcacaagtcctactaatccaactaagggaaaatgttttaattacaaccaaaagccgaaaaaaaaaaaacttttacaatatgctagtaatagggacgaggcacaaaaaaaactcttttttttaaaaggaggatgaaaaggggtcaatgatggttggggggagggggccactcaaggggggggcccaattgttgagcgggcccttgccgggggggggggcttggactgcaaaccccaaaaaccc

SEQ ID NO: 69935 - DNA, 2602 bp, Glycine max
  Clone ID: PAT_MRT3847_34163C.1
ttcgttctttgacgtccgggaacattcatctaagtcttgtcctccctccttcttcttctctcccctgcttctctttctccttccaaatcactcctataattttcaattcaaaggtggtatttgtgaaggaaccctaaaatataattttttgaccaaagatggggagaggtaagattgcgattcgaaggatcgacaactccactagccggcaagtgactttctcaaagagaagaaatggattgctgaagaaagctagagaattatcaattctttgtgatgctgaagttggattgatggtgttctccagcactgggaagctttatgactatgcaagcacaaggtaattaattaattaagatcaatttatttttagacaaatttattagtcctttcgctttaaatgatggaaatcgatctaaaattttgggtgcaatattattgtctcagcttttctttgctaatataaaatctgtactatataaagtgaataaaataattacatagatagtactaaaatacaagatgattgtgattctcgtatacttcgtggttggtgtcatgccgtgctgtacgaaacattttatatatgtccacttgcattaggaatatatctgtgactgtgacttcaatttctttaatggttgccaagctataattaaccctctcccccatttgatattgcctaggttgagtgtatataataagaaatgtgcatgcgcgtttgcatggtacggtgttaatcttcatgacactttagcatttctgatagcagaataactctgagaaatggttttctcttctgcctcctcaatcttcccaatctttcttggtcttttcctttttgtctccagctagcgcctccagttttgtgttattaattggctccaagttacaacacagtatgatactcctagctaattaattaataaagttatgatgaaaaggacacaaacgtaaccttccactttcactctattaatctaagaactcatattagttttgattgtaggactatttttatgtaggtattttaaactggtaaaacctcatactataagatagaatattacagattaaggcatattgtggtataatatttgggtaatctataacttacctacttgatcgagcatggatacgggaatgcatataacttatattctcgaagcagtaattgagtttattattttttcttttacatcgagtttattatgaattagtactaatctataaaatactctcgtaaaattacttttaacataaattactgaaagaattgttcttctggataagtgagctgccttatattacaatatgattcacgcatgcatgcgacgatgattgtttcacacatgcgatgtacaaagtgaagacacacaacaaaaggaaacaatagatttagctacaatatatatatatatatatatatatatattggaatatgttaaagctatgatgcaaacctaaagttatcaaattaattaacaatcctagttgtttcaaatgtatcggaaatgtctcaaatttcaaaatgtgttggaaatgtctcacaattcactttggatactctgtgtacaatctttagcaataaagtgataacatttgtttcccatactcccattattactattgaattgtgcacctctcattgtattaaaaaactcattttgaaatacaaataggcatattcctaaatgcaatgagagatgtagaatttaaataagagagtgctggattcaaatgcctaaagtgatttaatccaacaccttggatgaatcatgatgagagcttaaatttaagaataggttaacccaatccaactttcagttcagatttaaatactgtctaaatcggttttatctataaggttggtaagttaaatgatttgggtcattaaagtccagaactacaaaaaaaattacattcaaaaaataccaaaaaattaagtgatttagatttttgacaatgtatatcagaaaatgacaaggatgaagctcgtgggtagagttttcaaaatggatcaacctggccaggtcacaggttattagtgaattaaacagattggtccatttagactaaaaaaattagaaatgcattacagaattgtattttaaaaagtcttgcttcaactaggtgcaattgatgttaactagcacgctagccctattgaaatggtatctcgttagacatggtgtgacaatgctgcctgagcaccaagtcaaagaagaaaacattttgtagtggagagaattccccttcaatgttgctggtaaaccttaaatgctcaatccttgaaggtcccgcgctctctctttttggaaagaaggttggagaagattaattaaaagaagaggttaaacccaattcctaagtttaacttgtgagttaagtgagctataggttaatctaacttgaggtgaggattgtttggattaatgaggattttggggccggcatctgtgggagttttctgtcaatttttttttttgggttgatttagatgtatatatgactctacgtaccatgctattctgggtacttattgtgctcaaagcttagctcttttattcttcaataaatacatttttgcttataaaaaaat

SEQ ID NO: 69936 - DNA, 288 bp, Glycine max
  Clone ID: PAT_MRT3847_34164C.1
tcgccctcgcgtccgcttgtccctctcacgttaaacggcagagccactgcaacaagaagcagcagagttcgccgctgctccgcaaccttaccctatcaattttcgtccttgttttcgtaattgcagcgaagaatggggaagcgtaaggagcggattcagaacccggaacccttcgatccgtacggcgccgaccccgcgaaaacgaagaagcgctcgaaggcgccgaagcggcaccagcaggaggagcagttcatcgctcccaaactaagctccaagatcatgaagcgg

SEQ ID NO: 69937 - DNA, 894 bp, Glycine max
  Clone ID: PAT_MRT3847_34165C.1
ttcccggctcgacccagcgtccggctgcgagaagacgacagaagggggatcttacatcaataaaagtcttctaactcttggaactgttatttcaaagttgactgaaggcagagctagtcacataccttatagggactccaaattgactagattacttcagtcttcgctcagtggtcatggacgtatatctctcatttgcacagtaacaccttcatctagtaatgctgaagagacacataatacattgaagtttgcccaccggacaaagcacattgaaatacaagcagcccagaacacaataattgatgaaaagtcacttatcaagaaataccaacatgagattcagtgcttaaaggaagaattggaacaaatgaagcggggtattgtctcagttcagccaaaagaaactggtgaagttgactttgtgcttctaaaacaaaagctagaagatggtcaagtcaagttgcaatcaagattggaagaagaagaagaagctaaagctgctttattaggaagaattcaacggttgactaagttaattttggtctccactaaagcgccacacacaactagattttctaaccgtcctggtcctcgtagaagacattcctttggggaagaagagttggcataccttccctacaaaaggagggatttaatctcagatgacgaaaaccctgatatgcatgttaatttagagggaaatactgaaacagctgatgattcttttaaggaggagaaaaagacaaagaaacatgggttactaaattggttgaagatacggaaacgagatactgggttaagtgccttgtcaggcaccagtgataaatcatgtggagcaaaatctgttagcaccccttctactcctcaagcagaaactgttaataatttgga

SEQ ID NO: 69938 - DNA, 571 bp, Glycine max
  Clone ID: PAT_MRT3847_34166C.1
ctctacccaaggaatgaatcttcccaaattccttggtcttccatggacaaacgcacgcaggtactgttcaatcactcgattgagcacctcagtttgaccatcagtctgcggatggtaagctgagctcattcgcaggacagtgccgcttaatcgaaataaatcctgccaaaaatggctaatgaaaagtgggtctctgtctgaaactatgctccgaggaaacccatgaagcttgataacgatgttcaagaaaagtgaagcaaccatgtgagcagtatgtgaagtgggtaaagtccccaagtgaattccctttgaaaatctgttaacaaccacaaagattgtggtgtggccatggtaaggaggtagaccgacaataaaatccatggagaggtcctcccatggcctctgaggaacagggagaggacataacagtcctgcgaacttcttagcttcatatttcgtcaattggcagtccaaacaatttgccacacagcgagccacatcttccctgagtccctgccagataaaattctttgataaacgagctaaagtctttcgagttccggcatgacca

SEQ ID NO: 69939 - DNA, 331 bp, Glycine max
  Clone ID: PAT_MRT3847_34167C.1
gtcaaatgtattgaaagatgttcttttagatttttcatgttatagaagcccacctctctcgatttccattttcatcgtgcctctcagtttccaaattatattcaaggacttttctatgaagttgagactgaaatctggtaccttcactactacaaaagtgattttaacgacattaaatccaagacagtattttcaaaattgtcatcgtccaaaacttggtagtattttttgtaaattattgaatcattttaatgacaattttataaaaatcatcttaaaaatcaagtgtttcatgacgatcccttctgtcgtcttctcgcagccgtaaatt

SEQ ID NO: 69940 - DNA, 425 bp, Glycine max
  unsure (1)..(425): unsure at all n locations
  Clone ID: PAT_MRT3847_34168C.1
gaagtgcatagttatacacacaacacattcataccagacactctcctagagttaagtaaaaataaaggctatgtcaccaaacaagcgcttacttcttgttgcttttctgttgctttgcttcatcaccatgacagctagtgccagaagtttgagagatattaaggatgatgcagtcaagaagagtactcaaactagtttctttaagccaaaccatgaaggggtacaagacagcaatgatgagttggatacaatggattacacacctgcaaaaaggaatcctccaatccataantgaaagttccattatttttttcttttgttaaaaaagcaccaattttatttcacagtgcttaacccactctgcaagtgatctatcaaagaccgtcatgtattgatattggttggagcttggaaattcacacccc

SEQ ID NO: 69941 - DNA, 274 bp, Glycine max
  Clone ID: PAT_MRT3847_34169C.1
gtgggaaaaccaaaaattttttgaattttttattaacgttttgttaaacaatatgatggggatggggccccaaaatattctgacaatgctaccaggatcatgacggtcattataggcacagccatatggaacaagaattatccattgggaaagagatgttctacttaattaatgatggggggaccagtggtttcgaaaattggattttattctacaaaatttccatttaaggggagatcctgtaatcctacaaatgatccaagggggacttttt

SEQ ID NO: 69942 - DNA, 382 bp, Glycine max
  Clone ID: PAT_MRT3847_3416C.1
acggcgcgagaagacgacagaagggcactaccacaatcccatacccctctccttatttcttcctcagtgaagatgtccaccagcaagttattttcatgttgcccaattaacaaatttaatttttatttcccaggtgagattcatttaccactatgattaatcttagatggcagtgtgagcagccaaccaaaattaaatgctatactagatagcagatctcagagtggctgccacaccaaagatttgctagaatgaaaatacttttaaaatattaagaacctacaaaaataataatctgaataattttgaaatactgtaccataaacaaatgaataatcaagattaaacgaaaaaaaatcgtttgtgttagttaacatgtaat

SEQ ID NO: 69943 - DNA, 571 bp, Glycine max
  Clone ID: PAT_MRT3847_34170C.1
aagggaaagaaagtgtttttataatatggataaataattattttgaattacattgaaaggttggccacaaacttcgaaataacatggcaaagccttaaaaagatagacggcgtcctgatatcatgcagcttccaatggaaatcaattttttttttccatttttcaattctcctttagtggggaaggaatatgggtagtggtggtgggacgggaatcattttcgaaactctttcaagtgcactcttcaagaaaagtttgcttgctaaacctgcaaccaccttaaggtaaaccgattttttaaataaaaaaaaaaggtgcaagttttgaataaaatataaatgttaactggtagtggtagttattataaaaaaattataatgctattgtagtaagtaaaaactcttacaagataaaaaatcagtgagtccctgtaagtaaacaactccttataaataaataaataatgatgcacgaagatccctaaagactgtaaaattacaatgatatacatcaggtatattatatatcacgatctacagaaagggcaaatgagaaaaacggttttagaaag

SEQ ID NO: 69944 - DNA, 383 bp, Glycine max
  unsure (1)..(383): unsure at all n locations
  Clone ID: PAT_MRT3847_34171C.1
ggagccccgagaggagcttaccagaatgctttatcgggtaagtttgttccagcgttggaaacgtgcgctcggattaaaataaccgacccgaacccgaaatgggatatggaaacaatgcccggtgctagagtcatgagtgacatggttttactcccgaacggcgacgttttgattgttaatggagcagccgtanggactgcgggctgggaattgggccgtaacccgctactgagtccgtttctttataaaccaaataatcgggtcgggtcgagatttgaggttcaaacatcgtctgatattccgagaatgtacccctccagtgccgttttgcttcgtgacggtcgcgttctggttgctgggagcaaccctcacatttattacaa

SEQ ID NO: 69945 - DNA, 554 bp, Glycine max
  unsure (1)..(554): unsure at all n locations
  Clone ID: PAT_MRT3847_34172C.1
agcttatagaggaagaatttcgtgtttttcaaaaaaccttttcagaacagcgctattaattttttttctcaaaaaacgaatttttccaaaatttatgtaataacttcttcattttgaagatagaaaattctaaaaaagtataaaatgctccagatttttctctatttttaatgcttttttgcactttaattgattcatttagaattgaattatgaattttcaaacattcgcctaaatttccaagggccaaaaaatgaaaaattttttcaattcaaaaatttcagattaagatttaaattgtaccattatgcagaaagcaaaaaattttaagaatttatatagggaaagggattgaacaataaaagccccccctcgattggaagccccccctcgaatataagccccctttggaggggggttgaacaatagaagccccggggcttataatcgaggaaatacggtattttagttaactatttcgggnatttttcgtcactaaaagtatccgccctaattattagcttattattcacatataaattccatactttttt

SEQ ID NO: 69946 - DNA, 181 bp, Glycine max
  Clone ID: PAT_MRT3847_34173C.1
ggcaaacgcagcctctggtatggcagcccatgatgactgcaagatgaggcttatggagctgaaggcaaaaaggacacaccgtttcatagttcttaagattgaggagcagcagaagcaggtcattgtggagaagctcggtgagcctgcccagggctatgaagatttaactgtcatcctttcc

SEQ ID NO: 69947 - DNA, 291 bp, Glycine max
  Clone ID: PAT_MRT3847_34174C.1
atttgatgctctactggaattcttaactgtccgcaaacatcttgaactttatgcatagaataaaaggtgttccacatttagcaatagacagtgtcgttatgggaaagttgacatcatttgacatattgaagcatgctaataaaccagcattttcacttaatggagggaatagacgatgactgtcagttgcaattgcaatgagtggagatccacctattgtcaatcttgatcatccatccacatgtatggatcacattgccaaaaggttcatgtgggaagtttgatctacga

SEQ ID NO: 69948 - DNA, 427 bp, Glycine max
  Clone ID: PAT_MRT3847_34175C.1
ggctcgaggagacagagggagtgagatggtttgcattttacacagaacacatgaagtgaacggcataagaatgcatgttgcaacaaaaggagagggtccactggtgttggtcctccatggcttgcctgagctctggtactcatggcggcaccagattctctctctcatctccctcggataccgagccaccaatgacgctctccgtggatgctgtgacacccagggaccaccttctatcagaagctacagctgctttcacatagcgggagatcacaatgcgctcattgactctctgggtgtccaacaagttttccttgtggctcatgactggggagccatgacctgagggtatttatgcatgtatcgccctgacaaagttaaagcctatgtttgcctcagagtttcttttcttcgcacagacccaaac

SEQ ID NO: 69949 - DNA, 735 bp, Glycine max
  Clone ID: PAT_MRT3847_34176C.1
attcggctcgagcaaagctacattaataacgtcgtttaatgttccaatattgtagtgtttttgtcctgttggggttggactgctgtgctgtattttggttttgtattctgccccttgatttgttctgttacttttagccgtgttcatgtctccaggaaatgtttatattttctttcaaaaatgtttttccattgtgtttatttgtcttttttgggcatggttcaggctccagtaggtcgcattttctttactggagaacacacgagtgaaagatttagtggctatgtgcatggtgcatacctcgcaggtatcaattctagcaaagaactacttgaagaaatgagaaaggacaacaaaagaaaaaacaagagccaaagtcgagtattagagcccttgtcagcattaaccgaatgcaatattcctagacaataaaatctcaggggcaagcttagaatggcactacacaatcatccaacagcaaaccgaaataatccccacatctttgtcctacaactgtattcactattcatcacctctgtttcatcagcaataatagtaaaagaaaaataatcaagaaaacaaaggtaacaagcaaactacagaccaaaacgaaagccaaggacttgagttactcgtgtcctaattactaataaatttctggtataaactcttgtttatattgattagcagataataggcagttgcagccaaaaaaaaaaaaaaaaaaaaaaaaaa

SEQ ID NO: 69950 - DNA, 891 bp, Glycine max
  Clone ID: PAT_MRT3847_34177C.1
ggctcggtggcaaatatggtctctttaaggccatgctttcttttcattcttatctgcatcgcgataattaatcatgcacattccaacaatgatcggaagacttacattgtctatatgggtgatcatcctaagggcatggactccacttccataccttctcttcatacatccatggctcaaaaggttcttggcagcgacttccaacccgaagctgtacttcacagctacaaaaactttaatgcattcgtcatgaagttaacagaagaggaggcaaaaagaatggcagaaatggacaacgttatctctgttttcccaaacaagaagaatcgtcttcacacaacaaggtcgtgggacttcgtgggccttcctcagaatgtgaaaagagcaaccacagagagtgacataattgtgggagtattagacacgggagtttggccagagtctgagagcttcagtgacaaaggatttggtcctccaccaaccaaatggaaaggatcttgtcataacttcacctgcaacaacaaaataattggtgcaaagtacttcaatctggaaaatcactttaccaaagatgatatcatatctccaagagactcgcaaggtcacggatcacactgtgcatccacagttgctggaaactcagtaaactctgcaagtctatttggatttggctcagggactgctcgtggaggagttccatctgcccgaattgctgtgtacaaagtatgttggctcacagggtgtggtgatgctgacaaccttgcagcatttgatgaagctattagtgatggagtagacatcatttctatttcaactggagcctctggaatagtacacgatccttattttcatgattcaaataatataggaagtttccatgcaatgaaaagg

SEQ ID NO: 69951 - DNA, 283 bp, Glycine max
  Clone ID: PAT_MRT3847_34178C.1
cgctcatgaatggcaatttgttagggtgccaaaggggccgaaaaaatattaacaaccctttttataataaaaaaaggaaacatttggtgactgatgggggagttaattgaaacctttggagataaacaccttccataatcccaagccacaaaggtcacccaatccacagtgtacaccatgaaatattaagggtgaggctaaattttttgggggggggaaaaacaatgaggggcaaattttttattgttttccctccgctgggggcaaaattaaccccccgatt

SEQ ID NO: 69952 - DNA, 436 bp, Glycine max
  Clone ID: PAT_MRT3847_34179C.1
ttttttttttttttttttttttttttttttttttttttttttttttttttttttttttttttttttttttccggccaaaaaaagcccccttaatttattagcagagtattttttatttggctgggggaaaaccttacccaggggaaaaaggggcataagtaaccaaattaaaaaaaaaaaaaaaaaggcggagggaaacatacttgggccccagtttaatccaatccttggagggcatctcccccaatctgggcaaactcggcctgggccttttccccgaacggggccaaaaacgcggacctttaatccaaaaagggggggaggcaaacctttggggttggaagcatcgggattggggccaaaagctccggactttgagcatctccttggggggggggggggaaataatcaggctcgttcttgttcgactggctgc

SEQ ID NO: 69953 - DNA, 802 bp, Glycine max
  Clone ID: PAT_MRT3847_3417C.1
cccacgcgtccgcccacgcgtccgacggctgcgagaagacgaccgaagggtacggcggaaagaagctgagcatagatctgaatggagagcgaggtggtgtccattgcagttttctaatgaaaacaacaaaatagacacctgttaagaaggaggacaacgatggtgctgccgctatttactgctttcattctctttgcttttattccgaatggattgttagcagttccttccaccgtcccggcattcctttggtcatcacattatgaactggcctctgaaaatatattgaaggaatctgtaaattaccaagtcatttctccgaaggatctagcaaaatctattttatctgaagcaggctggtcaaattttctgtgcaaaggaaagaaatttcatgagcctctggatctggcactcttattcgttggtagagagttacaatcttcagatttaagcatgaacaaacatgcaaactcagctcttttggacctgctcaagaactctttcgccagatccaacacttctgtggcatttccctatgtttctacatcagaggatgtgcttttggaaaactcgttggtttcaggatttgctgaagcctgtggagatatgggaattggcaatgttgctttccatggatcttgctccattgatgatgcaaatcatgaagaaatcacaactttgcactcagttcaagactatttgaccaagaggatggaagagagtcacagagggaaaactgattttggttgtgttctgcaatgaaggctctcaagctcttgagaatgttgacaggacacaatct

SEQ ID NO: 69954 - DNA, 467 bp, Glycine max
  unsure (1)..(467): unsure at all n locations
  Clone ID: PAT_MRT3847_34180C.1
ttaatacctatggctaatagatctaatttcaccatttctcctaaatttttcattggaagaaagaaagaagaagtgggatgagaaaaaccaggaggaaattgcaaaggctgtaaaacagcttacagattttgatcaggtattcaggttcattgtaaaatttgcttgattcttcttatatgccattacttcaaaccacacatatgatctactcataaaaattgaaaattttatttagtaggcattgaatattgtagaagcaagctgatgcatctgttgtgttaattttttttaatatgcatttcctgttttcttagtattntctttcttgtttctcctttttatttgcatgcatataacatgaatactgttcttggaaagagaaaaggaactttccttccttttggtgacagctgtacattttctgttatgtttcactatgttatgttgtactagtttcttctctctgc

SEQ ID NO: 69955 - DNA, 526 bp, Glycine max
  Clone ID: PAT_MRT3847_34181C.1
ggctcgaggtactcatatatcaaatctgatgatcatggcatgatggtcatcatcacccctatctgatcgtctatttctgaggaagtatttcacatcctttgttgctaggaaggtttcatggtcactctatgttggcttatcgtgagaacaagtctgagattaactggagcttcaactgactatgcaaatcaccaccgtcttcgtccagaattagctctcaccgatcaccgaccaccgtaggcaccacaacctccacctaccctactttgatgcgattcccacatacctaacacgagttataccactctttcattacgcctctgcattctgtagcgcgatgaaacatctcaacaagtcaaccatatcccttgcagcaaatattccagcatcataagacacctgaaggcattttagtaacccgtgagaaagcatattgatcaattgatatgaactttagcaattgttgaagagcttgactatatactcagtatgatggctcgacaaccttgcgatgacaaatcatctg

SEQ ID NO: 69956 - DNA, 1690 bp, Glycine max
  Clone ID: PAT_MRT3847_34182C.1
ctcgagccgcttctttttttttcttatcttatttcaaacatggagtggcatagaggccacaccataggccaaggctcatcagccaccgtctccaccgccacatgctgtggcggtgtcttggccgtcaagtcaacggagcttccacaatcagagcctctaaaaagggagcaaaaaatattgtcctctctaagtagtccttatgtggttgcatacaaagggtgtgacattaccatggagaacaacaagctcttgttcaacctcttcatggagtacatgcccttcggcacacttgcccaggcggcactcgccggtgcgctggccggctcttaggagtcggtcatcgcacgctacacgaggcaaatcgtgcaagggctggactacctgcattcaaaagggttggtgcattgtgacatcaagggtgccaacatcttaattggtgaagatggggccaaaattggtgacttggggtgtgccaagagtgcggcggattccacgggggcgatcggcggcacaccgatgttcatggcgccggaggtggcgcgtggggaggagcaagggtgtgctagtgacatttggtcacttgggtgtactgtgattgaaatggtaaccggtggtgcaccatggcctaatgtggaagaccctttttcagtgctttatcacattgcatattctagtgaagtgcccgagattccttgttttctatccaaagaagcaaaggatttcttggggaagtgcttgaggaggaatccacaagagaggtggaaggctagtgaactattgaagcatccatttattgagaaattgtgtttcaataaggaggttttggagtctaatacaagttccccaacaagtgttcttgagcaaggctattggagttgtgtggaagagtcagagagtttaggcgatttgattcacaaaacaagaaagtttgaaactttggctgccgggagggtcagaatgttggctctgtcttctggggtgccctattgggcaagacatgatgatgagaattggatcacagcaagagggaatggggttgaaggttttgccaattgtggggcagagacagcttcttctgccagtcatgggttgtctcactaggtgttggtgaaagcaatgtcactggtagaattttagtggacatgctttttagtatcacaaatgttgtagattgttagtgttgtagttagtgatctcattttttgacggaggcattgcttggatgctattctcttaacataagattctttatgattcaattattcaatatttcattctcctctgttctatcaatctatagattctttatgattcaattattcaatgaaagtttgtaactttgactaccgggagggtcagaatgttggctctgtcttctggggtgccctattgggcaaaacatgattataagaattggatcccagcaacagggaatggggttgaaggttttgccaattgtggggcaaagacagcttcttctgccagtcatgggttgtctcattaggtgttggtaaaagcaatgtcactggtagaattttagtggacatgctttttagtatcacaaatgttgtagagtgttagtgttgtagttaatgatctcattttttgaacagaggagaatgaaatattgaataattgaatcataaagaatccctgttaagagaaatagcatccaagcaatgcctcagtc

SEQ ID NO: 69957 - DNA, 219 bp, Glycine max
  Clone ID: PAT_MRT3847_34183C.1
tttttacaaataaagaacttgtatgaacttgtagttccataaatatacaacaactccgcgaattgcgtggcatggatgtctaatcaaaaaatatactttcacataatccaccctaatactagtgaaagttattgggcacagcacaaatgtccaaataagatgatttctatcctaacaatgctttctcattaaatatgtaatgcacatgtaacattaaat

SEQ ID NO: 69958 - DNA, 395 bp, Glycine max
  Clone ID: PAT_MRT3847_34184C.1
ccccaagggaaaaaaaaaccctccccttttttattacaaaaattttcccgtatccaaagggcaatccatcaaacgggtttggacccctttataaaccttttaaatgtttaaaaaaccctttttttgccagggggataaaggcccaaaattgggaccaaaaaacaaaagtccagttttggtataacagggggggccgggaccttccaaggaaagtttaaaaggcaaggaccgaccccaaaagccccttttctttaaagtctaaaggggcccaaaaaacccggaggcaggggggaaaaccctgggcattcaatttttacaaaagtttttttgcgccaaaaacaaatttttaccgggttaaaacattccgggaaagggaatccccccatttggggggg

SEQ ID NO: 69959 - DNA, 238 bp, Glycine max
  Clone ID: PAT_MRT3847_34185C.1
atcaactggcaacttggacaattaatgctgtggtggcaaatgatttatatacagatgatagctttgaggtgaatacaaaaggagcgcgataagaatataaatggacaaagcacaaatgctcttttcaattcaaagaattgttgtgtcaagtttattgttatactctgaatggaggaagtcaccattcagatcaaacaaacttgatcagttgaggcagcattcacaattttttcactaa

SEQ ID NO: 69960 - DNA, 174 bp, Glycine max
  Clone ID: PAT_MRT3847_34186C.1
atgagttggtgaaggtagtggtgcaagtgttgaacctcttgcttctgagactgctggctccactgctgtggttgccattttgactcaaacacacataatagttgcaaattgtggagattcaagacgtgtcttgtgtcgcggaaaaccagcactgccattgtctgatgaccacac

SEQ ID NO: 69961 - DNA, 470 bp, Glycine max
  Clone ID: PAT_MRT3847_34187C.1
gcggagaagtgcttggaagaaatagacaacttcatcacttgcgaatcatacacacaatatgggaccgaaggacaatgttgcagatagcgatcaactaaaatttcagatacgagaaaaagtgattgaacgggcaaggatggtttttaggctgaatgatttggagaactacaatctttatagacgcaattatggtattgctaggaaaatggacatcctgaggcatttgcatctggcactagacaatttctcttgtgcaaataaaccacataaagggagagctatcaagtcatgcacaacagaagagctagacaataaggtacagatgaaatatagttcttacaatcatcactgtaaacaaaaaaattgtgataaactccataaagaaatcaaacgttttgaagtgacaaggaaaaagtcagcacaattaaagcaaggcatcagaaatcatgtgaagattatgagtgatgagt

SEQ ID NO: 69962 - DNA, 138 bp, Glycine max
  Clone ID: PAT_MRT3847_34188C.1
ctcggatcgaggagatatggctgaggctttattccaccaccccagggggctaattttaaaggaccgtggcctgggtctaagaaatccggacactgctaacagttatggaaatatggttctgttttaccatggccttaa

SEQ ID NO: 69963 - DNA, 141 bp, Glycine max
  Clone ID: PAT_MRT3847_34189C.1
caacagcttctgctgcacttccttaaaattaagtgcctgagcaaaagtccatgcaatcttcctctgtgacagacttgaagacttgggatacttctgcctcaataaatctgaaaccccgaactatagacgcgaataaatgat

SEQ ID NO: 69964 - DNA, 2005 bp, Glycine max
  unsure (1)..(2005): unsure at all n locations
  Clone ID: PAT_MRT3847_3418C.1
ccacgcgtccgtggaggtggtgtccattgcaatttttctaataaaaacaagaaaaataataatagcaaaatagacaccattaggttttcattctctttctctctctctctgattcgatcgatttcgattgttgaattcatcccatcgtggagccttcaaatttgtagttgaacaacgatggtgctgccgctatttgctgctttcattctcttttttgcttttattccgaatggattgttagcagttccttccaccgtccccgcattcctttggtcatcacattatgaactggcctctgaaaatggattgaaggaatctgtaaattaccaagtcatttctccaaaagatctagcaaaatctgttttttctgaagcaggctggtcaaattttctgtgcaaaggaaagaaacttcatgagcctctggatctggcactcttatttgttggtagagagttacaatcttcagatttaaacatgaacaaacatgcagactcagctcttttggacctgctcaagatctctttcgccagatccaacacttctgtggcgtttccctatgtttctacatcagaggatgtgcttttggaaaactcattgatttcaggatttgctgaagcctgtggagatatgggaattggcaatgttgctttccatggatcttgctccatggatggggcaaatcatgaagaaatcacaactttgcactcagttcaagactatttgatcaagaggatggaagagagtcacagagggaaaacagatttggttgtgttctgcaatgaaggctctcaagctgttaaaaatgtagacaagacacaatctgaaggggaagttttatccaatcttatcagttctgtggaggaatctggtgcaaaatatgccgttctttatgtgtcggatccctccaggtcaatccagtatccttcttacagggatctgcaaagatttctagcagaaagtacagccgggaatgaatcaaccaattccacaatttgtgatgaagtctgccagcttaaatcatctcttctagagggaattttagtgggtatagttttgctaataattttgatatcgggcctttgctgcatgatgggaattgacaccccaacaagatttgagacgccacaagagtaatgatccgtttgctgaagctaataattgttatgatgctcggcctactggattaaaatattactgctatattatttgcgaattttacgggaggctctgataagtgttctgtagttgatgacttgtctcagggactttttatattgaattttaaaataatttgtatcagtatataaaaataaaacttcatcctaggtttaattttgatcccgccactgtcagttgtaaaatttgaagaagaaatttcagattgtgttgtatttttttaactgtctccaaatttgctccgttcgatgtgcataaaatttcgagttaaagtttgcgattgaagttaaagatattaccaagtggaagttctaaaataatttctgattctctaactctttgttttgttcgtgtttgtgtaaattgacaatttctagttcattatgcaattaatcactacttgcaatgttccacgttgttagtgtttgattcgtatggatgtagctaatagcaaacaacttagatttaattgagttattgccgagcttataatcgccttttctgattaggacaggatagggctaatctggaagttaaaggaatggtgaatttggattttgtagttggaaggagcaggagtttgggttttctaagggttgtaatgtagtgttggggatattaaaagtaggtgtgtctggcttatagaaaccacacgagaaaaaggtttctaaacggaagaaaatcagggaggaggattttgaagtagagaaaaccccacacttcattttggaggttttccatttggcattatgccccacttttntgattcataagcgggagaatagattttctgaattactcaagaaaactgcagatatgatggactttt

SEQ ID NO: 69965 - DNA, 547 bp, Glycine max
  Clone ID: PAT_MRT3847_34190C.1
aaaaaggacaatttaccgggactattcacacttaaatgggttcagggtccaaaaggaggatttatgatgggggcatgaacctggctttgacccctttgcgggatttttgagtaacccctcccccctttttgggggggcccccccattgggcctttaaggacaaaagacctcaaacctgacttcttgttaattttaaacccccccaacgggggagggggggggataacccccctacctggggggaagggcctttaatttgccaaaagcctttagttcattgggtggccccaacaaaggtcccctggaatttttcccttcgaggggggttctggacccaaaaagttcatatgaaaacaagccataaactaaccctttgaaaagggaaaatgcttgcaaaagggaaaatgaaaaatcaaaggcccccgaataaaccccaggcttaaagggaaaaaaactgaaagcgggcgggttctctggggctggggcaccccccggggggaaaagcccaaagggaggggggaaacaagcttttgatattctggatttt

SEQ ID NO: 69966 - DNA, 582 bp, Glycine max
  Clone ID: PAT_MRT3847_34191C.1
ttgcttattttgaaaatagatgcccctgccagaaaggattgggtagctgttgataaaaaaaaataaaattacacaaaaacacccacaggtagcccagaatagaaaaaagaaggaaaaaaatgtctgttgcttttcctttctctttattcttctgtggttattgttaatgattatgaatgttctaatgctagatgggcatccaatttctttatatagatctattctaaatttttcaaggtactgatgattgcattttcagtttttcatttatttcaggtgtctctggaactagcctcttcaattctgttagcttgatggcttataatgttttctatactagtgttcctgttctagttagtgtgcttgacaaagatcttagtgaggaaactgtgatgcagcatcctcaaattttattttactgccaagcaggaaggtttgtaattatgctgctattagccttgctgtttaaatgccataaagtcttcttgtttttttgtaattggcagttcagtgcaagtgaacaattttttttgtcatagcaggacaataaagaagttcatttcaactgaataacctttcatt

SEQ ID NO: 69967 - DNA, 408 bp, Glycine max
  Clone ID: PAT_MRT3847_34192C.1
aaaaatggttgcacaagttgataaaaccatgtgtgatagccaacatgtgcgcaggtaaatgaaaattctacactctagttcatgaaacaatgggatgaggactgaattcggtaagtcttatgaatattaccatggtgacgattaaaagcttgctggtttggtgagtgaaggatatgaactggcgcacgaacataactatatataccatgcaacggtgttcactggtttagataaactaggttacatggaagaagtattagacgatgagttgaaacaagaaagaaccagatgcaagggttatcaaacatccatttggtgaagaacttcatgtaaacctgtatatgtagaaaagagaagaccgacacgaaaaagcttggcatatcaggtccagttcagtcataccatacc

SEQ ID NO: 69968 - DNA, 335 bp, Glycine max
  Clone ID: PAT_MRT3847_34193C.1
gcgccacgcgcacgctttttgtttcgcacgcgctgatttgccacgcactcatagtcttaaaggtatgattgagatggtggccacagttggtattcctgagaatacaggtgtaggatcgccactgtgcgttctaattgaacctttcagggggagtgccagttatgacattcacaccatttgctatcaacactgttaattatgatatcctgctatgtacaaaagcgccgactatgccatccaaggctaaccctggctagtgcgcatggagcttggacctccttcaggcaaccggagctcaccgagatataatttgagcacctggatggactgccacc

SEQ ID NO: 69969 - DNA, 290 bp, Glycine max
  Clone ID: PAT_MRT3847_34194C.1
gacttcacaacgcaaactgcgtcattgcatcattgcagatatcattaacccttctaccttcagattcgcgggaagatggcatcacctcacgctaatgtgacatcagttgtttagaacagtggtcaacgtgtttctcaatcgagatttgcatgctcttcattcttgtctgggttcgatgttgttggtcatgcatcaagtgcttggaagaaggaacttgtcacatcttcgatttccatggtgcctagagccacactaacatttgatcccccaactaccacttcagagcatac

SEQ ID NO: 69970 - DNA, 599 bp, Glycine max
  Clone ID: PAT_MRT3847_34195C.1
ggctcgagatctactctctattttcctagcttagattccttctccaatggctcttgccgtttccactacttcttcctcttcagctgcagcagcagcagcagcgtcgagctctttcttctcgcgccttggatcttcatcggacgctaaagctccgcaaattggttcctttcggtttccggagaggcctcaagtttcgtctggtgttgttaatttaactcaaagacgctcctcggtgaggccactcaatgccgaaccgcaacggaatgattctgttgttcctcttgcagcaactatcgttgctcctgaggttgagaaggagaaagaagattttgagcaattagcgaaagaccttgaaaattcatctcctcttgagattatggataaggccctcgagaaatttgggaacgacatcgctattgcctttagaaagtttatgtcggtgttgcatgagcgtatggattttactttcaagcgttgtctgatggcccaaattattgatgttgctttgattgagtatgcacatttgacgggtcgaccctacagagtgtttagtcttgacactgggagactgaacccagaaacctacaaattttttgacg

SEQ ID NO: 69971 - DNA, 310 bp, Glycine max
  unsure (1)..(310): unsure at all n locations
  Clone ID: PAT_MRT3847_34196C.1
gtaagctcggaattcggctcgttaaaagtgagaagcggaattactttgtgtttgccatggaatttccaaaancggaattgtttcatccaatctcgccgggggtgccccccgcgataactccctttcgcgggtcaaggcagcaaaccgattggaacagcgaaaagactcaacatggaaatgggggtcgccgcaaagctcttctgaggttcaaagagaagccctcaagaagtaacggtacctttgaatggaccccctcgggtccctgggtgccccggctctactctgagaagggtgatgagaaatatcgatg

SEQ ID NO: 69972 - DNA, 161 bp, Glycine max
  Clone ID: PAT_MRT3847_34197C.1
atcgtaaaaacgcagttaataacgaccaaaaacggggggaatacagggacgtttccggacttttccacggggcaaaggacaaaggggaccgtggaggaaaaaacgacaactgagaaagacttgaacacccaaaccgtcaaagagaaaggtggggggacatg

SEQ ID NO: 69973 - DNA, 411 bp, Glycine max
  Clone ID: PAT_MRT3847_34198C.1
caacaacaaagattccaaacaccgaaccaattgcccttaaataactgaattgctcaaacttcagatattccgtctagtattttgactgcagagaagttgctttcttctggattatcccaagatccccaaatgttgaatatgttgcagcagcaacacttgctgcagttgcattctcaggcagcagcggctccttcacaaccaatgcctttgatagataaacttctattgctgaagcagcaacagcagcaggaggagcaacagctgttattacgccaacaacaacagcaggaggagcaacagctgttattgcgccaacaacagcagctgctttctcaagtgcttcaggagcatcagtctcaccagcgctttggcaatttatctcatcaacagctgcagggaggtggaataccc

SEQ ID NO: 69974 - DNA, 270 bp, Glycine max
  unsure (1)..(270): unsure at all n locations
  Clone ID: PAT_MRT3847_34199C.1
taattcaccacnactctcatggccgcagcaggctgcaccgnctcaanaaccttcattttgncaccaactggttctnaagnctaatccaggaaaancttgntctccanaacttctgacatcnacgagatttggangtccnnctgtgcncggcatgccaccccatgncatgtacaaagcagatcangacattggcctncnnggtacccttttcgattttntccgtcaaaggagtgcatanatgcacctattggagatgttttatcaaagcct

SEQ ID NO: 69975 - DNA, 1182 bp, Glycine max
  Clone ID: PAT_MRT3847_3419C.1
gcacactgatgtggctgtcctgctcgacaatgaagccttacaaagcagatgaagagacttttgaatcatctcatgaagcgttcaaatcagcttttcctagagggtttgcttgggaagtgatcaaagtttatagtggaccacctgaaattgctttcaagtttaggcactggggcttctttgaaggtccttttaagggacatgcccctaccgggaagatggcccaattctatggcttgggaactgtcaaggtggatgactctttgaaggttgaagaggtggagatttactatgacccggcagagcttcttggaggccttctttcagggaatcacgaagcccgcgattcggcgtctggcgcgacgtggtggcgtgaagcgtatcagtggtctcatctatgaagaaactcgcggtgttctcaagatcttcctcgagaacgtcattcgcgacgctgtcacctatactgagcacgctcgccgaaagatttccacttgcatggacgttctttacgctctcaagtgacagggcaggtctctctatagtattgacaattagagatgtgtcatgtagatcattttacctcaggctcaatcacaatcatgactcatgaggtttattggctatacaggtggatgactctttgaaggttgaagaggtggagatttactatgacccggcagagcttcttggaggccttctttcagggaaccacataaatcacccaattgaagaggatggcaccaaaacttcagcaccttcccaaggatgtcccttctccaaataattacaatgatgtttttaagtgaatggtgtcttgggatccagctatatttcttgaattaattaatgtggcagctgagatttgaaggcaaatatagtatttgtgtgaaattgggtccattgaataaaattggaaacatgtcaaaatgaattatttttccccccgctttatatggaaaattatggcaaataaatgtgatgtgttggaaagcaatgtgcatgatacaatgtcggtttggctttgctgttgcatagtttagaagttataagttattttattttattttatttttgggagggagagctttctagcaatctgatgaagagatcgatccaataagggaccaagttagctcatgtggcagcaaaatctattatattgttgaatgaaagcatttgaagatc

SEQ ID NO: 69976 - DNA, 323 bp, Glycine max
  Clone ID: PAT_MRT3847_341C.1
atatttttttttttttttttttttttcttgatgttttttttaaaaattttggtggtttaaaacactttacaaattttcacttactagggaaaaacacatatacctttgaaagtaaacacatgacgcaaaacccctaagttgttccgaaccccatcgaaaaactcacaaaatattccatctacaaggactcatgcaaaacctgaagtgtccaacacaacccatccaaatttaaatacccccctccctgaacaaacctttatttttacagccctctccaacaaaaaattttaacatattgaaaacaagacaaacctcccccatat

SEQ ID NO: 69977 - DNA, 412 bp, Glycine max
  Clone ID: PAT_MRT3847_34200C.1
gaaataaaaaaattcccaagcaaaaaattttttttggggctggcataaacttggccaacaattcacaatcttggtaaggcccgccatgattaagtgggaatatatttccccatttctctggattacagcttatggcatggccctctttgggggttttggggggccccttccccaaggggaagccagcctctgggggttccacaaaaaatttcccaaagggttctaaagtagtaaagttcatggcatgccctcggcttttatgcctttgggaaagggaattcttgtgagaaaggtctaggagcttttcaacggggcaatttcatgggctgccaaaagctttatttttttatatatatatatatatatttatatacatctatatatatagggtcccacaaaattttttctttaa

SEQ ID NO: 69978 - DNA, 558 bp, Glycine max
  Clone ID: PAT_MRT3847_34201C.1
ctaaaccacttccggataatgatatttagtctttgctctcctttaccctttacagaaactaagcatttttctcctcaatcttaaagaattcgttttccttcatgagatctctgactaaattttataagcacacaatgctttctttttttctctctagaacaaccctacgaaacaccaatttcatggtcccgcacacaaaatacaatgttagcttaccaaatcccccgcgctcattatagaacctgagttataagaatgaccgtgccatcatagtcagacaaaagccaaaccttatgtctggagtataacagctttcattccaaaacaaaacaaagagcaccctcaaatatatgatcggaacctaataccgtgaaaagaagcgcctagaattaagttcaagacccattcaactaaagtttgtattgacacaactcatagaaatacagaatgcttcaaaaccaggccaacttaacagatgatggagatattaatgggataaataacctgtgccgggacaagtatgttatccctgttgataaacaagggcaataaattcca

SEQ ID NO: 69979 - DNA, 237 bp, Glycine max
  Clone ID: PAT_MRT3847_34202C.1
cccacgcgtccggcagagtctgatcacaggtttaacataccccaacctaggcacaatgacggggaagctagcgcgagctagataggtcgaattagtgtcgtggaatagagacagtgcatgagatgacggctcagtttatgcatgatgaccatgagagtatcatacacgtatacatagaagtcgtaacttgatcacagaaccatagataggtaccgatctacgcacatgaaaaccatc

SEQ ID NO: 69980 - DNA, 591 bp, Glycine max
  unsure (1)..(591): unsure at all n locations
  Clone ID: PAT_MRT3847_34203C.1
gtaagctcggaattcggctcgagctttggtcttctattcagagggaaggatagtcttggtgaagaagttgtgaaaccatatactcctacaacattggatactgatgttggatactttgaattggttgtgaagatgtatccacaaggacggatgtctcatcactttagggagatacgtgaaggtgattacatggctgtgaagggaccaaaggaagagctggatgcctttgccattaagttccctaatcaattcaaagtttactatgttctaaatcagccaccagaaatatgggacggtggtgttggattcgtcactaaggaaatgatccaaacagatttgcctgcaccagcatcagatattaagatattaaggtgtggaccaccttccatgaacaaggctatggctgctaatcttgaagctcttggatacagtccccaaatgcagtttcagttttaagtcttgaataaagctcatctatatntaaatttttaaaatacacacagcattcgagtccgatatcaatgtttggacattngttggtattctctttctagaattgacagaataagcgcgcctggttacactctaggt

SEQ ID NO: 69981 - DNA, 1283 bp, Glycine max
  Clone ID: PAT_MRT3847_34204C.1
ggcacgcaagcagactagcaacttgtattgttgctacaaggcatataaattttcatcattgcaagttgcaaccattttgaccaaaaaccaataataagctttcgaccaaaagaagaaagaagaacccatttatcatcgttggaaaaaatcccagatctcaaaaaatggaattttcgcagagtcacagggtagagatgataagcatggcagttgctcttgttgccattgttggtggcaccgcttactattactacgtcaccaagaagccaaaagggtgcttggatcctgagaacttcaaagaatttaaacttgttaaacgcactcaactcagccataatgttgccacgttccgatttgatcttcctactcctaagtcagtgttgggacttcctattggacaacatatcagctgcagagggaaggatagtcttggtgaagaagttgtgaaaccatatactcctacaacattggatactgatgttggatactttgaattggttgtgaagatgtatccacaaggacggatgtctcatcactttagggagatacgtgaaggtgattacatggctgtgaagggaccaaagggacgttttaagtaccagcccaaccaagtaagagctttgggtatgattgctggtggcactggcatcaccccaatgtttcaagttacaagagctatattagaaaaccaacaggacaaaaccaacataaatttgatatatgccaatgtcacatttgatgacattcttttgaaggagagctggatgcctttgccattaagttccctaatcaattcaaagtttactatgttctaaatcagccaccagaaatatgggacggtggtgttggattcgtcactaaggaaatgatccaaacagatttccctgcaccagcatcagatattaagatattaaggtgtggaccacctcccatgaacaaggctatggctgctaatcttgaagctcttggatacagtccccaaatgcagtttcagttttaagtcttgaataaagctcatctatattaaattttttaaaatacacacagcattcgagtccgatatcaatgtttggacatttgttggtattctctttctagatttgacagaataagcgcgcctgtgttacactctaggttagacattttacattgtagtgatgttcaggtttatggaaagttttgatggcgtatgctgtaacaatgcaggctgtttcacaattttggctctcaccccaaaactcattgataaggtagagctgcagagactttgctttttgacgtcc

SEQ ID NO: 69982 - DNA, 649 bp, Glycine max
  Clone ID: PAT_MRT3847_34205C.1
cccacgcgtccggtgaagaagagtgaggaatttatgcatgtggcatcacgtgacccggtcgaattgtaccgcgaaatgtgtagtgtggaaaggggtccaaggctggatagtacagaggtggaggtgctgctggaagtgtgccattggtttgccaaatcaggttgggcatccaatcaggcccttgccattttcattggtttgtcatttttccccactgctgcacacaagttccgcaaatttctcaagaagtgtcctgccgatgttgccaagtacttggtatatcttgggccaagcgatgaggccatgaggtttttgtttcctatatttgttgagttttgtttggagaattttcctgatgagatcaagaggttcaggggtatggttgagtcggctgacctcacaaagcctcacacttggtttccgtttgcgcgggtgatgaaaaggaagataatttatcattgtgggccgacgaatagtgggaagacttataatgctttgcagcggtttatggaggcaaagacggggatttattgtagtccgcttaggttgttggcgatggaagtttttgacaaggttaatgcgaaggggatttactgcagtctgctaaccggacaagaaaagagcgcgtgccgttttcaaatcatgttgc

SEQ ID NO: 69983 - DNA, 315 bp, Glycine max
  Clone ID: PAT_MRT3847_34206C.1
tttttacttcatttcaggcctaattgaattgggagaggttccattcagttgaatgaggtgttcaaatatttcgttagtagggaaatgattgcagtgcatttatctgtagctgggatttgcccaagcataagttgcataagtgcattatagaaactgggtgaaggttgataatgattcttgtaattatttttgggtggttatgtgaattggtatttacaaactgggatatatgactaccaattttggttctggtatcttggaggattcattctatattttatcttttcctcactggttgcttaacaagtgtcgggc

SEQ ID NO: 69984 - DNA, 326 bp, Glycine max
  unsure (1)..(326): unsure at all n locations
  Clone ID: PAT_MRT3847_34207C.1
anangcnngcacgcgtacgtnagctcggaattcggntcgagaaaaatnncganangtanatnttcnnanggcagaaacgnganccnaggtannntngtgganacgtccnantaancgtnannnnnnancggantagcacggggaannnangnangccganaananncaagnggggnaagnaatgggaagnngcnnctggatanagcagaaaagccctcagaagggaangttngncngcggaatcaacgttnaaanagagaagagnnaggantcaaggatnggggntatnngntganaagggaggntctgtaaaaggggggggggan

SEQ ID NO: 69985 - DNA, 359 bp, Glycine max
  Clone ID: PAT_MRT3847_34208C.1
attcgagttgaaatataaccatttcacttattaaatgcggctttgccttactagcctaacaatcccaaacacatctggtcagggccgaggatcgactttgtgctgactgagtgagccacaggacagatgtgtcctagatttgtacaagctgtggaaacatgagaccggcaacactatgcttcgttttccacctcagagtgccatgccacacattgatgtcgctgagcatcacatagggaacaaagaggaagtagatactgaactcttggatgaagaacagcttgcgaagagtggtgatatcctagagacactaaacatgacatagaccttgctatggactagagcttctagatcctcag

SEQ ID NO: 69986 - DNA, 537 bp, Glycine max
  Clone ID: PAT_MRT3847_34209C.1
ctgcttgggggggggggggggtgattaaagcgttgagagagaagcgaagggcggtagtgatatagggataggtaacagatactagcacactttgtcaacagaataaaaaagcacgggttaccagagtgagcgataggaatagaggagagtgggtgtcataaaagagacggctagggttgacaagattgagaaatatagttgattatcgaggcttgggaaaaccagcgtatcgagtcttgatgaggggcagcttaaagaggggcaacgggtgatgcttttagatagtacggggccacatagaagagcatggcacataaatatgaatttagccgccagtgtggccactagttgggagtttacggatgttaacgaagtgagggactggttggcgtaatgtagtaagctggcccgaattagtaaaaacccgtgttttagttggcttacgaataaaactagcaatgtgacttcggcaagttgtgaagcggactgctaggtgagagggtttaagatgacataatacagggggactgaccgagc

SEQ ID NO: 69987 - DNA, 811 bp, Glycine max
  unsure (1)..(811): unsure at all n locations
  Clone ID: PAT_MRT3847_3420C.1
tnnnnnngagctaataattatatcttattttatcatnnnntaggaatttcaattaaaccatcatcctattctataggagctcaggtgtgcgggctctggtccgcgtggctttgcccctcgcggagtcattgatatctttatttcgcttcccggtggggtgagccactctcgacttgtgcctttggtcgttctgcatttaaaggatatgaatttcctgacggaggtcttaattttcagtagtcacagtgaagaggctactgattctggtgttgacacttattttggtttttgcacctatcctggacgggagttgcggcatcgtattgatttaaaggtgtacccaagagacatatatgcttttggacttgtagcttggactggaaacgatgtcttgaatagaaggttgaggctgcaagcagaatctaaaggattccggcttgacgatacagggctatttccagctactcagggttctggcggcaaacggggtgcaaaaggtagtgcaagtttgaaatttaatactgaaaaggagatatttgatttcctagacttcccttgtcttgaaccacatgaaagaaatctctaagtatagagatggttagtaagaaatctcttgctagctctcagcattcaaccttgtagaatatgttgatgtatttagcaaatggctttttggttagtaagaaatctcttgctgctttgtaaataaatatactcgcaggatacaattcacgtatctgacttagtatatatttttgtacaaaaaatggttctataagatcagaacagttttgacgtaaaaaaaaaaaaa

SEQ ID NO: 69988 - DNA, 676 bp, Glycine max
  Clone ID: PAT_MRT3847_34210C.1
tcaaagggagacttttcgactttcaagggtctggcagacctgatcccgcgcttgacttctcacttctctcaaaattgcaaaacacttgtccaaatgaagatgcttcaaacagcaatctagcacctcttgatgctacaagtactatgatgtttgacaatgagtattatagaaatatcgtatacaacacagcgcttctagaatctgaccaagcactacttaaggatcgaaggactgctcctacggtttattattacagcaacaaccggttttccttctacaatgattttgccaaatccatggtgaagcttagtaatgtaggagtacttacaggagcagaagggcaaattagatataaatgtggctctgtaaactattgagtgcttgtatttttcagcttcttagaaaaacctcaacaatgtaattgaggaagccaataagtcacttggagtatgaatgctatcctttgtatattatgtggagtgatcatcatcatggtaggtggtggtagtattccagaagagtgaagattagccatgttagattttatgtcaagatctttatgtagaaatatgaaaccttgatgtcaaagctcaaaaaataatctttgtatccatgtgttgctaagtttgtacactaaacagatgaaaatttgtaataaattaatgtactttgccta

SEQ ID NO: 69989 - DNA, 521 bp, Glycine max
  Clone ID: PAT_MRT3847_34211C.1
ttcccgcatcaccacccccggttgcgatctactagtttacgctgtctgtatttacggacaagattgagcccctttcaacaaccagcacatcaagatgtacgtcgagcactccatcaacaagtatcgcaagtttgaaggagctgttgggcgtcgtgtcctgtccctcaaggagtccatcaatggtattcctggatccgaccaccttgacgcagtcaacatgaattctgcagagggtgccttctggaacttcgagcgtcccatcttcgagcacaacaagaagtggatgttcgagcgctatgaagatgcctctggtcaagagtgctggaagattgcgcacaagcctctccttgccaagttgcttcaccgcatcaaggaggcccaagctggtcgtcgagtcatgtccgtctccaatgaatgcctcaaagatgaacgccgcggtctcaacaagatctactgtgagaagcctggcacacgttcggtctccattcttgccgtcgactacaaccttgctgtttgcatgt

SEQ ID NO: 69990 - DNA, 936 bp, Glycine max
  Clone ID: PAT_MRT3847_34212C.1
gacggctgcgagaagacgacagaagggggcagacacgttacttgattcaaaagtagtacaagattcttgggctcatagggttgacactccaacctccctagtcggttttcgaaataaccgcatccatggcgaccgaaccaaaagcagccaccgatgacgtcaagatcgatctcttcgaagacgatgatgagtttgaagagtttgaaatcaatgaagagtgggatgacaaggaggaaggaaaagaagtgactcagcagtgggaggatgattgggatgatgatgatgttagtgatgatttttctctccagttgaaaagggagctggagagcaacactaattagaattaaaccacctggtagttattattgcttgatataacatgctatatgacttgggtgtttaagctctaggaaggaaactgaaaatgaaaaatatgccttggtaggaaggaaatgtaagactgtaagaacacataatagggacgtagtttttctgttcttgaacatctgtgtagaagttattgagtgcttgtacttaaattgaattctgcataaggctttaaagatttgatttacaatctcaaaaaaaaaaaaaaaaaaaaaaaaaaaaaaaaaaaaaaaaaaaaaaaaaaaaaaaaaaaaaaaaaaaaaaaaaaaaaaaaaaaaaaaaaaaaaaaaaaaaaaaaaaaaaaaaaaaaaaaaaaaaaaaaaaaaaaaaaaaaaaaaggggggccctttaaaaaggacaaaatttaacatacccttctttcaaattaaaaacttttttaaaaggggcccaaaattaaaataaagtggactgtttttaaaaacttaggaattgaaaaaacctttagttacccaaataaaaagccttggaaaaaaatccccttttaccaaattgggaaaatcctaaaaagccctaaacgattggcctttc

SEQ ID NO: 69991 - DNA, 620 bp, Glycine max
  Clone ID: PAT_MRT3847_34213C.1
ggagaaaagcatgcccacccaaccctaaaatgaaaataagaacaaataattcgagattgtaagtcaaattttaaagccagacagcacctaataatgcagaattcaattaaagtacaagcactcaataacttctaaagcatatattcaggaaataacagaaaagtcatgtccctatgttcttcaatttccttcctaacaaggcatagttttcatctcctccgaagagctcaaacacccaagtcatatcgcatgttatatcaagcaataataactagcaggtgatttaattcttattagtgttgctctccaactcccttttcaactggagagagaaatcatcactaacatcatcatcatcccaatcatcctcccactgctgagtcacttcttttccttcctctttgtcatcccactcttcattgatttcaaactcttcaaactcatcatcgtcttcgaagagatcgatcttgacgtcctcagtgactgctttgggttcggtcgccatggaaaaacagatgatgttggagtataaaccctatgagcgaagaatcttgtatgtactacttttgaatcaagcagcgtgcgtgtgtgaacccttgtgtggggttgtggaaagcgaa

SEQ ID NO: 69992 - DNA, 366 bp, Glycine max
  Clone ID: PAT_MRT3847_34214C.1
aatacccaacagaaacataaggacaaaccccaggaaaatgggctaaaggaaccccaaacaaaatgggggagaaaaaaaccaacgggtatttttcaacggggggggcccggaagcccccaaggatttggaacaaaatcctcaaccaggtggcataaacaggggggggttttgggcccagtggaggggctccagatttgtgggggggggggcaacttgcttgaaaaacaaggggaactcgatttgggaagagggaaactggttgggaagcacaccgtgatcccatcctatgataaaagaacccgggcccattttgaaagggaatgggtcccggccaggaacctttggggtgcagaattttagagaaag

SEQ ID NO: 69993 - DNA, 232 bp, Glycine max
  Clone ID: PAT_MRT3847_34215C.1
gattcacacagggacctaacaagtccttcgtgatcccccgattgctgaatagcacggtcttccttgcgctctttctcttttgtcctttcacggccgcgggattgcctgcagccatcgctcatttcgtcttcaaaaatgatggttcccctctttacaatggtggcacatattcaatcttgtccggcacacgctccttgggcgcacaaagactgcccccacagggaagtggtga

SEQ ID NO: 69994 - DNA, 218 bp, Glycine max
  Clone ID: PAT_MRT3847_34216C.1
accacgcgaacgaactatatatgtttataattataagtcacacaatacaagccaaggcccgggcttttacattgggtcggaacttgccactatatttaaagcgcgcggcttttttgctgcatgaatgtccacactaaaaacacgaacacacattatacctaacttatttaaagatcacatatttaccaaaaggtttggcccccaataggttacaaaat

SEQ ID NO: 69995 - DNA, 202 bp, Glycine max
  Clone ID: PAT_MRT3847_34217C.1
actgggtccagaaaactccatcaagaacagaggacagataagagtctactccatctggctgaagaagcaatcagcaatgtgcatcctagaacgcatcctcaaggtccatatcacagagaaaaccataaccaaattcgactagtgcagagactccagatgggccaaggccacgaagctctcagagaagcagccctcgttgcat

SEQ ID NO: 69996 - DNA, 853 bp, Glycine max
  Clone ID: PAT_MRT3847_34218C.1
gacaccagtgtgacagtgtgtagtgtgttcgtgtccgtgtctcaagttgaaacgttgtgtcgtgtttgtcattgtctaagaaagagggagaaatgggagtagtgaacagaagaaattctgcagctcataccagtaaccaaaacaaaacaacttcaattcaactccctttaggaatttttggaacagtgctggcagtgttgttcattgggtttgtagcatggagttatcaaactattcaacctcctccttcaaagatatgtggatctcttaatggtcccactataacaattcggcgaatcaaactaagagatggaaggaatttagcatacaaagagcatggtgtcccaaaagatgttgccaagcataaaatcatctttgtccatggttttgatgcttgcaggcatgatgcctatgttgccaaaacactatcacctgatgttgctgaggtattaggggtttacattgtatcttttgatagacctgggtatggggaaagtgatcctcatccaaatcaaacagttaagagcctggcattggatatagaagaacttactgataaattgggattagggtccaaattctacataataggtttttctttgggtggccaggttgtttggaggtgccttaagtatatccctcacaggctggcaggtgcagtgctcatagccccagttctcaattactggtgggctggtcttcctgcaaacttaactaatgaagttttctaccaacaaaaactacaagaccagtggacagttcgtgtggctcactacattccatggcttacttactggtggaacactcaaaattggctccacttctagtttattgctgccagtttgatcttttt

SEQ ID NO: 69997 - DNA, 494 bp, Glycine max
  Clone ID: PAT_MRT3847_34219C.1
gcaccaggacagaaccaacaaactcaagaaaaaagaaaaaaattacaagaggaaagcccgcaagaaggcattgcaagaagcagcatcaagagagcagaaaacaagaaacaccaaagaaaagggacatgggttctgatgtggctgctgtgtcttccactcccaaaggtgaaaagtttcggattgcagaagttacaacatgccctccagcaccaaagaagaagccaaggctgctttctaattgctctttgcgtagatcacccttagcattctttgcaccaccagatttagagaccttcttctgctttgcgcttcaagatcttcccgtttcatttgtttgctaatatttatgtgattttgtgacactttaattagaagatgcatgtggacttctgttatgcatgtgcttttattttagtctttttagttttttctgcacttcttgcaaatgaaaggtatatgctttgagaactttggattttggagtgattgatctt

SEQ ID NO: 69998 - DNA, 853 bp, Glycine max
  Clone ID: PAT_MRT3847_3421C.1
cgaaagtactaatcgaagcgtggatattgggtttttcccgcccattttgaaagaaaagaaaaccctggctggttccatttctcatcttccctcactcgcacaaaaattagtttctacttccgagctgcaaaatgagtgctcacatggagacggagctcacaaccgaccaaaacggcgctgcttaccaacactcacttcccgttcccgaggacaaagttcttgtccctgtcgaggtaaccctaaaaccttcaagcacagctaaaatcgacgatgttcgttccgccgttgaggggatgttggaaaagaggagtttgagctataacgatggaccggttccagtgcctcttgatgatgcgtttctcgcagataacgtgcaaagaatttgcgtttgcggatgtgatactgatgaagggatgcacaatgataatgttcttttgttctggcaagtcaagcctgttgtacatgtctttcagcttagtgaggaagggccatgtgaggatataagctgtgatggccaatcttccagcttcaatgaatggattcttcctgcaaaagaatttgacggcatgtgggaaagcttaatatacgaatctggtctaaagcaacggttattacgatatgcagcaagtgctttgctctttactgaaaaaggggttgatccattccttgtttcatggaaccgcataattttgttacatggaccacctgggactggaaagacgtcgttatgtaaagcattagctcagaaattatcaattcgattcaattcgagatacccacaggcccagcttgttgaagtgaatgcacattctttgttcagtaaatggttctctgaaagtggcaagcttgtagc

SEQ ID NO: 69999 - DNA, 264 bp, Glycine max
  Clone ID: PAT_MRT3847_34220C.1
ccacgcgtccgaaagaataaattaattttgcatgtatatttggggaaataaaactattatctcaaagattttgcaaacgataaacccttcaaccgattaatgatgtgttgagggcggttaatatgtaacgatgttgcttaatccctacatatactacgtatatctccacaaaaaaaatcttccgtatattttttccaaataaaaacatacaaataagaattagaaaccaattacaaaactctatagtacttacaacttaagcat

SEQ ID NO: 70000 - DNA, 220 bp, Glycine max
  Clone ID: PAT_MRT3847_34221C.1
gaattgaccggatggacgcacgcgtccgtatcaggaacgaacgactaggtaatccattgatggcacattcctcgatcgtggttactgtgagccataactagggtaaagggaaccttacctgtgcaaaaattcacactcattctacttcttctactattggatctcgatctctagctataccttgtcttctcctactctcatagaacaacttctctttctc

SEQ ID NO: 70001 - DNA, 417 bp, Glycine max
  Clone ID: PAT_MRT3847_34222C.1
atggatactaccacaccttccgtaacaacatggtcggccggatcgactataaactatacaattgcaggaaccgccattcacggtggaggatcatgccagatttccatgtcgtacgaccatggtagcacctggaatgttatttacagtatcatcggtggatgtgttattgagtcattgactgagaatgttaaaattccctcggatgcgccaagtggagaagccttattctcatggagctggttcaacctcatcggaaacagagagatgtaccaaaactgcgctccagtcaccatcatcgatggaggcaacggtctaaattcggcggattatcccgctcctttcgttgcaaacgtcgatgttgcccctggatgcaaaaccatcgaaggtaccgaagttgtctttcccaacccaggtaaa

SEQ ID NO: 70002 - DNA, 176 bp, Glycine max
  Clone ID: PAT_MRT3847_34223C.1
ctcacacatacaccacataagagaacactatttaaaaagaaagaacatgttcaagaagcagtgtgagccatggagaaaagaaaaaaaaaaagaactgaactccttcaattagatcattccttcttttcttcaaatggtagcatgaatacattgttaatttctgagatggcgagtta

SEQ ID NO: 70003 - DNA, 318 bp, Glycine max
  unsure (1)..(318): unsure at all n locations
  Clone ID: PAT_MRT3847_34224C.1
ngcatgcacgcgtacgtaagctcggaattcggctcgagtgggaagacttcacttgtgtttcctggctctaagaaagagaggtggcttctgagaacatttctagaatagtttgataagctatcccatcattctcctgtggtctcactgttctagagggtacaactaacccgtgtggtggaggacattttcagatttgtatagaggatgccccagaaagttccatctcaagaagncctcnagaaggcttcagctagtgtctgttagacaaaggcaggatgagccctgaagcgacaaattctgcagctctgctcatnncag

SEQ ID NO: 70004 - DNA, 218 bp, Glycine max
  Clone ID: PAT_MRT3847_34225C.1
gccacgcgttcgctcgtgcctctagggttatcatatcttcatttccattttctggctctgggtttccaagaatcttaagctatgggaaagtcttacccaaccgggagcgctgattaccacaagggcggtgagaacgccatgaagaagctcagaggctttatcggtgctaagagatgcgcttctctaatgctccgtttggcatgggactctgctggaac

SEQ ID NO: 70005 - DNA, 199 bp, Glycine max
  Clone ID: PAT_MRT3847_34226C.1
tacggctgcgagaagacgacagaagggatatcaataagcgaaaaatcactcctcccctgtgcaaaaaaatcgagtcgtccgatgtgagctctgattccccgtggatattctcggaatggcatatccgcaagggcagactataccctgaagaagagagatagagggctgctgctgctgaagcgtaatcgatctcatatct

SEQ ID NO: 70006 - DNA, 695 bp, Glycine max
  Clone ID: PAT_MRT3847_34227C.1
aagatttttgagtaatggtttgagatgatcatgctctgtgattcctcagcctaccctcttatggaattatgatttttcttgaattttatgtcctagatcaagatatcgtcaatatcctcccttgcaagtccttttttatttcgtgtgcaaaattccccttcattagttccttttttttccttatgcttttccttttctaagtgacagaatatgttgatttatatatgtctacatttctacgcaacagattatttacaactttgtttcttccttatattttttttccttatgcttttcctttttgggtttgtgtcttttaccccatttcaagttttattttgacttgctgtgtttcttagaatgtactcattttagggaaaatatccatgcccttgatcattttatttctctctatctctatcctttcattattttatttttttgctggttttggttatgttgaacatgtccccaaccactttttctttaaaaaagttttgagttcggattttttttttgtcaaacaggatttgaaaaggtagctttggatgaagtagtgagtacattttgttttttacctactttaagagcttgcatgattttggttggggcattggtagagtttgcgtgtaaagccatttaatgccataatttgaaaaggtagctttggatgaagtaatgagcattcttttttt

SEQ ID NO: 70007 - DNA, 2315 bp, Glycine max
  Clone ID: PAT_MRT3847_34228C.1
acgcaccggctcgtgcattggtccgtaggatggaggtgcattggtccattatccgttgttaatggaaatggaagtggaagtagcacttccattttccaatttccaatttccagtggagtagaacacattcattcaattgcaattttttataatttcatatatcctccaatattgctggtggttagcactcacaagagacaggctcaactaccagacaaattttccattcccggcatctcctccaaacctacgtaccccagataccctaaattcgattcatacacataacacaacacaacctcgttcctttgctgaccaactcggttgttgtttttttctttcactttcacctatggttatggcttctttgattcagttttccccaacttccctctccgctgttcccatcactacccgtttcacccggacccacaagtctcgccttcgttgctccttagatgctaatgtttccgacatgagcgttaacgcgccaaaagggttgtttcctccggaacctgaacattatcgaggaccgaagctgaaagtggcaattattggagctggacttgcaggcatgtcaactgcagtggaactcttggatcaaggacacgaggtggatatatatgagtcaaggccttttattggtggcaaagttggttcttttgttgacaaaggtgggaatcacattgaaatgggattgcatgttttctttggttgctacaacaatcttttccgattgatgaagaaggtgggtgcggataacaatctacttgtaaaggatcacactcacacttttgttaacaaagggggtcaaattggagaactagattttcgcttcccaattggggcaccaatacacgggataagggcgtttttgtccacaaatcagcttaatacttatgataaggctagaaatgctgtggctcttgcactcagtccagttgtcaaagctcttgttgatccagatggtgcactgagggacataaggaatttggatagtattagcttttcagactggtttttatccaaaggtggcacacgcatgagtattacaaaaatgtgggatccagttgcctatgcccttgggtttattgactgtgataatatcagtgctcgctgcatgctcaccatatttgcattgtttgccacaaagaccgaggcttcccttttgcgaatgctgaagggttcacccgatgtttatctgagtggccccatccgaaagtacatcacggacagagggggcaggttccatcttaggtggggatgtagagaagtactttatgacaaatctgctgatgggagtatttatgttacaggactttccatgtcaaaggctactgccaagaaaattgtgaaagctgatgcttatgttgctgcttgtgatgtccctggaattaagagattacttccatcagagtggagggaacaggagtttttcaataacatatatgaactagttggagttcctgtagtcacagtgcaacttagatacaatggttgggttacagagttgcaggatctagaaaagtcaaggcgactggggaaagctgttgggttggataaccttctctatacacccgatgcagatttttcttgctttgcagaccttgcactttcatctccagaagattattacattgagggacaaggatcattgctccaatgtgttctgacgccaggagatccatacatgcccttaccaaatgacgaaattattgcaagggtagcaaaacaggttttagcgctgttcccatcatctcaaggtttggaagtcacttggtcttctgttgttaaaattggtcaatctttgtaccgtgagggacctggtaaagatccatatagacctgatcaaaagacgccagtgaagaatttctttcttgctggatcttacacaaagcaggactacatagacagcatggaaggtgcaaccttgtctggcagacaagcttcggcctatatctgtgatgcaggggaaggattagtggcattgcggaagaagctcgatgatgagtttaaagacgacttaacaatatcaaatactaaagatgaattgagcctagtatgataaatttccacgaggtggtcacgttgacatgaagctagctcgttctttttccatgcaacatttttcaatgtatattcaatccaaaaataatttcagaactgattgtttcgaagcaagtagtgttgtttatagttgtaatatccggtgtctataaattgtgattcctatccagccattgacattctttaagctgaaattttttcttttcaaccgttgaatgtacataggtataaggctatggatctcagtt

SEQ ID NO: 70008 - DNA, 448 bp, Glycine max
  Clone ID: PAT_MRT3847_34229C.1
agcgacgtctgcatcacgatttgactcaagtttcaattgaagccaattgcttattttcgacgtggatcatctcggatggacttggatctcttctgtcacttcacgacaccgactttcctcacgacactcgtcaacctcgcgcgcatctcctcgcgccacttcatttcatacttttaatcggcacagatttctatcgcgcatttctgggtcagcatcattagcgcgcgtcaatttctttcatctgttcttgcgcttcttacagctgctcaaccctggctaccattgagactttttgtgtctatcatggccccgaacggccaccaggcacctgcaaagaagggtattcacaagtctagcgacagctcgtccgttttttgggaggacaagcatggccatcgcgagttcatggattggaaagaagcaaatcagaacggtccttttccttcgt

SEQ ID NO: 70009 - DNA, 220 bp, Glycine max
  unsure (1)..(220): unsure at all n locations
  Clone ID: PAT_MRT3847_3422C.1
ggaattcagctcgagcggctcgagcgactccatctattattcatccacactacctctcatccaaatccgctnctcgatgccggcggcggcgcgcatcatccgggacatgcagtccgatgccggtaacaagatgtgcattgactgctcccaggagaatccgcagtgggactccgtctccgacggcgactgcaagtgcctcgaattctccggcaagcaccgt

SEQ ID NO: 70010 - DNA, 437 bp, Glycine max
  Clone ID: PAT_MRT3847_34230C.1
ccacgcgtccttttacgcgtccgcccacgcgtccgcaacaattattgtattactgttgcacatgagcttagggtatgtgaggaatctcaaaaaagttactgcattgttgattcctaagtacaaggtactcattgcatctttaatgcacaattggtacatcctgtaacagctgctgtgctgcaatgtgcatttttgcctttatgttgtgccatacactagtttctggaaaaaagaatctaaaccataatgttgcgccagaaattatctcctgatatgcctttccagctggcatcagacacaattttacggacactgagggcccgagtgcaccatcattgtcaaggacaggtgaaaatatttttttgggtgaagttttattttggattgaaccagtgaacggcattgtggattattgcctagacctaactgaatttgtt

SEQ ID NO: 70011 - DNA, 797 bp, Glycine max
  Clone ID: PAT_MRT3847_34231C.1
gctgcgagaagacgacagaaggggatgacatacttgttgttgtcacatctggagaaaatgtgacagaagtacagccacaatttgatgcaataagtaaatgtcctggaagggggatcattgtttcggggattgctcctccagggtccggatttgacttctatagtcgattcttctgcccgaaagatggagtcaatgaggatcatgtgtgtgggagtgcacattgtgccttggcatcctactggagcaagaagctggggaagtgtgatttcaatgcttatcaggcatcacccagagggggaattctcaatattcatcttgatgagcaaaacaaaagagtgcttttgcgtgggaaggcagttataatgatggaagggtgtgttctggtttagtcctgttcctagcactgaagaatatgaagttgtgaactgtcttggttgatactatagcatataaacaaagtgacgtgtaaacactattttgtctctgtctttttgttttttctttattttttgggtcttgaatcattggatgctggacttgtacccctggtttgaatattttaggcatattttcgttggggtttcattatggaccctctacttagttggggaaggagctcaaagctactataaacaaataaagttgttggattcttgtctccatgtttggaaaacaataatgatatacaggaggaaaattgtgtgaaatagcaatgagaattgttctatttgtattagaagataatttttattcaattatctctcttgaatgatctatccaaatagcatagatgtttg

SEQ ID NO: 70012 - DNA, 780 bp, Glycine max
  Clone ID: PAT_MRT3847_34232C.1
ccccacgcgtccgcccacgcgtccgcccacgcattcggctcgaataaataactcttgtgctccctctacagtctacacacactctccaccctccccccagaaacttgtttggtacttgacactcagattcactcaagtggataaggatggcaaatctcagcaatagccactcagaatcctttgtcaagattccaacagtaaagtttgccaagcttttcatcaatggagaattcctagattctgtttcaggaaaaacgtttgagactgttgacccaagaacagaggaagtgattgctgaaatagcagaggctaacaaagaagatgttgatattgctgtgaaggccgcacgtgaagcatttgattttggtccatggccacgcatgcccggtgctgaaagagcaaagattatgctgaaatggtcagagctaattgaacagaacgcaaaagaaatagcagcattggacaccattgatgggggaaagcttttcagttggtgtaaggctgtggatgttcctgaagcatccaacatcctacgttactatgccggtgctgctgataaaattcatggagatgtgttcaaaacatctcgcaacctccacttgtattctctgatggaacctgttggtgttgttggacacattatcccttggaatttccctaccgtcatgtttttcgccaaagttgccccggccttggctgctggctgcaccgtggtcatcaagccttctgagcaaacacctctgtcatcactcttttatgctcatctttctaagttggctg

SEQ ID NO: 70013 - DNA, 183 bp, Glycine max
  Clone ID: PAT_MRT3847_34233C.1
gcttgcgctatagcttttcctattataagtcgtattaaaactgggcagtaattagtggtctttgctgaattctgattcaaatacatttccactcaacataccacacaacatactattttgtaaaatatagggtgaatactgagggggctaactaacaataaaagtgacattaatcactgccgg

SEQ ID NO: 70014 - DNA, 476 bp, Glycine max
  Clone ID: PAT_MRT3847_34234C.1
ccgggatcataccgaaaattaaacataagatgggagagaagaaagttttgattcttatcgtgtttgttatggcttatggtttggcagcaacaacattcactgcctcacaactccctccaacatgcaatggaaatgaaggattactcaccttttgtggcccttattgcgggaatatccaacccaatccaacttctgactgttgtaagtcagcagcttctgtatttcagagagccatggcttccggtcaaggtataagagatctgtgtaattgtctgagggctgctgtaccatttttgaactttaaagaaacaaaacttatcagccttcctgatgcctgtgggattaaactttcgttttctatgcccttatgtgtattgggtcccgggccttaatgtccctcctcccatccaaacaaaaataaaaattattgctctatgtattggtttattagattagtgaaagcatattaccatggc

SEQ ID NO: 70015 - DNA, 103 bp, Glycine max
  Clone ID: PAT_MRT3847_34235C.1
gacccacgcgttcgcccatgcgttcggaaaactgtatggacgtagcttgacggtatattttaattgagtacagctggatactaactgacaacacgttatatat

SEQ ID NO: 70016 - DNA, 609 bp, Glycine max
  Clone ID: PAT_MRT3847_34236C.1
cggttaatatcggcatctcttatttctgttgcataatttcacaagggtatctattagcaacttttacttaaccacaaaacctatatggactcttctaagaatatgatttgtctttcaggtccctggtaaaaattcttatccgtttgtgttcttacttgaacaatagagcttcttttggcctttccagaagagacaagactgttgcggcaatgttctttgatgaaagtcctgcttcttctgtctgatcttgtggtgatccatgttcaatgtatcgatcgggaagcatcataggtctccacttcagtggtccatccaggaggccaactatacttaggaaatgtgaaacatgtgaaccaaaacctccaatagaaccctcttccactgtaaggagaaactcgagctccttacctaatagctttatgagatacagatccaaaggtttgcaaaacctagcgtcagcaactgtcacagaaaggtctagtggcttgagcatttgagctgcttgcaggcattgctgaactacagaaccgtatcctaaaatagcaactgtgctcccttgcctcacactagtgccctttcctatctcaagaggagttcctttgttattga

SEQ ID NO: 70017 - DNA, 273 bp, Glycine max
  unsure (1)..(273): unsure at all n locations
  Clone ID: PAT_MRT3847_34237C.1
gaaggacggaccattgttggttgtcgcgtgtggaagagataccatttctactgcaagttcggtaaaacgtggagcatctganaatgcttttgatgttcagatacaaaatccaagactgcatctgaataggtttgacatggtgattacacctaagcatgattattatcctttaacttcagaacgacagaaacaggttccttggttccttcgaagttggataactgcacgtgatcctccagattgtcatgtggttctgaccatgggggcgctaca

SEQ ID NO: 70018 - DNA, 399 bp, Glycine max
  Clone ID: PAT_MRT3847_34238C.1
gaataactaacgctccacgcgaagtatacccccagggtaaatttagtcctttacattgacaatgtcccaatccactctattcctgaccctattgctatacccgctcgttcatgctctttcttacgaagctgctcatattaaagatggcctgaaattctattaccagctggatctagctcactccgatctaggttctgaaagtgtggcctaccattgccatgggaaaggaccataggcagtggaggctgatggtcgaatactgaagtggcaggagacatggagagagtggatagactatgcagatacctcgccacacaggatcatgaaattatgcgacgggttacagaaagacatgatggagtcaatgcatggaagacccttaggcctgaaattcaacac

SEQ ID NO: 70019 - DNA, 286 bp, Glycine max
  Clone ID: PAT_MRT3847_34239C.1
cattcatgtaagattttttctgttgcttttgatgaagttgtatgttacataaacatatctccatggtgccgccatcttaactaaacttggctgattcattgggttacatggttaaaggttatagaaagccagactacgagatgatggaatatgaatcactagagttatattatatgcatcatctatttcattttcttcatttgaagtttgcaccaaaaaacaaagaaagacagttttctttcaaatcattgcgatcctggttgtgctagattcttccttcttttgt

SEQ ID NO: 70020 - DNA, 1629 bp, Glycine max
  Clone ID: PAT_MRT3847_3423C.1
ggctcgagcttttatttccttacatttttcaactcttcattactattcattaactttcttgttaagggaatcttcgtcgtggaatctgaggaaacgtcagtatgaaaatcatggagttttcctcgccataatgaacgagagagaatcactagaggcacatgttgttggtagaagaatttctctgggattgactttgattgaatgattgttcactgttcatgctaaacaacacaaaccaaacggctattctgactactttttgatcctgtttctaatctttctaggatcctgtctgtcttgtcactaactcttgtttggtattagagcttaagtctttctttcgggctttgagttgaattcagatgtcacagtccaaggtaacaaaacaagatgatgagtccaaacctgcaaaacaagttgacaacctataccaagatctttgttggaggattagcttgggagactaagagagatactttaaaacgctatttcgatcagtttggggagatcttagaggccgtcgtcatcactgacagaatcacaggaagatcaaaaggatatggctttgtgatcttcagggacccaaattctgcaataagagcttgtcataatccctatcctgtgattgatggaaggagagctaactgtaatcttgcagctcttggtgcacagaaatttgatccatctataacaacaggaaggcaaaaattcagtagcccttcatggaatatggcaccaattccattgcaaggaacttccactcattacaatcagcacataccacactacccatttccgcatccagtctacaggtatcctggttatcctcacccacaagacttgtatgaaatgaactacaataatgcttatggtggacagcagcttccactctgttggtttccagcatattgccaacccttttatggccttagtagacagtttattccaacagcatatgtgaaaaaggcacaaacccctgacgtgtcacctcaggagttcacggttgttggcttctcagaacctatttcagcttctccctcaatttgcagcactggattagacacaggaacagtaccagctacaggagtgctagaatcccaccaagaacagaagtcttcaacttaaagctatgatgtcaatttactagaatagagaaagtaaaaaagaaaaatgacactgctgaataaaccaggaagctctaagtacattcccattgaggtggtctagcaaaggaactaaatcaagcaataacgtattgagatctcccatcgatggaacagctgatcctagagacctgacacttatgaagtgaatcctggatttgttcattgtctttgaacatttttttacttttcagcattctggtgcacagtattattcattcttcggttttcctttttttttcattttaattttcttttttaacattggattcctgctaagctatagttgaaaaagaaaaaaaaatgtttgttattattcttttattcttatacctatgctttgcattcctattttgtgttagttagctgaactaaaattgcaagagtaatatcagcatttgtttccatgtgtcccagatcatagcaattctatctctttttagctgaagtaaaactcggttttgga

SEQ ID NO: 70021 - DNA, 1186 bp, Glycine max
  Clone ID: PAT_MRT3847_34240C.1
gtttcaaacctgcaatgctcccctccccttttaggtcctcctccattgattccgaatatggattatgtacatagcacgcgtgcggattttgaccaaagctaaacattagtcagatgatactgttttttcaccttgcacctgcaaacataactaaactaaccaaaaaaagcaagatcatggtaccattaagttaacgccatctagaactagcttgggatccacccttcttgtctcaactctcaagtcatggcattttctttcactcaacgatttttcctttctccttcacttcttcttctccttctcctgattgctctctctgcttcttctcttactcccacttgtttttctgacagtgtttttgattctcaagcagcgcatgctgggaggaaccttcttcaggctaaaaaaagttgtcctgtgaatttcgagtttttaaactacacagtaatcacaagcaaatgcaaaggaccccagtacccacccaagcaatgctgtgctgcatttaaagagtttgcttgcccttatgccaatgctttaaacgattcaacgaatgattgtgctgcaatcatgtttagttacattaatctctatggaaagtaccctttcggcttctttgctagtgtgtgtcgccaagggaagaaaggtattactattaactgtcctgcttctgctgcatcgccaccatcagtatcagaagatgacactggaatgaaaactcaccagatacgtgtgtgacagtaatagtagtagtctattttccatgttgttatgttacatgtaataaggtttgttcagtacttacactggacaagtactaaaccacttcagttcaaagacatgttaaatttgcactcagatcatcctggggatgcaacttataactactatgttggtttcacaagctgtctctagtaggaaatgccagaatatttttactttcatcatctctgttgtgttttatttctcttaattttctaataaaaaaaaatcgtccactgtccatttgtattggtgatgctcacagcctacaaaaaaatcttggtattttgatatctttctatacacaacttttattttttttctcgcgcaatattgatgtataatcagttacccttttttatatgttgtgtgtgaattaccttttgagcaaaaaaaattgtcaatgtacctgtagtttaaggag

SEQ ID NO: 70022 - DNA, 251 bp, Glycine max
  Clone ID: PAT_MRT3847_34241C.1
cgggaaattgaacctcggtagcctctatttggaggctggaactcaacctttgtcagtggttatgggctagcattgcaagacttcctttttgaatctccggatggcagaagatacctcaatttgtacttgtggttgccctcgtgtcgagagagtggttgcgaggttgagtggaaacattgtgctgcgagagggatgcaaggatgccagagttgagagtccttttgaagtgaagcaacatctagagatgaagt

SEQ ID NO: 70023 - DNA, 530 bp, Glycine max
  Clone ID: PAT_MRT3847_34242C.1
gttcctccagttccatgctcagtggagtgattttcccgtgttccagtttttcgtgtttgcaaacggagtaatcagtggatatgctatccttagccttcccttttcatatgtgtgcattgttcaaccacatgcagtaaggccaaggcttcttcttatgaccttcgacacagtgatgatggggctaatcagtgttgcggcggcaggtgcagctgcgattgtgtacgtaggtcataatgggagtcaagacgcgaattggatggctttttgccagggattcaccaacttttgtcaagctgctagtgaggctgtggtcctttcatttgttgcagctgctttcttcttgtgtttggtccccctctccgctttggctctcaaaagcaattgactaggtgtttcgtttccgaaccatgatggcgcttatttgggtgtcaatgttattgcttgtttgtctacttctgtacaattaaagtgagagattttcatgtgtaaaatctactcttaatattgtaaattggaatatatatggaggt

SEQ ID NO: 70024 - DNA, 167 bp, Glycine max
  Clone ID: PAT_MRT3847_34243C.1
cacggggtcaaccgacatagcacagataacaggcattctcttatagcaactacacatttctcagtgttcccaatgtctcactgcccacgcgaactcgacatccctggttggcctcccaagcttcatccctcaacaggcaccgttttgctcccaagtctaactttccc

SEQ ID NO: 70025 - DNA, 118 bp, Glycine max
  Clone ID: PAT_MRT3847_34244C.1
ctatgttaggtgaaatccggccacaacttatcttatttattccaaatcaaggcaacgaatgattccttttcaccatcttaccttgtatttaacggtgctactaaacaacaaccctctt

SEQ ID NO: 70026 - DNA, 378 bp, Glycine max
  unsure (1)..(378): unsure at all n locations
  Clone ID: PAT_MRT3847_34245C.1
attcgactcgaggacgccacaaattatacctcttatacctatttcctaccaaagatattattatcttaacaaaaccaacataactgaggggcctcttatatcaatgagtaagagcaaanctctctacactctcttcaaccaattaacataaatatcacaacactacaatgagatgttaatttaagatttcatcccaatcccaacccaaaaaacatatttccagaatcttcaaatgtttcaacccatcatcatcatccatcaacatagttacaacttccactttacacccacattaatctacttaacgagagtacctatatctctattattacaacaataaatcatatttattgaacattacaattccttacattacta

SEQ ID NO: 70027 - DNA, 2235 bp, Glycine max
  unsure (1)..(2235): unsure at all n locations
  Clone ID: PAT_MRT3847_34246C.1
acacaaactaaaagcggccggtatgggtgtccaacatatccgctcctcctgtgtacacccccaccccccgggtattaagtccgtcaacaggggtctccctcccaccactaatcgtcacacctttgagaaggggacgcgcggccgcttctttttatacccacccccgcgcaaagaggtgttttcacaaccctcaaaagttggggcccccgctgtttcccaccccccnctttaaaaaacccgcccagagggggggttatattaactcttaaaaggggggaaggggggcggggccccccccccanattttttttttttttttatattttttttttttttttttttttttttttttttttttttttttttttttttttttttttttttttttttttttttttttttttttttttttttttttttttttttttttttttttagtaacaaaaaaaaatattcataaaataaattaatgacaataatttagaacacatggcttaaggtcaaacagaatgatagaatgatacaacttacagctgacctggaaagacaacaaagcaatgaatcgagagatccttaaaaacacagaaaaaagtcttccctaggtaatatataaagtgtctcaacatgtttagcagcgcatggtctctacattaaaattacatagagcacagattgccctagtataaattcctacttctccatgtgggggctatattgcctacaggctaacgaaaccaataggaggaaaatttacgattttatataaaatcaaccagtataatatggcagaacacttgggcaagacaagaacacccttctcaaaggtagcacatcaccatcactgtaaaaagcttaacttgcaacgggttttgcaatgactttcttaacggcttcagcatatgtcctgtgctgatatggcagagtggactcaagcaggtcccaaagtgaagtcttgggattccatccaagctgcctgtttattatggtcatgtcagggattctcttgtcactatcatcatatccctcaccataaaattcttttgagctcacatcaacggtaggtgtttcaggagtttgttcgccacttacctttgaataaaccttaatcattatttcagcaagctgcctaacagtaacctcattgtttgggttacccacattaaatatgtggccattggccctggcagggttttcaatcatcagcaagacagcttcaatagcatctttaatgtaaacaaaggttctctgggactggccaccgtccacaagcttgaggggctctcctctgagaagattattgataaagcatgcaagaacccgaggaacaccctcacttggaccatcaatcccaggaatgaaatccattcgaggtccaatccagttaaaaggcctcacaattgtgaactccaagccattttcagcaccctcagcaaaaatcagcctctcaatcaactgtttcgcacaggcataagaccacctctgtttttcaatagaaccaaaaatgcaaggagactcgtcttctttaagaacatagtatgccggatccttacgaagaggactatctttagggagaaaggctccaatcgtctttccgtacacttcgcaagtagagaaatggataaggcgcttgttgttctcggaacagtatttcaccacggggagcgcgtcgatgaaattgctgtaaatggtgtcgagagggcgggtgttgtaatccgcgggagtgcaaatggcagccagattaatagtgagatctgccatcttgatgaggccctcgaggcgagagtcgtgtttgatgttgaggcggtggaaggtgatgcggccggcccagggggaatcggagggttcgaggaggtgtttgatgttgtcgttgtagacgtcgagggcgaggacggtgtgaggggtttcggacatgagcttctcgcagagatgcgagcctatgaagccgccagcgccgatcatgcagatcgtaagtgccttcatggggttcccgtccagatccactcgcgccattgctgcgaagaagaatagtgttgtggtggtggtggtggtggtgctttttaacgggactcagcgactgataatatatagaagacggagatgtgataattatttaattatattttgagaagaacatgtatttctttttccgactgtgacacccccttctgtcgtcttctcgcagccgtacggacgcgtgggcggacgcgtgggcggacgcgtgggcggacgcgtggg

SEQ ID NO: 70028 - DNA, 364 bp, Glycine max
  Clone ID: PAT_MRT3847_34247C.1
aacgagctcttgcaaaatgaacacagattgaaccttctctgcccgaaactttatgccatgtgcacccacatagagtgtctcagatattagcattgtttgccaccgatatacgtaagctgacctgctcttcgttcctacttctgatggcgtggaaccctgagcccgacacttctctgtcacgacaactatgcgttctcagtgtttcctgcagaagcatgcgatgctgcacgaggagaaacctgcatgacggagatttactcaaatacgaagatacagccctaggcttagactccacgagtagtcacagagaaccgttagagagagatcctgaatactatgatcctaatacggtatttccaggaga

SEQ ID NO: 70029 - DNA, 587 bp, Glycine max
  Clone ID: PAT_MRT3847_34248C.1
gcgacaccagctttatcttggcacgagatgcaattggcgacacttacttgttcattgcttggcgtctaaatggctcccactgaactccatcatatttgaatggtgactatgatgattgcgaacattatgagtcttttccacctgggcacttgtactctatcaaacatgagagcgttgctgacgattgcacaatcgcttcatggtttctgtgacgctattctcctcagccaccttatgatcactcttgctttgaggcatgcctttgagatggctgtggttaaacggatgatgactgatgttccctcagcaggttcgctttctcaaggatcgtactctacattgagtgcagtgcgacctttatctctacctgtcaggctcacgatgctctctatcagcgggcatccaaattacactctttatgtgtatgcctagagggagcacctgaccttatggctagccttgaagtaacatactacataggaactgttcatcatgaataccctactctgtacaggaaggcatatataccattgatgatgagatctatcacatatattcatcatgggtcgacacaattagagcaagca

SEQ ID NO: 70030 - DNA, 171 bp, Glycine max
  Clone ID: PAT_MRT3847_34249C.1
ttatactttttttttttttttttttttttttttctaccaatcaaatttacaagggcggaatcaccaaaaatcttgactcaaaaacctctcttccacttacagtaccccttactgataaaaatattttgccaaacattctaccctcccctcgatgggaatcgcccttaaaag

SEQ ID NO: 70031 - DNA, 492 bp, Glycine max
  Clone ID: PAT_MRT3847_3424C.1
ggcttggaacctttgggctgatttatgtgcttgatggtcgtgagaagatgatagaagggggagacggagtaaacaaagtatagaatagccgaagcgaacggtacaaaaacgtacgccgtagagaaaggagagggcttagcggcgccgccttcgtatggtcctttcgagtctcggcatctacggtgttactagacctctctttctagtctttctggtcattgtgttgctgtctttgactcttgcggtcatggcgatattgaagtattattcctaactagtagtcataatcgtccttatacagcgggcgactctgccgtgtccaccgatctctcgggcgcttaataagcgccttccgcggtctacgatcggggagttactacaggccggcactcacgtacgccctgtttcgataaagccaaggttcacgctcgttctagcgctttctcttcttgtagagatttaaatactagaatggcggacggtacgtgcgtc

SEQ ID NO: 70032 - DNA, 399 bp, Glycine max
  Clone ID: PAT_MRT3847_34250C.1
cgatcggtgagagttagaaggtgacgatgccttaaaatgtttgttagcttaaaagtaaatccgaccatgatgataaggaggatcccaatcatcttcgattaaaaataattggagaattttcaattaataaatttttaactatcagattaaattgagtgttgagatttgaccatgttttcaatttaattttttttgttttttaaaacagtaaaatgtctttggttctatccacgacaacattggaagaatcttgacaattcttttcactgaaacggtgaaggagagagcaatcaacctcttagtaacatcaccaaagaggtcatgaattttgtcaaagaaggagactgtatgtgatgagacccactttaagttgttgagtcaactcgttgagtgagtgat

SEQ ID NO: 70033 - DNA, 488 bp, Glycine max
  Clone ID: PAT_MRT3847_34251C.1
aatcaaagcactcccttctatctccctcttttcctctctgtctggtttgcattagtatacatacatataaatattcatgtatttgtataaggtcaatccccagaagaagctgaaggtccttttttttctgttggtttctttggttggatctagagaagacaatcttagttgtgaaactcagacacacatgttgggagtaattattttgttgtaaattctgagccttttgcaggagaggttaaactcagttttcatacacacagctgggaaatgaaaattaactgtgaagccaaccagctgccactttttagcatgttgccacttctcgaatttctgaaacacatgtaaagggagcacactttgcacacattgaagatggatatcaaggaagcacaaagggtggtcatttccaaaccagttgcttcaaggccaacttgttctactttcaaatctttctcagagctcctagcaggtgcaatcaatgtttc

SEQ ID NO: 70034 - DNA, 390 bp, Glycine max
  Clone ID: PAT_MRT3847_34252C.1
ggaggagtcctagtcagttcgaagcgcgcagcactgttatgaatactccacaactccgctgaacgacgaactgttctctcatttgaggatagtgtgatctcagcgatagttgagacaggtgcagaaggatcactcggcaaagaataacacgctgtcgaatcatctgctactattctgacgaagatgcccagatagatacacgccaacgtgctgttaaagaaggaaccttttcggggctgatactgatggcgataaaagagacattctcaagcatcggatagagctacgttgcgtttggtatttgctcagacattatacgacgaacaaaagactaacatgctaagttacggagataattgcttatgacattgatgaacgattagatggagg

SEQ ID NO: 70035 - DNA, 489 bp, Glycine max
  Clone ID: PAT_MRT3847_34253C.1
cccgccgccctttaccccgaaattcttgaagccatggttatggaactacattatgattatgagtgtagaaaacgaagaacgagaatggatgttctatcaaaaatgaatcaacttaaattgctcatgcttaacaaggtcaactattatggaaatctcaattatatttcaaatgaattaagatatctatgttgagataaatatccttccatgtctttgccatcaggtttatattcacatcaactctgccttatagcaatattaaacaattatggaaaggcacaaagttattatatattgctgtttttcaatgttctatggttctaaatggacaaatgaaaaaataaactatctcatatatgtctttaacttgattgtatctgcttaaagaaacatgagcacatataaatgtcattaattttggccgccagcttcttttgaccaaatttaaaaaaaaaagggtgtatctttctttcttttacttaaagggta

SEQ ID NO: 70036 - DNA, 465 bp, Glycine max
  Clone ID: PAT_MRT3847_34254C.1
cccaaatctctcttatctggttaaccccaatgtcatatgtcatgcacatgttttttattgaaattttgatccaaaatatcctcatcttcttccttggaacactttcatgtgttcttgctttcaataataaattgaagaacataaaaaagacctcaagacaacttcaaaaatttcataaaaaaattctttcatgatctcttcaaaacaactaaacaagcacaaattgtagaaacacgaaggaatttgtacattatttcatcatctcatcttttttcttgttctaaatcataaaacaacattttttttaataaacaagaaaaaaattcattaaaaaggtgtaaaaagcacatcattaccaaaaaaaattagcatatcctgcaccgcaattttcctattcagtccttaaattcgccaacaaccacatcattacaaacatcatttgattcaaaaactatgtcattccct

SEQ ID NO: 70037 - DNA, 592 bp, Glycine max
  Clone ID: PAT_MRT3847_34255C.1
ataaaagagagacatctacttctaatgcgagaatacggacttcaaatcaaatagaaatgaccaccatcaaatttggaacatacataaaaacctggaacagacacttagcttagaagaagcctgtcaaatatcgaacctgtgttcacgtaagaaaaatgcatgaaaaaggattaggttccaaagctgttcctgcaaataacaaataggagttgaataacagacatgatcacgcatgcccaactgcatatatggggcctacgacaaatggctaaattctcaaacctggttgggctaggaatctggttaagagactctggttagacttgccattcaagtacaccccatcaaaggactgaattgcgctgatgaccgcatcaggggtactgcaagatacaaattcggagctctttggagagaacaatttccctgtcaaagagaaccctagctcccaagatattcccttgttcactagacactgacttgcgtgctacagggagaacacctcaagcaagattacctacatgaacacggttttcacaacttgaaggaccactccctccgtgaccaaaagattaaccacattttaccacca

SEQ ID NO: 70038 - DNA, 251 bp, Glycine max
  Clone ID: PAT_MRT3847_34256C.1
tattttttttttttttttttttcctcctaagaggagcatgcttaaatgtttttattagtaaatgcttcagcttgaggaatactaaatttcgaatttttgacaggtatttgtgaaatttagtggccttttcaggttgtcaagagggcagttttctcatctggatttgtctcctctcttgtcccaagttgtctctagctttggtgctaaccgtcttatgtggggcacgtaagttcccatcgtatatgttttca

SEQ ID NO: 70039 - DNA, 395 bp, Glycine max
  Clone ID: PAT_MRT3847_34257C.1
gagcaaagtgagttgcggaaaacagtgaagtatataagagatgaacatgggggccctgaaccggggcctaagggcgagacgccctgacagcctttctacaattaaccatactatgtggtgagaagctaaagccatacaggctggtaaggaccataccctgccctgacaacatcataatcgttgcaacaactgcaggactctctacgatgaggagtacacaggagctattcaatatgcaatgtgccagctgcttccttcggcgcttagaatccaccgcaatgccccagatggtagaaagatacttcatctctaactgggatggccttgataagcatcacctaaaacacagcgtctctctcacaccgaactcactacggacctgaagcccatgtgac

SEQ ID NO: 70040 - DNA, 392 bp, Glycine max
  Clone ID: PAT_MRT3847_34258C.1
ttttgttttttattttttatgttgggggtgttttttttttttttttttttttttatttcatttttttttttttgtttttttttggcggggggagaacccccaaccccaaaatttttttttgtcccccctaaaaattcaccatttttgcccaacccaaaatttagcgcgttaaaaaagaggttgccctttgcaataacggaagggaatctctctttttatgccaaaaaactggcctataaaaaaaaaaaaaacccccttaagttaaaaaaaaaacaaaatgaaacgggcaaacttttgaaactcaaaaatttttttaccttctaaacaaatgcttcctttttgaacaaaattggcccctctaaaataaaaatttccgggttggaaatttttga

SEQ ID NO: 70041 - DNA, 137 bp, Glycine max
  Clone ID: PAT_MRT3847_34259C.1
aattcgtctcgagcataacactgtgacacacttgtcactgcctccatcaagtcgctgacgcgctacctggcactatgcctcgattggccatagcatattccaaacatccatcaattggtgggacctgcgttcctgca

SEQ ID NO: 70042 - DNA, 186 bp, Glycine max
  Clone ID: PAT_MRT3847_3425C.1
aaaaataataagaaagttgatttagttatctatgtcgccatagctaaagggatcatagtgtcggctgtttgtgagacgtaggtattggagacggatactacggcaactatgtccacctacatatgaaccaatatagtatgtataaggatgaaacacagattgcgtaaatttacatccaacaattta

SEQ ID NO: 70043 - DNA, 346 bp, Glycine max
  Clone ID: PAT_MRT3847_34260C.1
tcccaccccacatttattttccacccacacggaaagaaaacaggagacgtttgaaccaaaaagcgggggggacaccactataaaaagggcagaagaactaaaaaaggacgggggggactatacagcctatgcatacaacaggccacatatgctacacaacaaaccgatatgaggaaagcgacccccaaacaaaagctaggctcagaaacgagacaaataaatcgatactcagaaaaagacaggccgcgaaatggaaacgacatatcataaacccaccctgaatactagctaaataaccgctaggaagcattccatgcgccaactaggaagaagaatcaaccattcc

SEQ ID NO: 70044 - DNA, 308 bp, Glycine max
  Clone ID: PAT_MRT3847_34261C.1
ggggggaaaaagggggggggggggtaaacttttaaaaggaacccttaccttgtgttcacaaggtacccccccctacccgaaaaacctttttggggccaaatccttcctcgcccaaattatctattttttcaataccccaccccacttgggggaaagtgtgtccccgcccaaactaatttgcgggggtggggaaccccccccaggaaaggggggaaaaaaatttatgtcccgaaaatttttcaaaaagggggggggcccttataaaaaaaaagggagcctccatttgttgtaaaattaagggggtttta

SEQ ID NO: 70045 - DNA, 1017 bp, Glycine max
  Clone ID: PAT_MRT3847_34262C.1
aattcggctcgagatcaagcttttgatgcaacctcaccccaattgtgatggcgatggagataaaagtttgtgttattcccatagtgggtattggaggcttagggaagaccacacttgcaaagttggtgttcaatgataataggatggatgaacttttcccattgaagatgtgggtgtgtatctccgacgaatttgacattaggcagattataattaaaattatcaactccgcttctgcttcagctccaattattgctctttctcaccaagaaaacattaatagcttcaatattgagcagttacaaagtcgtcttagacacaacctttctggaaagaagtatttactagtcaatggattcaaggagctgcagacactttagggacattgttaattttaaattgtcatagtttttagattcttcctgagtggctgacaacaatgactcatcttaagatactccatattgctaactgtcctcagctgctgtatctcccaagtggcatgcatcgcctcagcgccctagaagaattaagcatagatggttgtcctgaattgtgtcgaaaatgtcaaccacaatgtggtgagtactggtccttcatcactcacatcaaacgcctttccattggagaaacaagagaagggcaactcatttttcgaatgttgtcgcgtctacagttaagattgcacgattagtaaagctaaaatgcacaccatggagaccgcaatttaaattctgatcatgaatgaaatattattttgcttctaaaattttcaatttattaaaaacaaaattggcatggggcaaaagaagttaacggttcatcatttgtatagccattgtaggcatttgcatttctagcgtttgtctcttgaatacttcaagtattagttttagaaagaaaaagcatcattttatataaattctcatgatgacagaggggcacttcacagaatcctccaccttcagcttttgtaatctgtccactagtttgagctaaatctattttcttttcatc

SEQ ID NO: 70046 - DNA, 528 bp, Glycine max
  Clone ID: PAT_MRT3847_34263C.1
atctaacgaaaggcacctttcggagtagcagctaatacttccttccttccagaattgatatcagcaaggcattaatttccttctaaaaaaagaaaaaaacatgaattcttcatggacatgcaatgaaccatgaatttgccctacagactccagcttcagcacaaagaacttacccatcgcaaattccctatattttgatgaaactagaatggacaccaactgtcactgagctgggaggcctaacacaatacaccagatgccaaagcctgctaaaaacaacaggaaaacgcctcttcagttacatgcatcattcatgcatcaaaatccaacgggaatttactaccggtgtaacgttagatttcctccaagccaaccatgtttacatgaaaactcggaacataggtattagaccttcaagaaaaacactgacattagggccattcatacaaatcaaaaatgttcctattaaaacaaacaaaaacgcgtggaaacaacaccttatgaggcctgtcttaaaccaaaaaccct

SEQ ID NO: 70047 - DNA, 297 bp, Glycine max
  Clone ID: PAT_MRT3847_34264C.1
atagggcggaaatttttatgtttcccataataccaatcttcttcattcatccaaataccagggtactcaaacctcccagtgaacaagacatggactccagcttaattaatgcaacctagacacaaacgaacatatatggtaaaaaacctaatgggcctgggtggggcggaaaaaaaaaaaacgttttctccgcatggaccagaaaccctccatgctccaattgcttgagctgttgtttgcatggccgcaacaacaagactgtttcggattggccgggaacaccatggaaaatggatc

SEQ ID NO: 70048 - DNA, 472 bp, Glycine max
  Clone ID: PAT_MRT3847_34265C.1
acgaggtcacttaccaagacttccacaacatagagagcttctctctcagttgactccaattcatgctaaactttcaaatgaaagatcaattgctagaaagcatcctgtacataggtgcaacgaagtacaggctgaagctgcaacacagtttttgaatataatgtggcactatttggaatcactctgctcagatctgaaatctcacacgatcactagtgtacaatcaaataacgacagggtttctttacttcttaaagatagcttcattgattcatttcctgcaagggaccagccattcattaagctatttgtagatacacagctcttcactgttttatcagactcacgtttgtcaagctttgagagtggcgagtcatagtcccatgtcacattattttataaaccaaatggtgcaatacatctgttagacatgtttgttggcactgaggaagatatagttcttgatttcatt

SEQ ID NO: 70049 - DNA, 373 bp, Glycine max
  Clone ID: PAT_MRT3847_34266C.1
tccgccttgttgagcttgagctcttttttcattatagaattctccacccagttaatgatgcatatgggttgtggtggacatcagacatctgtgaaatatggtttgctgtatcatggataatggatcagtttccaaaatggtgcccaatacagcgagaaacataccttgatcgtctgtcactcaggtatgaaaaagaagggaagccatctgagttgtccagtgtagacgtctttgtcagtactgttgatcccatgaaggaacctccactgattacagcaaacactgttctatctatccttgctggtgattatccagttgataaagttgcatgctatgtctcaaatgatggtgctgctatgcttacttttgaagc

SEQ ID NO: 70050 - DNA, 290 bp, Glycine max
  Clone ID: PAT_MRT3847_34267C.1
ggttgctacaggtggactccccgagaatacaggattatcattggcctgtgctatgaacagttctttaagggggcgtgccagttctgatatttacaccatctgctctgaagactgtgaatcatggaatcctggtggcacaaaagcaatgactatgtcatgtaatccaaacccatgttctgatgcatggagattggaactcttgaagaccgccggacattcactgaaatatacaactgtgccactggatggactgccaccccaatgcaggattgttcacgtacactagattg

SEQ ID NO: 70051 - DNA, 931 bp, Glycine max
  unsure (1)..(931): unsure at all n locations
  Clone ID: PAT_MRT3847_34268C.1
ggcgctcgggccggccgggctccgctgaatgatgaaataagcactgggctctgagcaggtaaaactgctatatgtgaagcacaatgctagcctagatagctatctctgactatgaaggaaagaagaaaagaaaataataagagttttaatattattgtattgtagtagtagccatggggactttcaatcactatgtgattgttaagttcaaagatggtgtggcagttgatgatctcattcaagggttggagaagatggtctttgggattgaccatgtcaagtcctttgaatggggaaaggacattgaaagtcatgatatgctaagacaaggtttcactcatgctttcttgatgacattcaatgggaaagaggagttcaacgcatttcagactcacccaaatcatcttgagttctcgggagtgttttcacctgctattgagaagattgtggtgctggatttcccatctaacctcgtcaaagcaccagcatgatcctcaacttattcaagcaaataaacttttccatctttaaaagtgtatgcatgtgtgtgcatctgctatttgtagtctgttatggttgttcctagctagttcctacaatctcttatgcaatttcaaacttgataataagttcttcttttttcctaattaatggaaatttctagcattattggtatttgttaatactaattctatgatttctctccatgtttctactgccacaaagggtgtgatgaatgatgaatgtgaacagtatgagccccttgattggatgttttctatttggttatagaggagggaatgtgattatcaatacagagtttgaatatatcatcacctaactagcaaggggtaattttccnaaaaaaaaaaaaaaaaaaaaaaaaaaaaaaaaaaanaaagggcgggcgctcgcgatctagactcgagcc

SEQ ID NO: 70052 - DNA, 231 bp, Glycine max
  Clone ID: PAT_MRT3847_34269C.1
ccttagcctgttttgtttttttttgggtttgggcacaaactttgggacataaccaatctgaattctcggggaagtttttcttggcaaaacataaatgccggcaacagagttattctcaggtttaaccataaagggggtcctttcctggttgctggggggtcaaactcctgaaaaaacgaggggggggggggattttcattgatggcaaccccaagcgactgaaattggggg

SEQ ID NO: 70053 - DNA, 302 bp, Glycine max
  unsure (1)..(302): unsure at all n locations
  Clone ID: PAT_MRT3847_3426C.1
gagactgacgctgctcgtgatgcacactctaaggacgccgataaatatcgtaagataatcatangaagagatccgcgaagtcatgggtgcacgactggtctaacctatacagtacttgcttgggctggggaaactgctattctcttgtgccacaatatgaaatctttggattttaagaaactgtaagaacttttcatcgctcagcactgaacaaggctgataatattgcagattaccggcatcttgttgaatgaaaacggagattttcttttcagcccatctcattcacaaatcacaatggg

SEQ ID NO: 70054 - DNA, 272 bp, Glycine max
  Clone ID: PAT_MRT3847_34270C.1
cttctggggtgttgtcatgcgttgtggctgtccgtgccgtgaccttccccttgccccccttttcttggctcccctttccgggcttcctttgacgggtcagtcccactacggcctacccccctgactgggggggtggttgacttgccccggttggcttccccccccctccgcccacactgtctgatgtcgaacggtcgggggctgctccgtcgctgtcttcccccccagacccttggcctccctcctccccctgtttctgccccctccttttt

SEQ ID NO: 70055 - DNA, 341 bp, Glycine max
  Clone ID: PAT_MRT3847_34271C.1
tctatgcgtcaggttttgacagaaatggcactcacggccatccatgttaatgaccttcttctcctgaagctgaagaccgcaaatgcatttttgaccctatgtttctgccagtgtcccagaggtgtggaaatgaaacagagaggagtacgatgaaaaatctaatatgaagcaacctactggtccggtggcgaacctgattggccacttagctacgaaaagggaaaaccgtaaaagctaatgcgatgtatgggttggatggattggccaataaaggagacgattacttttgtaatcaacacagatagccaagagagccgctggggattgatcaacgctctttg

SEQ ID NO: 70056 - DNA, 224 bp, Glycine max
  Clone ID: PAT_MRT3847_34272C.1
gggccccaaatttattaaaagggctcaatgggtttttttggaaaattggcgggacaaattttgttttttacaaggttcctgtaaattgttacaatccattagcaacaggaggccgaaattcctttaattcaacccttttggcaaaaaatggaactgggaaggctcaccccttatggcaatattttttaaaaccatttaaaaagctctaggggcagttttttttt

SEQ ID NO: 70057 - DNA, 537 bp, Glycine max
  Clone ID: PAT_MRT3847_34273C.1
tccaaaacccgaattggagaacttttaaagtcataaccgtcctgacgcttggatcatagacatcatgtatacatggggatccacacttatcaatagcttgcccacacctgtttacaggcccatgcccgtcttcgctcttcgagtaggggtagccaccaatcgacatactaaaacattggctgccgattcttcacttgcttatgcagttcctggaggtgctcacacactatgtcacgctcaattgtaacccctgaccaactatgttagataagatggctagtaccttgctacacaccaaggaaaagagcatgcatcgtgcaattgtgatcacgttaccagagctcagcaatgggtacactgagaactacgatgaactgacccgtgctaaagtatggcaccttgtgatgctctgacttatggtggatcattccgacattagaggcaagccacaagaggatcaagtcttcgaccagcgcctagagggctgaacaccagagagtacagactcatggtgtccatatgctttgggagcttgga

SEQ ID NO: 70058 - DNA, 1354 bp, Glycine max
  Clone ID: PAT_MRT3847_34274C.1
ggaatttgtaaaacagttggcattagaaaaacgtggctctgcattatcgctagcggccgacaccatttctgattgtagcatcattattattactgaattctgcagtttcaaggtgaagcctgaagcgccatggaagctcaagcggttcaagtcttgcgatattcagctacgctgcattccaataatcccaagcttgagaaaacagggaccaatggctctctccgaatgtttggtggatttaagaaacagctttttgtttcgtctaagttgcagagtgcaaaaccttcggcgaatatacggcgaaggacagcatctttggtggttgcatgttcgcataataatattccagcttcagcattggaatatggaagctttcattcttctgttgaagaaaagttgattttgaagattaaatcacaagagatcgaaccatacttaagtggacgctgtatatatcttgttggaatgatggcctctgggaagacaactgtgggacggatattgtcagaggcgctttcttattcgttttatgatagtgatgcattggtggtgaaggaggttggtggaatatctgtaactgatatattcaagcactatggagagcctttttttcgtaataaggagactgaggtgttgcagaaggtgtcaataatgcatagacatcttatttctactggtggaggtgctgtcgtgaggcccatcaattggaaatatatgcagcaggggattagtgtttggttggatgtacctgtagaagtcttgactcagagaataacagctgaaggaactgattctcgcccacttctacattatgaaggaggagatgcatacacaaagactatcacgcatttgtcttccctttttgaagaaagaagtgaagcatatgcaaacgccaatgtgaaggtctccttggaaaatatggcagcaaaactgggccgaagagatgtgttagatttatctccaactgctattgcaatggaggcgctggaacagatcaaaggctttcttataggtgaagatggcttttaagcgtgtgctagcagaatcttccacacaagcatgctttaattgtgcatatttttctcttcaaataataattatagcatggcaatgtgttatatctttttgttaggaaaaggaatgatgcagcatcatcaacatgcacatatttagtattttttttattcgtaaaaattaaaaataagtactagaattgaagttttacaactttcacgtactgaactagatctcgttagtgtaggaatttagtgtttatgtgtaatttgtgtgatcatatataatttgacggcatgcagcatttaatttgtaaatctttttttttttttaaaaaaaa

SEQ ID NO: 70059 - DNA, 267 bp, Glycine max
  unsure (1)..(267): unsure at all n locations
  Clone ID: PAT_MRT3847_34275C.1
cttgtgttggctancanactagaattctttgatgganatnttccagnggnttcttggttaccaattttngtgnantgncntgcatcccngnaagtcgattncnttcagangcngncgtnntaaatgntncatgaggtagtggacgtggtggtttacccaccactgncttggnttagttctgcngttagtaatcgcgcctnagatatcgacnaanagattngcacagcacttgggnaaggtaangaaattgnttttcttatagagttg

SEQ ID NO: 70060 - DNA, 786 bp, Glycine max
  unsure (1)..(786): unsure at all n locations
  Clone ID: PAT_MRT3847_34276C.1
gtattctgcagtttcaaggtgaagcctgaagcgccatggaagctcaagcggttcaagtcttgcgatattcagctacgctgcattccaataatcccaagcttgagaaaacagggaccaatggctctctccgaatgtttggtggatttaagaaacagctttttgtttcgtctaagttgcagagtgcaaaaccttcggcgaatatacggcgaaggacagcatctttggtggttgcatgttcgcataataatattccagcttcagcattggaatatggaagctttcattcttctgttgaagaaaagttgattttgaagattaaatcacaagagatcgaaccatacttaagtggacgctgtatatatcttgttggtcagactctgggcagaagtgcttgcgcatacatacattgcaagtataattacttagggtattcaaaatattttgaatctgaaatgcaggaatgatggcctctgggaagacaactgtgggacggatattgtcagaggcgctttcttattcgttttatgatagtgatgcattggtggtgaaggaggttggcggaatatctgtaactgatatattcaagcactatggagagcctttgtttcgtaataaggagactgaggtgttgcacaaggtgtcaataatgcatagacatcttatttctactggtggaggtgctgtcgtgaggcccatcaattgggaatatatgcagcaggggattagtgtttggttggatgtacctgtagaagtcttgactcannagaatacagctgaaagaactga

SEQ ID NO: 70061 - DNA, 828 bp, Glycine max
  Clone ID: PAT_MRT3847_34277C.1
ttttttttacaaattaaatgctgcatgtcgtcaaattatatatgatcacacaaattacacataaacactaaattcctacactaacgagatctagttcagtacgtgaaagttgtaaaacttcaattctagtacttatttttaatttttacgaataaaaaaaatactaaatatgtgcatgttgatgatgctgcatcattccttttcctaacaaaaagatataacacattgccatgctataattattatttgaagagaaaaatatgcacaattaaagcatgcttgtgtggaagattctgctagcacacgcttaaaagccatcttcacctataagaaagcctttgatctgttccagcgcctccattgcaatagcagttggagataaatctaacacatctcttcggcccagttttgctgccatatctgtacaaaagaacataacacaataatagatggatgttatctagaatgcagataatgaatgagtagtataccctttagagcttcacagaaatctaaaaataaagcaatctgaattttcatgctttagcaatggacaatccttaaagactaactactatccataaatgaagaccaaaaaagttaagcttcagaagtcccaagagtctataagtagcaacttcctttcctgttgtattcccaaagattctggacagaaccagaattctcatttaaagaaatgaaataacatttgcagacatactttccaaggagaccttcacattggcgtttgcatatgcttcacttctttcttcaaaaagggaagacaaatgcgtgatagtctttgtgtatgcatctcctccttcatat

SEQ ID NO: 70062 - DNA, 396 bp, Glycine max
  Clone ID: PAT_MRT3847_34278C.1
cgaaatatattaaaaaaaaaaaattataaaaaaaaaaaaaaaaaaggggaaaaaatgaaaaaaatatataaaaaaaaaaaatataaatattataataaaaaaaaaaaaagaaaaataaaatatattcaaaaaaaaaaaaagggggcgccccccctttaggggccccccccccccgaaattatttgcggaccgggtccatgggggttttccattttttcttttttggggccctataaactttgggctattccagggcaattgttttccctggggaaaaatttttttccacacaaatttctacaaaatttagaacggggagcttttaggggtaaaccctggggcccctaagggggggaatacttcactttaatggctgggccttcattcccctttttc

SEQ ID NO: 70063 - DNA, 352 bp, Glycine max
  Clone ID: PAT_MRT3847_34279C.1
cctttctcctgtttgataggactgctgtcgttactctgatctcctggtctcctgggagaaagaccgtatctccacattggtcccttgaacaggtaccgcttaattggtagttactgagtgctagatgagcctttcactctctcacactacaacatcatggccgtcggagggcatggcgagagaggcatcactctcatcactgctggatggaacacacacccacattgatctcatgaaggaccatatgcaggtagagggcaaagacaattaggccaaaccggataagaatctccgacccgaactcgacttccaagaccaggtcgaccgtgccacaagacaacgccctattgcg

SEQ ID NO: 70064 - DNA, 418 bp, Glycine max
  Clone ID: PAT_MRT3847_3427C.1
cacgcagtcatttcaaattcatcagttgacttgacttgggtttgtagtttttgttgcttttttggttagtttcagcttttcaattcaattcaattcatttcatttcaaagactttgatttgaaaggctaacttttgctttccattcctgaccctgaaaacgtcaacacagcaaccaaacaaccagtgaattcaacccaaccccattgtgctgtgtttaatctaaaacaacatgtcgacaacagtcatcttgtctgctctgttggtggtttgcctgtttgtacagacagcagctgttttgccttcaactcaacaacgacttcagcttcactcacctttcagacgttctcattcaagtgtgctgcatcaactgaccaattcgcgtcaacgacaatcaatttacacacagagacacgatta

SEQ ID NO: 70065 - DNA, 413 bp, Glycine max
  Clone ID: PAT_MRT3847_34280C.1
ctctcttaagaccagggaggttggaagagagccctatcgtcgatggtcttccctttcagcgctttgagagacacagatattaggtgctagattttttttcctcacaacgaaaactgtacgagcttttaagccgagtaacgctgtacgaacatatctgatcagtcgctttttcttttggggctggcctgatgggagacggctatacggaacatacaatctgtttactactgctaagtcctttattcttcacaccaagctactgagcagaccttccatccaaagcttgacgtatatcctgagtggactgccatgcagtgtgatgtgccgaagtcgacgttcccccttacttcatcttagatctagtttctggtgatgctgcacacccatacgggtgcctgccggcccctactatc

SEQ ID NO: 70066 - DNA, 334 bp, Glycine max
  Clone ID: PAT_MRT3847_34281C.1
gtttaattgattctatttctattggcaattgctaattgtgtgtgtctgctttggttttggctgaatttccttttcctggttgatgccttgttctcgtctccaatgaggcaagggaagtatttggtgttccacttgaagtgtgtttagagagtagagatactcattgacataatgactgaagctgaaatccactgaaaaggccaatgtcactgacagtaacactgtattgtataactgtataagttatacatgtcatgtggctaatttgtactcaattatgactgttgcccttttgagttttgacaacaatgaaacaatgtattttccttaaaaa

SEQ ID NO: 70067 - DNA, 438 bp, Glycine max
  Clone ID: PAT_MRT3847_34282C.1
ggctcgagatgcctcccaatctccgattcttcggcttgaggcgcgaggcatcaggttcagggatggctgcttatctaaaacggtaccactcccacctgcctcgccgacctcactccgtcggagtctatgccgcgctatctagcaatggacgccctaccaaatcgttcgactacgattcgatgataataggcgcctgcattggccgtcacggcgcctcgcttcatgccgccgagaagggttcgaaaacagccactgctgaaagagatgtcgagggagggacatgtgtgaacagaggctgagttccttccaaagctctattaaccgtgagtggtcgtatgcgagaactaaggagcgatcatcacttgaagtcctatggctaacatgttactgctgctggctatgacagaacaagagtcgctgatcatgctcataaccttg

SEQ ID NO: 70068 - DNA, 448 bp, Glycine max
  Clone ID: PAT_MRT3847_34283C.1
gatgagagctcggttcctattgctgctggtgctacccgagttcacgactcaaaatcatgtgtcattagtgattgatcactgggagagagagcacccacgacactaccagagcctccagagatacgctaacaagcgagacatgttcaggaaccactcgtgctatgctcggtgcatcattgctaacgtggagacagacgattgtgatgaatgaggattgacccgaccaccacgcctacctcctcaccaggagagggaaccgtactagcccgctgagaaggatgaggacgaagatgagcaaccgacctcaatgacattgacgagcgcacaatcttgttgagaccatgagcatgagtcgtgagagggacagaaatgagctgtcatggacgaagtacgcggccaagggggctgtgaagaggaagaggacgatgatgacgaggaacacgatgac

SEQ ID NO: 70069 - DNA, 261 bp, Glycine max
  Clone ID: PAT_MRT3847_34284C.1
cgctcgtcaaaaattagaattttatcataaagcagataccaaaaaatgatcaatgtacaatgcaaagcaaaattgcagccaatatatataagacaaaagtcaaatcaaacattaaaagtccacatagatactccatcatcatcaaaacaaattaatcagacggaagtgcttgttctccggcttcttctccaacttgggcacggtgaccttcaacaacccgtctttgaacgtgcagctaatatggatgcggttggcatcctt

SEQ ID NO: 70070 - DNA, 379 bp, Glycine max
  Clone ID: PAT_MRT3847_34285C.1
cactgcccctcccaaacaatactctttcttccacgaacaatctccacaacattaacggcagcctagtgttcctatgggaagaaaccccattttaatgtctcactacactttacagcgacaaacgatacgagctaaggataaaacaactaaaaccgcactcaaacaccgggtcttataaatgacaaatcataagaaaacacacttgaacaagcaaaacttgtaaaaaagcgcatcgcaaaacatgccccaccctgtataaatgtgaggttggaaccataacaacccatagtgaccatcccacatacgatgatattgcccatgatgaactaaggctaaatgagtgccgctcccagcagaaagccttccagtttctataatc

SEQ ID NO: 70071 - DNA, 355 bp, Glycine max
  Clone ID: PAT_MRT3847_34286C.1
gggtttgtttaaggaaaggcaaaaataaccaccataactacacagaaaccactccgcgtaggacatttaactacattagagtccctacactccatactaaatactctaagtgctaaaagctttatgaataactgtcaacctacagaaccgactatttttttatacggggttgaccaaccctcctaggacatggaataataacttcaaccacccccgcacctgagaatggttacaaaaaacagctgtcgctgccgaaccaaagccactctactaactggaatagagagcctgaaatgatgacctctaatttaagtctaagactctctatcacgtgatcatgtgattttgactagcc

SEQ ID NO: 70072 - DNA, 451 bp, Glycine max
  unsure (1)..(451): unsure at all n locations
  Clone ID: PAT_MRT3847_34287C.1
tttnggcaggtgtgggatttaatactgtgagcagacagtgatcattgatattagccgaacttgatacagtatctaccaattaccaaacattaaaaaaaaaaaaaaagatgcgaccatgagctgtacacacccatcacaggtgcaaaactctagaacttggtgaaaggcaagacatgacgcgtttattttaaggatgtttgtttgacacaaaacaccggagtgcactaaaaccctcacagagctaatacatatgttttcacctacacattaatagtttgttattaacactaattaagggctatgtgtgcttgaagattgctattccaacacctaactttcaagttcaggggttgcaggaccactttggtccacatttgcggccatcgtttttagcgggcatacccattgaggcaccctcaaattgagacttaacaggtgccactcccatgac

SEQ ID NO: 70073 - DNA, 698 bp, Glycine max
  Clone ID: PAT_MRT3847_34288C.1
caaaacaaccagaggaagatgatgtgggtttcgtattttctgtggactgtagatcccgcttgaatcctccgattcctgcaacgtattttgggaactgcgtcgcggggcaaaaggttgtggctgtgacaaagaacttggttggaataagcgatggttttatcagtgctttggaagggataagcgaggctttgaatatagtgaagggtgagggagtgctgagtggagcagaaacttgggtttcgttaatgcttgaaagaggggagagtgtgcctcgattattcagtattgctggatcgccattgtttgaggtttatggcactgattttggttggggaaggccaaagaaagtggacatgacttccatagatggaacgggagcgttttctcttagtgaaagtagggataacagtggaggaattgagattggcttgatgttatgtcaacgtgagatggaagcttttagtaccctttttgttggaggacatgaatccttttaaagtttaaatgggatgaataaatgaaaattgtgagcattagtttttttcatgtcacgaaaattggttccatcgtatatgcaggcatctagtgattctgttttgtccgtaccctttgggagaagcatgttttgtttactggttctaattcctctgtatgaagttttttgttatctacaatgtctcatttggatttccatgaaa

SEQ ID NO: 70074 - DNA, 275 bp, Glycine max
  Clone ID: PAT_MRT3847_34289C.1
acatttcaacatacagagcaaccactcgggtcttggttcttttttcaacaactataactacatccttctctctcctaacaaaccacactattaccacctaacactccaaatcaaaccatcatattaccttcaaatattccaattttaaatcatattaatcttcgttactaccaactaaacttccttatcatttacaatgttaacttacaatatcccattaactaaaatcaaaattacacatatacctccaatcaattttttttattataatacaa

SEQ ID NO: 70075 - DNA, 485 bp, Glycine max
  Clone ID: PAT_MRT3847_3428C.1
ccacgccgtccgaaaaaaaaaaaaaaaaaaaaaaaaaaaaaaaaaaaaaaaaaaaaaaaataaaaaaaaaaaaaaaaaaaaaaaaaaaaaaaaaaataaaaaaaaaaaaaaaaaaaaaaaaaaaaaaaaaaaaaaaggggggcccgcttaaaaggacccaagcttccgcccccgggctggcgaggcaaaaccttttttataggggccccaaaatcaaatccatggcccggcgtttaacacggcgggaacgggaaaaccccgggggtaccccaattaaatccctttgaaaaaaatccccttttcgccagggggggaaaaacagaaaagccccaccccgaccgcctttccaaaaatttccccaccctaaagggaaaagggaacccccccttaaccggcccataaaccgcggggggtggggtggtaacccccaggggaaccgttaccttggccagggcctaagcccccgctcttttcctttttttccc

SEQ ID NO: 70076 - DNA, 159 bp, Glycine max
  Clone ID: PAT_MRT3847_34290C.1
attactacggttttgaggaggggtaacaaagtattcaatccccccccttaccccccaattcaatctaattgcccatcttacctcggcaattaaactggacaaacatacgttggaaggcccatgggatttttctaaaagtaaactccaaatgaagttccc

SEQ ID NO: 70077 - DNA, 335 bp, Glycine max
  Clone ID: PAT_MRT3847_34291C.1
ctcggaaaacaaatttaattatcctacggaacggggttttcaaacaaggtcaccctttaaaaccaaaataaaacaaaaaaacccgggcttaaaaaaaacccctaggggttccgttagaaagggccacttaatttttcctaaggggcaatttcgccgctcttttgggggggcttcctcgggtccctttgattcctaaaaaactggggacccatcccttggggggaaggggggcgatccctttggggtttctggaggccgtttttgggggccttgaaggactgattgggccctgggggattcttaaacttggccatctcaaagggaaggggaagtgc

SEQ ID NO: 70078 - DNA, 601 bp, Glycine max
  Clone ID: PAT_MRT3847_34292C.1
ctcctttttttttgtggaatttgttctttaaacaagggttctatacctctcttcatttaagaagaaagttatagacataatttcctgatccatgactcacagcattcttaaccctgcacgtaattgcaggagtcattacgccccgaaacctcatgttcatccaagcttttaaaggagcaatggatggaccaccatattgggaacaacctacaaattcacattactgcttttcatactacagatgggtgatgtatacggatggcatgcataactgatttatcctttactgattcctcccgagtcagacagcatcattttcatgattcaagtctcccacatgactttgagcatgtggattatataatcaaatacattcacttcatcaaaggtagtctggtgctggctgtttagcaggtgatcctccttgattcctgtggagcatgcttcaaacacccggatttgctttagtaggatttccaatccaactacagaattgcagctaccttgccacatctggagcaatttttgggagctgcccagtccgtaactatcggggttatgaacaatccattctatagcctttccgtcaccaactgagtgt

SEQ ID NO: 70079 - DNA, 391 bp, Glycine max
  Clone ID: PAT_MRT3847_34293C.1
cccacgcgtccgtacggctgcgagaagacgacagaaggggactgcaaactatgaataatcccttttctcatttctttcatcttctcttactgctgtctgctaattctaatcttaattttctgtttactgtttctttcttccttcatattttatacgcttcttcttcttcaactactactctctctctcaaccttcaaagcttcaaactcaaaagcaatggcatttgatcccgtgcaacccgtcgcaaagaaagcaaggtcaggtggtgagattgtgagtgcaagagagcctctgcttaatggggttcatgactctgaaagctattccgtctctgctgcaattcttccatgtctcttcccagctttgggtggcctactatttggctatgata

SEQ ID NO: 70080 - DNA, 583 bp, Glycine max
  Clone ID: PAT_MRT3847_34294C.1
taaccaacaatttaattccttcaaatttaagggcgttgcccaatgatttatttcaacctcaagggttggttgccaaccgaacttgggtgggcaattgggttgagagtttcaatttgggaaccttttgggtttttaaccaaaaccttgggacatatatttttgggttcaacttttggccgacaccccattcaaaacgttccaaccaaattggcttggagcaaagaatttttcccacaacttacgtcaagggaacccgagttttcgtcaaaattttttaaggctttcgggagaagggattttcgcccgcttgatttcttgaaagcctggaagtaccagcaaggatttctttccattcttctctaaaaaaaaagcttcgaaggtttttgtaagcgaaaaaaattcaccaaaccaggtgccttaaatggtctttcttccatttgatattgtacacaccaggaaaaatggtggatcttcaaatgtcttaatcgcttacttcatacaatgtctatattcttgaatgactaatgtctttcattgattttctgaaagtgcattgaaaagcttttaatgaaatagaaaaatc

SEQ ID NO: 70081 - DNA, 516 bp, Glycine max
  Clone ID: PAT_MRT3847_34295C.1
ggggggggaaattatttcaaacccaccaaactacctcaaataggcttaaaccccccaaatttctttcccactggaccttttaactgtacttaacaaaccacacaatgaaacacttttgcttggaccataaaccccttttagcccaggtcaccctcaggaggtatctaaattcgctcccccaatgttttgacaaaaataaccacattcctacaacgctcatgttgttggctctaacagacccccccccccacggttgtgccataaacctaccttttttgcccaaagcataaagatttaaatttgctcttcttccaaaacagtccccttcaaatttaaaccctccaagctttcttaaaccccattgcccaccaaacctaaaccctaccaccgtttctccctaaggaattttaaaactcctttccgactgaagattccacttttgaaacgtcagcccccccggaaaccctaaactttttttccttcaaaaaaccctaaaccccaattttctttttttta

SEQ ID NO: 70082 - DNA, 163 bp, Glycine max
  Clone ID: PAT_MRT3847_34296C.1
tggtctgtcacgaatgaatcaccatacatatttggcatccaaatcctgtgctggaacgccggagtggatggcgccagaagtgttgataaatgaaccagccaatgagaagtgtgatgtgtatagttttggtgagatcttgttggggttagtctgttcatcgata

SEQ ID NO: 70083 - DNA, 3163 bp, Glycine max
  unsure (1)..(3163): unsure at all n locations
  Clone ID: PAT_MRT3847_34297C.1
tcgacgaaattatactgggtaccccaaatcatgcgagaattccttttagcgtcgtctcgctaggtctgtcttcgaaatcaaagacggaggctctgaaataataaaaaccacgcacgcatcgaaagaaagagagagaagaagaagaagaagaaaagaggggtcttcgaagaaaccatgagtatcctctctctctaaactctctcagattcgatcctctcttctcttctttcaattccgcttccctcgcactaaatgacagggtttcctggccctcgccgcgatcacgcttcttcttcctcctcctcgcacaattccaacagcagtggtagcaacgtatttaatttgcttgcaaggagggagatctcaccccgaacaagatatgtggcaaaatggcattggggagaacccggtgaagcttcaaaatcaaagtctagtccttattctcgtcctaaaaaagaagttgtgagagatgcaagacgtggtctcctctcatgggttgaggctgagtcattgcgtcaattgacttctcacctacatctgagcacatactacttgcgtatggtcggcgccatggttctcttcttaaaagtattagtcattgatggagaaacaggttaccctatatatacagtattagattgttaaactggtgttagatataggacttgttagggtgcataggagaacaccttgggtggttagtttccatccattgcatccacatatacttgctagtgggagcttgtggaacaaagttcgtttatgggatgctaacaccactatgagcgtgctatctcatcatttctatcgtcccattgcatctattgcttttcatgccaaaggtgaaataattgctgttgcatctggccacaagttgtacatatggcaccacaacaagaaaggtgaagcatcctctccaatatttgtgttgaagacaaagcgctcccttcgtgctgtgcattttcaccctcatgccgcaccatatcttttaactgcagaggtcaatgatcttgattcttcagattcctcaatgacagaggctacatctcttggttatttacaatatcctccgcctgctgtttttgtcacaaatattcatcctacagaacatattaatttgtccagcgaactaccttatgtgtcattacctttctatgtaatgcctgcatataatgttgatgagtcaagagcagaactacagcatgctagtcatgatgttgtctcaggtagcatgcaaattgagctgctgccatggtacagttacatgcagacccaagtgcagcagcgcattatgagactaccgtgtctcccatggatacattctctgagatgccctctagctctcaaactggtgcagaatatcctgctcatactgctttctctaatggaatgggaattggcctcagtaatctcacaatggatggtatggagactgatgaaaccagacctgctgaaggaagccaacatgggaacttgactaatacctattctcttaatggcatgctacacggactgtcgaggcaaactgcaaaccgtggggttctctcggagtttggtcaatttcatcagttttttccttcaagagacccaagtggatgggagattccttttctccatggatggataatgggtcaaagccaagttggtgttccttcaatgcttcctcacatgggtgctagtcgtgataatctatcccaacacattggttcttcttcttacataaaggcatctaatcattccacttctaatgttgatgcagcgatgccatcttcagcaatacctggcggcatcagcatacaaaccatttcaatgagatcaggtttagagaatcacttttcacaatcccgtgtacctgtatctgaatctggcaatcttgctgcttctattaataccccacatgatggatttgatatgcaaaccatcgtaagtcgaattcagtcagaacttgccacatcagtggctgcaacagctgcagagttgccttgcactgtgaagttaagagtgtggtcacatgacataaaaaatccctgtgccccacttaatgcagcagatccaggattacaaactccagtacaccaagatcctggtgttgcaacatcaccaacccggcatccaatttcagcacaccaagtctgggatgcgcggatgcttccccctctcgaggaggcaacatttggttcggtgcttgcttcacgagcaattagagcagctcattgtctgacttcaattcagttctcgcctacatctgagcacatactacttgcgtatggtcggcgtcatggttctcttcttaaaagtattgttatcgatggagaaacaacattgcctatatatacagtgttagaggtatacaaagtgtcagatatggaacttgttagggtgcttcctagtgcagaagacgaggtcaatgtggcatgctttcatccttttgctgggggaggactagtttatggaacaaaggaaggaaagcttagggtcctccagtatgacggtgctcatgcagtgaatggcactggaccaagttactttcctgaggagaccatcgttggtgtcagtcagtgagcaaggtttagacgaatgattggacatgtaattcaaacatctgcttcacattacttactgtacaactcatatgctgtctctgctgatgatctgcacaaacataaatgctgagcccatgcaaccgatggtggaacttcactcactgcaatagcaaaatgtatatttttgtattatccacgtatgaatatgtactaacattttcctttgttaacatgttttcttatttacccctccccctccaacccataagtgggcttctctttctacatgtgtaacttttagtggttaaagaaaatatttcttttcctttttttcataaaaaaaaaaaaaaaaagagtgttgtgtcttcttgagcacagtaggcggattttattctggtatacatttttgcgtgtttcgtgaaatcatcaacgtcagttcacgattaggggtagtgtatgtttaggattcactccccttatctcagggtgctgattcaatgttcctggcagtgtcgacagttttttttggtttggtgcatctcccataacagtgcccccccgttctgaaagatgtatgggttcgcgtgcgaaatatagaaaatttgctttatgtntttttg

SEQ ID NO: 70084 - DNA, 749 bp, Glycine max
  unsure (1)..(749): unsure at all n locations
  Clone ID: PAT_MRT3847_34298C.1
attcccggngtcgacccccgcgcgcgtccgggggtattcgaagaagaaacctgaatctcctctccctctaaactctctctcagattcgatcctctcttctcttctttcaattccgctccctcgcacgaaaatgacagggtttcctcaacctcgccgcgatcacgcttcttcttcctcctcctcctcctcgcacaattccaacagcagtggtagcaatgtatttaatttgcttgcaaggagggagatctcgccccgatcaagatatgtggcaaaaaggcattggggagaacccggagaagcttcaaaatcaaagtctagtccttattctcatcctaaaaatgaagttgtgagagatgcaagacgtggtctcctctcatgggttgaggctgagtcattgcggcatttgtctgctaagtattgtcctttgttgcctcctccaaggtctactattgcagcagcatttagcccagatgggaaagttcttgcctccacacacggtgaccacacagtaaagataattgattgtgaaactggaagttgcttaaaggtattagttggtcataggagaacaccttgggtggttagattccatccattgcatccacatatacttgctagtgggagcttggatcaagaaggtcgtttatgggatgctaacacatcagagtgcataatatctcatcatttctaccgtcccattgcatctattgcttttcatgccaaaggtgaaataattgctgttgcatctg

SEQ ID NO: 70085 - DNA, 368 bp, Glycine max
  Clone ID: PAT_MRT3847_34299C.1
cgaccagagacggccacgccgcagaagccgacgtacgagggcctggaggtggacaagggctctctgcccgccggcactaacccgctgccggttactacattgccacgtctgtggagccaaacgtgaaggacggagcggctaatgccaacgagactctgaccctgctcgcgcccaatgacaacgactatgccgcattcgagccgatcatctcgcagctggcctcgacgatcgactcgctcacgtcatcgctggcgaccccaagctcgggtgactctgcaaagatcttgaccaaagcgcaagacgacctcgcggcgttgagcgaccggctcatcgaagtgaagaaaactgagaaagagaggctggagaag

SEQ ID NO: 70086 - DNA, 388 bp, Glycine max
  unsure (1)..(388): unsure at all n locations
  Clone ID: PAT_MRT3847_3429C.1
atnatcttnnaactanctcnanatnnntnctactacnnntcgtnctntngnatctnaatncttnnnttcactcantnactttcnattcnnttnanttncngncntttngnttcatntnagctanatttcatannnnattaatcnancacntnagttganntacnatganannanatncncntnnaanggnnatnnaanngtgnaanatntgntcnatgntaaattgtnaatngnnncataagntacttgantantaacttncaannctgatgntcgcatacatantactnanantncntaaannnnnntttnncgaattcananaannntannnnannttttttaagntnaannnannagtttaaancngnaatnttnttataantnc

SEQ ID NO: 70087 - DNA, 248 bp, Glycine max
  Clone ID: PAT_MRT3847_342C.1
cgaaaaataatggttaagccaaaaaaagtcataggtcctgtgtttggttgagaggaagatgtcataattactgacaagtgagggggataacaacacaagtcagaagagaaaaagaaacagaagctgctggctgcagctggaacaaaaagaagagaaggagaacaaagagaaagagacctgagaggtgcttcctgggctcgtaggagaacaaagagaaagctgagaaagaaaaatagagggagtggaat

SEQ ID NO: 70088 - DNA, 1391 bp, Glycine max
  Clone ID: PAT_MRT3847_34300C.1
tgtcgtcctgtcccgtgtacctgtatctgaatctggcaatcttgctgcttctattaatgccccacatgatggattcgatatccaaaccatcgtaagtcgaattcagtcagaacttgccacatcagtggctgcaacagctgcagagttgccttgtactgtgaagttaagagtatggtcacatgacataaaaaatccctgtgctccacttaatgctgatagatgtcgtctaaccataccacatgctgtcctctgcagtgaaatgggtgctcatttttcaccatgtggtagatttttagctgcctgtgttgcatgtgtgcttccccatatagaagcagatccaggattacaaactccagtacaccaagatcctggtgttgcaacatcaccaacccggcatccaatttcagcacaccaagtaatgtatgagctgcgcatatattccctcgaggaggcaacatttggttcggtgcttgcttcacgagcaattagagcagctcattgtctgacttcaattcagttctcacctacatctgagcacatactacttgcgtatggtcggcgccatggttctcttcttaaaagtattgttatcgatggagaaacaacattacctatatatacagtgttagaggtatacaaagtgtcagatatggaacttgttagggtgcttcctagtgcagaagacgaggtcaatgtggcatgctttcatccttttgctgggggaggactagtttatggaacaaaggaaggaaagcttagggtcctccagtatgacggtgctcatgcagtgaatggcactggaccaagttactttcctgaggagaccatcgttggtgtcagtcagtgagcaaggtttagacaaatgattggacatgtaattcaaagatctgcttcacatctctgtacaactcatctggataattatagagagaggtggacctctcaagcagttgagctttctcaccataagatgtactactatatttagagtagagattctctcaacttgattttttaatgaacaactcagccagtgaagttattgaaaaaccaattcaaccatttaaagctcaactcttggtagctgtctctgttgatgatctgcacaaacgcaacaccatattatccaatgctgagcccatgcaaccgatggtggtggaacttcactcgcattagcaaaaatgtatatttttgtattatccatgtatgaatatgtactaacattttcctttgttaacatgttttcttattttcccctccaacccctccccctccccctccaacccataagtgggcttctctttcttacatgtgtagcttttagtagttaaagaattttttttttcttagtccctgggaaattttcaaactacacgagcatggcattaatc

SEQ ID NO: 70089 - DNA, 779 bp, Glycine max
  Clone ID: PAT_MRT3847_34301C.1
gtggagctctctcttatttatagctgaagctctaaaaaaagatccctcttcctcttgtaacaaaaaccaataatctctgatctgagttcctgacatgtccatcgagctagattctgaatccattcccacacccacggcccaagcccaagaccgatccaactcccgctgcgcactgctattttcctacagctgcctcggcccacggcgtcgttcctcatggtgggagcgcgtccgctcccactcccactccactccagcctcaaccggtgaccggtggtggtcgcgtgggctcagggcgctgaagaagcttcgcgagtggtcggagatcgtagcggggcccaagtggaagaccttcatccgtaggttcaaccgcaaccgccccaacaaacgcatacccacataccagtatgaccccttcagttacgccctcaactttgacgaggggcctaatggggatttcaacgacgacgacgatgcagcgcttcgtaatttctccacgcgctacgctgccgcgaacaacgtgaaatcgctttcccccaaggcacgtgacaccgacgacgctgttttggtgtgagtggtgtggagtggccacgcggtgtttggtttgtggcttagcttcagtccgaaaaggggcaggagtgggtgccccttcgcgtcattatttagttttatttttttgcttaaattacttattttttctttatattttcatgatttttttaattttttttagtcttgtaataatttttttgaaagtgatatttttagcttttacagtt

SEQ ID NO: 70090 - DNA, 812 bp, Glycine max
  unsure (1)..(812): unsure at all n locations
  Clone ID: PAT_MRT3847_34302C.1
gacgaaacagctcagcagagagccacacagatgagaatgagttaggaagagaagaaccccatcaaggatccatgttttttcatttttctttttggacccactgttatcccatcactgtctctggaaccaacttccactctccccaccttctctttcaattcactccacaattcatttttcccaaacacgtccgctcacatcccaaagttccctcctttttcactccaaccaccccccacgaaacgaatccatgaggagttcggagtgacccacgtcaccagcttccgaatccaaccccattccgcaaaagggtactttcttcaacgatggttgagaactcgacgctagggcgcttccaccaccaaaggctcgaccttcgccgctgggtccccgcgttcttcacctcgcacaagaccctcttgacctttctatggatcgccgccttcgcctccgtttttctgtggcagaggaacatagctggtggctttctggtctacggaggaattccggccaggcccatgcccatgctccgccccatggccttcaatttgacggatttcggaggggtcggtgacggcgttactctcaacaccgaggctttcaagagggccgtttcagcggtttctaagttcggcaagaaaggcggtgcgcagttgaatgtgcctcccggacgctggctcacggcgccgtttaatctaaccagccacatgactctcttcctagctgaagatgctggtatacttggcattgatgatgaaaattattggccattgatgcctncattgccttcatatgggtatgggaagggagca

SEQ ID NO: 70091 - DNA, 842 bp, Glycine max
  Clone ID: PAT_MRT3847_34303C.1
ggatgatatccggtcattggaacgtgaccgatgtctgcaacgcgctgttaggcggcttcgccgccataacagccggctgctccgtcgttgagccatggacagccatcgtgtgtggttttgtcgcttcagtggttctgatagcgtgcaacaaattagcagagaaggttaagttcgatgatcctttggaagcggcgcagttacacggtgggtgtggcgcgtggggggtgatattcacggcgctgttcgcgaaaaaggagtatgtgagccaggtttatggggaggggagggcgcacgggttgttcatgaggggtggagggaagttgctggcggcgcacgtgattcagattttggttattgttgggtgggtgagtgcgaccatgggacccttgttttgggggttgaataaattgaaattgttgaggatttcttccgaggatgagcttgcggggatggatcttacccgtcatggaggatttgcttatgcttatgaggatgatgagtcgcacaagcatgggattcagctgaggaaggttgggcccaacgcgtcgtccacacccaccactgatgaatgattacgatcacgattaattcggccccgacagtattatcttcaattgaaattacgtgtgacttagaagaagaaaaaaagatgatgatgattttgtttgtaatttattttatttgttttgggttttttttttaattttgtagatttttctttttatgatgggtaagtagggattttaatttgtaattgttattggccgtatattggtagatgctggaaattgaagattctgctggaagatgcgaacgtttctgaaaatgatagatggctgtgg

SEQ ID NO: 70092 - DNA, 373 bp, Glycine max
  Clone ID: PAT_MRT3847_34304C.1
tagtgataagtgatactatttgtttgatgttttcttgttgttatttgaaatgtcaaggaatgaggaatgattatgttgttaatgtcaatttgaaaacaatagttcattgtgatagtcaaaaggcctgcctacggggatcaagtaacagagcctctctagttgcttgagatgcttcgcgtgactttcttattgatactagtacctatgaaaaatccaaaaaggttccgcaatttactcactgtgatattggatatggtaaagtagtcaaaagctttaaaagtgtctgttattgggactgttctcagtcgatattttaaggttttgtaaattgaaaattttggtattttgtttttaccatggattgatgcttgaa

SEQ ID NO: 70093 - DNA, 253 bp, Glycine max
  Clone ID: PAT_MRT3847_34305C.1
ggttggtaagggggggcaattgttgtcaacactgcacattgaaaattttcatgaattccacaaaacgccttaaatccaactaccaaaaaagcttctccaaccaacaactcaaaaattgacccgcgaaattatagctcattagccaaatatccattggacactggctttaatcctaaataaaaaaaggggaaaaaaactttgcccaaaaagggatttgagacgcttctaacaagaaacgccttatttttaattt

SEQ ID NO: 70094 - DNA, 442 bp, Glycine max
  unsure (1)..(442): unsure at all n locations
  Clone ID: PAT_MRT3847_34306C.1
attcccgggtcggacccacgcccgtccgcctcaccgcccgtctcgtacccggctgcngnnagaagaccgatncagaaggtnngatctattattaccaacnnatgagagtgtcctcgtggnnatgtcatcnnctgtaaattgggacgccgccccaagcctnntgtcaagaaggggttgcttcnngagcctattgcnctcaactcnntggtttnntggaagtnngatcaacaacccaacaaccccgaggagaatntgtcaggtgnnatgaagaaaggagnnnatgcaggnntgatgannagttgagaaaccattgtnnacatgtattttcggtctctttgaaatggaccacngnnggatgaaatgctcnncaagaatnnttgttacncattttcctgcnnaatagaaatttttcnttttttaaaattcaagaaagaaattttag

SEQ ID NO: 70095 - DNA, 2313 bp, Glycine max
  Clone ID: PAT_MRT3847_34307C.1
gttgttgctgaggagtttcttgaaatttgtgggatggagggttccattccaaccggtttcaaatggagatctagaagagaggtggtggattggctgacatcgacgctatcaaagcagaacctgcagggagatagaagtgtatcagctggtcataacttggtaccatctcatgaggccacaaatgacagtgtcaatgaaattattggtctgtctgctcaaataacagatgacaaggactttccaacgagtaactccaaattgtccaattcagacattgtttggtcaggagttgcgtggagatgtggcaaacaacttaagcattatcctgcttttttcaggaatggcatcaaaatagcgattcaatcctttgtttttgttatgggcaagggagagaaccattatattgcttatgtagaggatatgtatgaagacaggaggggacagaaaaagatcaaagtgaggtggtttcaccataatcaggaagtcaagggtgtagttcctgtacgaaatcctcaccctcgggaagtttttatcacaccttattcccaagtcattagttcagagtgcgtagatggttctgccacagtcttaactcgtgaagactttgaaaaatgcatgccttttttttcccccacttcaagggacagaatacatttgtgctttaggcagtttagaagcaacaaaatcaagccctttgacttgagtaaattgcgtggttactacgctcaaccaattctttcttgcttacaccttgattcaatccagcaccctgagttcctagcaagagaagatgaagagttgagtgcaggtgatgatgtgaaagtaggagtcaagaggaggaggggtgataaggggtctcctcagtcttggataagtcgccagggggttaggaagttaagtagaaataagcaaatgatggtatacaaaaccttccaggttgcaaattatgcaagatcagaaaggatattgctttctcggaagcaggttgagtgtcaaccttggtctaaccacacatacaaggttgatgacaagatagagttactttgtcaagatagtggcatcagaggctgctggttcaggtgtacagttgttcaggtagcccggaagcagttgaaagtccaatatgatgatgtccaggatgaagatggaagtggaaatcttgaggaatggatcccttctttcaagttagccaggcctgataaacttgggatgaggcattctggccgccccaccatcaggccagctccaacttatgaggaacaagaactagctgttgaggttggaagtgcagttgatgcatggtggagtgatggctggtgggagggggttgtaactagaattgacaactgtggggatgatagtgttgaagtccactttcctggtgaatgcttgctgatgaatgtgtgcaagaaggatttaagaatatctagagattggttaggggacagttggattaacattaaggcaaaacctgaaataactaaatctatattcacagctaataatagctttaacacaaagctttctgtgtccccatctattgctaaagatgtggactctgttggttttgctaattcatgtcatggtgatcctgttagtaagaagtcaaatgaaccagttgttatcaaagaagagaattttgtgtcttgtgatggctctgataaagaagagaattttgtgtcatgtgatggctctgctgaagatggggactgtgtccaggataataaaccctcttcagaaaaaagtactcaagctgataatattgatacacatatcaattgtgataatgaagagaattgtggtgataatgataatgataacaatagcaatgatggtggtggtaacaagaatgatgatgataatggcaataaagatatgggggtatttggaacttctggaccggaccaagaaactgtagagctcatggaagtggctgtataaataattttttagaactcatgcataaagttatggtagttctgattgtagagctttgccatcatctcttattgtgttgtaatctttgtcctatgttagtctgagaatgtaaatagtagttgcacggttatgtgagaatctaattgattgttaacttagttgtctttatagatgtacagtgttgagtgtaatgtgctagcatgtgttgtcttcctttccattggttgtattagagagtaggtttctttcatactgagacaaatattgttgagtaatttctattgttatctgattagtttcatttatttgagccagtagtgttctctcgcgatctagaacaaaaaaaactcgagactagttctctctctctctctc

SEQ ID NO: 70096 - DNA, 407 bp, Glycine max
  Clone ID: PAT_MRT3847_34308C.1
gcacgctgcctaagctgcacacttgcgtaaagcaggaacatgagtgaactgtttgggaagaaacagattattacaagattctatgacttgaggggggtcgactctcggatcgcagagggatgtattcttgtggttcacctattcgacactgaacagactatacagcagcgataagtgaaaacctcagaacgcttgttgacgatgaaacgatagctgcatacgagtgggtttgtactaggcaacaccagcttatccatgccatgaatgctgatgaaattaccgactagctggggtcacagtgtctaagacagaacccttgggacattacaacgtgcctacacaagctcagtggaggatcagtctgagggtgagggctgtcttagcaacatcatgacacgaactgtttg

SEQ ID NO: 70097 - DNA, 122 bp, Glycine max
  Clone ID: PAT_MRT3847_34309C.1
ggacgcacctgttgttggctagttgttcaaggatggcatcgtactgtgttagaagtttgtagagtcgccccctcccattccttatggatttccgcttacagatatttgcattagcattttta

SEQ ID NO: 70098 - DNA, 2365 bp, Glycine max
  Clone ID: PAT_MRT3847_3430C.1
aattcggctcgagtgctcataccggttctgaaatatttaaggaatgcgtgaggggagctctaaaaggcaagaccattattcttgtaacgcaccaagtagatttcctacataatgtggatcaaatattggtgacgagggacggtatgatagttcaatcagggaaatacgatgaattattagattctggaatggattttaaagctctggtagttgcacatgagacctccatggctctagtagagcagggtcagggtgtggtcatgcctggtgaaaatttgaataaaccaatgaaatctcctgaggcaagaaattctggtgaaagcaattctcttgaccggcctgtgtcaagcaagaaaagttctaaactcatcaaagaagaggagagagaaaccggcaaagtgagcttacatatctataaactctactgcactgaggcttttgggtggtggggcattacagtagtattgattttttctttgttatggcaagcgtctatgatggcaagtgattattggctggcatatgaaacctcggaagaacgtgctaaaatgtttaacccttctctgttcatttccatctatgcaattattactgctgtttcaattattttggtagtgataagatcctacatctttacactcttggggctaaagacagcacaaattttcttcacacaaattcttcgtagcatcttgcgtgcgcccatgtccttctttgacactacgccatctgggagaattctaagtagggcatccactgatcagaccaatgttgatgtccttctccccttgttcacgggaattgttattgctatgtacattacagtgctcagcatcttgatcatcacctgtcaaaattcttggccaacatcgtttttgataattcctcttatttggttgaatatttggtaccggggttactatcttgcaacatctcgcgaattaactcgcttagattcaattaccaaagcaccagttattcatcacttctctgaaagcattgcaggggtcatgacaattcgctcattcagaaagcaaaagaatttttgtgaagaaaatctcaaacgggtgaatgataatttgcgtatggatttccacaactatagttctaatgtgtggttgggagtacgcttagagttgcttggaagctttgtcttttgcatttctgcaatgttcatgatcatcttacccagcagtatcattaagccagaaaatgttggtttatctctctcttatgggttgtccttaaatgctagcttgttctgggccgtattcatgagctgtttcatcgaaaacaagatggtatctgttgagaggataaagcaatttacaaatattccatcagaaccagcatggaatatcaaggatcgtatgcctccttcaaattggccaagtcaaggcaatgtagatatcaaagacttgcaggtcagatatcgtctaaacactcctctggttcttaaaggcattactttaagcattagtggaggtgaaaaggttggtgttgttggtcgaactgggagcggaaagtcaactttaattcaagtattctttaggctggtggaaccttcacgagggaaaataataattgatggtattgacatatccgctttggggcttcatgatcttagatcacggtttggtatcattcctcaggagccggtgctttttgaaggaactatcagaagcaacattgatcccattggacagtatacagatgaagaaatatggaagagcttggaacggtgtcaactaaaagaggttgttgctactaagcctgaaaagcttgactctttagtggtggataatggagagaactggagtgttgggcagagacagttgctttgtctagggagggtcatgcttaagagaagtcgactcttgtttatggatgaggcaactgcttctgttgattctcaaaccgatggtgtggttcagaagatcattagagaggactttgcagcatgtaccatcattagcattgctcacagaatacccacagtcatggactgtgacagagttttagtagtagatgcagggcgagccaaagaatttgataagccctccaacttgcttcagaggcaatctctctttggggcattagttcaagagtatgccaatcgctccactgaactataagaatctctcgtgctccttttgactcgtctatggtgggcttttagcctaatattcttcttaggttaagatgatagaaaaaggaaaacatgaatgttagggaatatattcttttaacattttttgaggtgttggattgtgtattgttttgagtaaaaattcaatccttgtgtccctaactcttaagctttttgtctgaacggacgtatttgtatgggtttattaacttttgg

SEQ ID NO: 70099 - DNA, 318 bp, Glycine max
  unsure (1)..(318): unsure at all n locations
  Clone ID: PAT_MRT3847_34310C.1
acagctctgtatttgggtttacttggattatttttatattaactcaaatatatccanttggcggtctttctatatttgtggctatatctccaaaacacttcttatccctgtgattcacaatctatgtatatcgatttttactttaaatgcaaatttttactttgctactgctatttcttatgtttgctttcatatcattctcttattttacagtgttagtgccattcttaatcattacataaaactcaccaatctatatactccaaaacttcaatacatcaaatcttgataactttaaaatgtacttttatgcttcaa

SEQ ID NO: 70100 - DNA, 130 bp, Glycine max
  unsure (1)..(130): unsure at all n locations
  Clone ID: PAT_MRT3847_34311C.1
gcgcatacactgcaccaaacagcatncagcggtttagatctctctatactctccatagccgccaccggcgatctgcctctaacagatcgacgctgctacatgtgaccccgatccatccgacagatctgtg

SEQ ID NO: 70101 - DNA, 660 bp, Glycine max
  Clone ID: PAT_MRT3847_34312C.1
gaaggaaccttgaatgcgttttataacaggctggaaacctaataacattttgctgtcattgatttatgttcattgtgtggtcgctgtcaacaacattttactccatatacctattttagaattataatctataaggtaagatttctaacaacttcaagtcactcaaatcaagtatatatgcagagttaaatagaatgatcaagaaactatccccaggaagagatgacccaaatgactgcccttgatcgtgtgcaagacttcctatgtaaaatcaacacacatatataatgatctgattcaataattaaaaaactagtacaaatgatataagtttttaaagccagttacctgtttcgtttgttggttgtcttacgttagttcaactctctgcatgaagaatagttttggacattgaaagagttctgaggaagactattagactagaatgtgattcactcttagtgattcaagcttttaagaaaccttctttagtcccttggcagttcgccgggtgttgggaaaactgtcctttttttttctgtaaaaatataggtttttgtttactctcatatattcagggagggggaattcttgcactgacatttttgactaactatgggtatgactctagggattagttacaccttggtgggataatac

SEQ ID NO: 70102 - DNA, 289 bp, Glycine max
  Clone ID: PAT_MRT3847_34313C.1
ctttttttttttttttctcgccgacgccttctttctctttcttctcaccaccgccttctttcttctcgccgccgccgccgccgccgccgccttctttctctttcttatcggcgtctttcttcggaggaggcaccacttccacgtttggctttagcatatggtttaagggcagggaaaagttcattcaagtgattggaccattcaccgagaacaaaagcttggtttcgagaaggcttaccaattgaacaacctttaacctaagaaagaaacttcgaattgttggaatgca

SEQ ID NO: 70103 - DNA, 384 bp, Glycine max
  Clone ID: PAT_MRT3847_34314C.1
tataacatctattaccacacatgcagacttacataatcgtccactacggctcgatttcaatctttcctaatatcagatctaaagggataatgaatcctatacgactgggaaacatattctcttaaaaatacacatacaaaatattaataatacacattataacacccaatgcaatatatcttattcattaatcaacaatatcactacaatatgattcatctaatgattacattacacatgttttccattcacatccaacaataatccatactattaaatataccacattctccactaattacaatcccattcacatttaaaaggagccggtatctacttctatatatcatttttaatcaataattttacaaataacttctaaat

SEQ ID NO: 70104 - DNA, 341 bp, Glycine max
  Clone ID: PAT_MRT3847_34315C.1
gggaaggctacaaaacacaagccttatttgctggatttatttattcgaagaaaataaaaaatagggggggctcaagtttttatagttacatgggcaaatacattccaccctcacgatgagcttttacagcatacatttacgtagtttttcaggaaagagcccctaaaattgaaggaaaaggacccttttttcccttactcccctcctccttttggtgggggtgagcataaacaaaggaggattccctttgcttttttaataacctctcaacattttgggcaaacccagggaacccaagcctccggactttgttttttttttgccataacaaattttttttt

SEQ ID NO: 70105 - DNA, 346 bp, Glycine max
  Clone ID: PAT_MRT3847_34316C.1
cgggaagctaccgttaatttaatttcaacattggccagctcaagtgtgctacaggataatgcatgtaggctcacatgcatatatagacttaaaacaagatcataccctaaagagcagcactcttcacaagtggtggcacaagtatgtcttcttctgatgtctttatgctcctagtattcagcaaggacaggtgagaaattaatcactcagaaaaataaggattcatatgttgtgaacaacataatattaaatattctttagtatgaaagctgctaattataagatggaatttccatacactatatgtatagtttctttatcagcaaaccatatggtggcaccagtc

SEQ ID NO: 70106 - DNA, 321 bp, Glycine max
  Clone ID: PAT_MRT3847_34317C.1
tttttcctctaacaagccggggtatgcctaaagctatgattgagacgggatactacacgtcgttttgaaggctcagcacttgatgtagccgcatgaattgccaaacccttataagggtatggcacaatggtgccagcatttccaaatgccgtgatgtggaacgcaaccgatcgtttgtcgaggacgcaaaacaaatggctttttcagaccattacatcattgcctgcacaatacgggaggtagaatgctaccccaagttccaacaagcgagtgcggtatccaacccgtcatcgaggctttttaagagctctacctcctgct

SEQ ID NO: 70107 - DNA, 385 bp, Glycine max
  Clone ID: PAT_MRT3847_34318C.1
cccacccgtccgggcaattggggttaacagattattcatattagattcccatgaggcattcttcccgaattggccgaagataaacagcctacctatggcaaaggctaatgccacagggccaatcttgttttggaaggacgagggatctttaaggccactggttttcgaattaagcaggcctgcaccagtgggtaagggggtgtggcctgcaccagagggggtggggatttaattgggtggtgggccaaggctaatgtcatggggaatgactttggttataattaagctattaggccatgggttaaatcctcatgcagggatggagccattggccttagcaccaaacaggcatttaagggggcttaaccccattataaaacttttt

SEQ ID NO: 70108 - DNA, 109 bp, Glycine max
  Clone ID: PAT_MRT3847_34319C.1
acatagtagtgttggtgggttgcaaagatgcttggagggtcttctccatacgggtcataacatagaagggacagtcctgctgcatgtgcaagactgtgttggacgtgaa

SEQ ID NO: 70109 - DNA, 488 bp, Glycine max
  Clone ID: PAT_MRT3847_3431C.1
ttttttttttttttattttttttttttttttttttttttttttgggtttttttaattttttttggtttttttaaacaattgcaccccttccccttttttattcaaaaaaaaaaagggtttttccattttttcccccgccaaaccaatcataaaaaaaaaaaaaaggaacccttcatattcctaaacgaatttttttaaaaacaaaaaccccccgtaacccccccttttcaacccaaaggggactcattaactcgtttcacaaaacttttttttattttcggccccaattggcaaaacccttttttggatcccaaacaaaaggctttaccaaaacattggagttttcctattccccggcaacaaaaaaacttaaccccttaatccccccacaaaaaatgtcccccaacccgaaatgggccaaattttttttccctgcgggacaaattttaccaaaattggttcccgtgaagaaaactttaatttttatt

SEQ ID NO: 70110 - DNA, 333 bp, Glycine max
  Clone ID: PAT_MRT3847_34320C.1
gggcacttcaacttccttcttctcttctactatcacttccgcttccttcttctcttccgtcacttcaacttccttcttctcttccgtcacttccccttccttcttctcttctttcacttatgcttccttcttctcttctggcacttcaatttccttcttctcttccgacacttccacttccttcttctgttctatgacttcagcttccttcttctcttctgttacttcaatatccttcttctcttccgtcacttccacttccttcttcttttctatgacttcagcttccttcttcccttctgtcggcttctcgcagccgtctcgagcccaatt

SEQ ID NO: 70111 - DNA, 645 bp, Glycine max
  Clone ID: PAT_MRT3847_34321C.1
tttccggacgatcgctcatctatacataatatacagcactcttctatctatacttcgtcttctgcatgatcgtgtttcttctcatttctacatcattgactagagatcagccgtatgctgcgctatgcttgtatgtccgcacaactgccgtgtgctctacagccactcaaaaggatctcttttatccgtgtagaagcgcacatgctactagttacatcttgccccagattccactatcacctcaggcacatcacctacatttccgtatgctaagactctgctcaagcgcagcaatgattcatcaccataatcttatttacaccttgattatacatattgtatcatcttaaggattcactagatgctgtagaaacatctaactaaaattggatggctttttcagatcttgttagcatacctcacacgtctgcgacttgaaggaatgctagctcatgacaatgactgctttatcctcgccctatacacctcaccttttaccatctctatacatctgcaacgaactattatctatgctactcggagttgcttctgaatgagctgagaacctcaggcccctacgagcagctccccctctagaactaattactcccccaatctccaagaactcgatatcattaatcatac

SEQ ID NO: 70112 - DNA, 333 bp, Glycine max
  Clone ID: PAT_MRT3847_34322C.1
gaactcaatcgtttactagaaacctgtcaattggtcatagcatttgaaaactaaaactacgacctcagaacaatcaaagtcatgactacatgtatcgaacgcgggactaaaacgtccccaatgggggcctatatatccattagaaaattattacgacctaacgccttaaataatccaacctagctggatgcttacgcttcatgagagcttgggaatgaaaaaactcgccaatcaccccaaatgtacacccgcacctgaaaactcctcctactgagcaggcgcccttgatgagacccagactgatgtgtgtgtacgatgaacccccattgcatt

SEQ ID NO: 70113 - DNA, 296 bp, Glycine max
  Clone ID: PAT_MRT3847_34323C.1
gactacatcctgcgacgaacaaatggcgttgcgcgccggttcttcaaagcgtcgcgtgtactcctcaacaatcactcctcagatcccagtatcagaaaacaaattgccctcgacagccgcttacagaagcacggattcccctcgtcactaggaaattgagaacggaaaggtgagggaagctgaggggaagtggaacgttcttgctgagacgatgcatgtcatacttccagccgcaccttctggacaccccgaaaacgcacgtggcttaatcagggcgcgtcgtccccatgccgcct

SEQ ID NO: 70114 - DNA, 145 bp, Glycine max
  Clone ID: PAT_MRT3847_34324C.1
ctcgagcacaagatccagtctcacactatgagcgcgctggtgcatagcatctcttcgcttcaatattatgtgtttctcttgtgggctttactgaaaactgaacataccatctcccaagggatctacagggggaatgaaaaatggg

SEQ ID NO: 70115 - DNA, 1534 bp, Glycine max
  Clone ID: PAT_MRT3847_34325C.1
ctcgagccgaatcggctcgagacaaattaaagttgagtaggttaaatctttgaatttggtcaaaaccgacccaaaacaccctactttcaattcaattcaaagtattgtttgttttttgtttgttggtgcttacaccgggagaagaaagttcttggaaggaaggaagaagccaaaaggcaaagagacaccggcaccggcatgggtcaagcttttcggaagctatttgacaccttctttggcaacaccgagatgagggttgtgatgcttggtcttgatgctgctggcaaaacaactatactttacaagcttcacattggagaagttttatccactgttcctacaattggtttcaatgtggagaaagttcagtataaaaatgttattttcacagtttgggatgttggaggacaagagaaactaaggccactttggaggcactattttaacaacacagatggcctgatttatgttgttgatagcttggatcgtgagagaataggtaaagcaaagcaggaatttcagacaatcataaatgacccatttatgctcaatagtgtcatcttggtgtttgccaacaaacaagacctgagaggggcaatgacgccaatggaagtatgtgaaggactaggtctctttgatctaaagaatagaaaatggcacatacaaggcacttgtgcacttaagggagatggtctttatgagggcctggactggttggcttcaacactgaaggaaagaaaagctgctggatactcttcaataggaacctcatccttctaatttaggtattttgtcattgaggaacgtgcagggtttggccagtttcattcaaggatgttgtaaaaaagtaatcaaattttttgagttacatttcgttcttagctgatgaattatatagatgctttgtttcaaggtgcttagatatactttgagtgtatagaagtttgggcatgatgaatgaaaatgaatttgagactatggcaatggacgaatgtgttgagtgtgtggccagttctaagttgatgtgatcgataatcaaatattttttgggttacatctgaagctctcattagtagaaagttgcttcgcctttcagggtgctttagatatgtatgcgactttgctccaattatacaagtttgtgcatgacgaatgattaactaaattcttttgcgatattgatatcccttattaagtgcacttgtactggatagaagttaacggatactggatcacttgttcattctcccccgatttcccccatctcactctttgtagtatttctgcgtgtctttacctgtgatggtgactcataaaaataatgactctgacaaatgtgtcacgattctctcttcagaacgttttcttgtgatttaattcaattgggtgtttgcaattaaaaaaaggtcacttgttcattctgccccgatttcctccatctcactctttgtagtatttctgtgtggctgtacctgtggtgattcataaaaataatgattctgacaaatgtgtcatgattctctcttcagaacgt

SEQ ID NO: 70116 - DNA, 286 bp, Glycine max
  Clone ID: PAT_MRT3847_34326C.1
cgaatccagactcgcggtgtaaatctcaatcaccaaaaactcacacttactaccttctccaaaatatctcttacaaataccacacttttccattgtgcaaacccaccctccgagtccgtggcttccctgaacctccttcccacccttcacttttctcttctttccttcacagaccacactgcaacacccatattcttctcacaccaaaaccttctcaacgaaagccttctcttgttgtcaaatctactgtagaagtcgctgatccttctccatcttcttcttccta

SEQ ID NO: 70117 - DNA, 367 bp, Glycine max
  Clone ID: PAT_MRT3847_34327C.1
tcggaggatcctgagatatcttcgaataaccacgcgctaattgttccggctcatatgaatcatggaaacagagtccatccaatgccttataatgatccatctattccattgcaacccaaacccatggcccccaaaaaagacattgctgtgtatgggtatggaagtgtggcttggaaagaccgcatggaggaatggaagaaaagacagagtgacaaacttcaggtggtgaaacatgaaaggagcaatgatggaaattttggggatgattttgaagactctgatttacctatgatggatgaaagcagacagccactttctcggaagctaccaatcccttcaagcaagataaatccttacagaatgatta

SEQ ID NO: 70118 - DNA, 477 bp, Glycine max
  Clone ID: PAT_MRT3847_34328C.1
tcgagagagtacagagggaaaaccatacaaaggtcgtacttctttgtctgatcccaaagccacccgcggaggaggagaaaaaaccggggaaggaagaaaagcccaaaccagaggagaagaaacagctcgacaaggttctcctggagccactacttgacaaggtactcttggagctcctcgaccgtgtcatcaagtccctcaatgtctgcaatgccatcaccctcgacctcaacgccgtcaagaaccattgaaggagttcttgttcccatcaagtctgaatcgctctcaacctcaaaggtactctttttttattttttctctcatctcattttcactcacctttgcattgcatccatggctcaaatacaagtacaagctcgtcaatctgttgaagggagaataatctcgccctagtttgttttttaaccctaactttcccaatttgcaaattattcattcattaactttcttcttttt

SEQ ID NO: 70119 - DNA, 682 bp, Glycine max
  Clone ID: PAT_MRT3847_34329C.1
cagcctcattgatgagggacactaaaaagtgttgctcctggtaacttcgaagaggcattggggtatttttgagtttgatggcaagccaaagtatgaattagacttaattggtcaacataaggaaaagggtcttgtcccagtggaagatatcaagtacatggaaaagaggtggtgtattttgaatccagatgttactaagttggatgatttggctggtagcattgactatgcttgtaccttttctgattgtacttcccttggttatggctctacttgtaataatcttagtgtccaagggaatgcatcttatgccttcaatatgtattatcaagtaaacaaccaacagaattgggactgtgacttctctggtttggctgtcataacacataaggatccatcacaaaatggatgccaattccctgtaatgatttctagtagttcttctttgcttcttcatggagggctttcagaaatccttaagaaagcattgagggtgtatatttttgtcatgtttttgctatagctgaaagatttaggcaatggtggagtattttagaatgtgttctgacaaattcagtttttctgttagttttaggagctgcctgtcatgtaaatttcattatattccattttgaagaaccccgggactttaagtagacagttttggacaacattgcttttc

SEQ ID NO: 70120 - DNA, 512 bp, Glycine max
  unsure (1)..(512): unsure at all n locations
  Clone ID: PAT_MRT3847_3432C.1
gcgcccacgcgtccgtacggctgcgagaagacgacagaagggtactcaagaaatatataaattacactcccaataacagagacattgtgaaacttttcaaaattccaaaacagagcataacataaatggaatatattgatctttagctggttcttatttttggcttgtgtaatatattgatctttcacttatatatgtcaccacattgctttattttttttatataattcctcaaagatttaaaatgttatcatatatgtctcacatctcaaagatataatttttgatttattcctctatttttggcttgtttgatatataagtgaacttgagctttcacttatatatgtcaccgcattaattattacaattcctcaaagatttaaaaggttatcatatatgtctctcaaacacacatacatatttgataaatacgtatagttatattgcttgaattgtaatgtatgctgacattntattttattttttgctctaaccaattatttaataac

SEQ ID NO: 70121 - DNA, 186 bp, Glycine max
  Clone ID: PAT_MRT3847_34330C.1
aaaaaacaagacccggggttcacgtttattactaataacccctcaggaactgtatataactgtatcggtggcaatacatttaaaagggatgttccacttaagctgtagcaatgaatatcggatccctcttttttgtacttttaggatagcgtgacaaaatcgagaagaacgtggactttccccttt

SEQ ID NO: 70122 - DNA, 765 bp, Glycine max
  Clone ID: PAT_MRT3847_34331C.1
ctcgagccgattcggctcgagcacacacatatatatatacacatacaacttcataatatccacacaatccaacatggcttaattgatctctcttcaaactccttgcattctttctttctttacaacaatgactttcgaagagaagacaatttatcaaacctctttagcctcaattcccaactacacccttctagagtgtgtcttggggctatgcttcaaagtgataaccatcctccttcagcttccttatgagtacatagacaacaatccaattcccaccatagtcttcaagggtcgcccaagaaccttccatgccttcataacatgcataatcttcgccttctccggtgctaccaatgcacttgtggcattcaataagtcaagattttctaggctttgtgggtattatgcaatggcttctatggcttctgctttggcaattctcttgtgggcagtgtgctgcacaggcatcaattagaatggctggactttgattctgaaactgctatcgctttataaagagtaaacagtgttgtgttgtatgttgaagatttttggtttcaacctcttaggaaactactggtttatgtgagagccagtaagaatgttagataaaagttttgagcaaaattaaaattaattattgattggtaatttattggattaataattataattttaatgcaaaaaacatattaaaattgattccatattagaagatagttggataaatttatgcaaaaaagtcgtattttttgttccaaa

SEQ ID NO: 70123 - DNA, 282 bp, Glycine max
  Clone ID: PAT_MRT3847_34332C.1
cggcgctcgatccagatccatggtgcatcgagatcggccatacctttttgcggatttctcgaaggaatcttgccctactgtgaagaacattttacttctggattctgaaggaaagcgtgttgctgtaaagtatttctcagatgattggccgactaatgcatcaaagttagcctacgaaaagtctgtttttactaaaactctaaagacaaatgcacggacagaagctgagataacattgtttgatggttatattgtcgtttacaagtttgtacatgaccttca

SEQ ID NO: 70124 - DNA, 387 bp, Glycine max
  Clone ID: PAT_MRT3847_34333C.1
aagggggaggcaaaaaaaacccttcaaatttctcaaaactaaaaagggtcaaaacccttgtttcgatttaagggaaaacccccaaaggggaaaaaaaagggtgttttctcccccaaaacaaattgaaattaaaaaaattaaagctccgcaacacttatcctggatcaaaaaactatttcgacaaaaaacgggaggaaagggggggtatcccagtatcacttgaaaggggaaaatctcggaagcttgtctctcaaataaaacaattttgcccccctgaccttacggggacttacccctttgaattctttgaaggggggggagaaaaccgggaagactatttcaaccccagggccgggaaagattctttggattcaaaaaggcggggga

SEQ ID NO: 70125 - DNA, 393 bp, Glycine max
  Clone ID: PAT_MRT3847_34334C.1
cccacgcgtccgattttttcagtacaaaaggatcaagaattaagaccttcactttatcgtctctctactccctcctagacattctttcttcgaataattgcttttccaacctattctattgcttgagcctttctccaattttgtttctttagttcttttcccaccctttttgtcaaaaaaacttatttgcccaccctttacaccgaaaaacaaaaaatgaggctactgtctacaaaagccacatgcaactctcacggccaagattcttcatacttcctaggatggcaggaatatgaaatgaacccttacgatgaggttctgaatcccaagggattattcaaatgggtcttgcagagaatcagctctctttcgatctcctagagtaatggctcg

SEQ ID NO: 70126 - DNA, 514 bp, Glycine max
  unsure (1)..(514): unsure at all n locations
  Clone ID: PAT_MRT3847_34335C.1
atctttcaatattttttcagtacaaaaggatcaagaattaagaccttcactttatcgtctctctactccctcctagacattctttcttcgaataattgcttttccaacctattctattgcttgagcctttctccaattttgtttctttagttcttttcccaccctttacaccaaaaaacaaaaaatgaggctactgtctacaaaagccacatgcaactctcacggccaagattcttcatacttcctaggatggcaggaatatgaaaagaacccttacgatgaggttctgaatcccaagggaattattcaaatgggtcttgcagagaatcagctctctttcgatctcctagagtcttggctcgaaaaaaaccctgacgtggctggattcaaaagcgaaggcaaatccatattccgtgagcttgctctcttncaggactaccatggcctcccttcctttaagaaggcattggtagacttcatggcagagattagaggaaacaaagtcacttttgat

SEQ ID NO: 70127 - DNA, 327 bp, Glycine max
  Clone ID: PAT_MRT3847_34336C.1
aaagaaaaaacagaagctgaacaagtctggtaatggagatgggagagaaacatcagtgattgagaataacatctcttttcccacactaacctctccagatcttattgagagtcagccatcagctcaaaagaatagtaacacatacaattgtaaatatctccctcaatgcagtaatcagacagagccaaggtaactttttttccccatcatttttgttgtaattggtatggttatttttagtaacaaaacatttaaacccaataatgaactcttcttgtcatctcgaaatacatgagtagagagaatacgttacaagtgattggagaa

SEQ ID NO: 70128 - DNA, 432 bp, Glycine max
  Clone ID: PAT_MRT3847_34337C.1
ccccaaggaaaaccacccaaggatttattttttttaaaaaaaaaattcaaggccccacaaacaccccaaataaacgggaactttttttgtttttaaaaaccttccttttgggggaaacttttttcttttggaaaaatttaaaaaaaaaaaaccccccggaaaaggggggggcagggtttattaccaattttaccaaggggaaaaccggatattccttaaccccctaaccttttgggggccctttttttccggggaaacttcctaaggttcccccccccaaaaaaagaaaggtaaatttttcaaacccccccccgacgggaaaattcctcccccttaaataaccccgggcaaacggaaaaatttttttaaccttcccggggaaaaaattaaggcgggacccaccttttggtggggggctgggcaaaagccccc

SEQ ID NO: 70129 - DNA, 265 bp, Glycine max
  Clone ID: PAT_MRT3847_34338C.1
attttgtacatgcaccaccaacctaaacaatgttacaattggctctactttgacgcaatcgcaatggcatagcgggagctaattaaatgaacgcagggaccacccatacttaatttcactacaacccatcatgcataaccgtctattcagcaaattaatacatgtggctgacccagatgagtcttagtccctccccgagctcgacccataagtctgcccagcttcaccttcttacgggggagacacaaaaactgaacaacctcac

SEQ ID NO: 70130 - DNA, 332 bp, Glycine max
  Clone ID: PAT_MRT3847_34339C.1
aacttggacattttatgcttttttataatttgttttttctggagtacaagtgtaaaaagtgaaaaacctaaataattaaagcccccaaacaagactaaaaacacgggcctatttgaggggcccttcaatagagggcagaaagctcttaaaaaaatatagggagggcccacggaaacagaaacccctacaaaaaaacaaaaaaaaaaacggtcaaacaaagcggggtataatgcagagcacgactagaattagctactcaaagtttgggggcaaaaaccgccactttacggaaaccaactggggcttctgaaccaaatgcacgacctaaatgc

SEQ ID NO: 70131 - DNA, 570 bp, Glycine max
  Clone ID: PAT_MRT3847_3433C.1
ggaaaagaacgaagacttctaacccacttcaaaaaaactgaggtgcacatacaatatccgacatgtgcttaaactggacacagttacaacacgactggacgcgaccactaataacaagggcccctactcctcatattattctgaaaaaaaaaataagacattttttgcacatccttaggccaaagagctcaccattcacaaagtagctagacttacttatatgtcatcatttgaacctaagaggtatgataagcccgcaggcccctaggaaactccaaaaaaaatggacaccagtgctctcttaaatttgtaaagatacaacccattgaacatatcaaaatggtgcccatactcttcaactgaatatactttattccttttctacctcttatttgtgccgctaacagcactattgcttccttgtgtcagtgtctgtgacaaatagcctatctgtactcttaaaagaacactgccagaaccacatatcatgaagcctaaaggcacctatccgagaaaatttgctggcaaaaaggaagaaactcgatgggatacacttgctgctgaaccatt

SEQ ID NO: 70132 - DNA, 518 bp, Glycine max
  Clone ID: PAT_MRT3847_34340C.1
gctacgattccgttccaaggaaggtttcccgtcatcactgtatgacgtcctccttctttgggggggggggggggacaaaagtaagataaatggcaggaacagattagagagagaccgatgacagagaaagatatagagggtttacaacagtcataattgaagaagacagatagtagatagctagtaaatgacggcaacaactacgccctggtaagggtagatggaaggtttatttaaaggaacctatggaagtggttacgaggcgttaaaggaaggaacgcgtttagccgcgttggtaaaaattggcctagacgaagggggtggggtggagggggcaaacaacaccaaaaaaaaaaaccgatgaaacgtgtgtatccttgagtgtagttgttacactaatgccggatacggacttccccagcaacagatgttgtataatagtagtatacgttaagggttgcgtagtcggcctcacttgagtacttatatcaggtcttgcggccacatacaaataaatt

SEQ ID NO: 70133 - DNA, 165 bp, Glycine max
  Clone ID: PAT_MRT3847_34341C.1
ccggtccggattttcggtcgacgaaccccgatttattgtagtacgatactatattgtaccaatattagtgctatattgaaactataagaggttattatgataaaatgatacctttacattaaaaaaaatttaggcggcctcctagagatgctgctactacgctgc

SEQ ID NO: 70134 - DNA, 229 bp, Glycine max
  Clone ID: PAT_MRT3847_34342C.1
ttgtacctatgaagaaaacacattatggggaaaaaagatgggactgcaatatggttgtgcagtacaggatgttataacaggattgtctattaaatgccgatgatggaaatcagtgtactataatcctcaaaggagagctttcttaggtgtatctccaaccaccttgctcgaatcactagttcaacttaagagacggtctgaaggaggcttccaaatagtgctttctaga

SEQ ID NO: 70135 - DNA, 882 bp, Glycine max
  unsure (1)..(882): unsure at all n locations
  Clone ID: PAT_MRT3847_34343C.1
ccacgcgtccgggcggaagggcgagggagtaggaatttgaagattaggtttagagaaggtgggaagcactggacggatgcagttcccattgggaacggacgcttgggagccatggtctgcggccacgtccattccgaaaccatacacctcaatgaggacacgctctggactgggacacccgcagactacactaattccaaggctccaccagcactttctcacgttagaaacctcgttcaccgacaacactatccccaagccactgctgcttcttctgccttaacaggaaatccatccgaggcctacctacttctcggcgatatccaattggactttgattactcacatctcacacccggcctccaacaaccttacgagagagagcttgacttggacactgctactgtcaaagtcagatattctgtcggagatgttcaattcactagggaacactttgcttcctatcccgatcaactcattgttactcaaatctcttccagtaaaccggccaaactttcatttacagtttctctcctcagcaaaatcattaaccaaacttacgtaaatgcccctaatcagattataatgaagggatcatgtcctggcaaaaggatccaacacaatccccatggaattcaattctccgcaattcttggatttgaagatcggtggcacagaatggagtcatccatattttggacaataacaagttgaaggttgaggcttcaattgggctgtttactttcttggtgcttcctcctncttcagtggcccatttaccgctccttcagattctannaaggatncctacgtcttcatggtttcactacattgagctaataaagcatgtatcatattctcatctttatgcacgccacttaa

SEQ ID NO: 70136 - DNA, 458 bp, Glycine max
  Clone ID: PAT_MRT3847_34344C.1
accaacccccccctttggcaatttttctttaccaatggaatttctgcattttcatttggccaaaatttagcttttccaccctttaaaatttttccggcaaataaccggttttaattactcagttcccaggaccccttcattaaaaccaacctccaaagcctgcccagagaaagggcgaaaccaaaaacctttccagtaggatcaaacttttgtggaacctaagatcaaaccttattagcggccctcactgaaactagcccccttaataatctcctttacaaaaattagccgattggcattttagtttccaggcaccatgggggctttgacatgctttttttatagactaattaagtcaatcaaatccttcctggtttaaactaaccagaaaatccaaattttttggaaatatttactcctttccaactatcaacttaaacctttttttttcctaaatt

SEQ ID NO: 70137 - DNA, 305 bp, Glycine max
  unsure (1)..(305): unsure at all n locations
  Clone ID: PAT_MRT3847_34345C.1
ttatttttttatgaaactcgaagcgtgtgctccttattagacaaccgccagcatagataactcttatattcgtgattgcaataaggatagaggatttaatgatatggcctcaccaattggaacccctaaatttagactcccccacgaaacaggccactaatagcgataacctggaatctaaacctgtacatatgatagagatgctacaccgcacttactatcttctaatgattttaacccgantctatgaaaaggacgacagctaatgcacaacctctatgatccttacttgcactgaacacctg

SEQ ID NO: 70138 - DNA, 784 bp, Glycine max
  Clone ID: PAT_MRT3847_34346C.1
tgcaattgaagactctgatgtttatgtaccatgtacctagcgagtagtggaggtggagagagagagaaccacgcgtccggtagtttatctttcctccgttgttgttcttcttctatgcttcgcgttctgattttcccccacgattgactcaggatttggctatggctgtacccgtcgaggaagccattgcagctctatccacattctcgctcgaggatgagcaaccagaggtgcagggacctggagtgtgggtatcaactgagagaggtgcaacagaaagtccaatagagtatagcgatgtttctgcttacagactatctctatcagaggacacaaaagctctcaatcagctgaatgctcttacccaagagggaaaggagatggcatcagtgctttacacatatcgtagttgtgtcaaagcacttcctcagctacctgattctatgaagcaaagtcaagctgacttatatttggaaacatatcaagttctggatttggaaatgagtcgtctgcgtgaaattcagcgttggcaagcatctgcttcctcaaaattagctgctgacatgcaacgtttttctaggcctgaacgacgcattaatggccctacaatatctcatttgtggtctatgttgaagttgcttgatgttttggtgcaacttgatcatcttaaaaatgctaaggctagcatacctaatgacttttcatggtataaaaggactttcacacaagtcagtggtcagtgggcagacactgattcaatgagggagggaattagatgatttgc

SEQ ID NO: 70139 - DNA, 253 bp, Glycine max
  Clone ID: PAT_MRT3847_34347C.1
tagttctgcagttaacaatcgctcctcagatatcaagaaaaagattcgcacagcacttgtgaaaggtaagaaaattgcttttcataccagaggtgatccttttccagtagcttgactggctgttctttatggcgttaagacatgaaattctgagttctaacgccactaaccctatgctgacgcgacttcgttggaactgtaatagtctcaaatatctggtctgatcagagtcctattgcatttgtgaccagta

SEQ ID NO: 70140 - DNA, 317 bp, Glycine max
  Clone ID: PAT_MRT3847_34348C.1
gggggtgggcaaaaaccgtactctcatttaccataattgaaattttcaaatgatattccaatttaatcacaatatcagctgacctaggataccaacaaaaatccaagctttcccccagtccaactgataaacaaaatgggcattttagacttttactgctccaagttaataatcctcccctccaaaaggggaaaaaaagaaacttattgttttattatgttaaaaaaaactttttatttctcctaaaaacctgaactttttggaaatttaccatgtttattcacagggccattggcagattggtgcttattttttgg

SEQ ID NO: 70141 - DNA, 427 bp, Glycine max
  Clone ID: PAT_MRT3847_34349C.1
atgcatgccagtcatttgaatcaaccagaatgtggcagctacagcagctgccagcttaacttggttgctcaagacacatctaaccagatgtccaggcgtgatcctctgagatgttacatggatgtaattgatgatatgctaactcaaatgtttagggaagatccatccttcaaaccacaaggtggccgactaggagaaagcgacattgattatgatactgacgagaagtcaatggcaacactaagacgtcatcttcgaggagctactgaggagtactacagtgtgtatatgacttacgtgttagaagcccttcaattggaagacaagataaagaattatgaacgccgcaactcaactggatggaaatatatttcaagctttagacctgctcggactggcaagtttgggtctttatgtgacactttag

SEQ ID NO: 70142 - DNA, 102 bp, Glycine max
  Clone ID: PAT_MRT3847_3434C.1
tgcggattgaagagtgtaccttttgcattcgagaaactagtattgtaggggtttactcacttaaataaagcgcattactatgcgcattgagtgtgcttaaat

SEQ ID NO: 70143 - DNA, 662 bp, Glycine max
  unsure (1)..(662): unsure at all n locations
  Clone ID: PAT_MRT3847_34350C.1
atcacaaccaccactacgagtttctctctctagaaccgccgaagcgaagaagagagaagagagaagagagaagagaatcacggttggctccgccatggacgcggcatcgcagctcgtctcctgcggaatcgatcccttccctcgcgccacctctccttccccgcgccaccgccgcaaaagcaaccttctcaacctccgccaacgctccagccgcgtcttcgccgtatccgccgagccgaaacccgcgccgccgaagaccgctgtcaacggagcaaattcgaggccgcctccgacaagagctgtcaacggcgtctccacgagaattggagatgtttcgaaggagattaagagagtgagggcgcaaatggaagaggacgaacagttagcgacgctcatgagaggtcttcgaggccagaatttgagggattcgctattcgctgaggacgatgttgaacttcgtctcgttgaggtagatgagagtagtgagtttttacctttggtgtatgatcctgccagcatttctgcgtattggggaaaacgtccacgcctccgttgcactcgcattggtcagttgttatccgttgcaagaggttttctatctcgtattgcctgggatgtgattaacaagaaggntaaagagattgaagttgctagggctattg

SEQ ID NO: 70144 - DNA, 1045 bp, Glycine max
  Clone ID: PAT_MRT3847_34351C.1
ccacgcgtccgaaaaaaagaaaaggacgaagaagtccgtgctggcaaaagattccctcattcaatcactaaggagtagtgggtggcggggtggttgttcccggtggctggctgtggtgttaaatagcaattttggttacaattagaaaccctaagaggcatggggtgtggcagctccaagctggaggatctaccagcagtggccctttgcagggagcggtgtggtttccttgacgaagcaattcaccagcgctacgcactggccgcagctcacatggcctacatcaactccctcaaggcaattggtcactccttacaccttttcattcagcaagacatggatgctcctccctctccctctccctccccctccccttctccccctcacaaaccctccaaacacgcctcttcttctcactccgactccgccggctcccacctccacttccactccgactccgactccgaccacctcccctccctccaccattcccctgatccatcctctcctctgcctcaccatcttcatatgaattacatgaagaataaagccgctccttcaattgtctacgagcagaggcctctgagtccccaaaccatgtacttgggagagtcctcctcttcctcctccttttacccttaccagtatcccccttacccctacccctacgatccctattcggccgtaggttcttcctcgccgcagctccatgccgtttccaagcctcccccgcctcctccctctcctcctcgctcctccacctgggactttctcaacttcttcgataacagcgacgacaagtactatccccaaactcattaccctgccacggccacccccagccgcgattccagggaggttcgagaggaggaggggatccccgatttggaagatgaggattaccaccacgaagttgtcaagcaggtccatggggatcagaagctcgtccagccaactatgcacgaacccccagcctcctcccgccaccacgacgaagatgacgatgatgacgatgatgatgatgatgatgatgatgaggtagaat

SEQ ID NO: 70145 - DNA, 1058 bp, Glycine max
  Clone ID: PAT_MRT3847_34352C.1
gaaaaaatggaacctgaaaaattatatgattccgtcgatttcatattgtcacttcaaagtaaaaatggaggtatacctgcgtgggagccagtaagatctcaaaaatggttggaagatcggcaattcaaagtttagtgtttttcaaaagtctatatccagagtataggaagaaagagatagagaatttcattaacaaagcagtacaattccttgaagatgaacaatcaactgatggttcttggtctggtaagtggggagtttactccacttattcttcctggtttgcacttcgaggtctagctgcagctggcaagacttatacaaattgtgttaccattcgcaaagctgtgaaatttctactttcaatacagactgaagatggtggttggggagagagttatctttcaggcgcaaaaaatacgtacgtacctcttgaaggaaatcgatcaaatgtcgtacaaacagcttgggctctaatggctctaattcatgctgggcaggctgagaaagatccaactcctattcacaatgcagcaaagttactcatcaattctcagcttgaagatggtgattggcctcaacaggaagtcacaggattattcttgaagacaggcgcattacactacccgctctatagaaattattttccaatgtgggctttgagtgaatatcgtaaaaaagttatgttgccttgtactgctgcttaacttgacctcaaaaagacagtaccatatatcaataaagaatccaacagataaaatcaaacaagttgttgattgagtttcataataatatgtttattcctattattatatttttataattctgaaacaattattctgtatcatagattgcgggggggcccgccccccaatgccccctataggggggtgtattaccccccctcattggccggggttttacaacggggggactgggaaaaccctggggttacccaatttaatcgccttggaagaaatcccccttttccccgttggggtaaaaacaaaaaggccccacccgatcgcctttccaaaaatttggcaaacctgaatggc

SEQ ID NO: 70146 - DNA, 397 bp, Glycine max
  Clone ID: PAT_MRT3847_34353C.1
gttgaacatgattgggataaaaaaaaactcaacaaccactgttgctgtgaacctagcaagtaaataacttgtaccaatttatctgtgtgtgtgtttaggtgggcaattttgaaatccaggcgatagagaaagtcccgtagttcttaatttgtgtagtattttatgttccagtttagggtaacagtattttgtgcgtgttgctcattggttgtctaaagtagtagaataaggatttattgtttcttgtcatgagttggggaatatacctatgaattacattccgaaaaaaaaaaaaataaaaaaaaataaaaaaaaaaaataataaaaaattaaattaaaaaaatataatttatattatatttttaaaaaataattaaaatattaagggggggccccc

SEQ ID NO: 70147 - DNA, 349 bp, Glycine max
  Clone ID: PAT_MRT3847_34354C.1
aagttaccaaagtttgtggggcattagctaaacaaaaacaataataatattcacatattatatatagataggagggataagttattttaagagtaactctaaaagagttatttcttattttcatcatttaagtttttaaaatataatgattaagattaattaattaattagtataatcattaaatctaaaaaaatagatgatggaaataaataataactctaaaaaaaattactcttcaaataattatatatagagagagagagggagagagatagagagtgagaaatagtgttgtgtggattgatgtgaaggaaggccactcatacctcactctcctttgaccatgac

SEQ ID NO: 70148 - DNA, 1131 bp, Glycine max
  Clone ID: PAT_MRT3847_34355C.1
aatggtttcagaaaaaataagaaaaagaggagcgattggattgggggtgggtaaggggagtgggaacaccattccatatcatttatctatctgtatctgcttctctttgcttaacatttctcactcacaacacaaaatcatctaatctatctatctatctcattcatgtgtctaattctaccttacttgtgtttgtaacgctattactcattactgtgtaaatggcatatgttgatgttattcgattacaatttcagtcctttttcttctccccctcaccactttctgctaagaggctattctatcctctcgcctattcttcttctaggccagcgccaccagctactcttgctttcccccccagaaagcatttgctttctttcaaggtatctgcaactgttgctgaaacaggtcagccaaaatggtgggaaaagaatgcaccaaatatgattgacattcactccacgcaagaatttctgagtgctatgagtcaagctggggatagactagttattgttgaattttatggaacttggtgtgcttcttgccgagcattattccccaagctatgcagaacagctgaagaacaccctgaaattgttttcctcaaagtaaattttgatgagaataagccaatgtgtaaaagactgaatgttaaagtacttccttacttccacttttatcgtgggactgaggggcagcttgaatcattttcatgttcacttgccaagtttcaaaaaataaaggatgccatcgagatacataacacagctcgatgcagcatcggtccacctgtgagcattggcgatctgcttgctgaaccttcttcagttgccaaggatagaccagcagaatctgtgtaaccatagtagtacttatgttctcgcttttgtattataagttgtctcacaaagggaaaccccaaagaaggctgtactccagagaaacttatgatgtaaaggatatatgtactctgtatatttactatttttatattttttttttcgtattagaagaattccgagcagtaaaaaattgtttgttctttttcattcttgaccattcatttgctgattgtaatcaagtacttgaaaacttcggtgaaatgaaatgtttctaattatggcttaa

SEQ ID NO: 70149 - DNA, 237 bp, Glycine max
  Clone ID: PAT_MRT3847_34356C.1
gtcagaaaatggtgggtgtaggagtgagtgtatccgcagcaatggttacaactacttttcttagaactgggattgaacactctaatcaccgcagcaaacaccaatggactgcgtacttttgtgttcattatcgtatcaaacttcttagctctcttcttccttataccctccaccttcctactaccacaggcaatgagccgcccccccaattccaagctcaattctctggagaatttc

SEQ ID NO: 70150 - DNA, 469 bp, Glycine max
  Clone ID: PAT_MRT3847_34357C.1
ttcaaaatccttagtttgaacaaatgataatctcccagctctcgaagttgtttatcttttttttcatatgcattacactcatatgtttctcttcaagttctaatttcccagtgcaatactccatattaggccctaatttggacaagcttccttcacaggatgaaaccatccaactattccaactatggagaaaagagcatggactagtgtataaagacctaaaagagatggcaaagagatttgagattttcttgtccaatttgaattatatcattgagtttaatgctaaaagaagctccccttctggctaccttcttggtctaaacaattttgctgattggagccctagtgagttccaagaaatctacttacatagccttgatatgcctacagatagtgctcctaagctgaatggccctcttttatcatgtattgctcctgcatcggtagattggaggataaaagagct

SEQ ID NO: 70151 - DNA, 840 bp, Glycine max
  Clone ID: PAT_MRT3847_34358C.1
cctctactggtgatcttttaacaagcactaaaccaactcttttggatcagccacctgtttctgctacttccatggataggtccagcatgcatggattcattagttctagagtggatgcaacaggtcctgggtctttcccggtgaaaagctctgcaaagaatagagatcccaggcccggtttcattaattctgatgcaagtgctgtggataacctgtctacattgataaataatatgtctaaagtggaatattctggaacaacaatctcaaggaaacaaaaggctgctgaagaaccttctttggatgttactgtatcaaaaagactaaaaagttctttggaaaatactgagcataatatgagcgaagtaagaactggaagtggtggttggttggaagagaatactgggcctggagctcagttgatagagaggaatcatttaatggacaaatttggacccgaagccaaaaagactttgaatacagtcagtagttcctgtactggttctgataatttcaatgcaacaagcattagaaatgagcaggcaccaattacagctagtaatgtgctagcttccttacctgctctattgaaagaagcatctgtaaatccaatcatgcttgttaacatacttagattagctgaagcccagaagaaatctgctgattctgctgcaattatgctgctgcatccaacaagctcaaatccggcaatgggaacagactcaacagcgaggtattggttcatcaatggccactggtcttcttcaaagttctgttggaatgcttcctgtttcatcacaatcaacttccacggcacaaaccctacaagatgattcagga

SEQ ID NO: 70152 - DNA, 286 bp, Glycine max
  Clone ID: PAT_MRT3847_34359C.1
ggggcaaaatttcccactcgtttcctttttttttaaggtcccattcgggattaaattaacctgggccatccccgggttggcctccggacctaaagatttatcccttggccactgggttaagagactttttccccagaaacccgggggggcctacctaccctttttttttcaatttggaccccaaaaaggaatcctttgaaagaggggggttggaacttggaccaatcccctttttaagctttcttggtttgggaaagacccccctaaaaaattgggcaaaattttt

SEQ ID NO: 70153 - DNA, 776 bp, Glycine max
  unsure (1)..(776): unsure at all n locations
  Clone ID: PAT_MRT3847_3435C.1
atatctatcggcaacctattcaatcccatctctctctccatcacgacgacgacgacgatgttcggtgtcctccgcagcaaggccgggcccctccgccgcctcccctccctctctgtccccctccgacggcgatcgagcaaggcagcggcggcgatgggggaggtggacatggcggagtacgacgtggcgctgaagcacttcgacgatctaattcagcgtatactcgtcaagaagaacacaccggactggctccccttcgtcccggggtcctccttctgggtcccaccgcgcccctcccattccaacgtcgccgacctagtccacaagctcacctacgaggaccaccgccgtcacccccacgattgctcccccctcctctccaccctccgcggctggccctccgtcaatttcttcatcgatgatgggacaaatgggactgtgaaagtgaaggttctgacattttcagaaaatgtagctcactcagaagatgaggaaggatgatccgtaatttagccaagccagttgctgcggtttgtcatgatgcaatgtcaggttgtggagaaaagtccaaaaaaaaaaaaaggcatgagaaaaaaaccaatactgaaaaggactgtgtgtgcaaatggaaattccttcagatgcacaactggtggttcttttgggatcaaaccatctcactctacttgactcaacattgatctgtttatttgcaatgctaggttgaatccttgtaggctgaatgtgtgnatatatttatttatccaactaataaa

SEQ ID NO: 70154 - DNA, 478 bp, Glycine max
  Clone ID: PAT_MRT3847_34360C.1
agtgtgtcataggggaagacccacggagaaaacacaggccaaaacagcacacccaggggaaacccaaaaaaaaaaaagacccccccacggccacaagcccaagcggagggggagaagaggggggccagaaaaagcggggcccccaaacggaacaagaagacaaagaggggggccacacaggggcccaaaacataggagggctccccagacaaagagaaacccaaaggggctctaaaactggcacaaaaaactccccaagaagggccaaaaaaagcggggggtcccccgaacaagctcccacaaatgggggcccatatcggttggaacccaacagggggcaccgaccaatcctgagcgccccaaagaggagaccaacgtgtaaaaaccgcgagaggggccccggaaaagtcagggaaaaacattaaagcgcggaacccccggccgacccgaggggcctcccaggaagcccggaacgggc

SEQ ID NO: 70155 - DNA, 719 bp, Glycine max
  Clone ID: PAT_MRT3847_34361C.1
aattcggctcgagttcttttgttaaaaaaaaaagatttctgaataatataaagtcttcaaaagtcgctttccccttccacctttctttccaacgttcacaaaggaaggttggtattaaaatggaaagcaaccatagcatgaggcaaaacaccatggaaacagagtttgaggacttgctgccagtgatggcagaaaagctggatgtggagtcctttgtctctgaactatgtggaggtttcaagcttctatcggacccggaaactggtttgatcacgagcgagagtctaaggacaaattcagctcttctgggcatggaagggatgagcaaggaggatgcagaggctatggttagacaaggtgatcttgatggagatggaaagcttaatgaaactgaattttgcatcctcatggtgaggcttagccctggaatgatggaagatgctgagtcatggctggagaaggcaattgatgaagagcttagcaagtcctcatcttagagataattggtccccttttgtaaccaattgtaagttatgatatatgtatttaataaatcttgtcagttttaagttgctataattgatgaaactcatctttgtcctaatgggtcttggacttgttaatcaaatcaatttcttttgttactttgatatttgtgtgatgtatttatcttttttgtcaaatgaataggattatataaaaaaaaaaaaaaagggcgg

SEQ ID NO: 70156 - DNA, 703 bp, Glycine max
  Clone ID: PAT_MRT3847_34362C.1
acatagatttggctcatattcatttgacaaaaacgatatatatatcacatcaatatcgcggtaacaaaagaaatcaaagaaattcatttcataagccacgacccattaggacaaagatgagtttcatggaacttaaaaactggcaagattaaaattaaatacatactatcataacttacaattgattacaaaaggggaccaatttatctctaagatgatgacttcctaagctcttcatcaattgccttctccagccatgactcagcatcttccatcattccagggctaagcctcaccataaggatgcaaaactcagtttcattaagctttccatctccatcaagatcaccttgtctaaccatagcatctgcatcctccttgctcatcccttccatgccaagaagagctgagtttgtccttagactctcgctcgtgatcaaaccagtttccgggtccgatagaagcttgaaacctccacacagttcagagacaaaggactccacatcaagcttctctgccatcactggcagcaagtcctcaaactcagtttccatggtgctttgcctcatgttatggctgctttccattttaatagcaaccttcctttttttctctttttctttgtgaacgttggaaagaaagatggatggggaaagctactttggaagacttttctattatataggaatgaagactggaagag

SEQ ID NO: 70157 - DNA, 452 bp, Glycine max
  unsure (1)..(452): unsure at all n locations
  Clone ID: PAT_MRT3847_34363C.1
cacgcgtccggncaccactctcccaaattactaaattttaccgtcaaaaaaagaaaagaatacttcttctttttcaccgcattcaattcattccattgcgtaacacgcttcctctcctagttctcactttccacccccttctttttcttcttctacaaccttccttccttgttccttcgtaaatgcttctttgaacaagtttttttttttttttttctggtggagactcaaaagatcgttgtgaaggtttatacatagtaaaagttgaactactctatttacacacgcacgctcgcacgcgcgttttgttggtgaggttgtttttgttttgttgacataggaggaaacgaaccaaacggtggactgccttgtctttttctctcaaactcattctaagaacgtttgtgtgtgtgtgtgtttttggttttttaataaaaaaatagttttttttt

SEQ ID NO: 70158 - DNA, 485 bp, Glycine max
  Clone ID: PAT_MRT3847_34364C.1
cgcgtacgcctgggatttcggctcgagctctcgcacaatcaaacaaacacaatcctctatacgaagccttttaatctcgctctcattttctgactttctcagctcaatgttgttccgagtgtttgttgtttttctccaaccgagtcgaacatgtctagtttcgtcggtgtccttgtttctgatccatggcttcagagccagttcactcaagtcgaacttcaaaccctcaaatccaagaaaggactcaatcaggacgtgttactgtcggaaattttcgacctatttttaagaaattgaagggtttctctgaactgttcactgaggatgagattaaggatgccttggcagagtcacatcagaacatggatgaagagattgattttgagtccttccttagggtgagtttttgttttttatttttattttacccactgagaagttgaggcatgatttcagccgaactaaatcttgtatgacattttttc

SEQ ID NO: 70159 - DNA, 449 bp, Glycine max
  Clone ID: PAT_MRT3847_34365C.1
ggtctttaatgatttcatctctgttctctattaccagaatatgaatgtctctaatttggggtatttttatatttaagcttgatatatataacttgtatctaaaatttagccatagcagttatctgctatcccactatagtgttttttgggttggcctctcgtcactgttatctgggattgataactaactttcctaaatgactaatagtttaagccattggaaaggcacggatgattttatcacctcttatcaacgtcaatgagattctacagaatattctggtctgaggtttttcttgacctcaaagtcctagagtggtgacatggcaaaaaaaactcatgggtgtgtgccctgtccttatttgatgagagaaacccaatttaaccgggtttgattgaaggtaggttaaggttttttcctctattcataaatggtaagggcaggttta

SEQ ID NO: 70160 - DNA, 505 bp, Glycine max
  Clone ID: PAT_MRT3847_34366C.1
ccctccaaatcctttttttttataaataaaaattatttccaaaggaaaaaaaaggattttaaaggaccccatttaaaaaaattggaaggggaatttttaagggtttaaaggggaaaaccatttttttccccccgggcccgggaaaaaaaagggcccccccgggtctggaaaaccccccttaaaagggccttcggcccccccagggaagggcggggaaaaaaaaaagatttcttggaagggggggtaatccggggtaaagaaaccccggaccccaacaagaaattcccttcccggcccaattttaaaggaaaaaaaaaacccctccgccccagaaaaaaaaggtattaccgggccccccccggaaagggggccggttggggattgttaaaccaccccgcccaaggggggccccctgggaaatggatttggggaacctttaccgaaaccaaaagcgaatggggcaaaagcttcaaattcggggaagggggccaatcccaattttaat

SEQ ID NO: 70161 - DNA, 290 bp, Glycine max
  Clone ID: PAT_MRT3847_34367C.1
aattgcaggcatgtctagcattggaccttacgttaagcagccaggagaacccacccggggtcagaccggcagggaacacaaaaaggggccttgtttccttttaaaccttaaccaaaaacttgtttttccaaggcccccggttttttgtttcaaatccgcttctagagaaaacacgattcctccccaagtattcaaggaggccttgcggaaaattttggtccctatttaccccttggttgccccgtgatgattaacctggaaggggaagttattagggattacccctggga

SEQ ID NO: 70162 - DNA, 844 bp, Glycine max
  Clone ID: PAT_MRT3847_34368C.1
ggctcgaggccttacgtaggggatagcaagagagccatggatgagtacacttcagagatattcatgggtggaaagaacaccattgttttgcacaacacatgtgaggattcccttttagctgctcctattatcttggacttggtccttcttgctgagctgagcactagaatccagtttaaagctgaaaatgaggtctgcatgcattgctaaatgattttattgcttgattgtattcgtcattgtatttttttcagccttctgaggtcactatgttgtggtggttgatgcagggaaaattccactcattccacccagttgctaccattctcagctatctgaccaaggctcctctggtgagtttaatctaatcttattcaatgttgagtgcatatccttatttttatataggaattaagttgaaagaaatatgagttttagtattgagatacaattgtgaagttaaatcattgttcagtgaatttcccttttttccccttatcatttttttatcaaaaaagttggcaaggttactcacaacataactcttgcaggttccaccgggtacaccagtggtgaatgcattgtcaaagcagcgtgcaatgctggaaaacataatgagggcttgtgttggattggccccagagaataacatgattctcgagtacaagtgacgcatgggatagaataataattttgttggggtagcctatccgaatggtttatgttaataatatgtttgcttatgattttgcaagtgtaattgattgcatcttctcattaatgctttagagcaggacatattctgttttctagggacatgaatgaatgtagtataattttgtgt

SEQ ID NO: 70163 - DNA, 709 bp, Glycine max
  Clone ID: PAT_MRT3847_34369C.1
ccggattcccgcgtcgacccacgcgtccgggagtgtggaactcatggcgccctaatttaagccccaggcgtgtggatttgtaaatgtgatgggttcatttgtcagcatagctcgaaaccttttatcgtcttcctttttattcgcatccagccgcgactaaaaccatacagaatgttgattcgcggccattgtcgaacaatatcacccaacaattatgtacgtcttcgacgtctgtgttcaaaagcttataaaaaatgactttttacatgttaacccaattcaagcttataactactaagcaacactctcactctggggagactccaaaacgatgccgttttgggccccactcaagtcaagcctctccaccaagctcctgaacataaccggctactctctctgcaaagcgaagcagatcctcaatgccgaaacggcaatcgtcgacggcatacgactcggcgtgctccccgacgtggtcacctacaacaccctaatcgatgcgtactgccgtttcgccacccttgatgtcgcttactccgttctcgcgcgaatgcacgacgccggcattcccactgacgttgtttcattcaataccctaatctgcggcgctgtgagagagactctgatctcgaagtccctcgacctgttcgacgaaatgctcagacgaggcatcaaccccgacgcatggagccacagcattctaatgaac

SEQ ID NO: 70164 - DNA, 1169 bp, Glycine max
  Clone ID: PAT_MRT3847_3436C.1
aattctgcttgaattgtcgggagggaagcggatgggggccggcgatgtgtcccggtcggatgtggaccacgcgtccgcccagaagtcaccgtctttcattcccaacctaactttcttccctctctctctctcacatctataagcaaccaatccaatcccatctctctctcgcaaaccacgacgacgacgacgatgttgggtgtcctccgcagcaaggctgggttcctccgccgcctcacctccctctccgtccccctccggcaccggtcgagcaaggcggcggcggcgggtggacatgtggtggaggttgacatggcggagtacgacgtggcgctgaagcacttcgacgacctaatccagcgcatcctcgtcaagaagaacacaccggactggctccccttcgtgcccgggtcctccttctgggtcccaccgcgcctctctccctccaacgtcgccgacctcgtccacaagctctcctacgaggaccaccgccacccccacgattgctcccctctcctctccaccctccgcggctggccctccgacaatttcttcatcgatgagaatgaatctactgatggtgaggatactgatatagagataaatggcccagacgggacgaacgggactgtgaaagtgaaggttctgacattttcagaaaatgtagctcactcagaagatgaggaaggatgatccataatttagccaagccagttgctgcggtttttttatgatgctatgtaaggttgtggagaagtccaaaaaaaaaagcatgggaaaaaaaccaagctctctggatgttggaaaggacagtgtgtgcaaatgaaaattccttcaggatacagaactgttggttcttttgggatttaaacccatctcactctgcatgactcaacattgatctgtttatttgcaatgctaggttgaatccttgtaggctgaatgtatatatttatttatccaactaataaaacacagacattttagaatattttcctctaaaccagcaaggacttgctcaatctagtgcacatataattatgttgatgtgtatataattgtaatagacatttctttggtggtacaaaagtgtaatagccttcatggggcaacacttcgaaagtttttcattaaagtcacactctagcttgaattttatgaattttaaa

SEQ ID NO: 70165 - DNA, 188 bp, Glycine max
  Clone ID: PAT_MRT3847_34370C.1
cctcgtccacggacgcgcggggggggtctgttttccccaatgcaggcctgttctttttacaattgattggcttatttcctctcaagaatgtctgcccaggacctaatgtgttttaaatccccacaatcccttttgtgataaataaggtggccggggaaaccgactttttccccagcgcactttcccga

SEQ ID NO: 70166 - DNA, 594 bp, Glycine max
  Clone ID: PAT_MRT3847_34371C.1
tgttttttttccagccttctgaggtcattatgttgtggtgattgctccagggaaattcccactcctttccacccagttgctaccatccttcagctacctcaccaaggctcctctggtgagtttaatctaatcttattcaaagatgattgatgagtacatatcctctgaattttagtatcgagataaaattgttccaattgtgaagttaaatcattgttgttcagtgaatttcccttttttgtccttatgatttttttttatcaaaagttggcaaggttactcacaacagtactctcacaggttccaccgggtacaccagtggtgaatgcattgtcaaagcagcgtgcaatgctggaaaacataatgagggcttgtgttggattggccccagagaataacatgattctcgagtacaagtgaagcatgggaccgaagaataatatagttggggtagcctagctgaatgttttatgttaataatatgtttgcttataattttgcaagtgtaattgaatgcatcagcttcattaatgctttagagcggggcatattctgtttactaggaacatgaatgaatgtagtataattttgtgt

SEQ ID NO: 70167 - DNA, 1989 bp, Glycine max
  Clone ID: PAT_MRT3847_34372C.1
accaggccaaggcaagcgctgggctttgaaatggagcatttcagaatcatcaatgatgtaacccgcaacccactcaagttgtgacacgtgtataagcattctatctcgttcctctatatataggacctccttcacccaacacaagtgtgtgtagtataggattctcttctttattccttttgtaatttcattcattcttaatctttgtgaaaaataatgttcatcgagaattttaaggttgagtgtcctaatgtgaagtacaccgagactgagattcagtccgtgtacaactacgaaaccaccgaacttgttcacgagaacaggaatggcacctatcagtggattgtcaaacccaaatctgtcaaatacgaatttaaaaccaacatccatgttcctaaattaggggtaatgcttgtgggttgggggtggaaacaacggctctaccctcaccggtggtgttattgctaacagagagggcatttcatgggctacaaaggacaagattcaacaagccaattactttggctccctcacccaagcctcagctatccgagttgggtccttccagggagaggaaatctatgccccattcaagagcctgcttccaatggttaaccctgacgacattgtgtttgggggatgggatatcagcaacatgaacctggctgatgccatggccagggcaaaggtgtttgacatcgatttgcagaagcagttgaggccttacatggaatccatgcttccactccccggaatctatgacccggatttcattgctgccaaccaagaggagcgtgccaacaacgtcatcaagggcacaaagcaagagcaagttcaacaaatcatcaaagacatcaaggcgtttaaggaagccaccaaagtggacaaggtggttgtactgtggactgccaacacagagaggtacagtaatttggttgtgggccttaatgacaccatggagaatctcttggctgctgtggacagaaatgaggctgagatttctccttccaccttgtatgccattgcttgtgttatggaaaatgttcctttcattaatggaagccctcagaacacttttgtaccagggctgattgatcttgccatcgcgaggaacactttgattggtggagatgacttcaagagtggtcagaccaaaatgaaatctgtgttggttgatttccttgtgggggctggtatcaagccaacatctatagtcagttacaaccatctgggaaacaatgatggtatgaatctttcggctccacaaactttccgttccaaggaaatctccaagagcaacgttgttgatgatatggtcaacagcaatgccatcctctatgagcctggtgaacatccagaccatgttgttgttattaagtatgtgccttacgtaggggacagcaagagagccatggatgagtacacttcagagatattcatgggtggaaagagcaccattgttttgcacaacacatgcgaggattccctcttagctgctcctattatcttggacttggtccttcttgctgagctcagcactagaatcgagtttaaagctgaaaatgagggaaaattccactcattccacccagttgctaccatcctcagctacctcaccaaggctcctctggttccaccgggtacaccagtggtgaatgcattgtcaaagcagcgtgcaatgctggaaaacataatgagggcttgtgttggattggccccagagaataacatgattctcgagtacaagtgaagcatgggaccgaagaataatatagttggggtagcctagctgaatgttttatgttaataatatgtttgcttataattttgcaagtgtaattgaatgcatcagcttcattaatgctttagagcggggcatattctgtttactaggaacatgaatgaatgtagtataattttgtgtaaaaaaaaaaaaaaaaaaaaaaaaaaccccaaaaaaaaaaaaaaaaaaaaaaaaccaaaacccag

SEQ ID NO: 70168 - DNA, 385 bp, Glycine max
  unsure (1)..(385): unsure at all n locations
  Clone ID: PAT_MRT3847_34373C.1
aattcctnttnatcctccaaaatctcaaaaaaaaacattttactactctnattaanactaaatgctgcctacttgtgtttattttttcctgaagaaatatatcaattctgtcatttcttactcttttttcccgagttatttattactttaacacgtaataaaaaacgttagttataaatacattattcaatcttttcatgttgtagcatgcacccatctttgctttcttttgttttttcttaactttaaatgataattttttattccacattttttatctttctagaattttcttataatttacaatttccacggtttgacattttaaaatttttaatttattaattaattaatttactattttcaaaaaatacaactatcattc

SEQ ID NO: 70169 - DNA, 299 bp, Glycine max
  unsure (1)..(299): unsure at all n locations
  Clone ID: PAT_MRT3847_34374C.1
gcaggggatctaatttacccccttccattggaaaaatatgnaaattcantagatgncggattcnatntgaagactatgatcagccctggggnntggcagngaaanccgnggancccntactacattngntcccacngngataaccaaatacnttaangaacttcagcattcaanggntcagcngctgcttccgaaatggagatggagaaactaaaacatgattacccaaagtcgtgcaaatggctaaccagttgaagaacatgatgaaaattgcatcaatttgtgtaaggagctgttgg

SEQ ID NO: 70170 - DNA, 442 bp, Glycine max
  Clone ID: PAT_MRT3847_34375C.1
ttctactcaagttgtggcgtatgggtctagccgtactcaaatggttctaaattgtaccgtttattggcggggcctaatatttccagtgcttaaagcattgaagatgtttacaactcgaagagatcggtctgtccattcttttacgaaagctgacttttctgaatttgagaaatagcaaaagtcttattaggttgccgcagtttggagaggacctcattcttaaaaagctatatcttgaaggatgtcaaagtctgaggcacattgatcaatccatcgggtttctaaagaaacctcggtcatttgaatatcgaaaactgcagacgactcatacgcattgatccatccatctgtttactagaaaggctcagagaattggatttgaaaaactgctaaaatgtagatagctgacccaatagcatactagggctcaatgctgttaaat

SEQ ID NO: 70171 - DNA, 175 bp, Glycine max
  Clone ID: PAT_MRT3847_34376C.1
cgtggatatatgtagattgatgtgcgctacgctcatattcgtatacaccgtaacatgcaagagcgattcgctagaggcgtaaagcattgacgccatccacatcttatacgtgaagatccatgacacgggaggaatccatggtgaccaactgcgctgcacagaagacatagagcaa

SEQ ID NO: 70172 - DNA, 431 bp, Glycine max
  Clone ID: PAT_MRT3847_34377C.1
gtttgaggacactcacccaagctgtaacctctggtgagcgacctacccaacactctgcaatgcgcgattgccgtcaatgactttgagcatatcttcatggtagctccagggtgagccaccggatcccggagattgatgaaggtagccctgatcgattgaagaacatactccatgagttcactggagagcctgttgacactgtggataaacactaggaacaaccagtggagctgcttagcatgacatcatgatatctgactcagaatgagcgagctaggatcatatgctccatcgcttttaaaatcagcatgaatgcacctctcatgggttagttagcagctgaaactgacccactataaactgctacgtaggaactacaagagcataatatgccctttacaattcagaactccttgccttatggctgttat

SEQ ID NO: 70173 - DNA, 272 bp, Glycine max
  Clone ID: PAT_MRT3847_34378C.1
acgcatacgtatagtctggactcagcaatacattccattgaggactcaccggtacgtggcccgctcgtggaatctcgaaccaccgtattcaattcaaatcttaacctcaccagtaaaataccacaataatatgctataattataataattaagtataaattaagtacttccaggtacgaatttccattggcaagatctccatctgttgattagatcacttcatcctcggcgcggttttgcaatgctgtgaagtccaatagataactagaggc

SEQ ID NO: 70174 - DNA, 243 bp, Glycine max
  Clone ID: PAT_MRT3847_34379C.1
gcgcccacgcgtccgcgggtgtgtagtataattgcagtgaaattggggagaaaaaacaaaatgcacttaatcatggcgggctctgagatcctcaaagatattggttctcgaaatggcgctgtgttcaagctttttttacacaactggacccataccctgcttggtgacaaggcccttgggagtggccaaaagatttactatgatgtccagagggaaatctataaccacatatcattgcaacac

SEQ ID NO: 70175 - DNA, 737 bp, Glycine max
  Clone ID: PAT_MRT3847_3437C.1
aaagtaccgtctttcattcccacccaacctacctttcttctctctctcatatctataggcaacctattcaatcccatctctctctcaaatcacgacgacgacgacgatgttcggtgtcctccgcagcaaggccgggcccctccgccgcctcccctccctctctgtccccctccgacggcgatcgagcaaggcagcggcggcgatgggggaggtggacatggcggagtacgacgtggcgctgaagcacttcgacgatctaattcagcgtatactcgtcaagaagaacacaccggactggctccccttcgtcccggggtcctccttctgggtcccaccgcgcccctcccattccaacgtcgccgacctagtccacaagctcacctacgaggaccaccgccgtcacccccacgattgctcccccctcctctccaccctccgcggctggccctccgtcaatttcttcatcgatgagaatgaatctactgatggtgaggatactgatatagagataaatggcccagatgggacaaatgggactgtgaaagtgaaggttctgacattttcagaaaatgtagctcactcagaagatgaggaaggatgatccgtaatttagccaagccagttgctgcggtttgtcatgatgcaatgtcaggttgtggagaaaagtcccaaaaaaaaaagggatggtaaaaaaaccaattactgaaaaggactgggggcgcaaatggaaattcctt

SEQ ID NO: 70176 - DNA, 199 bp, Glycine max
  Clone ID: PAT_MRT3847_34380C.1
tttatacgtactctgcacaggacagcatagtcaaggtataagtcttgaaagactatgctgatgctcttctctattccggatgcacatgtggaacagagacaaaacagcccgggaatcatgtggttggaatatgcttaaaccaagacaccactgtacgccttaaaatctgctcaattgaagacggtacacttttgaagcc

SEQ ID NO: 70177 - DNA, 364 bp, Glycine max
  Clone ID: PAT_MRT3847_34381C.1
aaataaaaaaattgggggttttacgttttgcatttaaattcacaaaaaacacgcctctttcattttcctggtaaaaccaccatttcaaacccgacattatctcacctttgttcccttcacaaaaaaccccaaaaaaggtttccatcctttaaagccacccctgaaggcagggaccccccccttttgggccccaaaaaccccgcttattaatgggggaccctggccccccaacaaaacccaaaaaaaatcttctttaaacacccatgggcccccccccaaaccccccaataaaactcccccaggggggaaaaaaaccccccctttaaccccctcccccggaaaaaaaactcccctttgacccccc

SEQ ID NO: 70178 - DNA, 361 bp, Glycine max
  Clone ID: PAT_MRT3847_34382C.1
taaaaatttccaattcagaatttcagatagctgacatgcagtctttctcacattatatctcttcaaattgtcacaattaaaacaacaaaaacaaaatctcctagcagctatgcaccataagcatgcaagtactgttaatgtgttgacaaattcacagctagccaattgttgacaaatttcctcttatgaataaatccaatgcattcagatacaccaaaattatgctcgttcactggtgcattgattttgtgttgaaattattgataggggtccaggcagtgttatcaatggcagaacatgacagaaggctaaaattccaccatataaacacgtcattgcacctcatggtgccaccatggca

SEQ ID NO: 70179 - DNA, 354 bp, Glycine max
  Clone ID: PAT_MRT3847_34383C.1
tttccgaattattttcctcaggagaggcatctacgctgctctgctctgcagcaactatgcctaaccctaaggtcgtgttcgacatgaccatcggcggtcaatctgctggccgcatcgagatggagctctacgccgacgtcactccccgcaccgacgagaacttccgggcgctttgcaccggcgagaagggcgtacggcggagcggcaagcccctccactacaagggctcggccttccaccgcgggatcccgagcttcatgtgtcagggcggcgacttcaccgtcggaaacggaaccggcggcggggatgaataaggggccaagttcggccacacgaacttggtgaagaagcaca

SEQ ID NO: 70180 - DNA, 577 bp, Glycine max
  unsure (1)..(577): unsure at all n locations
  Clone ID: PAT_MRT3847_34384C.1
cggtaccgttccggattccccggtcgacccacgcgtccgcccacgcgtccgnccatcacctcctgctcctcctcctcttcctccgcgcgcgcgagatccagggagagggagagggagagatcatggcggggacggtgacggtgccgtcggcgtcggtgccgtcgacgccgctgctcaaggacgagctggacatcgtgatcccgacgatccgcaacctggacttcctggagatgtggcggcccttcttccagccctaccacctcatcatcgtgcaggacggcgacccgaccaagaccatccgcgtccccgagggcttcgactacgagctctacaaccgcaacgacatcaaccggatcctcggccccaaggcctcctgcatctccttcaaggactccgcatgccgctgcttcggctacatggtctccaagaagaagtacgtcttcaccatcgacgacgactgcttcgttgccaaggacccatctggcaaggacatcaatgctcttgagcagcacatcaagaacctcctcagcccgtccaccccgttcttcttcaacaccttgtatgatccctaccgcga

SEQ ID NO: 70181 - DNA, 396 bp, Glycine max
  Clone ID: PAT_MRT3847_34385C.1
cttggttttgttttgtacgctatgataacataacgggtaccggactagttaatctacattataacagtatcactcacgagccaaaaattcttgagatggatctagaaatcttaatattcacctccccatctgagaaggatggtggacacaacatgctgtgcgatctgtgtctgatgcaagcatcatgcatggcctgatcaagacactatcttgcctgatgcgtggcacgcatgcacccacactcacctggatatggactcatgcgcgatcactctttatgcttcaatacactatgcaatgacatgtccgagctacatgcctcgggcatgttattcaggtcaacaacccggactgtgaaagcaccggacccaccgccacagctggcatagagaagct

SEQ ID NO: 70182 - DNA, 636 bp, Glycine max
  Clone ID: PAT_MRT3847_34386C.1
agcatcttgtttttttttttctacgactaaaatttttctgaagatagcatcttgattcaagcattctacgactagaagaacttgcagacttgacattactagtcatctacgtacgacggtgattattatagcatttgaatttgacactaaagtttcaagtgaagttaagcagcttgatagatactagtactatatatctaagtgtcatattgtaatagtgaaatgtctagtttcatcacctcgagagagggagaatgttgactttgtagtcttattgccatacttgacactaattctgtattctcctaagaacccataaaagctataggaaccgtgcacatctgagactccctctacacgacccgtttgccactcttgaagaagtttgtccaccgcatcacctgctgggaggttcttgaaattattgtctgtcaggcacatttggtagcacccatttggatgtaatgccgtccaaagcattatcccattcacagagggatgtgagaagccttccctcagcacttcctccgaataatttgcctgtgcatcttcatcaagtgtcttgcttatatcacacctcggtaagccaaaaggagaaggccaagtgttgccaactttgtcgacgccgtggctgat

SEQ ID NO: 70183 - DNA, 249 bp, Glycine max
  Clone ID: PAT_MRT3847_34387C.1
aagtttgcaaaaattatgaaccttagacaatgtgtttatggtgaatttcaacttcttacttattggaagttgtatgagggtaagcatattcctgtatctaatattagtgcaggggatattctctagttctataccctaattgcacggaggaaattctgtcttagtgcaatgattcagaactgcaattggagtaaatagcagcccaagctatgcaatgcattgggacataaaattacttgatattccaat

SEQ ID NO: 70184 - DNA, 147 bp, Glycine max
  Clone ID: PAT_MRT3847_34388C.1
gcttgactgatgcacctactagctgaattggtgagggaatgctcaccatcggtcggtcagaaggacgttatgggacgcaaattagcgtggtaccataacactggtgtgcacgttatggacgcagttacgacaatcggaaaagatgct

SEQ ID NO: 70185 - DNA, 1189 bp, Glycine max
  Clone ID: PAT_MRT3847_34389C.1
cccacgcgtccgcccacgcgtccgctttttctctctcttccctcttcaatcttcacattttctctatggagaatcatggcaacaagcgagtctgggcccagtcccttctctttttctctctctacactctattcaacccttcacattttctctcttctttatcttaaattacttttccatggaggaaagcaagaaacgagtccgggacgagtccagctactcacccgagtcccaaactcagctggtcgactctcccgagtctgaaagtcagcgggtcgactcacctgagtctaagattcgtcgagttgactcgtccgagtctcaactcgactcggtccttgactcggaggtgcgtctacaagacgacatttttaacatacttgacgacgccgataatgtgcctgagcgtgactcggtgcagggtcttgactcagtgatcaaaagcttcgaagatgagataaacgctcctggttcggattctggttcgggtgacccgacccaggaaccagactctggggagctacaatctaacttggggtatcttctagaagcctctgacgacgaactggggttgccgccgacggttgttgacggtgaggaaacgggtcgggttggtccggaaatgacggagcttgccaggttaatgggttttgaagatgatatacccagttatgatgcattcgggtttgggtcagggtttgcggcggagagtgacggcggcgccggaggttttgtgacggtggatgggttgtttgactattcggacccggcggcggatgttttgtggcggtcggagtcattacaagctatgtaggtgaccgcggcgagattttgcgatggttttggcagaagggtgcgtaggggtggaaaatgtaaatctaggaaaatattggggttaaaataggaggaggaaaaaaaagggtagggtagcatagaaacgtggtaggtagatgtgaaaagttgtagggtttgttgttttggttttttcgttgaattcaattgaaacaaactggactacttgatgagccgtttcagttttgttttgttgcttcattttcttgcatggtagaacttttttttttatatatttaatttatttatcgttcaaaatcttttacatttaaaggagtgcttaatggttcggaaaaaatatcctctttatatataaaataaatactcttttttcatt

SEQ ID NO: 70186 - DNA, 491 bp, Glycine max
  Clone ID: PAT_MRT3847_3438C.1
atctttttttttttttttaaaaggatttattttaccggaacttgtagccgatttccattttgatattttatagaccactgtttgttggtttaaccgaaggaaccccctctgtgctaaatggcttgagggggttgaattatccaatctctcgctaattggacgagggctcttatgcacccttaatgaaaaaggaaaatgatcttgcatgccgtgcctcccggagtactgtttagtacaagcatccccgagggggggtacattttcttctttacggcaggggaaccatgaggtcatagggtcttccaaaatggtgggggcatgggggctcgggctttaaattggcattagggatccggaacctgcgaggatacctattttccatatagggagcatcattggggcctggatacttgatgggcagatctggaatgtgtgtaaacctggggcacggtaacaaccgcacacaagatacgacccggaagtttcgggcc

SEQ ID NO: 70187 - DNA, 967 bp, Glycine max
  Clone ID: PAT_MRT3847_34390C.1
cccacgcgtgatccaaacacttatctttttctctctcttccctcttcaatcttcacattttctctatggagaatcatggcaacaagcgagtctgggaccagtcctctgactccaacactcagcgggtcgactcgcccgagtctaagattcgtcgagttgactcgtccgattcgggtattaactcgtccgagtctcaactcgaatcggtcctcgactcgtcggaggtgcagctacaagacgacatttttaacatgcttgacgacacggacaatgtgcccgagcgtgactcggtgcagggtcttgactcagtgatcaaaagcttcgaggatgagataaatgctccaggttcggattctggttccggtgacccggcccaggaacccgactccggggagctacaatctaacttgggctatcttctagaagcctccgacgacgagctcgggttgccgccgacggtgggtgacggcgaggaaatgggtcgggctgccccggaaatggcggagcttgccaggttcgtgggatttgaagacgacatacccagttatgatgcattcgggtttgggtcggggtttacggcggagaatgacggaggtgccggaggttttgtgacggtggatgggttgtttgactattcggacccgtcggcggatgttttgtggcggtcggagtcattacaagctatgtaggtggtggcggtggttttagtgaaacggtgcgtaggggtggaaaatgtaaatctgggaaaatattggcgttaaaaataggaggaggggtagcacagaaaggtaggaggtagatgtgaaaaagttgtagggttaggatttgtttgttgttttggttttttcgttgaattcaattgaaacaaactcaactccctcatgagccgtttcagttttgttttgttgcttcagttgcatcttgaaccgttctttatttatcctacataatctatttgattaatttt

SEQ ID NO: 70188 - DNA, 245 bp, Glycine max
  unsure (1)..(245): unsure at all n locations
  Clone ID: PAT_MRT3847_34391C.1
taacanacnaacgcagtgagagagacacgcaacaccgaagaaccagnaacaanaccagnganataaacacttgcttgcacgttctcttcccagcgatcgcttctccttttccttcttcttccncttangctcatcntgcaccngcactttctattantcatgtgttgtntntgtcggnncgntgatcnantctggttaagaaccaccgttggtctggcaaancatcaggattgtgtgcggatntt

SEQ ID NO: 70189 - DNA, 3099 bp, Glycine max
  Clone ID: PAT_MRT3847_34392C.1
ctcgagccgattcggctcgagattttatttcacatttttccctttgtatatggtagttgatttctttttccttttttgtgtaggaagaagatcctggttggtattcaagagcatctaactccgttctagaccctgttgttgatgtgcaaatgaatcacaattccaaagttgagccagtaattgagaatgcaaacgcatatccagagataaaaaccatttccactgaaaatggaagtcatgttggaactcaggataaggatgttgtcattgaaggctttggctcagttggagtatatgaccaatgggttgcacctccagtgtctggtcaacgtccaaaagccagatatgagcatggagctgcagtcgtgcaagataaattgtacatatatggtggaaaccacaatggtcggtaccttaatgatctccatgttctagatttgagaagttggacttggtcgaagattgaagctgaaaccagtttggatgaaatgtattttgcttgaaaaacgtaaactttatgaaatgatgatacaggttaaagcaggtgttgggggcatatggctatatggtaaacttggtacagaatcagagtggatctgcgcagaaagaaaaaacttgatatataagacaccagcagcttcctattgcatttgcatcctcaatctcaatccatttattttgtataaagtgaagcgaattggtggatctgaatcagcagcagagggagatggcgatggcgagagcaacttctgatctgcaatacccagatcggttctacgctacggcgtgttatgtctggtttgatggatcctctcagaggaaatccctcaccgccactttcgcctagactagacggatccatcacttcaccctcttccaacatctccaacttcgccgcttttcacatcccaggactctgtcaatggaatagtatagaaccttgcaaagtggccaagaggacagagcttggaaacatgtcctccactgacactatgcgtcttttagtaaaaatattggaggaagaaacacaggcagaggtattcatgacgcatctaactctgttgaagaacctgccatagatgtgcaaatgaataattatgcgtgttccactccacattgtaaatgtgcacttttatcactagtcaaaggctgagccagtaatttataatgcatacggttatccaaatataaaaaccatttccactgaaaatagaagttaatgttggaactcaggataaggatgttgttcctccagtatctggacgaaatccgaaagcccgatatgagcatggagcttcagttgtgcaagataaactgtacatatatggtggaaattacaatggtcgataccttaatgatcttcatgtttcggatttgaggacatggacttggtcaatggtggaagataatgctggagttgggtcgacaatcaatacaatccctggacactatagaagggatttaggctatgggaacaaaagcttttgtcaatcgcagggcatacaaagaatccttctgaaagtatcggagtgaaagatttttgatcttcaacgctacatggtcaactctaaagaattatgggaaagctccggtatcacgtggcgaacaatcagtgaacattgtggggaaaatcttagtaatttttggtgggcaagatgcaaagagaactctcttgaatgatttacatattcttgatttggaaaccatgacatgggatgaaattgatgctgttggggtgccaccttctccaaggtccgatcatactgctgctgtacatgtggaccgatacttacttatctttggtgggggttcgcatgcaacatgctacaatgatttacatgttcttgatttgcaaactatggaatggtctcgccccacgcagctaggagaaataccatcaccacgtgctggacatgctggtgtgacagtaggggagaactggttcattgttggtggtggtgacaataagagtggggtctctgagacggttgtactgaatatgtctacactgacttggtcagtggtaacttctgttcaaggacgagttcctgttgccagtgagggattgagtttggttgtaagctcctatgatggtgaagatgtacttgtatcttttggagggtacaatggacgttacaacaatgaggtctatgttcttaaaccaagccacaaatcaaccttgcaatccaaaataattgaaaattccataccagacagtgtttcagctatcccaaatgtcacaaatgtggagtctgaatttgaagcaggccatgattctaatccaccaaaatccacaggtgatgctacccgagatctggattctgaagcaggccacaaagggattatcaaggaacttgtcatggacagtgttgattcaataaaatcaaaaggtgatgttataacagttctaaaggtcgagaaagaagatttggaatcatcgctctacaaagagaagttgcaaactcttcaactaaagcaagagctttcagaaactgaaactcgtaactctgatctttgcaaggaactccaatcaatacgtggtcagcttgcttctgagcagtcaaggtgtttcaaacttgaggtggaggttgctgaattaagtcagaagctccagacaattgggacactacagaaggaacttgagctcctgcagcggcaaaaagctgcatccgagctggctgccctgaatgcaaagcaaaagcagggttcaggtggtgtatggggttggcttgctggtgctcctccccctacccagaaagaagatgatgggtgatcgcgtgattaaactaactggattactatgctgcatttagtttcattagcccatttttacatccaatacacttattttttttattcaattctttttttggtgaagggaataaaatttagctttctgtttaggaaaaaccccccgtaggggtcttgcaattgcagtaatacatatttcacatattctgtaattttatttacttgttcaggacagtgcatgttgttgttcccgccaatttgctgatttgttttgaatccactattgaatgaaaagataagtattcttctatttggaagaactatatcaaaaaaaaaaaataacacaaa

SEQ ID NO: 70190 - DNA, 810 bp, Glycine max
  unsure (1)..(810): unsure at all n locations
  Clone ID: PAT_MRT3847_34393C.1
ctcgagccgattcgctctcgattcggctcgagattttatttcacatttttccctttgtatatggtagttgatttctttttccttttttgtgtaggaagaagatcctggttggtattcaagagcatctaactccgttctagaccctgttgttgatgtgcaaatgaatcacaattccaaagttgagccagtaattgagaatgcaaacgcatatccagagataaaaaccatttccactgaaaatggaagtcatgttggaactcaggataaggatgttgtcattgaaggctttggctcagttggagtatatgaccaatgggttgcacctccagtgtctggtcaacgtccaaaagccagatatgagcatggagctgcagtcgtgcaagataaattgtacatatatggtggaaaccacaatggtcgttaccttaatgatctccatgttctagatttgagaagttggacttggtcgaagattgaagctgaggttgttgaatctactaactcatcctcaataacattcccttgtgctggacattccttgattccatgggaaaataagctcctatcaattgctggtcatacaaaagatcctaatgaaagtatacaagtgaaagtgtttgatctgccaaacgctacatggacaactctgaagacttatgggaaacccccggtctcacgtggcggacaatcagttacctttgtggggtacagcttagtaatttttgggtggagaatatgcaaagagaaactctattgaatgatttacatattcttgatttggaaaccatgacatgngatgaaaatgatgct

SEQ ID NO: 70191 - DNA, 319 bp, Glycine max
  Clone ID: PAT_MRT3847_34394C.1
gttttgtattttgtttatttttttttggtgatattcttattctgttctgttggttcttttgttttgataattcaaagttcctttggtgtgtcttcctttgatataaagaaaacaacccatcaaaaaggtttattaacataaagaaacccaagggggggttataaaaaaggaccagtgatgggagccaggggggaaacccttaaacaaaactaaaaggcggaaccggccgaaatcttacccccccccctcgacatttgaggagtcacctggggtccctggaaagatgatgaaatttctaagcccccaaatagtttttttt

SEQ ID NO: 70192 - DNA, 128 bp, Glycine max
  Clone ID: PAT_MRT3847_34395C.1
ctcgagccgttaagatatccccagcgtcttgtctattccctgggcatcaaacgcaattcactgatccaccacatgaggacatgagagagcatttgttgattaggatttggaaggtttttccacttagg

SEQ ID NO: 70193 - DNA, 194 bp, Glycine max
  Clone ID: PAT_MRT3847_34396C.1
aaaaagcgttggcgaccacaccaaaactaattgcattgaaaagcatagaagtcgcatagagtggtgggacaggcaaaataaaacattttgaaatcatattggcacacttgagtaacggctgctgaccattgtgacggatgcatgttgtgcttataccttacttgcgacgaagaacaactgccgaactattcaca

SEQ ID NO: 70194 - DNA, 377 bp, Glycine max
  Clone ID: PAT_MRT3847_34397C.1
gtaggccatttgttttgaattttttcgacgattacaatactttctccccccccccaatactccatgggggagcgagaaagtaaaaagaatcaaataatttattaaaataagagagaaaaaaaaacagtctaataaaatgattccgggaatctgttattttaaccaatagtttttctccgagaagtttggcaacaagaccgtttggtcggtcataagaggcgcgcgcgtatttatcattgttgcaacgcgtgctgccgtggcgactgaatttatcgctgaatatatttcacggcgcgaacttcgagctttcagctgaatttaagagcccggtcgacatcgtgcggagtgagctcaagggtcgttgttacgacaaaaat

SEQ ID NO: 70195 - DNA, 241 bp, Glycine max
  unsure (1)..(241): unsure at all n locations
  Clone ID: PAT_MRT3847_34398C.1
ttgctttcagataacttgatagttntgtgnnanttatttganttcangaatgtctcaaccccgactccgttggtggcngagattnaggtngaaaacntctggtggatcacttttacgacnccttngaggggtaagaacccancatcgtntnnaggagtngccccncatcaatatccataagggnggaantcnatnangntgattggganaaatcgggcaattcaggggcttannttcnctg

SEQ ID NO: 70196 - DNA, 402 bp, Glycine max
  Clone ID: PAT_MRT3847_34399C.1
ctatgacatcgcgcatgcacgcgtacgtaggcattgcactcgagccaagacatctgcatagattgcacaatacagaatcaacttggttgggatgatacgcattgtgcatcacatggaatattgcatctggtcaattcaactaggattcagggagaaggcgtgaatatatggatgcttgctattatctacgttatagcaagaaattcctggagcatatgtctcgaggcatcgcccattatatcagacttttaggactgacagtagctccaatcttggatggatgatcctgttctacctgctttacctacgattctgtatcttaactgcaagagctactctcatatctttcaaaggaaaatccttgacaggcatgctgctagtcatacatgtggtgggtgacca

SEQ ID NO: 70197 - DNA, 264 bp, Glycine max
  unsure (1)..(264): unsure at all n locations
  Clone ID: PAT_MRT3847_3439C.1
attctgctacatcagaatcaataaaacaaattccttgataatatcaaatttctgggatgtttctttttttttttattcanaacaatggcattangtgattcangtagcctacctcactcaanggtataagactttacatngttgttcctttattttnatttttttcatctatcttttttctaaagactaacaangttttangtaagtngcngacaacctaacttaaacctccttgtaacctgggcttgggagttgggactggtt

SEQ ID NO: 70198 - DNA, 325 bp, Glycine max
  Clone ID: PAT_MRT3847_343C.1
ctcgagccgaatcggctcgagcggctcgaggggaaattcatactgggggaattctcatagatgcacgggtgggcatctaatccaaacctttcttcaagtacaatctcagactcattgcatgaatagtgagaggcatccatattaaaataagaatcattcatttattcactaacaacactggaaaatattttagcacgaaagacctcaagatctccagatcgttatttcatatcattcataatattaaaatgaacacttatattaccaaactccatagacagtgtgtctgcaaatacatttatcctagttgtagcagttttcaata

SEQ ID NO: 70199 - DNA, 410 bp, Glycine max
  Clone ID: PAT_MRT3847_34400C.1
acaacggagggttccggcgttctgtattcaatgtctctattgcgtgcttccatacgccgattagcatatgcaaatgtggactacgatcatattgttggctggagaacatcatccattatacgagagactgaacctgcgaaatcctaagatgccaacaacgagacatacccacatgtcggatatgaagagcattgcaagcttgcgctgatgctgagcagtgggactcatcagaatgtaacagctacctcaagatagatgaggacctagacacacgcttatctcgaatatcttgggaaaaaggagatactaccttccatattagacagcatatatttcattctcattctatcattcacgtcatagtccaaatcacacagatattaggggcggatgtcatacaccatatgatt

SEQ ID NO: 70200 - DNA, 200 bp, Glycine max
  Clone ID: PAT_MRT3847_34401C.1
acaagacgacagaatggccaagttatctatgggatatacttcccacacattttcctctccggcgacgatcagtcctcctacatcagctgggaagtcattgcctggaatttgccgtgaccgggactttctatggctcttacatcctcaacccccgttcagtcaccaacgcccatgtccctaatcaccttgatgctattttc

SEQ ID NO: 70201 - DNA, 359 bp, Glycine max
  Clone ID: PAT_MRT3847_34402C.1
gagacacgtacgcaactgaaacggaaaaccctattacatgaatagaactcctatcttgttcgctctcttctttcatctttgtgccttcagctcatatcgaccatcatgccaacgctgatgatgatcatgtgtacgacagtgacggcgatcagcttcaatacggtgtcaattactgcgtgttgccagtgataacaagagctggcagtggaatagcagtaacataaggacgaaacgaggattgacctctgactgtggtgcaatctggcagcgagctctctgatgggttatcgatacagatgtgcatctcgatcagcatgagtcgctttcatcattcattgccagcatttcagtaacattca

SEQ ID NO: 70202 - DNA, 825 bp, Glycine max
  unsure (1)..(825): unsure at all n locations
  Clone ID: PAT_MRT3847_34403C.1
cttgcatagcctgcaggtttcttaaataacaaaccaaactttcatgtacgcaatgctcttctgtggtcataacagaaatactaatggatgaattcttgtccccacatgttggccttccttctcaagagctggtgcaactctgaaagcaacatcattttctgtttcttccgtttgacgtcataacacaggaattggtggagttgaaacaaaggagtaaagtacctggaaagatgcacgcatgcatgtgataatcttatgtcaccatgcttctttgtgctgcaaagattctcaaagactcttataattcatcctcacttctttagttagcttttgagattgaatagttaagttcaatccaaattctaagaaaaatcatgtaagaaaatattggtttttaattctgcttcgtttctatacgatgttctgctttatgtttttgcagatactgctcttctaatcttagtttaaaatgtgcgatcattactcattgctgtcaatttggctctcttaataattaaatatatatatatatatgtatatataatttttattttatgattccaatcatgttagaatcaataatttttttcaagcaataaaataagaatgttttatttaaagaatttgattaggatacacattatatttctaactaacgagcatgtggatcaagacacaaaagcttttggtaccttaatcaaggtgagttctacaccttctacgtgagtgagttagtgagtttggctatttattttaaaactaatttgtatccatatctgcatgattnttgctcgagtgtcacattttcgacatccataagtcact

SEQ ID NO: 70203 - DNA, 332 bp, Glycine max
  Clone ID: PAT_MRT3847_34404C.1
ctcaggttgtcggggacaaaaagctggtgttttactttttttctgagattattaaacaggtccactgatgttaaaacccttataattggcgattacggctgacaccaaaaatttagagtattatttttaggaagaagaaaaaaatttctgaacaaagtgaagcattacccatgggccttatatataacagacaagaactaggttttccttttcacacttattttttgaagaactttacacccttgtggatgcttcctgctaacgtggtttttgacttttacaagccaaccctttcatactcagtcaggggaccccgtttataaacctatttt

SEQ ID NO: 70204 - DNA, 236 bp, Glycine max
  Clone ID: PAT_MRT3847_34405C.1
agatcgtagctcgctgtccaagcccatatgataatcatttaattaaagattttctggtggatttagtggtttatcataataccccccggacccggccgaatatgattatctaataatgccgagatgatgaagtaatgaaaaccttgagtataccatactaccaaacaaattcacttgtcattcctggatggatacctctctgggacctgcctgaaaagttttacccgccacttaaa

SEQ ID NO: 70205 - DNA, 686 bp, Glycine max
  Clone ID: PAT_MRT3847_34406C.1
ctttatgggcccgcaaggacccacgttttttcgagttcatttttttaaaaaagacaacacatggttgtggaattatgtaagacaacacatggatcacggctggttgtgattacaaaggaatcagtatgctcaataacgaaaagaaagttcctgggtgacgctccttaattggaaatttctatgggttacattttaagagatacatcaaacttcaagttattaagtgttaacaaattacgaaaccctcgagccgaatcggctcgaggtgtagtactacagttactcattttctaggctcatcctctactggcggcactttgtttgcgcagtcagaagaggtgtgccctaaaacctgaccggtgtttgggagagtgccgtccctagcagaagctcagtcaggagtgccactgtggaggaaagaatgcgaagatagttcctcaacatagtcaacagtcgcgcctttcacaaaatcatatgaaatattgtcaacaaccaacttaattccatccctctcaaaaacctcgaacgcagtttttagtcatgtgaaggggctccaagtcaggatcagaatcagaagaagaagtggcaatggtgaacaacagaagaagaagagaatgaagaagcctcaatcgcgccgcgccgtcgccaatggcggcgccaggcgtcgaattagcgacctctctctc

SEQ ID NO: 70206 - DNA, 223 bp, Glycine max
  Clone ID: PAT_MRT3847_34407C.1
gggcaaaccaagactaatatcattggtttttaataaaggataaaacaaacttagcttgttgtttgatggggccccaccgccttgcagggcctattttttttgcccaccccataaaaactaaaaggtatttcttaggacaagcaaacaattccaagtgtgatgcctgcagggaacaatttgggaaaccttcctgatcctttctgaatagttgggggagaatttg

SEQ ID NO: 70207 - DNA, 146 bp, Glycine max
  unsure (1)..(146): unsure at all n locations
  Clone ID: PAT_MRT3847_34408C.1
aggacanaatctggggatcggccaaacgctttccgaactcattgatgagaaacccccgatcacacacgagaatctctagcaataagggaaaagcattcctgtgagccacctgttgagcctctcatctgacacgcacttcaagatac

SEQ ID NO: 70208 - DNA, 370 bp, Glycine max
  unsure (1)..(370): unsure at all n locations
  Clone ID: PAT_MRT3847_34409C.1
gaaatttagacgtttctctaactccgatattatcactctccccacttgcacacacacatctctnaantaantgccagccctcattggttcagaagagtgtgcaagctggcacctttgcatgtgaattctatatcagcaggagaggaggaatgaaagattcggataaattaacgtgggatcagggtcgatgtctgagtcccgcacaggcacgttcctcggcctcacagaagcttatggtgtcgctcatgttcttggtttccctcacctacatggcttacactctaaagctggtttccacgtccacatcatcatacgagtgcagccacgctcctttcatcatcaancacctcttcccttcctcaaacgtaac

SEQ ID NO: 70209 - DNA, 708 bp, Glycine max
  unsure (1)..(708): unsure at all n locations
  Clone ID: PAT_MRT3847_3440C.1
gaagaatggtaaacgtctgtnnttccctaattcaaattttgtcataagtatcncaaccaaaggtacaattattacagcaattgaagaggaagaaacgacaatggatgaacaacattgtaattcttgatggttatcatgatgcgaaagtaagtaatgccagtgtatatacaacaggaaattcaaattttatgatgcgactattgaaaaacaactactgtaagaactaaatgcagaagcgtgcacacaaaacattgaacagtaccatgaatattatccatgagtttgatctaacttccatgaaaagagataaaaatgacctcgtgctcgtggagtattgcgcgaatggaataatcagctagctaccctttgtacttcaccaacaattataccagataaataacaagtacaccgctgtacaaatcactcaagttaatagtatatacgatcagaaacatctccaaataatatatcttcccaagatttcaattttcatgttcaggcaaagtctcttgcaaacttattgccnnngttagctttatttgcaattcggagtaatcanngccagtcatattcaaatgatttggatcctctgatcgtatannnngtatgaatcttccatctcttctgattgaagtagnnctaaccacattaatgccttctttanncagnatgnccnacactcttgacatgnnnaacacacnnnnnncg

SEQ ID NO: 70210 - DNA, 267 bp, Glycine max
  Clone ID: PAT_MRT3847_34410C.1
agcctggccgtccgtgcaggcacctccgatgccggcaccgtcacattcatcgtcttttccgccgtttcagttgaggccaccgccaccaccgcagcaggatatgtctggcgcaggcggcaccaagtggcccggtggcaatcaaatctacaacccttttgcaccaacagctgtggcggcagctcatagagcggaggctgaccctgagtacgaggatctcatggcattagtttgcatgaaatagcgaagactggtggctgggccctgatc

SEQ ID NO: 70211 - DNA, 280 bp, Glycine max
  Clone ID: PAT_MRT3847_34411C.1
cacgcgctcatcttcccttgcccattgcagggccacgtagggtccatgctgaagctctctgagaatcctaccctacgctccattattcattttcgaaccagcaacgcgtgttgcttctggccttatttctggattccaaagctctttgagtgcaaagaacttcccattcgatgagatgaggacatgtaccgaatcatatgcaatatgcctggcatgggaaacttgcttcgatgtagagatctcccaagtttctgcagaccaggtacagaggggaacttgt

SEQ ID NO: 70212 - DNA, 458 bp, Glycine max
  Clone ID: PAT_MRT3847_34412C.1
ctctaggtactgttgggacggctgctgcgcccgcacctgccgtcccggattgcccgacgcgacccattccctcgctggcgcttgggctgcagctcaagtggagcatcggttctgatcggtactaatacactaccaatgctgaacaggcgaggcgtcttctcagtggcgcgcctctgaaagcatgatggcccgtccgtcaggtgacattctccacctccatcctgccacacgcacccatcatgaatctaaggttatagctaatgtgttcccctcccagtggccatgatgtgcaccgactttatcgcgcaagggttgaagagagggattcctgggccggtgctggcttgacatcttgccacacatggagctccatggtactatatctgggtcgcataaagaccctgggtgactcgtggcccatttaggagggagaactgacgatgctactgacatctgtc

SEQ ID NO: 70213 - DNA, 130 bp, Glycine max
  Clone ID: PAT_MRT3847_34413C.1
gtaattctctaatttctttgtatctatacgcatcgttgatatcaaccatgtttgctcaacactcgatttcacatagattaaccaaaaatagaggaaaaaagttttagaacagttgatggaaggctgatag

SEQ ID NO: 70214 - DNA, 260 bp, Glycine max
  Clone ID: PAT_MRT3847_34414C.1
cttcgatgctaagtagttttgatagccagcgccacctgtgagcatgaactgcgtgacctctgtctgaagactgtgctactcgagtaccaccaagctgataccgacgaccactgctaggtgatccggatggccgttctcgtcgccatttgcaatggttaccggacatacagacataccgctgttggatgtcacgcctatgacacattgacgatagggggcctgagagaagaaaattttattagatttatctaagacgacct

SEQ ID NO: 70215 - DNA, 135 bp, Glycine max
  Clone ID: PAT_MRT3847_34415C.1
aaaaaccaatgcatgctccgtactcaaatcatacctctcccgctacatggatggaccctctgggcactgttggacgacatcctacaatcatgatgtcactaaaatctgaaacattcaagatcatgtgaacgcact

SEQ ID NO: 70216 - DNA, 579 bp, Glycine max
  Clone ID: PAT_MRT3847_34416C.1
aaacccaaaaaccacaaggctcactaggggaaaaaaaagccttccccgcaaccaaaaattacaggggggcaaaaaacaaaaaaaggaacaggggaaagggggggacaaaccccaacttgggggggggggaagtaatttttatcagcaaaatacgggaagccaaaaagggaaatatagggggacaaatgggcactaaaaaaatttttttcaaaaaaggaagcccaatcatcaacttcagcttaaatctctctaaaaaaggcgcccttggaaccccaaaaggggccggggaaattttggacaggcccattttcaacaacccaaattggactccttttttcatcctcacaaacccgggaaatcaatctggaatcaggactaaaaaaaacaccccccccggggaattcatccaggggatgggccaagggaaaaatactttgcagggccaaaagaggggggggttcatcaaacaaaaaaagggggggatttgacatggaaataaaggggaaaaccacccgagctttctgccctcctgaaagttgggcaataggagaaaaaggggtatgacttgggaccccaaac

SEQ ID NO: 70217 - DNA, 1177 bp, Glycine max
  unsure (1)..(1177): unsure at all n locations
  Clone ID: PAT_MRT3847_34417C.1
gtacgcctgcaggtatctcggtccggnnaattcccgggtacgacccacgcgtccggggattcgaaagacagcatggatcggggagagggtaaatttgtctattgatcgagaaagcttgggcggacccccaaccattagcacattctaagattcagatgactaattggctggagttgcagagggagaaaggtgaatccgctcatgatgcgtggaaagtaggggaagagtctgattcaaaaccgtctgcgatagatcacgtcgaactgaagcacttaagaaagaagctgagaacttttggttgatttgatgctcattctgacacggttcatataaagtcacagcacagacataacctggttgctgctactagtcaggctcatcaaatgcaaacatggctcttgttggccttggcccggccgtcaactgcttcaactgcagatgcggctgacctagatctagatgtcccatcaatagcgaaggaagtggctgaactcgttctttgggacttggactctgactttccgtactcgtccctgaacccatagggaatccgtccctttcagcccctgaacctaatgaatctgtttggtacgctgaggcttctccttcccctgaggccgtaaacagacactgaagacaagaaaggttgggacaaagacctctctttcaaatctcgtaggaagtagaaagaaaggaagtcgcttgtgcttggcgtgctctaagctccgaagctgatgttcgattgaattaacctcaacaactcgtgaaatttaactaatggccgaagtccttcttcgcgcacagccagaccttctgctcgattgtttgttgcctcagttgggaagaaggctggaatctctctctccctagccctaggatagaatgtgatctctttctctccactccccctccccgactggaattgaagtaagggaaggaagatgtgtttattttatcctaaagagttaggaaatgtgttgtatactgaaagccagggtatcttaccctaaaaggcagagttggaatactttctgggttcaaatccaatagtagctagaaccagtgaaagggtagttcaccagacccgctcacgataatgcgaatgaaacggcagataagcctattactggttacggcgagaagatcctaacaaacggccggtttacatttacaacag

SEQ ID NO: 70218 - DNA, 257 bp, Glycine max
  Clone ID: PAT_MRT3847_34418C.1
cttccaggctagttgccttccaaacgcaggtagccgacctgcaggagggcctacaaacggtgccagcaagagctgggcaacagctggcttgtgaaatgagacaccttgaccaatatgctttgggtggacggtctcctacatgttcagtggaggccaccaggagcatccatgagcggggaagggtccacacccttacatggcaagttgatacgatggggtgcttggtggatgggccatggaggtccgtgagctggaac

SEQ ID NO: 70219 - DNA, 508 bp, Glycine max
  unsure (1)..(508): unsure at all n locations
  Clone ID: PAT_MRT3847_34419C.1
tgatcttgtgccctatcccaagagaattagcatagatgctgggaaagaagaaacaacagttgaggcaatcttggaagagctggcacgggaaatccattcatctgttggtgttagaatgcatagattaggggttgttgtgtgggaagtcaagctctggatggcaacttgtggacaggcaaatggtgctgggagggtcattgcagacagtgtgactggtcatacatgcaccgtacatatataccgagaaaaggangatactgtcactcatgaagtggtatacgtatcagtctcgagtaagggtgcactgcatggtgtgccagtgaatgagaggcatcaacctttgggagttattgagcgatggcgtgtttctgtaagattgagcagtacgcacatactgctacgagtagtttcttgcatttgatacggcgctatgtacacgtcctgggcagtcgggcggccgggatttcagggggctagtgatcgtactgttgttgtggctgaagagcta

SEQ ID NO: 70220 - DNA, 121 bp, Glycine max
  Clone ID: PAT_MRT3847_3441C.1
acgcgtgagaagactacaaaatgacgacagaaggagtcacatgattcagtagcgccgtgattacacactaactccacctttttataaactatactcaacaacaatattgccaaacctaaaa

SEQ ID NO: 70221 - DNA, 746 bp, Glycine max
  Clone ID: PAT_MRT3847_34420C.1
ctttgtcaataataataaataaaaatgaatcaagtgtaactgtttcaaaaacaaaattttgaaactctgcaagaggcctaattgttacttcacctagtgccattctaaatgccaaaaggcacctattcataatttataagaaatctttttattattattattattttctctatgctctagtggcatcatcatcatcatcgtcatattactcttctccagccttctgcttcaacatagctatgaatttctccctctcctctgaagacattccctgtgttgaacaatctccaactccccattctgccccacgtatgcagtatttgttctcaatttctttacggttcctgaagtgtaacaaatacaagtgttattgtatcttgctaacaatagatgcagaaaaatcatataaaaaaatagtcattattatcatcaagattttaaaattgtagccacagtcacggttttgctgcaatccttaacattgtaaaaaaatgcggacaaatgcaactcatatgccctcaaatgtagtcacaatgtggtcatatagaatcatagatagaaccagtcaaaattgcagtcgcggaccatttttttaaaaccttgattatcattaaccatctataatccatggcagtatcctatggttttgactatgcaaataaaaacataattaaaaaaaaaaatacttctctttattcaacttggatttctcaagcagttccttcatcaagggggatgatttaatt

SEQ ID NO: 70222 - DNA, 539 bp, Glycine max
  Clone ID: PAT_MRT3847_34421C.1
ggggtggtgtttttttttttttttttttttttttttttgttttgttttttttttttttttttttttttgttttttttcaaccccgcccgggagggggggggaaccgccgggcgaaaaaaggaaaggaaaaaactgccgcccccgcccagggggcacaaaaggaagaagggccgggcccaggggggggggcaggccaagggggggggccccccagaaaacaaaaaaaacagatggggcacgaagcagaaaagccccccacacggaggggggggaaaaaagccgccccccaatacggaggaggccacaaaaaggggcccaaagaattgcccaagaacgaaagcccgggggcggttgggggaaaccccgagaggatacgggcgccggcttgagataccgcccccgcccaaaggagcggggggcataaccaccaagcccagggggacgggaagcaaaaaaaaggggaaccccgaggagacgagaacgaaaccttcccccgccccccccggggggggcagagaagaaaggggcaggccccctcc

SEQ ID NO: 70223 - DNA, 543 bp, Glycine max
  unsure (1)..(543): unsure at all n locations
  Clone ID: PAT_MRT3847_34422C.1
ttcaaggggggttccaccgcctcagtagccctcatctctacaccaacacctgcccctttttggcacccggcagcccagagcacattactatgtgcccatgtcggagatagtcgcattcttctttgcgatactgctaccggtttagctcagcccttgacatccgaccaccaccccagtagcccgactgagagtcgccggttacgacgatatgcacctgccgggtcaatggtttccggcgatagcttcggcgaggaacgcattgctggtctggccaacagccgtgcattcggagatatgaagagcaagcgcattggtgtctcagctgaaccagagcttacacgggtcgagatgggtcctgcccaatactcattccttgttctaatgacggacggtatctctggaaccctgagcgatcagganatcgtggatgttgtcaaagaggcccgtacacctgaagatggagctcgcaacatcgtcaaatatgcaactgaggtttcttctgacggtgataacgcaacgtgccaagtggtacgtctgggtggc

SEQ ID NO: 70224 - DNA, 389 bp, Glycine max
  Clone ID: PAT_MRT3847_34423C.1
tggacgcgtggggttgaccattccaaacccagaaggaaacgctgcctagaggacacactttcggtactctgcgcctttcagagtctgtcgtgtctatcgggtcatgcatcgtacgctgatggccgccatagttccgcgatgggtaaggatatccaccttaggctactcactcctaaaaccgtcttcttattctataaccaatttcatctacaacaaccctaaacccccaatctttaaaccctcccagttccttccacccatcatgtttgtctcatccaacaacaaagactcctgctacactttagattgcgacgaaacccaaccgcccagcccaggcccaagaccgagcccatacccgagccatgacccatacttctagcaccaggaga

SEQ ID NO: 70225 - DNA, 128 bp, Glycine max
  Clone ID: PAT_MRT3847_34424C.1
ttcggctgcgagttgacgacagatgggttgcacccaactagcctctaaagaatcagataaagaattttcaaaattttccgttgctaaagagttcattgtctcagaacatgacctggtaccctcatata

SEQ ID NO: 70226 - DNA, 488 bp, Glycine max
  Clone ID: PAT_MRT3847_34425C.1
atcccttgccatgttgaggaattcagaaacgttcgtggcttgattgatagggacaagtcccttcatcaccaccaccaccaccaccaccatgttgggtgctttggcttctgaattctagtaaaaaagtccaaggttttagaaacgacaacatcgaggttttcagagtcttgttcacaatttcctatgatattaagaatcccgatgaaaccgcaatcgaaatttaaaacttggatgaaaaccatgaaagaaagaattgatcttgggctagaaatcaccacccctttagttttttttgaaggattttctcatgtaaattcctagctcgagccgtttttttagtgtttggtttatgtgaaaaggaaaaaagccttcttaggtaggtgatggcgaggacagctgaacagaatgttgcttcttccaattgtatttacttttccattacgattcctaataatatagaaaaaagagatgctattcttttcttttaa

SEQ ID NO: 70227 - DNA, 261 bp, Glycine max
  Clone ID: PAT_MRT3847_34426C.1
ccttttctacccctgactgaaagggggtatatcaaaacagaagcgcgactactaaaagaagaaatgaagaaaacgaatcattggttcattgttcgctgaaacgatacgatcacagggaatgcgaagcctaataagcacacggtcaacgatatcgtggcgagggtggactcagtgactacgaaccggggcagagggaaggcgggtgttaaggaccgaaccgggtggagaagggcgggcacgctaaatacgagtgccctcact

SEQ ID NO: 70228 - DNA, 427 bp, Glycine max
  Clone ID: PAT_MRT3847_34427C.1
ggtgtgcttctcgtgccttctttcactttataacgcactctcaccccttccctcatgtgatttcttcttccccttctgcacttcttcatctccttcttcactcacacatcaaaataaccaaattctcaaaaattaccctcaaaatatcaaccacagcactaaatctttgatgatgccccctcagcaagaaacctctattacatcaaacattccggccatccccaaccggccggaaaacagctacgtccatgccgaaccaccgagctccgccaccaacgacattaaacccactttcacgagcaatgacattcacagcaataattcttctcagcaccaccaagcagctccttcagcacccagattttctgttcttcagcaatccttgcgccctgttaccctcaaatttgaggatgtttcctacagcata

SEQ ID NO: 70229 - DNA, 320 bp, Glycine max
  Clone ID: PAT_MRT3847_34428C.1
aaccttggaggaggcccggcttttcttttttttaagttcataaaaaaatggggggccagggtcgtatacgggggtaaaggaaaaactcgtagtacaaggtgaaatacattgggggagctactgccctcagtatattaactcacctattgggaacgggaaatgatcatcccccgggataaaaaacagggggcttttggtcaaaagccgaagaacaatttattttttagccccttccatatatttctcaatacttggtacaggttccactgggggggaatcatcacttgctggcatatccaatttgggggcatgccttggga

SEQ ID NO: 70230 - DNA, 218 bp, Glycine max
  unsure (1)..(218): unsure at all n locations
  Clone ID: PAT_MRT3847_34429C.1
cagactataacctcacgggtgaaaatgcccacgacgagccgtgtattgtttgagtaaactnnggnngagcanggagtctgtttttctgaacatacattacgtggccccaggtttcagaccaacttggccaacccttaaaanaactanncgtttcctgcgtcgtgaaccaataacagcttgtcagggaaagatcgcctgttcagtttgaccacctgttg

SEQ ID NO: 70231 - DNA, 276 bp, Glycine max
  Clone ID: PAT_MRT3847_3442C.1
gtttccagtaaataatgttgatgagaaaaaaaatgcaaattggaacctacacaatattcatcactaaatgtttcattctttatcatgattttttcaggaaatgatcgttgctcaaagaaaagcaaaaacataagttgtgagaacctttgttgaagaatttctttcagaagctcattaaaatcagcttcacatgttcaacccataatcaacaaaaattaactattttgtaatattcaaactgaatgaaaaacattatcaatcaaatttaattaaata

SEQ ID NO: 70232 - DNA, 148 bp, Glycine max
  Clone ID: PAT_MRT3847_34430C.1
taggtcgagccgtgcgagcctttgatgtcacagacagtgcttagggtgctggctctcgatcatcaatagctgctgcgcgggattcccatactgctgggctgctaggacgaaataatgcccgggacagtcttgtaagcactagaggctg

SEQ ID NO: 70233 - DNA, 482 bp, Glycine max
  Clone ID: PAT_MRT3847_34431C.1
ggtttcagagttgagacatttgggtctcattcatcagaattcagaaaagagatcgatggttaattgtttgcagttgatgatgaagaaaggctcacaagaaattgatgcaacaaaacattgaatatcaatccaagagaggtttcacaccagattgagagaggctgacagaagagagtgagcacatgctagtggtatttgtatgagggcatacaattgcgggtgcgtgctcacttctctatctgtcagcttcccattcttttttacttttggtgtgttcctctcatctcttcgtaacttcacaactcttgaagcgcctcctcagtgtaactctcttttaacttcattccattctctgtgttttaagttttcacactcactttaaataagtcccctttatggtacaaacttgtctcattctccgagcaagtcaatggatctatgtaattatagcccttgaaacgactcgtattgcatgatccttc

SEQ ID NO: 70234 - DNA, 590 bp, Glycine max
  unsure (1)..(590): unsure at all n locations
  Clone ID: PAT_MRT3847_34432C.1
aataaaanaaaatngggcnttnaatngngggntctctcaggacaagggggcacgtnatgagtaattccaaagnactagacccaaagnaattaagagtggggaggaacaggaacaggaacaggaacagcancagcagcagcagcctgggagccggngaacctancgagcatgacaaagggcatcccttcancaacgnnngnngangaaaataaaaaccaaaacagagaacttgaagagcaaaggaggaagccatttgnccaaaagaaactccacacccnncaaagnctggnacctcacatttgctgctcacacccaatgtgcccccgcccaagnggaaggccgnccaaaaacccatagggggggagactttgnncgggcctcctggaaaccncngggnccccaccccttccttccttcccnncccccnanccaacccccatccccnanatccnncngnnnccctcaccaanccccccnccccccccaacccccccaccaaccccccccaacacacccccncccctcnnnnnccaaaccannannccccccccaaaccccccccccacccccnccccccnnnanggcccccc

SEQ ID NO: 70235 - DNA, 206 bp, Glycine max
  Clone ID: PAT_MRT3847_34433C.1
taaacttgaattatgtatatcactttcccattaagacattagcaatggggaaaataattataagatggtatgaaatttattttccccattgctaatgtcttaatgggaaagtgataaacttgaattatgtatatcttgtaaaaatgtaatttatgcacagaaaaaaaaaaataaaaaaaaggggggccgaccgctaggggacctcg

SEQ ID NO: 70236 - DNA, 342 bp, Glycine max
  Clone ID: PAT_MRT3847_34434C.1
cgcgtcgttaatggcgccattgccttggtgtttgtcgtcgttgcattggaggtcagggtcgtcttccattcctttgctaggtacattcaggtccctccgcccctcaattttgttcttgtcactatcaccatgcttggaggggcttctgccaccgccgcttatgccatgggtatggtttctgatgccctcagctctgttgctttcactacttccgctattgtggtcagtgctgctggagcactagttgtgggctttcccttactttctgccaaaagatgtctaatgctggtaatggcaactggtctactttttaatttaatgcaagcaactcctcctgtgtca

SEQ ID NO: 70237 - DNA, 333 bp, Glycine max
  Clone ID: PAT_MRT3847_34435C.1
tataaatgaaattggtggttcagggaagttagagaagaatgagtttgttcaggatgctgatagcaagttagagaaagttgaactagttgaagaagcaagaaaatgtgtcacaaaaaagctagaaaaaaccagctccaaatttttcagaaagaaagcataatcttggagctaatgactggtaaattataaaatgtattaagacttgtatggagtatattatggtagtagacaatattttctgttgtggattaatggaagtaaagtgtaagatatgtatttgatttgatatctatcagtatgttagttataatacataaaaaacaatgttttgtc

SEQ ID NO: 70238 - DNA, 988 bp, Glycine max
  Clone ID: PAT_MRT3847_34436C.1
ctgctatcttgtgcagtgaagagtttgttgtgaaacacaatttgcaatcacaagctgttgaaattcttgctctgacaatggccacagacactgaaacttctttcaaggacagctgtatcaagatggttggttttgacatgagcaaattggctgcagataaagcttacaagattgctggagtcaccgctaacgatgttcaagttattgaacttcacgattgtttcagtgcaaacgaactcgttacatacgaagctcttggactgtgccctgaaggaaaggcaggacaactcgttgataccggtgctgttacctatggaggaaaatgggtagtcaaccctagcggtggtctcatctccaaaggccatcctcttggagctactggtctcgctcaatgcgctgaactttgctggcaagtcagaggaatggcaggcccaagacaagtgaagggtgctaagattgcacttcaacacaatattggtttgggaggtgcagctgtcgttggtttgtaccgtcttggtttccccgagaaattcgtgccttacccaagcgacaagccaaatccagccgtagaagatttggcaactaagggacaagtgtctaacgaaaatgcctctggaccattcaagagcgaagctgtctttgctgaaataccaagaagattgctgagaatgcttcgttggtgaaatcaatagatgctgtctatcaatttgatatcacccatggccctggaggaaaagctcaatcatggactgtggatttgaagaatggaaatggcagcgtgaaagttggaaagaccgaagcagccgaccttgttctcaccattgcggacgaagactttgtaggaatgatgacaggacaattgaactcccaccaactttacatgaagggaaagttgaagatcaaaggcaaaatggctttggcgtccaagcttcagttgttgtcaagtgcaaaggccaagttgtaattttctcaacaaaggttttagttt

SEQ ID NO: 70239 - DNA, 482 bp, Glycine max
  Clone ID: PAT_MRT3847_34437C.1
cgactaacagcgaaaagcgataccaacttctatactggtatgctcttcttcttcttctgcctagaaacaaactgagagagtagttcactttctgtattgggttctgccactttcatggtttcatcttatcaaagccacacaccttaggcaaaaatggagagtatcttactcttcttctcatcattcaagttcgcactctcgctctcactcatactccactcacctttttcctctgctcagatcatgcaaggttttgtaagtttggactgtggaggtacagaaaaatttgctgatgaaattggtcttcattggactcctgatgataaacttacttatggacaaataagcactatatcagttgtaaatgagacaaggaagcaatatacaacacttcgacactttcccgctgattccaggaaatactgttatactcttgaagttgttagcaagacgagatacctattgagggccagcttcttata

SEQ ID NO: 70240 - DNA, 464 bp, Glycine max
  Clone ID: PAT_MRT3847_34438C.1
ctctcatgaccctctctacgctctcgacatcttattacctatgctctctcgttcttctactcacgaactccactgtctctaggatcgcggtgattctcgttaccacagtatctgactgatatcatgcatccattatgataccaagttgctgtttacagatctgcctccttctatacaacggactgcggtatctggtattttagcggaatcgaaactgcaacacattctcattgacctctacttttacataattgcgttttcaactgaatcacttctaccactgtttcgagactttgaatgaaagatactttatatgaacaacgttcccgattggatggaaccttgacatataggcgcaaagattcatggacccaacactgaatccatgtactgtgacagaaacctgacatataagatcttctaccaattgaggcaagcatggccagacaaagctgtcattcaga

SEQ ID NO: 70241 - DNA, 373 bp, Glycine max
  Clone ID: PAT_MRT3847_34439C.1
aataagaggaggagaaatgagagggaacaaaaggcggaaaccgaaaaaggagcataagtaccaagccaaaaaacgagagaacccaaggagagaggcaccaaaaaacaacaaaaagagggacgtttaacaacggcgtgacaggaaaaaccctggggaaacccaactgaaaaaccctggaaaagacccaacttaaaccacctggggaaaaaaaaaagagggccaaaaaaaacgctcttcccaagagctgcaaaacccgtttggccaaagggacgcgcaatggaaacgcccaataagacccacctttaagggggtttcgcgcagcgggaccactaaaatagccagctacataagaccacaaaataacgcgggtttt

SEQ ID NO: 70242 - DNA, 293 bp, Glycine max
  Clone ID: PAT_MRT3847_3443C.1
tttgctttcaaatacaaacctaagaggatactactctcagattggatcaccatccatggcacaactgtccaatggaacttcaagtaccactttgatctcaaagagtggcactacttcaatcccacatcgagcaacgtttgcccaacccatttgatcttaccgatgatcagatccttgacattgtttatctggctcacctcaatgatgatgaaacttgcgacaccgataaactttacaaccttgtctccaacattgtcctgcggagtcaatccccgatttccgcagccagtttc

SEQ ID NO: 70243 - DNA, 139 bp, Glycine max
  Clone ID: PAT_MRT3847_34440C.1
ggtcgattactcaaaatgtgctggttgagtagactggtgattcggttgtggaatcttctgctgatatagctaaagtagtggctgctgtacctgaggtacaaaccattgataataataatgctttattggagaaatctac

SEQ ID NO: 70244 - DNA, 450 bp, Glycine max
  Clone ID: PAT_MRT3847_34441C.1
gttttgttttgggccagcatcttgggtaccacagaagcgggtcacctgagtactgaaatgagattttcaactggggacaggcataaagtgagccaaacagactaatcacttaggtttttttattgtgaaggagatatgaaagagaaagagacaccccttgaagagataaaatacaaagttgacaagtgggtcatatatgagaaagagactggaccctctcttgtgcccacttacgacatatatgagatattactgtgacatgacagccttgaactttctcccctctatgaccttctcaatatagacttgcctttatccgtaaagcacacatagagctttagggtatgatgatcactggtctaaaaagaaaagctttgcatgtcgagccacataataggagaacttgggtcgtgtgagtcatgaccttcaagtcaccacataccttatgga

SEQ ID NO: 70245 - DNA, 495 bp, Glycine max
  Clone ID: PAT_MRT3847_34442C.1
ccacgcgtccgcaagtgtatcctagagagttcattgagatagaaatttgttttacaaaatgaagggagtgtttgtaacaattttttctctactagttgtatttgttctcacagttacagcttcagaaccagagccaccagttacaccttcaggaccaccaaaggcagggccaccaaaggcagggccgccaagggcactgattacaacttcgggcccaccaaaggcagggccaccaaaggcaccagttacagcttcagaaccagagccaccagttacaccttcagggccaccaagagcaccaatttcaacttcagggccaccaaaggcagggccaccaagggcaccgattacaacttcgggcccaccaaaggcagggccaccaagggcaccagttacagcttcagaacaagaaccaccaattacagcttcagaaccagagccaccagttacacctttaggaccaccaaaggcagggccgacaagggcaccgattac

SEQ ID NO: 70246 - DNA, 644 bp, Glycine max
  Clone ID: PAT_MRT3847_34443C.1
gcaagtattatttattcataatttattatttttgtcttggaatgtacaaaagaatattgtgtcgcttgtagaaacaaactacaacataacttaattccaaccaattgaatatcatcaaattagtaattaagcataagacaataatcaaaggccagaagtgaatggcacaccagtggcaggcaaccacgtgcggccggcaaggaggttagcaactgtgaatcgtgatgcctcagctgggctacttattctatgaaaaccgggccatcgtaccctgtttctggtggaagaaccgggcccaaagttcctgtactctccataatagagagtattcaatgcaaaattagagtctccccatggagaccaaccccctgggctcaccaggctatccaagaaagatttcatgaccacacctctcgagtatcgttgccaaggccggcccaagaaggtgttgaattttccaacaatgggcctgaggtctggtgcagccctgatctgagaattgtgaattgaaaagccagtgttttgaaatggatcatatcgaccttgggccgtgatcatgtttgcttgcccatttaagggttttcttacaagaatcacacagttttggaaaacaacagcagcattgccaaatctggtgccgaatt

SEQ ID NO: 70247 - DNA, 345 bp, Glycine max
  unsure (1)..(345): unsure at all n locations
  Clone ID: PAT_MRT3847_34444C.1
aattccccgtccgacccactcatactcacactcctacaatacatacactactccattattatcatttcacttaacatatctaagcacgactctatatcatacgcactcagacctcncacacctctctcttctctactccaaattcacaacctcaacattaatcttcttacaaaccttctccccacattccctctcccatttccacctgatccaaaatctacccttcatctaccctaaaatattccgccctctcatctttcatcttcgaccactataattacaaatttaacatatatctcttaatcaactcaatcaatcacaataactctcaatcctactttaaat

SEQ ID NO: 70248 - DNA, 926 bp, Glycine max
  Clone ID: PAT_MRT3847_34445C.1
cccacgcgtccgcccacgcgtccgcccacgcgtccgggaaaaatcgaattaaatttgcacagtaacatattccctcacaacacaacaatgagtcgcaagagagacaggtcagcttacttttcccgccacgacgccgccaagcgccgcctccccttgccggagcccgcggaggaggagacgcctacgatgagaccggcgccgccgtccgcggtggtcgtgatgggcctcccccaggactgctccgtcctcgatctcaagtcccgattcgagatctacggcgccatctcccgcatccgcatcgaccgcgacgccgtcggatacatcacctaccggaccaaggactccgccgacgctgccatcgccgccggcctcgaccccaccttcggaatcaccgttaactctaaaatggttcaggtgttgtgggcaacggaccctctagccatgtggagggaaggagttggtaatagcaggaacaaaggttctatgtcaaagcttgtgcgtgctgaggtacctttgagcaagcatggaagaggtaacagacttgcttcacccatagggaataccaaacttagcgaggctagctcaggtagctcagttttagaagtgtctttcaagggcagagaaattgttgcttatgatgatatcctctgactatgaaaatctgtattgttagagggtagtcttattctgtatcaatgatttgaatttgggctttagatctctttgtagttcttttttcccttttgttaagtatgtgctcaatgagatactgggaagtaacttatggagttggttgtgatgtttaatacctacatcgtagatgtaatgtaaatagttggatttacattttgttgtctcgtcaattctttggatttgaaagtgtaagatgttcttccatgattgttcacatcacaaaaccttttttt

SEQ ID NO: 70249 - DNA, 1230 bp, Glycine max
  Clone ID: PAT_MRT3847_34446C.1
ccacgcgtccgggattcccgattgatgaagccaaaagagggagtttggggaagttctctcggatgctcaagcgtttgcttaatgacttggaggttcgccagattatgaaggctgagaggttttgtgaagcgaatcagcttccacctgagtatgtttgtgtgaatggacatccactttcttatgaggaattggttacgttgcagaactgccccaaccctccgaagaagctgaagccaggaaactattggtatgataaagtatctggcctttgggggaaggagggacagaagccttcacaaattattagtccgcatctgaacgttggaggccccatccaaccggatgctagcaatggaaacactcaggttttcatcaatggtcgggaaataactacacgagccgttcgtatgttgcagttggcaggagttcaatgtgctggcaacccacatttttgggtcaatgaggatggttcctaccaagaagaggggcagaagaatacaaggggatatatatggggaaaggctggaacgaagcttgtatgtgctttcctgtccctgccagttccttctaaatcttcaaattctttgggagaacaaccctccagtctggctagcagaacaatgcctgactaccttgagcatgggatagttcagaagcttctcttagttggttgcagtgggtctggaacgagcactatttttaagcaggccaagattctgtacaaaagtgtcccattctcagaagatgagcatgaaaatataaagctgatcattcagaccaatgtctatgcttatcttggcatactccttgagggtcgtgagcgttttgaagaagaaagcttcgggaatttaaagaaaaatcaatcttctgtgcttgacactacaggaaccagtccaaaacttggtgacaagacaatttattccattggcacaagactgaaagcattctctgattggcttctgaaaactatggtttccggcaaacttgatgctatctttccagctgctactcgtgaatatgctcctttgattgaggagttatgggatgatgcagccattaaggccacctatgaaagaagaaatgaaatagaattgctacctagtgttgccagttatttcttagagcgggctgttgagatactgaggactgagtatgaaccctcggatttagatatcctctatgctgaaggagttacttcatccaatgggatggcttctgtagagttttcat

SEQ ID NO: 70250 - DNA, 231 bp, Glycine max
  Clone ID: PAT_MRT3847_34447C.1
ctttagttctgtattttcatgcctattttctgtttagccactcatcaaggttgacttattttaatatagttggtctgtgtcctgatcagctatccctctgcataccttgggcaaagccttcttcatccacccctgcgctcggctttttgtggtagttttaaccaaaacatgagactcaaactgcctttttcggagtccattgatcatactgcttgttcagatctgttcaca

SEQ ID NO: 70251 - DNA, 357 bp, Glycine max
  Clone ID: PAT_MRT3847_34448C.1
cccacgtgtgcgaacacttcagaaagacaacacatgggacactcactactttttataaacatgagtctgaaataaaacatggtgcggacttaaggggtggttttaacttctttcacttcagcgggcgcatccccgctccttaaactgaggtgcttccaaaagactaactcctccacttaagatgataaggagggtctccagcgctaccgcgagcggctgcttttgaatcctctgatggctgatccttgccggcgccatgatcttcctctccatcgcgccccctccgatcggcatattcaggctggtcctcccccccaggcgagaacacagtagtgccgttgacccagaggatttctt

SEQ ID NO: 70252 - DNA, 282 bp, Glycine max
  Clone ID: PAT_MRT3847_34449C.1
ctcacacacaccaatggcatcataacaagaaacagatagacactccccagagttcaaagagtcagcgctatttcctctgttgtgtctattgtcactttgtcttccctctctgtagcagcagcagtagcagtgatggagcgtgctcgcaggctagcagaccgcgcgattctgacgcgtctggcttcagaggcaaagcagcatcagaagagtgaatccgtgctgcactcttccacctactgcatgctgggctactcttcctgcaggtgcatgtcgtctgtgctg

SEQ ID NO: 70253 - DNA, 450 bp, Glycine max
  Clone ID: PAT_MRT3847_3444C.1
ccctcgtagccggatcagcctgagggccgtcacccacgcgtccgcgcatcgccgaggatgaggaggttcaacattagatttgggatcccagcgaataatgtgatgatgcagttgtgattgttagcgagggccgccgctcactcttaccatatgactgatctccatagacagtgacagcgtttgactcttaaatacgctgtcactgaactcgggcccagactattctaacgtacctgcacgtgcaatgtgaaactggttaagagagcgaatgtattgcatcagcacggctatcacaaattaatgacgcatctactacggagaaaaaagtgtgctgttacagataccaacgaggtgcaaaagaggctgcatataactctttatacaacccccaccttgtttccatcttaaaatggcccactgttcatctttcactggttttgcacatagctc

SEQ ID NO: 70254 - DNA, 375 bp, Glycine max
  Clone ID: PAT_MRT3847_34450C.1
aggcattaaaaatcttcaagggatcatttttgcaaccagagaaactggacctctttttagttcatgtaaacattaacagctaaacatttccacgattacaggcttcttaactctaaaataagggtttcaaggccttcaaacataaccagccacatgcaagtatccataataaactacagaatagccacatccaagtagtcaccgatcatcatctaatcttccatttccataagataatgtcttgcccacctcttgaactttgaaacggccggttttgtcggggaatacaaaggcgaaggagagtttggcgtttcttctccttgcagccggagcaacttctttgacaagatcggtgagttcttggagaggagcgcc

SEQ ID NO: 70255 - DNA, 472 bp, Glycine max
  unsure (1)..(472): unsure at all n locations
  Clone ID: PAT_MRT3847_34451C.1
ccttgactggagcaaagctccaaccttgcgagatgcactggaccagccgagtgagacactgaggccaccggacaagcccctgatgctcacactttaagatgtgttcaaaatcacatgcttcgtaactgcgccaacaagacgggtgaagatcctcacaatatgaagatcagcatgcgcggtgatttgggcaccaacggtactagccaactgaatcaattgtgtgaagatgcaacataaatatcttacaaaggcacatgctaaggacaatgtggaatggaacgatcagaatgaaattatgtaggatntgaatccaagctatgtgtgccttaaactcacaggataaccgtgcacaggaggctaccaatctcacacatcaatgatcatgatgaaacaccctgtccaaaatgtaaacagtgatgacaataatctacactgtacactagtcaccataggagaaaggtatgcgaacgta

SEQ ID NO: 70256 - DNA, 859 bp, Glycine max
  Clone ID: PAT_MRT3847_34452C.1
cgccgcgggcaggcggcgtcaggcgggggcaacagatctacgggtggcggcacaaagcattcactgtgtcggaaaaagaagaagagaaaaaagatgagcgacggaggaaaacgacaaggtggaagagcgttgccgccgccgccaagaggccctccgcctcctcccccctctcgccctcgcctcgaacccgtcgatcgcgaaaagacatgtccgttactgctgcgagtgttcactaagattgggagtcaccattccatggaagactttgccgtcagaggcaaagagcccaaagacgaggttcagatttacacctggaaggacgctactctccgagaactcaccgatcttgtcaaagaagttgctccggctgcaaggagaagaaacgccaaactctccttcgcctttgtattccccgacaaaaacggccgtttcaaagttcaagaggtgggcaagacattatcttatggaaatggaagattagatgatggcaaggctttagccgaacttggttttgaaatcggtgactacttggatgtggctattctgtagtttattatggatacttgcatgtggctggttatgtttgaaggccttgaaacacttattttagagttaagaagactgtaatcgtggaaatgtttagctgttaatgtttacatgaactaaaaagaggtccagtttctctggttgcaaaaatgatagattgaagatttctaatgcctatattttttatcacggtcccttcctggttcttttgttcacctcaaagataaaaggaaaggatgatgtttatgggtgagaatcattggtttcgtgattcaatggtaataaaaaaaataagcaaaaaaaaaaacccaaa

SEQ ID NO: 70257 - DNA, 245 bp, Glycine max
  unsure (1)..(245): unsure at all n locations
  Clone ID: PAT_MRT3847_34453C.1
ccggnccggacggcccgactcgacccactcatcctatccttctaaagcgccagcgttctcccttcatattacttttaccttactctgcagttttatttacccgtggtgagcaatttccctcctactttaactctaatacccactaacttttttactccaaatcttcaacaaacgctctaatcttttctcacctcccttcctttaaaacctctccacttctccttttaccaatgaatacactcatc

SEQ ID NO: 70258 - DNA, 719 bp, Glycine max
  unsure (1)..(719): unsure at all n locations
  Clone ID: PAT_MRT3847_34454C.1
atttaaacccctcttattctgatttgaccatctatctatatccctaaagaaaacattcaatctttgccttcaccacgcgtccgctacaactcactcttcccttttctttgtcctaaactcatgtctctcccttcttttgctaccacttctttttcatttctattcacatctttctttgttttcttcatcttgtgtggaaattcttcatcttccttagcaatacatgccaacactacacgcccccctcgccagctctcagtaagttactatgccaaatcatgccctcaggtagaacagcttgttggctcagtcacctctcaacaattcaaagaatcacctgtttctggccctgccaccattcgtctcctcttccatgattgttttgtaggaggttgtgatgcatcaattttaatagcatcaaagcctgggagcaaggagttggcagagaaagatgcagaggataatagagacttgaaggtggaagcttttgagactgtgagaaaggctaaggaacaagtggagagaaagtgccctggtgtggtgtcatgtgcggacattcttgtaattgcagccagagattatgttcacctggcaggagggccctattaccaagtgaagaagggaagatgggatggaaagatatcaacggcatcaagggtggcctccaacatccctcatgcaaactccaccgntgatcaactcatcaaactcttcacctc

SEQ ID NO: 70259 - DNA, 557 bp, Glycine max
  Clone ID: PAT_MRT3847_34455C.1
aaaaaaaaattttctccccattttatatggggggggaaaaaaattaccccaacccgaatcagggaacattttccttaaacttaggccacaacaaattcatttggggggatgaatcaaaacctaaaaagtttgcaaaggcgggcccaagaaacccccaccaatccctttctttatcatcggaggggaaaacaaagccttcacgtcccttgaagccccccaaaggggaaccccaaggggctggagaaaaagggtttgaactaaaaactttttgattgacccccagggccattgggttttgggggaaattcccaacaggccttttgtttggggccctacccgcccccaaagaaagggaaacaaaaatccgggggggcaaaggggggggggttttcatgggggactttggcccaaaaccccttttttcggggggtgcccccccccaagggggggcccctggggggggattttttcccccacctccttggcaaattttcccatttttgggggcaaaacttttaacaaaggcctttttataaaaattggaaaaagataatttt

SEQ ID NO: 70260 - DNA, 435 bp, Glycine max
  Clone ID: PAT_MRT3847_34456C.1
tcgattccgattccaaggaaggtttcccgtcatcactgtatgacgtcctccttctttgggggggggggggggggaagaagaagaaggaaagataggtacttgggtaacaggaaaatatcgtatccctgcggggcaagcatacaaacttagccaccacctaacttgacaggataacccgagaaaaaccgttaaaagtagaacataacgctgcaaaggaatgggggcctagttaaagacgcgttatgaaaccaccaaaacctatgacctggcgcgttgggcagtagcttggcatggctatatacgacccatgctaggtccgtgagttaggtggcgtccaagctaggctgagagcctgcgtagaacgtaaggagcgcaataagtataaccagcagtagaataataagcggcgagtatgcacgattggatggtaatggg

SEQ ID NO: 70261 - DNA, 447 bp, Glycine max
  Clone ID: PAT_MRT3847_34457C.1
ggtgttcaccccccggaaaacaaacaaagctcgtattcaaaatcctataggccccatgggggggggagaaaaaaaaaaccaccccccctaattagttgaaaacggaggtttcatggtttcaactttgggccatttaaacaccccccaaggggaacccattttccgttgcacctaaggcccccgggctagctagctttagctgcaaggggaaagaaaaacctttggtttttgagcgaacccatttgaccgggggcccccccttttggggtctcccgggttcacatatgggggatcccagggggggatttggccccctgggcttacacccaaaatttttccatttggcaacaggggggggctatgaaaattcccggggggggccgaaaaaggggaccctcttctgggggggccaccaacctttgggggtgggcactggctaaattttaa

SEQ ID NO: 70262 - DNA, 238 bp, Glycine max
  Clone ID: PAT_MRT3847_34458C.1
gggagttttcacctttgtcgtccgcaaatccggcagcaaatggaccgccaaccaacattccggcaacttcaaggcctccgccaattccaccttcaatttccaacggaggctcttgcaacccgttttcgccgttaattcctccgggggagttaagtcctttttttttcccgggtttcctacctccgttgggtcccagggaatattggggggtccatatttcttggaaggtgggggtggt

SEQ ID NO: 70263 - DNA, 626 bp, Glycine max
  Clone ID: PAT_MRT3847_34459C.1
atgagttcggctactaagaacgcagcaaacgcggttgggggaaaaactgcaagagcatgtgacggctgcataacgaaacgtgcacgttggtactgtgctgccgatgatgcttttctctgccaggcttgtgactcttcggttcacttggcgaatcctttggctcgaagacacgaacgagtccgcttgaaaaccgcgtcgtacaagtccaccgatgaacgacgacaacctcccacgtggcacaccaagaaacctcgaacgcccagacatgggaaacattctcgtaacaacaaccctttccacttggtccctgaagagggttccgaagaggcgaattcccatgatgagaatgaggagcagctcgtttatagggtccccatagtcgacccttttgttgctgagctatgtgggactaatagttctccttcttctgttacttcaactgatcaaggggtagtagctgctgctgctgctgcttctgctgaggttgaatacaaagggattcaaagcaatgatttttgtagcaatagcaatgagatcgaaaacttgcatgggatgctttcttcggatgcagaacttgctgagtttgctgctgatgttgagagcttttgggtaagggggcttgaaaa

SEQ ID NO: 70264 - DNA, 351 bp, Glycine max
  Clone ID: PAT_MRT3847_3445C.1
cattctttcttttattactgatgattatacagacccgcatgatggttacttttcgactgcgattgtgaactaataatcaatgatttaattacactcactaccactgatgctgtatgatcgtgtgatacaaacaccccgagttctttgatagtactacattgtccaaccatgtatttttgactaatatacaagcgccctttgatacattacacataggcgctgaagtaacgtatacaactccttatagggaggcattagctattgataaaagagcagggcctggtgtgaaaggttactaaaatacctggcaggatcgtgcaacgcaatatattttaaaacacacaatttttg

SEQ ID NO: 70265 - DNA, 285 bp, Glycine max
  Clone ID: PAT_MRT3847_34460C.1
gggtctcgtgttacatgataaacagccttcgtggtggtgacgaaaaatcgatgcgtgaaacggacacacaaagatgatggctagttgatcaaggatggctatcagtaagatagaacttctgggagtcgaatgtggaatgcataagggattaccgctcacagctgttcgcaatagcattgaaaaagagacgctcacacgatatagctttgaaaaaacactgtgccaggctaaagctgcaagtatgtcagaacaatacttcaaaaattttgtttctatgtgtgtgca

SEQ ID NO: 70266 - DNA, 1464 bp, Glycine max
  Clone ID: PAT_MRT3847_34461C.1
aacttagcaaaatttttatatacaaagaaataagaaaatgaaatgaaaagcgatatcacgtcgcaaaactatacttagcaaatactaacaaaactttagtggcagaacaacaaatgtagctcttatttatttagcaaaggaaatgttggtggtgcaaaggaagccctcttgacaaacctccccttcattctgggtctcttctcagcattcaatttcctaacttcgtaccttattttcttcgagaacaacctcgttcggcgcttctctctgtatcttgacaccctcgcctctctgcccccgtctattatcactggatgaatcccaaatccacccatttcaccgcaaggatgatgatatgccgtttcgcaacttcccatgcattgtttccagcactcatcagggtccaagtttggtttgtcagcggtggtccacggagatttttggctagcccaggcgatgattaccgcctcatagtctagctgcaacgaaatcttgttctttttcacctcatcatcattctctttcttcgctcctaattcattccccaatcccaaatcacaaaccttcacctcttcacacgtttcataatcaaagctcaactcaaacgattgatcatctcttcccacgaccatatccatctccatctccaccagagggctctcttcctgatcttccatcttcaccttcccactacctaccgaacactcctcctctttcgcatcaaccagtcccaattcttccatccccacgcacttgttttcaagccccctacccaacaagctctccacatcagcagcgaactcagcaagttctgcatcagaaggaagcatcccatgcaagttttccatctcattgctattgctacaaaaaccattgctttgaatccctttgtattcaacctcagcagcagcaactaccccttgatcagttgaagtaacaggagaaggagaactattagtcccacatagctcagcaacaaaagggtcgaatatggggaccctataaagaagctgctcctcgttctcatcatgggaattcgcctcctccgaaccctcttcagggaccaaatggaaagggttgttgttacgagaatgtttccggtgcctcggcgttcgaggtttcttagtgtgccacgtgggaggttgttgttgttgttgttgttgttgttcatcagtggacttgtaggacgccgttttcaagcggactcgttcgtgtcttcgagccaaaggattcgccgagtgaacagaagagtcgcaggcctggcagagaaaagcatcatcggcagcacagtaccaacgtgcacgtttggttatgcagctgtcacatgctcttgccgttttggccccaaccgcgtttgccgcgttcttagtagccgaactcatttgaagccaataccaaaaaaaggggggttacagtgtggttttggtaacaggggaatgattgttttgatgggttattccgcgg

SEQ ID NO: 70267 - DNA, 310 bp, Glycine max
  Clone ID: PAT_MRT3847_34462C.1
gttggtttaccaggacctccttacaggtgatgagcttatatatgactccttccgttacaaggaaattgagaatggaatgctgtgggaagttgaggggaagtgggttgataaaggagcatttgatgtagacattgctgcaaacccttatgctgacggtggaggaaaaaatgaaggagttgatgatgcatctgctaaagttgctgacattgatgacacattcaaacttgaagagcaacctgcattcaataagaatcaattatgtaccttcatgaagaggtatattaataatttgacttccaatctcgatgca

SEQ ID NO: 70268 - DNA, 362 bp, Glycine max
  Clone ID: PAT_MRT3847_34463C.1
tgctttcaaaacaaaaaagggcggccataagtggcagtttttttataattggcatgtggcccctgcagtggacccattctttccaatgctcgaatcaggtggtttgtacttgggtggctgggatttggggttccaaatgcattggcaatctttcctttgaataaaggttccattttttgatagggttgactttggttgggccaaggcttgaatttgagccaagatgtggaaagtcctttagtggggatggaagcagtttttaagcaccagttggttgcaggataatcccggttattcctttttacgggggaattttggtttaatttggccctccccagaataatttgttccttttttatatg

SEQ ID NO: 70269 - DNA, 542 bp, Glycine max
  unsure (1)..(542): unsure at all n locations
  Clone ID: PAT_MRT3847_34464C.1
cggacgcattcccggtttcaaccagagcagcctcaggtatttaaatgtgtccaacaaccggctctccggcgagattccggtgagctcggcattgatccggttcaatgcgtcgtcgttttgggggaacccggggctctgcggggaacagatagaagaagcatgcaaaaacggttcattggcgccatcgacaagccctagttatccgttgataccaaggacgatggggaaatcgtcgacgtcatcattgaaccgcacgaagttgataaaaataatcggagggagcgtcggtggagttgttttggtattagtttgcacgactgtggtgtgggttgtgatttgcaagaagaagaagaagggtggtgcagaagtggcagaaggggaagttggtgtggcgggaggagggggagaagaagaaggggttttgcgtgggaaaagagggtgtanggaagctggtgttctgcggaggaggggatcgggagatgagttatagtttggaggaattgctcaaggcatcggcggagacattggggaggggtatagtg

SEQ ID NO: 70270 - DNA, 190 bp, Glycine max
  Clone ID: PAT_MRT3847_34465C.1
caactactcgactactctctctcacttttctgggttctcgctgagtccttagctacagatccgcatatatgaagatcattattctggggtactcttctctggctttcaacttgtgaggcggcttctgcggttccctttaactaatcatggatgatggttcaagatataggactcaattccacacatcata

SEQ ID NO: 70271 - DNA, 595 bp, Glycine max
  unsure (1)..(595): unsure at all n locations
  Clone ID: PAT_MRT3847_34466C.1
aaataactagaattattttatttgatgtatttgactcatatcttaaataagctcttgaattcaaattttttagattggataaattctactaaagacaatcaatttagttttatcacagaaattagttttatagatatttcatactatagttacttcaaaaagcccccatttttaattttttttacatactacaaaagtataaagaaagcagtaaaacagctcaattagtgctaatcaaagttggaattttcctccttgctaacgtgcaagtatttgggacaaaaggttggcactgtcactgacaagctatgcccagcttcggctgatccttatgtttgaagttcattgtgaaataaacagtgaaagttttttctgtgtttgagtttattgtggtgacattactatnattacaaatcaaaaataaagatttgtttcccttttaaggttattatggattatcttaaatttatgtcaagtttgatcacattcaaatttagaaaaataactacatatcttcaccaaaaaaaacaataactacatattttataagaaaatgttaatcaatgtcttaaaatataaataaaatttaatatta

SEQ ID NO: 70272 - DNA, 283 bp, Glycine max
  unsure (1)..(283): unsure at all n locations
  Clone ID: PAT_MRT3847_34467C.1
cagcattttggggcatctggattccaaccttatcatntatnngaacttgcacagccaaaataacactctcatangncactgaaatgccttgagaagtgtattccaagttgcacattttatgttcatttcagaatcttaatttancaaancatccacatttgacntgtccaatatcaacaaatatctgctactttnnttttatctgatganttaatgtgnagagctaaagtacacctatttatgganatacgtccatcaaagtgaagccaggctgantgagntt

SEQ ID NO: 70273 - DNA, 541 bp, Glycine max
  Clone ID: PAT_MRT3847_34468C.1
ggctcgagggcgctagaatggcgtcgtccgaaggtggtgccagggcagtgcatgacgacgtcacatgtgtgatctgaagccgtgatgtatgagatccaccctagctctacactgcttatcacgctgaaggggaaaaaagcttccggactaggcacgacctatacccatgataaacagtgacacatcattcagacaaaagcattaacagcagcatacaaagctgactcttactctgtcatctctctctctgtctgtctctgtctcaagccctagtccagagtgttgtctctctctctctctctctctctgattctgcaattgtggtgactctattgtccattcacttctttcattaaaatcatcttcataacataaattgtgagccaccttgcccctattaatgatgctttctgcctctcttaatttccacacacaatttgagcttaggagctctttgcccttttaaatttgcgtttctttgttctgagtggaccactcaaattgtactcttgcgcctaactggtgcatgcaatcttatatt

SEQ ID NO: 70274 - DNA, 315 bp, Glycine max
  unsure (1)..(315): unsure at all n locations
  Clone ID: PAT_MRT3847_34469C.1
tngacacagcgtaagccactcgnccngncgctnctncagaannacgngananggannagcagcgaagannnccagganaaacccnnagnagaaganncgcggctgaatnatntggaacaancccngcagannacnntncnggnnaagnnctggtcatnnagtnggcnnaagatngcccntnaanntcnannncnccntcnggnngctgnccntnnggcnagangnaccngaannnccagangnctgcannaggtcggaagcacgnnncncnnngngncccncganagtnngnantgccgcncgnggcanangncc

SEQ ID NO: 70275 - DNA, 710 bp, Glycine max
  unsure (1)..(710): unsure at all n locations
  Clone ID: PAT_MRT3847_3446C.1
ttgtaataacacgcaattatttatattgtaaaacaaaacaaaaagtcaccgtgccaaatttaacaaacaaaattgaaaataaaaataagatttaattatctatttagtctttatatataattttcaaacttatttcttataattattatagttaataagtgaattttttagtatgtaaaatttatattttaatttttaaaaagtttttgtcgttaggagttaaaaaaatttaatgacaaactttttagaattaaaatataaattttaaagactaaaatttatttattaaattttaaaattaaaaaattcactttttaactaaggttaaaaatgataaatttaaagattataaagacttaatagttaattaaacgtaaaaataagaataaagaaccatcatactttggttgagatagcagtattttccttggcctccattccagttaacgtatcatagagaggttggttcagggtctctggcagataaaacgcgaaaacgcccccaactattccgcacaaagcgaacaccaaaaacggcaacgacccacccaaaacgannnccagcggcgccagtatggcacccatctgcgccgcctgcgtggcgcnnncgagcgcggcgttcctcaccaccgtcgggaacagctccgccgtgtaaataaacaacaaattataagtccccgccatcccaaaaatccccaaaatcccacaca

SEQ ID NO: 70276 - DNA, 131 bp, Glycine max
  Clone ID: PAT_MRT3847_34470C.1
atgtggacatggaagttgaagatatgaattcctcaggcaatactactgtcatcgatgtatctgttgcaaaggattccatgcacatagatcaactggttcagttgaatccacctgttgactaccattctgtg

SEQ ID NO: 70277 - DNA, 863 bp, Glycine max
  Clone ID: PAT_MRT3847_34471C.1
gctatgagcttttctttttctcttaaaaaaaagggttagttaatatacatgcaatttaactacaacattagagggtaagcactcgtttgtaagcactaggcataaaatgctagctgcatatcattatcacttcagtatgttattgcaacaacaattcacaaattggaagtctcagtttcaacgttatcaacttttgggagctcttcatcatcatcatcatcatcagccacatcatcaatgggaatgtcctcgctatcataagccgtgcctctctgaattgaaggagaaggataaggtgacaaatcctttgcttcaggattcctatcaaaaagatatggaagttccagaagccgcacaaaagattctgtctgaggatttcggggattcacagcaaaagcaccatcaaaattggatcgtgaagggtcataacaaggagctgttctaacaaattcaaaaggtttgcaccccctctcttgtagcttgcttctaacccattcaagacaatcttccatctcaagatttatgcctctgaagtctgcacctttgtaagtcaaagggaatatagggttgaacttccgtgttattgctaaccattcttcatcatactgaatctcataaggtcctgcatctgattcaatttccacaatctgtaagaaatcacgcccaggaatacatttatccagtgcaagaaattttgtcagtggacctccttccccatgttgaacaagagcagcaaacttgcagtgtaagtgagctgaaaaccaataatgtggtttcaatttttctagaagttcagcagcaggtttactacctagtcttttttcctctatctcttgcttaaaataatgcttgcgccgaacaag

SEQ ID NO: 70278 - DNA, 460 bp, Glycine max
  Clone ID: PAT_MRT3847_34472C.1
gaaaaaaacacgttcagaaccgcttcatcaataacatgccgaccgaaactctgtagtaagaggacattttctgcatcagacacacacatagatagaaaataaaacaaaaatgttggtgtccatgtccgtgtgcggccaagatgagattgagttgtcaagagatggcagccactacagtctctcaactggaatactaccttcccttggagccaaaagtaaccgcagactcaagctcaaacccttcattatatctccctatgaccgccgttataggatatgggaaactttccttgttattctggtggtttacactgcttgggtttctccctttgaattcggattcctgaagaaaccacaagcacccctttccataaccgataacattgtcaatggattttttttcgtggatatagttctgaccttcttcgtggcttacattgacaaaagcacttatttgatc

SEQ ID NO: 70279 - DNA, 162 bp, Glycine max
  unsure (1)..(162): unsure at all n locations
  Clone ID: PAT_MRT3847_34473C.1
aacntcgcangcacgcgtacgtaanctcggaantcggctcgagatngnttnaaaatnaatgnnnggactgtgtncatggnacttgcanaanancanatgtgcagttatngncaccacannnanactttnactataatgatgccnatttnacgtgctgnggtt

SEQ ID NO: 70280 - DNA, 322 bp, Glycine max
  Clone ID: PAT_MRT3847_34474C.1
gcaagttaaaggtcattttaattgtttaccccccaacacaaacaaaaaggtctgctgcaaacaattcaaaagcaagacacagcctataaaaacaaggacttgatttaaaaaggcagaaaaaaaatccctacaaatttataccccacttccacaccaaatcccctaaatatgaattacctaaccttaaaattacacaacataaccaccctcccaagaccttaataaaacaacctcaaacctctttcacactctaaatcatcctgaaaagcgattgccttgaacctaaaaaacaacagacttaaaaagacatttacttaaactt

SEQ ID NO: 70281 - DNA, 419 bp, Glycine max
  Clone ID: PAT_MRT3847_34475C.1
ttgcgatttttctttggacactatttcccatagctcgaaagagcgctgagatgacggtacattactccatggatctctgaagctattccctcaacggaagatctccacataggcaagtgcaaaaggctccccaagacttgaataaaactgttatctactcttagttcccttcttgaagaccttctctagagggtcaaacaaacgattcatttacaaagccaaaagcttctcccattattagccctgccatttcaacccccttttgaacaaatatcctctttccactagagccaccatcatgatgagatagacatttgagttatgggggttacccctgaatgatccaagggcctcgtctgcaactgctctaaacatgaactggtgccagaaagctgctataggtgccccaataaaaggtc

SEQ ID NO: 70282 - DNA, 649 bp, Glycine max
  Clone ID: PAT_MRT3847_34476C.1
aggcccgccccctttttttttttttgtttttttttttttttaaaaaatacacaaatactaaactttcttacattatatatgaaatcattccatcaatacataatactataatcttggaccgaaaataccaggatacattaaaaattaaaaaccaagaccaaaaggaataataatattagaaattaaaataatagctggaatctcaatttcacatccatatattgtggctggatctaacatccaaccattttcccacatattctatcatttgtttcccttcatttcttttccaaattatcatgcacacacacacatatatatatatatatatatatatatatatatatatcaatcatggcttagaactgcaaatagtatccaagaaaggagaggagggaggcaccaaggaatggaccaagagcagcaacgccgcctttgggtgccagagctggggcggggacgattgcaggagcttcggccttgtcgtgaccggcgtgagccattgcagtgctaatagaggtcacgacgaggaggacgacacatgcaaccttcttcttctccataattaaacttttgcagtgtaaagaaagggaattttagtgaaatctcgagccgcccaaggaaaataggtttggactgagaatgtttt

SEQ ID NO: 70283 - DNA, 1208 bp, Glycine max
  Clone ID: PAT_MRT3847_34477C.1
gctcgagctcgagccgagtaaatagattgtattggacaagaagtgggccgaggcccatggatgatggtatctggcttaaaggttaaacgaagatgattgaggatgtcatgatgcaagcaaggaagggagttgaaggatatctctctcattacatgatcgatcattcatagcatagtgtgaaatttgagcgagaccctaagaagaagaagaagaagaagaagaagaagaagatgccgaagaagatgggggtgaacacgaaggcggaggcggcgagggctcgtaagagcgcggcggatacggagcggaaggagaaggagagtcgagagaaggaggaccagtactggcgagaggcggagggttcaaagtcacgcgccgcgaagaagaaggaggaagaggccgaaaagagggcggaggcagccgcgcggaaagcggaggcgcgacggttggcggagcaggaggagaaggagctggagaagtcgatgaagaaggtggacaagaaggcgacacgggtgtcgatcccggtgccgaaggtgacggaggtggagctgaggaggcggagggaggaggagcaggcggaggctgagaggaaggcggaggaggctaagaagcagcagagtcggacggcggcagaggaagagtacgagagaatggtgcttatttcgaacactaatcgcgacgattcgatcatcgaagcaagaacattggatgatgccatcgctcagatgaccgtcgtggataacttgcccccagatcgccatccagagaggcgcctcaaggcctcattcaaggcgtttgaagaagctgagctgcccaagttgaaggaagagaaaccgggtcttactcacactcagtacaaggacatgatatggaagttatggaagaaatctcctgacaatcctcttaatcaaattgctgagtgaatggtcaactgcaactgaatgcaatgcaacagctaatattgggcgtggtggcatttctaattggtaaatgctataatacctatttagattacagaaacagttatcacagccttcattttctttctctgtatgagtttcactttctgtacatgcacatcaactttgagtaggactcttctcctactgctctattattgtatttaaattgatccaacgaattatgatatatccaattaagtatacgcttcgttgcacgtctaatagtttagacgagtgagttttaataat

SEQ ID NO: 70284 - DNA, 554 bp, Glycine max
  Clone ID: PAT_MRT3847_34478C.1
cggttcaaatagcagttttcttgaagcagatcagttttttaaaaactgaactgactaacaattcggttcaattctcaataaaaaaaaatattttttttatcagtttcagtccaattcaattcagttctttttgcccagccctaggtatatataggagcttcttggcacctttgttacatcatgtcctcctattaatatgtgaatctcctacaaaactctggtcacttaaaagagagagatccgtcgcttagatggacgtgatgtgatggctgcatgaataaatactcctcaagcagttgtgctgctttagtgaacaattttgccgaaagcacaagcagagccaaatccctgtgatcaggattcaaatgctggtaatttacaccaagttagcactttgcacttcatacatctagctacaagttgtcttccatctcatctggtacatgcagtttctcaatggcagccttgatagcagcagcatctgttgcagatggtttcaaatctaaagaaataccataatgaagcattgctctctcgtgcatgttacgcctttt

SEQ ID NO: 70285 - DNA, 358 bp, Glycine max
  Clone ID: PAT_MRT3847_34479C.1
ctggtataaaatcatgtgcaccaccgacgatattccatcgactcataaaactagaccagaaatgaaaagtggtattaatgaagatgttagccatataatcaaagtagggcgaatagagtgatgtcagccatttgacattcaatgacacaggggtgccacaggagctaaaaagacaggttttatagtattggcgttagacttgctatattggagtgcaagatgccggcctagaaaaagatgacattttcagtagataagtgtagtgaaaatatacatgttgtgtaggattctgcacatatgtgtgcatacaatatgagatcgtgtgcgatacattgatatctgtgatttattatgggga

SEQ ID NO: 70286 - DNA, 1565 bp, Glycine max
  Clone ID: PAT_MRT3847_3447C.1
gcctcgagccgaatcggctaacacttacacacacactctcacacacacactgtgtttgtgaaactctcacacagacaagtcacaacaacaagtttctgttgttccaatggcatcagcaacaccccttttgaaagatgagctggacatcgtgatcccaacgatcaggaacctggatttcttggagatgtggaggccattctttgagccttaccatctcattattgtgcaagatggagacccttcaaagatcatcaaggtccctgaaggctttgactatgagctctacaaccgcaatgacatcaacaggatccttggccccaaggccaattgcatctccttcaaggactctgcatgccgttgctttggctacatggtctccaaaaagaagtacatctacaccattgatgatgactgctttgttgccactgatccatccggacacaagattaatgcacttaagcagcatatagaaaacctgctctgcccatccacacccttttttttcaacaccctctatgaacctttccgagaaggtgcagattttgttcgcggttaccccttcagtctccgggaaggtgtaccaactgcagtttctcatggtctttggctcaacatcccagattacgatgctcctactcagcttgtgaagcctcttgagaggaacactaggtatgtggatgctattttgaccataccaaagggcactttgtttcccatgtgtggaatgaacttggcctttgatcgcgatctcataggagcagcaatgtactttggtctcatgggtgatggtcagcctattggacgctacgacgacatgtgggcaggctggtgctgcaaggtaatctgtgatcacttgggattgggaatcaagactggtctgccctatatctatcacagcaaggccagcaacccatttgtgaacttgaggaaagagtacaaaggcatattctggcaagaagacattatcccgttcttccagagcattgttcttcctaaagaagctaccactgttcagaagtgctacattgagcttgccaagcaagtcaaggaaaagctttccaaggtagatccttactttgacaagttggcagatgccatggtcacttggattgaagcttgggatgagcttaaccctgcgggagcatcagtggccaatggcaaagcgtgaatcggtttttggttaactgcataacaagccacagaacttggaagtggaactatttatatactgtattttttttccttagtatttatcttcaacttaactgttattctcggcttaaattttgcagcattgttagctgtaattctgtttaataacttaatcatttgagcttagaaacaataagtacacccgtagggcgttactttctttttattattgtttgatgggtagagatcacatggcagcatttcgttacatgtgaaataatagaaaggttactgatgtatgtcttgtttattactgagtatagatccatagtggtcaatttttaactgatgtattcgactatagatccatagtggtcaatttttaacaaataaaaaaaaaaaaaaaaaaaaaa

SEQ ID NO: 70287 - DNA, 957 bp, Glycine max
  Clone ID: PAT_MRT3847_34480C.1
ctcgagccgagaaaatagattgtattggacaagaagtgggccgaggcccatggatgatggtatctggcttaaaggttaaacgaagatgattgaggatgtcatgatgcaagcaagagagggaatcgaaggatctctctctctcatcacatgatcattcagcgagcaatagcatagtgtgaaatttgagtgagcgagcgaggaatcggaagaaaacgaaaccctaagaagaagatgccgaagaagatgggggtgaacacgaaggcggatgcggcaagggcacgtaagagcgcggtggatacggagcgcaaggagaaggagactcgagagaaggaggaccagtactggcgagaggcggagggttcaaagtcacgcgccgcgaagaagaaggaggaagaggccgaaaagagggcggaggcagccgcgcggaaagcggaggcgcgtcggttggcggagcaggaggagaaggagctggagaagtcgatgaagaaggtggacaagaaggcgacccgggtgtcgatcccggtgccgaaggtgacggaggtggagctgaggcggcggagggaggaagagcaggcggaggctgagaggaaggcggaggaggctaagaagcggcagagtcggacggcggcagaggaagagtacgagagaatggtgctggtttcgaacactaatcgcgacaattcgattattgaagctagatcattggatgatgccatcgcccagatgaccgtcgtcgataacttgcccccggatcgccatccagagaggcgcctcaaggcctcattcaaggtatgaattgaattggacccaatccgctatttgctaaccctaatcctaacccttcattccgctgagcaggcatttgaagaagctgagctgcccaagttgaaggaagagaaaccgggtcttactcacaatcagtacaaggacatatatggaagttgggaagaaatatcc

SEQ ID NO: 70288 - DNA, 1165 bp, Glycine max
  Clone ID: PAT_MRT3847_34481C.1
caacgtcacaacacatataaggataagcacgtcagtgctttatttaggtgacaaaactacgcgcacctacagccttttctatctatcggtcaacgttagtgctttgtttaggtgaactaattcggagaccttgcaagacttcatcaatggctgtcaaagtttatattgtgtactactccatgtatgggcatgttgagaaactagcagaagaaataaagaaaggggcttcctctgtggaaggtgttgaggccaagttatggcaggtacctgagacactgctggatgaggtgcttggtaagatgagtgcaccacccaagagtgacgtaccagtcattacccccaatgaactatccgaggctgatggctttgtattcggcttcccaacaaggtttggaatgatggctgctcagtttaaagcctttctagatgctactggaggcttatggagagcacaacagcttgcaggcaagcctgctggcctcttctacagcaccggttcacaaggtggtggacaagagactacagcactcactgctatcactcaactggttcatcatggaatgatattcgttccaatcggttacacattcggtgccggcatgtttgagatggagaaagtgaaaggtggaagtccatatggtgctggaacttacgccggtgatggctcaagacagccaagtgagcttgagttacaacaagcattccaccaagggaagtacattgctggcatcacaaagaagctcaagcaagctgcataatgttgccttgccttcatattagatcatactattattattaaaccataccacaatattgcttgaaaatcattgtccaatttttagacttgaaatatattgagtttttttttcctgtgcttgcaagtattttttttttctttctaatcttggtaaaggaaatgctttgtatgagtgttacatgttgcagtggatgttgcaatttgttgaatgaggaaagtttgtgtctagtcctttagtgttaggcggaaacagtacttgttcctatcttttgtattgccccgttaagcacataaacattgcaacgaccagtttgagtagaaaaaataaaaaaaaaaaaaaaaaaaaaaaaaaaaaaaaaaaaaaaaaaaaataaataataaaaatttattaaaaataaaaaaaaataa

SEQ ID NO: 70289 - DNA, 931 bp, Glycine max
  Clone ID: PAT_MRT3847_34482C.1
ggctccttccattttcgatgtatcgtcaacgttagtgctttatttaggtgacaaaactactcacagagaaagacactcggagaccttgcaagacttcatcaatggctgtcaaagtttatattgtgtactactccatgtatgggcatgttgagaaactagcagaagaaataaagaaaggggcttcctctgtggaaggtgttgaggccaaattatggcaggtacctgagacgctgcaggatgaggtgctcggtaagatgagtgcaccacccaagagcgatgtaccagtcattaccccgaatgaactatccgaggctgatggctttgtattcggcttcccaacaaggtttggaatgatggctgctcagtttaaagcttttctagatgctactggaggcttatggagagcacaacagcttgcaggcaagcctgctggcatcttctacagcactggttcacaaggcggcggacaagagactacagcgctcactgctatcactcaactggttcatcatgggatgatattcattccaatcggttacacgtttggtgctggcatgttcgagatggagaaagtgaaaggtggaagtccatatggttcaggaacttatgctggtgacggttcaagacagccaactaagctcgaactggagcaagcattccaccaaggcaagtatattgccggcatcacaaagaagctcaaggaagctgcataatgttgaatcaattaagatttagaattaaatatatgtttgagaatcgttcattatattttagtcctagaatgttctgagttctgtttctttaggtgcttgcatgttatagttttcttatctttcaaaaagaaaatactatgtattgagttatatttttatgttacactacggtgtagtgattattgaaatttattgaataaaggaagtttgttttgtct

SEQ ID NO: 70290 - DNA, 301 bp, Glycine max
  Clone ID: PAT_MRT3847_34483C.1
tttcttacgcgtggggaaaatcctggctatgacaggactggaaatgaaggaatcgatgctaaacaaacgcatgcctgctgatgttcctgcaaagcgagctcacgaatttgcaaaagatgttgatatctacagcctcaaggttcgatttcctgctgttgtcaagaagtaacctactaaggtcgataagtccgcagaaatcctggaccgtatacaaagagtagctggtgatcttaaactctctacggaagggaagatgtatgacggtaagctttttcctgactcttatattcatcgccaggga

SEQ ID NO: 70291 - DNA, 261 bp, Glycine max
  Clone ID: PAT_MRT3847_34484C.1
cgccaggctaaagatgtttacctttgccatattctttcaatttacaaggttgtttgaacgcccaaaattaaacgggggatgggagggcgctggaacaagaaaagggtatgattgttttgtgccccggggcagataaaagggggcccccgaccccccatcaagatgtgcttggggcgaccatgagaaacctcaggagggggggaacggggggcccctctacactggaggacttagttttatttttttcaagaaaggactttt

SEQ ID NO: 70292 - DNA, 298 bp, Glycine max
  Clone ID: PAT_MRT3847_34485C.1
aaaagaacacacacttaacacataaatacgacaataaaaagaggagcggaaattttcaaattgacagatcatacttagcaagagggtcaagtgtaacacccttgattgaattaaacctacgaacactcgattgataccacaaatttcagataatgcagaggataccggattagcagagtatctggcaaatgcctgagggacagaaaaagctggcataagaggattaccagcaattacaaactcttgagaaattcctaagagactatgaaaaactgtggactgtctgggaatgtcaata

SEQ ID NO: 70293 - DNA, 433 bp, Glycine max
  Clone ID: PAT_MRT3847_34486C.1
gtgtgtttttttttttttttttattttttttttttattttatttttttttttttttttttttaatttgggtcaagaacactagcaataatgtatacataagctatctatttaaacagccactcttccataaacactttttataacgaccatgctaattgatggggaggcgggccccaaaacaaaaaaaaaaaattcctcccactggcaatgggggaaaagggccgtaattggaaaggcccaatactcgtgaattaagaaaccccaaccctatatatacctttaaagaaagattccaaaacttaaaaaccaactttctcttttaaacaagaaacaaggaggctccccaaggagaaaccacaagtttttgggggccctgccattacccccatttggaaaagttttggttaaaaaaagaaccagacccaaaatccg

SEQ ID NO: 70294 - DNA, 149 bp, Glycine max
  Clone ID: PAT_MRT3847_34487C.1
agaatcttaatttcaactcttttctcttaaccctatgtttatgcctcatggtgttactcgccacgggggacttcattacccgtccaaggggggagtacttattatattctgcatgctactatgtcttacttgtattgcacattctctct

SEQ ID NO: 70295 - DNA, 544 bp, Glycine max
  Clone ID: PAT_MRT3847_34488C.1
ccactttgtgcggaactcttggctgagattgtggacggagacgtggccgagggctatggtgatggataatgtaataaatctggtgctggcataatgagccccattatcaaccccactaccagaaagactcaatccagagcacaagctggtgcacacgaggaggtgaacatggtcatggacttgccaaagtcatgcccaaagatctggctatagaccccactatggctacgtgctgaacttcttgacatggttactgatctccttaaagagcacgcagaaccactggcgaagtgcctggcgaaagaaatcgcagatgctgccacagatgctgttacagatggtgatagatctggtgatccggctgattatactgctgagaaacgggtaaagattctgggagagggaaaggacttgttgtctgatagctatcctgcgaatgattggacgacatactgccttcacattcgaaatgacactaggagtgacaccatccatctcaccttttaactatgctgtcaatcatgctgcttccgaacttgctgct

SEQ ID NO: 70296 - DNA, 214 bp, Glycine max
  Clone ID: PAT_MRT3847_34489C.1
caaaactacttttttaaagttccttttaccttcccgaaatggtggacattggtcttttttggggcccggtttttgtccaagtttattggttcccggtggcctaatatttaaagttccattcctttttgcccagattatattgtggaaatgggaatttttgcaaataacttggccttttttttttattatttccaaaatgaaaaaattttccacc

SEQ ID NO: 70297 - DNA, 254 bp, Glycine max
  unsure (1)..(254): unsure at all n locations
  Clone ID: PAT_MRT3847_3448C.1
ganancaacgaggtnctgagctctctgcgncgaanctggctggancgtggaagaagatggcacaacttatcgaaaggnatgtaanagacccacaatnnanattggagnancaccactgagcttaagcgcntgttcttccattcaggcatntccacaatcctcgtcnncccngtntcggnaaccatcctaccatgtagngcaacctcttctcgntcncagcncaagcgcatggcgggnaccaccttntcttntaa

SEQ ID NO: 70298 - DNA, 174 bp, Glycine max
  unsure (1)..(174): unsure at all n locations
  Clone ID: PAT_MRT3847_34490C.1
gaaccctccaattcagattggcttanttggcagcgttgatgcggcttatctctctctttcgttttgaaaaattaatttcggctctattttttcttctcctattttgttcagatgaactaaactccttaacacacctagataggaaattttaatgctgaagcagattattagtgt

SEQ ID NO: 70299 - DNA, 349 bp, Glycine max
  Clone ID: PAT_MRT3847_34491C.1
cttcaataagatagttgtcaactatgcttatagcttcctgaggaagaactttcgcgagggggataaatcgatggcaatccctcgtaacaaacttctcaaagttggaatgacatatgaaatatgacatgacatactctattataaataattaagatataatgagtaagagggactacttgcctcagcttgttgcagtgtctaactaaatagtttgtatttgtttttaaatgttatggtgtatggcaatgttttctcaactccatgtgaaggcctatatccattttaagattctagtgtgagtctctgtaggtaaaacattttaaaaccacttaattatctcattagaagc

SEQ ID NO: 70300 - DNA, 477 bp, Glycine max
  Clone ID: PAT_MRT3847_34492C.1
gggggacaaacttttttttttggttttaagggccaaaaaataaagagctataatcaaaaaaagggccaggaccagggggcaagtccccgtaaaaattaaaacagggggaacccggaaaaccaaccttgggatttacattaaaatgggaaacaggtttaccctttggggggacaaaaaaaaggcttaacggacaaacaaaaaaaggaattttagttaattctaaaaaaacccaccttaaaagggaaaaatcaaatgggccaacccccgggaatggggcttcaaaaaccaaaaaaaacaggggaccaaaaaaaaaaagggggatttttgggaaaaaccttgggatccaacttttaaaaaggggggcatatttaaaaaaaaaactggctaaaaaaggccttcacaaaccccaaaggggggaaaccccccgggtccttttcacctacattaaaagcccccccttttttctccccatttgaa

SEQ ID NO: 70301 - DNA, 986 bp, Glycine max
  Clone ID: PAT_MRT3847_34493C.1
ccccggttgggggagtggccttggagattcctattgatatatctgtcctgaacaacatgcgacagtttgtgaaatatagtcggttgaaacaatttgcactaagggcattggctagcacacttaatgaaggagagttgtctgatctaaaagatcagtttgatgcaatagatgtggacaaaaatggttctattagtcttgaggagatgagacaggctcttgctaaagatcaaccttggaagttgaaagaatcacgtgtgctagagatattgcaagcgatagacagcaacacagatgggctagtggatttcaccgagtttgtggcagctactttacatgtacatcaattggaggaacatgattctgacaagtggcagcaacggtcacaggctgcttttgagaaatttgacttggataaggatggctttattactccagatgaacttagaatgcatacgggtttgagaggccccattgatccattgcttgaggaagccgatattgataaagatgggaaaatcagcttaccagaatttcgtagacttctaagaactgcaagcatgggttctcgaacagtaatgagcccaagtcaccgtcatcatcgaaagatttagattagatatgtttcggagacagggataattcaggagatgagagtgatggatttccttttaagatgatgatctcttatgcagattgtgctgaagccctccttgtgatatctattctgctgcacattttgcactctgaccatcattatatggaactctgaaactagagttaatattgactatggcataccacacaggattgtgtgttaagcttagtctagacgaccatgtcaagaggaatttaaatagtgtgtggattgacttgaggtatcagagtttcatcggtgtacatcattggcttgtttgtgccatacatgtaatgtgtaatactgtaactataaataaaaaacttcttactccccttccccttcaaaaaaa

SEQ ID NO: 70302 - DNA, 505 bp, Glycine max
  Clone ID: PAT_MRT3847_34494C.1
tgtgggcactggcgtccgagtccgattaattcccggagcgaccatgctcagctggccggcggccgcccttttttttttttttttttagacacgccgaaatttattgttggctgcagggaatggtaaactttgaaaatctattgtgagacgccgtttgagcgaacactatcttcatttttgacaggatacgtttacacagggccactttttttattagtaaaaaaaaggcacgggtgttctttaaaaaaaaaaaggggcaccccgccctcttattataaagcgcctccagctcgccgggcggggggcttgtatatctccaaaagaggggaaacaacccctggttaacccccccgaaaaaaaggggggggggggggccttacaaatgggggggggcctagtctggggggggatcatttggaacaacaaagaaccccccgcccccagaaaagggtccttaataaaaagaggggggtgattttttttttctcaaccaaaaaaaaaaata

SEQ ID NO: 70303 - DNA, 146 bp, Glycine max
  Clone ID: PAT_MRT3847_34495C.1
gcacgagcaaagtcatgaacacaattcttgatggtttgaacaaaaaatagccatctctcccatggctgtaacttcccatgtttatcatccacggttccagctcctctaattttttgtttggtttcgtctatcacacattatttgtt

SEQ ID NO: 70304 - DNA, 300 bp, Glycine max
  Clone ID: PAT_MRT3847_34496C.1
tgtaggcgtcggaacctgtttccatgcggcttcgttgagcataccacgaaccactcggataaatacctaaatggggctaaagcgtcgccacagattacatcaaatcaaatggaataatttaacctatacttgcttacccaccgacggcgggtgcggtccaacctaatggactttacccaacattggccgcaacatagaccgaccgcaaatacgaaataagctatcccaaaccgattcgttgggtggtttctgaaaggtgaactcgtacacccttacatatcgatggtggctgatacgtac

SEQ ID NO: 70305 - DNA, 281 bp, Glycine max
  unsure (1)..(281): unsure at all n locations
  Clone ID: PAT_MRT3847_34497C.1
gaaacttcncactaggaaagnttctcatccctctgtgggccgggtatcttttactcccaataaggagggnacatctgtgaatcactactgtgggggttcaacttcatctcaatcgganagtagtgaatcagagtctactacaaantcacatttatcctctgagaggnatttcgctaatcttcgttcattcatgtctaagcctattcaccctatgtcctttaatgacctaacaactactagggatgcctttgatcctgcagttncagattttacagagtttg

SEQ ID NO: 70306 - DNA, 707 bp, Glycine max
  Clone ID: PAT_MRT3847_34498C.1
cctcaagtcaaccttggttctggaccacacatcgtaacatcatcgagtgtctgatctcgttcgcaccctgcttcttagtcctctctctcaccatttaacaattacactggaagaaaaatgggaggttgtctatcatcgaagcctaaggcagtagataatggctcagcttccggcaatatcaactgtttcatgctgtatgcgagagcactctcaatcacatggggagaaactccagaatattggatatgggttcagcagaaagaagcaaggtactcatctatctccaaatattaaggggttttactataaaaaaaaaaatcaaaattctatataaaaagtagtgttctaaaaagtagatatctcacgaatctaacatacagggatgggatttttgttgtgagattcaatcccctcttttattgataaaagatttctttcgcaataggattgatttgctttcatatagttttagatagctctttagttcaccgtgtgtttcgtccccctgtattttttgttcgttcatctttttattaatatatttttggcttgttgtaaatgatggtaatgtctggagtgttatcctacttagaattattcccaaaaatgttattagtataaatgttatttcagaaaatatttaaaaaatctagttagattttaacattcctggaaatgtttttgaaatttaaaataattgaaataga

SEQ ID NO: 70307 - DNA, 256 bp, Glycine max
  Clone ID: PAT_MRT3847_34499C.1
catttggacacaataatagggcctggagtgatgcttctttatcctctatacgcatcaatgagagcaattgaaagtccttcaaccttggatgatcaacagtggctaacgtattgggttttatactccttcatgaccctctttgagctttccactcataagatccttgcttggtttcccatttggggatacctgaagcttatgttttgcgtctggttggtacttccaatgttcaatggagcggcttacatatatgaga

SEQ ID NO: 70308 - DNA, 319 bp, Glycine max
  Clone ID: PAT_MRT3847_3449C.1
cttgagcaatttttttctgattggatcatttgaactaaaatggcgggaaccattatatcgtctaaaacttcccattaatcaaggatgcactattatctaccgtgatcgcctactaacatatatgaagccagcgccgacacacaaactgcaacagaaccagaagcggtctaaactacacacgacctccacttctgctgggactataagcaggctagaggaaactacgcaggcaacagcccgtatcagaccaacctgaacaccctttatgccactctcacttgcaatacagatattgtctactgtctctacaatttcacaa

SEQ ID NO: 70309 - DNA, 311 bp, Glycine max
  Clone ID: PAT_MRT3847_344C.1
gcaaacatcaaagaattacttaatttaaaaatcgtccctcactctttccacccttataaactccaaaaaactcctcactttcttctccttttaaccaaccttatatctaactcatccccccccatctttcatgctacatcacttttcttactaccgtaatcaaaccttctattactcttcctttatcaacccatccaatccactgattaccttacccccatcaacaaccttattcttctcattttttagtaccttgcaatcttcaacagccctttttcttttaaaatcaccccttaccttttccgatttta

SEQ ID NO: 70310 - DNA, 315 bp, Glycine max
  unsure (1)..(315): unsure at all n locations
  Clone ID: PAT_MRT3847_34500C.1
cgcangcacgcgtacgtaagctcggaattcggctcgagacatangtntcaaaggcccacngttnctnaatccnnntccanagccngangncttcaatctcaatctnctngtctccantganatgaaacccnagcnccaattggtncctntaatcattaactcttnatagtaattactaatctcaattagccttcatctcncacacaacanaanannngncgnnntgntgctcaangagacancgttcnancatgcacangcagcaganncaaannnngncangtcctgagntannnnnnnncnntanacttctct

SEQ ID NO: 70311 - DNA, 1113 bp, Glycine max
  Clone ID: PAT_MRT3847_34501C.1
gcacctctcttcttcttctgtttgtgttctctatccacattcgttatctagtgagtgtggtggcacttctggtgttgctcaacaatggcgtccgttgcagttatggctacaagcagcgacagcaggtggtctatggcttccttgcgctctgctttgccctctcattctcctcctgtttcctcttcattgcgcttccctgtattgccatcttcaccgtcttcttcttcaacgaaactccgaatttctcgaaccaaacccaaatcccttctcacctctttcaccggcctcgctcctcttaaccccatcttcctctccgctccttcttcagaatataccggctgtgatcactcttttaccattattgacaatggtggtcgagtcactgccatgagacatgggaggcgagtgcccaaactcaacaggccccctgatcagcgtcgcgcactcatccgaggtcttacaactcagctccttaaatatggtcgcatcaagaccaccagagcaagggccagtgcaattcggaagtatgttgataaaatgatcactttggcaaaggatggttctcttcataaaaggagacaagcccttgggttcatctatgagaagcaaattgttcatgctttatttgcagaggttccagaacgttatggtgaaagaaatgggggttatacaagaattataagaaccctaccaaggcggggtgataatgcacctatggcatatattgaacttgtgtagccatcgcctttatttgggtgcatttattagcaatctcactgcaatcttgagcttggctatgtatccagtggtaaacaatgattctacagtttttcctatatttagttgtatttgtatttatgcttttttgactagttttcagtatgcatctatttctgtactcatggacaaacaaccatctttgaacttgagtgatcatctaccaaaggtcatagattcacttattttttaaaattgagatgttttaagtgtgtatatgcaacattgactacgactacttctccgcttgcggctcttgctgtaataattatttgacaaaaaaaaaaaaaaaaaaattcctgcggccgcgaattctggtgccgctggtgccgaatt

SEQ ID NO: 70312 - DNA, 1255 bp, Glycine max
  Clone ID: PAT_MRT3847_34502C.1
gggattggccttatagaaaagaaacttaaaaatcgaattcaatggaagggactagatgtttcaagaccgggtgaggctgatgatagttttgccagtttacaggcagaagttgaaaatttaacgatgaaggagcgccagttagacgaacaaataagggagatgcaagaaagactgcgggatcttagtgaagatgaaaataatgacaagttgctttttgttactgaggaagatataaagaatttgccctgcttccagaatgaaaccttgatagccattaaagctcctcatggaaccactttggaggtccctgatcccgacgaggccgttgattatctgcagaggagatacaggatagtcctcagaagcacaatgggctcaatagatctttaccttgttagtcaatttgaagaaaagtttgaagagattaatggtgctgatgttgcacccaaacttccatccagtccagatggtaccaaacatcaatcaacagtggtcccggaggatagagggaagcacatagaagtgcagggacaagcagctcctggacctagttcagattttactccctcccaggattttgtgagtgggatcatgaagattgttccttcagatgttgctagtgaagctgattactggcttttatcagatgctgatgttagcataactgacatgtggagaacagaacctggagttgaatggaatgaactggaaccacttcaagaagattattgtatgactgacgagaacactacaacgccaagtcatccttcaaatgtaggtgaagtgtcttctgcatctaaacctactggaggttgaagcttccaaaggatgcattgtgaatataatagtgaacgtggtgttcctcttccttctgagaacctatgacatctagccatctcccttttgtatcctctctacatagtcctggaggttggattgaaggttccatgaagatgctttctcatgtttctccaagaagttcgatggaggagctaactgagtggccaatcaactggctcattgtacagtaaatattacataacctaagcgaccttagttcaagaaaaaaatctcgctgctttgctgaaccatctttgtatattacataaccctagtcttggctttctagtgtacttagctcgatctcttatgtttaccaagcaataaaaaacacttcggaatgctcccaggcaatgttatcacctgtaactatacatccatttcaataagcttgcaattaagcacacagttggcg

SEQ ID NO: 70313 - DNA, 1219 bp, Glycine max
  Clone ID: PAT_MRT3847_34503C.1
gggtgaggaagaggaagagagaaatgtccaatttgagatcaacacatatgatttcaagattgattctggtcccgtcagcttggtagttaatgcttgtgcaagcagggatcttcaagataacattgtgggagtttgttttgtggcacaaggtataactgctcagaaaacaatgatggaaaaattcccccgaattgaaggtgactacaaggcaattgtacagaacccaaacccattgatccctccattatttaacacagatgaatttggttggtgttgtgaatggaattcagctatggcaaaattaaccggatggaagcgagaggaggtgatggataaaatgcttttaggagagattttcgggacccagatagctggttgtcgcctaaggaatcatgaagctgttgttaattttagcattgtacttaatacagccatggctggtttggaaacagagaaggttcctattggtttctttactcgcgatggaaagcatgtagaatgtcttctttctgtgactaagaaattggatgcagaaggtgtagtcactggtgtcttctgcttcttgcaactagctagtgcagagctgcaacaggcattacacattcagctcctatctgagcaaacttcattgaaaagactgaaagatttaacttatttgaaaaggcaaatccagaatcctttatatgggattatgttctcccggaaattgttagagggtactgaattgggagctgaacaaaaacaatttctgcaaacgggcactcggtgtcaacgccagattagcaaaattctggatgactcggatcttgacagcatcattgatggattcaaacattgctgaaccagatgtttggacgtgatggacatgaatctgaggagggtattagcatgctgattagcagaaagctgttaaagctcatgaagggagacgtacgttacataagggaagcaggcaaatcatctttcatcttatctgttgaacttgccgcagcacataaatccaacacttaacactttggaaataataccaaaccatattaattttttctaaatcagaaagtgaaggaagcaagaaatttgcattccttgttcaatatttaactcttgttattaagtaccttgatgtaaggtgatgtagatatgtaatgtataactaactagctatttacacactttatagacctgttctcgtctacagcaatgatgattcatttgcaac

SEQ ID NO: 70314 - DNA, 226 bp, Glycine max
  unsure (1)..(226): unsure at all n locations
  Clone ID: PAT_MRT3847_34504C.1
ggttaatggngtaagnattttggaaggatgtcttacnctgctnataangttaatcagcnccaagagaaagatttgttagagggaaatttnncntnngatattaaatctngntctagcattgganaaagtttngtactagaaaagcacaanctgttagtggagaaacnttnaaatatganataattggtgctngttcgcattnttcagnagatntnnntgaaaagga

SEQ ID NO: 70315 - DNA, 998 bp, Glycine max
  Clone ID: PAT_MRT3847_34505C.1
gcaaatccagaatcctttatatgggattatgttctcccggaaattgttagagggtactgagttgggagctgaacaaaaacaatttctgcaaacgggcattcggtgtcaacgccagattagcaaaattctggatgactcggatcttgacagcatcattgatggtaaagaccttgatgtactagtggcccttttgtcctgcataacagctacatggatttggagatggttgaattcactttgcatgaagttttggttgcctccctaagtcaagtcatgacaaagagtaatgcaaaaggtatccgagtagtcaatgatgttgaagagaagatcacaacagagaccttatatggtgatagtatcaggcttcagcaggtcttagctgactttttattgatttccatcaatttcacaccaactggaggtcaggttgttgtagcagccacgctaacccaacagcagttagggaaattagttcatcttgctaatttggagttcagcataacgcatgatagttttggggttccagaaacattgctgaaccagatgtttggacgcgatggacatgaatctgaggagggtattagcatgctgattagcagaaagctgctaaagctcatgaatggagacgtacgttatttaagggaagcaggcaaatcatctttcatcctatctgttgaacttgccgcagcacataaatccaacacttaacattttggaaataaaaccaaaccatattttttgtacatcagaaagtgaaaggaagcaagaaatttgcattccttgttcaatatttaactcttgttattgattaccttcttgtaaggtgatgtagatatgtaatgtataagtgtataactaactatttagttcctattttaactcttgttattaagtaccttgatgtaaggtgatgtagatatgtaatgtataactaactagctatttacacactttatagacctgttctcgtctcaggcaatgatgattcatttgcaaca

SEQ ID NO: 70316 - DNA, 267 bp, Glycine max
  Clone ID: PAT_MRT3847_34506C.1
ggctcgagctcttccttacccattggtagaaaggaattgataagctcagtcataactatcacccttctgtggtatgttgctctcgcgcgagagagccatggccatgcataggttcctgaggaagaatattgggacgttgtttgggcacacgctctcatcaccactgcgctgggagagcttatagggcctcttgatgcaagagttgaagacgatgaacttgctaaggaggttgatgatactgagccgccatggccttattttatgaag

SEQ ID NO: 70317 - DNA, 2867 bp, Glycine max
  Clone ID: PAT_MRT3847_34507C.1
gttaatttgttagtctcggttagagaggattgagagacacaaagaagaatcatggaggtgaacaaccaaatcgtggagaggagcaagagggttaaagggagagtggttttgatgaagaagggtgtgttggacttccacgacatcaaagccaacgttctcgatcgagttcacgagttattaggcaagggtgtctctcttcagcttattagtgctactactcctgatccagcaaaggggttattgagagggaaggtggcaaacttggagaggtgggtttcgacgattacctctttgacatcaacaacagacacagagttctcagttacgtttgagtgggatgagagcatgggtgttcctggggcattcataatccgaaacaatcaccatagccagttctacctcaagacactgaccattgaagacattccagggcatgatggtcctgttaattttgtctgcaattcttgggtctaccctgctcatcgttacgcccatgatcgtgtcttctttgccaacaaggcttatcttccatgtcatacacctgagccactgcgcaagttcagggaacaagaactaaaaactctctgcgggaaagggttcgggaagcttaatgagtgggacagagtctatgactatgcatactacaatgatttgggacttccagatgatggtcctgactatgcacgccctgttcttggaggatcacaatttccatatccacgtagaggaagaactagtcgtccacattgcaaaacagatcctaaaactgagtcaagattgcatcttctaaatctaaacgtttatgtgccgagggatgaacagtttggccatgtcaagttttcagattttctggcatactcactgaaatctgttgctcaggttttgcttccagagattaaatctttgtgtgacaaaactattaatgagtttgacacctttgaagatgtacttgatatttatgagggaagtattaagcttccaagtggacctttagcgagtaaactgagagaacttgttccctatgagctgctgagagaacttattaggaatgatggtgagagattcctcaaattcccggtgcctgatgtgatcaaagtgagtaagactgcatggaggacagatgaggaatttgcaagggaaatgcttgcaggggttaaccctgttattatccgccgtcttcaggaatttcccccggccagcaagctagactccagagtctatggagaccaaactagttccatcagagcaacgcacatagaaaatagtttggatgggcttacaatagatgaggcaattcaaaatatgaggctatttatattagatcatcacgactcattgatgccatacattagtcgaataaactctaccaacacaaagaacttatgcctctagaacgctcctgtttctacaagatgacggtacactcgagccactggctatagagttaagcttaccccatccacaaggggaacaacatggagctgtgagcaaagttttcactccagcacaagaaggagtatcggcttcggtgtggcagctggctaaggcttatgcagccgtcaatgattcaggatatcatcaattggttagccactggttatacactcacgcagtaattgaaccgttcattatagccacaaacaggcagttgagtattcttcacccaatacacaagctcttgaagccacacttcagggacacaatgcatataaatgccttagcccggcacacgctcatcaatgctggaggggtactagagattacagttttccctggtaaattcgccttggaaatgtcgtccgttatatacaaaagttgggtattcaccgagcaggcactacctgctgatcttcttaagaggggaatggcaattcctgattcaagttctcgtcatggactaaggcttgtgatagaggattatccgtttgccgtggacggcatagaaatctgggatgcaatagaaacctgggtgactgaatactgtaacttctattacacatccaatgacatggtcgaggaagacagtgaacttcagagttggtggaaagaagtacgcaacgagggtcacggtgacttaaaagataggaattggtggccagacatgaagaccaaagaggaactcattcattcatgcaccattatcatatggcttgcttctgcattccatgcagctgtgaattttggacagtacccttttgctggatacctccctaaccgtccaacggtgagtcgtaggttcatgccggagcaaggtaccccagagtatgaggagcttaagtcagaccctgaattggcattcctcaaaacaatcactgcccagttccaaacacttgttggtgtgtcactgatagaagttctgtccaggcactcaactgaagaggtttaccttgggcaatgtgagaaccctgaatggactctagatgctgagccattggcagcatttgagaggttcagacagaagctgttggagattgagaacaatatcatggaaaggaacaaggacaagagattcaaaaacagaaatgggccggtgaagatgccttacacacttctctatcccaacacctcagattattctagggagggtggactaactggcaagggaatccccaacagtatatccatctaatacaacactcctacctttctatcttcccattaaattctatttcaagcaatttgtgtgtcgtgattactagagtgtataatttataacattgtttgtcttcagattaccatgttgcctgcctctgctttaattggttcaagctcgttgtgtaactggttttgattgaaaaaccatatcatcttttgggagcatcataaacaattgaaattgcaagtgttttggttaagcttcaagcttc

SEQ ID NO: 70318 - DNA, 254 bp, Glycine max
  Clone ID: PAT_MRT3847_34508C.1
gttggacctcagtctgggttcgaatgggactgagtgcgttactgctgcgttgtatatctggagtcgattggctcttttcgtattccctcatcgtgaattggcttgactctctcatcgctacagtactaagatctatgacatgtctcgttgctcgtgttttggaattgcaagttatgaccttcaatgtctacatctcggaatcatgtgtgtatcttgcaatacatcttatatgtatagatttaccacttcatgtg

SEQ ID NO: 70319 - DNA, 777 bp, Glycine max
  Clone ID: PAT_MRT3847_34509C.1
tacggctgcgagaagacgacagaaggggagtcacagtagggttaccttgcctcgcaaacgcagttgctttgctttgcaggtcgcaaaacgccacccttctctctctctctctcgtgatcctatctatctgtctatcatttaatttaatttcattctcttcctatcgaatctctctgcaacaccagcatccctgcatcaatgggcgcttctctgccccccaaggaggccaacctcttcaagcttattgtcaaatcatatgaaaccaaacaatataaaaagggtctcaaagccgctgatgccattttgaaaaaattcccagaccatggagaaactttatcgatgaagggtttgacattaaattgcatggatcgtaagtctgaagcatatgaacttgttcgtcaaggattaaagaatgaccttaaaagtcatgtttgctggcatgtttatggtctcctttatcggtccgacagagaatacagggaggcgatcaagtgctatcgaaatgcactgagaatagatcccgacaatattgaaattcttcgtgacctatcactcctacaggcacaaatgcgagatttgtcaggctttgttgagacaagacaacaacttttgactttgaagccaaatcatcgcatgaactggattggattttctgtagcccatcatttgaactctaattcattcaaagcagttgaaattttggaagcatatgaaggggactttggatgaggatcatcctccagaaaatgaaacggtgtgagcatgggggaaatgctt

SEQ ID NO: 70320 - DNA, 1124 bp, Glycine max
  Clone ID: PAT_MRT3847_3450C.1
ggcgtcgaggatcaatcggcgctcaaaaagttttcgactcttggcagcgcgaagcttggagcaccgtttctcatggcggttccaacatcggaaagcgaatccgtagagaacagaacattcctttcacaattttactctcactatctcggaaaccgaatccagactctctatccctacttctccacaaatttcttgtccaccttcgctctccgcttcagatcaacgcagcgtcgggaatgtctccctcttccgctaccttcctcttcactcgactctcccttgttcatgaccaagagatctagagtgcatgatgttttggaggatatattagagcgtgttttgataaatttgcatagcgtccaaaagaatctgcacttttggcagtccagagccaagagtacagattccgagaaggcacgtttcatgatatttgagaggggtccgagggcttttattgatgaaacagttaagttgttgtgtggcctcactgttcaaggttcgtccacacagaatctgagccaatctgcatctgattatattggcgagagagtaggctttttgaatagcttaagatattcactcgccacatttttggctcaggtttatatggaagttgataaaattggagaggagttggtggaagatccagagactaagctgcccttgttgttggttacaattaatgttttgttttcaacattagaagcttcaattggacatctgcatgcaacgcgtcagagtgattcttctgttgatgggagctattcaacccctctgctgtttgagaagctgccagaaataaatcaggaggggtctcagtggacagactgtgaaataagagatgctatcaattcagtttatcaaaatttagacaagttggattcatacatatcttttcttgtcatcaaacataaaaagccaaggaaaataactcaatattggatccgctatacatgtggtgcagttggtttgtcagtatgctccatttggctcttgcggcatagtagattggtggggagttctgatcttgataattgggttgaggaagctaggaactcaacatatagctttttcaagaatcacgtagaggaaccgattttgtccattaaggatgaactttttga

SEQ ID NO: 70321 - DNA, 811 bp, Glycine max
  unsure (1)..(811): unsure at all n locations
  Clone ID: PAT_MRT3847_34510C.1
gagtacacttgtcatgtgcctatacataatcataagggnggcccctaaanttttgttnattnnnatataattattgttattttaacaggactcggccgttggtttctcatgtatttgtactacgactactacttatagtgcagttcttaaaggttgtttgttagtctcacttattgagagagttgagagacacgaagaagaatcatggagaggagcaagagggtaaaagggagagtggttttgatgaagaagggtgtgttggacttccatgacatcaaagccaacgttctcgatcgagttcacgagttattgggcaagggtgtctctcttcagctcattagtgccactactcctgatccaggattgagagggaagctaggaaaggtggcacacttggagaggtgggtatcgacgatcacctctctgacatcagcaacagacacagagttcactgttacatttgagtgggatgagagcatgggtgttcctggggcattcataatccgaaacaatcaccatagccaattctacctcaagacagtgaccatcgaagacattcctgggcatggtcctgttaattttgtctgcaattcctggatctaccctgctcatcgttacgcccatgatcgtgtcttctttgccaacaaggcttatcttccatatcaaacacctgagccactgcgcaagttcagggaacaagaactaatagctctccgtggaaaaggcttcggaaagcttaatgagtgggacagagtctatgattatgcatactaccatgatttgggactttcagatgatgttcctgactatg

SEQ ID NO: 70322 - DNA, 250 bp, Glycine max
  Clone ID: PAT_MRT3847_34511C.1
gttgctatagatgatttaaaagtataaaatcattcttgtatgtttaccaaacaaattaagctttgggtgacatgatattagagtctctatgagcaagtggtctagagttggatccttgttttactcatccttctaataaaagttggagttcatcacaaggttgttagataggcatgtgctctgtgcattgtccacaatttaaacccaaaggccttctgcacgaggggtgtgttataaaatgaaagtatgg

SEQ ID NO: 70323 - DNA, 249 bp, Glycine max
  Clone ID: PAT_MRT3847_34512C.1
gtcgggatgcctgcgatgcagttacactgtactactagtgatcatccctctgagatgtggggcttcgtcaagaacgatgatcggaatatagcgaaagcctagtcagccgataccctatggaaagagcttgtatatgtaaggagaatgctttctgcgagcaaggatatgagagggagagagttgcatgagattccagagcaagtcctgccacggttcgcaagtaagtccaatcgccctgcgggtttgagg

SEQ ID NO: 70324 - DNA, 510 bp, Glycine max
  Clone ID: PAT_MRT3847_34513C.1
gctgaccacttagctcccaatcacaatcattcacaaggacaagaactccaggtctcctccacaacaaatcgcatgcaaccaaaatattaattagcaccataatatcataggtaatcttaaattagcttaagcaaaaatatttctttgtcctcaatttctcctcctgtccaattaaatgcctgttctgtgtgctaatgaggaacctaactaattactacacaggaaaagactcctttaaagtgagcaacagcatattcacattaaaccatttacctggttaagattacaatacacttcagattaaatcaatggtaaacatacccttgctctcttcataaacaagctagctttagaagatcttccttcctattatcaatgcttaatccaaatgtattcagattataaaacttacacagtatttcctttcatgaacatttcaggcctctccttaatcaagttggttcgtacccaagcaagcaaatctttcatgattaactcagaaagaatgaa

SEQ ID NO: 70325 - DNA, 568 bp, Glycine max
  unsure (1)..(568): unsure at all n locations
  Clone ID: PAT_MRT3847_34514C.1
gccaattatatatatccataatcccttccttcacataactctcctctcaatggattgctggcacaaaatcactaagacttggacttcactctctactcgtttcaaacatcatcgcaaatctagtcagtcctctctctctcttcctttctttattattctcaatatatccaaatcttttttattttatcatcttcataggtggtcgagttggtggtgccgctcaatactctgccgattgtgacggaatcagtgccggtttgctcaagcttcgagatgatgtgcaaatgtgcggctacagagatgttcaggtcatgtggaacatgttgaacgtaagtttgcaacatgaccaaatgccaatggaagcagccagaagaagctccaacaacgctaaatttcgcaagcgtggctgcagcaagcagagatcaatttgngagggtcttgttttggactaaccgtgacaacctcgtgaatgtacagtaaattaaaaatgattatcatcaagttttgcacagtggaaataattaatgtcaatgttttgtnnntagtcaaggacaatgaaactttattt

SEQ ID NO: 70326 - DNA, 282 bp, Glycine max
  Clone ID: PAT_MRT3847_34515C.1
gatgaggaacatggacagttcacagctttctaggcacatgaacaaccatcacgtggaggagcatgcagagattcttagatcatggagctccaggcatgcacatatgactcatcacatatcgtagaaaggtgcttcgactgctactcgtcacctgcaagtgtgtgctgacagctgtgtgatgtgtcagtctcctcctcttcagctcctgagatgtacactcgtcatcatcaactggcatttatgcgttacccatttatgccatgtgcgccctatattatccag

SEQ ID NO: 70327 - DNA, 790 bp, Glycine max
  unsure (1)..(790): unsure at all n locations
  Clone ID: PAT_MRT3847_34516C.1
cgaatctctcaaaatatcctcataatggccccacaatgacttgcagttacactctcacgatcttgtttcagaaagaacagagtaaccttgcttttaaggataggatatatttttttttcctttctggaaaagagtgaagagaccaccgtcatgttatagcatttgacccactcttaatcggcctgcatacgtaggactcttacccttcttcagtttttctcattttctggttctgttgttgcagacgctgacatgacaaaacacgcttcttcctaatcaatcctctttgctactttgactcaccaatataaatatcaattataaattgccgtatccattgcttcatttcactctttctcttctcacattgcttccttcctttcttttcttcaaatggaaaaaaaggtccttttttttgtctccattctcttattcattgctctgctatttcatggaggaaaggttttagctttcaagagccaagacggatcagaggaatggggatacgttcaagtcagacccaaagcgcacatgttttggtggcattataaaagtccatatagagtggaagatccttctaagccgtggccaattgttctatggttgcaaggaggacctggtgcttcaggagttgggattggaaattttgaggaggttgggcctttagacacaagcttgaagccaaggaactccacatggttgaaaaaagctgatctcttgtttgtggacaatccagttggaaccgggtacagttttgtggaggataaaaaactctntgtcaaaacagatg

SEQ ID NO: 70328 - DNA, 447 bp, Glycine max
  Clone ID: PAT_MRT3847_34517C.1
gagagaactagtctcgagtttttttagcgttaaacacgagagagggaaataaggcatataagtatatatttttatttttattctatggtatttttttttctgtgtcaaaagacaagaaaccaagtgggtaagaagcctcattttcaacacttggaaggtgcaataaatgatttgcatccaaaggggaaggagaaattagatataggcctcacaaggttccatcatttgtttgattattagagccccgttaggtggtgctggtcacgtatgtctcatggaatatctacgtgacatagctgttgtttccttattattgcatgttaagtcaaataattttgtgtataccctaatgttcctcctcctgtttggattggaccaatattgttcatcgaatgaagactactaatagtattattattattgtactacttaaatagagtctcttgc

SEQ ID NO: 70329 - DNA, 353 bp, Glycine max
  Clone ID: PAT_MRT3847_34518C.1
catgaaacgtcacagctcttctgtagagtcagcctaatttgaattaactgcccgccttttgggggcggccctttctgggaaaaccatgttatttacccatttcttgcgacttgtatctctttttttttttggccttatgtcaaattagggggccggtttttaccaatcgggattggaaaaaccccggggttctcccaatttaaatgggttgggccctgttccccttttttaaggtgggggtatttggaagtggcccccaccgatacccctttcctaacaagggccctaccgaatggtcaattggctccccccctttacttgctcttaaagcgggggggtttgggggttacccc

SEQ ID NO: 70330 - DNA, 308 bp, Glycine max
  Clone ID: PAT_MRT3847_34519C.1
ggctcgagcttttgctcaacgatccccactttaactccatgttgccatcatctgtttgttttgacagtcaccggtgatcgtaaaacacttaatacaaacttcatcatgtttttactttactctactgctgggatttcatgaacaactttatatgcattcttcaagctaacgtgggttgtgataatgggccctgctgacactccagaggaatgatgcaccattaaattaacttttcaatcaccggactatttttctgaataaccaatatctgaacgaagtccgcatttgatgtcatcttagaatactat

SEQ ID NO: 70331 - DNA, 158 bp, Glycine max
  unsure (1)..(158): unsure at all n locations
  Clone ID: PAT_MRT3847_3451C.1
cgcatgcacgcgtacgtaagctcggaattcggctcgagcacgnttgaggtgtgagcnataactctgttanggaagaananagtgagantgaanatgctcntgcaanctccaattcctctctngttgggntcaacacttgtctcccgggcnaacccaag

SEQ ID NO: 70332 - DNA, 143 bp, Glycine max
  Clone ID: PAT_MRT3847_34520C.1
gtgtgaggtaactatacttatagctaaaatccacacgacttcttcctctctttccgactatatctctttctctctctccctcgagctaattcctcatgttatgggttgtaaggcaacagacacaataccatgacccctttttg

SEQ ID NO: 70333 - DNA, 219 bp, Glycine max
  Clone ID: PAT_MRT3847_34521C.1
atggctactaatggtccacttaagagaaaatctccaccagatgatgattctgtcaacttaaaaatcaaacttcagaatttggattacgagacgctgaagttcatttatgacggttttaacattaaggggaaacatacagcaagaatgcttaatatggaagatgatgctgagatcgtggccataagatcacaaattggaggtggtgctgcagcactttga

SEQ ID NO: 70334 - DNA, 1093 bp, Glycine max
  Clone ID: PAT_MRT3847_34522C.1
cacgtcatattatctattctaccggacttatctaagtaagttgtctttcttctctttttctatctctaggtgtattacagtatccatgaatcatttttacatatataattattcagaaatggctgatgttcaactgcagacatgaaatataaaactatttttaaacttacagcactccttttttttttttttttgaaaaatactgtttgcaactgtgtagcttatgcttgcaactgtttttcctcccatttgtcgatactatatgtcactttaaataagttttggaataaaatcttatgagaggaaataaataaaagaaagcaaaatatttttttttttcacatcacttcaaatcaaattacctactttgtttttttttaaaagtacttttcttttagcttttctcaaacacctacaaatttataatgtatattttgtaaattaaaaatcaaacacttctagttgaaaatttgtcaaaaggtaaactgaattgaacctataaatgtcctgtgtaacaggatccgttgaagttcaaagaagaatttgcacgaggttgcaattctcaacaccaccgttcgttgctattgaaatgtttgcaaatagacacgttttattccaaaggaaacatggaaccaagacttcaatgtgatggcttattgaagaacagttaggagaattgataaaaatttaaacatatgaagcctaatatttctcaatataattttagaaagtatgcttaattgtaaaatccgtttccttgtttttgttaattttaccaaattgatccttcctttttttctcatctactatttgagtcctcctatattttaaagttcattatcttagtcctcagagttgattttaaccgttgattaaataaatagatatctatagttataaatttttgtttgtagtccccattaatcaaatcaaaaactcatttctataagaacaactaatcatagcaatcaattatatccttttaaaattgttagattaagtacataataatactttttctctataaaaaaagataaaattagttccatttaggaactcctgaataaaatatgaatacattagattaggctgc

SEQ ID NO: 70335 - DNA, 123 bp, Glycine max
  Clone ID: PAT_MRT3847_34523C.1
cctctagtcttatacaacattctaattagtcttcatactctttaatattgagcaggagtaatttcatgaattttacaagaaatatcaaatgtcttgagtgtaaacattttgcggacgcgtggg

SEQ ID NO: 70336 - DNA, 502 bp, Glycine max
  Clone ID: PAT_MRT3847_34524C.1
atgaattgtttttttattccttattatttttttggagcggaccaaaattaaggtttactcagccccaaaaaaagtatccacattttgggccgagaaataaacaggcgggagaataaattctttagagagaagttctgcaacatccactactatacgtttgaatttacgcggccacaaaaagagccctgcaaaaaacatatgactaatattcttccgaccaaaaaccgaagtggtgcagtctctcccagcgtgaattaaatagacccttcctttgcccaaatgttagatgatttaaggtgaacctcgggggccatttacgggtggggctacaaatttttggagagaaggaccaacccgttgggcatcataaacgtttttacacagagtatatcgcgagcgggcggccttccctcctttgttttttaaaccaagggggtacgtggtattcattgggaaaactcccgacaggatctgtttaaaggccaacttgtgtccaccttaa

SEQ ID NO: 70337 - DNA, 813 bp, Glycine max
  unsure (1)..(813): unsure at all n locations
  Clone ID: PAT_MRT3847_34525C.1
gccatgcttgacaaatttcccgaaaaatatgaacctgctgtttggtggccttcatctcatcagttccaaagaagaagtaaaacacaagagagtaacaatggatggagtgaagatctagaaatggaaatgagggaagtgattgaagtggtatacggctgccagaagacgacagaaggggactatgagaggcttgggaacatagcgttgaaggtaaacaggagtttggcgattgcagggcctctattgagtggcatagcagcggtggggacttcatttgtgggtaatggatcgtgggcggcgttagtgcctctcatggctggttcattagcttcagttgttaatgcttttgagcatggtggccaaataggcatggtctttgaaatgtacagaaactgtgggggattcttcacgcttttggaacagactattcaagctacacttgaagagaaaaacttggacaaaagagaaaatggtgaagtatttgaaatgaaggtagcaatgaagttgggaagaagcgttttggagctgagacgacttgcctcaaaatctgcttcctgttgtatgaaaggaatcacagtagatgaattcgccagcaagcttttttaatcaagataaaatttcataagggatgatgcaatattcttttattttctttattaattgtatagtcttctgacatttataactttataccaaagacagaatgtatatatatgtatgtaccttcagcccattgactcaatgatcgatatttacttctcacaannnanaaaaaaaaaaaaaaaaaaaaaaaaaaaaaaaaaaaaaaaaaaa

SEQ ID NO: 70338 - DNA, 786 bp, Glycine max
  Clone ID: PAT_MRT3847_34526C.1
gccatgcttgacaaatttcccgaaaaatatgaacctgctgtttggtggccttcatctcatcagttccaaagaagaagtaaaacacaagagagtaacaatggatggagtgaagatctagaaatggaaatgagggaagtgattgaagtggtaaagaataaagacttagaggattatgagaggcttgggaacatagctttgaaggtaaacaagagtttggcgattgcagggcctctattgagtggcattgcagcagtggggtcttcatttgttggtaatggatcgtgggcagcattagtacctctcgttgctggctcattggcttcagcagttaatgcttttgagcatggtggccaagtaggtatggtctttgaaatgtacagaaactgtggcggattcttcacgcttttggaacagactattcaagccacacttgaagagaaaaacttggacaaaagagaaaatggtcaagtgttcgaaatgaaggtagcaatgaagttgggaagaagcgtttcggagttgagacgacttgcctcaaaatctgcttcctgtcgcatggaaggaattgccgtagatgaattcgccagcaagcttttttaattaggacaacatttcatcacgaattacacgcaatattcttttattcattattttttttttgttacatattctttactaattgtatagtcctctgacacagctttattacatactgtacatatatttgtacgtacgttcatgtaactgactcaatgatcgatatttacttctcaccatttttcttgtctt

SEQ ID NO: 70339 - DNA, 315 bp, Glycine max
  Clone ID: PAT_MRT3847_34527C.1
gatcactcggtggggacagaagtggcagttagttgctctgcagaggaatcctcatctggttcagcaacggcatttatcgttgcaatctacgtatagtatgtggaagtttggtgtaatacaataggattcttccgatcaggttggtcacagtcgaagtccagttcacacatggagcgctgacgatgtgccgttcagtgatcctcacgaggatgctagagatgtttcggaaagttcacctgcaatgacatccagatctgcttccacttcacatgacgcgccaaattgggtttcgttccgtatccattcgctaatctc

SEQ ID NO: 70340 - DNA, 213 bp, Glycine max
  unsure (1)..(213): unsure at all n locations
  Clone ID: PAT_MRT3847_34528C.1
ccctcacttccaccaattctttcttttattttaacctcatcttcttctactcaaaggcagatttctacataaggaactctcgcccaatnatctaccttcctaatccactcactttccctgtcatgtgttaattcacacttactcatcattacaacttccctcatttttctcattcacaacttacaaaacacaaccatataaactccctaaatc

SEQ ID NO: 70341 - DNA, 102 bp, Glycine max
  Clone ID: PAT_MRT3847_34529C.1
tcatagcgaggggcgggctctaaattgatcgagtatatttcgggaacaggcgtgcacagaagatctggcacaagtaggcatgggagctcttggtgctagcct

SEQ ID NO: 70342 - DNA, 198 bp, Glycine max
  unsure (1)..(198): unsure at all n locations
  Clone ID: PAT_MRT3847_3452C.1
acacaacaangggagacgagaagaagggcaagccngcngnnnccggngngnggnccaccannaagccnnncgtttttggnggagcctncggnatgctgggggggggngtnattnaacccatngatatgataaaggtgaggatttaagtggggnaaggatcagntgggtagggnaggtnaaacatgcttaagaatgagg

SEQ ID NO: 70343 - DNA, 524 bp, Glycine max
  Clone ID: PAT_MRT3847_34530C.1
gtgataacatgggctcaacttggcatccatgataaaccggtgggattgctgaatgttgatggatactacaaaacctttttgtcttttattgacaaagcggtggaggaaggcttcatcagccccactgctcgccatataattgtatctgccccaacaccaaaagagcttgtcaaagagatggaggaatatttcccacaacatgaaagagttgtctctaagctaagctgggaaagtgaacagctacattagtcctcactttgtcaaatccaatggtgatttagatgatgatgatgatggaagtttgtgtagagggtagttgttagttagaatttcgaagtcatagagactactatcctaggtgaccacaattttctggagccagattctttgtgctcttacatttccttgttagtgtaaacatttgattgcaatctagctatgaaggctaactactttgttcaacctgaaggttcacccctgtgttcgttctaaaaaaaaaaaaaaaaaaaaaaaaaaaaacgaca

SEQ ID NO: 70344 - DNA, 1299 bp, Glycine max
  Clone ID: PAT_MRT3847_34531C.1
cccgtcggcggccgggggccgagtctatcttttcctccgattacaactccggcgttcgttctcaattcctggtttcgcttcaacgactcaccgaatcggcgcaaatcttgctcgcggagttcgagtccacgatccagaaaggcacttcaaagccggcggtgaacggcggcggcgtgcactcgctcacgattcagacgatgaattacctttcagtcctcgccgattatctcaacgtgctctcggatatatttccgcgcgactggcttccaccgcagaagtcgtcatctctgccggaatcttatttatacagtccagaatctgattactcggcgtcgacgccggcgctgacagcgcgttttgcgtggctgattctcgtcctcctttgcaagctcgacggcaaagcgaagcattgcaaggacgtttcgctttcttatctgtttctcgcgaacaatctctggtacgtggtggccagagtccgaagctcgaacctgcagtacgtgcttggcgacgattggatccttaagcacgaagctaaagcgaaacggttcgtttcgaactacgagaaggtggcgtggggagaagtggtttcgtcattgccggaaaatccagccgcggcggaggcgagggaggtgttcgagagcttcaaccgcaaattcgaggaagggtatcggaaacagaactcattcgtcgtagctgaccgagaattaagagacgaaataaaaggttcgatcgcgagaagtatagtgccgagatatcgcgagtggtataatgttcttcttgctaaggttggatcagtgagggacttgacggcgacggagtacgtgacgtttacccctgaggatattgaaaattacctcgttaacctcttcttttttggaacctcatccagtgctgtatcgtcctcgtcggtatcgtcgtcccctctccggcgttggagttaagtgcacagtttgaacgggcgagtttttttcgccctcatttttcttgattgtagtaatgagtatagagttttgacatagacaacaaaagctataccgactttttcagttttctgcgtgtggtacacgtaagcatgacttcttcgtgtagtttccactttttactttcagactttcatgatgtatacttctaaaccaaaaactggataaattcgttatttgtgtacaataatattttgtctaattcattaacttaatattattatatttatacgtataaatatattaatatatttatacaaataaatctgcgcacaaaagaacgtgcagctactattgatgtgcgtttgttttctttctt

SEQ ID NO: 70345 - DNA, 449 bp, Glycine max
  Clone ID: PAT_MRT3847_34532C.1
cttggtttttattttttttttttttttttttttttttttttttgtttttttttttttttttaagcggggtgatgggtggaaagagtaatcatttattgccccagggtttattccttggatgattttccaaattttcaaaatttaaacgcaatttatataaaatttacccttatccaaactaacaattttttacgatcactgtcttacaaatctaaaggagtcccctttctttgggaacttgccgacaaattagatgaatgccctatttcttggccaaaattttttgacagtttggggggggcaattttctcagctgccacagatcttgtctccagtggggcttgctgttttttcaaatgctttaaccgtagataattgtcccccgcccaaattaaatggggcaaaaacttttgggggggggtaatgaggatatgccaccctatttttcc

SEQ ID NO: 70346 - DNA, 950 bp, Glycine max
  Clone ID: PAT_MRT3847_34533C.1
gaacacgtactgaagaatagcagcaagtagtagctcttgacccttctttccaccttttctggtccctccctccagaaatggcttctaattccattcttcttctttgtatctttcttgtggttgccactaaggttttttcctatgatgaagatctcaagacagtggttcctgcacctgctccaccagtgaaggcaccaactcttgcccctccagtgaaatcaccatcttaccctccagggccagtgaccacaccaacagttccaacacccactgttaaggtaccccctccccctcagtctccagtagttaagccaccaacaccaacagttccaccacccactgttaaggtaccccctccccctcagtctccagtagtaaagccaccaactccaacaccaacttccccagtggtgtaccctcctcctgttgctccatctccaccagctcctgtagtgaaatcaaacaaggattgcattccactatgtgattataggtgctcattacactcaaggaagaaattgtgcatgagagcatgcataacctgttgtgaccgatgcaaatgtgtccctcctggaacttatggtaacagggaaaagtgtggcaagtgctacactgacatgctgactcacggcaacaaattcaagtgcccatagaagaagcctaatatctagtaacttacctaagcttttttgttaatcaagtttgaatcatgagtaatgtggtttgagttgctagtgtatttaataaccgagagtgataatcataattgtacaagctatcgtgttaatcaaaatagtcaacactgtttgtgttgtctataggatccatttgtggtccatgaagaagtttatattcataatgattaatataaggatgtattgctgtacgaaattcagaactataattaaatatgaatatgaccttgctaaaaaaaaaaaaaaaaaagagaa

SEQ ID NO: 70347 - DNA, 396 bp, Glycine max
  Clone ID: PAT_MRT3847_34534C.1
gatgtacttgtcattggtacttcttggtttcttgcatggaccggtctcctgcccggtcggctcgagctcccttgctcctcctgcagctcgcccattctttgggcggggggggcatcgttcgtcgtcctccggatttgcattggctaccattgcattgagcacttgaatgcaacctgggttggagcaagtgtttggtcttccccgagattcgtatcttcagggttatttcaatcatgtttctgaacatcttagaattggacctcctgtgtattttgttgtgaaaaactataactacagctcagaatcaacgcatacaaatcagctttgctccatagccattgcagatcagactctcttttaactagagtgcgagagcagcccttggatcagacacaa

SEQ ID NO: 70348 - DNA, 401 bp, Glycine max
  Clone ID: PAT_MRT3847_34535C.1
gttaaaatgttttttacggttcatcgtttttcaaaatttaaatttgggaaaattaagtttaaaaacgggacataaaactatttatgaaagggggcaattttttttatcacgaagctgcaatttgtaataagccattgggcctaaacaatgcctccgggggggggtgtgttccacggaatggcccaaaaacctgcacacagcaacctttcgtgttccccccattacgtaaacatgggaaggcttatattgaatttcgcccattaaaacaggggccaaaaaagattaagttgggacgtatgggccgtaacatttaaggggggttttgccccccccctagccaaaaaggtctcccggatattgcgccccctttcccctactgcccccgcccccgttaagacttt

SEQ ID NO: 70349 - DNA, 932 bp, Glycine max
  Clone ID: PAT_MRT3847_34536C.1
aaatacgaatgtaaaaaaatacaaacccacgcgtccggaagaatagctagtactagctcttgacccttcttcccacctttttctggtccctcctagaaatggcttccaattccattcttcttctttgtatctttcttgtggttgccacaaaggttttttcctatgatgaagatctcaagacagtggttcctgcacctgctccaccagtgaaggcaccaactcctgcctctccagtgaaatcaccatcttaccctccagggtcagtgaccacaccaactgttaaggtgccccctcctcctcagtccccagtagtgaagccaccaactccaacaccagcccctgttaaggtaccccctccacagtccccagtagtgaagccaccaacaccaacatccccagtggtgtaccctcctcctcctgttgctccatctccaccagctcctgtagtgaaatcaaagaaggattgcattccactatgtgattataggtgctcattacactcaaggaagagattgtgcatgagagcatgcatgacctgttgtgaccgctgcaaatgtgttcctcctggaacttatggtaacagggaaaagtgtggcaagtgctacactgacatgttgacacacggcaacaaattcaagtgcccatagaagcctaatatctagctagtaccttattacctatgttttttttttttgtttaagtaattaagtttgaatcatgagtatgtggtttgagttgctagtgtatttaataaccgagtgatcatcataaattatactagttatcgtgttaatcacaatagtcaacactgtttgtgttgtctataggatccatttgtggtccatgaaaaagtttatattcatatgattaatataaggaagtatttgctgtacgaaattcaggactataattaatatgaatatgaccttgtt

SEQ ID NO: 70350 - DNA, 519 bp, Glycine max
  Clone ID: PAT_MRT3847_34537C.1
gagatgttttttcctcaaactggattaatgattgatttctaggttttgcatcgaggttaaccaacacctgatagtaacaacgtatacaatggtgaaatggagaagaaaaaagggaaaatagttctaggcttttgagaggcctagtctctcccactagtccctcctagcctatattctctctaactacacactctccccctctaactttctgccagcttggcagtttgttacaccatttttttttgtttaattccattcaggtgcaccgcaacccattgtctggccttacacctgcactctgccgcactcttcttttgtaaactttggtgatcttgggccttgggcttgtatcaaataataactgtttgatgattgttgaatgaatcccaacataatgctgctaatggtcattggtggaagaggtatggcaataaaaatgtaaaatagaagtcttcttgtttttatgaatttaagaaagcttttggtaattgctgacgaatgcagtcacagtaacattag

SEQ ID NO: 70351 - DNA, 409 bp, Glycine max
  Clone ID: PAT_MRT3847_34538C.1
tttttcgtaacttactgaactttattttattcattatgttgcttttacaataaaatcttatgctacatcgaaattaacttttcacttgactgtgaataaattttttaaaattattttcttataatttatttatgatgttttattttaataacaaatgttatattgaaatcattcaacacgatgtcaattttttatcaaccaacttttgacaaaagattgtcgaagcatctaatatccttttttcgtaccacacatgattgtttgtatgtgaatacataattaataggaaccagctcaatattgttagcaggtacatgagtcactttttcccgatgttccttgcagattgttaagattggtttggtcttgggaattctctataaagttcctcctcactttcttaggtcta

SEQ ID NO: 70352 - DNA, 305 bp, Glycine max
  Clone ID: PAT_MRT3847_34539C.1
gtggacttggagaaagcactgcggcattttcatcaaatcttattccattcacatttatttttaccatgccacgtacttaaaaaggtgaaggttcaggttttgaccatctaacccaaaaccccctaatgttttttctatcccactttttggggccccaaaggcctatccgtggtctaattaaacaacaacgttggctggttaggcacacgtccatagataaattggggccccataaaatggtcttgattcccaggaatttgacaacggggtaagctccattgtcacctcccatggagacactaacc

SEQ ID NO: 70353 - DNA, 489 bp, Glycine max
  Clone ID: PAT_MRT3847_3453C.1
cttcttatagcttcatcccaaaaagctcttttccttctaaatttgattccttagttcagcattctattattatatatggcttcttcaccttcctcagaaaacaaaaacctagagggagtagctggtggtgccggagagaaacccattccacttggtgagaacgttctgcagaagcatgctgcattctttgacttgaataaagatggtgtcatctacccatgggagacttttaaagggaaagtttccatctatactttttccaattgaaattaaaaatatccaacgcggcaaacacggcagtgacactggagtctacgatactgaaggaaggtagttgttcaaatatttcttttttcatatctttattgctttcattttagtcatctaattaattataaaacatttgggttacatatttattttcaatgtcattgataaatctttcttacatagtgtactttatgataaatcttttaggtttgtaccttc

SEQ ID NO: 70354 - DNA, 512 bp, Glycine max
  Clone ID: PAT_MRT3847_34540C.1
aaggatttttatttgacattatattatgtacatgtgtttatgcgactacatatcatattagtgatggtatattttatggagtagccatagcatccattttaagattatacttaaaggaatcacatgaggattaatatgataacttgtaattgattgtgtttactatattatgtacatgtgtttaccctaatgtttatgttgttatctacgaggctcattggagatgtatgtatgagaaaacacattatggaaatgacagatctggtgactcaacttaagtcgctccaggttgaaatttctgagccattcatggtgcacctaattttgaattcactctcatcacagtatggccccttcagatatcatacaacacacataaagagaaatggtcaatcaatgaacttctgaccatgtgtgtccaggaggaaggaagacttgctcaataaattggtgaaggttctcttagcgtgactcaagataaggggaagaaggaaaaaagaggaaaagaacca

SEQ ID NO: 70355 - DNA, 1167 bp, Glycine max
  Clone ID: PAT_MRT3847_34541C.1
aaatagattaattttgagatagccaaatgaaaatgggcatcgtccaaagactgtgttctagttggagtaacgttttcagattgggcaacaggaacagttacagttcttttaataaatctgttgatcccacaaacccatcatgttccagttcttccttcctcacgcatggaatccacgtgtttcaatgccccgatgcggttggaattgtagccaatctatcggattgcattgcttctcggggtggcaacattctctctgctgatgtttttgtacctcaaaataaacgagtcttctactccagaaatgtttttgtttttgatcctgtcatgtggcctcgaatgcaaatggaggaggatttcctaaggatctctaaaacattcaatgccatgagatctgttataagggtgccagctctggatcctaaatataagattgctattctcgtagcaaagcaggaccactgtctgattgatttgttacatggatggcaggatggaagactctcagtggatatcacttgtgtaattagtaaccattatcgaagtccagaaaatgaggtgattcgttttcttgacatgcacggtgttccttatcattatttgagaacaacagcagagaataaaagagaagaggagatcttggagctggttcaaaatactgattttttagtacttgcgaggtctatgcggatactatccagcttctttttaaggagttatgggaaggatataattaacatccaccatggcctgttaccatcatttagcggtagcaatccatctaaacaggccgttgatgcaggtgtgaaattaattggtgcaacaagtcactttgtgactgagggacttgatgctggacctattattgaacaaatggttgaaagagtttcccatagagataacttgcagagctatgtgcagaaatcagagaaccttgagaaacaatgcctcacaagcgctatcaggtcttattgtgagcttcgagtgttgccatatgaaaaaaagaatactgtcgtattttgaggacaaacaacaattatacactctgccaaatgggggtatatctctataagtgcatatgattatttacttcaaaagcccacgctatgcttatatttggataaacttatcaataattactttaaaaaaaagttgttaaaatgaatta

SEQ ID NO: 70356 - DNA, 192 bp, Glycine max
  unsure (1)..(192): unsure at all n locations
  Clone ID: PAT_MRT3847_34542C.1
atgtgtcgttgacagngaacaagttccccgacagacagccgattcggacggcggcgaagagccaagacgacggcaaggactaccaggtgccgctgtcggcgccagctggatgacacgacgcgatttacgtcatggtcgttttacatagcagggatagcaggatttgttgccattttctgactctctacatca

SEQ ID NO: 70357 - DNA, 168 bp, Glycine max
  unsure (1)..(168): unsure at all n locations
  Clone ID: PAT_MRT3847_34543C.1
ctncanncngattcnggttccgagntttatnaaccgtggcnatgagtatagntccggattggaanattgataaggcctgatctnnnaaggntagagaagtgggtatttacgcaatgcattgatgacgttaagattccatatttanccaagcacatnttgtacaggcag

SEQ ID NO: 70358 - DNA, 562 bp, Glycine max
  unsure (1)..(562): unsure at all n locations
  Clone ID: PAT_MRT3847_34544C.1
tcatggatccaatggagagacttcttcacccatggagggtctcaacggtaatagcgttgacaatagccaaaagcgcgctgtgccacctatgcacagctgcaaatattcccaaaagaggagtaagaaaactaaggagtcacagtttgatttgagtccttcagttggaggtatcagtgtggccacaagggaagatggtgatcgcgaattggttaatcttgtgctcatgacttatgattctcttcggagaaggctctgccaacttgaagatgccaaggagttgaacacaacgatggcaatcaagcgtgcagatttaagagcaagcaatgcgatgacagtcaaagcatttagaacaaacacgaggaggagagtaggagcagtgcctggggttgagattggggacattttctttttgcggatggaaatgtgtcttgtgggtttacatggccagtcgatgagcggaattgactacatgaccatcaaggatgagcttcaggaggaaccagtggctctaagcattgtttcatcaggagtatatgataatgatgccgangataatgatgtt

SEQ ID NO: 70359 - DNA, 310 bp, Glycine max
  Clone ID: PAT_MRT3847_34545C.1
ccttgtggggaatggcggggactgtggttgaggcgcaaggccacaccgttcctggcctcgggggggggaagaacttttttattctctgacaaccggatccgcctcttatccgttggagccatgacaaatttccgggcttttttctgcgaccggggatctgacttggccgggtggggggcggctagctcccacacccagactggggtgatgtttgccgccacctctttgatgaacgcggtgtactagacctgctggggttagggctgaacccacgtggcgtatgaacggtttttattgaagaggtggccgg

SEQ ID NO: 70360 - DNA, 403 bp, Glycine max
  Clone ID: PAT_MRT3847_34546C.1
agcttattcattagttctcatccattaatttccattggaggccgaaaacagaaaccaaaaattccgggtggtgaaatttcattaaggaaaaacaaaggggaatgtggtttaagtacaacaaacaaaggggggggggtaccgatgctttgcaaatttttcaatgacttaaaaacctgggggcttgtaggcgaaaaaactgatgcactggacttggggaacgttgtcaaatcccatgattcgggtgaagcccttgggggatgcagtcttagcctcttgaagctccttcaacacctgggaagcattagtgcagccaaacatagggggcttccacatgggccagtagcggccattataatatccaggggacctgttgtgctcacgggacacaaaaccgtgctccaac

SEQ ID NO: 70361 - DNA, 399 bp, Glycine max
  Clone ID: PAT_MRT3847_34547C.1
agatgaaaaaacatcacagttttttttttttttttgaacggccaaaatttttttaaatagataataaaagatactttgtcccagaggcactacaagaaaccacaggaggttggatctcctaaattaaaaataaacaagggcccaaaccaagattgcttcataacaagaaaatggactatttgaaccatgtaaaaatttttttttgaggaaaaaatgttgaagaactagcgtgcactaaatttaaggattagacaccatggttatcttagaaacaaataactggaatgtcggtactccaagattaagaaacaacgcaattttaaaatgcactgcaagaaaaagaagaaaatggattagcttgccctaatccatttttaatttagctgcctgactaccggc

SEQ ID NO: 70362 - DNA, 344 bp, Glycine max
  Clone ID: PAT_MRT3847_34548C.1
aattaaacatattctttaaggtccaaatcactcgcttattgttttctttacatacacatgcagacaataaggtctaacaagttcaagactggcatgggcttgtttcaacgggctaaggccgtgctgctccagaggcacacatacaagtcactgctagacgaggacaacagggatctcgggactaccagaacaaaaggctcacttgaaagctcgccagggacgagggaatacagggaggtatgctgaaacataacatcgtctgcagagcgtgtacggtaagttcatctaactctgcaaccaccggtacatattggacatgaacgagcagcaggtcctgcagacgc

SEQ ID NO: 70363 - DNA, 236 bp, Glycine max
  Clone ID: PAT_MRT3847_34549C.1
ggtcttgaattaccggtcgacggcgcgtacgtcctgaacctctgcatgacgagtcccaagactaccatgctatgcgaaggaccaagcttaggggtgggtgccctgctgcagctgtgactcggggatctgcggtcaactctgaaagccctgactgactgccacaggcttctacatgctctgaacttggatcgcatgcgtccttaaaaggatctagcccttatggtaatgatgatccc

SEQ ID NO: 70364 - DNA, 878 bp, Glycine max
  Clone ID: PAT_MRT3847_3454C.1
gatcttcttatagcttcatcccaaaaagctcttttccttctaaatttgattccttagttcagcattctattattatatatggcttcttcaccttcctcagaaaacaaaaacctagagggagtagctggtggtgccggagagaaacccattccacttggtgagaacgttctgcagaagcatgctgcattctttgacttgaataaagatggtgtcatctacccatgggagacttttaaagggttgcgtgaaatcgggactggggttttgctgtccgttggaggtgctattttcatcaatgtgtttctcagtcagaggaaagtttccatctatactttttccaattgaaattaaaaatatccaacgcggcaaacacggcagtgacactggagtctacgatactgaaggaaggtttgtaccttcaaaatttgaagaaatttttaacaagcatgcacatacacatccaaatgctttgacatatgatgagttaacggagatgataaaggcaaatagagagcctaaagatttctcaggaaggattggtagtgtggttgaatggaaaattctttacaaacttgctaaagataagagtggattactgcagaaagaaacaatccgaggtgtttacgatggaagtttatttgaacaactgaaaaaacaacactcttcaggcaaagagaagtagtaatatttttcagacacgtatgtgaaaagaagaagttacttgtcgatctcagcaaaattggttatttttatgaatttatatgctagtaagttagtcacaatattcaaagtgtctgtttatttttatgttcatcaataatgtatatgtcaagtcaaacttatgtgtcatctatcatgttgaattcatccgaaaagca

SEQ ID NO: 70365 - DNA, 493 bp, Glycine max
  Clone ID: PAT_MRT3847_34550C.1
tcgcccatgcgtccgatcaatacaatgaggttcaggctcagatggaaacaaatttgcttaaattgtctcttgatgatgttcaaactcctaaagggtccatgtcggatcttaaaatctctcaatctaacattgcacgttccaaagacacagatggaggaaccattctgcgtactgatctattggcagattttttgacagagggcaattttagagctagcgttgatttgcaagccactcatcctattaacggaatgactaatacggcgtccacagtcggtattcctgagaatacaggtatagcattagcctgtgctatgaatagttcctttagaggggcgtgccagttctgatattgacaccatctgctctcaagactgtgaattatggaatcctgcttgcacaaaagcaatgactatgtcatttaatgcaaacccgtgatctgatgcatggagtgtggaattcctgaagcagaccggacttcattgagatatca

SEQ ID NO: 70366 - DNA, 526 bp, Glycine max
  Clone ID: PAT_MRT3847_34551C.1
cacgcgtccgctcatacattatgtttttgtggggtgcacacctaaaggagggatgccagcacactgggattgcgcatcacctagttgtgagacatgtacagcggagagcgaggagccaaagagcgttgtggctgcaggctgatgagatgatatgagaaagggcatagccaggcatgctgctacttacgttgacgagtactcttgttcgcagtacgttgtgcgtgatggcacagcactctgatctaaaaaattatgaggaaagggtcataaagtcaaaacgtttaaatggcacgtcttgaagcactcatacagtgcaatactacatgacgctcattgattaaaaccaaggcaaggtgcttgaatgggattatcaacagatgtggcttgactgattaccttaagatattgtaacttatactagttgtcactagatgccatagacagactatgaaaggaggatcaatctcacatactgctggttgagatgagtaaaaatgcattatctccatatttgcacactatcaat

SEQ ID NO: 70367 - DNA, 519 bp, Glycine max
  unsure (1)..(519): unsure at all n locations
  Clone ID: PAT_MRT3847_34552C.1
ccacgcgtccggaacagctaaaggtcagagataggaactaccacttgcctccacttcacaccaaacaagcacctatgaagttccaattccatgcagttccatttgttctactaagcttcacagtgtctctatttggtctgattgaagctgacttgaactctgacagacaagctctccttgagttcttttccaatgttccacatgccccaaggctaaactggagtgattctactccaatttgcacttcttgggctggtgtcacttgcaaccaaaatggaactagtgtcattgaaatccatcttccaggagctggattcaagggctccattccaaagaacagcctaggaaaactagattctcttaaaattcttagccttcactccaatggccttagaggaaaccttccttctgacattctctccattccttcactccaatatgtgaacctgcggcagaataacttctcaggcctaatcccttncactatctcgcctgggctgntagnttgggtgttnnttc

SEQ ID NO: 70368 - DNA, 587 bp, Glycine max
  unsure (1)..(587): unsure at all n locations
  Clone ID: PAT_MRT3847_34553C.1
ggctcgagtgtgaataagcacaggaaacatgagaatcactaaacttattatggaacagaaaagatgttcttttgtgactatatacagagatttcaagccatacctgctcatggtcttagtccaggttggcttaagcatcttatatctgatcactaaagcctccttcaatcacgggatgagcccttgtgtatgtaacttatcggcagatagtagctgtggttgtgatgctcccttttgcatactttctagagagaaaagctagaccacacttgacattttctctttttgtacaaatttttgtgctttctttgctagggtaagtgcaaataaatatgcatgtttccacaccatacgagaactcaagtatgaaaacttgatttgtctaattttaaaaaattcatgagtagtttgactcttaatattcactttgcaagcctgaaatacacaaatcctacctttcttggtgcaatgctcaacaccatacctacccttaccttcattcttgcagtggctctcaggttcgcttaantctttatctacatgaattttgaagttttaaagccagaagccatcataatatttacatt

SEQ ID NO: 70369 - DNA, 208 bp, Glycine max
  Clone ID: PAT_MRT3847_34554C.1
gaaagagaggaaacccttttttgttttaatctatgcgcaatatgttaaaagggtatatttggggggacggggtaaataatttacaaaagggggacccggaaatgttgtttggagagcactcaaaggatgccgttgctcaccttccacaatagtgggggtcaagctaaagcatttacccccttttattgggggggagggggttcccctt

SEQ ID NO: 70370 - DNA, 2130 bp, Glycine max
  Clone ID: PAT_MRT3847_34555C.1
cgattcccctcgtacttcttttcctgctgctcttcgtgctcgcggcgcctcggctagtggggcgggggggcgcggctttggaggcgcgtctagcgctgatgatgtggacaattgggcggttggtcacaagcgctgctcctgtttgatcatccgatttcggtaccagtctgcgcgggtccggcattgagcccgacccgtgggcgagtgggcatccgccgcgggtggttgagcggcggtcggggaggccaagtctcgtggcgtaaacgcggccgtgaactgcaagcccaagaagaagaagggaaccaccatcacgctttccgagttcaaccgtggcggtttcgaccagggccttacgcgtgacgagatgctcgcccttcccaccggtcccaaggagcgttccgccgatgaaatgccgttcaaccgccttggcggcggtttctcctcctatgaccgctccggcgggtcgctcgcgcgaccgagacggcggcaacaacgaaggttcgtggggcggaggaggcagaagatcctacggcggattcgacgaggagcgcaggggtccgaatcctagggtttcggaactcgatcagccgtccagggctgatgaggttgataattgggcgtctgtgaagaaatctctccctgccttcgattccggtcgccagaatcgctttggtggcggcggttatggcggttctggtggtggcggttttggtggcggcggcggcggtggcggttttggtggtgcgtctagggctgatgatgtggacagttgggcggctggtaagaagcctgttcctgttagatcttccaatttcggttctggttttcgcgattccggagtggagcctgatcggtggacgagaggcggtccgccgcgtgaggttgaccggacggagcgaccgaggctggtgttagatccgcctcgaggcgatggtgtggtgaacgagtctccggtgaaggcattggataaggcaaatccgtttggcgcggctaggcggtagcgggggaaggtgttggctgaaaagggtttggattggaaaaagatggattcggagattgagacaaaaacagtttggtgtggcttaagagttatcttcaacttttgatgacgagaaccgaatactactattttattacttgtcttttctaataccgatgctgttttgaaatcaggcaattggaggaacccctttggggatgccaagcctagagaggctgtgctgggcgagcgaggcatggattggaggaaaattgatcttgaattggagcatcgctctgttgacaggcctgagacaatggaggaaaaattattaaaagaagaaattgataatttaaagaaagaacttgagaaagagtctacaataaattcaaacaaggaatctgtggatgaggctggtggagaccaaaccagtacacatgcaatattacaacagaaagaaaaggagctggaacttcttatccgtgatttggacgacaaagttcgttttgggcagaaagccattgaaaggccaggttcatcggcaggaaagtcttctactttttctgataggccacattctagatctggctcctttgaggattctagaagtgtggattttacagacagacctcgatctcgtggtacaggagatatgtggatgcatcctagtgatgacagaagacagtttcaaggtagcagggaaaggggatggttttctggcagccgagacttgaataggtcaacgtcaagagagagatggtgaacagcagttttgtgtggattaagagttatcttcaacttttgatgaccagaacctaatactactattttattacttgtcttttctaatcgttttgttcattttactccaggcaattggagcaacaatcattgagtactggcactaaaacttttgcctaatctgttattgcatctcgaaacattgtaaatttgtttttccccttctggtaattttttgggtgtctggatgaaggcagaaagcctgtaattttattaggacaaaatttttattgagaatcttggaacttactagttaatgttaatgtgatattgttctgaattctgatatacaattatttttcttaaaaaaaaaatataaatagacggccgctcgcgatctagctcgagcc

SEQ ID NO: 70371 - DNA, 811 bp, Glycine max
  Clone ID: PAT_MRT3847_34556C.1
cccacgcgtccgacaggaagttcttcttcaccaagtgatgctgatttgcaatccctttttgagctccttcaacaaattttgatgaaagtgtctgtttcaagatcagagaacttgtggctaaaggctcttaaattctatgcaaatcaaagacgatattttgataaattggtggagatttctgttgttaccttggtcagagatggtggtagtgaaaatggattttccctttcttctgctattgtaagttttatacttcaaaaggatggaattcagaagaccagagatatctataaacgatttctagctttaccgcttcctggtcttgctttatatagacgttgcattgacctggaaacaaaccttgcatcaataggagataaagatggtcttataaatgccaggaaattatatgaatcttcacttgcaacatatgaccaaaatgtcagcttgtggcaagattactatcgcctagagatcaagatgggaacatcagaaaaggctactgctatctattggcgtgcaaggaaagtactcaaagatgctagtgaatttgtcactgccccagatatgtgataatattttcaagttacgaccatggctattggagttcaattttgaccactttatttatttgagttttcttctgaaatttcttttcgacaagtctaatctagactcaaatttgtttttcctcccaagaggtgaggaatagagcttcctccttttctccaaaaagctaattaactgtattgcacccttgtttgcgtatgttgggtcacgttaatgagaatgttaaatgcatcgtatgtat

SEQ ID NO: 70372 - DNA, 2561 bp, Glycine max
  unsure (1)..(2561): unsure at all n locations
  Clone ID: PAT_MRT3847_34557C.1
aactcacgctctaaacgcaacgcagcatcgttcgtgtatccactgcagttgcctcagttgacggtgttggtagggaaaaccatggcggacgtggtgcagtaccgtttggagcgcatggtggacgagctcgacgacctcgagcagcgcggcctcttcagccggcgcgagatcgcggagatcgtgaagcagcggcgaaagttcgagtaccggctgaagcgtccgagtcctctgaaggaggatttcttggcctacgtcgagtacgagactcagctcgacgctctccgcaggctccgcaagaagtccgtggcgcgcgaattgatgaagcaaggcaataagaagctcaagaagtctaagtccgatttcgctggattgctcaggattatggacatttacgagctcgctttgaagcgctataaaggcgacatcgacctctggtttcgctacctcgagttttgtaggctcagaaaaaatggcaggatgaagaaggccttggcgaatgttattagatttcatccaaaggttccgggaatttggatttatgctgcggcttgggaatttgatcataacttgaatgttgcggctgctcgtgctttgatgcaggaaggtctcagagtttgtccaacttccgaagacctttgggtcgagtatcttcggatggaacttacttaccttaataagttgaaggcacgcaaggttgctttaggtgaggatcagggaactctcacccgtgatcctaggagttctgatgaaaaacattggagggatgaaaacagtgagctgtttatgcctcttggtgaaagaggggatggtgatggtgatgatgatagagcaaatgttggaagtgatgagtcggaaaagaagcaggagctgtttgaagaacgtggtatgaatatttttcaaactgtctatggcggagcagttgaagctgtcccctcgagtctcagtcttaggaagcggttttttgaaatattggagggtacaaacttgtcgcattatgaagatatgtgcaaggagatattgaatgacatgaagagggatttttcaacacaaccggaattttgggactggctcgcaaggcatgaatgtgatcttgaaaatgatctggagataagtgaggagggcattattcctcaggtggaaaaggcagttcaggtttatgaggaggctttggaaaatgtgccatcaggaactatgttttgtttgtatgcaaattttctaacggatattgtagctcataaagaaggagaaaccaatataaatggatcatcaggtcatgctgcaaactatatatcacatctcctgttaatatacgaaagggctgaaagcatggggtgcattactgaagatcttgcttgcaagcatgtgtccttacatttgcaattgagacagctggatgaggcccggaaactggcagcaaaactttgcagtggaaaacttgcagaatcggtagagttatggggattaaggattactatagaaattagatgcaccacaaaaagttcttcaccaagtgacgcagatttgcaatccctttttgaactccttcaacaaattttgatgaaagtgtctgtttcaaaatcagagaacttgtggctaaaggctcttaaattctatgcaaatcaaagacaatattttgataaattagtggagatttctgttgttaccttggtcagagatggtggcagtgaaaatggattttccctttcttttgctattgtaagttttatatttcaaaaggatggaattcagaagaccagagatatctataaacgatttctagctttaccgcgtcctggccttgcccacgcgtccgattgcattgacctggaaacaaaccttgcatcaataggagataaagatggtcttataaatgccaggaaattatatgaatctgcactcgcaacttatgaccaaaatgtcagcttgtggcaagattactatcgcatggagaccaagatgggaacatcagaaaaggctaatgctatctattggcgtgcaaggaaagtactcaaagatgctagtgaatttgtcactgccacagatatgtgataatatttctaaattacgaccatggctattggagttcaattttgaccacttcatttatttggtttttctacagaaatttcttttcgaccagtctagtctagactcaaatttgtttttccttcccaagaggtgaggaatagagcttcctccttttccccaaaaagctaattaactgtattgtacccttgtacccctgtatgcgtatgttgggtcacgttaatgagaatgttaaatgcatcgtaagtacatattcttatactcgattggagcccgtgcttttaaaagactgtcaaatatatgattgtgtcaagttaccgtgtgtaggcataaaaaaattgcgggtggaatgattgcaaagttgatcatatgagacgaatggaaagtattatgtaaacgtgtaaagagaaaatgaaatgaatgagagtatgaaacaatactttcttttttggaccaaaaaaaaaaaaaaangnaagaggagaaaaaagaaaaaaaaaaaaaaaaaaaaaaaaaaa

SEQ ID NO: 70373 - DNA, 405 bp, Glycine max
  Clone ID: PAT_MRT3847_34558C.1
aacactgagcatcgtctagctatctcgatcgaactgtccaaggtcctgtcacgctatatatataccaataacaaaatttattaaatgtgggtgggttcaagaagtaacaaaaggggcatgaaaaaaacacaacacaaaatccgaagtctatataggtgggtaggtagtctaaccccaactggtgtgctcatgtaattattcgtcttcaattaggttaaccggtctttttcatgctgtggttgccatcccagtttaaattacaattgagtccaattcgacagtgtcgtcgggtccttaatcgtcgccatccctttggtcttcctcatcagcccaacaccgtcgctcgtgccacactactactcgtcttattgttcacgtgttatattaaccacgctgtccaacttg

SEQ ID NO: 70374 - DNA, 462 bp, Glycine max
  unsure (1)..(462): unsure at all n locations
  Clone ID: PAT_MRT3847_34559C.1
accgcaacaattaacatacatttagtgagagaatttatcatcaaccaaccatgtctgatattcccgtntttgttgccgaagagtatgatataaggacaaatcattatatgaagggtggttctttctcttttttttttttttatttctatttcatttttctttcttattatctttttttgtttttctcatttcttttttttttcttttttactttttttttctttttttatctcttttttctattttcttttttttttttttttatttttttttttttttatcttttatttttttttttttttttttttttatttttttttcttgtttgttggtttctctttattttttttattttcnattctatttttctttattatttttatcctttatctttatttctttcttttttttttgtttttatcttttattatttttttttcttttttcttttattttattttt

SEQ ID NO: 70375 - DNA, 1830 bp, Glycine max
  Clone ID: PAT_MRT3847_3455C.1
aaaaagctcttttccttctaaatttgattccttattcacattctatatgtattgggcttcttacctgtctcagaaaacaaaaacctaggggagtgctggtggtgccggagaaaacccattccacttggtgagaacgttctgagaagcatgctgcattctttgacttgaataaagatggtgtcatctacccatgggagacttttaaagggttgcgtgaaatcgggactggggttttgctgtccgttggaggtgctattttcatcaatgtgtttctcagtcagagtactcgtcccgtaactctctttatccccataaaaactctcttttttttttttttttacattattaatttgtctgttttaatatgagtgatttctcctcttttttttcaattaatctaacttttattggtttctggcgtacatagtagcatataatatatttttaaaaaatggaaatagtatgttctttagattttcctttaaaaatataattaactcacaccgaagtgatgtttcactcaatcgaaaaaggaaagaatgtcaaatgatgtattatttaaatttaaatatctttttcgttgttataatttagtatttttttatttttttcataaaacaaatcattttagttctggtaaaattaatttattttgtatttcatccttaaaaatactatcattttttcattatttaaaatattttttttacaatttaaaacactatctaaagttctttaaatatgaaaaataaaacaaatacatttcactagtactaaaatgaaaaatataaatttgtaaaacaaaaatttaaaaacactaaattgtatgaaaaaaaatatatttaaacatgttatttaaattaaatttcctctactttccagatacaaggaaaaagaaaagacattttgatcatgaacggtggagggacaaatttgattccatcacattttacaaacggatgcccataaaatatcttatccttctttttggttacacaaaatatcttatccttctgccaaaagttattatccccaaaaaagaaattgtggcaattaaatacattgtctgataattatatttttcacttatttgacgcatttgtttccacagattggcctgtaccccgagaaaaaacgagaaacaccaaaaggcatatacagttatacaccatacacaattgtattttgtataaaaaaatgtataataaagagagcagcagaaagaaaaaaaagatagaaaactatgtgataaaataataaatgtaatacagagaaataataagtataataaactaattattaatgcaataacttgtttgtttttaaaatactactaattaaaataaattgctcaaaaaatttgtattctttgataagtcgtttgtttttgaaataaagtgcacttatcaagttctcgtggtgtgtagggaaagtttccatctatacttttttccaattgaaattaaaaatatccaacgcggcaaacacggcagtgacactggagtctacgatactgaaggaaggtttgtaccttcaaaatttgaagaaatttttaacaagcatgcacatacacatccaaatgctttgacatatgatgagttaacggagatgataaaggcaaatagagagcctaaagatttctcaggaaggattggtagtgtggttgaatggaaaattctttacaaacttgctaaagataagagtggattactgcagaaagaaacaatccgaggtgtttacgatggaagtttatttgaacaactgaaaaaacaacactcttcaggcaaagagaagtagtaatatttttcagacacgtatgtgaaaagaaga

SEQ ID NO: 70376 - DNA, 310 bp, Glycine max
  Clone ID: PAT_MRT3847_34560C.1
ccagtaattgtggggggcttaactaccggggattaatttttcaaattccccggccttttttccatagcgaacagctacctaacattagttataaaaaattgtatcgcccatgaggtcttcatatccctctcacgtgcaaaaaaatccaacttgctgtaaggaaaaacctgaccacttccttttaaggacgtttgtgactcacttttggccgaagtgaaaccccctctttttattcattaagcataactgtttcacacacgggaagtgtttgtcaaggttgctaagcaagggatataactgtttgcatctt

SEQ ID NO: 70377 - DNA, 269 bp, Glycine max
  unsure (1)..(269): unsure at all n locations
  Clone ID: PAT_MRT3847_34561C.1
gtcttttttgtgtgttgnnggagtggggtgtggggttttgtgtgggtatttggtgatggggtgggttgggnttggttgatgctttggcgttgttgtgatttaatgaagggtgggtttatgcctgtgaaggttaatggggggtttgattgagtggttgtgtttatgttgttgagaggttgagtatgtgggtgggtgtgttttcattgcttgggctggtgagtatggacctagcgtatgggtggggatgggctctttatattgggatattg

SEQ ID NO: 70378 - DNA, 464 bp, Glycine max
  unsure (1)..(464): unsure at all n locations
  Clone ID: PAT_MRT3847_34562C.1
taccactcaacgcaattgacatactttacagatgcaacacattgaaaaatagaatcgaacttgtcaattccacctacattggttccctctcaagggaacaccgccgaccaacatgaagggctggctccagacccttgtactcgctgcttcattagcaggccgagttgtcgcaaacgaatttaatatacaacaagatgacgctcatcgacaacggtgttcaggcatgtacagccggaaagcctggggcggcgatatcgatccctttatcctcacgaaattcgtcaaagctgaagacgacacagccgaccaagatgtcctcgtcagcttggtgatttttgaatggggtgatgaggcactgataggacgtcaagtaccgggaaccgatgagctagctactatctgtgaccaggttaaagtcgacgccagcctttgtacctncgaagaaataagttcatttatacttg

SEQ ID NO: 70379 - DNA, 419 bp, Glycine max
  Clone ID: PAT_MRT3847_34563C.1
gcttaaccttgataggaagatggcttattcaataattcgtgcataagggtaaggaactttggatgaactaatgcgaatgggtgtaagcctcgctgctcggaaacacccagtgctgaccacactgagagacacgaaagcgcaggtaacgccagttggcgaagtggcgttaagcatccctagcggtacgaaaagagaggtcgtgatgatatcatctacgtccgtaccgctcctcgtggagtagatcccgcatccaaccaagtctttgaccagggaacgggagaattcccactaccgctggaaggccagccgggccgtgagcgcggtgggaacgggcttcccaaaaagccagccccgggccggggtcggcatagaatgaaggggacggccctaatgttgtttgtgttggcaaagccaacttc

SEQ ID NO: 70380 - DNA, 563 bp, Glycine max
  Clone ID: PAT_MRT3847_34564C.1
gtgactgcaatttagaatcttggtcatagtttcaatcataatcagtgttgacctgtacagcttggaattggtaatacaaacagatatggcatcaaaagtttacttaatatcacagtttgcacatgttttctgacactattagcggtttaaaaaattcttgataaaaaattattgctttataaatcctctatctctctcttgtgattttcaattcttttcctgctttcagaaatatgtataagctggcattttttaccagcaccacagagaatcaattgtagatcaggcttatattctctcacaatatatcactgaacaatatcactgtgtgtaggtctgtgcctaagaggggaaggttctagatgaatctctgccaaggtcacaccccgaacaaaactactaaagttcatcttatgaagtgtgggagaaaaagaatttagttcttctgaagggtggggttcattttaggggggaaagtgagaagttataaccacacttgatgcatctctactaatagtagattttactatcaatagttatagcttcttgcttttaccaacaag

SEQ ID NO: 70381 - DNA, 160 bp, Glycine max
  Clone ID: PAT_MRT3847_34565C.1
gaaagcacaaattatctaacccttttgtggggaaaggtaggaaacaactaatgaacgacactaatgcaaatgggtttaaccgaaacaccaaaaaccgtatgcatggctattattcaagtaacaagtggccattatccttggggagacaccaaattaaaaa

SEQ ID NO: 70382 - DNA, 654 bp, Glycine max
  Clone ID: PAT_MRT3847_34566C.1
aagtccagacaaaaagcaaaacaacgcgcttatttctagatctcagctttctcgattctccttttcccaagcgactccgaatccccgaaaaaaaacaacaataacacacgattcctttcttctctacgaagatgatcaagatgaatctcgcgttcgcattcttgtgtctattcacggtggagccatggcgcgtttgctcgcaacaacaacaacagaggcttctcgtgaacatgacgctcgttccaagcgctcgtgctagtggcgctctttgtttggacggaagtttaccggcgtatcacttgcacagaggatttggagctggtaaagacaactggccttctacaatttgagggaggtggatggtgtaatgacttgaaatcatgcttggatagagccaaaactcggaggggttcaacacgttatatgaccaagtgggaggtgttctccggtattttaagcaataatgccacccttaatgcagatttttacaattggaaccgtgtgaagctgagatattgtgatggggcttcatttactggagatgctgtgttcactaacaagacaacaactcctcatttccaagggcttaagatttgggaagccattattcgcgaccttttaccactgggtttgggaaaggcacggaaggccttg

SEQ ID NO: 70383 - DNA, 244 bp, Glycine max
  Clone ID: PAT_MRT3847_34567C.1
ccacgcgttcggataggttttattttttttttttctgaaaccaaaggacggactagttggtggctctatcactctttttctggaccattgacaagtattcaagccaagggcgatcgagattttgtaaaattccaaacactctaaccccctccacaagaaaaaccagctaatgtccaaaaaagtagcttggctcctccaacaagaaacccccctggtttctcaaaccgataaattcaaacctctc

SEQ ID NO: 70384 - DNA, 221 bp, Glycine max
  Clone ID: PAT_MRT3847_34568C.1
cttgcatacagcactacctagctcgcaagcaagcacagccatggatgcctcgcgtcgccatgttctcatctgctttgcacgtgtttcactcttcctctgcgctctatccctatccgctgctcacggatcctccacggttcaagacatcgcgataaagttgacactcggtgacaaccatcttctgcgcatgtactagaagttcgtggctttcatcgatactt

SEQ ID NO: 70385 - DNA, 833 bp, Glycine max
  unsure (1)..(833): unsure at all n locations
  Clone ID: PAT_MRT3847_34569C.1
tgcatgcctgcagcatccaggaggtttgctaccaaccattaaatatacctgaacagatttgggaggagatatccatggatttcatcacaggactcccaaagtcaaaaggatattaagttattttagtggtggtggacaggcagtctaaatacagtcactttatccctcttaaacacccatattcagcaagggtgttggctgagatttttgcacgagaagtggtgaggctgcatggtatccccgcatctatactgagtgatacggaccttatttttgtcagttctttttggaaggagttgttcaaactacaagggacagctctgaagatgaacacagcatatcatcctcaaatggatgggcaaacataagtggtgattagaaacattttttagatgttttctagctgaccaacccaaaatttgggtcctttggctatcttgggctgaatattagtataataccaattttcatgtgtcaactggaatgaccccgtttgaagttgtctatgttcgcaaaccaccgatgctccgtaggtttttaccaggggaggttcacgtggaagcggttaggagggaattacaagacagagatgaagcaatttcacagttgaagtatcagttgcgatgagcgcagaataggatgaagaaccaagctgacagaaagagggctgacaggcattttgaggttggggaatgggttttcttgaagcttagacctcatgggcagctgacattaggagccagaattaatcatagttagctccctgctattatgggacttacnnaggtgttgccacgagttgnagcagttgcatacaggcagcagttgcctgc

SEQ ID NO: 70386 - DNA, 592 bp, Glycine max
  unsure (1)..(592): unsure at all n locations
  Clone ID: PAT_MRT3847_3456C.1
gngnatctttcatttgtccaagtatttttgcttagacatgttacatacaatacaagaggaaaaaagaaaattaaagaaatataatattgatttcccatctcttttcctcctaccaagggaacaagtccatttctcagtatttttaaaaatttcctaccaaaaatcagcattcaatatgacttagtggaaaacaatccattccatgggcttttaccctaattttgcaaagtacttgtgaatcttcagatcttggatcaattaattactttcaattcagtaacttttgttaacctttcgcttcatcttcaccttcattcaaatagtagttcaagactccaaaagtaaatgaagtagttagtttagaactttacgatgtaacacagaaggttgtttaaaccccttcctctttttacccacgcattaaccacttctttggggaagagttggggacaagcagctccatggtcaaatgctctcaccaagagttagcattagtagcataaaaatgattgcaaaatggtattacaaattgaattctgataaaaaatcatggagaaaataagctataatcattggaactatacagattaaa

SEQ ID NO: 70387 - DNA, 287 bp, Glycine max
  Clone ID: PAT_MRT3847_34570C.1
cccgcaccccaacgccgacaacggggggcttttttacgggatgccctgcattttctcaccccggacgggcgaaatgtgtccaatctgttaagggagggacaagtacactgtgttgctaccactgagtgtgtgggtccaggacctatggagtttaaattcacgctcgactttgcgctatatgagtggctggggaaactgagtttaccccatagcacgttccttatttggcaaaagaatgcccctttctatagggggaggagcatgggcaaaatattgctttcctcatg

SEQ ID NO: 70388 - DNA, 236 bp, Glycine max
  Clone ID: PAT_MRT3847_34571C.1
ggagatatcacggaagcaattaaaaaggccaatggcgttcattttcctgaagagaggctctgtaagttgctggttcaactgctgatggcacttgattacttgcatgcaaatcatattcttcatcgtgatgtcaagtgttcaaatatattcttgactaaagatcaagatatacgtctaggtgactttggtcttgctaaaatgttgacatgcgatgatcttgcgtcttcagtagtggg

SEQ ID NO: 70389 - DNA, 443 bp, Glycine max
  Clone ID: PAT_MRT3847_34572C.1
gcaagggaggaaggttgggaaattttgggaatcaccagcccctttaaatgggaaaaaacgggggggcccttatattttggacccccccactatatcttggggctggaatacctgcgggggtcgaaaaaaaaaagataattaaaagcgggggggtaaaaaaaccccactaaacccacctttgccggggacattgtttcctttgaaaacgaacttttgatttatgaaaaaacttgggggttcataaagaaaaagcttggcggggttggttttgaagggggcaaaatttttgggggataaggggctttatataccccaacgccctaatggtcgttaaaacaacagcccccggaaaaataccagaacggagacccagggggcgggttttttatagagggggcgccccgggctgcaaatttggggggctgggggaatggggaaacccc

SEQ ID NO: 70390 - DNA, 544 bp, Glycine max
  Clone ID: PAT_MRT3847_34573C.1
cggccgccctttatgtactgtttgtgtgcggataggatggatagaattcttatgccttattaccctcgcgctttgtcacattaatcttcttgcctacgaattaattagctcgacatataagtgccggccattgatgatggaccattttatttttggccgctggtttacaactaaaaagacgttttattttcaagtggtaaagcgtactttcctagggaacattatatggaactcgagtgcatggtcaatcatcagagcaattaggacggaaagagagaccattcttattgcccgcactaaccaaggagccttgcctacttttatcctgtagcgcttatccaccacaagactagtgcgcggaaggttaacggtagtgataacgcccactcagtagcgtttaaccgctgcatggatcttggtgaacatggctggcctgcacctctgaggcgtttttgggaccccatacagaaagcggacgctctttgatggggtgacaaatgcgcctgaggcggacttgcacgctatactcgccatgctcggggca

SEQ ID NO: 70391 - DNA, 334 bp, Glycine max
  Clone ID: PAT_MRT3847_34574C.1
cgtacgcgtgggtgaaaatgttaattgaatttctcaagcacaaaaaatataacttcaagtgcacattcgattagtaatatttcttaagcacaaacattatatttgtttggtaacaacgcaaccctcaaacttgaatcaaattcaaactaacctgtgcaagtagtctgcacaatacgattcatcattcatgcgtttgcaagcacaacacaaacatctcctctatacaaacaaaattaacaaaaaaaaaaagtccatgtcacagccccttgttaatctagttgcaaagctgcatggggttcacaatttcctttatgtgggtcctccttgtcataaa

SEQ ID NO: 70392 - DNA, 587 bp, Glycine max
  Clone ID: PAT_MRT3847_34575C.1
gttgctgctcatcctccgtaacctccgagctctgcaccgaagaacgaagccatggggtaacctaacaattctccattactctttcgatatgcttcactgcatgtttatgttccttttatgttttatttgctttgttcccaaaaattgaacgcacacgaaggaacttgagctcgtgaatttatatatgcttctggtagatctgtttctcatcaaataatctcatcgattcttcccgtgtgaaaactttatattttctacaatgggattatgtatatttatcggtgtagtgtttatgttggttttccccccgttttgtgcaatgtgatttgcttcttcaatggtttttgtttaattttatttggtcgatgatctaaagcttccttgtaaatatcgattatttcattgatttgttatttgatgttagttatagggtcaatggaattgagttcctttgtcttgtttttgaggggtgtgggagaaggggcaaattgcttgtgacaatttcaaaaaaatgaaaataaaatggagtgaacatttaactaggttttttagtgatgagcttctagacttggtatggtcaatgaatg

SEQ ID NO: 70393 - DNA, 252 bp, Glycine max
  Clone ID: PAT_MRT3847_34576C.1
aaaggattctaaccgccgctcgatcgggcttgcgcttcaaggcgtctcgtaaggtcaatccagtccaagagggtcagcaacgaaatttgcctctgaagggccgaagctcctactgctggtcggcaaacggacggcgggcgcacgcgtcgcttctagcccggattctgacttagaggcgttcagtcataatccaacgcacggtagcttcgcgccactggcttttcaaccaagcgcgatggccaattgtgcgaa

SEQ ID NO: 70394 - DNA, 218 bp, Glycine max
  Clone ID: PAT_MRT3847_34577C.1
tgtacaaatgttgctaaaaaattggggactaccagcatttttgaatcattccaaggtcctcgtcatatgcatacatgaaggttagaatactggggcatatttaaaaatcagtcctgaattattatatttttttgaaactgaaataaagcaaaaattacaatgcttacagagaatagtgaaattgaggcctatgatgaaggtaaaaacctttttatatg

SEQ ID NO: 70395 - DNA, 226 bp, Glycine max
  Clone ID: PAT_MRT3847_34578C.1
gatattttgatcaaccgagatcacaggtggccgctgcttaaatcggggaacaatagcactcgatacttgattacacgaattactaactttcttagtacttgtctgagtgccattccttaagggaaagaaaatcactctgtgtgctgctcacagacttgacgattcatgatctcttccacatattagatgatttgctgagcactctactatgctgatataagactta

SEQ ID NO: 70396 - DNA, 512 bp, Glycine max
  unsure (1)..(512): unsure at all n locations
  Clone ID: PAT_MRT3847_34579C.1
ttccaaggaaggtttcccgtcatcactgtatgacgtcctccttctttggggggggggggggggcacgaaaatgcgcaacctaggacagcaaatgcgtaaataaggataactgcggtacgggggtagcgggaaacaagataacagggcagggacagatagagagatgagagcgcgagtataaaaagggaaacacatatatgtgtaacgattatgggagtaaggtggaacgtgaaagtggcacgtcagtaggccttttacgtantgagaggtacgaccgttaactgttagggtggtgagggtgtaaaatgggggggtggtaaaaggattggcagtgggtacggcagataaaataatcaacgggattcgcgtatgtaaagtagtccncagatgcgtgacaaacaaagaattaagcgtagcacgtgtggagccgggttagccgctgcgccgccgcctccgcgaacaaataggcccccaatactacacaaaagccgagggggcgtaagtcagcgctg

SEQ ID NO: 70397 - DNA, 407 bp, Glycine max
  Clone ID: PAT_MRT3847_3457C.1
gtaaatacatggactaaagtgaagatttcataaaattaggaactaaaataatcagcatttacaatgtcagggactagaatggggtttactcaagaaaaatctaaaactttcactcatgcccctcccatgtctgaccactgaaggttttcagtaaagatgttggttgcctcattattttcttcctcatttgagacgtctatgtattaacatacatgatgtattccttgaactattggagtgtgtgattctcgaataagctcctaaactaaatcatttttatccgagttcacaaactttcaagttatttattttcagtcttttcggcgtgatcatggctcccaagtcttaaatgggagccatttctgcgtgggttttgctttctctcacttgtggcaatggcaaggtca

SEQ ID NO: 70398 - DNA, 952 bp, Glycine max
  Clone ID: PAT_MRT3847_34580C.1
tcgacccagcgtccggcgggtcgacccacgcgtccgcattcctcagtccttgtcttggttttctgctacttttgcctgtgaaaatccaagacatagcagatagatgattccttagccatttgatctctctaacagcctttctacctatgatactatcttgatcttgctccctctttcctacggcattcaccccaccttgttgttctttccatttttctgacttgctccttttttctctcaaacacttcatttcttgagtttttttcactaagtttgttagggagatttacacaatggccaaacactttcttctgcttctttttgcagtatgcgttgctgctattgatgaagaaccatttataggggtgaatattggaagagacctctcagatatgcctcaccccactcaagtagtagcactacttaaagcacagcaaattcgacatgttaggttgtatgatgctgaccaagctatgctcattgcccttgcaaacacaagaattcaagttgctgtatctgtccctaatcaagagatcctagcaattggtcaatcaaataccacagcagcaaaatgggtttcccataatgtgatagcacattacccttgccactaatataacaactatttgggtgggttctgaggtcttaactaccctcccctatgcagcgaaagtgcttgtcagtgcccttaagttccttcactcagcacttgttgcttccaatcttgatcaccagatcaaagtctcaacacccctttcctcctccatgatccttgattcattcccaccttcacaagccttcttcaaccgctcgctgaatccggtcttggttccaatgcttgatttcttgcaaaccactgactcttatctcatgctcaacatctacccttactatgactacatgcagtcaaatggtgtgattccattggactatgcactctttaaccactccc

SEQ ID NO: 70399 - DNA, 300 bp, Glycine max
  unsure (1)..(300): unsure at all n locations
  Clone ID: PAT_MRT3847_34581C.1
aagcnngngcacgcgtacgtaagctcggaattcggctcgaggagnnngaaaagatcngaanacgnntntgnttcnnnaagntaagntcncntcgacaatcantgngngcnncngcgngtnggngntggccatgnncnacgcnctctctntnntncncngnagccgtgctncgcaacntnggnggcnagctctangagnanntcgnnaangntgcgcttngnntgnagggcatagtgncgcatgcnngcttnagctggggatcgtggatangatnacggnngtgnatcagttggtngncnn

SEQ ID NO: 70400 - DNA, 206 bp, Glycine max
  unsure (1)..(206): unsure at all n locations
  Clone ID: PAT_MRT3847_34582C.1
gggatcaatcacattatgtcctttgcaatcatctccaatgtatggatgaacaatcaccaaagatcagaggcttcatcacaagcatgtgtcagtantccttccgatcctcggaattctcagcaggagagttgcagtgaagaatcactcactgttacgtacactaatgtcacccaaactttgattaatggtacattgaggtacattgg

SEQ ID NO: 70401 - DNA, 767 bp, Glycine max
  unsure (1)..(767): unsure at all n locations
  Clone ID: PAT_MRT3847_34583C.1
cctaagcttttttttcggctcgagatnttgagtcatgtnacnntgttcttataatatgnaggttgttttgtttgtttttttaaatttctatttnttgtttttcaacatttnatatatttttttttaatactgtncttggtatnatttatntntnttttatgctgttntattgcaaacaattggacgaggtttggtgntnttattttcatgttttggtttctttcttttctttatttttatattttngggttttttttttttttttttncttgttttattttttttttattttgaattgnttcttttttgtttntcctnttttnnttttttttatttntttcttttttcttttntttttttntttctttnnnctttttntttgtttnaacatntattatnttttctttttttttgttctattnacttatattttttttcttcttnttttattaatcttttttntttttcttntttttttttttttaattttncttttttttgtttttttnttttttttttttttttttcttaataatgnnnttttcttttttttttttttttttttttcttttttttttttttttgtgattttttttttttttttttttttttcccttttccttcaattattttttnttttttttttttttttttcttttttttattttttttatttnttttcttcttttgtttttnntttcttttcattttttttttttttctttttttttttttttattcctggggctttaattttttttttttcc

SEQ ID NO: 70402 - DNA, 1094 bp, Glycine max
  Clone ID: PAT_MRT3847_34584C.1
caaccttctagtgaagttgaagggacacctcaaccacccacccaacaccattcattcttatttctttcattcataaaaatcattcattcccagccaccaccaccaccaccaccaccactctctctctctcaaatccttaatttccattcataagtataagattacttcagaagctccttcaactatagatacacatatatctcttcaaaccctattccctcacctctggaatctaaccataaaaatcataaattttccctctttcacccgaatctgaatccaacaatttgttcccacaaatagaaacccacgaaaaccacaaaaccccttttaggttttaatttccccaacgttgttgtaccatgtcgtcatctctgatcgcgaatccaaccgcggatcgctcgcgtgactctcaccgcacaaagaagaagaagaaatctattaagcaacaccaacagcagcatgacgcgaaatggaaaacccacgcgcagcagcagctatactcctccaagctccaccaggccctcgcgcgtgtcaacatctccggcgacgcgccacgccgcggcagggcggtgcgcgatgccgccgacagggtgctcgccgtggccgccaaggggaggacgcggtggagccgcgccatcttaacgaaccggctgaaggtcaagttcaggaagccggttcacaagaggcagaaggttgttgttgttgggccgggccggccaaagaaaaaggcccggttcagcgttctccggctcagggggaaaaccttacccgcggttcagaggaaagttagggttctgggccggttggttcccggttgcagaaaagaaccgcttccggtgattctcgaagaggccatcgattacatacccgcgctcgagatgcaggttcgcgccatgcaagctctcgctgacttactcttaggctcttcctccgcctccacctccgccaccgccgcgccgcctagttgatctcactttccggcgattatgccacgtttcatatattttttttccttacttttgttattatttgcctcgttttcaccctcactctactcggcttatgttaattgccaagtacatacataatat

SEQ ID NO: 70403 - DNA, 321 bp, Glycine max
  unsure (1)..(321): unsure at all n locations
  Clone ID: PAT_MRT3847_34585C.1
tctagaggctccctggtggggcccaagcttacgcgtgcgtgcgacgtggtagcggcgcactcgtgtccattgcctgcattccctgggcagttgtgcgaattgctaagcgctgctctattggagttgctttcttatttttctatggaatttttcctggcgggggggaggatagattttttttttgtttgccnagagncgcgaaagggagcttaattttttacttttccactaccccggcaggagcagccattccccttgtatgattgtttgcggtaactcacctctggacgactctaaactttcggctacgctttatagggt

SEQ ID NO: 70404 - DNA, 275 bp, Glycine max
  unsure (1)..(275): unsure at all n locations
  Clone ID: PAT_MRT3847_34586C.1
gagctcgagccgaaaatgcttcttctttcatctcttgtncatccttccaggggcaacaatgcattctgccatcttaggtatattgtgtgacaccctaaactggtgcacatgtgttcccataattcancttaatngaatattatcatttaccaaaacttttcgttaatcaganatatgatttgatatttgtagttcagtncagctcgtgtnntattgtatagaaagttcaatcantcagtaccatatnaagtgaaatgaaggctacaaccattttc

SEQ ID NO: 70405 - DNA, 363 bp, Glycine max
  Clone ID: PAT_MRT3847_34587C.1
cttattcactttttttttttgcacgggacaactaagaaccatctccatggaaccaattagatttccccgtccagcaaacacgtatagcaaactccatagaggtccgggggacttatttggtactaaaattctatccgacggactcttaacccagctagaattgcggggcaaaatcgcaggccactggatctccaatcgaaacctaaagggttaccaaggctttaacgcgacggggccacctcctcaaattatgggtacctacttttaaacctttagttactgggaaagccgcctaataacaccctttgctttagattgcagagatttccccaccgtgtgggtagggggagctacattcactac

SEQ ID NO: 70406 - DNA, 467 bp, Glycine max
  Clone ID: PAT_MRT3847_34588C.1
gctgcgagaacgacagaagggcaccttagtttaaatcccaccttcaacaaaaaatcttaggaatttgagagaaatcctagaatttaatgcaacataactaggaattagtatttctattataaagagacgctttgaatgaggcagagaacgagtcatcccattgaacgagaggggcatagcttcactgaaatcaagctacccatttaatgtaaaataagtataaacacaaatcacaaaagaaaaattctatgctatcctcagaaatttaattaggtgttttaatcccaaaaatggtgcacaactctctttccaatggtgcactcaaactcactcaactattgaccccaaaaataactgtatccaattacttattcttcacaaaaatggcgagtcatgaatgaatgaagatgcagatggaacaataaaaaataaaactgtagatatgataatagttttatagtatatta

SEQ ID NO: 70407 - DNA, 411 bp, Glycine max
  Clone ID: PAT_MRT3847_34589C.1
ggctcgaggactaactcactcactcactgacttactctcatgcttaatgattgattacctagcctggtgttagattgaggggcaggagcaagacctgtcgctggcatcgaacaatttcccaggaagacagccgactgccacatcggcgcaaagccaagacatcagctgggtctgcctatagccgaggccatcagccgactggctacccgagggcttctagcggatggacatcatacatagcgaggatagcctagcttgccgccactagaccgatgatctacatacccgtgttagccgatatgggagtctccagtgctaagtctcagtgtagtgccgatgtgacactccgaatgaatctcgcctgaaggagcatgatctgcagcctctgtgactgagcccctgtggtactat

SEQ ID NO: 70408 - DNA, 422 bp, Glycine max
  Clone ID: PAT_MRT3847_3458C.1
ctcactcttccactcactcattcactttactttaaaggcttgaaacttagtactggggaccgttctttttataacaagcgctgtgcttatttacataccaaacctctctttatacctatttctcactctatcatctctggaactcattttcctctgatacttatacataaacaattgaaacacaacttccaaaccaattatcgtattcacacaccaacttcaatgtactcatcctaaattctagagtatctgactcattaacatcttaaactaacttataaatcaaacaaagacctgaaagtgaacaggctcacaccaagccttttgcatctgtctatcaccctatatctggagctgctcactcttatcaaaggaaccatagctaatgatgttcccatatcttacattcacaattccttaat

SEQ ID NO: 70409 - DNA, 133 bp, Glycine max
  Clone ID: PAT_MRT3847_34590C.1
gatccccgcctacacaaactataggcggacattcggcggccaatccaaggcttagctcaataatctcaacaagcgccccactttctccagcggatatgcccgagtaactgccggtggcactgatcatgaaaac

SEQ ID NO: 70410 - DNA, 869 bp, Glycine max
  Clone ID: PAT_MRT3847_34591C.1
ctctcgagccgaatcggctcgagctcagagtcacagaaaaagaacatactccagccacgaacacagtgcactatagtctatagcttcacctttttgttgttgttgttgttgtttcattcaccatgtctactatgtctgaagggtattataattccaagaagagtggtgatatatatggccagcagggaactcgcgcagcattgagcatgtcaaggcttcgttgcattctgcgagggttgaatttcaagacctatatgtttttgtttcttgttgttccaatgggaatcttcagtctgtattttcatgggctgaaaatctcatactttctgagacccctgtgggaatctcctccaaagcccttccatgaaatccctcattattatcatgagaatgtgtcaatggagaccttgtgcagacttcatggttggagaattcgcgaatcgccaagacgagtctttgatgctgtcttgtttagcaatgaagttgacatcctcaccattcgctggaaagaaatgtatccatatgtgacacattatgtgatcctcgaatcaaactcaacatttacaggattgcccaagccgtcgattttcgcaagcaatagggacaattttaggtttgttgagtctcggttaacgtatgggatgattggaggaagatttaagaaaggtgagaatccttttgttgaagaggcataccaaagagtagcctcggaccggcttttaaagatagcaggaatagaagatgacgaactcttgataatgtctgatgttgatgagattccttgtgctcacacaattaacctcttgaggtggtgcaatggtatccctcctgttcttcaccttcaaatgaggaattacttgtactcgttc

SEQ ID NO: 70411 - DNA, 215 bp, Glycine max
  Clone ID: PAT_MRT3847_34592C.1
ggttctagtgtatgtgattgttgtgactcgttcgtcttcttgtttatcttcttcttttgttgtttgtgtttttgttttttctctcacctgaaaatgtcttgcttctgtggtaactgttgttgcttaagctcctgctagtgcttcaactgcttctgaggctgcaagatgtaccctgacttgatctacacctagtcaaccaccatctagaccttttt

SEQ ID NO: 70412 - DNA, 487 bp, Glycine max
  Clone ID: PAT_MRT3847_34593C.1
ggctcgagcggttcgagcacccacacgcttcattatacttgttctcattgactgggttacaaaaggcgaggggcgtcattactattatcaaagagggtcctctagccattgcaaaggtcgagctgtaacagtcaccatatccactgaatgtgccgaaccctgtgatgaacccccatacacttgtgttttactgtgggaagcaccacaagacttatgtggtaaatcacaaaaaacaagtccttgggacagagcttgatgggaagccacttgaagatattattgtcacatcatacaataagggttacattctcccatctctcaacaatgcaactcaggtatggaaccatgacttattctgggagagcatgaaaccatgtggaggaggaaagccatcctgggagcttttaaaactgaatgatagagactgtggttcattatgtaaaatccatgatgagctcaaggctgctgcttctacacaatttggttc

SEQ ID NO: 70413 - DNA, 487 bp, Glycine max
  Clone ID: PAT_MRT3847_34594C.1
ttaaggacaatgtgcctccacacgtctcatactgttgctgcattgtttctggttttgcattgctgcagggtttctgttattgcatgtgttgttgtttcttactgatattacgttgctgcttcaaatttgacaacgaaaatatggtctggtctccactcttaacaacttacatttagaggaaggattaccttattttatatgtcgattactttattaaggtattttttctttcgaattttaattgtagtttctcacaatatattttccatttttgtattatatttctatcaccatctataaatgtatgttaacacgatttctgtagaaaagctctgccggtgcaccttgcaacatgccgtcatgtaaaggtggcaaatgttataatgagagggatatgtaactatttagacagaaaatcgttagcaataatttctcttagaaaggtttgtcaaaaccatgcaatgggacactaacaactgatcggcca

SEQ ID NO: 70414 - DNA, 250 bp, Glycine max
  Clone ID: PAT_MRT3847_34595C.1
gatgagagcttgccgttcctgcttgacttttgtgacaggtaccatctcagcattctgcaatggttgcttaccgttggtgaagtgttgtggcaacattctcacatctcatatctcataatctcaagctccgtgtgtttatatgtctctccattcgcacgtgggcattaacgttgttgctttcgtcagttttcacgttgatcgcaatcgctctctctcttccactttccctgttcctgaccaagtttcatgt

SEQ ID NO: 70415 - DNA, 357 bp, Glycine max
  Clone ID: PAT_MRT3847_34596C.1
aattccttgcaagccaaaagcttaactggattaaggcaactttgacatgtaatccaccccttttatccaacttatcaaccttcaagtacatacaccaattttcttccaccaacaatcccattttacgtgaagtcgaggaatcatattttccgatgggatctatggtgagtacccataaccttttgcacttatcacttttgagatacctgaaatattgcatcattatcgccaatcatcaattaattgcaattcaagcaggttttgatggaatctaaattttatggggcacatgggtatcttaatgatcaaattcttaaaggatggaatcaaatgattccaacaaattaattttgtgga

SEQ ID NO: 70416 - DNA, 603 bp, Glycine max
  Clone ID: PAT_MRT3847_34597C.1
cttttcttcgcgggccctcggccgcgcgccctccgcggagatgcagaccgtcaaattgatctccatcggcaatagcggtgtcggaaagacatccatgctgattggctacacagctcgtgtcttcccgacggagttcatacccacggttttcgatgactatgcggccaacattatggtcgatggcaggcctgtgtacatagccttgtgggataccaatggcagtgaggactttgatcgcttgcgtcccatgtcgtaccctcagaccgacgtgttcctcgtgtgcttctccgtcgcctcgcccacgtccttcgacgccgtgcggaacaagtggtggccagagatgaccaagcacgccgaccccaacacaccctgggtgctggtggcgacgaagaccgacctccgcaatgacgccgcgctggtagcggagctcagagagcgccaaatggcgccgatcacgcaagcacagggacaggcactagccactgagctcggcgctgccacttattgcgagacgtccacgctcaccctcactaacttgagcgacaccttcgatgcggcgtatcgcgctgcattggctccgcggcggtacgccgcgcgtaaggc

SEQ ID NO: 70417 - DNA, 224 bp, Glycine max
  unsure (1)..(224): unsure at all n locations
  Clone ID: PAT_MRT3847_34598C.1
agttgcngcacgcgaacgnangcgcgggttnggcacgagcagcaggagannggggancnnnaagcccnnnnnagacngagaggagnngcnacgnagcgnancgagnagagggnanacggnaggangcncagngnganacgggcannagacgnanngacgnnggngacgggggncngngggngcngnggtgganagnagngggnggaacggcaggaggcggggag

SEQ ID NO: 70418 - DNA, 103 bp, Glycine max
  Clone ID: PAT_MRT3847_34599C.1
ccccgacacttccactgtaatacacaactttcccattatagtgtactctgcagaagcctgcgaatctagtgtatgcgaagcctgcatggcgcagatataccct

SEQ ID NO: 70419 - DNA, 280 bp, Glycine max
  Clone ID: PAT_MRT3847_3459C.1
tgctacaagatttacccatacttaaactacacctagtcaaccaccaccgataccttggtcatgggagtggcaccaattaaggctcaattcaagagtgcttaatatgatgttcccactcagaacgatcgctgctaattttgatctaactgcacctacaacccctgcacttgcaagtgaagtgttggaaagctaaatcttcaaacatatatcgcccttagaaataatgataaaaactatatgtaatttcaaaacttcaaaaatatgtaatatgtattatgtt

SEQ ID NO: 70420 - DNA, 736 bp, Glycine max
  unsure (1)..(736): unsure at all n locations
  Clone ID: PAT_MRT3847_345C.1
ttatccggctcgagcactccttcctagttcctagtacactatgttgtcactttccaacgtacacctttccactgccgttctgctcaaacccattttccttcatggcttgtccggtttcctccaccttctgttgctcgtggcggttgttctgtcatgggtttggaggaaattcacagcaggtcccggggatgagtctaagaagaaacccaacaactccctcttcaaaacgaccgttttttcttctcttgctctttccgctttcaatttcctcctctgtttcattaactacttctactggtatacaagtggctggtcagaagaaaagctcgtgacccttctggatttggctaaaaacgcttgcttggggggttgtttgcgtctgcttgcaaaaagcgttcttcagttccggccaaagaaggttctcgttcttcttcagcgcctggttcactttctacctctctgtttcttgctattgcatcgtggtggacattgttgttatgtctgggagacgcgtttctctgccaacacatttttatttgcacgtttctctggtgagggcaagatcacagaattggtgtgagagagatgggttcgtccgtgaagctttcaaggagggccttggaaactgagatgcccgttatggntcagatgcaggaatttgcacgaggagctaanaatgccttgtctttggcccanggggttggtttactggcagnctcccaagcagcgttggaaa

SEQ ID NO: 70421 - DNA, 169 bp, Glycine max
  Clone ID: PAT_MRT3847_34600C.1
ggtgctgttcttgcgcgtgaacaagcctcaggtaagccaaaaccatggttaagcataacaatgttatctcaaacggacactcccgtaagcgctggcagaactatgtgaagacttggttcaatcagccagcacggaagcaaggagacgattggctcgtcagaagaaactg

SEQ ID NO: 70422 - DNA, 516 bp, Glycine max
  Clone ID: PAT_MRT3847_34601C.1
cactgtctgcgagaagacgacaggaggggaaaacaaacctgcatccatcttcttactctttcgctagtgcctattctttccctatcccctctctttcgagggtttaagtttttctttccttcccccttaactattaggcctttatttcatgtctacttaatatccgttgtcagatatgcttccattcaactttgaatccccattcacttgttcctcctgcaactctaaccctagaattgaagatgcaaccacagcaggctaaggcagaatgccatgttgcaaccatctgtctaccaccaccacggtctccttactgctcctcagatagagcctacattgagcggaaatctgccacctcgctattattaaagctcatgccgcactgattatgttcgcatcatttataatcaggctacagattcccttctataaaacctttattcatctacaaggcccccttcaccgacggaaacctcattcggaaagagaagccatcctatgccctatcggactaca

SEQ ID NO: 70423 - DNA, 252 bp, Glycine max
  Clone ID: PAT_MRT3847_34602C.1
cccaggggagtttaccatgttagagcttgctcaggtatcttactcttcttctctactctcactttcatttgttcattgtttctgtttacaattatgccttttccttatttctgtcagaatatgctatgacatgtgtattttatttttattcattccttaatcaatagcctaacagtaacatatagcaaagtagttgtgccttttacagtaagggcacacttttggcgagtggagtgagattgaagttacttt

SEQ ID NO: 70424 - DNA, 393 bp, Glycine max
  Clone ID: PAT_MRT3847_34603C.1
atataatatgtaataagaatcaggattaattgtcacgcacccattatataacaacattgataacatttaaagtttgcagttttgatatacactgcaacaattccgggaaggaaattgacgatgagtttcactctagttcttgaacaaaaggtagacaaagaataataaatatacacgaggcttactaaacaaaacagataactgttaggcttgattttcaagtaacagtgttaaaaagaatcccacatattgtatccacactaaggcacaaaaatacaagcaacatggcaaagaatgagcatgcatgcacgttcatcatcatcacaagtggcgccaattaagctataagtttatctcgaataaacacttgatccactgctgctagtttggtca

SEQ ID NO: 70425 - DNA, 173 bp, Glycine max
  Clone ID: PAT_MRT3847_34604C.1
cgggccgaccgacgcgtccgaccggttgcaaaaaaacaccaaatgggcctttcgctattgaacaaaaatacaggcatttgtctatttaagataggatgccggcctatctacatatgctctctggatccatctaactgctgcacttaaaatggccttctctgtcactgccgctc

SEQ ID NO: 70426 - DNA, 1288 bp, Glycine max
  unsure (1)..(1288): unsure at all n locations
  Clone ID: PAT_MRT3847_34605C.1
atgatgctcatagcgcatagtgtccgctatactttacctggacaaagaaaaaatagcatccttcactataagaaagcattttttttctcttttctaatttaagaaaattacaccaccttgaatcttagacagcttgagttcaaaaatggggcttgatggaagattccaaagatgaggggacatgtgaagggggaacaagctcaataaataaagaagttctccacaacttggaaggtgatcagcttcaagaattttccatcatggctactgagacttctgcatctgatcatgcttctactattgatgagcaatatgtgaagaatgaaaaggacgaaggcattgcacaaaagatggcttctttagcaaatgaagatgaagtcaaacatgacaagcctgaggatgaggatactccttcatcaaagacagaagaagatgaggttgctgcagttgagatcgaaaaatctgaagattctccggcattagaggcttctgctgaagatagtgtgaaacatgacaaggttgaggatgcacaaagtgcaacatcacccccaacagatcacaaggttgaacctgctattactatagaaaagactgaagattctgtgccatctgttgcagttgaagacaatgtaaaggaggagaaggaagtggttcctgactcacacagtatcagtgacattgaaccagttcataaggcaccactccacagaacccgctgcggaggaaacaccaccactggaactagaaaaggaaccaagcaacacagatgagactagtcctctgacagaatcagaaggaggggtgctgaaagaagctcaagttttggaaacatgtgcccaagtggaagagaagcctgagcctgtgtctacacctgtggctgctgaagttgatgaaagccagaaagaaccagaaaagcaatcattggaacaaagggtagaagaggagaaaccagacacatctgtagttcctcaacactcagaagaaagcggtgatgccacagaggtcaaaacaagagaactagaatttgaggcagaggtattggaaaagactaacaactctgaaacagagaaaccagagcctgtggaagctgaagttgctgaaagccagagagaagcagagaaagcagagcctgtggctgctaaagttgatgaaaaacagagtgaaacagtgaaagcagagcctgtggccgctaaagttgatgaaaaccaaagtgagccagaaaaacaggagaaagaagagaagcctaagaaagntgctcctttaaccagaagctgaaagtgcagaagca

SEQ ID NO: 70427 - DNA, 471 bp, Glycine max
  Clone ID: PAT_MRT3847_34606C.1
ctcggttcgctaccagtgtaagaactactacaaactgcgcacagatggagatggggaggcgatgccatgcagcctacctcatgtacatctcagagtcagatttacatctccagcagatgtgggaaaagaaggaatgctgatgatgatgtcaccctcacctagagtgtacaccttaaacaatgagaagcagtggataaataaggctgttggagataaacttcctgaatgtgaagcagtatgtgggaagcccaagaatccggcaaacccagtgcagcggatcctgggtggacacctggatgccaaaggcagctttccctggcaggctaagatggtttcccaccataatctcaccacaggtgccacgctgatcaatgaacaatggctgctgaccacggctaaaaatctcttcctgaaccattcagaaaatgcaacagcgaaagacattgcccctactttaacactctatgtggg

SEQ ID NO: 70428 - DNA, 421 bp, Glycine max
  Clone ID: PAT_MRT3847_34607C.1
tatatgagaagcaaaggattttctaatcaaactaaagttggccctaattatgttgatcaaaccatcttaagtgctctgatgttaaattttaggagttaaagaaagaatgttgtataaacataattgtcttcacgactcatatgatactcgtgacaaaagacatactcagcaacaacttgaggaacattaacaactggctccttaattttggtgcaccagcaagcactgcaacaacctttctgatctttgccatgctctgtgagcaaaggcagtggtcgtgctcacccatgtctagatgcactatgggcatcagtgacatcaatcgctctttgatgtgaactctcgtccactctacaaccaccaattatcataggtgaagtcattttgtacatgaaagttaaaaaataagatgttaggccga

SEQ ID NO: 70429 - DNA, 1284 bp, Glycine max
  Clone ID: PAT_MRT3847_34608C.1
actttatctaaataaacctccaattgacaaccttctcacatcctcatggcctccccgccgcctacgccacgcgcttcgtcgtcgccggtgccaacttcggctgcggctcctcccgtgagcacgcccccgtcaaaccttcatcaccctcttccttctcagttgaaaaatatagattcaagacaagttatgattgtaatacggcaagaacgatttggaataagatttgcgtggatcgattttctgatgctttggctagagcaagggaaaaggcaaaacaagttactgtatcagagaatgttgctgattataaaggccacggaccaagaggaatgagaactgaaatatgggatggcttagtaggtatttggaatacaccagggtggaagaataagtctattaaagccaaaatgaatagagttgcctagcctgaagccaatgtgcatacaggaggggatctagaagcttcgagaaaaccttgaaaaagatggatgtagagtacaagcttcgtgttacttatagtgaattatacaacaaattgcataagacaaaagatgggaatatgtctctagcaaaacgccaatacaagtatttttttattaatattgaatttagatattgatttgtttcctattactaacttactaaaattttattaatttgctataagaaacctatgaaaatgcctttacagagaaatatggagaaggataaatcataacatcttacagctgacttttagctactttgtgttgcacattaattgtagaatcctttgcatgggtaatagcttggagctaatgagaggttctccacagggttcatcttcaacaacggtaggtccatcttccacaaatcctatacaatccacagaagacatcactgcaatatctacacggaagtcttacatgcaagagcagatgcaaacccaactgcagatatagacaaaatcattgcagacacacatgcaaacactaatggcgaacatgcagctacagatatagacacaaatgcaattgcgaatacaagcacaattggagtttttatgaaaagagatattgtctgccttcccccctatcagacaaagataaatgataatgcccttaagtttgatgattgaatttctctttttatatgtgttttaagactcaccaatggatgaaacttgttgacaatgtttagctactttgtgttgcattttaattgttatacactttgatgacaatattttatttagttatcttgaaagaagaaatttagaaatagattgagttgttgcccatattt

SEQ ID NO: 70430 - DNA, 383 bp, Glycine max
  Clone ID: PAT_MRT3847_34609C.1
gatatatatatatatattattttcgggtattagttgatgtgcctaagaatgatgaggctgtaccaacaaatttaaacatattatttatttacttgagtgggagaaaagtctccgatttgtgcccgataaataaaacaaaccaaaaaaaatgctctcaaaagcaaaatacaaaaaatgacatagacaaaaaaataatattctggaggtctctggcaaccaaatgtcaggaaacatgaaaaaaattggggcggcgcccccttgggaaccccatgcccccggaattaaaatctggcccggaccttgccggattccaagttttacttttatggagtgtattaaacgtttggcgcaaacatggctaaaattgttactgggggaaaatt

SEQ ID NO: 70431 - DNA, 746 bp, Glycine max
  unsure (1)..(746): unsure at all n locations
  Clone ID: PAT_MRT3847_3460C.1
gccacaatcaagataagacacttgtggagaactcgtgctatagtgttccatatgtgtgaggtgcagccacaagagaagatatatattattatcattacatagacacactntattcttccggctccaccaaaactttgtccaccccatcatttgtcttctcaattctcatcactaacacacaagtgtgcgttgtagatttctcagtttgcaacatatggcttccatcatcatgtcatttgctccagcaactggtagagtctttgcagccacagcagcaaagggtgctggtggaagcaaagagaagggtcttcttgattggataattggaggattgcagaaggaagaccagctggtagagactgatcctatcctcaagaaggtggaggagaagaatggaggcaccaccaccaccaccactggccgcaacaagaactctgtggcagtgccacaaaagaagaaaggtggctttggaggcctctttgccaagaactgaagcagcagtgatgatttgttatttaccttacaattgtttttacctgttttcttctgaaatgcttgcactgttgtcttgtccacttagattccaaccacctgatcttatggaatactttattatgtctggctcttctgggtcaatgtatttactgaactatatcgattccttttggatcagttacctgccaggtacaatctgttaattgacaatttgatatatttggattttttttgggtattttactttattt

SEQ ID NO: 70432 - DNA, 228 bp, Glycine max
  Clone ID: PAT_MRT3847_34610C.1
gttttaatgcttctggactgacaatgtcatgggatacgagtggcattagacgtgtggtacaagccataatcaatgtgctgacgtgcaatgtacaagaccaaatgggtgcgctggcgtgctacataagggtgctaccaccaaattgagctcaccaaagctgcttgattattgacttggagaactgagaggacacatggtctctggtggaatggttgttcatagccaatg

SEQ ID NO: 70433 - DNA, 225 bp, Glycine max
  Clone ID: PAT_MRT3847_34611C.1
acgagcacaggttttgttggaagaactgccttttgcttttataaaaatgaatattttctttctgtcaaaataaataaagcaagaaagtggactgtatatgatggaattttcatgatttttcctcttgcttatgtttgcatttctcaattatgagcttatttcaatttacttgggtggagttttcttttttttcttatgggtggggataaaatggggggtttaatt

SEQ ID NO: 70434 - DNA, 796 bp, Glycine max
  Clone ID: PAT_MRT3847_34612C.1
ttgacaattacatcatgtaatgaatattacgtatagaatatctggcaattacatcttataatggttattgaatatgaaagcggaattttgattgttttcagcacaccagctgctattggaatggtgtttaattttctgctatagtgtttcctgcatttgaatattcccattgttaaacagtaatcttagtgaaatctcatatgcagaaaatatggcaccatttactaggaaagctctggcaactgtagttcctaaaccccgccatagcacaccgtatccttcttcgttaacactctttttgaaacaatctataatgcctttgtactttatagaagagggtgtttgagcctgtagtcttgtctttacaacatcaaaagggtagcaactaatccaactcgtcacccctgctaatcctcctgctattaacatagtattcaaactctcttcaccactttttctgcaacctgggtgaagttgttccctcatgtattcatatgtccagaagtataaaccatgagaaggtccatccctcatcacagtgacacctagacctcgatagattcctcgaaggccttcttttctccatatgttcttagcgagcattagaggaccttttgcggtttctgtcatctgacctgcgttttgcagctgaagtcgaactttggtcaactccacaggggatattaatagactttggatggccccggtaccagttcctcctaaagcaacacccttgtaggaaggagggtctttagcagaaacagatgagtcaaatgcccttgacagaacctcgtgc

SEQ ID NO: 70435 - DNA, 304 bp, Glycine max
  Clone ID: PAT_MRT3847_34613C.1
aacacccctaccttatatgaattcagtaggaggtttggaagtggccggtgagcttacggcagcatgcgacaaaacttgtatcctatcggctgactcaagtgcagttctctggccgatggctgacaacgactcggctgccataacacgggcgccacacaactgaatcggcttgtaactcatccccctatacccagctgccgtaatagcggataggccagaaccgaacgtccttcctaactgttgcacatcctgaatggcaaatggcacttcgccctgtaacggcacattaatcacagaggttgtg

SEQ ID NO: 70436 - DNA, 1309 bp, Glycine max
  Clone ID: PAT_MRT3847_34614C.1
cccgggtcgacccacgcgtcgagagaattaagattttataatttaacttttttggggtgtgattaaaagagaagctagctaaaaaaaatgggttcagcatccgaaagtgtttgcgttacaggagcttctggtttcatcgggtcatggcttgtcatgagactcatcgagcgtggctacaccgttcgagccaccgtacgcgacccagtaaacatgaagaaggtgaagcatttggtggaactaccaggcgcaaagagcaaactgtctctgtggaaggctgatcttgctgaagagggaagctttgatgaagccattaaaggctgcaccggagttttccacgtggccacccccatggactttgaatccaaagaccctgagaatgaagtgataaagcctacaataaatggggtactagacatcatgaaagcatgcttgaaggcaaaaactgtgcgaaggctaatattcacgtcctcagccggaaccctcaacgttattgagcgccaaaagcccgttttcgacgacacatgctggagtgacgttgagttttgccgtagagttaagatgactggttggatgtattttgtttctaaaacactggcggagaaagaagcatggaaatttgccaaagagcagggcctggacttcatcactatcattccacctcttgttgtcggtccctttctgatgccaaccatgccacctagcctaatcacggctctatcgccaatcacaggaaatgaggaccattactcgatcataaagcaaggtcaattcgtccacttagatgatctctgtcttgctcacatatttctgtttgaggaaccagaagtggaagggaggtacatatgcagtgcatgtgacgctaccattcatgacattgccaaattaattaaccaaaaataccctgagtacaaggtccccaccaagttcaagaatattccagatcaattggagcttgtgagattttcttccaagaagatcacagacttgggattcaaatttaaatacagcttagaggacatgtacactggagcaattgacacatgcagagacaaagggcttcttccgaaacctgcagaaaaagggctttttactaaacctgcagaaactccagtgaatgccatcatgcataaataggcattcatatctttgtatctgtgtgatggctgtgcaacttgcttttcttattccgtttcttgattaacgtttctgttttatgaaaaattagaaatgtgagtggcttgtaaggccaggttatcttcaataagttaataaaaaccatcttctaaagtctaaaaaaaaaaaaaaaaaa

SEQ ID NO: 70437 - DNA, 366 bp, Glycine max
  Clone ID: PAT_MRT3847_34615C.1
ggcctgccactctatagcctggatcgcacgcatcactctgccaagtggcatgcagacgctaccggcgagtgggaacgcatgcacgaggatataacagatgtggctaagcctagactactagcttcacacacggagtctgagatatcacacatgggtacattggactgcttgcttgcaagtcggaaccgcctgtaccatataagagcttactattctgctcataatacttttaaggatgttcatctcgctactccgaaatccacttttggcgggaatgtatgcatttattcgtcatacagcgcacgttatatcaccaacgtgtgatgatagctccgatttgacactagtgtcaattgaatgcaagtg

SEQ ID NO: 70438 - DNA, 1342 bp, Glycine max
  Clone ID: PAT_MRT3847_34616C.1
gctcgagctcgagccgaatcggctcgaggctaagccttataaataataagagcaaaaaaaaaaaaaaccaaaacaacgagagagagaacatgggttcaagttcagcatccgaaagtgtttgcgttacaggagcctctggtttcatcgggtcatggcttgtcatgagactcatcgagcgtggctacacggtccgagccactgtacgcgatccagctaacatgaagaaggtgaagcatttggtggagcttccaggtgcaaagaccaaattgtctctgtggaaggctgatcttgctcaagagggaagctttgatgaagccattaaaggctgcactggagttttccacgtggcaacccccatggattttgactccaaggaccctgagaatgaagtgataaagcctacaataaacggattgctagacatcatgaaagcatgcgtgaaggccaaaactgtccgaaggcttgtattcacttcctcagcgggaactgtggatgttacggaacacccaaaccctgtcatcgatgagaactgttggagcgatgttgacttctgcacaagggtcaaaatgactggttggatgtattttgtttcaaagaccctggcggagcaagaagcgtggaaatatgccaaagagcacaacatagactttatatcagtcattccaccccttgtcgttggcccctttcttatgccaacaatgccacctagcctaatcactgctctttcactaatcacaggaaatgagtcccattaccatatcataaagcagggccagttcgtacacttagatgacctttgtcttggccatatattcgtgttcgagaatccaaaagccgaagggaggtacatatgctgttcacacgaggcaaccattcatgacattgcaaaactgcttaaccaaaaataccctgagtataatgtccttactaagttcaagaatattccagatgaattggacattattaaattttcttcgaagaagatcacagacttgggcttcaaatttaagtacagcttagaggatatgtttactggagccgttgaaacctgcagagaaaaagggcttcttcctaaacctgaagaaactacagttaataatgagcttcttcctaaacctgcagaaactacagttaatgacactatgcagaaataaatatgctttcatatcagggataagtatgtatgttgaagatctcatctatcaagtgatgattatttcttttttgtgttgtttttctttagggatcatgtgtgatgaatttctagctgtaataaagtattgttttttttatccaaaaaaaaaaaaaaaaaaaaaaaaaaaaaagcggccgctctagagga

SEQ ID NO: 70439 - DNA, 414 bp, Glycine max
  Clone ID: PAT_MRT3847_34617C.1
gaaagagggatttgggactcgtggctcgtgggtgagtgcagagagtgaacagattgccgcttcgggtttcatggcggtggacggaaagcggcgatggtgtctcacgatgacagagggcgacttgcaatgcccgcgagtggccgtgttacggtttagggattcgcagaggtaaggaattcgtgtggtggtgttacaatctgatattcacggtggtgaattgcttgtttcctgcgcgaaaggcttcgccgattaacggaaggttcgcggatgggtttattggtggattttggtgatggcacgcgttattggtcccgtagctatgcttctggtgtgtgggtttgagtgtctattggctttggttttatggcattgagtctgtggctgtattggtgggtgcaaacggtactgggtttg

SEQ ID NO: 70440 - DNA, 547 bp, Glycine max
  Clone ID: PAT_MRT3847_34618C.1
tgctgatccaccacttttccttctcttgagattctcgttacccttttcacactaaacacagtaaactcactcatcacttgagaattcagattcatttcatttcgctgtcgttttgctcacaccacgcgcgtccgcgaaatgacccctccaacgacacccaatgcctctccaacgcacgacgctcccttcttccaaccggcgacggttgttccgccactccgctgctaactcccccgccgccgccctcatgtcgccggaatccaccgccaccgcccttaatctccggcggatcctcggcgctgcactcctcttcttcctcgtctctctctcgtgcgtgctgctattcagaaacgcctattactctgtcttcgtttcctccaatcccttgtctcgtttcaccaccgtttttccgcccaacgattccgcagcggtaaccaatgaatattcacttgaaaatattctgagtgaggctgctatgcaagacagaactgttatcttgacaacattaaatgaagcatgggctgcaccaagatcaatcattgatcta

SEQ ID NO: 70441 - DNA, 347 bp, Glycine max
  Clone ID: PAT_MRT3847_34619C.1
ggctcgagggatcttaattcttgtgtactgcactgctgatatctcaagtggccacagtcacccagaggggacatacgtgctcgttttggatcgaaaggtgtttaatgacccaagccgtcgtgtgcatggacactcaaggactatgagctatctggatattcaggatgattgatgctttccacatgacttactccaacatgtataggactagggctagattactgtctgctgagtacaggacaattactggatagtgggctagcaccattgtaacctttgataccttctacactgacggctgtgccactgaccccatgacgaatgccagagattcccatgagccggtt

SEQ ID NO: 70442 - DNA, 258 bp, Glycine max
  Clone ID: PAT_MRT3847_3461C.1
ctcactaccaatgcacaactgacggcacgaagatagctgacgtgctgctttcacaagacattgacacgggtgtgaaagtcaacaagcgaacgctaccccaagcttgtgccaactaagaggcaagatgccaaggtattgatggattaggctttagcatgggtgcttactaccatgctggtgcgcttgttaagacatcgcaaacagtggcttgaatacggaagggtatctaggccatggctgagtacgatgctacctggg

SEQ ID NO: 70443 - DNA, 739 bp, Glycine max
  Clone ID: PAT_MRT3847_34620C.1
ggctcgagatttctctgttcatatatataacgcccattgtaattgtacatggaaggaggagtacctgacgccgatatctctgccttcagagaatgcctctccctctcatggaagaatccctatgtccttcgcctcgctttctcagctggaatcggtggccttctttttggctatgacaccggagtgatatctggagctcttttgtatataagggatgaattcccagctgtagataggaagacttggcttcaggaatctatagtgagtacagcaattgctggagcaataataggtgctgcagtgggtggatggatgaacgaccgatttggaagaagaaaatcaatccttgtagctgatgtcctctttatagttgggtcagcagtaatggctgcagcacctgtccctgctgttctcatcataggtcgagtttttgttggccttggtgttggaatggcttcaatggcatctcctctctacatttctgaggcttcccccaccaaagttcggggagcccttgtagctctcaacagtttcctcatcactggtggacaatttctctcctacctcatcaacttggctttcactaaggcgccgggtacatggaggtggatgcttggagtggctgctgcacctgctataatacaagtggtgttaatgttcacgctcccagaatcaccacgttggctgttccgacggggaaaggaggaggaagcaaaagcaatattaaggaaaatttatc

SEQ ID NO: 70444 - DNA, 402 bp, Glycine max
  Clone ID: PAT_MRT3847_34621C.1
attgattccgggaaccggtggttttttgcagacttcttgcttatttttcacctcgagaaaagtgttcctacattggttggcattgaatgtcccaaggatgagaaactttctcgtcgcaaaatttgtgacatacctaagacgcgctgcttactattttcccttggagttaatcttgtggtccgtcagaagcgtctccaattctgttagggttattatgaagaaaagggacaagcttagtcgccaaggcgggatcaacccatactccatggaatggactggtttggccaatagactgctgagcaagggccaccactttcgtgttgcgaatatgcttgctttgatggtttgattaccaagcaagttatgagcatgatgggtcgaaatatctaccgtctttttggt

SEQ ID NO: 70445 - DNA, 475 bp, Glycine max
  Clone ID: PAT_MRT3847_34622C.1
acaaaggagagcaggaacaattctgttatgtagacagcatcttgacaaaagctgaaaaaacagaatataacaatttaaatcaccttcaaatctgtcataactacaaccacaagctttgtcataataacaagtgctaaaacttcgtaaggaaaacagcaaagaatatcagattgatctactttacctatccaacctaaaacatgcataaaacttgttgccatagaaggaatatcgaaaaagggcaaggggtaaaccataattacctgaagaccacaattcattgcagactcaagttgttggtgaaaacaatagtaaacagcaaccagaacagctttagatctcaggaatgctctggtcattgcatcaacaactttagttgaatctgctttatccaagagatcttgctcatgatgcacaacttccatcctatgcaaagaatgactctgtaaagcattaatgggaaacagaatggcac

SEQ ID NO: 70446 - DNA, 260 bp, Glycine max
  Clone ID: PAT_MRT3847_34623C.1
gggtgggtgtcatgttttggttcttctgattgtcttctttgttttagcttcttctggggtttgtggcctggtcttggaaattggttttgtgaagtgggtacaatgggtatcgataccaatttggtgaccactgtcattggctttggtttgagtgcaactttcattgtttttgtttgcgcaagaataatttgtggaagactacgagagcgaacacggactatatatgaaattgaagcaataacagatatagaacgggcaga

SEQ ID NO: 70447 - DNA, 329 bp, Glycine max
  Clone ID: PAT_MRT3847_34624C.1
ggagcatcttccgcgtcgatgtaaccgattacgaactttcagaatctcgaaactagccgattcacgtaacgccgccgaggttgcactgcttcactccggaagctttccacgacagaaagcgcgttgagggcgcaacttgtcgaaaagaatagcaagttaaggcacgtagaattgcttatatctagaatagcatacgtgccaacgaatcacggaagacataaaccctgacttgtaccattacaacccgttcgtgtcgttggactctcgacacctcgggttccaccgatgccgatgcgagtcgattcagggcgagccaatgtacccgcacc

SEQ ID NO: 70448 - DNA, 160 bp, Glycine max
  Clone ID: PAT_MRT3847_34625C.1
ggaagcagccaataagaatattaagaaaaatatttagaagatgacagtgtcgtacaaagattggcatgagatgttttcttttgccctgcatatgtatcgaaccttggtacgaacttctactggggcaacaccctactccttggtttatgggaaggaagca

SEQ ID NO: 70449 - DNA, 436 bp, Glycine max
  Clone ID: PAT_MRT3847_34626C.1
tttgggctgagttgaggtgcttgcatggtcgtgagaagatcatagaaggggggcctcgtatttcctatctataagctattagctcgctctccacgccgcgatccgcggggacgctaatcttcgtaaggaagagatctacgagagaccctaaaagaccgtaatcagacttcttcgtcggtactagcggcgtcttctaagataacaacaccacgtcccggaacgtagccactcctcgattggaccatatttttcgggacggaggtatacccaagccaatatcctagcctattgacgaccacttcaacaaattattcatagcgtgtccagccctccaaacgccctactttaatacccacctagaccgaactacacgcccggatactccataaaactaccggcattttccacacgacgccctcgacatctccattccaac

SEQ ID NO: 70450 - DNA, 172 bp, Glycine max
  Clone ID: PAT_MRT3847_34627C.1
cagtttcatttcttggtgttttctatctgttgttcaatgtttatgggcaacatcaataatattatctcttactatcaatcttccttttgtttggaaatggtaatataatgatgttgattgctggacaagcaattgtagcttcttacttcaaatgtacctgacatttgaatct

SEQ ID NO: 70451 - DNA, 168 bp, Glycine max
  unsure (1)..(168): unsure at all n locations
  Clone ID: PAT_MRT3847_34628C.1
anncangnnttnngaantactngatntaaatgctgatagttatttgcgcggagttggtggaattgcagatcaataaggattgcggggaagccgcgggatacaacattgattagggaaaacaggagtggggaaaattatgggggggggggttggggataatcggttggg

SEQ ID NO: 70452 - DNA, 522 bp, Glycine max
  Clone ID: PAT_MRT3847_34629C.1
taggagacaagcaacacacagagagataaaaaaagggtagatagtgatcaaatttcacaagtgaaggtagttgaattcaaggaacgtgtgtaactaatcttccactccccaaatcagagaatgaaggatctccaccatgacaattcttattgttgatcatcacgatgtcacaagctgacatctcttactcttgtggttcttgtggataccccctgaacttgacatcatcaaatagaatcacatctaacattgcatctgaatatcaaaagtctgttaagaagggatcactctcttttgcttcagttgatctaagccgatttacgcagattgaccaaataaactgttttcctgtatcatggtttaatcgttctaagactaaattgctttgccgtaaatgtggggttcatattggttatggttatggtggagaatcacatgttctttgtggatttgagtctcccacttcatctacctctcaaaggaaattcaccataaagattcgttcattacagccttcttcag

SEQ ID NO: 70453 - DNA, 547 bp, Glycine max
  Clone ID: PAT_MRT3847_3462C.1
attattcatattgtgtctacaaaaggttatattgataatgattattgtgctgatctgatcataattattatcttatacaggtactttgattatcttttctatgttgattttgaaacatcaatggctgatcagagtgcacaaaatgccttaaggcatctaaaggaatttgctacattcttgcgtgtgctagggagctatcctgtggacactagctcgatgtaaataatctccaaaagaggactcccaaatataattacagttgtgtggagcacagttcttccggtggtcaaatcatgctgatggaaatagagtttgcattgcttcaatacaagatatatacagaaaatagtatcaaatgtacaagcttctttaaattttgatgggcctcccctgccgttaaatttatgttctcacaactagcatacaatgaatcaacaactttttttattttattattactcacatgttagttcaaaaaaaaaaaacaataggaatatgaaaaacaataaaagaaaaaaaaaagaatagtaaaaataattttgaattt

SEQ ID NO: 70454 - DNA, 445 bp, Glycine max
  Clone ID: PAT_MRT3847_34630C.1
gcgtctactaactgaattgcgaaattcattgatccggaggtcatcggttgagagcgaattccgggcccttgatccatcggcggaacgtgtaaccaatttcacatatccaaccctcatatacagcatctggttatcataccgcaactctaccgtgtaccttctgaaaagtcaaaaacaacccttctatgtatctcacttacaaacgtactctacgtacttcccattatataagaaatattggaaaaaaaaggatttactgctgatacaactgacagaattgaaacttttgttaaagaaaaaggatctcctttcggattatgctctagatgaaaccaccaacatcgtgctgcctcaaatcacaaagcgagcttatcaagcatcgaaagagcctcaaatattattcatagctccggaaaataccacgcattgataagtggttttgact

SEQ ID NO: 70455 - DNA, 705 bp, Glycine max
  Clone ID: PAT_MRT3847_34631C.1
tttttctcattcaatcttatctttaattacaaacagaaaatatacgcacgacaattattgatatagtttgatactaccccctctaatcgttatctatacacgagtccccttcagattaataaacgtgcatgcactcttctcatgggtccaaaacgttgacgtttagccttaccgcacgaaagacctctttttcttgccttggtagaccgctccaaatcccaacgtcactcatcgcctaatttatacagtaaagatgcaacgctttcatatcccaacaacgacttctgagccttaatgcctactacacatgatagcgacatgcaccaccaccacatcctatcgtttacctatgatctgctacaatcggccacaccgaatccgattctgcggttcgcgagatcaaactccacccatagattttgctggtggaagttgcctatgatgttgctggccgcacccaatctttcggacctcccgattcccaggcagtggaccccaccgcccacgtcagcgagcaccctctccttcggaaccacgatctccacgcctttctcgaactcgaaggccacgtcccttaacagccgtccgatctccattgcattcccatcgaaacacatgtccgccactccaccgtacacgtaccccttcttaaccctgggtcccagcactctaattatttcttcccgcaccctatcataagccacg

SEQ ID NO: 70456 - DNA, 271 bp, Glycine max
  Clone ID: PAT_MRT3847_34632C.1
gtcttttatcacacaatgttgggagcgctcattgaagcggtgagatagacttcgggagtggtgattctgggcttcaatctctatcctgtcattgtttttttctcaggaaatgaatacaagtcgtgactgcttcattttcacggatgcgttggagacttcaagcaatcaactctttaaaatagctttacatgactgttcattatgaatttgctatcaggatttatatttaatgaacctgaattttttttgtatagaaaaaaaaaaaaaaata

SEQ ID NO: 70457 - DNA, 1321 bp, Glycine max
  Clone ID: PAT_MRT3847_34633C.1
ctcgagccgattcggctcgagacgggacgacagaaggggattgctctgaattttctgcatcatattgcacacagagatcgtgatcgaaaatggcgacgttgaaggttcctgcacaacttccttctccattggaagacagtgagcaattgcgaaaagcttttcaagggtggggaacgaatgaaggattgataatatcaatcctgggtcacagaaatgcggctcagcgtaagttgattcgtgaagcttatagtacaacccatggagaagatcttcttaaagatttagacaaagaactttcaagtgactttgagcgggctgtgttggtttggacattggatcctgctgagcgtgatgcctttttagctaatgaagccactaagatgttgacttcaaacaattgggtcattttggaaattgcttccactagatcttcacttgatctccttaaggcaaagcaagcatatcaagcccgtttcaaaaagtcccttgaagaagacgttgcctatcatactaaaggggacatccgcaagctattagttcctcttgtgagcatattccgttatgagggggattgaggtgaacatgacattggcaaaatctgaggctaaactgcttcacgagaagattgcagagaaggcctacaatgatgaggagctgatcaggattttgtcaacaaggagtaaagcacagttaacagcaacactaaatcagtacatcaatgagttcgggaatgccataaacaaggatctgaaaaattgaactcaaaaagaatgtgaatatctgcaatttattgagggcaagccattaagtgcttgacttaccctgagaaatattttgcaaaagtcttgaggctggctataaacaagctaggaactgatgaaggggcccttactagagtggtgacaaccagagctgaggttgatttgcagcgaattgctgaggaataccaaagaagaaacagcattcctctggaccgcgcaatagccagtgacacttctggagactatcagagcattctccttgcactggttggacatgaggattaagttttctttcttaatctgttcagttgtcatgggattgcttgttaggctatttgcttttcctcttatcatgaatgtgatattgctatggatctctggacagaggaattcagtggcttgctgttaacgctgcttatgaggggtataaattatcatgctgtttcagaataatatgttttgaatgtcgaaaattcaagacatagcacttcacatctttattaaggatcaattatatgttttagaataataaaatatttgctgcgtctttttctactgtt

SEQ ID NO: 70458 - DNA, 1377 bp, Glycine max
  Clone ID: PAT_MRT3847_34634C.1
aaaaccagaaagtcagttaaacttgctgattttggtctggcaagagaagaatctgtgactgaaatgatgactgcagagactggaactacccgttggatggcacctgagttatacagtactgtgacattgtgtcaaggtgagaaaaagcattacaacaataaggttgatgtctacagctttggaattgtgttgtgggagctactaacaaaccgcatgccttttgaaggaatgtcgaatttgcaggctgcttatgctgctgcatttaagcaagagaggcctaaccttcctgatgatatatctcctgaccttgcctttatcatacaatcatgctgggttgaagatcctaacatgagaccaagcttcagtcagattatccgcttgctcaatgagtttcactttacactccaacaaccatccccttcaatgccgctagaacctgagaacgaacctgaggctataacaagtaacggtaccataactgacttttctacccgaaataaagtaaagttttcgtttattcggcacttgttttcttccaagaggaccaaaagctaactgtgagagttggaaatttttttaaaaaattccttttgctgtaaataaaagagttctcatagcagcttttacaagtaatcatttaaggtgtagaatgatgttgataaactttttgaaagagtaaggaaatagaaaggtttgtttatattatgcagttgatcttgttgtgtaagaacaagttggtttacatatttgcctccattctaagacatgtttttgattaaagtgaagcaattcctagtatagtagttgtatccaaggagtgctcaataatttgtttgtgttaattgactgaatgtcaattttaaagtaactgtgattatatatatagttttctgcccgaaacaggaaagtttggctttcttcgccaattgttttcttcgaagaggaccaaaaactaacattgagcgctgaattttttttaaaattcccttttgttgtagatgaaaagagttgccattctatggtatacagttttaggacatttatgagttaaccatctcaggtgaccaaaaggatgtaacatgttccataaaagaaaagaatgttgtttatagacttttgaaagattaaggaaagaaaaaaaaggattgtttacattatctagtagatcttgctgtaaaggaacaaattaatttagacattttcctgctttgagaaaggtaattactgagcattgtaaagtagttgtttccaaaggatgctcaagggtaactttatgcttatttgggagtgatatttctgattagttaattaagcatattgtttaagtaaatttttgtattttgcattaaaaaaaaaaaaaaaaaaaaaaaaaaaaac

SEQ ID NO: 70459 - DNA, 232 bp, Glycine max
  Clone ID: PAT_MRT3847_34635C.1
ccacacgcgtccgccaatggttcggtttattttttcgccaacgcgtcctaaggaaggagcggccgaacccgtaatggaactggtggtaatataaattttatagttggttactgacgctgaaccaaccgttaaactaaacttcccaaataaccatgggggattttaaacatatttccgttaaccgttttttcggcgaaggctaaatggttgatgtggggctggggaagaattg

SEQ ID NO: 70460 - DNA, 767 bp, Glycine max
  unsure (1)..(767): unsure at all n locations
  Clone ID: PAT_MRT3847_34636C.1
tccatttttttttatttattcttttccccagtagtatattattcctttcctaataagttctaaatgataagccttctttcattttgtagtaaaattttgttttccttgaaaatgctactttacctttctaaaaactaatttatctgtgttaattttttatatatcatcgagataagtatttaaacacgtgagcaatatttatttagtattgattaggaactgccttttttggtggcaaacatgggctgaattgattagtgagtgcttgttattagttagtgttgattttgcatacatggagcttgaaagcctaaataactcaaattagaaatcttactatgctagagaacaaagtcatgtgtatttggctatttcatctatgtgagtgtcactttgttagtaacacgaatgtttaaattcacaaccactctcgtataaattatgtacagttttatcactaaccaattgcgattggcttaaaattttattcgatggagaaactgttcgtgcttctgtatctataaaatatctatgtacattaatgggcctagttgttgcataacgaatactggaggacagaagatattttcttttctagagcaaaaaatgaaaatgattcataaaattaatgctagctaaattcaatttgaacaacaaaacatcanattcatactgtaggatttacctccggaaaagagacaaagcaagctcaagagattaaaaattccttattaagtggcactgtcacgaaatacagttataaatga

SEQ ID NO: 70461 - DNA, 341 bp, Glycine max
  Clone ID: PAT_MRT3847_34637C.1
ctctccctttcacttcctgacaaactagaggaaactgcttatctcccatgttacatgaattgtttctctccctctcactcccaacattttttaaagaatattttgggtggtaatttatgacaaataaccagtgaattaagtctgagtatttattttaccgctgatgtttttgctagaatccggggggggtttggtgctttttcaaaactattttaagtttttagcttatggaaaagttattaaacaacatttttagtcaatttttttaactaagagcattttttccttttagcgcgagagacggatgagaatataaggagaagcgctggtcagtccttttt

SEQ ID NO: 70462 - DNA, 180 bp, Glycine max
  Clone ID: PAT_MRT3847_34638C.1
aagcaaacctttaatggcacgaaggttcatgaaataggcgtgcggcctattcaaaccactcacataaactaaaacacttaacgtgtgtgaacagatggtcaagccgtgcactacaaggctgcggtgcagggaactaaaccaatgtgcttgcgttttatatcttagtggttgcggggggag

SEQ ID NO: 70463 - DNA, 1204 bp, Glycine max
  Clone ID: PAT_MRT3847_34639C.1
tgcgctgtaccaaattagtggccagtgtttagtgtttctgaaattagaggagcgccagagactggtaagggtgctgcgtccactcattcattactcactatactcatacggggtttctaaatcatatgccaaattagtagacaccctatgaattgttgttctgccatggcgtcccttctcaaatcaccttcctttctctctcctttgaaccaaaagttgaattatgtaagcttttctcccatgaccacaaacctgcaatccaaattttgtcgtgctagtgtaagaaatgggagatggcatgttcctagtttgacaataaaatctcaggcagctgttgaaggggatgtacttgagaaagaatcagtctctatcaatgaagaaagtgattacggggtcgtttgtatgcaccatgttggaattttatgtgaaaacctagaaagatcacttgaattttatcaaaacgttctaggcctcaagattaatgaagcaaggccacatgataagcttccatacaggggtgcttggttgtgggtaggctctgagatgattcatttgatggagcttccaaaccctgaccctttaactggacgagctcaacatggtggtcgagatcgtcacacgtgtattgcgattcgtgatgtttccaagctgaaagcaatctttgataaagcggggatcccttacacacttagtcattctggaagaccagcaatctttgcacgtgatcccgatgcaaatgctctagagtttacacaagtagatggttgatgtttatggatattacttgctaggctacacccctttgtcgctataagtcaccagaatgtagaaataaagttacaaatgattacatgtatgtaaaggctgaagggattgtaactagtaagagccatagtaaagttgtttgctactctgctatgcagtggcactagcagcaatagaatactggcgttcatcttatatatagcacacttgtaaggataaacggaacgtgaatactgagaaataagattgaaagaaattagattatggaaagtgatgttttcagtcaaagtgctagaggctccacgaagggaagcatacaagtagggcgtaaaattgaagatattcagaagccaagactttcattgtttgaacgaatgggatatcgtgtacaattatttttatcttactttttcctttatacacaagtaattagtaattt

SEQ ID NO: 70464 - DNA, 695 bp, Glycine max
  unsure (1)..(695): unsure at all n locations
  Clone ID: PAT_MRT3847_3463C.1
cccccccnccttttgggtgggggtttcccccgcccctttttgggcccgttctttnggtttcccgccccttgccctgtccttggggctggcctgaacccttttgattcccccccttggggttgggttcacttttgcccccccttntttttttttttggntttccctttttttttatgtcccnggaaccccaatctttggggggtctaactgcctgggtcgccccccccttttccctcctcnttctccctttccccgggggttttcgggagacgttttttttcctgcgttttgggttttcgggccctcccccccctgggttttttctggggccgggggcgggggttctggggccccttggctggtgcggggtttcccccttgctctcccctttngcgcctttggggcgtgtgttcttgcgggggcctcccttttttcctcgggccgtgggggcctcttttggctgggtttcggggccctggggggtcttcccctttggggacttgcccccccgggggggaatcccttcgccctgggccccttttccccccgggtttggggccctttttttccctcttgcctgggggggttttttttggggggcgggtaagtttgccctcccccccccctttggtggggggggttgggccttttttgccctgggccccccccgtgttttgtgggggggggggggcccc

SEQ ID NO: 70465 - DNA, 439 bp, Glycine max
  unsure (1)..(439): unsure at all n locations
  Clone ID: PAT_MRT3847_34640C.1
gggtcgaccacgcgtgcgcccacgcgtccggactgcccaagatgtatctttcttgtttctgngcgggcaaaaaaccatcgtctttcgtatcatctattttccatacaccatcntngttgaaattcatgatgtgccgtacaatgttattaaaaactggaattacactggttttattgatgcaatccacatttgttaatgtaaatgctttactgccaaggtgttctgttaaaaggaactagttgaatcaatttccacatccacagaacccaataaagactccttatacttcatttaggtgattgttcataatgatgacaccagttaataattgcttgaatggggctcaagggtttcttcttccaatatccgtcctcccaatccttagtaatcttcataattatttctatgactaaatttcttcagttgccctttacctcta

SEQ ID NO: 70466 - DNA, 486 bp, Glycine max
  Clone ID: PAT_MRT3847_34641C.1
gggattatagccacttgaattcgaggtcctccatggagctactaaccgaacatcttgaacttgaacttttgagctttggtatgcagtagttgatttacaagcatgtttgattccgcattatcttgaggtattccacgtattttgatacttagacgtggagagacggtggctacctgcgttctggaattcattccaaacatggacttatacataggttagtttgaataaatttcttggacgatatttatagaataagaaaataaaaaagttaaatgaagtaaacttttagtataaattaaaatcaatttatgtacttttttatgtgcataaattgattataacttataaaaaaagtttaatttattttactttttattttctttttttataaatgtttattaagaaatttattcaaaatgataggtgatatgtatatgaactactagtagcatattgaaagtcaccttgaaaatatatacgtatatt

SEQ ID NO: 70467 - DNA, 468 bp, Glycine max
  Clone ID: PAT_MRT3847_34642C.1
gcgggcgttaggctggagctagttctagatcgcgatctagaactagtcgaggcttgatcttgcatgctccagcggctcctatcgacccatcagactcgtaatctcttgcacgccaccagatcccttccctttcgcccaagcagatccttcagccggatggccaccagcccgatcgtcaaaagaatgaagtccaccaagactatcggcacccactcgggcaccttccactgtgatgaggctctggctgtcttcatgctccgtcagaccgaggagttcaaggatgccgatctcgttcgcagccgtgaccccaaagtcttggataccgcagacattgtcgtcgatgtcggtggcatctattcccccgaggctcaccggtacgaccaccaccagcggggattcgccgaggtctttgggtctggcgggcacgaccagatcaagctgagttccgctggtctggtgtacaaacac

SEQ ID NO: 70468 - DNA, 322 bp, Glycine max
  Clone ID: PAT_MRT3847_34643C.1
aatctcgctctagattggaaaaagatgcctttacaaaagcacaatttgctagtggaaaaaccttcaaatatgatataaccggagctggttcacattattcagaagatttcactgaaaaggaagatcaggaaaaacccaagaagattgatgccagattgtgacaaagaatagatcctgaatacattgaggttcaggctcagatggaaacaaacgtgtttaacttgtgtcttgatgacgttgaaactcctaaaggctccatgatggaccttaaaatatctcaatctaaaatggcacttaccaagaacacaggtggcggaaccat

SEQ ID NO: 70469 - DNA, 1286 bp, Glycine max
  Clone ID: PAT_MRT3847_34644C.1
cgaggtgcgaggcttagagctttggagactaaagttactactgattctggcattagaactcctgaataccttcaaggctttataaataagcttgaacagagttatgatttgtgcagagtgtatattaggcttttgagccagtctgatgctttggggatcatgaagcagtacattgcagtaaccatgcctctctatagttcatatggactcctacctgacaattcaacgtggcaagagtgccttattgttcttctgaacttttggatgagattggcagatgatatgaaggaaattgcattggaggaaaattcagcagaaactagtagcttcaatccacaatgtttaatgagttgtctgaaggtttttatgaaattggtgatggaagatatcatctcccctaatcagggctggggcagcatatatggttatgtcaattgcggcttaaatggtgattcttctgcagaaattataaattaattcggagctatgattttttctggttgtgggtttggtgctgttgcagaggttttttctgttgcatcatcagaaactggttcagcttctgatcatggcacttgttgtcaggatcttcctcatttctatttagatattctagaagctgttttgacagaattgatcaatggatcccatgagagccagaacctgtatcatatactgtcttctttaagcaagctagaaggtgacttaaaagttatgcaatgtgttagacatgtaatttgggaaagaatggtccagttctctgacaatttgcagttgccaagttctgtcagagtttttgtgctagagcttatgcaatttatctcaggtaaaaatattaagggtttctctacagaaatactagccaatgttcaaccatgggaagaatggaatgaattgatttatgctagtagaaagagtgagactgatgttgacaagcagttgccagatcacaaagactcttctagtagagttacgaatactttggttgctcttaaatcatctcagcttgtggcgtcaatctctcctagcatagaaattacccttgatgatctattgaatgcagacacggctgtgtcttgctttatgaggttgtgtggagaagctactgaagatctccaccttgatgctctgctggctattttggaagagtgggatggacttttcactgcagggaaagatgaagaaaccactgttgaaacatctgatggaggaaatgactggaacaatgatgattgggacgagggatgggaaagccttgaggaagtagacaatcctgagaaagagaa

SEQ ID NO: 70470 - DNA, 347 bp, Glycine max
  unsure (1)..(347): unsure at all n locations
  Clone ID: PAT_MRT3847_34645C.1
ggttgtggtgttttgcntgcccncttncgctgggcccgtttttttttgctttgcccntgggtgttggtgggaactcgggtcttgggtcgtntggtttgcacccttccccccccccgggcgccggggttctttgttttgggggatcgcccctgggggggggggggggttccccntggtggttcttgggcggggctccgcttccagaattttttcctaattcacccatcttccattccctctcgtggatgtccttttggggggccctgtcgcagttggtccaaacaacccctgctcgaattggccttgacattggggtgggtggggccaagcttttgggcccacacccg

SEQ ID NO: 70471 - DNA, 364 bp, Glycine max
  unsure (1)..(364): unsure at all n locations
  Clone ID: PAT_MRT3847_34646C.1
tgatatagcactttagcgtagcaacactgaatgagtaatgaatactcttttagaacttaaaaaacatccaagggtagtgagtgtttctggggctctacagttcctactggccggttcggttaggttcattaggctcatggcgcaaacctctctcgaaggcattcagttcaacgaggaaatccaaggcctgatggctgctccggagccggaaaccgactattccttgaaggcgctgctcgagcttccgacgacgcaagccgncgagctcctacactcgcctgatcgcgccagaaaaccgntgcgccacaggccgaaacctacaacgccaccggcaccgaatccgtcatcctnagcttgcttcacc

SEQ ID NO: 70472 - DNA, 450 bp, Glycine max
  unsure (1)..(450): unsure at all n locations
  Clone ID: PAT_MRT3847_34647C.1
ggctcgagggcggatcgggtagtgacccgcctggactggtaaacaaaccaaaccaaaccttgcaggtctctcgtcagaggcatccattccgttcccacagcactcaccacactgttactcttcttcaatccttactacagacagcagtatcttttattggatttatctcactcactcactggctttgttttgcatcttctcttgcccaactcctccaggcctttccgcctactcgctggcaggaactgatggggaagaaagtcagaaagaagactcgaggttctgccaaggagatgggggttgctacccatttgccaatcaaggttattgaatcatccaacccgactgtcgagtcttttgatgaggttgcaaaagagacaaattcttgccctcatcttgtaaaaggggttaattntgacaggttgtccactaaggttggctcttctggat

SEQ ID NO: 70473 - DNA, 516 bp, Glycine max
  Clone ID: PAT_MRT3847_34648C.1
atattcatctggcgaattggcgattatttttcttctggtaattagtctccatgctgataagcattcagcacaacaatctataatataatacaattcacataaaatctgggtgaatatcatcttctactatttcactagtcatggtctctaagacggtgttgttccttggacctgaatggtcctcaaagttaaagcttttcttccatccaagctctaaattttcattgtcctcagttaagtaattgttccatttggaggctgccctgctgctagttggtttgcatttttgagtcctctgattagctggtgttacgtaattatttctctttggattgctttcagtcaatgatgtaactcttggttgatctatccttagctcctcttgagagttatggaaaagggactttttgaaaagcctgtcacttcctgcagtagaaatcctccaccactctgcgtttcttgaacatacctttttgcaactcaatccaaccagtggctcaaaaacatcatctgcat

SEQ ID NO: 70474 - DNA, 343 bp, Glycine max
  Clone ID: PAT_MRT3847_34649C.1
tctagatcgcgagcggcgccctttttttttttttttttttttttttttttttttggttggttttttttttttttttgtttttttttttttcatcaaaactcaatggaattttgcttcggttttttggaaaaacttacaaacatgatccccaaaagagaaacccagaaatgtaaaccaaagaaagggggcctataaatgggggggtattcaaacactaccagcttttgtctccatgattcacccaattttgaatttaaccaaggaaaaacatggggggatgtctgaaacctcccggtaaaaactttaacaccagtttgtgtcaccaaaagagcccgttaaaatt

SEQ ID NO: 70475 - DNA, 636 bp, Glycine max
  Clone ID: PAT_MRT3847_3464C.1
aaaatgcattgcatttatattacatcaaaaaccaataaagaaatacaatgaataagtattatctaatagactatatcttgatgtgttgggggttcgtaatccttaattagtttttcaaggcttctacacatttccctaaccttaaatggtggtctttcaatggtagcgtatatattaaggatttgatacgggggtcttgatattttttctatttagtattgaaaatgcatgacttgttgaacaaaaattttaattgataggtaattgatttcaggtttatggatccattaacaaccggagactatccaaaaagcatgcgatctcttgtgagaacaagattgccaaagtttactacagagcaatccaaactacttattggttcatttgattttattggcctaaattattactctacaacatatgcctctgatgcacctcagctaagcaatgctagacctaattacataacagattctcttgtcagtccagcatgtaaggactccaatcttctatcattctatcaattccccaaattgcacgtatacattattaaaaatgatcatgggtgataatggacttgccttttatatttgggatggattacaggggaacgcgatggaaaacctaacgggataa

SEQ ID NO: 70476 - DNA, 259 bp, Glycine max
  Clone ID: PAT_MRT3847_34650C.1
gctagctgtaaggtgcttacataataatcatcaatatgagaaccatggttggggaactcgggtgaatgatcatacctcttgtgggagacactgaatatgtcacaattcatgatataacctaatttcggtatattgtcacaagtgatcctaggacctgaagcgccaaatgggatcataaaagggccacaatatgaccagtgcatgctacaagaatctgcacagtatagatactatctggttaacaatactttcatgtcaa

SEQ ID NO: 70477 - DNA, 145 bp, Glycine max
  Clone ID: PAT_MRT3847_34651C.1
ggtccaagggccttgaatccaggtcccaacgggttggaaattttttgggaaccttatggttgctgggaatttgtccgtttccggggaacacaattttggaagaggttctgataacatccgtgacaaacatggcatctgggcggtc

SEQ ID NO: 70478 - DNA, 330 bp, Glycine max
  Clone ID: PAT_MRT3847_34652C.1
tcgtatttttctatagaccttttacagggggggattttagtggacacaactggagattggatcacacttatacaaaattctccaattagtgactttgggagagttgctgcttggaagaaaggctgtttaatggttaagattgtgatgtgtgtgaatgcaacagtcaaaaggagggaatgggccttattggtacaaggatttttaacatacagcagctgttcatagcattttggtgcatgttagtggacaaaattgggaccacattcctgggaattgatcttttcaatggaggtgtgtggtcccaataatggttttgaaaagtgggagttc

SEQ ID NO: 70479 - DNA, 313 bp, Glycine max
  Clone ID: PAT_MRT3847_34653C.1
aaaaacccaatttttttaaaggggggggggactttttaatatccagcgtttttttataaacctttacttccttttaccataaatacctacccctgtcctaaactaggaaaaaaaaattttttgggtttaaaaaaatgggaaaaaaaatttttccacaatgacttttattacacactggattggatccaccatttttgggtttcttaaaaatttgggccatgaacaataaattttgggcttgcccccctaataaataatcccccccttttattcacccccatttcttttttataagggaataatgttttttttt

SEQ ID NO: 70480 - DNA, 217 bp, Glycine max
  Clone ID: PAT_MRT3847_34654C.1
tatgactccatgcacctactaagctcgaatcggtcgactgcatgcccgccattgtgactccactacgcagtatttgagatcctcatctccttccacattttctcctgttatatccctacattactatttcaaccccctgatatgtcaaatctagacatcagacttatcgacatagacaacactactaccgcaattcacatcatcatcaactactttc

SEQ ID NO: 70481 - DNA, 425 bp, Glycine max
  Clone ID: PAT_MRT3847_34655C.1
ctgaaacctgggtcataggattctaccccccgctcgatgggaatggcacttagaggcgtctaatggggttaatccacctaacgagggtaaccaacaccacatgcctttggagggcccagtcactctactgattatcagaaaagagaccgctgacgaacacttcgataacatcacccattcggtcctagaagcgatcacgcctaaacctacacacggtatgtcttcgccactggataatgcatcatgcacgatgaccaatctggcgaataaactgatgctgtatgactagactgaaatactattgcgactctggaatctgagcggacaacctaagctgaatgatgacctaactatggcaacaaaccttacttagatcttggtgaacagacctccacatgacgagtactggataacaatgctaccaa

SEQ ID NO: 70482 - DNA, 405 bp, Glycine max
  Clone ID: PAT_MRT3847_34656C.1
atgttttttgggtgcgataaacttggttttgcccgggtagaagcctgcagcaataaggaagtgtgtgttgataagccaaacctctatggaggatgaatgaaaaagtattaaccccttttataaaagaatgtccggagtccatatcggctggatattacaggtggatgagcacccattgtttgtggggggccaccaaccaccgtattactctatctttggcctacccgtaagggggagattatctcctctgaataggtatagggggttgaaggcaaaaatagatgatggtacacactttttttcaatatagaattggggacctttgggtctgccgagaaaacgagtctcattaaggggtgtgaggaatggggcttaaaccgctgaaaaaagctctattaattcggt

SEQ ID NO: 70483 - DNA, 676 bp, Glycine max
  Clone ID: PAT_MRT3847_34657C.1
acgcagggtaaatagtagtagggaatacgcatgcccttggttcctctacaaaatcaaaagggtttatctgagaaacctagacagtagacacggcagatgttgtccttggtcttctccacaaccacggatattccaaaacccagttacctgtctttgtggcaataggttaacttcagtgttgttatgccaaatctgacaacgttcactgaaatctgtgagtgaataaatggttcctaattttctcattgcaaggttaactgcatcattatcatcggtcacacaccacaggagtacccaaacccaattgggttctctgcttcaacacaaacacaatgctttcctttttttcttcaattcattctcttctggcacctcttctgattctgaatcagatggaaactaccacaaaggtgacacttttactgtgtcttatctcatcaactcatgtggggtgtccccaagaaaagccaaggaactcggtaataggatcaatttggcaacccatcctggttgaaatgctttgattgatcttcaggacctctaaaacttcaccaatcccaatcttgcaaaacttgtgggagaacaccctttggtgcttgttgcggatgcagagaatacccttttgcctaaactcaagttcttccgttctattgggccttccaacactgatatgcgt

SEQ ID NO: 70484 - DNA, 328 bp, Glycine max
  unsure (1)..(328): unsure at all n locations
  Clone ID: PAT_MRT3847_34658C.1
tggtctatagtaccgatctgagattccagagtacttgatcggagaagtgcctgtagattattgtcatgatccgataggacgtggctggatgccagacgacttatgcatgcaccacccgctagagttgatttatgccaaatgggcagtgctagatgctgctggatgcatgattcctgaggcctctaacatgtactgagctaactgtgggcctgagagctgtctgtatactactggaacctagtgtcttgatgggggtacatagaactactatntgaaacctatcaccatgaatcttattattgctggtgtgtctggagacatcgtcgtg

SEQ ID NO: 70485 - DNA, 425 bp, Glycine max
  Clone ID: PAT_MRT3847_34659C.1
tattatgggtatatgttctagtataggttaatttttaaattgagcactaaagataaaagggggggagcggaaattttaaaactccgctcgctaattgccaaaaagggctactcggaaattataccatgaaacaaccccaataaaaaaggaaaatgtaattaaaaaaaacataccggtagacggtcatttcaaaacaagctgggggatgatattaaaacaccatctcgtctgttatgaaaaactattcaaatttcttgcgaaaaaaccattttgacctaatgatgaaaatgaaattggcttcttggtttcccaacattaacaactggaaaacaccttcagcatacaacaaaaccatttgtatatatgggaaatcacagacaacttgggagaaatgatggcaaatgaaacactactttactacacaa

SEQ ID NO: 70486 - DNA, 2328 bp, Glycine max
  Clone ID: PAT_MRT3847_3465C.1
cccacgcgtccgcgctttctggaggattttctttgtaaatttgttaagcgtgttgtaaccagagctacaattataacagtttatttacttcacgctataccaagtgacaaagtaaatcctacagcaagcgcactaaaatgcattgcatttatattacatcacaataaagaaattcaatgaataagtattatctaatagactatatcttgatgtgttgggggttcgtaatccttaattagtttttcaaggcttctacacatttccctaaccttaaatggtggtctttcaatggtagcgtatatattaaggatttgatacgggggtcttgatattttttctatttagtattgaaaatgcatgacttgttgaacaaaaattttaattgataggtaattgatttcactaaaacacgtaataagaaaaacatatcacacaatatggcattcaagggctatttccttctcggcctcgttactcttgttcttgttaaatcttccaaagttacatgcgaagaagaatcagttaatacagtttcacccattattgacatttcactcaatcggaagagtttcccagaagggttcatatttggggcgggatcttcctcgtaccagttcgaaggggcagcaaaggaaggtggtagaggaccaagtgtatgggataccttcacccataattatccaggaaagatcatggatagaagcaacggagacatggcaattgactcatatcacaactacaagaaagatgttgggatgatgaaggatatgaatttggattcatatagattttccatatcttggtcaagaattctcccaaaaggaaagctaagtggaggtataaatcaagaaggaatcaactattacaacaaccttatcaatgagctagtggctaatggtatacaaccacttgtgactctttttcattgggatcttccccaagctttagaagatgagtatggtggcttcttaagtccacgcatagtgaaagattttcgagactatgcggaactttgcttcaaggaatttggtgatagggtgaagcattgggttactttgaatgagccatggagttacagccaaaatggctatgcaaatggacgaatggcaccaggacgttgttctgcttggatgaatttgaattgtactggtggtgattcttcaacggagccttatttggttacacaccatcaacttcttgctcatgcagcagctgttcgtgtgtacaagaccaagtatcaggcatctcaaaatggtttgataggcataaccttggtagctaattggtttttgccgttcagagataccaaatctgatcaaaaggctacagaaagagcaattgacttcatgtatggatggtttatggatccattaacatctggagactatccaaaaagcatgcgatctcttgtgaggacaagattaccaaagtttactacagagcaatccaaactacttattggttcatttgattttattggcctaaactattactctacaacatatgcctctgacgcacctgatctaagcaatgcccgtcctagctacttaacagattctcttgtcactcctgcatatgaacgtgatgggaaacctattggaataaagattgcttctgattggttatatgtttatccaagaggaattcgtgaccttttattatataccaaagaaaagtacaataatcctttgatttacatcactgaaaatggtataaatgagtatgatgaaccaacacaatcacttgaggaatctcttatggatatctttagaattgattatcattactcgtcatcttttttatcttctatcagtaattaggaatggcgcaaatgtgaagggatattatgtatggtctttgttcgacaattttgaatggtcttcaggttatacatcacgttttgggatgatcttcgtggattacaaaaatggtttgaagagataccaaaagctttcagcgcaatggttcaagaattttctcaagaaagaaagaagactttatagctctagtaaataatatgaaattcgtttattcattggttttgtaaataattatttggtttttctttgatattcttttattctaaagaggtcctaatttgacttagagggtattgattattcttttattctaaagaggtcccattggactgagaggtgaaacaaagatgtgtatcagttgattatagctgctatatattgttattgttatgataagaatgaaaaaaacttttggttacgataaagtgatatcatttacggaaagaaacgttatgaatgttatgatagagatgtcgatctatcgataattgctactattttgttacat

SEQ ID NO: 70487 - DNA, 412 bp, Glycine max
  Clone ID: PAT_MRT3847_34660C.1
aggatccacaagcattgcatcctcaagtcaaccaatgaagctttctgcaaatccagaggaaattgatgctctaagaaatcagattaatgcattgaatgaatcactacaaagacatgtgcaagagaaactagagatgaagcaggagttgactcagaccaaagaacaagtaatagctttaatgcaacactttggatttgttggttctttgcgtccatcttcatcacctcaacacaatagtgtaaatgacgatgactatagtgacactattagtgatcatattgattagagttgtatttgatatcttgctacattcttttaaaaaggtgtgttgaggatgatagtgacactattagtgatcatattgaatgtgattgtattcttgctacattcttttaaaaaggtgttgccttaa

SEQ ID NO: 70488 - DNA, 108 bp, Glycine max
  Clone ID: PAT_MRT3847_34661C.1
aaaagatcatacatagtagttactagtgggttgcaaagatgcttgcggggtcttctccataggaggtcatgaagataaacagggcacagtgagtgtatgatgctgcaa

SEQ ID NO: 70489 - DNA, 245 bp, Glycine max
  Clone ID: PAT_MRT3847_34662C.1
cctgcaactggaacaaacatgggttgccaaacacaagagtgtgttccaacagcgtgggttaaactgggcaccagttgaaaatttgccacagggtacaaacaaatggtgggggagggacgaaaccattttttattttgggggagctgggcccgggtgtgataaacatgggaagtggcatgcgtgggagacatgggtgtgggggggggaaaccgtggggagtggggggggtggctggggggggcggg

SEQ ID NO: 70490 - DNA, 164 bp, Glycine max
  Clone ID: PAT_MRT3847_34663C.1
gcataatgaccaagttcacaatcctcctcatctctcttctcttctgcatcccccacacttgcagcgcctccaaatggcactatcatcattatatctgccgtacgcatgtccaagggttcaatctcacgccttgtcatatgtctatcatgttgcatatccaaggc

SEQ ID NO: 70491 - DNA, 254 bp, Glycine max
  Clone ID: PAT_MRT3847_34664C.1
ggtcgagtgctgttcctcttctcttcgtcttcctttttcatacaaccatcttactggtctgagatacatcactggcggacgtcgaactcctccacgagtgcctcataatccatgcacgatgcaaccaacgccctcgactgggtctgcggcaacaaccgtcacttgccccccgattcttcactcctcatcttgttgccaggtttaaccgccaaagcaggtggctcaagcaatggacaaactcggacaggacctac

SEQ ID NO: 70492 - DNA, 514 bp, Glycine max
  Clone ID: PAT_MRT3847_34665C.1
tttctatcgcgtccggcaggttccaagcaattgaaaatgggaaatccgaagacagaagaggaaaggattgaaagagtaattcggagtcttttaaaacttccagaaaatagaagatgcatcaactgcaatcttttgggaccacaatatgtgtgtacaactttctcaacatttgtctgcacaaattgcagtggaatacaccgggagtttactcatagagttaaatctgtgtcaatggctaaatttactccagaagaagtcactgctcttcaagcaggtagcaatgagagagcaaagcagatttattttaaagaatggaatcctctgcgccattcttatcccgattcctgtaatatacacaaacttcgagatttcattaagcatgtatatgtggaaagaagatatactggtgaaagttgtggtagcagtcttcctaggattaaaatgagtgagaaggaggagtcttttgcagtaagaaaagagttcatttcgttttgaatcataagtcctcattcag

SEQ ID NO: 70493 - DNA, 545 bp, Glycine max
  unsure (1)..(545): unsure at all n locations
  Clone ID: PAT_MRT3847_34666C.1
ggctcgagcttgtattgacatcaattttcattgccgtgaaaccttgctttttctctctcggatagaagcaggttccaagcaattgaaaatgggcaatcggaagacagaagaggaaaggattgaaagagtaattcggagtcttttaaaacttcccgaaaatagaagatgcatcaactgcaatcttttgtctatcttgtaaggaagattgcaagaagttcacaagggaaaatcacgtacaacataaagagtaacatgcaaagagaagaatatactagaaaagttaaagggaccacaatatgtgtgtacaactttctcgacttttgtctgcacaaattgcagtggaatacaccgagagtttacacatagagtaaaatctgtgtcaatggctaaattttctccagaagaagtcactgctcttcagcaggtggcaatgagagggcaaagcagatttatttaaagaatggaatcctctgcgccattctcaccccgaatccggtaatatacacanacttcgagatttcattaggcacgtatatgtggaaaga

SEQ ID NO: 70494 - DNA, 244 bp, Glycine max
  Clone ID: PAT_MRT3847_34667C.1
ctcgagccgtgctcatgccaccttcttccttcaccctcctcctcactctccttctattataccttccatatgaagcagagagcggagaaactccaccccctactcccccgccgccgttcagacccggcatagcggtgctggtgtgcgttttgacaaccataatctcccttacatcgctcctcctcctctacatcaaacactgcaacggcggcatcccagacggcggaggcggaaactcggctcc

SEQ ID NO: 70495 - DNA, 724 bp, Glycine max
  unsure (1)..(724): unsure at all n locations
  Clone ID: PAT_MRT3847_34668C.1
cacgcgtccgagcgcttaaaaaaacgaagacaatctacagcgcgtttttttttttttttttactctccgtctcgtgctcaatttcctctctgcctcgcgcccaacccttcttccctcgcgaaccctctcgtcttcatcgacctctttgatgggaaacaagagaaggagaagagggaaaagaaacgaaaggaaggaaggagaaggggcgtgaaggttacatctggtggctccgatggcagatttggtggcttcgaggcgcatgcgacaatgtgaaacctcgatggatgaagtttatcagaacactggcagtgagcatgaggccaaatggcataacataagtaactgtgctggaatgctcttcagtaccaggaataatttggagtattttttatgaaaatctgttcaagaagcatataaaggggtaagattgcaaagatggaggcccttttggtgctgttatagttcataatgatgaaatggttgctagttgtcacaacatggttctgtgtaacacagacccaactgctncatgctgcggtgacagcaataagagagaaatttgcacatgatggacatgccctggccccgttggatagcaaagcttgtaagaagcttaagaagatagaacttgcagattgcgaaaatatatgcttcttgtgagccttgtcccatgtgcctttggtgcaatccaccttttctcgaattaagagggctgaggcagcaa

SEQ ID NO: 70496 - DNA, 3892 bp, Glycine max
  Clone ID: PAT_MRT3847_34669C.1
ccacgcgtccggtgctcaatttcctctctgcctcgcgcccaacccttcttccctcgcgaaccctctcgtcttcatcgacctctttgatgggaaacaagagaaggagaagagggaaaagaaacgaaaggaaggaaggagaaggggcgtgaaggttacatctggtggctccgatggcagatttggtggcttcgaggcgcatgcgacaatgtgaaacctcgatggatgaagtttatcagaacactggcagtgagcatgaggccaaatggcataacataagtaactgtgctggaatgctcttcagtaccaggttcatcacttttcttaattcctattgattcagaacaccggcagtgagcatgaggccaaaaggcaagacaggatactgtgttttttcattcatatatggttgttgaatgaactgatttgtcgttgctgcttctatatttcatatttatacttgcattttgtctcttttttgttccctgtcctcttttgattgtgcagttggaaaatggacttgtagaggctgttggtattcttatttccaaaatgcctcacatgtttgaccttttcttgacatatattctataaattggtatgtttgctgtagaaggcagcaacactttgttcaagttggtcaatttcgttgtctctgacataggtcagtttttaaaacaagtattgactttttttaaagaatggactagtaattacctcttttagttttagctcattgggggcaaatcttaaagccactcactaagagtatttttattgacaacatgcctggtgtaaaatgatcaattaggatttgacagtggtcaaatagtggtttttaacttgtattcagttccatctatgcaagaaaaaccaaaaagggatgatacatgtaggacataatcattattatcttgtcaccattatccaggtttcagacattcagtgaacacctgcttgaaattgggctatccttgttcatatttcttgttgaatttttagatatgctgctgaaagatttgacaagattagattatactttatacatatggtatgaggctatgcatgcttcaggttagtgttgcctggttaaagtttaatatgcaaatcatgtctgtctcagttgacaatgctgcagcaatgtgaataactttaaaaaatcatatttgctaccagattagttgcttcactttttaagcaacaggttaatattagacaatttgacagctagtatcaatgtataattctatctaggttttagaaaggctagctgagacccacgcgtccgccacgcgggggttccccaaccgagtaaaagaaaaggctgtgtccgttactcgggagtggaagatggcgacggcgccgggaaatcaaatgttggagggcggaggaggagcgccgcagcctccgggtacagacatgaccggaatatgcttccgggatcagctctggctcaatagcttccctctggatcgcaacttggtcttcgattacttcgcactctcccctttctacgactggacctgcaacaacgagcagctccgcatgcgctccgttcaccccctcgacatctctcaactctcgaaaatgacggggacggagtatatgctcagcgaagttatggagccgcacctgtttgtcattcgcaagcagaagagagatagccccgacaaagttacacctatgctcgcgtattacgtactcgatggttccatttaccaggcaccgcaactgtgcaatgtttttgccgccagaattggaagggccctttattacatacaaaaggcttttactacagctgcctcaaagttggagaagattggatatgctgggtcagctgattctgaaaatgctgagtatcatacatactctgcctcaggcaggacgggttctaccttgtgcaccgcattcactttctcctacctcgtccttctaacccaacctcaacctgtttctccgagaatcacatccaacgcttctgtcatggaggaagttaacgttgtggaaactaaggatggaactgtctcagtagctgctgcgtttgctggtcatcaggaagccgtgcaggatagagaccacaaatttttaagaaaagctgttgaagaagcatataaaggggtagattgcaaagatggaggcccttttggtgctgttatagttcataatgatgaaatagttgctagttgtcacaacatggttctgtgtaacacagacccaactgctcatgctgaggtgacagcaataagagaggcttgtaagaagcttaagcagatagaacttgcagattgtgaaatatatgcttcttgtgaaccttgccccatgtgctttggtgcaatccacctttctcgaattaagaggttggtttatggagcgaacgctgaggcagcaattgctattgggtttgatgatttcattgcagatgcactgcgatgtactggattctatcagaaagcgacactaaaaattaagagagagaatgttgacatagggaaattaatcgatttggttatattttttccttctggaacggaacaaaccacctctctcgtattagagcgctgagacagcatttgctttcgggttttgatgaattcatggcagatgccttgcaaactccaggatctatcagaaggtaacttcggaaattaagccagctgatggtaaatcattgtcaaaaagattttgagatacaaaagaagcttaagcagatagaacttgctgattgtgaaatatatgcttcttgtgaaccttgccccatgtgctttggtgcaatccacctttctcgaattaagaggttggtttatggagcgaaggccgaggcagcaattgctattgggtttgatgatttcattgcagatgcactgcgaggtactggattctatcagaaagcaacattggaaattaagagagctgatggtaatgaggccatcattgctgaagaggtttttgagaaaacaaaggaaaaattccaaatgtattagatctgtgattcttttcatatctgatggcaactggctattcaggattattgccttcatttaaattattgaaactgttgatagtggattgaactcatttgagtacaacaaattatatgctacaatttggtttacatcagataatgactatcccattgtcaatcataatataacgagctgatggacattggagtttttccaacactaactttgctttttggattattctcaaaatgagactgcattgttggaatcaaagactctaaggagacaattgacataaaggaagttaagcgagttgatcatattcttgcatccttgcaacgcaagttaccaccagctcctcctccaccaccatttccagaaggttatgttccacctccaactgcagaaacggagaaaggcactgaaactcaagaagcagcagaaacgcaagctcctactgctgatccgataattgatcaaggaccagcaaaaagaatgaaattttgatataaaagacatactgcaacggctattaatacttatacaggtggaggaaaattatattattccttaacaagcggccgttgctaaaacatgattaacttaatgttattctctggtctaaaatgcgttgctcttttcctgtcttcaccataaatgtagatattatcactgaaataggattaagttctcctgttttttcattctagacaatgtattgagcaattgtaacttgtaagggtaaacgaaactagtgtccttttcgcattgaacattttctgtattttacgttgacgcagggacttgcattgatcctagttttccctgaacacctcgggaaattgaattgctgatcaattgagtgtataaatattgcgtacgtcaactagggaatagattgaattcccgtatatgatttgttctctctatga

SEQ ID NO: 70497 - DNA, 145 bp, Glycine max
  Clone ID: PAT_MRT3847_3466C.1
acacgagtctccccaccatcaacaatctccatactcaccctccctaacaatctcaccattctccattcaaatctccaatcaatcactattcatactccatacatacattcaaccaccatccaccaaaaaaaaactcgacacaaac

SEQ ID NO: 70498 - DNA, 1082 bp, Glycine max
  Clone ID: PAT_MRT3847_34670C.1
ggctcgagcattcatccatatcccactccattacagcacagcacttctggattggacaaaactacccctatgagtatcagtgtccgatcatggcacgcattcatattatttctcaatccttcatcctttccatttcgcaccaacctccatggcttctctggcgttgctccgcagaaccacgctctcccactcgcacgtgcgtgcacgagccttctctgaggggaagagcagcaacagacaccgcatcgagaagattctagtagccaaccgcggtgaaatcgcttgcaggatcacgaggaccgcgcggaggctcggcattcaaaccgtcgccgtttacagcgacgccgacaaggactcgctccacgttgcgtccgccgacaaggccatccgaatcggaccgccaccggcgcggctcagttacttgaacggagcctccatcgtcgacgccgccattcgctccggcgcgcaggctattcaccctggatatggattcttgtcggagagtgctgacttcgccaagctttgtgaggacagtggtctcacgtttatagggcctcctgcgtctgctattcgagatatgggtgacaagagtgcatccaagagaataatgggagctgcaggtgtgcctcttgtgcctggatatcatggagatgatcaagatattgaaaaaatgaagttggaagctgataggattggatatccagtcctgattaagccaactcatggtggcggtggaaagggaatgaggattgtacacgctccagatgagtttgttgaatcgttcttagcagcacaacgggaagcagctgcttcttttggtgtcaacacgatattgttggagaagtatattacacggccaagacacatagaagtccagatatttggggataagcatgggaatgttctgcatttgtatgagcgagattgcagtgtgcagagaagacaccaaaaaataattgaagaagctccagctccaaatatttctgccaactttcgtgcacacttgggtcaagccgctgtttctgcggcaaaggcagttaattattacaatgctgggactgtggagtttatagttgatacag

SEQ ID NO: 70499 - DNA, 433 bp, Glycine max
  Clone ID: PAT_MRT3847_34671C.1
aattcggctgcgaggcaggggggcccacaactacgttttacgtggcaagctcaaacaggatatctcaacttatgttctggagcctatagggagcggaaaaaatagagactataaacagctaacaagaaaaaagttgaaagaattgcacgaatggatagtggagatggatgttcaatatgtggaatagatctggccctacttattggcaagcaatcagattagcctacagggcgtaatactattcacggtcacacactcaaattaagctgaagctaaaccaaaggcaacacctatgggggggaagaaaggtgctaatctgacgatccttaagaaggaataatactgatacaaacgcaccgattcactggttgctgttgatcatgaccccaacactggctaccatgaagtgaatcgactcaacaaagtcatatat

SEQ ID NO: 70500 - DNA, 382 bp, Glycine max
  unsure (1)..(382): unsure at all n locations
  Clone ID: PAT_MRT3847_34672C.1
ccggcggcaaaggaacttaaacagaaagtttcttaaaatttccccgaaaagatgaacatgaaaaccagggccttttttaaaataccaaacctggacctttttgcaataaacgggcgggcccaaacggcctttagcacaaattttaaaaaataaaaggggaaagatctcagtatggggattataacatcgcaaaaaaattattggaccattctaccggccttgggccattaaaaaaacacataaggctaaggtggaaatcccttcccacaagtccaagaaaaatttttgtggggacaaaacagcagaataaaaaaacacnaccttcccaaccattaccagaaacaatttaggttagggccctaattaccccccaaataaaaca

SEQ ID NO: 70501 - DNA, 129 bp, Glycine max
  Clone ID: PAT_MRT3847_34673C.1
ctcaactggcacctcttacaccccttttgtcctttttaccccctgcattcttctggcaaaaccctagattccaaatctggggttccgttttgcatagtccggttcagacaatgggttttgggaactggc

SEQ ID NO: 70502 - DNA, 383 bp, Glycine max
  Clone ID: PAT_MRT3847_34674C.1
ttcgcactcattggattaaaggaatgcttaaagtggtggccactgttggtgttcctgtgaatacagatatcgcatcgacctgggccctaaatagtgcttttagggggcaggccaggcctgacatggacactatctggtctgaagactgtgaagtatggaatcccgcttgcacaaaagcgatgactatgtcacttaatgcaaacccgggtgctgacgcttggagctgggtatctctgaagcgttccgaagttcattgtgatatgatttgtggcactggatggactgccaccccaatgcaagatgttcaagttacaagtgattggatgacttcctctcaagaatgcgttgccaggaccgattgcgtcttgattccacaaaatcct

SEQ ID NO: 70503 - DNA, 319 bp, Glycine max
  Clone ID: PAT_MRT3847_34675C.1
tcctgctcttaaagagagagcaacaaaagagttggaacaggtttgcttggatatgaaaaggctatacactgaacgggctgagataactttggatcctgagcggatagttacggcatgggctgaacttactaaatgtattgaggaacttgacgatcaaagggattagctgcgggtacacagagaattgttgcatgctgatagaatagaaatatatgctcagactgaacaattgtataaactggtagatttgattgctgtgtctgatgataatgctctctctgttgtgcttaaatctgatgtggagtctaaccaaaagata

SEQ ID NO: 70504 - DNA, 411 bp, Glycine max
  Clone ID: PAT_MRT3847_34676C.1
gctcactcgtcgttggccgcccttttttttttatttttaaaaaatttttacgacagtatctattaccgggaaaatgcttatacatcgaaggaaaatgcctatgaacagcatggcatataactccccgaaggctcattatcagtggagaaacagtgatggaacacctataaccatatacagattcgaaaatacgctggtaccagcttgcccgactccagcctagacttgaccgctacgtgtgtaatcaaaagccagccagccttatattgggccacacggaatggaccactgaaatctgtcaaatgggattccactgcgcttgccaaacctttgtccgaatacccgtgtttcccatgaccagcattcaggtccaagcagcggtggaagattctcacctggatccaaagactt

SEQ ID NO: 70505 - DNA, 270 bp, Glycine max
  Clone ID: PAT_MRT3847_34677C.1
ctatagccgttttagtttgaacgcatgaataatgatataggaagcacgattactggttgaagggtccacagaaatggagggaagagacattgaagccaaacttgagctaatataatatgaactttgataagactatttgatgtcattattaatttttaatatggtaaatgaccctgtggtgtcattggcatggaaaattgatgcatataactctttggccacaatctgtagcgatactaaaccatatgatattacgtataaaaatggatt

SEQ ID NO: 70506 - DNA, 283 bp, Glycine max
  Clone ID: PAT_MRT3847_34678C.1
agggctggtgctggggatggtgacactggggaatatgctctcatctgtccttgcgggaaaagtgaaaccgccagatctggtcactaaagttatctacaagcagttcacccacgtgaatctggccgacagcctctgaaagctttcccgcattctggacacagatcactttgctttggtgcttcacgaacaaattcactatcacatcgtcggttcctccagtaacaagcagatggcgtttggtgtggtgaccgccattgataagctcaatgtcattacgacagat

SEQ ID NO: 70507 - DNA, 401 bp, Glycine max
  Clone ID: PAT_MRT3847_34679C.1
gcatcaagcaaatattaaaggaagtagaaaaaacgatcacagtgtttttttatcagaataccacactgcatgcagtgggcatgaacagaccaaatagattaaaaaaaaaaaattagtctctacttgcaatacccagtcctctataactacaaggcaatctcgcaaccacgtgaggaagaggattatgaagaatatggccacctgctattgttcttgctggcccgtaccctgaccaattgaagaggaacctgggaagaatcccccatgcaccttgtatccagaagcacatacacttggccaaatcggagaccccggtttgctgcaatatatcgggacctgcggtcaaacaagtggaggaggtgatcttcaatcccagtgtgctggttatgggctccaaaaac

SEQ ID NO: 70508 - DNA, 312 bp, Glycine max
  Clone ID: PAT_MRT3847_3467C.1
gaagttaatttgcgtctagagtcaatttggaatctaggatgaatctcaacggacagagaagagccataaccatgtctggaatatgaaagggacgcaggggtctcggatcgggaggagcgaagcgagaccgtacggttctgagggataacagtcaaggtacaacgaagcccgcaattcgccgtctcgcgagacgtgacagcttgaagcgtatcactggtcacagctaccatcaaacacgaagtgttctcaatatcttccatgataatgtcattcgctgagctgtcagctagactgaacacgctcgacgctcga

SEQ ID NO: 70509 - DNA, 282 bp, Glycine max
  Clone ID: PAT_MRT3847_34680C.1
cccacgcgtccgcgccgtgcgcctcagaattgttctcttcgcctccggagttgcgtccaggggaagctgtcaagagcttatcttctaagggaaggctacagtgaatggtaccttgtgtaatacgcctcagactaaagttcatcctgcgaaggatgttatctatgtgaactggtacaggctatcttagaggcaatcttataatgattatctttgcattgaacaaactcaaagggtttatatgttcatctgcttagaacatagttaaatttttgattagattat

SEQ ID NO: 70510 - DNA, 732 bp, Glycine max
  Clone ID: PAT_MRT3847_34681C.1
gacgaaaaaaatagacacaaatcaaatgtaatcaggtgagatcacgatcccggcgtttgttgcagtccaaacgcatctgtcgtgtctggcgcgcactctctgtttattattagggttttgttttaaatctcttttttattttaccacccaaaattcccatctctctccccagtccaggcttagaaatggcacgctctctctgttctgcaagtggaatctctaatttttagggtttcgtttcgggaatttctcatttccttcaataatgaccgaattgcactctcatgacaatgccgcggttgctactgattccaagccggaggtttcttcgacggaagaatttagggttagtgtttgctccgacgctaacacatcatcatccaccgtcgataccgataagtttcacggtttcgatagcaaatcgctgttaccggaatttgacgagtacgtggctgctgagagacacgtgtcgcaggatctagggtttgagttcgaggtcggtgacatggtgtgggggagggtgaagtctcacccgtggtggcccgggcacctatacaacgaagcgttcgcgtccccttcggtgcgtcgctcgaagcatgagggccacgtgttggtggcattcttcggcgatagcagctacggctggttcgaaccggaggagcttattccgttcgacgcgaatttcgcggagaaatcgcagcagacgaattctaggacgtttcttaaggcagt

SEQ ID NO: 70511 - DNA, 222 bp, Glycine max
  Clone ID: PAT_MRT3847_34682C.1
cccgattcaccaaaccaacactggatgtgtttttaagtttcccgactacagaaaatactacgtcagtgctggcacatgagatcgggaacacattcacgcctcgaccactaccttttatggagcggcgcacgtgtctatctatcgggcgtgctgtattacatgaagaaccagctttttgacaagaaccaaatccctagaacggtaacctatcttgtcccaaaa

SEQ ID NO: 70512 - DNA, 399 bp, Glycine max
  Clone ID: PAT_MRT3847_34683C.1
caaaacaattgccccaacctggaattgtgaaaacccaaaggattgggccctttattttttattggagggggatcaaatttcattaaaaggtggttaccattattaaaccaaattaaaaggttaaggttcttgaacttggccaccaaagccttgattttaattacctggccggaaacctccaattggtttttcattttttccctaacattgggtaaatctccaaggggaaaaaaaaaaaaccgggtaaaattttaaccgtggcctaatggctggtttaataagggcaattccctttacaaccttttggattaaggcttaattccattaaaccttattaaaattattttggttgaaccaaaaacactttgaacctgccaaagaaaataaaactttttaaat

SEQ ID NO: 70513 - DNA, 594 bp, Glycine max
  Clone ID: PAT_MRT3847_34684C.1
aaagccttcaatcactcaatgatatcatcaatctcatcaacccgccccccacttttgatcataacaattattattacaataataataataataataacaataataataatttcatgatgaatcccatgcacatggcatatcttaaccaaccaattgtggccactgcagacaacaacatgtttctgtggtgaagaatctgaaaaaaaaaattaagatttcgtgctagtgtgttgttctgttgggagtttcgtcacggtggaatcattcatgagtgagggtaaggtaaatatttgtggtacctactactagtgtgaggcaatatttattaagatattattattattattattattggagtgtcatcagaacttgcttgctacatttgatgtgatttaaataatggaatcaaatcacatagtggcatttgcttagttctgttgttaggtcaccaaagtggcatgctacttgccattgtccaatgttttggaaaaatggatgtcggtgtaagtgtaatgtccattctctgctctcttttctttttttcttttttatatgatgattaatatgatatgaatgttatgggtgtgcttttat

SEQ ID NO: 70514 - DNA, 233 bp, Glycine max
  Clone ID: PAT_MRT3847_34685C.1
ggtgattaaaaaaagcaaaatggtgaaaatttgctgcattgtagctggatatctggggggtcctactatggcagccattgcacttaagtgcccatccatggaaggggctggcgctgatatgtctaaatgccgcattgcagactggaacagtgaccagctgcctatctatgaacctggccttgatggtggttggaaacaatgccgcggcaagaacctgttatatagcactgatg

SEQ ID NO: 70515 - DNA, 635 bp, Glycine max
  unsure (1)..(635): unsure at all n locations
  Clone ID: PAT_MRT3847_34686C.1
ggggattacgctaccgccccttacaataggaattcatgacaacatagtttctctaagaggagtctagagttagttgatataagtcacaagtcgtagggtagcctaatcctaatttacattgattgaattccctaaacagtcgtaagcccgtatctagctttccgctggcctgattagtagtcagactgatgatctacccgtctccgagggggtagacctgccggcaactcctacggcaaaagaaaagcgaactcttccttaacttaagcagcgctatgcttcatcctcaagggcaacggttctagcctcctgaaccgtcataatggacttataaaaagcctcttttgccatttttaccgatttggctatttgggccgttttactcatttctttgattaccagggcataagactgcccgctccaccacgtgcataaactaattatctcatgataggccaaagcgtgaccttttttctggccaaactctgtgacagggatataaaaaagggtgtaatccggatttctctaaagcgctacgtcttttcccggccatcatgcatcgctccaacctnctattgccacagccttacaagccaagcaagaagtgaaaaatctcaatcaatagggaccttact

SEQ ID NO: 70516 - DNA, 442 bp, Glycine max
  Clone ID: PAT_MRT3847_34687C.1
gtgagatgtagcacttaacttgcagtagaaattagcattcgttagagagactaggaaggataaatcatatccccatctcttaatgaaggcttcaaaaactcggtcctgacttgccctaaacattacactgaacctcatacttttgtcgctagatactgcatgcggttttacaccatggcttggtccaaacccataggcaaggcccaaccccaaccctaaccctaaccctagcccaagtggcttgtgccgctgtgatacactcaaactacgtgtgtgcgccaatgtgctaaacttggggaacgtcactgtgggtcaaccaccaaatgccccttgatggacacttgttgatggagtcgatgacctcgaagctgtagcgagcctatgcactgccctcaaagcacacattgtgggcatgaacctgaaccttgcaataggactcagc

SEQ ID NO: 70517 - DNA, 2055 bp, Glycine max
  Clone ID: PAT_MRT3847_34688C.1
ccagcctccaccaccaccaccaccagctcctatgtattatccctctaataatcagtatagcaaccagccacctccaccgccgccgcccttgtccccaccaccaccacctcccccggtttcgccccctcctcctcccccggtaactcagaacaacgaagagcggcacttcaaggagccttccacgtccggccggcgtgaatacgagcattccaatcacggcattgctcacaagcagcacaagcagcagcctcctgtgccagtgaagaagatgaacaacgggcctcctggcagggctgagaccgatgaagagaagaggttgaggaaaaagagggagtttgagaagcagaggcaggaggaaaagcataggcagcagctcaaggagtcccagaacactgttctgcagaagactcacatgttgtcctctgggaaggggcacggcatgattgcagggtctcgaatgggagaaaggagatctactcccttgttgggtgctgagagggttgaaaataggttgaagaagcccacaacgtttttgtgtaagctcaaatttcgaaatgaacttccagatccaagtgctcaacctaagcttatggcctccaaaaaagataaagatcaatatgcaaaatatacaatcacatctctggagaaaatgtacaaacccaagctttttgtggagccagatctagggatacctctagatcttcttgatctcagtgtttacaatcctcccagtgtcagaccacctcttgctccagaagataaagaattgttgcgagatgatgaagctgttactcctattaaaaaagacggcataaaaagaaaagagaggcctactgataaaggtgttgcatggcttgtcaaaacacaatatatatctcctctaagcatggagtcaacaaagcagtctttaactgagaaacaagctaaggagctgagagagatgaaaggaggtcgtggcattttggacaatctcaacagtagggaaagacaaatcagggaaattgaagcatcatttgaagcagctaagtctgatcctgttcatgcaaccaacaaagatttgtatcctgttgaggttatgccgttgctgcctgattttgataggtatgatgatcagtttgttgttgctgcatttgataatgctccaacagctgattcagaaatgcatgctaagatggacaaatctgttcgtgatgcctttgaatcaaaggcagttatgaaaagttacgttgcaacgggttctgatcctgctaaccctgagaagtttttggcttatatggtcccagcaccaggagagctgtcaaaggatatatatgatgaaaatgaagatgtctcgtactcttggatacgcgagtatcattgggatgttcggggtgatgatgcagatgatcccgcaacattcttagttgcatttgatgagtcagaagcacgctacttgcctcttccaactaaacttgttttaagaaaaaagagggcaaaagagggaagatcaggtgatgaggttgagcaatgtccagtacctgcaagagtgactgtaaggcgaaggtctagtgttgctgcaattgagcggaaggattctggggtatatacaagttcaaagggaaattcctcgaaaagaggtggcttagaaatggatgatggtctcgaagaccaacatagaggtgcaccacaccaggacaactatcagtctagtggagcagaagattacatgtctgattgattatttcatgcaaatgctgctgccttgaagcaaattgatccaacgaaatggttgttggattggctgcagatagctgaatttgttgcagcctttgtgcttcaatgaagaataaccaatgacaactcccatatttttgtatgtcattttaacttactgcacatactttcagattgtaggcagctgttaaatcaatatagattttctttccaataccattatattagaaaagattgaaaaataatgaattgtaaaaatcatgtcagactaaatggaatcctgacatttctctgaatgattttttgtgaacagcttgccaatgaaattactctcttcccgtt

SEQ ID NO: 70518 - DNA, 756 bp, Glycine max
  unsure (1)..(756): unsure at all n locations
  Clone ID: PAT_MRT3847_34689C.1
tcgctcttagcttgattgtgattttgagagtatccttctctgattttttctctccaaaatcaaaatctgttgaacccttttcctcctcataagattctctctccctttctaataattatctgacttttatcctctcacatccacaaatgcttttctcaaagaatggccatagattcttcaaattcagaagccaggtttcttgcccatgtcttttatactgtcttttcaatttttgataaccttttcaccctcatcaaactctcttcatcatccacaagaattttcaaccaaagcactcatcagtcttttggctcaacactcacaatcttatttggtgtgaccttattgtgggactacacacagtaatcattattgttcttctttaataatccatacaacaaacagtttccaaaatatccctctcaaaggagtggcacctcttgttgttattgccactcttctcctatattttaagtccttcatacacaccaagatttattcacaagttaacaccaatggttcacaagcacttctacgagctttcatgtggagttgttgaaatggcttggattatgcttagtgttgactactcacgcctactgtggcaattgtttggagtattttcttacgagaaccatgaatggaaacctcggatcatctagcacacacccttcagtttagtcacataatagttacatataatatntaattggttgccgagtttttcatactagtagctgtaagtctataatactc

SEQ ID NO: 70519 - DNA, 206 bp, Glycine max
  Clone ID: PAT_MRT3847_3468C.1
atagaaactctaaggagggcatatatcattaagtagctatgaaaggtctcaactttcacccagattcaccaaaaaactgagacgctcagcaggccaaccccattcaagcccaactcctaaatcctgaggtacatttataagacggcgactgtaactttttttttatggacaaaactggggatgagtggatttgcttcgcagtgccc

SEQ ID NO: 70520 - DNA, 442 bp, Glycine max
  Clone ID: PAT_MRT3847_34690C.1
aaaaaaaaagcgggggggctaaacccccttgaatatgggaaaaaaagttaaagggccggggggggcgggaacaaacggaggccaaaggggtagggcccctcggcttttaaaactagcccggagtcccaaccacagggggaggggaccaccttgggaaaaacccccttcagttttacagcaatctaatttagttcacaaaaagaacgatttcaaacccgggacaaaaaaaggggagccttttttttttttttttttttttaaagaagggggggttccctgggaaaaaaaaaccccccccaaaaaggcaattgaattcccggggggggaaaagttacagggggcccaaaaaaactaaggggggcaaaggggttttttttggcaccaaacaaaaaaaggggcgggggggggaagcccctattggggtttaataaaaccccccaac

SEQ ID NO: 70521 - DNA, 387 bp, Glycine max
  unsure (1)..(387): unsure at all n locations
  Clone ID: PAT_MRT3847_34691C.1
gcgcggtgtgcgtccnngttnggttagtctcngcgcctgtctaatagcccggggttngggtngtnggtcgtccttgtcnccacccggctttttcttaatgtgtgaaggtttactgccgggttggacctaaaccgtcgggcttttttttaatagggaattatngtggttctgctggttgggctctctaaagagctggggggggtcaaaaacatgganggaaagttccatttcctcatcncaatagcctngcaaattcctcgtttctaatctccggggcaaacttccttaacctngcggtggtttgcctngnctaaggccctaagtaangtccttccnggctacgcctaaanggctncgttnggcttccctctttaaagctctcttctt

SEQ ID NO: 70522 - DNA, 239 bp, Glycine max
  Clone ID: PAT_MRT3847_34692C.1
gttatacacctctttttttttctcgcgtcaatctgggggggatgaacttatcctgcgatctcataaatcttatcgacaatagtgtgtgctcagtccaaatgatgctcgcctattgaaatggtaagctatttctagtattgaatggctacaaaaagctgatgtgcctaccatattcacaaattgaagagattcattcgtcgcaaaggatgatgaatgctccttgttcaaatgataatttt

SEQ ID NO: 70523 - DNA, 175 bp, Glycine max
  Clone ID: PAT_MRT3847_34693C.1
catagaaagtaaataggttattgttaagagggtatcctatattgtgaagcgtgatccaacacatggcaaaggaaaaaagctttctctatattatagagaatgattcaactggggcaatatggcgaaaactacactaacatacaccctccaaaggccttatccctcacatttgaaa

SEQ ID NO: 70524 - DNA, 194 bp, Glycine max
  unsure (1)..(194): unsure at all n locations
  Clone ID: PAT_MRT3847_34694C.1
ggacttcagagagaagaagaagaatcatggtgtggggactcttccccgtcgatcctctttcatgtgtagataagtactacatttactatactggactctacaaagaatgacgaaaagggtgagattaaatactctctaaggcttgaggaacggctgtggtgctcgcataaatagnngntaatacagngaacccg

SEQ ID NO: 70525 - DNA, 2147 bp, Glycine max
  Clone ID: PAT_MRT3847_34695C.1
aattcggctcgaggcagtttccaaagaacccaactcaacttcaaaaccccataataatctctctttgacattcataaaaaacacacaccatggactcttgttcatcaccgccaaacaacaactccctcgctttctctctttccaatcactttcccaacccttcctcctctcccctctcccttttccactccttcacctatccatctctctctctcacaggaagccacacggcggatgcacctcctgagcccatcgccggcggaggagcgaccaacctctccatattcaccggcgcccccaagttcgaggactttctgggcggttcctccgcaacagccaccgccaccacgtgtgcaccgccacagcttccgcagttctccaccgacaacaacaaccacctgtacgattcggagctgaagacaacaatagccgcgtgcttccctcgcgcctttgccgccgaaccaaccaccgaacctcagaaaccctctccaaagaaaaccgtcgacaccttcggccaacgcacctccatctaccgcggcgtcacccgacatagatggacgggaagatacgaagctcatctatgggacaatagttgtagaagagaaggccaaagcaggaaaggaagacaagtttacctgggtggttatgacaaggaagataaggcagccagggcttacgatctcgcagctctcaagtactggggtccaactaccaccaccaactttcccatttccaactatgagaaggaactggaggagatgaagaacatgaccaggcaagagtttgttgcttctctacgaaggaagagcagtggtttctctaggggggcctctatatacagaggagtgacgagacaccaccagcatggccgatggcaggcgagaataggcagagttgccggaaacaaagacctctaccttggaactttcagcacccaagaagaagctgctgaggcctatgacattgctgctatcaaattcaggggattaaatgcagtcacaaactttgacatgagtcgctacgatgtaaagagcattgcaaatagcactcttccaattggaggtttatctggcaagaacaagaactccacagattctgcatctgagagcaagagccacgaggcaagccgatccgacgaacgagatccatcagcggcttcatccgtgacctttgcatcacagcaacagccttcgagctccaccttaagctttgccatacccattaagcaagacccttcagattactggtccatcctggggtaccataattctccccttgacaacactggcatcaggaacactactagtgttactgcaacttcttttccatcctccaacaatggcactactagtagtttgacacccttccacatggaattctcaaatgcccccacaagtaccggcagtgataacgatgccgcgtttttcagtggaggaggcatctttgttcagcaacaaagtggtcatggtaatggtcatggaagtggaagcagtggttcctcctcttcttctttaagctgttcaatcccattcgccacgcccatcttttctctaaatagcaatactagttatgagaacagtgctggttatggaaactggattggacctaccctgcacacattccaatcccatgcaaaaccaagtctctttcaaacgccaatatttggaatggaatgagctcatgcacgaggtgggatgagaatctgtgcatataatgatgaaaggggaagggcaatagtggtgatggtgttttagcatgcaaaagaagcaaggacgaactagtacctttagctgatgcagtatttgaatgagttggactgacagtcataatttcatgagaagcgtagctatacctagcagcagctgacactgtactaactcaaagttcctttgttatgttttggatgaattttcttttttttctttttcgcccctttattagctttttggtcctgttaatatactgacattatatcaaatgaggataatgggaagaaaaaaaaaatccttttgtaatccctttcatctcattttttgttagtatcaacttgccatctatgtgaaaggcattcaatgcctatatatattgatgtacctttggaaaaaaaaaaaaaaaaaaaaaaaaaaaaaaaaaaaagccgattcccc

SEQ ID NO: 70526 - DNA, 375 bp, Glycine max
  unsure (1)..(375): unsure at all n locations
  Clone ID: PAT_MRT3847_34696C.1
accaggagttctcgatcctactacacangagcagnnatagacttgcaagagggggaagcctgaaagaagagcaacgcccaacgatactagaaccaccgacccaacaaccacaagtggacgggagaggcaccgaaaacgctcaaaagaggacattccggaagagagaaaagcaaatgggaccaagacacgggacaaagacaaaagcaaatacaagccgatgctaatccgagcatatgcatcagtaaggaagataggcggctcagatgcgaacatttatatgggccacccccacagcactgcaagggtggaagatatccaaacctacatggcaagggagctgctcaatctactcaagagagctcatgaagagaggca

SEQ ID NO: 70527 - DNA, 247 bp, Glycine max
  Clone ID: PAT_MRT3847_34697C.1
tgcccgtagatctgctgagcgatgtagcgatgatttactcagagcacatactcgcacatatgaatatcttccgtacttcgactatacgatatctgaatattaacgaacttctacaaaagtgagctggaagacctttccgagacaatgcattgagacaacattggttattgcaaattttgatactactgtatctaccttctgaatagaatctggtgagctgaaaggagatcttcttgaaactgatagc

SEQ ID NO: 70528 - DNA, 537 bp, Glycine max
  unsure (1)..(537): unsure at all n locations
  Clone ID: PAT_MRT3847_34698C.1
cctcagtatgaagtgaaactaatcggcacagcgccaaagctcctgttcgaaatccgttaagctgctgtcagcttaatttttgcagctaagcttcatttattgcgaaatgcagtggttcggctgctccaaatgtttccacgatgcctacgcatgatatttttacaacatctcgttttaatttcgcacttgaaaactaccgccttgcggcaagtgtattcacggagctttcttgggagtcaccatatttttttaaaagtgatatatgtaattgcacacattgaaacaattgctttcaatcgtgtccgaaagaggggtctaggcgctttaaagcttcttctccagggcgcccttctctcatgtttcaatgcaggtgcctaactcgccaatttatgaatgaccataaaaancattctgcggggtttgttttgtaaaaatattttgatttttgtcattagcaaagggtatacagcagtatacaaggtattttcatttgcagtatttgagttgaaaacccagtccaccactctataaaattca

SEQ ID NO: 70529 - DNA, 375 bp, Glycine max
  Clone ID: PAT_MRT3847_34699C.1
atacccaacaacaacttaacaactcctccaaccctccgaggaggctttgctcaatttgacaagatgggtaatcgttttatttgcatgacgaagaaggagtccaaagatgttggatcgagaggtagcaagagaatgggtagatcacagaggaagcttgtgacagtgagtgaggaagagcttcatcttcaggcactttctatggcgcttcaacagcatcaattgtctcagaggtttgaaggctccatgtcttggagagttggcttcttcagaaagcacgccgtttctgaatcttttttagccaacaagcaggtttcagtaaatttggagaacattaaaataaagaagttttgtctaattcattgagtaggtttggag

SEQ ID NO: 70530 - DNA, 785 bp, Glycine max
  Clone ID: PAT_MRT3847_3469C.1
tacggctgcgagaagacgacagaaggggatctttatcttgaaacacatattactagactgactccaaaataactatcttcattctgcacccttcttgttcttctgtttagccaaaaaattctgagtgttaaattagtgactcatgactgctactatgatcaagttatattttttttcccttgccattttggttatcttccttgccaatccaaagggtgtgacttcaagttcaagtaccagtgagcctacaatttcagcatctcctggtgttttgccttatgtgactaccccagagatttcctcattttttcccactccaagtgcaattcaaccaatgagttctggttttgaggccgaggcaccggcaccggcacccagttcaggggagtttgagggcaagaggtcttctggttcagctaggttggattgtgcaggtgccattgttggtgttctgctctgttgtgccttgttaagtagcatagttgttgtttgagaatttaccattgtacttgtcttaaaggggttgtgaatttcatccactagagcatagagcatagtgttcttctttttctattagtccctgttctatgatttctttgttgcttgcttagttaatatacgtgatcgattacttatgccgtataaaaaaaaaaaaaaaagtattcgaaattcacatttttttgttccacattgtcaaggatttgaaaacttgctttaggaaaatttaatctactatttttagtgctgtttttgcaaaaaaaaaaaaaaaagcccctaggccgcgc

SEQ ID NO: 70531 - DNA, 547 bp, Glycine max
  Clone ID: PAT_MRT3847_346C.1
ctcgagcctcatgcatgcccaagaaaattcgagattacctcttcaaaataaaaaaccctcgccctcaagtccggttaccctctaagaactggattctctctggctgcaagcatcctaggaccccttcctttgccttatacagtggtagaaaccaatctcatcataatcctgttctcaacaacaataacaataacgatgctgccaccttagcagacgttgatcgtttcctcatggagaatttcaagtctctatacctcaaagacgaacatgatcatcaaaaccacgaccaagaaattacaacgccacgtgatcttcctggctcgacccgattctttgtgaagcctgcagggttctctgggtccctagtggaggatgctttcacaagtgacgaagcagcatcaatctcaacaatcaacgatgtttcttcttcaaattcttatgagaaggaggctcttccggataatagcatcgctttattgacgcgctcgaccagcccctacgaggacttcaagcgctccatgcaagaaatggtgaacaaccatgaaag

SEQ ID NO: 70532 - DNA, 263 bp, Glycine max
  Clone ID: PAT_MRT3847_34700C.1
tattgctcatccaaacccagaaagaaaaatcagaatcaagacaaaacaacctgcagagtgcagatatgggagttagaagttggcgccatgtgttgttctccttgtgtcttgtcttcaattcaggcctatgtaaagccacaacactaagagaagaagaacaccaagaaatctcatatgaatttggtaccaagttggatgcagttcctgtagtacaacctacaactccaggcacaacaaatccataccctacactaaacccaaca

SEQ ID NO: 70533 - DNA, 348 bp, Glycine max
  Clone ID: PAT_MRT3847_34701C.1
catggcccccgtccgtaggttgggatttcggttgggggggatgcttatttaattggttttgaaaaatactggggccgggttaaagttccaagattttttttccaatccttaaaaaatttggttttttggggggggattggggtggttacctaaattggggtgcaggaaattgtcaggccttactttaggggttttaaattgaaaagctttttggctgggcttaacataaccattcctgtggggtttgccaaaactggggcaactttgcaatttaaaaaggtggcaaatggggatttttttaagggaaactttaagcagttgtttaatggtttggggggggttcctggg

SEQ ID NO: 70534 - DNA, 323 bp, Glycine max
  unsure (1)..(323): unsure at all n locations
  Clone ID: PAT_MRT3847_34702C.1
tantgatgcatgtnngtnngatggagngtttgggtgcgaggtgtngtanatnngagttagnnngantgnagtnaggatngtanngtggttgtagannanatatngantgtaggnggtggtgtnnanggtnncngggngngagnnnacanatanatntntgagtgggtggantgatagatggcgnagaagtngtaggtgngngatttantnatatggttnanggtngttgtagataaagngagtgaatagnaagtaggnnnnnggnnnnaaaattanntggngaangatagagatgggnagtattggtgggtgngnanagagnt

SEQ ID NO: 70535 - DNA, 1993 bp, Glycine max
  Clone ID: PAT_MRT3847_34703C.1
acgagcggtccaattacacccatgcctgtacgctcagaaccagtagttgatggagtctttattgaagctaaagtcactaaaagcagccggaaaatatctgcgaagttgaagagttcgggagctaaggtttcaatgccagttgcttctattgaagtgcccataacttcaaccacattgaaaaggtaaaaagctcccgttctgttcagcaggagaaagaactactgccttccgttccttcaggacccgctttgggagtctttgttctttggcaaggagagacaacaagcccatctcctcctccagcatggactaccgattctgctaggattcctaaaccaacatcattaagggacattttaaaggagcaggagaagaagtcctatgcagtactaccaaaccaactgcctacccctcaaaaatcacagcctgcccaagctgcacggaatagtggttcttcacgcccaatttcagcttcatctccatcaaaaactgcaccttctagctggggttctaaaagtgttcatgaatggtaattcacctggatcattgagtcaacaaaaatctgggagtggcaaaccaactgtctaatgaagttccccatcgcccaagtcacattgaaaaggtaaaaagctcccgttctgttcagcggagaaagaactctgcagccatggacttcagaatcttctttgagactcgagccgaatcggttctagggagagccaacaagcccatctcctcctccagcatggactactgattctgctaggattcctaaaccaacatcattaagggacattctaaaggagcaggagaagaagtcctctgcagtactcccaaatcaactgcctactcctcaaaaatcacaaactgcccaagctgcacggagtagtggttcttcacgcccaatttcagcttcatctccatcaaaaactgcaccttctagccagataaactcccaagcttctctgtcaaaatacagaggggatgatgatatgttttggggtccagtcgagcaatccaagcaagaaaataagcagtcaaatttccctcaacttgctaggcaggggagctggggttctaaaagtgttcccatgaaaggtaattcacctggatcattgagtcgacaaaaatctgggagtggcaaaccaactgagcaatctctatcatcatcacctgcctcttctcaatcactgctaaaactgaaaaaagatgcaatgaccaagaattctgaagccatggacttcagagtttggtgtgagaatgaatgtgcgaggctcattgggacaaaagatacaagtttccttgagttttgcttgaagcagacaagatctgaagcagagatatttctcacagaaaacctgggattatatgaccatgatcatgaattcattgataaattcctcaattacatggacctactaccatcagatgttttggaaatagcttttcaaaccgtgaatgatcggaaagctgctggaggcatgatatctgcaaatacagatgtactagagctaggttacactgatggatccttttcaaaagttggaaagaagaaaggcggcaacaaaggaaaaaaggtaagctcttcagttttgggattcaatgtcgtgagtaacaggatcatgatgggtgagatccagacagtagaagactaacataacataggttattgcggaacgtgtaaatattttttggccatacgtgtattttgtaaatgtattttctgttattcatttaactttttttggcttttttaacagtagcagcatcaattgtatctgctcaatcagttttgttgtcttaaatgttgaaaattttgacgtttgatcacgctgacaaacataatattgtgtcagccttaacttgattcaattaatttgctgtttatcttttgtaagcaagctaattgattcgtaggcagagtctgtagcttgtaaagcccgttttggaaaactgttctgtttctatttttatattaacttttttttataat

SEQ ID NO: 70536 - DNA, 283 bp, Glycine max
  unsure (1)..(283): unsure at all n locations
  Clone ID: PAT_MRT3847_34704C.1
aacaaaacngaaaanncgcgcgcggaacgttattctcggggtcttgtttgtttgggaganaagaanagaaggcnnatgaatncncgcncgcgcaaacgcaaatggctatgtcgcganancaagcgacacgcgatgtgcgttgtgtgacccctagnatnagcaantggtnnncacanttacattcccatcaacggtcnacatgtnctganaacnatgacgtggnnttgnttagtcccctgatgcngaatttcnncggtttgcggccccaggnnaacggtntgtt

SEQ ID NO: 70537 - DNA, 107 bp, Glycine max
  Clone ID: PAT_MRT3847_34705C.1
ggcggtagagccaaaaagggagcgacccttgggcctgctgtagcctctttaatcaactgatgcaggggtcatttgaatgcatatttatgtacaagagcaacgagaag

SEQ ID NO: 70538 - DNA, 499 bp, Glycine max
  Clone ID: PAT_MRT3847_34706C.1
cacgcgtccgctcaatttgatacgatggaacactggaaaccacgagcctgtctcaaaaccccaaactctaattctggatcggaaagcccgacacatattcttacacggtcgggcgcaccaacagcttatcctgatccaagcaaggcacaagtctgcatggccctaacctcaccctactacgacctccaatacttgaaatggcagcccatacaaaaacgcatggcggcgcggaaaatgacacgccgcgcatgaccgacaggagaacgtactccgacaccgaccaaggaagaagatgagccggtaaagccggtgtctccttggcgacgaactacatccagaaccccgcacgtgagcgcggacatagacgaaccacctgcgagccaacccagcaggtgcgaggatgggcgcactgatgatgtacatgatattggtgcggacgccggcgcatatatgatcttgacgagcctggtgagcgagacaacacagcaagaggactacg

SEQ ID NO: 70539 - DNA, 1112 bp, Glycine max
  Clone ID: PAT_MRT3847_34707C.1
actatgcaacccacgagacaaacaagtccttcttaaaatcaagaaagagcttggcaacccaaccactctttcttcatggctcccaaccactgactgttgcaacaattgggtaggtgtctcatgtgacaccgtcacccaaacataccgcgtccacaacctcgacctctccgaccttaacctccccaaaccctactctattcctttctccataggtaacattccctacctggagtttctttccatcaccggaacccccaacatcattggcacaatacccccgacaatcaccaaactcaccaagcttcgtaatctctatatcaaatacaccaatgtctctggccagatacctcgtttcttgtcccaaatcaaaaccctagaattcctcgacctctcctacaacaaactctctggcaacctccctgcctggctcccttctctccccaacctcgtaggaatctccttcgacggcaaccgcatctccggcgccataccggactccttcggctacttcccgaagtcgttcgtgatgttgtcgctctcccgcaaccgcctcaccgggaagattccggcgacgttggcgaagctggacgtgaagtttgtgtacttgtctaagaacatgctggagggtgaccgcgtcattgttgttcgggtcggagaaacacacgcggcacatgtatctgggaaacaattcgtttgcttttgatttgggaaaactagggttgtcgaagaccttggagggcttggatcttagccataatcgtttatatgggacgctacctaagggacttacgtcgcttaaggatctgtattatttggatgtgagctacaataatctatgtggaaagattccacggggtggtaaattgcaagaatttgatgcatctacctatgctcataacaagtgcttgtgtggctctcctcttccaagctgcaaacggttctagagctcaatggagcatatataagaacatagttcacttgtgcttacgagaaaattaagggtataagaataagataaattctcttaataaataaagagaaattctttaatgttcttaactataatgttaagctactttgctaagaattttttttagtactatctatgctaa

SEQ ID NO: 70540 - DNA, 256 bp, Glycine max
  Clone ID: PAT_MRT3847_34708C.1
gcagcgattaatttatatttagtccattccagactggtcatactcaaatattacctcattacataacaaagactgatcaaaaggaaacctaaaacaactatttttacaaatcggaaaggagaactaattattcatcaaactcgcgcatgtgacataaaaggtagttggaagccaactgctcatttttggtacaagcgaagttcacctcccatacaggtgcaccatcaaaatccattgcttccaaacgtacaattgc

SEQ ID NO: 70541 - DNA, 528 bp, Glycine max
  Clone ID: PAT_MRT3847_34709C.1
ccaacacccttatcatttcttaaggaaaagttttcaaaagaaaaattacctttgaactttttagctccaaggaaccaaaaagcagggcaaacaaaaaacagggttttaactaaaggcaaaacacttttttcatccattcatgagggccttggcctaacaccccaggggtggagaactttggaaattggtttcatggggaaagcttactttgtcacacgggtggggggtcattttcaatatcaaacaaaaaccctttttctttgacccttttggcatattcaaaaggggcattgtcctgggcaacggggtaaacaaaagaagggccagctcttttttggtttttttcaacgggataagcccacttggttccagcaaaactagccttcaaggggggggcttcctccccaacactaaaatttttgacaaatccaccaaactgtttaattgtggggaatacagacttccttttttaaacaaaaaggcccttcccagaaggggggtttgcttggttttcttttggcacaaaaa

SEQ ID NO: 70542 - DNA, 554 bp, Glycine max
  unsure (1)..(554): unsure at all n locations
  Clone ID: PAT_MRT3847_3470C.1
cgtacgcgtgggttttgttgcaactgtttttttttgctggttgaagatttttacattttgttgctggaatctgattgttttattagtttttgaaaccttgggtcttgaatgcaggctgagatgagaaggcagaggaaaaagcaggtatgtactgtgtaacatatctgctgtctttttgacatgttaatttgcatgttcatgtgtatttgatctggtatacttgaaactatcctgtaatggcatgtctttagtaaagaagccaaattccatttataattttcttttaataacgtggatttaatgataggcagaagctcaagctttagattaaataagtagtaaattccagcttaatgatgttatcaaacatctagttctgatagacaggtgttgttaaaactatagtattcacactgataaatcatgaacattgggtaattgaagtatcttaagaagtgttcgtgtgttgcagtctttttttttataaataatttcggggtgggaccagnggactctactcatcatgatttctcggttaagtgcatacaatacaa

SEQ ID NO: 70543 - DNA, 335 bp, Glycine max
  Clone ID: PAT_MRT3847_34710C.1
attggggggtcatgttctttatctcattcctgaattgttattcattgatttgtaaactgccttagatttatgatactgtcccggcaagatagatgacaaaactgggaccagcactcaagagcaggaaaccacccaagcgaaccaataccccgccacttgctaaggagcactccctcaaaaatcacctggaaccaatgaaaagatgctgcattaggacacggcgctggatacgaacactgaaattgtaccttcagagacgcgccacacgattgcctggaggcacctaaacaactcagaaggccaaaccataaataccatttgaaggagcaaacatg

SEQ ID NO: 70544 - DNA, 164 bp, Glycine max
  Clone ID: PAT_MRT3847_34711C.1
ggttgttgttgtcgttgcttctgcactttgcagcatcttggttgcatcagcagttcggacgctctgtgattcgacaccgcaggactctctagactctcacgctgcagcatctctcatctcgtttccacctaactttatcttccttttgcgtccctttcacttct

SEQ ID NO: 70545 - DNA, 1052 bp, Glycine max
  Clone ID: PAT_MRT3847_34712C.1
agatgaatcaaataagtagttaaaaaaaaactataaagtaccaagtcaattaaattataagtattgccttcactttcaacccgtactttctctgtttctaaacaccccccacaaaattttctcactcgagaattttcccggaaaatctcacctttttcgatttctcagtcaagacaaacaacaacaaaaactctaaattctttcttaattcttgccaaattcgaaggagagagaaagagaaaaagaaaaggaaaaaaggttaatggcatcactgggatctccgtcttctttctggtgctaccgctgcaaccgcatagttagggttccacaaaaccacgccgttctcctctgccccgattgcaactccggcttcctcgaagagctccaaacccctccccactcgcgccgatccacgcgcggcggcggtgggtcccccttcaacccggtaatcgtcctgcgcaacgcaaacgacgtcgtctcgcccgaaacgcggaacttcgaactctactacaacgacgccgtttcaggttcctccggcccaagcagtctccgtcctttaccacagggagtatccgagttcctcatgggctccggcttcgacaatgtactcgaccagctcgacgccgccgcggggggcgccggagcactgccccccacggcagcgtcgaaagcggcgatcgagtcgatgccggtggttaagatcctcgcgagccacacctacgcggaatcgcactgcgcggtctgcatggagaatttcgagatcaactgcgacgcacgtgagatgccgggcggtcacgtgtaccattccgagtgcatcgtgccgtggctctcggtgagaaactcgtgccccgtgtgccgccacgaggttccttcggatgaagttgaagaaagtaataacaatactgtggggttgactatttggagacttgctgagggaggattcgctgtgggcaggttcatcggagggagggagctcccactggtgtatacggagatggacggcgggtttaacggcgctaacggcgttccaaggagagtcgcttgggatagct

SEQ ID NO: 70546 - DNA, 394 bp, Glycine max
  Clone ID: PAT_MRT3847_34713C.1
ggctcgaggcgatagtccccagaaccggttcttgcaggtccccttcaatcggctacagggtgagtgtgaccgtcccacttcctcccaacaacgtctgaaaaagcaccagcttaatctctcgcaccgcgcaccaggcgaccaacgactacatagacaccgtgaccgtcgagggcctctgctacacccaggtctggcgcacggtcgaggtcgtgtacgcctgtctctcaccgaacattaggatccatatgggcaacgcggtcatgatcctttcacccaattaagtgcacttgcccgttgtgcgagtggacgcaatgtagcctcggacccccatagaggccgccaagccgatagagaccgaccaacggatcgacccaccgatggccaatgaccctgc

SEQ ID NO: 70547 - DNA, 591 bp, Glycine max
  Clone ID: PAT_MRT3847_34714C.1
ccactctttctttttttacatttttttttttataccctttttttttcttttttttagtttgggcgtttttcttaagcggggtattgccctttttttggacccaaggtctgttttggtcgttcgttccgaaaaaagacaaagcctggaaacaaaccgcccccaccgagtggacgggggaaaaaaaaaaaacggcgggcggggggaggcaatgttgacacggtaaactggtctaagctgggcaaaaaaagaaggcccaacgaaacggtttgcgaagcagcaaaaggggccacggcctccttttgattaaaaaaggggcggctgaacacgggggggtgttgcaaacgcgcgtgatggacccatggggggagaccaaaaaaaaaaagtgtccctggtttaaaaagaacgccaaggggggagcaatttttttttaaaaaacgacccaccgtttgagcagagacggcccaaaagaaaaatctttcccccaaaaaacaccggcaaaaccccccttgggggaaaaaaagggggggggggcccccccttcatcgggggaatagtaaaaaacccccaaaagaggggggttttcctttttga

SEQ ID NO: 70548 - DNA, 174 bp, Glycine max
  Clone ID: PAT_MRT3847_34715C.1
aatataaagaaggagcttcaaagatataaaattactttatgaacaccaaacatataacatgacacatggccaaatgagaaatgctttttaagaacatgggactagtcgaaggaacgatccgtccatattcgaggggacataacttgggttaagatgatcatatgatctaagact

SEQ ID NO: 70549 - DNA, 425 bp, Glycine max
  Clone ID: PAT_MRT3847_34716C.1
ccacgcgtcaatacggctccgagaagacgacagaagggggtgagttttaagttacattgtgttgcaattgaggagttgaggtagtgattgtaaccaaaaaaaattagaaatggagaatcatcgacgtcgtactcaagtgacaacaagcgatgatgaagacgaacaagaaaaagaagaggtattgaaacggtctcgtcctgtggaagacgctaagcctattggcgagcctcttaagtattctggaaaagggaaaagcaagaagtggcactatgactcctttgaattcaatggcatccaatatactattggggatcatgttcttttcaaacccgaggaaaagggccaaaaaccatatgctggaattattaacgacattacacagggaaataatggcaatgtggtagtgacgggacaatggttttatc

SEQ ID NO: 70550 - DNA, 736 bp, Glycine max
  Clone ID: PAT_MRT3847_34717C.1
caagtttcttatttcttcctttcatatatattcaaaatttcaaatcaaatgaaacagcttttgtgttaaatatagaggaaacatggttataaattgattgtctcctcataagtcttctgaaccctttcagaaatgaatttaaggggaagaaccactcaactacatatcaacactttcatttattttgagaaggttaaaggctaagggagatgacagaagagagtgagcacacatggtattttcttgcacgatgacgattcatgcttgaagctatgtgtgcttactctctatctgtcatcccatcaccatctctcaatccttttcattttctatttatatactttttttttgtatttattttcttgctttcccttttggtgcttggactaaccctaagtagcagcttgggacctcactataagcaaaataatattcacatcaaatcgatctcatacatatcacaggtgtgtgcgtttttcagattgttcttaattagttcttgcaatcttcttagcatgctgacctgcagtacctagctacttcatcaaaagcttaacacctgtctccgaggcagacatgtgctttgatgcagatctattttaacatttataattatctaacactaattgtttgatcaatgttgtacgttattctcagtcaacatatatacttatgatgagtaagagaccgagtcttgctaattaattaattatagcatctggaaaacctagctcgt

SEQ ID NO: 70551 - DNA, 663 bp, Glycine max
  unsure (1)..(663): unsure at all n locations
  Clone ID: PAT_MRT3847_34718C.1
cggtgtatagcaagtttggagctctgaatgaagcagaaactgatatgttccgcactaactacacagctagagtgtnccttccttcgaacttctgatgccgagaaggcatataaccattcccaaaacaataacccttttggatctccntactgatgtcacttttcagcttcagtattcctctgatggatccaagtctggtgtacaacaacagggtgaaagatcaaacaacaagcctttgccagcagcagctacagcacctgttgcattctcacagggtactgaagcatccaaattgatcttcatacagcagaagcttcaaggtatgactttgatgctagaagaagcatcaggtggtggcaaatctcctgatatgatggcaaagttagagagcgagatgaaggctcttttggaggatgttaacaaaatggttgaagcttctttgttttagataaagatttcattggagactagtcattatgcagcaatgattagggtaggtttagtgataatatgcccccttttgtggggctgtcgttatctggggctctttttgtttgaccttttggcctagctttttaaagttagttggtatattttgaattggggtcatgatattaggtacttgaccagatatttatattttgaatgcatagttttatagat

SEQ ID NO: 70552 - DNA, 476 bp, Glycine max
  Clone ID: PAT_MRT3847_34719C.1
gcgcgcatacgtccgcccacgcgtccggtgagattcagggaaaagttgtattgaaattttcacacgaggaatttcttacagcttggtcaactcaggtgcgtcctacatcaactctgttggctgatgggtgtccatatttgtatgctatggggcatgatagtgcagtgtctacaataccaggtgattttgacattggtgttaagttgacaaccataaacaatatgggagcatatgggctcaatcctggtattgaacgtgctgggatttggggcaccattcctcagttcatggagcagacaaactgtttggacacagatggcatcagtgaggacaccattgtagcatgattctagcatgcagagcttttgtcaatggtctattgaccttctcggtggaggaattttagtggacaaaactggagattgtatcacactgatacaacattctccaattagtaactagttgagagatgctgc

SEQ ID NO: 70553 - DNA, 453 bp, Glycine max
  Clone ID: PAT_MRT3847_3471C.1
gaaatatataaagtattacctttattaaccaatataacatgcataccaattttgcgattaatgttattctctctatcatggttaattgtatagtctgcataaaacacatacaggcatgcacacaaaaagatttttattagttctataatttattatgtctttatatcaaagactccttaaatcttggaagcaaaagtcagatttgagtttgatctctcacatgcatgtttcaatctgatctgaatgttttactgatgtacttgatttgcttcagttcaattttcaacctaattccttctatcctttcactgaacctgtatattggtgccagctttaagacttgtgctcccattttcctgcagccaggatggactatctgatattgatgaaagggccttgaagtttttggttgcaatttcttctaattacaaaagtactgtagacaaagtaatt

SEQ ID NO: 70554 - DNA, 939 bp, Glycine max
  unsure (1)..(939): unsure at all n locations
  Clone ID: PAT_MRT3847_34720C.1
tcattaacttgaaattaacatcattagtgttttaaattttgcagcacctatgaaatgcactttatgatgattttaaattgataataagttaaaggtttaaatattttnnnnctataattatgcgcttttgtgcatttcgttcctgtaaaaaaagaatttcactttcgtccctgcaatttcatttttttgttttaaatccttctggtcaatctccattacaaaatacatgacatggctaacagacacatgtgacattgtatcagtggcctttgaatgaagctgatgtggctttgtttatttgtttttaaaatatatgctaatataatatatcgtgatttaaacaaaagaaagacccaacttggtaagtgggtcgcatgaatttccatctcttcttttgttttagggatgtcttcattttcgtaagagaaagagttgagagaaacaacttggagggcaattgtgagtgcttcgtcaatggcaaccagtgaggcttctatgtcagcaaattgaaggccttttatccctatttgtggctgtagagtcacgatttactttaccttctcatgctgcttcttttctttaaggttacaagatttttttatgccatgatcacctggacaacacaattgtctatggtaatgaagctaacgatggatgtgggtgttctcaagggacgacgaacatgtatttgaaaaaaattgagaaactaaagattaaaattgggaaggagagaataaggaataattttctattgatgatttagtgggttggttttgtaatgtatgtaatgaggaaaatgtagtggtattccatttatgtgttgttgtagttgttttgtaaagaaaaaatggtaaactttgttgtcattgtaatgactccttttgtggttcaatcaaatgaattaatgaaagtttttgcattgaaccaaaaataaattcc

SEQ ID NO: 70555 - DNA, 651 bp, Glycine max
  unsure (1)..(651): unsure at all n locations
  Clone ID: PAT_MRT3847_34721C.1
atccttcaatgcgcttgaatgttacaatgatcccaccacgctgctcccgtctgatacatcatattcctactcgtagcttgcatcaaacagttattacatatagcataaaattacaaaataaatatgtgtgctctcactgagaagcaacatgctctggtgagtatgtcactccatagcattcaaagcaaacattcctcaatacagcgttgggatctatctcttcgatactgtagaaagcaccatgaatgatacgacttgttgctcatttctactcgatgcagtagaccccactaatcctaatctcacagtgtccatgcttgaaagctatttgcattgctgtgttactcaactggtcgacttaaatctggcgcaacagagaagtttgatgcactcacttgatgctggtcctgcccaaaaagaatgcactgatcctcanaatctcgttgggtaggataatcactgctgtaaacgatagaggcagcagttgtggactagaatgcatgacacatatgagccgtgcttggtagagatcctacgactgaatctggcagctgctcttacgaaggcgtaattagtatctattgcataagagcgcaatagataaatcttgtttcactataacacttgttactattatacaagttcctgata

SEQ ID NO: 70556 - DNA, 302 bp, Glycine max
  unsure (1)..(302): unsure at all n locations
  Clone ID: PAT_MRT3847_34722C.1
aaagcacgcaggaaaaggccccaaagggccgnacnccaangncncccaaagccanagaggcaccaaaaagaaaacaaaagaggggnccgccgncnagaaatcctctctttggacgaaaacaaaaaangaaaaccanagacacgggtttccaccacgcgaggacaccaggcaaaggcccccgaaaagggaggccaaagcccaagccaaaaaagaaagaaagaaacaaaaagcanggcgccgcaaagccaaaacanaaagaaaaanaaaaaangacacggaggcacgggcgagacacacaccag

SEQ ID NO: 70557 - DNA, 453 bp, Glycine max
  Clone ID: PAT_MRT3847_34723C.1
accacaaaaataaagcagggtttcatactcactttgccacactaaaaccaaccaattccccctttagggacaaaaagttgttcacactatccaaacctgtttttaccccaaacaaagccaaaaatttccctccctgtaaaaactgctctatgcaggtttgtaacacgaaacaaccggcccttcctaaacactattattctttacaagctcgaaagaaattaaaaacttctacccccgggacggtttaaaatcaccctaggtgctcaagctgcctcccttttgggcaaagaccatgaaaacttgactttggctgaggccaccttcctcgttaggaacttccactaaccaccatctttccgtgactctcggggacttcataattgaaattgcctgcaaaaaggaacctttcaagaagaatcgggggggggacaaacataggagtggcttcaaaaa

SEQ ID NO: 70558 - DNA, 289 bp, Glycine max
  unsure (1)..(289): unsure at all n locations
  Clone ID: PAT_MRT3847_34724C.1
ggatcctctagagcgggcgcgngnnttttttttttttttttttttttttggctctccctctgctggggtccaaaccaaaacggggggcttggaaaaaacttttcaaaccactaaatcctctacagaaaacaaacccctctttactattctcgcagacttagaacgcctgattaaaacctgcattttttaaactattcctgttttggtaacaccttctcctatagggaggcgcattaaaactttttttagaaacaagaattatgtgtttcatgagaaaaccagttccccc

SEQ ID NO: 70559 - DNA, 261 bp, Glycine max
  Clone ID: PAT_MRT3847_34725C.1
tactcaacatgtgttattcaaaagtcttaagttcacttttgcacttaataataaacaagattaattcaatttgggctctgctctaaataagaaataaatgaaatcgaattaaatgcaaacctgctcctgatgtgttatacaaaaatttacgacttctttttccccccaaacttgggttggctcccttttaaccctttcatttaaatgttcaagtgggaaaaaagagggcacacgaattgggttttttcatacaaatgacca

SEQ ID NO: 70560 - DNA, 351 bp, Glycine max
  Clone ID: PAT_MRT3847_34726C.1
ggctcgagattctttctccctatggtttctttggcgaacaaagtgtgttgatataaaaagaacctgggggcccgtatcggtcctttttgcctcaaacaaatgctttgcgacatctgatgctccaatgacttaaaacttctagattgcaccaacacctgctttttttgaattacccgctgctcccagtgaaaatgatcgattcgaagtctctaagaacgatggagtacttacctttcaaagggacaggctccacgatccctttagcacagaaatctgaattgaacatgaataaacctgattgtacgaagggttgacatgctcctgctcatccactgtggggatttcttgggg

SEQ ID NO: 70561 - DNA, 1755 bp, Glycine max
  Clone ID: PAT_MRT3847_34727C.1
gaccacgcgcccgcacggctgcggagagacagaagggggggggatcaatggagaagagaagagaagagaagaggtaaatagggttagccacttgttcttgttcccttatctcttatggtgaaatccctgttcctgatttctcgaatcccaatgtcttccaccaccatccaccacaacggctcccacatacccaaaaaacccaaactctcttccttggaaatcgaatcagaattcggccaccacgactcctccgtcgcccgcatcaacaacggcagcttcgggtgctgcccggcctccatcctctccgctcaacgccgctggcagctccagtaccttcgccagcccgaccacttctacttcaacgacctcaaatccggcgtcctccaatcccgaaccttaatcaaggacctcgtcaacgccgaccacgtcgacgagatctccattgtcgacaacgccaccaccgccgccgccatcgtcctccaacacaccgcctggaacttccgcgaagggaagttccaaaaaggcgacgtcgtcctcatgctccactacgcctacggcgccgttaagaaatccatggaagcctacgtcacgcgcgccggaggtaacgtcgctgaggtcccgttacctttccccgttaattccaacgacgagatcgtttccgagtttagaaaagctttggagagaggaaagagtaacggaaatagggttaggttagcggtgaggctcgaggtgacttccatgccatgtgttgttattcccgttaaagagttgattcagatttgcagggaggaaggggtagatcaggtttttgtcgacgctgcacattccattgggtgcactgatgttgatatgaaggagattggtgctgatttttatactagtaatttgcacaagtggttcttttgtccaccttcaattgcgtttttgtacactcgtaggaaccttaagggtactgatcctggttctgatttgcatcaccctgtggtgtctcatgagtatggaaatggtttggctgtggagagtgcttggattgggaccagggattatagtgctcagttggtggttccggccgcggtggagtttgttaaccggtttgaaggagggattgaggggatcaagaagaggaatcatgaggctgttgtggagatgggggagatgctggcgaaggcgtgggggactcggctagggagtccccccgcatatgtgtgctagcatggttatggttggcttgccggcttgtttgggaattgggagtgattctgatgccctcaagttgaggacacatttgagggatgcttttggcgttgaggttccaatatactatagatcgccgagagagggagaagttggggtggttactggatatgcgaggatttctcatcaggtgtataacaaggttgatgactattacaagtttagggatgcggttaaccagcttgtgcaaaatgggttcacttgtgttgttctttcgtcggattgaagagttgagtggtatcactgttgtctttctgatgaatgaaagcgcaatcatttatgattgcttgcaagcttgactagttttgatggttttggtaccatagactgcagctttgctgcgaagaattccttagaagtaacttcaatgttgaggtctatggaaatattcttgtatatataatcgtcattctcagatgatttgatgcctttaaattgtgccaacttaagttaaacttgttcaagtttatataaaaaaatttccataaaaatttaggtttg

SEQ ID NO: 70562 - DNA, 626 bp, Glycine max
  Clone ID: PAT_MRT3847_34728C.1
cccacgcgtccggattaatttgaaataactatacatgatttttggcgataagcagaggtccgtgcgttttcaaacttgttccggcattcatttccagtgccttgcatgtgcctctattcctcatttctcaatccccaatcccaatgtcttccaccaccattcacgaaaacaaccaccacaacggctcccacatacccaaaaaacccaaactctcttccaccttcataactccgtcggaaatcgaatccgaattcggccaccacgacgctgccgtcgcgcgcatcaacaacggcagcttcgggtgctgcccggcctccatcctcgccgcgcagcgccgctggcagctccagtacctccgccaacccgaccacttctacttcaacgatctccaatccggcatcctccaatcccgaaccctaatcaaggacctcgtcaacgccgaccacgtcaatgagatctccatcgtcgacaacgccaccaccgccgccgccatcgtcctccaacacaccgcctggaacttccgcgaagggaagttccaaaagggcgacgtcgtcctcatgctccactacgcctacggcgccgttaagaaatccatggaagcctacgtcacgcgcgccggaggtaac

SEQ ID NO: 70563 - DNA, 715 bp, Glycine max
  Clone ID: PAT_MRT3847_34729C.1
ggccgcttttttttttttttttttttttttttttttggctgaatgacaacaacttgggaaaattacaatgctaattactgtgtcttattttcatttaataacatctattgcactcttcagatcataactagaaaaaaaaactttatggcttagcttcatatcatggaagcgtattgatggatgttaaatcaacaatttttaatcctatttctataaaatgatctgagtaaaaaagtggacgagagctagtaaaatttactcttttatattaaattttaaaaaaggttacattattgttttggtctctttttttaatttatattattcattttggttcttttattttatttttgaaaagcaaaacttttattaatgatcgatttggtcgtttaaaaaaatgctcagatggtatccctattgaagtttgaaaatgtgctggagatcgaacaaggtttcatttggcttactaaactttttaatgagattttgagatctaacaaaatgttagttgagtggaggaagagaaatttcggttcctattttctagaacaaaggagatattaaaaaaagatctaatcaactacatgggtatatatcttatgagtcacactatgaatttatcagaaaaggtgatcgcacatagattaagagaataaatgaggattgtggagaatcaatttactttagtacctttccatcaaggtctactaaagta

SEQ ID NO: 70564 - DNA, 422 bp, Glycine max
  Clone ID: PAT_MRT3847_3472C.1
aaaaacaaaacactcttatattgatatattagaaagccgtgactaacaacaagatagagagttataatgttcctgtaaaggaataaacccaaattagacatgcatctgattgtatggagtgacgagatctcaacacgaaccatactgacacacatgaactatatttaccccattcagcaatgcccatccgaatctgctggagctaaactatgcatactttagtaggaccgcccacggtgcaccggtattacaaagcatggggctggaaatgaattgtgtgactagaatcgttctgtgttcccggatattgccatggatattgttgcaagagcaggaccaatggcctcctttgcgtaaatgatgcgtcaacgctcgcacgagacatcaaacatttcctatgggacatggacgacaagcttaca

SEQ ID NO: 70565 - DNA, 932 bp, Glycine max
  Clone ID: PAT_MRT3847_34730C.1
tattacgaacagagcaacctagtactagctgaaaacacaaaattcactaatccaaaacctagctcaacaaaacacaaacttaaacaaaccacccaaaaacctaggcttaagcagatccaaaaatagaaacaaactttcactgcgtgtaaaccaacttaggcaaaagaaggaaggaaggaaaggcaacactcaaccccaaaacgtgagagagaagtagtaggaagcttgaacttgactacttgagttctgattacttgagttccctcaaaaggcaactcagaatttaacaaaaccagaagcagaagcccccccaaaattgaaaatctccagtgaaatactcgaagacccagaaccagcaaaggttaaaaattagcaagagcaataaagggtagtgccaagtttcatcatattccaataaagctaccaactttatctgttttactgcacaaaaaaaacactagcagcggaacccaagggagggcacggtgacccagaacgcgttagtcacagaattctaaaaccacaagccactttaaaattcctccttcaaatcacacaccagcactagaaaacaaaagagaattcagagagaagaaaaaaaaagattcaaatacaaaaagaaagaaagaaatatgtatctagaaagggtatagacaaaggaagatgatgagattttatttgattttattacctggttttgggttgaaagtcaaagtcttgggggtgtggtgtagctcaaaatgaaatccaataatccacaatcagaggatgacccagttcgtgaatcgaggtgaaagaacaaaaaaagctgtgaactttgtttggtgtcttgtggaaaggaaagggatgttgttgttgctgactggcgctccgaaatagaatgaaaaatgttttctgggagtgtatggatccgcggacgagtggacggacga

SEQ ID NO: 70566 - DNA, 104 bp, Glycine max
  Clone ID: PAT_MRT3847_34731C.1
gatggctactattgaagattcaaaacgattctacccactgttcggactctaggccaatttagcccttatttaatttgcccggacactcaaatacttttctaatc

SEQ ID NO: 70567 - DNA, 1801 bp, Glycine max
  Clone ID: PAT_MRT3847_34732C.1
gttgacagcgaaaccaaccaaccaaccaacaaagaaagaaggattaagcatatattcatcagaaagattaagcataatcatcagaaaaatggcatgcaatggattctgcctcagactcattgctttagttcttgtgattagcatatcaagtgttaattgcatagaaactgatgcagttgaacccattattgatattgcttcgctgaatcgagatagtttcccaccagacttcatctttggggctgggtcgtcatcataccagtttgaaggtgcagcaaatgagggtggtaggggactaagtatatgggataccttcacccataaatatccagaaaagatacaggacaaaagcaatggagatgttgccattgatgcttatcatcgttacaaggaagatgttaagattgtgaaggatatgaacttggattcatatagattctcgatttcttggtccagaatactaccaaaaggaaaactaagtagaggtataaatcaagaaggaatagactattacaacaatctcatcaacgaactagtggctaatggtatacaaccattggtaacgctttttcattgggatcttcctcaatctttagaagatgaatatggtggcttcttaagtcctcgcatagttaaagattttcgagattacgcggaactttgcttcaaggaatttggagatagagttaagtattgggttactttaaacgagccatggagttatagtcagcatggttatgcaaatgggggaatggcaccgggtcgttgttctgcttgggtaaatccaaattgcactgggggtgattctggtacggagccttatttagttacgcactaccagttacttgctcatgcagctgctgttcgtgtatacaagaccaagtatcaggtatcacaaaagggtttgataggcattaccttagtagctaattggtacctaccattctcgaataccaaagctgatcaaaaggcgactgaaagagcaattgacttcatgtttggatggtttatggatccactaacatctggagactatccaaaaatcatgcgatctcttgtgagaacacgattgccaaagtttactacagagcaatctaaactacttattggctcatttgattttattggcctaaattactattcttcaacctatgcctctgatgcacctcatctaagtaatgctagacctaactatgtaacagattctttggtcacccctgaatttgagcgtgatgggaaacccataggtataaagattgcttctgattggttgtatgtttgtccaagaggaattcttgatcttctattatatacgaaggaaaagtataataatcctttgatttacattactgaaaatggtataaatgaatttagagacgaaacactatcattagaggaatctcttttagatacatttagaattgattatcattatcgtcatcttttttatcttcgatcagcaattaggcatggtgtgaatgtgaagggatattacatatggtctttattcgacaattttgagtggtcttccggttatacggtgcgatttggaatgattttggtggattacaaaaataatttgaaaagatatcataaactctctgcaatatggatcaagaattttttgaagaaaactagcctttatgattctagcatatgatattgtcaattatgagattcatcatccattagatagttatatttgtaaataataatttgtgtatatttttttatttattccaataaggtctcagtggaccagaatgaaaattaaaaatgaagatacaaatttattgatttt

SEQ ID NO: 70568 - DNA, 518 bp, Glycine max
  Clone ID: PAT_MRT3847_34733C.1
agaagggttgcttctggacgtgatgcagatgctgagggaggtgaggatagaagttataggggtgcagtcgtcgcttaacaatggggtgttcgtggcggagttgagggctaaggtgaaggaacatgcaaacggcaagaaggtcagcattgtggaagtgaagagggcacttaaccaaattataccccatgctgttgactaaagagggggtgcatgcttgaattttcagggcttgactttatggatgaatattccaagtagaattaactggctatttctcttgcaatccacactatttgtacttccaatcacaatggcttaatgtgtatctatgattcaagccaggtgtgaagtctagtcaataaacccataattaagtattgtcacgaaggctagctgatgaaatagaaagaagctagggaacattagtgttgtctttagagttttagcagattaattaaaatagtttacattctataattttagtgtagtaatgatgtaatgatcgatgtagttgagaa

SEQ ID NO: 70569 - DNA, 507 bp, Glycine max
  Clone ID: PAT_MRT3847_34734C.1
gcatacgtgagctatgttttcggctagccttaatacaatctctcctttatctgtctctggtaatccattgttatgtggttcagttgttaatcactcttgcccttctgttcatccaaagcctattgtcctaaaccccaactcttcttactccaactctggctcttccttacaaaacaatcatcataagatgatgctcagcatctctgtcattattgccattggtgctgctatttttattgtcattggtgtggtggttgttactgtcctaaatatccatgcaaggtcttcaatgttatcttctgctgctccatttgtgttctctggtggtgaggactatagcggttcacccgcgaatgatccaaactatggcaagcttgtgatgttttcccggcgatgctgaatttgttgatggtgctcatacatattcttaacaaagaccagtgaattaggcgtggaggatttggagtttgttattgcactggccttagagattgtcattgtgttgca

SEQ ID NO: 70570 - DNA, 339 bp, Glycine max
  unsure (1)..(339): unsure at all n locations
  Clone ID: PAT_MRT3847_34735C.1
tngnnnnnaannnnnnnnnancgtgncnngnncgcanannatnagtcangnnnnanngtannaaggtntctcgtccgtcgcggctcgtctcggctgcctgcagccgcctctctgggggtcatgccgcccgcgccgccgccctcggcacctcccgcctgcatgccggccacccccgatcctcctccttccaatctcggtctgcaactctacagttgggtgtcagaggcacatgaattgccaattactcaaatgattgatgcattacgaggtaagatgatggaaacaatttatacacgacgagtagaatctaatcaatggatgacaaagttgacaccatcc

SEQ ID NO: 70571 - DNA, 448 bp, Glycine max
  Clone ID: PAT_MRT3847_34736C.1
ccacccttaatagcaagactgattcacccttagttaatcctgccacgatgaaaaaatccgttgaaattatggcaaccaatttggtttaccaaacaaaacaaagccccccaaaaaaacatctcctgctaaggctatactggaaaaactacgggtctaacacattgatcattacacccggggagtttcaagaactgaaatcagagcaaatttttcaagggaaactatttaaccttgtaaaagaaacccagcactttcccaccaacattttttttcctagcttttttatgacccatggagcccgctgggggaggccacccaattttacccaacttgttttggggggacaccttaccagcccacctttaattttttttgacaccaacatcaaaacgcggactaataacccccctttggttcagcctaccattcaattcaacaacaatttttc

SEQ ID NO: 70572 - DNA, 406 bp, Glycine max
  Clone ID: PAT_MRT3847_34737C.1
ttgggcctgtgatgaaagtgtacgcagcgcactgtatatccataagggaactatatgaaaatagcgctgctgtacctactatatacctacctgggaggacatctcaatcacctaagactatcatgtgaatcttagtacaaaaggctatgacacactgatattcagccgggaacatgacatgaaaattactttattggaaactcgctcatggataagcactatgaactattgcattggggatgattgtacgcaatggcatacagatggccatcttgcaggatacacgttgacttactacaatagaatgacatttgtcaccgagaagggatgaggccacacagctcctgagtacaagcctgactaatgcttggccatgtacatgagatggatatctagcagggctatg

SEQ ID NO: 70573 - DNA, 421 bp, Glycine max
  Clone ID: PAT_MRT3847_34738C.1
cttctttgtttaaagaagaaattaccaatacacatgcaaaataaaataataaaatacctttggaatccggaaagggttttttgcagcattcacataatttggtaatcttcctttcacttggagactcatcctgagaagaataaattaaagcatgaaaactgggcctagggttctacttcatgtacaaatgagggtaaagtgaaaagatattgccatataatcaagcataaaaattttctttccattgagaacaaggaataactgaaaacaataaggacgaaacttagataccgttccttaagtgcttttggtgctattcttcaatcaaaattggaatttcaactcggtaatttatgctgatctttaatgcaaacctttattaagagattatcaaggtgaaacttcgattctaattgatgaa

SEQ ID NO: 70574 - DNA, 1068 bp, Glycine max
  Clone ID: PAT_MRT3847_34739C.1
ttcggctcgagataaaaatggttatgccttgaaagagggaaaacagtggaaaaccattttaagaaattttgtgacggtaaatgatatccagaagctgacttttgcttcgaggtgcatattgaacaagtattcaattgatgagctgctaagtgagagtgacaggtcaacaatgctaagggttttgaattttcatcctcgtaaaagtgagaagtttggcattggaccacaggacattaaggttggatggcatccaaaatacaaggatagccggtgcttccatatagtaagaattgatgggacggttgaagatttttcataccgcaaatgcattcttggtgctcttgatatcgttgatccaaaaaagtcaaagatccaggagaaaaaatggtcaggacatggtaacacgtaatatctatgcatgtccaagcataataagtgactatcatttgatctggtgacagtcacagactataaaaatagagtcggaagggtaatagtagtgccacaactctacaatcacaaaaagcaacgttgtttttctacctttgatttagaaggatgtccggaatcagtggtagagagcactgttctcttttgcgagtttagagttatgttattggcattactccagctaattggtggaaatagtttgcagccttcttttgttgtattttactatcttcaaggctagactgggtgatagcttactcaaatgttgctcgatggatttagaggcagagcagcgaatccagcgtaaagtcataacattttgaaagaagaaaggagaagatgcatagaagggaggatacaagatggaacaatgatagtatatattttttcaatatgaacaaattaaattttattttatatgttaaaagatggcgtgggttcttaccctgagcttctttttgcttcttccactaatactttatttgccaacgattacgtaaggcaaagaaagatctagtggaagcagcaacgagaagcttgtaaagacttatacccccagaccatttgtattgatgcggcagttaaatataagatatgtttaggtttgattcaaatgtc

SEQ ID NO: 70575 - DNA, 418 bp, Glycine max
  Clone ID: PAT_MRT3847_3473C.1
atgaggtggtgaacaaacatcgcctgatatttgtgagcagtgctggtaatagcgggccaggattgagcactgttggtgcacctggtggtacatcttccagtatcataggtgttggcgcatatgtatctcctgctatgacacacaaccacatctttctgcttctcttgctgagccaccagtttcagactacggcttagaggaagaagccagggaatatgccaactcagttcatatagatgatgatccagtggacaagtatagtcttcctgagcaccagcagcagctacaagaagaacttgaaaccgaaattgtggtggaggaaacttccgtacaggaggcatctccaccaattcataccgttgcacacacttatccaaaggaaaaaaaaaaacccccccctgttgctcttgggagagtc

SEQ ID NO: 70576 - DNA, 281 bp, Glycine max
  unsure (1)..(281): unsure at all n locations
  Clone ID: PAT_MRT3847_34740C.1
tccttggtaaaagagtttaaaaaagcaacttttcaactgtacccctaanggatgaggtccgtgaaaatactaggctatttatcttcnanacatactctataatacaccaactcatttacatgggagttcttgcttagaagttaaattttaattatgaggaggcttagagatggattgttaatttcattctgagctcaaatctttgatccaaaattgatttctaatacttgatctattattattgaacctatttttcttaaatatttttatcatcttttttt

SEQ ID NO: 70577 - DNA, 280 bp, Glycine max
  Clone ID: PAT_MRT3847_34741C.1
cccacgcgtccgaattaatcttgtggacaattaacatctcaaaaaaaagaaaaagaaaaaaaaaaaaaaaaaaaaaaaaaaaaaaaaaaaaaaaaaaaaaaaaaaaaaaaagaaaaaaaaataaaagataaaaaaaatgaaaaaaaattataaagcaaaaatatattaattcaattgaccgacttaatacaaattaattactgtctaaataatagcatcacgaaagtaaaaccctttacataacataatttattggcattgtagaatattacctattaaa

SEQ ID NO: 70578 - DNA, 355 bp, Glycine max
  Clone ID: PAT_MRT3847_34742C.1
ccattttccattgtttgagtgtttgacaaataacgatgcatagccttcggaaaacttcgaccgtcttcactatatcgcttgccgaggaaagctgctagacctggctacacatacgcccaaaaaacactattacgggagctgctgcatgcatagcatataatgatgttaaccggcttacacggagttaatcccagaacacaagcggagtacttgacacactaggaaatcgctctaatcctaagaatctcactcatgcagagaaagtctacaacttcaagactggaacggggatatcgtaagtgctgaccgttgaaactaccacatcatcagcgagtccattgacacaatactgcac

SEQ ID NO: 70579 - DNA, 320 bp, Glycine max
  Clone ID: PAT_MRT3847_34743C.1
gtatcgttgcattggcttggaacctttgggctgatttatgtgcttggccccctggggcctcgccctcatcttcataaaattttatttctgcgaacgctctagaagtttaaaacacccctacagtacccctagaggaaaacggtgggcatggccctgatccgtcctcctcctgcgccctcctccctctcttcctccttcccctagactcttgtcgaggaacttctggagaaggagcctgcatctataccggactatctcaatccctatgatatcgctagtaagtatgaccctactgctgctgagcctcatgttttaacggc

SEQ ID NO: 70580 - DNA, 895 bp, Glycine max
  Clone ID: PAT_MRT3847_34744C.1
tgttattgaattattaaatgctgctaaataatgacactggcaagtggcaataataatgggaatgaacaaaaccacaaaagaaacttgtaatatgtaacacgttcgttggttaagactctcaagtggtggttgaaacctagcaaatatggataataagcaatgtccaatgaaacacgcaacgctacagtttcatcttcttcttcaaagttcttctaatccaaatttagaaccacttcttcttgtcttctcgctgacaccgaccccaccacctcttctccacatagcagctcactgcaccggcacacggcgcacgtgacatgcttatcgagccacgtgtcaatgcagtgcgggtggaacacgtgcttgcagtacggaatcatcttcaccgcgtccccctctcgcagctcctccaggcatatcgcgcactccgcgcacccctccccgcagtgcgccaccaccggcaggcacttctttgcctccgccgccgctgccgcgccctcctcccagcggcggcggtaggatccggcggcggcggcgtcggaggcgaactggcggaagtagaggaagacgaagccgacgaagaagaaggtggtgaagaggatgaggaagacgtaggccacactcgatgaaaaaactggaggaatcgaaacctgcagtgggctttggaattggaaagccgaagattgcggcggcgaggatgatgatgcgttagtggcgtgtttggtgtgagtgtgagagagaggtggcatcgagaggggaacgtcctcgttctgtagtagcaatctgcggttccagaattccatgtttttaattctctgctaccaaacactgccttatactctaatgtgtttgttgtgataactgagaagagaataataaattaaagttgcagtgt

SEQ ID NO: 70581 - DNA, 390 bp, Glycine max
  Clone ID: PAT_MRT3847_34745C.1
gggttattatttgcgggtgctccattgtgaatgaagagtacaatttccatctttagttggtgatttaatggtgagttccaaactcttctaaaatatctatgtaaattgtggaatttacagatattgaaattagattgttgtcttggtctcaaaaagtttacagaaaatttgatacacataaaagctctacaacaattatcattgaatgattgctggaagctatcaagcttgcctacttagataggtaagttgacttccctaaggagtttaagcatgtacttagttggcaaggaaagaaagtttatattggtagaattaggaccactcaagcctaaaggagatcttcacatcaagcatatgaagaaagtaaaaagtgtaattaattccaaa

SEQ ID NO: 70582 - DNA, 285 bp, Glycine max
  unsure (1)..(285): unsure at all n locations
  Clone ID: PAT_MRT3847_34746C.1
gttagtacttagcagccacaacaccttctcttacttgtcttgctcaagggcaaagaagagtggaagcaatcttatttttattatggtgtttagttgatcgtggtggatgctttttgagatggatctcaggcattttagaagtgaattcttgcccacaacacttaatccatcttcaacctacctccanttttctccccttagacctttgcacaaaaccctaaacctcaaaattccaatcacagaaacgctttgcagttgtttcattctcccaaaggcctaaaacaa

SEQ ID NO: 70583 - DNA, 229 bp, Glycine max
  Clone ID: PAT_MRT3847_34747C.1
atggaatccaattgaggggaaaaaaaaatgttacacaacctatacttttttatccgatatgtctgcgcattataggcaggttcctatgtgtgttaaaaacaggtaatgttctcccataggccattctttggacggctttttggaaaggcaaaaaggccccaaagagccgtcttcctggcaatcggggggcaatgagtaatatgcctgtagagatacttccgggggggga

SEQ ID NO: 70584 - DNA, 363 bp, Glycine max
  Clone ID: PAT_MRT3847_34748C.1
tccacgcgtccgcccgctctctctctcgatcgttatatcctctctttcacccacaggagaagagggattgaatcatagggaatttggagcgtgaattgtcatgcaataaaattcgatcgattttgatattctaagtcgtagtatccagattattactcgaaatgatgaatactttatggagggcttgattgaaccaacaaaagttagtacccaggctctgtttacaaaaaaccaattggtaatatatctaccaacaccactgatgtcatatactgatgtttgacagaaaatatttattaagaaattcagaaatggaacaagttgtaacaaatttacgtattagtgtaatatttgtcctatatt

SEQ ID NO: 70585 - DNA, 176 bp, Glycine max
  Clone ID: PAT_MRT3847_34749C.1
attctttccaggcttcaacaagagccactttcctagtttttcactccttctcccagtctcggtgtgcccttcttctggggcattcgtgttgcccttcttcagctccacctccacacccgctcttggcccgagaagcttcactgggatcactatggtgggtgtgtgagagagggatt

SEQ ID NO: 70586 - DNA, 411 bp, Glycine max
  Clone ID: PAT_MRT3847_3474C.1
atgaaaaattatggggacgatcgacatttgccacaacttaaaaaggaagttaatatagcgggagtttataacgggattttgaatatgaatgagaacgtgaatgaaattatcgttgataaacaggggaaaccaagtagaatgaatgccgcatatcggcaattgttatcactgtataagatttattgtggtaaggaaatagaagttttaaatatctacggagatttagaagatggctcacattcagatggacgtgtgtcaaatagctcttctcaatcgcttcaatatttactaagaggtagcactaagtcttatcaagaaatgaaatttaaaggtgcaaaggcacaacatagtcaattacatgagaataaagatgttgcaaatgaaatcatacaattcttatgggaaacttaa

SEQ ID NO: 70587 - DNA, 527 bp, Glycine max
  Clone ID: PAT_MRT3847_34750C.1
gtgttgtggtttttttttttttttttttttaaaaaggccggcaatacattccttggggaccaattcaaaaactaatacaaaaaaatccttgaaaaaaaaaaacttaaaaatattggcccctttttcaatttttttttctcaagtaatgattgactttgccgggagggcccccctgcacaggatttatggtccaacaaactcgaatgagggtcctccctgttttctcaaaaccaagttaatttaattgtttagcatggcagtttgccaccaaaagaaagtcaatattcttccaataactaagggaaaagctcaaaaaatctggggggccacccctggttggcctattccagccgcttcatccttcactttaatgctggaagagcaattgtggtctgcccatccaatgcccattttttcaaaatcatctatcactagtttgttcgacggccccatatctccaacaaggggcatgcccttcccattctttgtgggggcaacacttcgctgcctgccaatgccccagatac

SEQ ID NO: 70588 - DNA, 777 bp, Glycine max
  Clone ID: PAT_MRT3847_34751C.1
agagaccccagcgctcctacgattcacagccaccgcgccctcattcccttgttgcagtttttccagccgcagcaagccagcccaccttcgaagccatgtctaccaggtctgtgtcctcgtcctcctaccgcaggatgttcggtggctccggcacatcgagccggcccagctccaaccggagctatgtgaccacgtccacacgcacctacagtctgggcagcgcactgcgccccagcactagccgcagcctctattcctcatcccccggtggcgcctatgtgacccggtcctcggcagtgcgcctgcggagcagcgtgccgggcgtgcggctgcttcaagactcggtggacttctcgctggccgacgccatcaacactgagttcaagaacacccgcaccaacgagaaggtagaactgcaggagctgaatgaccgctttgccaactacatcgacaaggtgcgcttcctcgagcagcagaacaaaatcctgctggctgagctcgagcagctcaagggccagggcaagtcgcgcctgggcgacctgtacgaggaggagatgcgggagctgcgccggcaggtggatcagctcaccaacgacaaggcccgtgtcgaggtggagcgggacaacctggccgaggacatcatgcggctgcgagagaaattgcaggaggagatgctccagagagaggaagccgaaagcaccctgcagtcattcagacagggatgttgacatgcttctctggcacgtcttgaccttgaacggaaagtgggatccttgc

SEQ ID NO: 70589 - DNA, 551 bp, Glycine max
  Clone ID: PAT_MRT3847_34752C.1
ccctctcctcttgtttctcactctctaattctgtcgtgtctcaccctccctctcactctccaccgccaacaccagcgccactgccaccgcctcaggttcaacctcaacctcagcctcagcaagaacaacaaccataatagcagacacaacaagggatggttccatcacaggcgtcgtcgttgtttcagatactgtctttgtctgtgccgttggggtgtttgaattcgtagctggcatcatatcttctgttgttgtcgaggcttctattttccccaacttcttgttagttagggtttccacagcttccgctttcgcccactgtgccgcttccgctgtctgagacatctgaatttgctaggagatgggttccattgtgtaacacatacaatattgagcccccggcaccggaatggtactttggtcagaagatgggctatctgaaaaataaagcatatcccgcatttgtaacggaaaggacagccacgaagagggattatgaacaatttaaggggaggattaacagtctgggggccaacaacacaaaaggttcc

SEQ ID NO: 70590 - DNA, 902 bp, Glycine max
  Clone ID: PAT_MRT3847_34753C.1
ggtccggattcccgggtcgacccacgcgtccgtctctttcctgatccgttcatttcgctctcaaacaccattcacacaaacgcttccttaaaaaaaaactactttccctgtttctctttcaatttttcttcattcctagtacgtttttttccccatgtctgggattcacagattaagttttgaaaaaataaaacagaggaacttgtgttaatcaatagaaatagaagatacaaaaatttgtattgatggaacagaaaaacgttttgttatcggcgttgagtgttggggtgggagttggagtgggaattggtttggctggaaaaggcgttacaaaatggggtgctaatgaatattcatcctcaaacggcgttactccggagaacatggagcgcgaaatgcaacgactagttgtcgatggcagagaaagcaaggtcacttttgatcaattcccttattatctcagagagcagacacgggtattgctaacaagtgctgcctatgtccatttgaagcatgcggaggtttctaggtatacacgtaatcttgctcctgcaagccggactattctgctttcagggccagcagaactttaccaacagatgcttgccaaggctttagctcattactttgaggccaagttgcttctgttagatttaactgacttttcattgaagattcagagtaaatatggtttttccaacatggaatcttctttcagaagatccacttcagagactactttggagcggctatctgatctatttgggtcattttcaatcttttcacaaagggaggaacctaaaggcaaaatgaacaggcctagcagtggagtggacctccaatcaatgggggctgaagcatcttgtaatcctccaatactccgtaggaatgcttcttcctct

SEQ ID NO: 70591 - DNA, 136 bp, Glycine max
  unsure (1)..(136): unsure at all n locations
  Clone ID: PAT_MRT3847_34754C.1
ctggtgtctttncatggcatcacagctcccaatggcacattcgagcttgctcgcactaattgagaaaccaccactcctggtctcgatctgctcagtcggctctgtgccaagtactatgatgccggtgcacgttttg

SEQ ID NO: 70592 - DNA, 552 bp, Glycine max
  Clone ID: PAT_MRT3847_34755C.1
ggctcgagcgatgatgaataagaacacagacatcatcatgagttattcttattcttattcccctgccactccattctcgtcatcatcttcacattccatggatcccataatttggagcaaattgccacccgaaatcctcgaatacatactctcttttcttcctctcaaaaccttcttaaacctaagatccacttgcaaaggtttctggtctctcatattctctcctcctttcatttcgaaacactgttctcccactgcttcttcacccttctcttcattcctcttactctcacaccctcaattccaccgtcacttccctctctacgattgcacactcggcacgtggcgcaatttctctctctcactctctgattcattccactcttttccttctttcagcactcttatctcctctggtggtctcttttgcctatcagattccacatcatgttccttgctcgtgtgcaaccttttggccaagtcctctagaaagattcaatacccaagtttctctctttacttggagcatcttacttttgtcaccaccccaac

SEQ ID NO: 70593 - DNA, 258 bp, Glycine max
  Clone ID: PAT_MRT3847_34756C.1
ggtcgtcatcttattgtttttcccattgaatggcacgtcttgtttttacgatatcccactgggtgccttgcctactggcctaacccatatacaagctggctttagggcagttgcttgattcaagccggaggactgaggcagccttgcttaggctgttactggagaaacctgaagttattggggttccttgtgaccccccggttgctgaaaatttactttatccgtgctctacttagagattaaccttatcatgccgga

SEQ ID NO: 70594 - DNA, 464 bp, Glycine max
  Clone ID: PAT_MRT3847_34757C.1
aattcggctcgagctcagtttccaaaagcaactaggactggcattttgttcttggttctgctgtcttgtacttgcttcacttcagcagatgcttataatccgcttgatccaaatgggaatatcacaatcaaatgggatgttatatcctggacccctgatggatatgtagtaagtatgttcttgtacgcatattacttattaatatgagtgtcaaaccatctattgtatattacgcatggtgttgaaagtttgtctgcagcttttctttccactgggttgctcacatcttttgtgatgaatctgcgtgcatgctcatgtcagctgcttctcatgtcatctatctcttaatataaccccaagtccctaaagttttttgatggaaatatgaccttacaagttttgaaaaaccaaggtcatttttttgcaattagaaacgtgacatggtttgaatttcttattatact

SEQ ID NO: 70595 - DNA, 2033 bp, Glycine max
  Clone ID: PAT_MRT3847_34758C.1
cagctaaagagggagaaagagaaacctatgtataacttcttcacggggcagtgaacgatttattagaaagtcaaggaaaagaatttgtcctaaatagagaaaaaataaagtatttgtaatagcactataccttgattaccttccatccgtagattcctttccagcatcatcggattattctctctcttctaacactcccactgtagttcgatattattctatccaaattcgaaagcttttttctcacacatcgtataacatctttacaaccatgaaaaccactgcaatcactataaatccctcactctctccacccttttgttccaaagccactacccctccttcttgttcttcatcatcttcttcgttccctcctagtttcccacgttttcacttgtcgggagcaaaacccatttctctttcttgcagaggaacacgattgtgctccttgaaagggtctaaaactctttggggtagaaaaagttttgtgcttggggctggaaacatgaccatggcagaggttgattctcatgaagagggggagaacgagggtgctttggttggctctgagaatgagaacaattcaaggcctcggagaattgctctctttgtcgagccttctccctttgcatatgtctcaggctacaaaaaccggtttcagaactttattagatgcctacgtgaaatgggtgatgaggtgatggtcgtgacaacacatgaaggagtgccacaggaattttatggagccaaattaattggatcttggagctttccctgccctttgtatcagaaggtacccctctccttggcacttagtccaagaataatttcggaggtagctcggtttaagcctgacataatacatgcatcgtcaccaggcataatgatttttggagctcttaccattgcaaaacttttgtgtgttcctattgtcatgtcctatcatacccatgtaccagtgtaagttttattcaggtacattccaagatatacctttagctggctggtgaaacccatgtggttgatcataaaatttcttcacagagcagctgatctgactctggtgccatctgctgccattgcgggggatctcctagcagctagagtcacagcagctaacaagattcgtctttggaacaagggtgttgattctgaaaaattccatcccaaataccgctcccatgaaatgcgattaagactaagcaatgatgaacctgacaaacccttgataattcatgttggacggcttggagtagagaagagtttagattttctgaaaaggctcatggataggcttcctgatgcccgaattgctttcgttggtgatggaccatacagggaagaactagagaaaatgtttgaaggtatgccagcagtattcactggaatgttaggaggagaagaactgtcccaagcatatgccagtggagatgtatttgtcatgccttcagagtcagagacgcttggttttgtagttttggaggcgatgtcttcagggatacctgtggtggcggcacgtgctggaggtattcctgatataatccctgcagatcaagatggtaaaactagctatctgtatgatccacgagatcttgaagactgcttgagcaaactaaggccccttttgcacaacaaagagttgagagaaaccatgggtaaagctgcacgtgaagagatggaaaagtatgattggaaggcagccacgcgaaagattcgcaacgaacaatacaacgctgccatttggttctggcgcaagaaaagagcccaactattgagacccttccaacggctggcaaaacgttttttcccatccccacaagtcaactacaggtgatgcaacttcacctaccaagcttaggctggtcccttgctagctttctttggcttcatagaagacttgtattggataaatgtgtggttgatagtgtaatggattcattctttttgaatgtaaaggaacatacaatatggtggcttgcaccgtattttgtgcttttataaagggaatcagtgccacaggtttaatccttaaa

SEQ ID NO: 70596 - DNA, 590 bp, Glycine max
  unsure (1)..(590): unsure at all n locations
  Clone ID: PAT_MRT3847_34759C.1
attcccggggtnncgacccanncgcgtccgcactaaacacaccgctgctcatgctattatcacaatnccacccatctctgttcgccttagagctgcaacaactgtagcaagcttcatcatgcacattgatctcttactattacacgatgggcgccgggaggctcggtacctcgcccaggccttcttgaggcccttaaatcaacgccgtccctccctacccgaccaagcgccacaccacgagctgacgggatcggagccggaacacgagtgaatggccaatagagcagaccatcgctgactcatgacactcaccgtcgagctcgcgctgaaacacaccgaactaaactagctacgagagtgagaagctcgaaggttcacttacgcacgggcggctatcctgcaacgaggacaaagagccacgcactagtgcgaatactagagagccggcggctacgaggaatgggttgaggaagacgaagaccatgaggatgatgaagagaaggacggagaacgacaacaagaagaccaagagactgttgatgaacaggaagagggggaggatactgaacaacgcggagacattgatgata

SEQ ID NO: 70597 - DNA, 309 bp, Glycine max
  Clone ID: PAT_MRT3847_3475C.1
ctgccgccaaagtttccgtcattacagtcagatgcacatcttcgggtgatggagacaggccgtggcacaaatcagatactctacgtgtgcatgaatatggttcacattggcaagcacaatcctctggcacgtcaaggagtcaagttgataacggtggcttcaatagatcactgacacggaatcatgacagggtggctgctcataggtacggtgaccagtttgttcacaggaaacactcatcttgtgagcatcatggccaaccttgtgactactacgtatgaacagattctgtccgtgccgggctttttg

SEQ ID NO: 70598 - DNA, 270 bp, Glycine max
  unsure (1)..(270): unsure at all n locations
  Clone ID: PAT_MRT3847_34760C.1
cngccactaacgtaatcaggggnacaaagnnatcacaagttcaancnacttntcnnnttcttaangggcgtccntnccagncgttaaaatggcccaagaaactttcctatncacatctgaatcagtgaacgangggcaccctgacagctctgtgaccagatctccgatgctgtgctcgntgcntgcntggagcaggaccctgacagcnaggntgcctgtgaaacctgcaccaagacnnacatggtganggttttcgganganatcacaac

SEQ ID NO: 70599 - DNA, 522 bp, Glycine max
  unsure (1)..(522): unsure at all n locations
  Clone ID: PAT_MRT3847_34761C.1
aaaaagggccccccccaaacccttatcaaattggggaaacccagggaaccccctcctttcccttttttaaaacgggggccgggaaaggccccccccggtttactttaccccccnaaccggaaacccaaggccaaacccccccaaaggggggcttggcccgaccggccaaaggaccctaacaggaaattctaaaaaagcaaacaaaacttttggcccccaaagggaatatcccccccctaaggggcctcaaaaagggggggggatgggcaaagcccaggggggggggcccaaggggggccgggaaaaccccggggcaaaagggggcctgggagggggcaacctttttgggcccgctgggcccggggggggaacccccccccctgggggggggatccaccccgggggggcccaagggccctttttgggggggggggggggggcccccccccggggggggtggggttggggccccccggccgccccggggggcggggggggggggggggggcggaggaggggggg

SEQ ID NO: 70600 - DNA, 2267 bp, Glycine max
  Clone ID: PAT_MRT3847_34762C.1
acgaggagaactagtctcgagttttttttttttttttttaaatatgtaaattgcactggcattataaaatcatccacaaaacaggaaacattgttctaattcaattcctcaagctgtcggtgcatgctcaccaaaatcaaaatatacatattcaattattaatttatgctatatataagaaagtcctcccaccaccaaaatcaaaagaaaacggaaaatagtggaacttattaagccatataagatggacaaaattaatgaatttgaaactaattaatcacaatccaaagaagggtattaatttcaaagctttctcacctgcatgatcaacatgcatactgaaccaaaccagcagaccccacttgagaagactcatcgtcttggacttgatgatcatcatccggtggcacttgaccggaattcggggttggattcaagcagtagttcccttccctttctgactgcggcacgatttttccttgaccatacaagcaactcagttgatggaaataaggacatgtcctagagttaagggaccttttcttattaacattatccttggtttttctgaagtacttgtttatgttctcccacttctccttgcacctctttgcacttctcttgtatcccagcgctgacatcccttgcgagattctctcccacagaggacccttgtttccttctttctcttcattgctgcttagacttgtgcaccttaggtttatcagtgctaacacttcatctcttggccatcttctccccatatcatctttcgaattctcactgctggccataggggttgttgaggtgggcttgtatgtcgaaactgaatttgactctagtgggataatgttattgtggctattgagtgaagaactagggttgtgggttgttggggaagagttggaggaagaaggaacttgtaataatgtgtcacttgtgctagggttttctgctcccaacgtagtttggccatgattttgaatcattttagaagaaggtgttggctcaagattgttgtcttcattggaaggattattagggttttgcgaatgcgatgcacaatttggaagatttgaatcatttgtgatgtagtacttggcattttggcttggaggggataatgaagttattgttgttgttgcacatttctttaagaattcaattatggtggcttgtctatccccggcaatggcttgctcttgtgccataatctcaagctcctttttcatcctatccaactcttgcttcttccaagcttcttctctggcgaacttctcttggtcccttttcaccatgtcctcgaggagcttgttgtgagtctcttcttgctgagccatcatcttgttgacaacactctcgcaaaaacccttgaacatttcgaacctatcacgcctcttcctcttgcgcacctttgaatttgacttctccaccactgtgtcacttccaatatcacatcgtttggtcgctgtagttgtttcaatgtctctcgaattttcttccaatgcgtgtcctcctaggtggtgagtcttttcactcctcactacaaccccattatgatcatgagcaccaggatcagagttttgacaaagctcctccagctcgctaataaggaaccggaaattgttcttgccgtagttattgatgttgtcgaaatatctactctcatcttcaaacttctccttgcacttctcagcactcttcttaaacccaacctctgctagcctccttgagacatggtcccatgtgagctctgggagccaattttccatgctagatctgattctgaaaagtgcaagcacttcatcgttggtccaggaatcggttagctgatctggtaattgtctttgatctctttgaatccccaatatcatctttcgaattctcactggaaccgggcctagggggtgttggggggggggggaaggaggaggggggagcaggggctgatgggataggggtgatggggcgagagggtgaggagcaggggtagagggcgggaggggggggagggtaggaggaggaggggacgaggaggcatgagggaggagcgggagggacaggtggagcggaagagggggcctgggcgcgatgaagaggcggaacaggagagggggtcggccgaagatggttgtgtgcatgggaagggtcggaggggagtggcgggtgccacgcacaatctgggagaccggcagcaaatgaccagaaggccacgggcaactggccaggaggggatgacaaagacgctgtcgctgttgcgcgcgtcc

SEQ ID NO: 70601 - DNA, 324 bp, Glycine max
  unsure (1)..(324): unsure at all n locations
  Clone ID: PAT_MRT3847_34763C.1
tnctttctttattttttttttttttttttgggcgcaaatntatagaccttaattaacaggagaagtaacctcaataatgaaatacaacggggggagtatttgaacaaagctatcttttctaagaaccttgcttagggacaggttttttgcaaatgggatttcttgcaccggcccctttcggaattgaaatttgcatttagagcaccaccaattaacaaaattgatttgtttctcttaaactgggcattggcaacaaacatatgtgccaggatttttttcaatttatcatgagtttttccagtattgtgctggggtatatcccgg

SEQ ID NO: 70602 - DNA, 528 bp, Glycine max
  Clone ID: PAT_MRT3847_34764C.1
ctgattcacgctacctttctttctctctcctcttcactgttcatttccgaaattcaattttgatgattattgagaatcctaatttgcctgacctaattcgctgcgaccgagaaaccatcgaggcttgatttcatgtctggttgttccgatgaggaggagatttcgttctcagaatccgatcgtcaccgttacgaaggaggcagtgacggcgacgacgacgattccgaaatcagaaagaatgaacatcgcagcagcagaagaagaatgggtagtgcttttggaaaggtggtggtgcgccaattcacgaaagcgaagaagcaagtgcgcagaatcagaagcagaacgagtcttctcgcgaaatcagaagaaggtaaggtggtgattgttgaagctggcgttagtggaaggagtgggtgtaggttctgtttttcgcggcccaaagtgttggaatcgcctaatgaggagtctccatcgagtgatcccaatgaccctaatttcactcatggcatgttgagaacttagatggac

SEQ ID NO: 70603 - DNA, 333 bp, Glycine max
  Clone ID: PAT_MRT3847_34765C.1
ccgcgaaccgtgatgagcctacagacctgtaatgattttgcgggtatgatcgcaatcattattgaacatctaagggactgagttcagtgacttctggattcaatgtacatagtatatttggcgctgtattctgttttaaaaaatgcctaaggcaaccattacacagagaattctgtgctgtttatgttctagtttgatatataattcggactacatgctgaggggttgtgacctatagttcagtgtttcaagtccataagtgtgtgctcaaatctcaatcttgtgttatcctttgtattcatttagttgatgccttctgatctcatgttaagt

SEQ ID NO: 70604 - DNA, 684 bp, Glycine max
  Clone ID: PAT_MRT3847_34766C.1
ccagaaactctgttctcggcccatggaagaattacggaaactagagaaagtacatagcatgctggaattcatggaatcacggggcgtttcaaacctcgatcatcactctaaccgcttcctcgctaatttcattctcttcttgatagaaccctccggagaccttgccataaacgacaagtgctccttgctttcccagcttattcccactctctcatcttcattccttgaagacgcgtatcaacaccaccttgacaccaccaagcgagaaaattctggttttcaacaaagtcttgttgaaaatgctttgcttggttgcaatcagacaaaagaatacagttcgttgcaaaattgtaatgaaaacacagccatggtcaggctggattccatgcaaatggcaaattctacccttgaggatttttgcagatcttactttatgtttcacggattggatgtaagcaagccacaatcaatcttcaaatacttacctattctttcattcacagagagttatatttatcagctagataaaatgaatgagaaattgctgcaaacaccctacaatggaaagtgtgtatttggagaaaaagatgagtggcagagagaaactaaattattggtttcttgcttctcaaatgacccagttagaccacttgcgactattcttgaacacaaaggccttttgac

SEQ ID NO: 70605 - DNA, 481 bp, Glycine max
  unsure (1)..(481): unsure at all n locations
  Clone ID: PAT_MRT3847_34767C.1
agtttccgtcatcactgtatgacgtcctccttctttgggggggggggggggggcagcaaagcttcagacgctagcttacgcgaccacaattgggaatagaatgtcaagataggagataatctaagatggaaaaagaaaaaaagaacctacttgtgtatgttgtgcgatagagataaaggtatttggaggggaaaagacgcgccgagcgacgtctcaatgtatgttaagcgctgcggtggcgttaccagggagtagcaacgcgtaaagcagcggtgcgcgtgctaatcgagaagcgaggcgtgacttttctggtagcttggtggtatggccaatagcatgaaagccaaggtgcaggcaagcgtaaaatttagtaaccccncgttggttagtaaantgcagagcacaagtaaagcagtaaaggcgtaggtgacaggcgctactatagtgctggtggggaaatgagtgttcacggctaaaaggt

SEQ ID NO: 70606 - DNA, 375 bp, Glycine max
  Clone ID: PAT_MRT3847_34768C.1
gccacgcgtccggatcgagagtggccccaggttaggctcaattctagagtgctgaaatgggtgtgttccgctgaaaacgatggctgccaatgtggagctaactgcacctgaaacccccacacttgcaagtgaggtgtttgagagctaaatcttcaagcaaagattgcccttagaaataatgataaaaactgtgtgtggtctcaaaacttcgaaattatgtggtgtgaattatgtcacgccctgatgttttgggtgtaaacaaagatgcttacaataaagaggtaaccactttgccctgatcgcgtacaagtgtttggaacctctaatgtgcgtgtgaagtgccaggctggcttcatatatatatatggatcaatg

SEQ ID NO: 70607 - DNA, 255 bp, Glycine max
  Clone ID: PAT_MRT3847_34769C.1
tcgatttttttttcatgcagaaacgagggatcatctaagtaaaccagctctcatcagggtgtgggtgaagaattggaagcgggcacttaacatcatggattgggatgacacctgtgtgacaaaggtggctatccctaaagagaagggaactgcggttgaagacaatcaggaatagggattattctatgaagggataatgaacaaccctacattgccaagggtatttccgggtctgaatggggcgagggagaagga

SEQ ID NO: 70608 - DNA, 286 bp, Glycine max
  Clone ID: PAT_MRT3847_3476C.1
cggctcgaacagagcgtatcggctcgagggctgttattacagattgctgcctgcctgcttcttttagcaaattgtttgattgctttattcacaacataatctgacatatcagttgtgttattttattgaattttttttgttgtgagatttttgcacacaatgctttattatattgggttgcagctagacacatttgtttctataatatctttcaattagtttaaaaagatactaattatgcatttttaattttttgaatgtgccactggattggatttgacttgtg

SEQ ID NO: 70609 - DNA, 269 bp, Glycine max
  Clone ID: PAT_MRT3847_34770C.1
ttgatttctcttgaccatgaccccctctaccaacacaaatcctcttctcctcttaattctgagcttcctccttctatccattcaatctatcaggtttaaccctgatggagagtttactattgtccagttcactgacttacacttctgtgaagaagctgaacaagatatgagaagtcagcaactccaaagaaatatccttgactgggtcaaacctgatctcgtcgtcatcagtggcgatggcgcttccgattatgctgacggctcataga

SEQ ID NO: 70610 - DNA, 276 bp, Glycine max
  unsure (1)..(276): unsure at all n locations
  Clone ID: PAT_MRT3847_34771C.1
gtggcatccgcatacccgacagagacagccgagtttccancaaagcctttncaggataagcccttgcagataaacttgcaccaaatgagtcctttccatgtgatacaatctccaaggaagttatcaagaatagatccgccgcaacattttccagtgttggtcatgctcttgaagtccataatngagatgatatctgccaaccatccagagttgttcagcattaaacacagtctttcctcggaacatgcagccncggttgattngtcnattgncccc

SEQ ID NO: 70611 - DNA, 367 bp, Glycine max
  Clone ID: PAT_MRT3847_34772C.1
aactattgctaaactggaatccaatttgaaaaaaaaaggcaaaccggaaaatgaaaggagaaccccagaaatgatgactgggcaccaaatggccaaagagtaagaacatgtccaaggaccacgaacaaagcgaggagtcactaggaacgggtgaggcatctaggagcgacctgagcacggaagggcgagctcaagacgctatggctggccacctgaccggggatggaccaccagaatgccaatgtacttagaactgcctggattattcacgactgacactatactagcaaactgacattatacctgcaagttgacaacttaagttcaaggtgggaacctgggaccccggtgggattttcggactccg

SEQ ID NO: 70612 - DNA, 319 bp, Glycine max
  unsure (1)..(319): unsure at all n locations
  Clone ID: PAT_MRT3847_34773C.1
agtcgcatgcacgcgtacgtaagctcggaattcggctcgaggatttttttatttacatttcaaatgttatctcctttcctggtttcccctccagaaacccactatctccccctgcttctatgagggtgctcacctacccatccactccctcccatctccccaccttgacattcccctacactggggcatcaagccttgacaggaccaagggcttctactcccattgatgccagacaatgccagccgcatatgtagcaggttctagatcgcgggcgggcggcggatagtgagctcgtcggaccgggaataattncgggac

SEQ ID NO: 70613 - DNA, 398 bp, Glycine max
  unsure (1)..(398): unsure at all n locations
  Clone ID: PAT_MRT3847_34774C.1
cgcacttttgaaacgccgnngnnncactggcaaaccgggggagncacgcgcgnnncccgccaccggnccgaagagaagngannnccaccaagnngagcancnggganncnncnncaaccccgaaanggggagaaacgngaancaannngcgncagcncggnnaaaggccnaaagcanncaggccagggggggnacannnacccangaaanaggcacacgggaaganagnggnanaaanggggngaaanggangnncaagnganaaagggggaagnaagnggncancaaacnaaggcaganganggcgangcagaaccaagggacggngaagnnaanaaggcggaaaacnanggancncangnngaggangagannncngagccacacanggggangga

SEQ ID NO: 70614 - DNA, 654 bp, Glycine max
  Clone ID: PAT_MRT3847_34775C.1
accaccagctagtgtgtccattacttgtaattaatccgtgttcagagttttccaaattcaattgaggtttctcagtaacaacttataggaaaataaagcaagaggttgattttgtacctttgagtttgtgcatgcataaaaatttgtatgtgcttaggacttcaaaattacaaatttctgggacccctactttgagtgctcctctgcttagcctgtcctattctgttagtggaatggatatatgtgtttgcaagaatgtgggcataaaatgtgttataataacatgttaaaatactagtaggaataataagagccaatgctaataggtctcgcaagcaaaggttagctggtataggattttactaggattaaggaacgtctgaaatgctacagtagtataagtagttcacacacacaagggctttttaagatgcctcatgatattccttatagttgtaccactcatataatataaagaacttaccatgagctggagtaaaagaccagaatatgatgaaattgaaagcaaggatatgatgcatttctaaaaggaaagacataacttcaaggccatccattaaactcagaatatgatgcatctagagatgaattacatttgggggggtctatccttaaagcaggtaataaaattgg

SEQ ID NO: 70615 - DNA, 230 bp, Glycine max
  Clone ID: PAT_MRT3847_34776C.1
aggacttcatgattgaggagatccacgagggttcctttggggcacatgccggtgggcatgctatggccagaaaaatccttagggccgactattattggcttaccatggaaagcgattgttgtgctcatgtcaggaaatgtcataaatgtcaggcatacccggacaatgtcaatgtttcgccacattctctgaatgtaatgtttgccccttggcctttttccatttgggga

SEQ ID NO: 70616 - DNA, 275 bp, Glycine max
  unsure (1)..(275): unsure at all n locations
  Clone ID: PAT_MRT3847_34777C.1
gagtaaaggcttttttaaaagattttttccccagggggaaaccgccattaaaagccataaaaccaccatacatgaagcaggcaactatgaatttaaaatcaaggaggaaagtaccccgactggcaaatcacacataaggggaatatccggtgccctgagcgggtgaagccanaaaaaagccacttggaaggaaaaagacccacccaaggcggggcccccggagccctatgttttttggctgtatacggtgaanagagaaggcagaagaaacatga

SEQ ID NO: 70617 - DNA, 127 bp, Glycine max
  Clone ID: PAT_MRT3847_34778C.1
aaccaagcccaacacgaagaactcaccccacccagcgagggtaggctacatatccaaccccatgaagagcaagaccagcgcctccgattttagggctatggagcaagagctcacctgccaggacgcc

SEQ ID NO: 70618 - DNA, 489 bp, Glycine max
  unsure (1)..(489): unsure at all n locations
  Clone ID: PAT_MRT3847_34779C.1
tgaaccaaaggccggtcttcggagtattaagctccgacagcgtgttttatgctcccttgcttggtttctttgtcttcaccggcattccctcctcggcttttctgtggttcaagtctgttcaagctgctaacaaggaagcggaggaacaagacaagaaggatggttatttataggatgcgagtgcacttctgtgttgaacactctttctttgttgtgttgatgtaagttattatatatgaggaatgttgaagcaccatgccattgcgtgatcaagtgcaaatggtttgtgctgttatcaagtaaatcatatgaaaatgcttgacaaanaaaaaaaaaaaaaaaaaaaaaaaaaaaaaaaaaaaaaaaaaaaaaggagaaagtaattaataataaaaaaataaaggaatattataatatgagggggcgggcctttttaaagaanccaagcttacaaacccgggcctgcaacgttataacttttttataggg

SEQ ID NO: 70619 - DNA, 840 bp, Glycine max
  Clone ID: PAT_MRT3847_3477C.1
ctcctttaacaaattgttagaaaatgcaacacaaaatcttcgccacaatgcgtagcttgaagatcatggatggttgcaagggcactcaggtctacgccatcaacccctccggcgccggtggcgccgacggcccaaccggcggtggaatcggcgagaagcttctccaacagctccacgaccacatcaaaggccaaaccctaagaaccaaatcggttcggaacttgcaagctacgaaccatacgacgccgtcggaggttgtcctctccgacggctcgctccttccttatggcctctccatgacggaccttctggagcccaaaattgagccttccttgatgtcggtggacttcgtcgaaactctcgccggagtccaccgccgcacaggggactgcccccagttcgaccgctccgaggtctacctggagcaatgcgcggtgtttcaggggctggccgatccgaagctcttccgccgcagcctccgtgccgcccggcagcacgccgtccacgtgcacgccaaggtcgtgcttgcggcgtggctgcgccacgagcggcgcgaggacgagctcatcggctcatcctcgagcgactgcagtgggaggaaccttgagtgcccccgcgccacgctgactccgggctatgacccagagtcggtgtttgattcctgcgcgtgcacgcgtgcacacgcagggaatcgtgatattgatgatgatgcaatgacaatagtggttgatgagcaatgctccacctcggaggaagaggaggaggaggatggtgacatgtctttttttgttggtgatgatgaagataagtggtataagttcaatatagcctcactttcaa

SEQ ID NO: 70620 - DNA, 327 bp, Glycine max
  Clone ID: PAT_MRT3847_34780C.1
gtttctcattccctgacacgtcgggcgaaaaaggggatcatttactggcgaacgggggtaaaccctcacactgattcacaccacactcatcactatccgatgccaggcacccgttggtcctgcaattactcgggctctacccctgacagcacaaattctaaaactaccgacgaccctaacacaggcacgtcagggacatctcacggtatcatcttcgataccattactactgctactacaactcctactacttctttttggactgatactatctacataactatcacggactgtgaatcaaatgacgcatagacttgtctatatact

SEQ ID NO: 70621 - DNA, 382 bp, Glycine max
  unsure (1)..(382): unsure at all n locations
  Clone ID: PAT_MRT3847_34781C.1
ttccttctctatctgatggaggtggatattgctggggagcaacatcatgccgatgggttctaggatgatgcaaaggcgaacagcgttgggggaactgaacaggggacgcataatatgtggattcctctgccaatccctgtgtcttttcccatgctactacctgttgaggctgatcgagtgatgactgcccctgcgtcctgtgcaccgagtctttgtttgtggtatccgggctcatgacggcgtattaattgatcttgttgccaggagtattgaaactatatccttttttatgtagtgagaagagcgatgagatcgtgatgtatgtacctaaaggcttgccanctggtggagattatgcaaatgtgggacatgaagcaatggc

SEQ ID NO: 70622 - DNA, 332 bp, Glycine max
  Clone ID: PAT_MRT3847_34782C.1
cgctgcaaattgacttttggcaacccaaaaatcgccgcttaatcacactcttttctgaaacaacccacctacgggaaagtctccaccttggggggggtgactgcctctaccatctctctctactctaaaataacacagtgcatttgaatacacaacattcttgccgaaacccaattctgaaccaccatctgttagcttctctgacattgacacgaaatttttgactattcaacagatgcctcaaaaaataacagttgaataatgttattttcttctgaagacctttctcacctgtattggggcatgaaaacacatacccaattctaattttg

SEQ ID NO: 70623 - DNA, 245 bp, Glycine max
  Clone ID: PAT_MRT3847_34783C.1
acgctatagtacaagcatcaaaatgtgcccacgtttctgacattctcgaccgacattccacattgtcttattttaccacgacggcggaatcagcttctacgacctgcgctcattctacgcttgacttcaccttacaacgagaccacgttacaccgttcctttataacgctggcctacacccacttcggctgactccaccagtactaggtattcgatcgcttcttctccgatcattgcaaacccat

SEQ ID NO: 70624 - DNA, 1078 bp, Glycine max
  Clone ID: PAT_MRT3847_34784C.1
ttgacggcggtgaagggaggggggtgagaaggatggaaagtcttatataattgatgtgaagaaagggaggatgaggattcggttgaaggtggcgctggctttgggggttgtggtgatttgtactggggtaggtgtgggggttatgcattttgtggagaagcttggatggttggattcgttttatctttcggttatgtcagttaccacggttgggtatggagaccacgcgttcaagaccatgcacggtcggatctttgctgcgatttggttgcttgtgtcgacgcttgctgtggcccgggcgttcctctatttggctgaggcgagagtggataagcggcataggaggatggcaaagtggattcttggtcaggatatgactgtttctgagtttcttgcagcagacatagacaataatggctttgtgagtaaatcggaatatgttatatacaagctcaaggagatgggaaaagtatctgagaaggacatcatgcaggttagtgagaagtttgatagactagatgctggcaactgcggaaaaataacgcttgctgatcttatggggaatcataattgatgagttcagtgttgccaatttgagaagggagtgtcagattctcaagttgatgggaactttcttcttctggggattgggagggatatcaggttgtcaaagacgcaagctggtgattttccccttaccctcttgttatgatcattaactcctgacataaagttgatgctgctgaattgctgggttcttttgcctgaatttcacaaattatttggaggatggtaaggtgcaagacaccttgctgaaattcgggtatgaccaatcacatattgtcagattgatgagatggcttgtgataatggaagggataattttgattggttaaataattaatctgtacatattctttttggaaaatgaattgcattgattctttagcatattatttctagtgagcctctctgggttagccgtattacacaatcaatgtgttcgtcttggtgactttcgtgtattgtttttgccaagatgattcgattagctcaggcgtaattaaatatgtttctt

SEQ ID NO: 70625 - DNA, 1017 bp, Glycine max
  Clone ID: PAT_MRT3847_34785C.1
cccgcgtccggttcaacagagagtgtgtgtgagaaagagagaaaaaaaaaaaatgaatgcttcaatgaggaaaaaggttcaaaggaagtgtaagataagaggctacaacctcaaagtcgacgctctgaacgagatcctctccttcgcatctcgcttcgaaggccccgacgaggacgaagccatcgatctcctcctcgtcgagctcgattcatctctgaaatccaccataatcgacaaggagacggtgcagcgcgtggtcagcctgttgctggaagccaccgaggccaccgaggaaacctccgatgccgccgctgccattcgcgtcgtcgatgcgttcctcatccccaagtataaatacgactatagcagaaagcagttctacgagcacacaggcagcttatctattcatggagaagcatcagcaaagtcagatctgtacagggaaaggtttctgttgttgttccagaggctctctcgtgaccagcatttttcagcgcctgcttttgaatctgaattttcacattttgggagctgtgagatatctcccattcaatctctggttgggcaaacaggtagaagatgggtaatgggagtaatatctcagctggaggatggccattactatttggaagaccttacagctgcagttaaaatcaacttgtccaatgcaaggataactacaggactcttttcagagatttttgtttttttgcttaaggggagcttcttaatttcattaaatgttttacagtaaattaaatttttcttccttttgagatgctcaaatccaagtgattcgaggactttggttcaaagtgcttaaaatatatttgtcctgtcttcataatttttttattgattttgtatgctataactcataacagctcaatttttttataagcatggatgtattgtcatctgtttctttgacaagcaatacaggataactacaggactcttttcagagaacactatagttgtggctgaaggggagatgcttgtggagggtatttttca

SEQ ID NO: 70626 - DNA, 763 bp, Glycine max
  unsure (1)..(763): unsure at all n locations
  Clone ID: PAT_MRT3847_34786C.1
cttgcatgcctgcaggtctacccagcctcctatttggaaatgagaattctggccacagttggttgtggttagcaactagatcccaaatccatctccccatcaatgctgcattgaatttggccagatcctttatccccaaacctccatcactctttggaagacagatcacttcccattttacccaagggattctcttgagctgttgggttcccccccacatgaagtttctttgaagagattccagcttatctaccactcttttggggatcttgaaaaaagataagagataaatagggagggcattcaagacagacttgatcaatgtaaccctaccacccattgataaattcttctgattccacttggagagcttagcttcaaacttagatatcataggctcccatactaccctgcttgatgatttgataccaataggcatacctagataataaaaaggaaaatccatgtgtctacagttcaggaaatctgctacttcctgaatccagctggtctgaacccccacaacaccaatctgacttttggcaaaattgatcttcaagcccgatgccatttcaaaacctctcagcattgacttcaggactacagcattctcccaagaggcctctccaataaaaacagtgtcatctacatattgcagaatgtttgtaggcactttttgcttcccaaccaagaaacttgaatacagatctttgttcaaagcctncctcatcataccagtaagaccctcagccactatgttgaa

SEQ ID NO: 70627 - DNA, 726 bp, Glycine max
  Clone ID: PAT_MRT3847_34787C.1
taacaacaacacaaggccatcatcatggcagctgcttctcctatggcaagccaactcaagtccaccttcactaaaactcttgtagctcccaagggcctctctgcctcttcaccactccacctcctgccttctaagaggcaatttagcttcactgttagggccatccaatcagaaaaggaccgcagtgagcccactactaagagggatcgagggcctggcccatggctaccttctggtgggcccattcgtgaaggccgggcctctgaggaacaccgagatcgccgggcaagcaggctctctcgccgctggtgggcttgtggtgatcctcagcctttgcctcacaatctatgggatttcatcttttaacgaaggagacccatccactgccccgtcactgaccttgacgggccgcaagaaggagcccgatcagctccaaactgctgatgggtgggccaagttcaccggaggcttcttcttcggaggcatttcgggtgttatttgggcctacttcctcctctacgtcttggaccttccttactacatcaagtgaagaaagtgcttattatctttgtttactttttgttgttattcattctctatgaatggacaatgggtggaaatggatccttatttgtgcaatagagatggatgtaaatgatgtattgtatgactctcaacatgttacaatggtaaattctctctctcctgttctggccttcttttata

SEQ ID NO: 70628 - DNA, 481 bp, Glycine max
  Clone ID: PAT_MRT3847_34788C.1
tcccaaaggcctctctgcctcttcaccactccacctcctgccttctaagaggcaatttagcttcactgttaaggccatccaatcagaaaagccaacctatcaagtgattcaaccaatcaacggtgatcccttcattggaagccttgaatccccagttacatccagccccttgatagcatggttcttatcgaacctccccgcatacaagaccgcagtgatcccactactaagagggatcgaggtgggcctgtcccatggctaccttctggtgggcccattcatgaaagccgggcctctgaggaacaccgagatcgccgggcaagcgggctctatcgccgctggtgggcttgaggtgatccttatcctttgcctctcaatctataggatctcatgttttaactaaggagacccatccactgtcccgtcactgatcttgactagccagatgatagagcccgatcatctctcaactgttgtaggt

SEQ ID NO: 70629 - DNA, 713 bp, Glycine max
  unsure (1)..(713): unsure at all n locations
  Clone ID: PAT_MRT3847_34789C.1
gcagtgagcccactactaagagggatcgaggtgggcctggcccatggctaccttctggtgggcccattcgtgaaggccgggcctctgaggaacaccgagatcgccgggcaagcaggctctctcgccgctggtgggcttgtggtgatcctcagcctttgcctcacaatctatgggatttcatcttttaacgaaggagacccatccactgccccgtcactgaccttgacgggccgcaagaaggagcccgatcagctccaaactgctgatgggtgggccaagttcaccggaggcttcttcttcggaggcatttcgggtgttatttgggcctacttcctcctctacgtcttggaccttcctttcttcacttgatgtagtaagaaattgttggcaaaaaatgagtaataacaagatatggaacttccccaggttggtggtttggaggaaccacttcctgctgcanaacccttgctcttttcaatgcgtaaaagagcaatatattgtggtggagcacgaagtggatctgctgcaaaaattagcaataatatggctttggctggtaccatgctgggaatatcaaaagctcttgctctaagccaatctctaggtgtttctgccagaacctcgacaaatatagtaaactgctccagggctcgctgctggagtagtgatgcttacaacccaattcctgggctgatggaaggggtgccctcgtc

SEQ ID NO: 70630 - DNA, 365 bp, Glycine max
  Clone ID: PAT_MRT3847_3478C.1
acctttaatttatgctatagtaatgaatatgcgcaatgcagaggtttcagtgagcagatgatgcgttcgagatcaagtccctgaggtttaaaagatgacttcttgctacgatggatggacatactgtgtcccaataccatttgggaatttggacgaagacaccatcaattttggggttttatccctcaagctggtgctgcttgtagagatacaggaaaaggctgtgtagaaatcttgacatgaggagtttcgcacagagaggaaagctcaagttgcggctgcaacagctgtggttggtgacgggtgtctatatacgagtgctctggtacataataattcagtgtctgcaataccaagcgattatg

SEQ ID NO: 70631 - DNA, 550 bp, Glycine max
  unsure (1)..(550): unsure at all n locations
  Clone ID: PAT_MRT3847_34790C.1
ggcagctgcttccccaatggcaaaccaactcaagtccaccttcactaggactcttgtagctcccaaaggcctctctgcctcttcaccacttcacctcatgccttctagaaagcaatttagcttcactgttaaggccatccaatcagaaaagccaacctatcaagtgattcagccaatcaacagtgacccattcattgaaagcctggaaaccccanttacatccagccctttgatcacatggtacttgtccaacctgcccacatacagaaccacagtgagcccactactaagaaggatcaangtgggcctagcccacagataccttctggtgggcccattcataaaggccaggcctcttaagaacaccaaaatcaccaaacaaacaaactctctaaccaccaatagacttataataatcctcaacctggacctcacaatctataagatttcatccttcaacgaaagaaccccatccactactccatcgctgaccttaacgagccacaagaaaaaccccgatcagcttcaaactagtgataataaaccaaag

SEQ ID NO: 70632 - DNA, 412 bp, Glycine max
  Clone ID: PAT_MRT3847_34791C.1
ctatgttaacactgtttgatcatattggataaggaaagtgtggtgcagggaaatatataataccaaaaagttggggcacttgaaaattctggttcaagaactatgcggggaaaaaaaaaaacgaatgaagatccaaaaaaatgcctcaggatgaaaccacatctgggcactgaaaaactgagaggttcgactctagcgtgacctacaacaagctgaaccttcccggactgtgaaacatgtagggggtgcaacgaggggagcaggtgcaaaacaaatttctgaactgggtaggtcaatgggggaaagcaaaacaagcaagaatgcccttaacatgttttatccgcgggggctcaagctggacctggagctgctgagggggggaggttccctcaacttgcacaggggggcacaa

SEQ ID NO: 70633 - DNA, 262 bp, Glycine max
  Clone ID: PAT_MRT3847_34792C.1
caacattcattctcgaaccctatccaaactgcaccccttctcgaataatagtactcgctgatctgtggcagtggaggtggtggagatgcatatggtgcatttttgtcggtgtttccttttggttcaatcatggtggagcatgaatattatgtaataagttgaaagattgctgggaatgaaacgtgctttttctaaagggcgaattctcttcagaagggcaacttccatccttgggcaggttccaattcctcgaactcacttc

SEQ ID NO: 70634 - DNA, 546 bp, Glycine max
  unsure (1)..(546): unsure at all n locations
  Clone ID: PAT_MRT3847_34793C.1
caactcaagtccaccttcactaaaactcttgtagctcccaagggcctctctgcctcttcaccactccacctcctgccttctaagaggcaatttagcttcactgttagggccatccaatcagaaaagccaacctatcaagtgattcaaccaatcaacggtgatcccttcattggaagccttgaaaccccagttacatccagccccttgattgcatggtacttatcaaacctccccacatacaagaccacantgagcccactactaataaggatcaaagtgggcctgacccatagctaccttctggtggacccattcataaaagccaaacctctgaagaacaccaatatcgccgaacaaccaaactctctcaccactaatagacttataatgatcctcancctttacctcacaatctataaaatttcatcttttaacaaaagaaacccatccactaccccatcactaaccttaacagaccacaagaaagaacccgatcagctccaaactactaataaataaacgcaattcaccagaaacttcttcttc

SEQ ID NO: 70635 - DNA, 1031 bp, Glycine max
  Clone ID: PAT_MRT3847_34794C.1
aattcggcaccagggataaggtttttgatacgaatatcagccaatgagataggaggggcttcaacagccacaaccttgatcttgcattgagccatgaaactacttagccacttgggttcctcactagagacacttgtctattaactcttttttgttgttgtggtgtttcatttgtgaaactaacaacaacacaaggccatcatcatggcagctgcttccccaatggcaagccaactcaagtccaccttcactaggactcttgtagctcccaagggcctctctgcctcttcaccacttcacctcgtgccttctagaaggcaatttagcttcactgttaaggccatccaatcagagaagccaacctatcaagtgattcagccaatcaacggtgacccattcattggaagcctggaaaccccagttacatccagccctttgatcgcatggtacttgtccaacctgcccgcatacagaaccgcagtgagcccactactaagagggatcgaggtgggcctggcccacggataccttctggtgggcccattcgtgaagggccgggcctcttaggaacaccgagatcgccgggcaagcgggctctctggccgccggtgggcttgtggtgatcctcagcctttgcctcacaatctatgggatttcatccttcaacgaaggagccccatccactgctccgtcgctgaccttgacgggccgcaagaaggagcccgatcagctccaaactgctgatgggtgggccaagttcaccggaggcttcttcttcggaggcatttcgggtgttatttgggcctacttcctcctctacgtcttggaccttccatactacatcaaatgatgaatgtgcttactagctttctttactttttcttattcattctccatgaatggactatttgtgcaatagagatggatgtaaatgatgtattgtatgactctcaacatgttataatgttcattcctctctcctaaaaaaaaaaaaaaaaaaaaaaaaaaaaaaaaaaaaaaaaaaggttacc

SEQ ID NO: 70636 - DNA, 1061 bp, Glycine max
  Clone ID: PAT_MRT3847_34795C.1
gggataaggatttgatacgcaaatcagccaatgagataagagggccttcaacagccacaaccttgatcttgcacttagccagttcggtccctcacttaagccactgtgtggaactaacaacaacacaaggccatcatcatggcagctgcttctcctatggcaagccaactcaagtccaccttcactaaaactcttgtagctcccaagggcctctctgcctcttcaccactccacctcctgccttctaagaggcaatttagcttcactgttagggccatccaatcagaaaagccaacctatcaagtgattcaaccaatcaacggtgatcccttcattggaagccttgaaaccccagttacatccagccccttgattgcatggtacttatcgaacctccccgcatacaggaccgcagtgagcccactactaagagggatcgaggtgggcctggcccatggctaccttctggtgggcccattcgtgaaggccgggcctctgaggaacaccgagatcgccgggcaagcaggctctctcgccgctggtgggcttgtggtgatcctcagcctttgcctcacaatctatgggatttcatcttttaacgaaggagacccatccactgccccgtcactgaccttgacgggccgcaagaaggagcccgatcagctccaaactgctgatgggtgggccaagttcaccggaggcttcttcttcggaggcatttcgggtgttatttgggcctacttcctcctctacgtcttggaccttccttactacatcaagtgaagaaagtgcttattatctttgtttactttttgttgttattcattctctatgaatggacaatgggtggaaatggatccttatttgtgcaatagagatggatgtaaatgatgtattgtatgactctcaacatgttacaatgttaaattctctctctcctgttctggccttcttttaatagatcaatttgtcaattacatcttaaaaaaaaaaaaaaaaaaaaaaaaaaaaaaaaaaaaaaaaaaaaaaaaaaaaaaaaaaaaaaaaaaaaaaaaaaaaaa

SEQ ID NO: 70637 - DNA, 483 bp, Glycine max
  Clone ID: PAT_MRT3847_34796C.1
cccacgcgtccgaaaaaaaaaaaaaaaaaaaaaaaaaaaaaaaaaaaaaaaaagggaaggaggaaaaaaagaaaaaaagaggggggggcgctttagtggtaccaggtttactttcccgtgctggcgccttctttctttttctttgggttcacttacctgcatttcgttggccggggttttgcatggccgtgcttgggtagccttgggctttatcccttttaacccccttgccttatttcccctttgggctttctgggtttgtcctgaaagggcccgccctggtttgcttttcccaaggttggcgcaccttggctggccattgggccgcgcccttttgggggcctttacccgcggggtttgtggagtttcccccccctcaatcccttaccctttccgtccctttatttcccgttccttccgtttttttcctttccttttccgcccgttccccgggttttccctttcaggctttatttttggggc

SEQ ID NO: 70638 - DNA, 700 bp, Glycine max
  Clone ID: PAT_MRT3847_34797C.1
cccacgcgtccggatccgaagattattgcttcgggtttgtattctgatgtgttttacaagccggtgaaggtgtatgcggtgaggtacttggatgagatactccttgccacatcagggtccaagatgttggccttggagttgaggacgggggttgtcaagactttggaacttggattgggtttgcgtgttgataaggtgaataccgcgattcatagcgcggtgtcggagaagattgagtttcttgggatggaattgcaggctgttctgccttccattttgcgcccgccaatgtcggagaaagcaatcagggcacggaagaagtacctcaggcagaaggaagtcagggctcttgaattgagaaatgctagagcaaggaacagaaggaaactggggttgaagatatttagtcatgtttataaaaagatcaagcaaagtgatgggtttaaatttgactttagtattgaaaaccaggtccgagaaatttttagatcttgggctgatgaagtagtgcaagagttcttggggaatatagatgagtgtcaagaatggcatcgaagtctatcagctggcgatttcctacagttgagacacattagaaatcaattaccacctgagcttgttgatgcttatgataagttccaagagcaggtagataaacatttgaatcctatagaagctaggaaggcgatagaggaagaag

SEQ ID NO: 70639 - DNA, 201 bp, Glycine max
  Clone ID: PAT_MRT3847_34798C.1
ggaacaaacaaagcagcttggaaatattatttcaaaggcgggagtaattggggccagccacactcaactaagaaacttttaatcacaccgggacaaccaagacttgagagggttttgaacaaaaaataatagaataaaaaggtttcatggaagggaccccaggcacacccgctttttttttttttcatgaaaaccgaaaaa

SEQ ID NO: 70640 - DNA, 334 bp, Glycine max
  unsure (1)..(334): unsure at all n locations
  Clone ID: PAT_MRT3847_34799C.1
cccgattngaagtcagtgccacatgggaggatggttacactgactagtgaggccaatgctggagatggaacgcctagtgcgcgccacacgattaagttcactgactgaatgctcaccaactattggccatcctggactgatatccggattcgctgagaggtggcacggggagacaaacaccttccatcttccgcatagagagccgaccaacacattggatgatttatctgcactacatcatgtgcccatctgtggcaccttgcacagaacacaacgattctctatggaggacgccagacaattgctagagagacatgttggagggaattgccga

SEQ ID NO: 70641 - DNA, 988 bp, Glycine max
  Clone ID: PAT_MRT3847_3479C.1
ccacgcgtccggttgaatttatgtttttgcttgaaattgaagaacggttatgatgatggtatatgtgccctttggcccaccccctttaagtttttttgtctcctttctctcgaacgcgagtttcaattcgagttgttttctggaaaaaagtgaactttcgtcagatcaactttgtgagatactactggtattttatagtagtagtagagtagtcaaggctggtgctttttgaaagggaggtcttttaaactgggataggcttccatctgaaaaggctgtgatcttttactttttattcccaatgtattttttgtcggactttttagcattcttgtatttactagtaattttttaataggactgaacgatgctagtgctgctgcctgggctaaaagttgcgtactttttacatttttctcttaaaaacctgcatgatttagcgtgcacttctcttgttattttaagatcatctataatgagaatcaattaattaatgaacttaaccaaaaaaattattattttgatatgtgcgattttgagtctctttaagaaaaagttgtttatatcaacaattttgactcatgatttacttaatttcctattaaatataggagagagaaacaattgagttagttaatagaaatttttattagagagaaaattcattaacctgtttaagatggacgcgacatgaattaagttacttgcataaaaacccaagaagatgctctaaggtgtgaatgatacaacttaaaagtgaagtttttatgtgcccattcttccaccaagagcatccacccttgaatttatttgggtctaacagtgggatccacctagttggtggcatcacatggtcaaaattttattggtgaaggaaaatatttgccttaaaggacataagaattgtccaaaatgagatattcttaaggaaaatgtttcatgaatatccagtatactatttaatacctttaacaactagaaagagtaa

SEQ ID NO: 70642 - DNA, 652 bp, Glycine max
  Clone ID: PAT_MRT3847_347C.1
ctccaccgcggtgcgcggtcgctctagaactagaggatcctcctgtgcatcacagccagctttgtattcctagcttgtaagctacttgaggataggggcatgtctgaatctatttaatctcttgcacctgtttggcaaattgatgttttaagtatttaaataactaaagctctctctacagtacatactcacttttgatttatgaattggcaaaattcaacttttttccttgaatattcttaaagcgagatgaattccaaaggagagtgttctgtgtgtggccttcattgagtggttttctgttaccagaaagctcttggtggccttcctcttccctggtgtcaaggttgactgttatatgaaatgggaggggagagggccgtttctgccacacattgtcctaggttcttaacattatttaatccttataatgcaatgttatcctcattccacagatgaaacctgagaccaaagaacatgtcacacataaagtacattgcagagttaggatgtgaacccaactctgattctaaacctaatgctctcactctttcattcagaggttcagtcagttctttgtaggctgtagatccagagaagctgccgtaccccacaataaaacgggcgctgcaggtattcagcatctagctcc

SEQ ID NO: 70643 - DNA, 301 bp, Glycine max
  Clone ID: PAT_MRT3847_34800C.1
ctcgagccgctccagcggctcaagctctagcccaatgcggggcgatgaatttccgagcgggaaactctatatgaatactgagtctaacacgaactggctttcgagtgtacttctatttaaccgataccggggttgcaaggactttgacatagctgtggattgtatcagactaattcaaaattagaaacattatatctgatcgagggtagctgcatcgctaacacgacgagaaatggtctagaatgaaaggtcttggaaaatagcttctaagaggagtgattgtggaatattagaacaggag

SEQ ID NO: 70644 - DNA, 325 bp, Glycine max
  Clone ID: PAT_MRT3847_34801C.1
cttagccaaaagagttttataggaaattcaattaatgattaataaaaagagatggtcttttaaaataaataataacaccaacaaaaccttcttctggagcataacaattgacctggtcaccaaaatttttatttaataccaaaataatctgggattccaatttcaattggttaaacctaagcctagacaagcaagattaaaaaggccgggtttgatgaccccaaaaggggtttaacagacaagtttaccaacccagggagaatatttgccaggaaaaatgttgcccgtagggtcccattgaatgcctcttcaaatattgaaagtt

SEQ ID NO: 70645 - DNA, 132 bp, Glycine max
  Clone ID: PAT_MRT3847_34802C.1
ctttgctacgtgtaaaagaggagaggaaccgcgccaaccctcgcttcttctagctcttcaatccttttataacctttatagatgcattcttaatcgttgggacaaatgttcatcgagaattgtaaggtagag

SEQ ID NO: 70646 - DNA, 314 bp, Glycine max
  unsure (1)..(314): unsure at all n locations
  Clone ID: PAT_MRT3847_34803C.1
gatgagaggctggttgtgcacgccactgctgcggctgctgctgggggtttggctgctgtcgttaccacgccgctggaggtcgtgaagactcaattgcactgtcagggtgtctgtggttgtgatangttcacaagcggatcacgtggggatgttatgacgacacgactgggcaaagatggttacagaagggtgatgcgagggtcgattccaaggatggtcttgtcatgctcctgctgcggcgacttgctggtctacatatgaagctgggaagtccttattggaagattgcggtcagcagacagacactgggaccg

SEQ ID NO: 70647 - DNA, 215 bp, Glycine max
  Clone ID: PAT_MRT3847_34804C.1
caaaacgccttgttgggcactgcctccctgtatgtcattccaattacaatccatatttatggtcatcatgagcgcattaccgctttcccttgggatatcctagaacgtgtagccaccattggtttggcgacaaagacagtgtgtgatggacctacatgcggagggctttttccggaggtcgaggaggatccgtgcgggatcccggctctacactc

SEQ ID NO: 70648 - DNA, 268 bp, Glycine max
  unsure (1)..(268): unsure at all n locations
  Clone ID: PAT_MRT3847_34805C.1
attgcagcccctctgcttcttccaccataatccattgcntctcaaccctttgcaacccaccacactcgacccccaaacagccctcaacatgtctgtccaggatagagcccaggcccagctgtcgcagctcgacaaggagctgtccaagtaccccgcactcaacaactttgagaagcaaacgtcggttcccaaggtctacatggtctcggtctagccggcctttacttcttcctcatcttcttcaacattgctggagaattcctcgtca

SEQ ID NO: 70649 - DNA, 436 bp, Glycine max
  Clone ID: PAT_MRT3847_34806C.1
cctgattcatcacaattctccttgacgatgggggggaactttttgtggttggcctgttgctcgcaggccttaacatgctgactgcttccttctttctcctttggacttttgagaattggccagcagaagagagatctagatctcgatagcatcagagcagctcgaatggtcagagaaaagctaagattaggccgacctgtgttgggtgcaaatgatcagtatatgggcaaaccaaccgatgagggcatagcacctgtgaagaattatttggatgcacaatattatggagagattggaattggcacacccccgcagaaatgtaatgtcatatctgatactggcagttccaacctctgggttccatcatcgaagtgctatgtatctactgcttgctatacccatcattggtacatgtcatagaactacaatacatata

SEQ ID NO: 70650 - DNA, 277 bp, Glycine max
  unsure (1)..(277): unsure at all n locations
  Clone ID: PAT_MRT3847_34807C.1
ctctgttcaagttttttattattacatagttaactgattctaaaataaggggaaaaataacacttttggaaaatagaaagcatacccttcctaattcctacatctaggangnnnncatttatcaagcactgtgttgaatgaagcaaaattcatgtaagatatcacaagatcagctgctttaaaacctgaggctattgttatgccaactgatagtccacctttgaagctacctgcaaagaaaaatccggcaagatctctttctatcttatcaattgct

SEQ ID NO: 70651 - DNA, 620 bp, Glycine max
  Clone ID: PAT_MRT3847_34808C.1
ggccgctagcgataatagacagaaggggatccacatggaaaaactacaactaacattatttaactcaccgaaactcacataataactttactacttcaccaccagttaatcatatgataaagtatatgcttccctttggcacattctatagcaaaaagggtaggtaatcttgccccctctttaactttacgaatgacccctaagacatgtacatgaatactaaatgaaaatacacttgctgataatgaaaacggccattactaaactaccacggcacgtgcctaaacttattgttatgggaatgaggacactccaaccaaacaccaactgggctgaggttcattggctaccacgttcattgtataaccagacataatactttccacaaaaactccattgcccttctcaaatgcatagaaagcatgacaaaaggcctttggggctgcataggggcatacgtttgaaattggaatacttaaccacacaccattgcagggtacttacccaaacaaaacttttaggcacctaataaacccaaaatagtaccggttcctaacgaaagctatgagcgtatcttctcagactaaaagcttaaagaagcactctccaatactcctgac

SEQ ID NO: 70652 - DNA, 682 bp, Glycine max
  unsure (1)..(682): unsure at all n locations
  Clone ID: PAT_MRT3847_34809C.1
ccacgcgtccgggagtgtgtgtgattgtgttgcgttttcttcttcttcttcctcctctctcaccttcttcaaatcccactcttcttctatcctttctctctctgcaaccttcttctttttctctctccatagctccctctcctcgcgcgccgcgtttggatccacgcgccgctcaatttcgcaacagtcgcagcaatccccagctgcgcaatcttccaattcgagctgcggtttcaaactatcgccgctttttttctccggagaaccgtaatcgttggtcgttttcgccggaattcggaatttgcggtgagagttttcggattttgtgttgtttcgcttgccatgggggaaggtggtgaaggagaaggtgattgcgctccgaagaatgcgnntcgttgtcggaagttgttgctccggcgaagaagctggcgcggcagcttgattttaccggcgcgccggagcatccgcagctgtcgcaaccgccgcagctaccggtnggctgtgttgccgttgcagccgcaggcgcctcatgcgaggggttgggaaaccagaatctccaaaatcaagatcaagacctaactttgaaatcaaagatgctactccaaagaagcaaaaacagtgcaattgtaaacactctaaatgcttaaagctggattgtggagtgttttgcatcaggaatata

SEQ ID NO: 70653 - DNA, 757 bp, Glycine max
  Clone ID: PAT_MRT3847_3480C.1
ctctctctctcattatctatcttatatctaaactagtatgttgttgggattttggagatgagctggacggttagatagtttctggattccatggctcatatggattcaactgttattgttccttcttctccttaccattctcttttgtcactccatcattactttagatccctctcaccacacaacttctccttctgcctctgccactgattctgatcttcacactcaacaaccctccaaccacggttccactgctgtgaccaaccgtcttcagagcacccggggagtagagaacacaagtattaaaggtgagataggaatagtgagagaagagtttgcagaaggggaggcttcaagttcgtctgtgtatttcctccacccttgctattatttcaacttagccaaagaagcattcctcaaatgtcttggccttgattctacatcatctaaatctgatgctccttcttcccatattcttcgctaaccagacttggctcgctgctcatcaattcccggccctcagttttctatgaaatggtctcgcgtctttctgagccgcttttctcgttataattggagaacaacaaaaatacctatgaaagtgtatctaagttttttttagtgattcaacattttcatctttgaataaaaatgaaaaactgggttataccatataagactaaataagtctcaacagtcaatctcttcagtcttgactgccacataaaattgtgatggcttgaaagcaaggttctgt

SEQ ID NO: 70654 - DNA, 114 bp, Glycine max
  unsure (1)..(114): unsure at all n locations
  Clone ID: PAT_MRT3847_34810C.1
tcgcacgcgngtacgtgcgctcggaacgccgcgcggggtcacgactcgaacatcacgatcggctcacggctcagtcgacgtgaccactcgctagcgcgtaggacagggcgggca

SEQ ID NO: 70655 - DNA, 365 bp, Glycine max
  Clone ID: PAT_MRT3847_34811C.1
tatttaacattttctctttttctttttccaaccccttgcgaagggtaataactggatgggggtcacaatttaaggggcaaccttaaaatgcctcacacctataaaattttctcccatggtctccaatatttcaccatctaattgaaattagcccttgattattcaatcgaccatataaaaacaaactgtttggaaaagggccacctctcttatgaaacaaaatcgtttctatggtagctggaatttaaatctgaattaacaggtcccaaaaaaataaatatcaccctattgaacgctaatccctttcgaaagcaccccctctttcccttttatatgcgcgcaactaccctcaagtggcctccccc

SEQ ID NO: 70656 - DNA, 369 bp, Glycine max
  Clone ID: PAT_MRT3847_34812C.1
gacaaaaagaaatgaaaatcacgcaagagaaatactgagaaaaacaagtagagaatgtgttggtctttctcataggttcctgttgctgaggaggatgttctctatgtaacaatgctcatgtgtccctatgttgtctcctgtactgctagaccccaattcctcatgatagcctatcctagtcctgatcaagccttatccttagattcctcttgtaagactaaacctaaccattgaccgatataagacacacatacacatctaagttctttgtccccgtttccttgtgatagcacaatcagcttattcccattcttttcaaggacttatgagatcaaataagtttctcacttttgaataaaccctaacaaa

SEQ ID NO: 70657 - DNA, 146 bp, Glycine max
  Clone ID: PAT_MRT3847_34813C.1
tttttaactagacgtcaataccaaaaataaactttgctgacttaccgaggcattaatacatcttttgttataaccacgacctgttcaacatattgagattaacatcttgtatgccctcgctgggctccatatctgctgcataaaat

SEQ ID NO: 70658 - DNA, 535 bp, Glycine max
  Clone ID: PAT_MRT3847_34814C.1
ggggggggggtttaaaaaaaaatgtttttatattgataaaattttatacacattggaaaaaaacaagggatgtgaaagagattcaaaacaacagatgaggcgcacaattctacttaattaaaagcacactgataagaagagatttggctacaaatataaaacatttacaacacaaacattaacgatattaacgaaaaaaacctgctaaaaattgataaagatattaaaaataacacaaataattattgttgaaaaacttgaatgaaaacactgaataacttgtaataagaatcacaaaatgaaataataatggtttgaatccgaagaactgagcgaccgatacctagcacaagaaaagtccatagcaaatcaaggatgcttaatgaacttaaatagagaaattaaaaaaaaagaaccgactcaaggataaaacagaaaatttttgaaaaatacctgcaggctaacaagctatacctataacgagccggaaaaaaaaaaggtaaaatcatgggcaaaaaaaaaaagcagcataaaa

SEQ ID NO: 70659 - DNA, 294 bp, Glycine max
  Clone ID: PAT_MRT3847_34815C.1
ctctctctcagattctatttattactcacaaacgtctacgagagcgggctctaaactacaaccagattgaggcgatccactaccaccggctgctgcgccatctgccgccggaagaggacacaggcgttaccgcggagaattctagtcagttccgaagtccttatacggagaatgcaccatacggtctcctgcgcttccacattgggtccttcctgagcgacatgtacatgacgcgtatcagtgtcccgcggcagaatctctaactcacgatgtcgaaaggcaacttacattgca

SEQ ID NO: 70660 - DNA, 483 bp, Glycine max
  unsure (1)..(483): unsure at all n locations
  Clone ID: PAT_MRT3847_34816C.1
gccgtccgggaacgaaatccaacgagcctgggcggacttcaccagcgggggtgacgccatcttcgagatcctgacgtcatctccacgcagagtgccttcgctgtcggcgagaggaagccgccagagatcatgtcctggaactccgacgagtagaaccagacgtcgatgatccagtctgcaacactcccacaaagtactgagaacgatatacaattaagttaattatcctattaatcatcattattcactgttaaccacctcattgatttaattggccaacgttaataagcaaacggtcactaagacaattggacggaagtaccaaaattgtcaattttaaaaagctagagattcaattttacaattaaaaatcaaagggataaaaatggctgatttgtaaaatcaaagagattaaaattgtaatttaatcttcaataaaataattntttattttttttgtctaaatgaaaaggtattagatgc

SEQ ID NO: 70661 - DNA, 214 bp, Glycine max
  unsure (1)..(214): unsure at all n locations
  Clone ID: PAT_MRT3847_34817C.1
ttggtatgaggtgcgaggggggcctctgaaggcgcattggcttttttttcccacactgatgcgggtccatgcaccaaaccagagacttccaaaggtgcaagcaccacctncattggacctagcacgctacgccgtcggtaggacctccttctacacgcttggtctctgaagtcacacaccatcatatcgatgtcgtccttctcggcctctggat

SEQ ID NO: 70662 - DNA, 371 bp, Glycine max
  Clone ID: PAT_MRT3847_34818C.1
ctgaagaaaaatttgacagaccatttcaaaaatgagaagagtatgatagtatcaacacccaaaagtggggtgagtgaacaaaaataaaactaaccccccaccaaagtagtagcatgttcttagtacatatggcacatgataaagatatcaaatattacagccttgccagcagcccagcacaagtgcaagaagatgctcctgcggtgtttatacggtgtaccgaccgtttgttgctcctatcatgaaagttgtatgtcaatgatctccttccacttccttccaatgctcatttgggcagcttcatttgctgctgtctttgtccacaacgaaagtttgttctgccactggcgcacactagcaaccacaccaca

SEQ ID NO: 70663 - DNA, 492 bp, Glycine max
  Clone ID: PAT_MRT3847_34819C.1
gtttgtatgatcaggtattcaagcccagcaagttgcaaatcaatgcggattttcacttgttcaagactgggattgagcctaaatgggaagatcctgagtgtgccaatgaaggaaagtggtcagtcaccagcaacagcggcaggaaggctaaccttgataacatgtggcttgaaactgtaattgtttttttgttttactccgattggttttcttttcgtgtttagagaatatggggagagatctgttttttattttttattgtatttctcaatagatgatggctttgattggggagcaatttgaggatgccgaggacatatgtggtgttgttgcgagtgtgcgccagtggcaggacaaactttcgttgtggacaaagacagcggcaaatgaggctgcccaggtttgttattatcttgtaaatgatactttgcaattgaaaccttatgtgatgttgtctgttatcttgtctgtatatgatttcctattgtagaa

SEQ ID NO: 70664 - DNA, 388 bp, Glycine max
  Clone ID: PAT_MRT3847_3481C.1
gggcgggacccgaatatcccccaaaagaccgaagtcgtcggcaaaaagaggcaagacggtaatgtaccggcgaaaccgggtaaacacgtttgggtcctcaagagacatgaaaagggagccaaacctacagagcacgacattcttcctagcgaagaccgacaagaagtaagtcaaggcgccgaaggctctgcgcaactcgaataacgtagtgcgtaagtcgaagccgaaggatcataaggaggtatagaagtcccgtatcaaagcgccggaaaccgaaagtgggaacgccaaggttccgcataggagagtctacgttaatacttagtcggtcgacccagacgcggtcgactaagataccaagaaagtatccgagaccgacttcaacaat

SEQ ID NO: 70665 - DNA, 1398 bp, Glycine max
  Clone ID: PAT_MRT3847_34820C.1
ccaaagccctcaaagcataatctcactcgtattacccatattggcgttgcggtggaaaaatgggagaaatggcaacaagcgaagaagtggttgcggcggcgccggaggcagccgcgccggaggcagggttgaagcacaaactggagagaaaatggacgttttggtgcgacaaccaatccaaacccaagcaaggcgctgcttggggaacctctcttcgcaaggtctacaccttcgacaccgttgaagagttctggtgtttgtatgatcaggtattcaagcccagcaagttgcaaatcaatgccgattttcacttgttcaagactgggattgaccctaaatgggaagatccagagtgcgccaatggaggaaagtggtctatcaccagcaacagcggcaggaaggctaaccttgataacatgtggcttgaaactatgatggctttgattggggaacaatttgaggatgctgaggacatatgtggtgtggttgcgagtgtgcgccagtggcaggacaaactttcgttgtggacaaagacagcagcaaatgaagctgcccagatgagcattggaaggaagtggaaggaaatcattgatgttaacgacaagataacatacaactttcatgatgattctagaagcaaaggagcaacaaagggtcggtacaccgtataaacaccgcaggagcatcttcttgcacttgtgctgggctgctggcaaggctgtaatatttgatatctttatcatgtgccatatgtactaagaacatgctactactttggtggggggttagttttatttttgttcactcaccccacttttgggtgttgatactatcatactcttctcatttttgaaatggtctgtcaaatttttcttcagagttcattggtagtttttttggtcacattctaaaagctttaaattttgaatatgtcgacacaagtttagcatgtatgatctggagcttttggaggagcttcagtggttatggtgtttgatcgtggtgggtggcacggtcctgttaggaaagagttatttgcattttttttctttaattttcatgcaatttatgtctatttttattcttaaagaaatgtgttttgattattgtatatttttctgtaatttgtgtaagtttttaacccccagaaattacattttaatttggaatcatcccactcttgcgccaagccttttttctgttccacaattttcatttttttaatttcagaaaaagggaatctaagcatgcaatcttaaatcttattatgggtatcaatgattgatgccactgatttaggtttaagaaaaaattattgattttatggatcttaagagagaaactctttatgggggcttaaactttttctttatcttttctgcttaccatgggatttat

SEQ ID NO: 70666 - DNA, 403 bp, Glycine max
  Clone ID: PAT_MRT3847_34821C.1
gtcaatctctacacaaaagtgttccacttgagtgaaaagtagtgtggtgggaactatacaatgtttcaatggcgtcataaacaccagtacgagctgaggcagctggtaagttggtgcaaagaactctacatgtaacagaaaagaagagacctgatttagcgttgttgctgaacaacaacacctacatcatccgaagatcaacagaaacctgtgttatctggtcatgtttaaggccggcaagacacctacatatacccatgaagctgtcgtggaagaaagaagctactaattcgcgacagtgatacagaggctattaaatgttaacattcagccgatgacgtgtccgcaacgggggatgcagggacatatcatcccaaagactatatatctaccatttgcacgg

SEQ ID NO: 70667 - DNA, 734 bp, Glycine max
  Clone ID: PAT_MRT3847_34822C.1
agacccctcctagaccatgcgccttggccattttctcctgctcacgactcttgccgtcatcgcttgctgtagcacctctgctatcgctgaagacttcgttcaagtcaacagcttaccgacggattttcgacacgagctgacccacggaagccgtcgcaatcttaaaggaagcgtgagtgaaatcaatttcgctcaaaacagcgcaatttccaatttcatggaaaagctcaagatgcaaggacagtctttatcagccttctggaaggatttcaaacaagctgctaaagtaaagcttcccgaattctataagtttctcatatcccatgtaaagatgaaaaagaagcaaccaaacatggcggaaacgcctccgaggagtccttcgtctgccggactggatcgtcaacattcgacaccgaatcatgccgtccctccgcaagaggtgactgcgtccgtcaagccgaatatggaattaacatcgcctgggatgtcaccgccgaaaaattcgccagctttgagtgaaggcacttccccgcaaatactaccaaaaccagacggacaataaggcccgaggggtgcattgtcttcaagaatcatcgcctggtcacgtcgagacaagtaagtacccgtggtgtgttcgtcacgcttgcatcgcatcaagtcgcagtagctatcgaaagtattccatagtaatcgcattttgtccgttaacatccaacatccaattgcccaacttg

SEQ ID NO: 70668 - DNA, 241 bp, Glycine max
  Clone ID: PAT_MRT3847_34823C.1
actgatatggccaaatgaaattgcaaaagaaggtggtgttatcagtgcaatactaaccagggtgctttctgctccttccattcctcattctggatcggggtctgctgcctctgttttgggcattattctaggttttagttctgaatactacttggaagttcctgttgctgttttggttacgctgcttctatctggcttagatagcactgttgttgcttcattaactgctcttcctgtgttg

SEQ ID NO: 70669 - DNA, 310 bp, Glycine max
  Clone ID: PAT_MRT3847_34824C.1
gatgaaaaacaccattaacattcaacattctaaaataaagaacagggttattcacttatttgtacaatatgaaatttacactagtttcagttaccaatcacatttatacttactttatacctgtacacatcataatatctgaattttaactagaacaatccagattttacacctctgcacactgtttccccaatggtgtttattagcgcacgtttcaaacatgtatggtactgcttagtgaaaaacagtgaagccaacatcatttactgtttctatggaattagtcaggcaaagcaaccaaacccgcttc

SEQ ID NO: 70670 - DNA, 940 bp, Glycine max
  Clone ID: PAT_MRT3847_34825C.1
acgagggagcacagaaaatctgccacaatgtttgcaaatgtggttggtgctcaagtgatatcacaacttaatgcaccaaacactagcctggaaactactgataagacagaaaggagttcatttacggataatgatcccgatagcagtgaacatcagaatagtaccttggacagaggagaaagtgcggttacttcaagtgaagggggagaagcaacagaatttaatatgactgttggagaactaatggatgcttatgaagtctgcatttccaatttacgtaaggcccagtcacgccgacgcatctcttctttgaagaggatttctccagtgaactttacaaaggaggcacgtcttcaggttcctgaagagattctccacaagatacggtctcttaatgaccttgacttacagctctatgaatatgcaaaagccattttcaataaacaacataaaacctcattgctgattactgaggagagttgggacaacatatcaggcagtgcatatggcctctggagggtcgttacgctagcaattacttgtgtcttcttcattttcttattcttactaattgtaaatgtgagaagaagaacgtccaaagttaagaagtgaaagtaattaaatcataatatgtgagatcacagagtctaaaagattttagagaacagatattttagacaaagccatggtttgaattgaaccatcgatattctcatccccggtcgtatagcttatacagttaaactggattttgttctaagttttgtccattgatgagaaacccagttcttgatttcaaaaaaaaaaaaactttttacttttattttcatttttgtccactattctttttcatttgacgacattcagctggttatgggggttaactctgcaactatgaactgtggttatcatgtaattaattttattttattttttcttt

SEQ ID NO: 70671 - DNA, 264 bp, Glycine max
  unsure (1)..(264): unsure at all n locations
  Clone ID: PAT_MRT3847_34826C.1
attttgctttgtcataatgtaatgcaggaatgcatttttttgttggtaaattattgctattggtggactttaagagtgcgggtttataatttctccacgnaagncgggcntcntaaaattgtgtttatgaatgaanctaggttgactcanttctntgttgtaggttgagatcaagaaggctgaancanagaaatcctnnaacccagcttctcttnntccatttgctagtgantntagggcacgttcttacnntgntggtttngg

SEQ ID NO: 70672 - DNA, 201 bp, Glycine max
  Clone ID: PAT_MRT3847_34827C.1
cccacgcgttcggatagcctttaattatgaataatgataaactcttaaggggtggctaaaaactcatgtcttacgtctgtgatgtctcacgagcactcaggcctgctgaggctaacaacacaccttagacataaactgctcatgtctggccgttcagcaggaccaagttaccaggactaatgatgggcgagagaagctcat

SEQ ID NO: 70673 - DNA, 275 bp, Glycine max
  Clone ID: PAT_MRT3847_34829C.1
aatatcacttctacttcagttgccatcacatacaatctgatttatgttctacacaacaacaaacattcagccacgttcactttcataccactaccactacatcatccaaaaatcaccctctacaccacaaattctctctcaaactctaatactcaaatcaattcatcttttaactataacgcaacctcatcactcacatcaactattgttacaccatatatactacatccatatcttcctcatactcctaaataagaattcttcccttccctaaa

SEQ ID NO: 70674 - DNA, 921 bp, Glycine max
  Clone ID: PAT_MRT3847_3482C.1
ttttttgcgatcaatttgtatatttatatagatcttatatcaaacaaggtacatcatataacgagtttacatccacgtagctcacgtaaaaacaactgcatataacattgataaaacttaacaaaagtaactgctatatattactgacttcatttttgaaagagttatcttcaatatatatatatatagtatactcaatatgcgccttgtgcttctaaaaagacgttaatttccttgtctctggcacgtaaccagggattatgcattatggcttctgaatttaaacaactcagacggcaaatcaaagtaggaactgaatgagttatctccttcattttcatgaattcttgcttttgaaaccagggaactacgttcaaatttttccaaagaatttggctttgataacacagggacagggttcacggcagcatgcatttgggtttctgcctttcttgctttaactggctttgttttgccaaaccctggaagatgcatgcaaagtgcactgcatgtgaatccctcttcctcaaccctgtcactttttggaataatttcttgtagctcgtagttgaaggaaatgtttctaacctcacttgatgatggttcaaggctcttggttactttgttcattgacaaagctctaggcgatgaggtggtggaatttgtggccaagaatttgaaagaaggttgaagtaaggatagggtagcatttgaaggtgtgacagaaggttttctctgtgacagtggatgcacagcaatctgtttttcttttcgtagattcttcttgatcaagattttgggcttatccatcatgggtacacggaagagaagtcaagtcacaccttatgcatttttttgcaatgcctgcttcatcttatttgaccttaattcgtccacttcctggaaatggtgttctgtgca

SEQ ID NO: 70675 - DNA, 1535 bp, Glycine max
  Clone ID: PAT_MRT3847_34830C.1
tctggatccttgaatgatgcaataaccaaatggacaaacctcaggtatttgtctcttgctcagaacaagttcagtggaaatctgcctagttggttgttcacatttaacgcaatagaaatgatggatttctcgcataacaagtttactggcttcatacctgatattaattttaagggtagcttaatatttaacaccaggaatgtcactgttaaagagccattggttgcagcaagaaaggttcaactgagagtttcggcggttgtttctgatagcaatcagctcagtttcacttatgatctttcctcaatggttggaattgatctatccagcaattcgcttcatggggaaattccaaggggcttatttggtctagctggcctagaatatctgaacttgtcatgcaactttctttacggacagcttccggggttgcagaaaatgcatagtttgaaagccttggatttgtcacataattccttgtctggacatatcccaggaaacatttctagccttcaagatctgtccattttgaatctttcctacaactgtttttctggatatgttccccagaagcaagggtatgggagatttcccggtgcatttgctggaaatccagatctgtgcatggaaacttccagtggagtatgtgatgatggaaggactcaatctgcgcaaggaagttctttcagtgaagataggatggatggcccaatttctgtggggattttctttatcagtgcctttgttagttttgattttggtgttgtggttctcttctgttctgcccgggcaagaaattacattctccaaacaaaagtttgatttgatgcttgtgacagttacaaatctcctgtaaattccattttgtaatttggtacctgtgttctcagtttcaagtaaaacatacacttatgtgactaggaatactatccggccatcaacttcacaagtgttttcttgtgattcctgatcaagtgtctcagatttacaggatcaaaatgccatgacatgagtaacacaaggtttaaagaacactcaacactggctttatctatctgagtgaagactagcctggcatcattcagccaagaaaagaatggatgattatgatgaaaatttgatccgagtaaagacgagtccctcatcattctgatggttgttctcttttgctggaatttggttgcatcaagtttagaatgcatcatcacatgtattattcataatcagtggtgggtgaagggtcagtagggaacatgtctgatatctggtctagttatggtgaaattttgatcttgggcatcaaattgcagatttgcaagcatgtttacgtgaagagaacttgtataattcttgattaacctagttctttcttgaggtggggaaccaagttttccctgtaagtggggagtaggttctcataagtctaagatttgtatttgtattactatcttcacaccttcatcatagtgctgtgattttaaatgatattctcacgaaaccttttcattgacaacagaaaagaggttaattgagcc

SEQ ID NO: 70676 - DNA, 981 bp, Glycine max
  Clone ID: PAT_MRT3847_34831C.1
gcgttctgccattcaaatttttttcttccttttacttgcttaatcatcatttgtcaattattttatttgcattgtcattgcatgcattactattaaaccttactactaatccattaatcatccttcttaaatgtatgtatatgtacgtgcaagctagttatttaatacatacagacgaatagagccattggcttgcatttgaaacaatgacttatgatttcttagcataatataacataattcaacaataaaggttaaacatcaaattgtccctagctagatttggaagtaactatttatttttctcctttctataagaaaagaaattgataaccactaatcaatttggtccttgatgcaacataatattagtaacgaaactgacccatatgcaaaatcctcaacaactaaattggttgatatttgtcaaatttgatggataatatcaattttaagaacaaaatggatattctattttaacaaataccttacttattgcatctcacattaacattgtaatcaaacgattctttaattatcacactattcactcaagtaaacctttttgtttgtttgcaggagctgtttttgctgtcaaaataggtgagttaattagtatgtgttataatagtttgacattgttattactattgattatatgatggtatgcaccactttgtgtctttcactcttctaataattaagaatgttagtttaattattcatttagatattttagtcaccagagtttacattttaatttcaaaaaggtttttgtcgctaaatttttttaattccaatcttttgatagaaaccttttgataattaaaatataaacttcaaactaaaaaatctacttattaactataaggactaaaagagataagtttaaaaattataagaactagatgagtaattaaaccaagaatcttgtcagattaacaaattgtgcatataggttggatgttagtcatctttttt

SEQ ID NO: 70677 - DNA, 476 bp, Glycine max
  Clone ID: PAT_MRT3847_34832C.1
ccacgcgtccgcgtctctagtttcttctattttttttttctgtccaagtgacatgacgcggaatcagaaaaaggatggatacagatacatgtacagtagtgctgcctcatggtcatggctattcaaaaaattatacactcttttctttttcagcgtacgtactttacgttacattttctatctcagaaaaacccacctgggcatgtcacattattttttcctgatccagcattgaaaacctacgttccttttttgaggtctagaatcttttcaagttttagctgtatttcgacacggaaatatatagaagattcatttgtgtaatagtagaattgcaaatcaagcacaaaaaaataaataaccaaataaaaagaatggtcaatctcttacgtcattttattttagtcaattgtgtaacatgtgcccttgtgttacgcaacgattcgggttggctacttctatatgctaattaattc

SEQ ID NO: 70678 - DNA, 261 bp, Glycine max
  Clone ID: PAT_MRT3847_34833C.1
gctgggtcgagaaccctacatcaggaccataggagagataagagtccactccacctggcctgctcaagcattcatcagtgtgcacaatagaacgcatcctcaaggtccacgtcagagagaacagcataagcaaattcgagcagtccagagacaccataagagccaacgcaacgactctctcaatgaaccaccctcattgcagtagcaacagcagacgagcttctcacgttccactgcacctccttcaactgctccctgggt

SEQ ID NO: 70679 - DNA, 603 bp, Glycine max
  unsure (1)..(603): unsure at all n locations
  Clone ID: PAT_MRT3847_34834C.1
ccacgcgtccgtgtttacctaccggcggcgcagtttttctcatcgcttcttcttcttcttcttctttcgtttgcatctgaaactgttggctctgtttttattcaactcaacagcacatcactttgtaaattactataaaaagccagatctattgcttttcatccattaacgaggggaaaaaaacaatatagcaatcaaacagataacaatttctcgattattttctcccttctatattgactgtttcctgaagcgatgtcgtgctctctctcgttttcaaggctttacgctcgctcggagagaactcttccgagcgaaaacgagaagccacgactcaacgtacgatgtccggtgagagtgacgaagtttttaggaacgcggctgcgttcgagcgggaagagcctcggttcgggagcggtttcacgtttggcaatcggaggggcccgggtcggtcaccgaagctgaggtntgcgggnttcggtcggctatgtccgccgtaccgaacaagccgctcgggctttacgatccggccatggataaggactcgtgtggagtgggattcgtggcggaactgtccggcgaaagtagccgcaaaacggggac

SEQ ID NO: 70680 - DNA, 412 bp, Glycine max
  Clone ID: PAT_MRT3847_34835C.1
gtgctctttacttaaaatgttaattgaatttacgattcaacactgttgtaaatggttaacgagccgatgattaactaatagcaatacattcataagctacactgactatgtgttctgcaaatacaggtactgagtcttaaacagggagtcatcgagattgggccagtcacacaatgtaaacactaacgttttggggtcaattgcatcgaagcgctcaagttgatgagttgataatctcacaatgtctcaggccgcaaagatcctttaagatatgactcctaaggactgcaaagggacatgaatgtggcatatgtgtaggagtgtcaattcgctcaagaagcttcattatgcactcatcaaacctagatagaccctgattgaaaacctgcaagtcagtcatggtggacacgaa

SEQ ID NO: 70681 - DNA, 356 bp, Glycine max
  Clone ID: PAT_MRT3847_34836C.1
agattgttgtgactcgtacttcttcgtcgttatcctcatcctttgtcgtttgtgtgtatgttctttctctcagctgaaaatgtcttgctgcggtggtaactgtggttacagaagcgcctgcaagtgcggcaacggttgcagaggctgcacgatgtcaccatacgtgagctacatcgagtcaaccaccaccgataccttggtcatgggagtggcatcagtcaaggctcaattcgagagtgctgaatagggtgttcacgctgagactcatggctgcatatgtggagctcactgcacctgcaactcctgcacttgcaagtgacgtgttggagatctaaagcttcatgtatcgatggccc

SEQ ID NO: 70682 - DNA, 716 bp, Glycine max
  Clone ID: PAT_MRT3847_34837C.1
gttttgatttccccaaagaacataaaatatggccacgggcaccgttgacaacaaagcggcgaaatcgaaacctccaagggccgaagcgaatatgtttctcattcgcagcgtacgccggcgacctccttaattgcctcaaagcctcgaaggtggcaatcgacgaaggactctccgacgcagaattatcaaacatagaatccaaattgaaattctcgttcccaccggacttacgcgcgatcctccaacaaggccttcccgtatcccagggcttccccaattggcgttcttcctccacacagcaactacaaatcctcctcaaccttccagcctcctcgattctgcgtcgcgtctccagtacgcgcttctggcacccttcctggggcccagaaccctccgaccctacccgagtcattgcccgcttattacatgatgcgccgccgctcgttccgatttaccgccattgttacattccctcctcccccggcgccgccgggaaccctgtttttcatgtcgacaacgacggtgatgttcgcttgctcagctttgacgtggcgggattttttcgggagtttctggcgccggggacggaggagccggtgtgggcggcgacggcggcgaggagggtgaggttctggtcggaggtggcggacgcgcaggggggggagctaggcgggtgtctggagagggtggtgtggaaattacgtgagggagggtgg

SEQ ID NO: 70683 - DNA, 454 bp, Glycine max
  Clone ID: PAT_MRT3847_34838C.1
aggaacaaggggggcggggtcaaattctaaattttaccccccaagaaaggtttctcaggggaaaaaaaggccacaagtttttggggcttaaatccccggaccccccccccaaatttaatagctgccctgcccaaagcccatgaaatactttttgaaacaaacccccttccccataaaaaaatagaaccccaaatgccttaagcaacagtttcaaaaacagtttttgaagggttgttttcaggcccaactgaaaaaaaaattgcagcttttgaagggttgttttcaggctcaactgaggcaacagttgcagcttttgaaggcttgttttttgaggcaacaggggcacttttaaaagggttgtttttaaattggggggcttaatccacccaaaaggcaatttttttcccaaatttggaaacgggttgcaaaacttaattgggctccacatttcctt

SEQ ID NO: 70684 - DNA, 471 bp, Glycine max
  Clone ID: PAT_MRT3847_34839C.1
cctcgagccgattcggctcgaggaatagttggtttgatgcttttgctgctattggccaaggcattgtttcatgtgtattgctatcataagatgaaaggagaagaccaggctcggatagagaaattcttggaggattatagcgcaatgaagcctactcgattcacttatgctgacattaagagaatgacaaatgggcttagtgagagtttaggggaaggggctcatggagcagtgttcaaaggaatgctctcccgagaaattcttgttgctgtgaagatactcaacaacgcagtgggtgacggaaaggatttcatgaatgaagtggggactattgggaaaattcatcatgttaacgttgttcgtttgctcggattctgcgcagaagggttccaccatgctcttggttatgatttcttcccaaatggatcgctgcagagattcttggctccgcctgacaacaaggatgttttc

SEQ ID NO: 70685 - DNA, 267 bp, Glycine max
  unsure (1)..(267): unsure at all n locations
  Clone ID: PAT_MRT3847_3483C.1
cctctaanctacctctttttcttctctctcaacaacttcancttcttnntcctcgatcatgtctnacttcaagggcaagtaccatgntgagcttatcgncaatgctgcgtacattggcatcctgggaaaggtattcntgcnggcgatgagtnaacagggacaatggnagcgtttggcnaccatcagtgtagagaacattgatccaacaggagagtctaagggagtgcttntnatnccccngggnncctnaanaacncagggggaacc

SEQ ID NO: 70686 - DNA, 371 bp, Glycine max
  Clone ID: PAT_MRT3847_34840C.1
cgcatctaacccctcattcaagaaattttccaaactaaataaacctgaagcacaggatcctccaatgaggctcataatcgagccaaagaaatttcaaatttgccatgaaatttcactttccatcatttcataacaggctactactcttggcttgtttcggaccgttcccactgtgcactaaccaatattattattccctaagaataaaactataaaagggaaacaggtttcttttttttttttaccaaacaccagatcataggttttcataaacctttttttagagaaaacacctcctttgggcctcatatttgtgagaataattacaaatacccaacccccctggtaaaaaccattttttttaccgggaa

SEQ ID NO: 70687 - DNA, 188 bp, Glycine max
  Clone ID: PAT_MRT3847_34841C.1
ccaccaaaggtaaatttaaaaatatattataaggtctattagggataaaaccaaagagcacgcccaaacacatgttgaaatataaaataggcaaagccgcttttataacattcgtcaaagggggggcttgagggcaaacagcgccaaagaaaagctttttttataaaatgcgcaaccctaaacaattt

SEQ ID NO: 70688 - DNA, 721 bp, Glycine max
  Clone ID: PAT_MRT3847_34842C.1
ggaagatcgtgtctctgtgaagagggagagatgcgtgtttgaatctgtgtgtgtgaaggttgaacaagacgcgaagcaatcgcaacccccaaaaacgcggcgttttgaacggtccacgacacgaacatggccgaaacgtcttctacagaagaggatcacaatcatattcccatcgaaattatcagcgacgacgaaatggctctaattgaagctgctttcgcttttgcttccactcgcactttctcttcacttcgttcttcttcttcttcaaaattacccctttgcacaaacgccttatccatcacacctttgtccaaaagaaagttatcgagtgacattgaggatttacccacttgcaagaaaaaacacactctttctgattcttttcttcaccgcttcaggaacaaacggggcttgtccgtcaccgatctcacttccacggaatggtgcccaaaacaaatggagttttctctccttcttggagggagaaaagtgaatgaagcaatgagagctggcattgctcgccatgcaaagcttgaacaagaggtcatatcttgtttgttacctcactcattcagcttcttacttcacccatcttactttacattacatgtcccttcttcacttgttattggtgatacaatgggttttttttttttttttggattaatcattgtgattaggacctttatctcctcggtgggatcttgagttatcccac

SEQ ID NO: 70689 - DNA, 530 bp, Glycine max
  unsure (1)..(530): unsure at all n locations
  Clone ID: PAT_MRT3847_34843C.1
ggctcgaggtttcttctttggtgtgcacactaaagatggtttagccatgggcttgcttctcaataccaagggtgccatggcactgatcatgctaaacattgcttgggatagagcgattttttctgtacctacctatgcggttatggcttcagctgttcttctaatgactgtagtagtatctcctgtcatcaatgcggtctacagaccaagaaaaagattcgagcagaataagctaaagactatacaaaaactaagagtcgatgcggagcttcgaattctagcatgtgtccacaatactcggcaagccacaagcatgatcagcataattgaaacttttaatgccactagacttacccctatacatgtttttgccatgtaccttattgaacttactggacgtgctgctgcccttgttgctgcacatatagagaagcctagtagccaacccggagaacaaaatctcaccaaatcacaggcagagttagaaaacattgccaatgcatttgatgcanttggagaggcatatgacg

SEQ ID NO: 70690 - DNA, 524 bp, Glycine max
  Clone ID: PAT_MRT3847_34844C.1
ggtacgaaggaggtgcattggtccattatctatcgttaatggaagtggaagtagcacttccattttccattttgcatttcccagtagagtaggcaaagccaaatccaaagggaacacgttcattcaattgcaattatttatattaattaataataattcacaaattgtgtgtggccagcactccaatcccctccctcaactacccgacaaattttccattcccggcatctcctcccagcctcgtaccccagataccttaaattcgcttcataacacaatttcgtttctttctttgccgaccaactcggttcttttttttttctttcaccttcacctatggccatggcttctttgattcagtgttctgcaacttccctctccgctgtccccatcactacccgtttcaccaggacccacaagtctcgccttcgctgctccttagatgctaatgtttccgacatgagcgttaacgcgccaaaagggttgtttcctccggaacctgaacattatcgaggaccaaaact

SEQ ID NO: 70691 - DNA, 1102 bp, Glycine max
  Clone ID: PAT_MRT3847_34845C.1
aacacaggtaaacattgcttgtattcattgaaacagaaggagtacaatcagtaatacaatcactttgagcattagaatgaagtaaagtattacatgatgtactaggattacaattgtttgaacctaaggctacactagaattgagactagagagagacttgaacttggacacttgagacgagggactctgaaacttgtaaagaccatcagctcctacaactccacgaagaagcacctcagaagaatccttggccattccccatgaacacttgctcagaaccagtcacagagtgagcatcagacacattagaagaatcaggtgtaacatgatgcgacgcacctgaatctggataccaccattggttgctgaaggttggatcagaactggccataaatgcttgtggtggagaaggtctgggtgcagctggtctaggtgaagcatagccaaaagaaggtgcatacaccggtcgagcattcatcagaaatggattgaaaggagcacgttgaggtgaaaacggcatagaagcggattgcgaatatctgtaataacaaatagaggcgtcatgaccacttttgtgacagatctgacattgagacttaccaaaacggccacctccacggccaaaacggccacctccacggccagaacgaccgcctctgaagttataattattgttttcagcatgagcagtaacatgactagtgccagtgggaaacgactctgtagcaggagacgacggttccatcggagaagacgaatcagacggctgagcctgcgttaaattgactgacactggttctgtgagaatcattttccgatgcttctccaatctcgattcgtgtgcaaggagataggattcaagttcgtccaaagagctaagatcttccttactattaacagtagcaacgataggatcatattcctcgggaagtgcatcaaggacgatctcaattaggttacgaagaggaacgggatctccaattgagatcaaggattcattgatttcgcgaacacgctccatgaacgactcaatcgtgagaggacctttggagagacgacgcaattctgagcgaagctgacgtgctttcgcgaacgcgaggg

SEQ ID NO: 70692 - DNA, 133 bp, Glycine max
  unsure (1)..(133): unsure at all n locations
  Clone ID: PAT_MRT3847_34846C.1
ctgacttggctnganccagttcagcnaaaatngatcatggttccctgggtactgaagtatctaanaatttaagtgaactnaggcgaattgagttcatcaagaggtgaaganacnacacnacatgcgacgntgg

SEQ ID NO: 70693 - DNA, 319 bp, Glycine max
  Clone ID: PAT_MRT3847_34847C.1
tttaaggcccttttctttttttttgaatttgaagtatctatcaccaattaattccactctttttgccatcaaacaacaaaaaatcaatctgggtatcaaaaacataatgccgtcattagaggaggaactctttccatcaacctcaggaaagtgcaagatcgagcggacccaccacatgatccggcgactctatcgctgtttcgtctcaccagcaccatgtacctgtgggccctcttattaatcggccttaccgcttactatctcaactttcaaggcttcgtcgattgcggcagcctataacttatcagcctctggggcg

SEQ ID NO: 70694 - DNA, 1261 bp, Glycine max
  Clone ID: PAT_MRT3847_34848C.1
attggcaaaaccatgtgtaattgaaattgtttaagttgcaagaatcatttgtccatgacctacaaaaaatggacttgcgtatgatacattcactaactcaaaaaaacttcaacaaagaataccatttcctctgcgccattgttttgatatttagtctcccaaaattgccatgatgatgactcaaaaaactattccaactccctacgaaagtcaacattatctacaaaaacagttttccaaccatcaggatcaacacacaatgggatcttcgttttgataccaggtacaggtccaggttcccgagtaatcttccctcctgcaagtttgattgcttctgcagttttgtacacatcatctgtgcctattgtaatctgagcataagcatctcctttatcataatctgggactccatagttgtaagtcaattccaggacagtgtttttttcctttggaccataacccagtattgctattgtactcttaaactctggatcatcttgggttcgaagtagctccataccaaaagccttctcataaaatttaatggaacgatcaagatcacccactcgaagcattactttgcacaaaggctccggagagggaaccctttccaaaagttcaaattgataaccatcaggatcttcaatatatgcaattgttgtgttgcctcccttgacaggactaggctctctagtaatttttccacccttggctctaacaagttccactattcttgaaatatcatcaatagcaataccaaaatggccaaatccatctccaatgtcatacttctcaatcccgtaactgtatgtcagttcaacaacaaagtgtgcatcctcaggcccatatccaagaaaggcattggtatatttctgctcttgcatgtcacgctttctgagcaacttcattccaaggcactctctataaaattttatgctcttgtccaagtccccaacacgatacacaacatgaagcattcttctcttgtcatgtttgacccaatctagcacattttcttgtgtagcagctgtggacatgtttccgaatgccatcactctcatgcacttatcatcatgtctcaaaaacctagaagctttgaggccaaacttatgaaactgtctaatgccgctaccaagacgaaaaagagagagcttttgagaagggttgcaagaggcgagggagggcaacatgaaggaagaaagtgagggacgaattgaagaagacattttactgagtgaagtgaatgtggacggacgcgtgg

SEQ ID NO: 70695 - DNA, 654 bp, Glycine max
  unsure (1)..(654): unsure at all n locations
  Clone ID: PAT_MRT3847_34849C.1
ggtccggaattcccgcgtcgacccacgcgtccgcttagctttaaacatttgagtttgttattcttttctttctgtttcacaacattaattcacttcactctgtacattgttttctccttccatggcttcttcaattcgtccctcactttcttccttcatgttaccctccctccgctcttgcaacccttctgaaaagctctctctttttcatctcggtagcggtattagactgtatcataagtttggcctgaaatcttctaggcttttaagacatgatgataataagtgcatgagagtgatggcatctgggaacatgtccacagctgctacacaggaaaatgtgctcgattgggtcaaacatgacaagagaagaatgcttcatgttgtgtatcgtgttggggacttggacaagagcataaagtatgcccaatattaaattagttacaaaatagttatatctatgattctctacagtgatcattgtcatgggaggacaaacttgttgtgatttcagattttatagagagtgccttggaatgaagttgctcagaaagcgcgacatgcaagaacagagatatactaatgccctttcttggatatggccctgangatgcacaccttgttgctgaactgacatacaattatgggattgat

SEQ ID NO: 70696 - DNA, 399 bp, Glycine max
  Clone ID: PAT_MRT3847_3484C.1
gttataggcactgacgatatcaagctaagacggattgctggtaccaaacagagcgctcgtgaatctacaactatatagtctgctaagaaggagatgtctaccaaatttgtgactattgtatggaccaactgcagatggagtgaggaatatactctgggatgtattgactccgttgctcttagtgagactgctaattaccagaggatgaccgaacttttgatgctgaatctcctcttacacatgctgaattgggaagttgctcatgaattaaagacatgatctgtgttctcagatccacgccgttcttgcatggtgagaagctgctgaagtatacctagttgggctctttgaggacactaacctgtgtgccattcatgccaagcgtgaaaccaattatgc

SEQ ID NO: 70697 - DNA, 458 bp, Glycine max
  Clone ID: PAT_MRT3847_34850C.1
gaagaggtaagcggttactcactccatggctgcagcaaggagaggcggcggcggcctcggctgaagaaagaaggtgggagcggagagcgcaggcgtgaaatgttcccaaggctgcagacaccgacggatttgctttgggagccagagtagctgccgccaccagagtccggagccatgagcgggtttaattttggaggcactggggcccctacaggcgggttcacgtttggcactgcaaagacggcaacaaccacacctgctacagggttttctttctccacctctggcactggagggtttaattttggggctcccttccaaccagccacaagtacccctttcaccggcctgttctcacttgccacccatactccggccacacagacgacaggctttacttttggaacagcgactcttgcttcggggggaactggattttctttggggatcagtgcttc

SEQ ID NO: 70698 - DNA, 1457 bp, Glycine max
  Clone ID: PAT_MRT3847_34851C.1
gaactcaagccttgagatatttcccttttgaggtttgattagtgtggcctagttaatttgttttctcgatgagaatgagaaagcaatccactatgcaatgcgcactttttcgcttctgggttcccttgttactacttgccagcttcagttatgctccttctgttttggccacaactgaaatttcagggaatcaagtgaacatggatgggaaggttgtaaatgaagagttaggaaaacctaatctaaaaggacaagatgaagaagaaaaattcaaaggactttttccaaaaccaattccaattgttaaaccttttccaaagctcattcctataattaaacctattccaaagccaattccggttgttaaaccaattcctattccactttataagccttttccaaaatcaattcctattgttaagcctattccaaagccaatcccaaatggtaagccaattccaactgaagaagcaaaattcaaaggtttttttccaaaacctattcccatagttaagccaattccagttgccaagccaattcctattgttaagccttttccaaagctcattcctataattaaacctattccaaagccaattccgattgttaaaccaattcctattccagtttataagcctattccaaaatcaattcctattgttaagcctattccaaatggtaagccaattccaactgaagaagcaaaattcaaagggttttttctaaaacctattcccatagttaagccaattccagttgccaagtcaattcctattgttaagcctatccctatcacagtatataagcctattacaaaatcatttcccactgttaagcctataccaaagccaattcccattttaaagccaattccaaagccaatttccattgttaagcctatatcaaaaccatttatagtgcaaaaacccatccctgctgttgagccagagaaatttttaaaaccaaagcctttcttcaaaaagcctcttccaaaatttcctcttaatcccaaatttaagaaaccacttctaccaccatttccaattcacaaggcaattccaactccataaaatgataacactctaggtctacaagcaataaagtcattccttccatttctaataccttattatatgtagttttcccacacctcaacctcaatcatgatttagataataatccttctgtacccctcttgtgtactggattggaatatatgtagttaatgtgttctccttaatgaagatttcaatattagtttttataagattgattatattataagtatttacatttttcttttttagtagataatatttaattgtgtttgtgtgtagagagagagatatcattaaatcatatagctattcttctataagaggtgaatcttaactattaaatccttatatgtttagtgaaacaatattgtaatgaaatatcaatgttggaattttgat

SEQ ID NO: 70699 - DNA, 177 bp, Glycine max
  Clone ID: PAT_MRT3847_34852C.1
tgggagtcacataacaatcgataaatgtctgctgtagcgccacaatggtggagatcaacatctggtttgcgctccttctcctttgtgccgtctacacctcataccatggattcagccattcctgaattcgtgctctcttctgattgtaaccgtcatgagtatggtggcacatactat

SEQ ID NO: 70700 - DNA, 256 bp, Glycine max
  unsure (1)..(256): unsure at all n locations
  Clone ID: PAT_MRT3847_34853C.1
ccctcncctactctcacttgctatgccatcaataagcgctgtcactcctgggatctgcattcccttcctctcctatttttttccgactattttagggttttgctctgtcgcctcctcgatccgaaatccttcgtagatgtacaagatccctgacggacaaatcgcgccaccacaagtccaaggcagcaccctgctccacccaccaaccccaactacctctgccccaagggaacaaagaggctcacagacagcaaca

SEQ ID NO: 70701 - DNA, 506 bp, Glycine max
  Clone ID: PAT_MRT3847_34854C.1
ggatcaaccccttccaccgatcaaattaaggaacctaaccaccaggccttaaaataggttttttataacaaagcacctaagggggtcatcggtttgtaatacccattatcattcggggatgtccattattaaaatcatagggactttcgaaggtaaaaattactttgggggcctaatcccattcccaaatcatagaattatataaggcataaaacacaccttgggttaagttgaagaaaagttcaaaacccatgccgccggggatctcgaaatccttgaaagggatggaatccttgattatggggaaccacttttggatgcggatcttgtcggtttttgggcccgtttgacccgccaccagttttttaaggtcgccgatggggtaatcgtcgttgaacttaacccccacctttttcccaaatgaatcgttaaacaccacctgaatcttcttcgggacgcaaacaaccttatttcccaattccaaacctaaagtctttcgccgaacc

SEQ ID NO: 70702 - DNA, 422 bp, Glycine max
  Clone ID: PAT_MRT3847_34855C.1
tgcgttcgttttttttttttttttttttagtaacataatattcatattcattacttataaaagtgaaataacaaacacgtcccgtcataattaaaccggtgggggccagggaagaccgacctcaagcctcctaattggccctaaataatgggcccacaccccaccccaccttagcttggttggaggggttttattaaaatggaaggggaatgaccagaatcatccgatactgttgtggaaggctaaagaccatgagggaatggctttggtttgtttccgctgcccagttgaagcagatattccaaccctaacccattcaggaagctctttgttgagctcaatatcatgggagagtggcacagtttgagtgccaggatagaaagcctcaacatgtgagttttttaggggcggcattatagctg

SEQ ID NO: 70703 - DNA, 228 bp, Glycine max
  unsure (1)..(228): unsure at all n locations
  Clone ID: PAT_MRT3847_34856C.1
ctcgagccctgaaaaagcacaagagtaatcataacagaatattttctggagcctaatttgtgtctatccccgcgcnntttagttttgcgagcgcccgatggcttgcttgaaggggcagaaagagggcctactgccctttcactgtatatgtgccgacatagttatcaagatcatgacgtgaagtacgaaaaacaaggcgatggtggttagagtggctaatctttatta

SEQ ID NO: 70704 - DNA, 265 bp, Glycine max
  Clone ID: PAT_MRT3847_34857C.1
tttattcgtgcgcccattcaaagatgctcgggggggaaattcatggcgtcgagggtaaaccgccttctaaaccggaacaggttgactctaccatggaacacggtgagagcttaccgagtgttaacttaaacaaacttggtgggacaatgagtgaaagacttggtcacaatgagcatgtattgcatgaaaggccaactacgtgtgactccaaagttttcccttaaatgaaaccccaatatgaagttgcactggcaaagtttgtacc

SEQ ID NO: 70705 - DNA, 497 bp, Glycine max
  Clone ID: PAT_MRT3847_34858C.1
caaaaaagtcaccaaacagatgggacttgcactcggttatcgatgatctatattctgtaatactatgggctacagatggacacataccatactagcatactcttgagccgaaaccttgagcactaacactgatattgttacacacctgatcacaagataacccatcacatgtctatgcacccccttctcccatgcatgacgcaagctagagctaatatattgcattcagctagctgaaatctaggtgcccgccactcttcctagacttcaccagccttgctaagcagatcctaaaatgctttacatgcatgctatctattgcacttgtgcgcgggattaaaaactgcctctgtcttgcccagagaggccttctggctgaggacgtaccacatgctcacgtcctgaggactgacgaacaaagggctcacatagtgctcactaacgtgcgccgtgccggtgaagactggaatgaccagccaggtgctaaggatcagctt

SEQ ID NO: 70706 - DNA, 916 bp, Glycine max
  Clone ID: PAT_MRT3847_34859C.1
ccacgcgtccgatgaaattgcttctaagctcccaacacaacaccctgacctgcctaataggcttgaccgcatgctgcgtttgcttgctagttattctcttcttactacttccactcgcaccacacaccatggtgccactgaaacagtttatggactctcacaagttggacaatactttgtccctgacggaactaggggctacttggcttcattcacagcatttgtctgttatccaccactcttacaagtttggctgaacttcaaggaagccgtggttgatgcagacattgacttgttcaagaaaattcttggagtaacaatgtaccagtacatggaaaacgatccaaaaatgaaccaaatctttaacaagtcaatggccaacttgtgtgcaacagagatgagtagaatacttgaaatatacactggatttgagggaatatcaacattggttgacgtaggaggtggcaatggacaaaatctaaaaatgataatctccaaataccctttaattaaaggaattaattttgatcttccccaagtgattgaaaatgcacttccccttccagggattgagcatgttggaggggatatgttcgcaaaagttccacagggtgacaccataatactaaaggctgtatgccacaattggtcagacgaaaaatgcatagaatttctgaggaattgtcacaaagcattgtctccaaatgggaaggtgattgtggtggagttcatattgccagaagaacccgaaccaactgaagaatcccagcttgtttccactcttgacaacctcatgtttatcactgttggtggaagggaaagaactcagaaacaatatgagactttgtgcaagctctctggattttcaaattttcaagttgcttgtcgtgccttctctatctgggagtgatggaat

SEQ ID NO: 70707 - DNA, 418 bp, Glycine max
  Clone ID: PAT_MRT3847_3485C.1
aatttcgtgatcataggttgccgcaccttaaaaccggaaacaaaagcaatcgttacttgattccaagaatctctcaattacttgctactatcttggggacgatttattaagggaaagaaaatgactctgtgtgctggacacagactcagcgaatgattgtgtttatcattcttagtacatgcgctgaacactctcctatttgatataggactgaccgatagatttaaacttctatgagtatattttcagctctctgtggaatttcaagttcaagctggcgaaatctaggattagtgctcccactctgctatctggtataggactgcgtgggcagactattctatggatgtactttctttcactctctaattctcactgatccgcattgccgttcaaagtggtattatttgataaacac

SEQ ID NO: 70708 - DNA, 630 bp, Glycine max
  Clone ID: PAT_MRT3847_34860C.1
aacaagcaaggccaaactcgtcttgctcaatactacgaatatctcaccctcgaagagcgacgtgccctcgaaggcgaaatcgttcgcaaatgcctcgcccgcaacgaacagcagaatgagctggctattttggaatttatacatctcttggttgaaaccatggatcgtcattttggcaatgtgcaagatattttgcataccttgatctctagcaatacgcaagccctgtaaaactccccataactcagcaacaaaggctatagtgcacctcactttttttgcaaatcctattttccatctgccatgatgatctcgcagaaggcctccacaagtagccataccttgtgatgatttcaaagatccatctgtattcaagcaaaaccaaccttcaggaggagagttttcacatgaattttctctttgacataatttctagagggattaaattgaaagtgggcagatttgtatttcttccaatgatgacagatttcttccaaggtttgcatgtataaacaaatgaatcatgatgttgttggatgttcctccaataccaaaatagtagcaggatgtggccccatattcaggcctagggaaaaaagaaataatgctttgtagggggggggaattata

SEQ ID NO: 70709 - DNA, 529 bp, Glycine max
  Clone ID: PAT_MRT3847_34861C.1
aagttcggaattactcaaaattttaaattattaaactaaataaatattttatggtaaaataattgacacgcgtcaacctttaaatgcttgggggattgatgttggggaggatatagcatttctcttaattttagtgcctattcacatgtccaatatctgaaagtcgaggaactacaacaggtacaccacgggccttctcaagagcaaaatttatcctcaatggtctacccaacagtgcctttccatccattgcatcctttgcacatttagcatcatcttcatttgaaaaaatgacaaatccaaagcctctagacctgccactgtcttcagtgacgtccccgaaggaagagaaagcctctttgagggacttgtggtccactgaccatgacaaccctcccacaaagagcttgttggaggaagcatgagaggggggagaacagtagaatcgacattgagtttgaggaggagaaacgtggaaccttttccaaatgggggtggcaagaaacgccacacacttccggacgcgtgg

SEQ ID NO: 70710 - DNA, 1480 bp, Glycine max
  Clone ID: PAT_MRT3847_34862C.1
agctcgggatcggtcgcatcattaaccaaaaaaaaaacatcaaaattaaaagaagcaagcatgggggaatccaatgtcatgaccaagactgaggatggtgcttgtctgtctgcaatgctgcttagtactaatctagtgtaccctgcagtactgaatgctgctattgagctcaacttgtttgagatcattgctaaggcaacaccagctggttcttttatgtcatcccatgaaattgcttctaagctcccaacacaacaccctgacctgcctaataggcttgaccgcatgctgcgtttgcttgctagttattctgttcttactacttccactcgcaccacacaccatggtgccactgaaacagtttatggactctcacaagttggacaatactttgtccctgacggaactaggggctacttggcttcattcacagcatttgtctgttatccaccactcttacaagtttggtcagtgattttaactcctatatacgtatatcacatagaggacaggtgtatgtatgtatgtatgtatgtgttgcattttgaaaagaaaaataatcattattcgactctaatacattttaaaatgaaaaaaactttctttgctccaatgttcttaactttccaggctgaactctaagaatgccatggtgagatgcgggaatttcattgttcaagaaaattcatggggtaacaatgtaccagtacatggaaaacgatccaaaaatgaaccaaatctttaacaagtcaatggccaacttgtgtgcaacagagatgagtagaatacttgaaatatacactggatttgagggaatatcaacattggttgacgtaggaggtggaaatggacaaaatctaaaaatgataatctccaaataccctttaattaaaggaattaactttgatcttccccaagtgattgaaaatgcaccaccccttccagggattgagcatgttggaggcgatatgtttgcaagagttccacagggtgacgccataatactgaaggctgtatgccacaattggtcagacgaaaaatgcatagaatttctgaggaattgtcacaaagcattgtctccaaatgggaaggtgattgtggtggagttcatattgccagaagaacccgaaccaactgaagaatcccagcttgtttccactcttgacaacctcatgtttatcactgttggtggaagggaaagaactcagaaacaatatgagactttgtgtaagctctctggattttcaaattttcaagttgcttgtcgtgccttctctagtctgggagtgatggaattttacaaatagcttagaattttaagataaaagtattaagagcaaactgataataaagaccttcatgtgagctcaaggtcaccactttcttgttgtactttccactttcatgtgatgtaacgtttatgcatattaaaataaattgattttggtttaaaaaaaaaaaatttaaaacccccctaact

SEQ ID NO: 70711 - DNA, 382 bp, Glycine max
  unsure (1)..(382): unsure at all n locations
  Clone ID: PAT_MRT3847_34863C.1
cctcgtgccgaattcggcgcgtggcgcctcgaggcctcgtgccgttttggcgcggtaaataccctgaaatggctgtcgtgcatgatttacttttctgattgcaaggagaggaaaatgcagaagaaagttgatgaggaatcaggtaaagatcttgcaaaatgattcattgaagaatggaacttggagataatttgctgttatgtagtgataaatttgtttttatgtggagttagtgatgagaatttgaataatgtacaagatgtgtagagtgggaaatatttatacttccatttgccaaaaggaatgtaggacttctgaacttttgatcaggaataaattgtgaacaaatgatttacgtcaaaanaaaaaaaaaaaaaaaaaa

SEQ ID NO: 70712 - DNA, 225 bp, Glycine max
  Clone ID: PAT_MRT3847_34864C.1
aaaggggggggcttttttttttaaaaccatggggggttttacccatgtttgggcaattgcaagcaaccccaaggggggggggtcatatatataatataacatcccctccattttacatgttacaccatatttcccaaataatttcctttattaagttttgggccatatcctagaaattaaaaatgcccgagccaaataaaattttttgctccctaaccagcccaa

SEQ ID NO: 70713 - DNA, 244 bp, Glycine max
  Clone ID: PAT_MRT3847_34865C.1
ctcgagccggctagaaagaaaaaaacaatataggtacactatctttgggttggatcggaatccgaaccttataatttagtctttgcataccttcactactacaataaagtgctttaacgacacactaactacgacagttaagaagaaaacgttgttgaaagatacacggtgacattatagtaattttgacgaaaatatacaacgatggtcgtttaataaccaccttcattactagcaataagga

SEQ ID NO: 70714 - DNA, 1432 bp, Glycine max
  Clone ID: PAT_MRT3847_34866C.1
gtgaattcgtgattttttccgaaaaccctcgtcttcgaaatcagcaacaaaaacgcgaagtgtactaagcgaagccattgcagcgtgagaatggggaagaaggcaaaagggtcaaggaagggtaagaaggcatggagagctaacatcagcaccgaagagatcgaagatttcttcgagaaatcaacgaaggacgctctttctggtggctctctacaagccgtttcttccgattctctcttctatgaagacaagtccaaagatcttgctgtgaagaagaagatcgagaaacatagggagagggtgctccgatgtgatagcctgctacagaaaaatcagtttgttaagccagtgccatcttctattctgaagaagtgttctaaaaaccgtaatgtggcctctaaatccaatttgaaagtggccaatcaagatggtgataaggatgattctgccatgtttgatctatgggatgataaaggcaaggatgacaagaaggtgaaaaaggtagcaaagcctactcttatcccagcagtagagattgatcccccaggctgctctttcaatccctcatatgaaagtcaccaggatacattggcttctgccgttgcagaagtaatgcaaaaaatctacaaaaatgaactgggccctgaacccgtgcctttaactgttcctggagaagctatcgccgaagaagatatgtattttcttgatgtggacaataggagtgacaacgatgaaagtactcctgaaaatgaggatgatgatgcattggagaaaaagcctattaaaactaagagagttactagagttgaattgaataagagagctaggcggaaagaacaacagagaaaagaagcagaagctaagaagataaaggaattgtctaaggaaattgatagcataccagaaattgttcaggaaattgagcatgaagacgaggaaaagaagaaaagacaccttaggcgtcaagttgctaaacaggagatgttaaagacacgcccaccacgcttaggaaaacacaagtttgaacctgcacctgttcaagttttattaagtgaagagataactggatccattcggaagctcaagggttgctgcacccttataaaggaccgatataaaagcatagaaaaaagaggattgattgttccagcaaaaaggaggaattagagttctgaaggtgttatggaaagaaaagaagtgatggatggaagacccagatagtttttctaaaggaagatcttgtttgttccgtgtttaattaacttaattttgacatatatcattctccatttttgtttttttataacaattttgtttggaaagcgaaatgtctacatgcttagaactcacttgtttttgcatccttgtattactaggggtatattcaatcaggattttaaagatttttttaatagaaaatattgtggtattt

SEQ ID NO: 70715 - DNA, 1590 bp, Glycine max
  Clone ID: PAT_MRT3847_34867C.1
cggctcgagacgacagaaggggatagcataacaataacatacataaaccttgttatgttctgccgccaccagcaggatcgcgtattcgtgattgtttccgaaaacccttgtctctgaaatcaacaccaaaatcgtgaagtgtactaagcgaagccattgcaggcgtgagaatggggaagaaagcaaaagggtcaaggaagggtaagaaggcatggagggctaacatcagcaccgaagagatcgaagatttcttcgagaaatcaacaaaggacgctctttctggtggctctctccaagccgtttctagcgattccctcttttatgaagacaagtccaaagatcttgcggtgaagaagaagattgaggagcatagggagagagtgctccgatgtgatagcctgctacagaaaaaccagtttgttaagcctgtgccatcttctattctgaagaagtgttctaaaaaccgtaatgtggcctctaaatctaacatgaaagaggtcaatcaagatggtgataaggatgattctgtcgtgtttggtctatggggtgataaaggtgaggataacaagaaggtgaaaaaggtatcaaaacctgctcttattccagcagtagaggttgatccaccaggctgctctttcaatccctcacatgaaagtcaccaggatacattagcttctgctgttgcggaagaaatgcaaaaaatctacaaaaatgaattgggccctgaaccagtgccattaactgttcctggagaagctattgctgaagaagatatgtattttcttgatgtggacaatgggagtgacaatgatgaaagtactcttgaaaatgagggtgaaaatgaagatggcacattggagaaaaagcccattaaaacaaagagagtaactagagttgagttgaataagagagctaggcggaaagaacagcagagaaaagaaggagaagctaaaaagatgaaggaattgtcaaaggaaattgatagcataccggaaattattcagggaattgaggaagaagatgaggaaaagaagaaaagacatcttaggcgacaagttgctaaacaggagatgttaaagacacgcccaccccgcttaggaaagcacaagtttgagccctgcacctgttcaagttttattaagtgaagagataactggatccattcggaagctcaagggttgctgcacccttataaaggatagatataaaagcatagaaaaaagaggattgattgctccagcaaaaagaagaaggaattagagttgttgttggctaccaaacttatgtcgctccaaaaattctggaggcgttgatgtatggtaagaagagaaggtgatggatgaaatgaatacctataaagtttttctaaaggaagatcatgtttctcaattgtttggcctaatatatgtgtattatttttaatgtcaatttatttagtaagtggaaatgtccacatgtattagaactcctttttgcatcgttatattgctaaagattttgttcagtgttatttaataattttagacatcaaatatccaattgaatttttttatgcctccaagatgaggaagttgaaaaaaaaaaaaaaaa

SEQ ID NO: 70716 - DNA, 233 bp, Glycine max
  Clone ID: PAT_MRT3847_34868C.1
gtgggcctcgagctcaaagccaacattcgtcactaccttctccttgttactgttcccaaataacatcaacccactaggacttgcggttccaataggaatgtcagaggcacttcaaattgaaggcacctactgaacccatgtaccaaaacactcactataatcatgtcttatactatgaaccttggttttcttatatactatgcgctcaataccctatcatgctttattataac

SEQ ID NO: 70717 - DNA, 535 bp, Glycine max
  Clone ID: PAT_MRT3847_34869C.1
tcttgactttgttttggaggaagacttgctacagcctatgaaacctgagattgatgttggtgatttgaaaaggagagtgagtatgtttaatgatggaatgtttatagaaaagaaggagaaaacaaaggaagcatttgtcaataggctttctcagttctctggaccatccgatcatagaaaagaaatcaacttgaacaaagcaattacagaagcacggactgcagatgatgtgttagaggttacttatgaaacgattgttgcagttgcaaagggcctaagtccctcacctctatccccattgaatatcgccactgctcttcatcggattgctaagaatatggagaaggtttctatgatgaggactcgaagactggcgtttgctcgccaaagagagatgtctatgcttgtgagcattgcgatgacagccttacctgaatgctcagctcaaggagtctctaacatatcttgggctttgtccaaaattggaggcgagctgctttatctttcagaaatggatagaattgccgaggttgcg

SEQ ID NO: 70718 - DNA, 578 bp, Glycine max
  Clone ID: PAT_MRT3847_3486C.1
aaccggggaaccaacagtttttttacaaaaaaaaaaaggggggaaaaaaagccccccttttttttccaaaaaaaggaaaaggtaaagctaaagccctgggtttgacttatgggtaattttaaaagcctggaaaaaaaaagggcaaatactaaatactaaacccaggaaacaaacccccccaggaaaaaaaaaaacttattagaaaccccaggcccaaaggacatgatcttcctcaggaaacccaaaattacaaaaactttggggggggggggagaaaaccaaatttttttaaagttgggaaaaaagggccaaaggggaaaaaccctgggggggggtatttttttaatttggggacaaattggagggaccgggcccaaacccaaaaaaaaaatccccctgctctaacagggcaaagggaaccccctggggggaagggggactattggaaaccaaaagggccctccttggggaacggaaattttccgggtaacaacccccaacaaaaaaaaaaacttgggatccttccccctccgaaacggattgcagaaaaagcctttgggggggttcctgttcctgaa

SEQ ID NO: 70719 - DNA, 228 bp, Glycine max
  Clone ID: PAT_MRT3847_34870C.1
aacaagagaagcattaactgacgctagaagctctagacggcgcatatatggcctgttgggtgatgtcttccgtggccctcaatcctgcccgtctcagtgttgagacgtactcagttagagggcgatcatccctctcaatggaactcctgttcattcaaagtcgcgtccattggtgacaagatgatcaatacctacatgcgatagtaaactcatggtggcatacctttg

SEQ ID NO: 70720 - DNA, 1049 bp, Glycine max
  Clone ID: PAT_MRT3847_34871C.1
atctcatgttctgatcccggtccacgctgtccatgtacagtacatgaacatgaaaatttctttcttggttttcaatatgtacaaaaagacttaggatggctacatttctgattgatgagacgctacaagagaaaaatgtgtacaaataatctacgttggtttcaagatgcaagtttcattgccttgtccctcaagcacgttcctcaatatcctctttcatttgcaaatgtttttatcaaatggaacacatccagtaaatgtcatgaactagtgcagttccattgctgtcatgaactagtgcagcaaatgttcatctcttgatgacttgatagttacttgcttctatgaagaaccccttatgatttccataatctgcttatatcgcggccaaataccacagttgtaatccagttgacaaatacatagaatctgttcctccagctgataacacgcgtgatgtatgccgagcgcctaataaaaaaactcagatatcctgcctgtgccaacccttttgcctccttggtctgtctaagatcaacaagggccttatatctaccaatagttgccatgcttccaaggtgcctataaacaaatggatccccaaactctatttcttttgcactgtttgcatggcctgcacctgcttttccaattttgtttagtagagctgctaaatatttaccttgcctctctgcaacttgggctaatgcaggaagtgtttgtcttccagtactttcaacaaatccactgcagtctcctattgagaacacatcttgtaccgaaggaacacggagccactcatcaacaccaatcctcccaccaggagcttttgggagatccaaagattgaatcataggcaatggaccaacaccagtggaccataccaacaacccgtatggaacctcagagccatcattaagggaaatcttctgaggtttaacatctttcacaatgccacgaacaagacgaactcctgactttgtcaattgcttggtagcatagcgcctaagccggtcatcaaaggaagacaatatctcatttgcctcaat

SEQ ID NO: 70721 - DNA, 389 bp, Glycine max
  Clone ID: PAT_MRT3847_34872C.1
tccacgagctgctagtctacggccgccctttctttactttattaaaaaatgtaacatcatcccatctatgtatctatatctaggggaacgtcatatttgacattgaaattaaaaggacagacagcactattatgtcatgaaggagttcataaaaaagaaaatgatcggattacattcaggtaagaaggagcaaaaagaaaaaagaaaaagaaaggtcttaaacggatgttgatcacatgtgacatcagactacctgcacgcttcttcccgtttaagattagaaaagctgaaagcctcttggtttcaaatcttgatcaccactgcttatcatttttactcttgcaagatcagtatccagcatacctcgagccccaatctcagacttactt

SEQ ID NO: 70722 - DNA, 379 bp, Glycine max
  Clone ID: PAT_MRT3847_34873C.1
aaaggaaatttttttttttcaaacctaaggaaaccctggaaccccttttcccaaacttgtggacccctggcaaaaaaaaaaacccttatccctaaactccaacaccagggggaggttggttatttaaaaaccaaactcctaaaatttttcagggccccccggggaaaaccccctgatggggagccaaggggtgggcccaaacggggggttcccccccataatgcaaccaaaggcttaacccttatataagaataattttttaaaaaaaagggagcctaaggaaataaaaaaaaaaaaggcttttcaacatgacatgaaaaagggggggcctaatgatccccccaaggaggaccatttttaaactggggttttttccccc

SEQ ID NO: 70723 - DNA, 113 bp, Glycine max
  Clone ID: PAT_MRT3847_34874C.1
gttcgtaagtcgtcgcgacttcgtctgcagagatcgaggcggatggcgaccggtcaaagcatgcgtatgtttgcatgcgatatacatttggctgagacccgagtcttaccgtg

SEQ ID NO: 70724 - DNA, 531 bp, Glycine max
  Clone ID: PAT_MRT3847_34875C.1
tttttggggtttttttaattttttttttgttttttttagggacttcatagcttatagccaaacaataataaaaactacacaggctttgttcaattcctgcacataaaaccgttcctgttgctgtaaaagtgcaaactcaaaatgatgttaaaagaattatgtcaaggggtaatgccatgcagctgtgcaaatgataccttatagggcaaaagagttacgtgagacatatagctaattactagccagtacttgaaccaacaaataaaagtgaaaaccgttgtgagacatatcgatgtatctaggccattgcattggcatttttcacttactccaaattactctttacattttcattactaagaagcacaccttaagtcagcaattggttctgtatttgctacttccatattttaccctcaatgtgcaagcctctctatacttgctaatcacagtaactatctacgtatgtgttccccatgcgaatgacagcagaattccaaaaatcatcacatgcctaatatacatgcaaca

SEQ ID NO: 70725 - DNA, 268 bp, Glycine max
  Clone ID: PAT_MRT3847_34876C.1
aatgattagcttttcttacacttagttgttttcctatgtgcagcatcgctatgattacgatggtcatgtaagtcgcctttttttcctaagttattctctctaatgcttaattaaattcattgaaatataggtgacattttggtgatcaatctcctaatttgttcaccttaattcatttttgaatcacaactttacatgtcactgcattaattaaaaaaaaattaagttgagaaagaagttgtcagcacgtggttgaggaatgagtgtg

SEQ ID NO: 70726 - DNA, 417 bp, Glycine max
  Clone ID: PAT_MRT3847_34877C.1
ggctcgagaagtaacaatctcattcttgctttattgaggcctgtcatgcgattcacaatgcttcaactgttgaagaatttgagatctcattcccaaggaagggcgatcagtgacgctgatatcctgtactggctgaacttaccaatgaacaacagagttagaacttctcacatctagagcttcgagcagaagagcttgactactgaactcttgacacttgagcttctgagtgctgtctatcctaaggctgtccatctgcacctggtcatcatgggtctacgctatgatgagacgaggttgaacgcctcttatatatacagcgttgcacactagctgcggcgttctatacacgtgatacctcatgatattacggcggttaagcagatgatgatcctcactcttgcggtcagcataatg

SEQ ID NO: 70727 - DNA, 170 bp, Glycine max
  Clone ID: PAT_MRT3847_34878C.1
cttacatggctctgcatttgacatttgagaaaggaatggtggaactttcattctgggattgtgtggggtcaagagaggagatagccagactgtcatagtttagataataggtgcgtgcctaacggtacatgaataggtcccatctgtggcaattagctctgcagatgcga

SEQ ID NO: 70728 - DNA, 448 bp, Glycine max
  unsure (1)..(448): unsure at all n locations
  Clone ID: PAT_MRT3847_34879C.1
taattcccgtnntttctcgggggctttttcccctctcttccttcgttctcccctttttttttccattcttttataatgaaaagggatttaagggaaaaaaatagatcatactaataacggaatcctcatctcattctataaacattacaacgaggtaactagaacttatattttaagcttctttctaggggctggggcattaacaaaaagggtacccctggcaccataaagagaactttaccatcttctgtctggcaaggatcttatttgatcttgtgcaaaacattatggagcttttggaaccaagcgggtgcggggggcgacttccggccatattggcatcttcacaccgaactggaaagcagctattggcattgcttcctcttagtcaatgaaaggtgcccagtccttttcagtttcaaagtcccatttatgaagacaacccttt

SEQ ID NO: 70729 - DNA, 396 bp, Glycine max
  Clone ID: PAT_MRT3847_3487C.1
tatgtaacgtaattagactaataataaacttgtgatgatgttaggtgaacattgcgatatactaactcatttcaatatagtgtaacattatacactgaatttgagtggaatgcaatttcctactggagggaattgtaaaacaaaatcagaacaactgaaatacctataataatagggaaagcccagcaaatctctctatgcaaaagccactgacactggaattgatccagaattggctgcaaagaaactgaacattgattgggattctgctgctgaaattgaagagacaaatgcagatgatgagacagaagtgccttcagtggtggtcagttcttaacctgccttacagattctggtttaatgattagccagtctcagacccttgaagattccaac

SEQ ID NO: 70730 - DNA, 338 bp, Glycine max
  unsure (1)..(338): unsure at all n locations
  Clone ID: PAT_MRT3847_34880C.1
cgtttacatagctatttttaccaatacaacanccataanaaagaaagaggccttattaagacaagtaatcctaacaaacagctcctcttcaaagcatttttatgcatgtaaatgaacaaaatcagaaccacattccggtcaaaatatctatccaatatacagttgtggaactaataatagctttgaaatattgatttctgagtagccaaatcaaactttataatcatttgaatttccatatcccaataccaaacagtctacattttttaattatctataataaatctctcaagaactctaaaaatagcaaactaatacttcttttgccacctttattt

SEQ ID NO: 70731 - DNA, 223 bp, Glycine max
  Clone ID: PAT_MRT3847_34881C.1
gttaacaaaagcgcttttccaggcgcaaattatgctaggaatggtgcaagcgccttaaacggttccaaaagttcggccaatggtggcgcagaacagagtgtagtctatgtagccaacacaaaaaccaagtattcagcatgctccattaatgtctgagctaggtggtgcacaggatcaagcatgtgtatttgaaaccataattcctctgtggaaacatcgaagc

SEQ ID NO: 70732 - DNA, 1153 bp, Glycine max
  Clone ID: PAT_MRT3847_34882C.1
caaagtttgatttttattttaaaatcctcaattttatagtttgtgtgtgagagagaaagatttgccctatcaaacttttcttaattgttagcattattataagtaccctatcatctttaagatattaagttagtattaatagtattagtatgttactatttgacatattttttcttgattttggttaaagtttgaagatggtgactgttttgttttgtctatatcttttgttgcattgaagcggctgaaggagacagtaaaatgattgttggtgggtcagttaaccctcaaaacaatacacaattctcagctgctttattaggaggtgatgtagaagatcatgctgtgaacggaggtagcaatggcgatgatgctttgactataaataatttgctatccgatctagcaaggggaagaagactactttgataaagaattacagtgggcgggagttccaggccattaagcgtaagagacaagatgacgattggtcggataaactaaaggacctgaaaaaaagagttattgatgtgaaaaactcactgcatcagtctgggtcgactaatgaaatgcccaagccttctgaattgcatgctaagtttatttatttattgatagagaagctttgggagttgcgagatgaaaatgtgaagaagatgtgggatcttctggaggatgaggaacgcttcattattggcatagatggaatggggggagttggaaaaacatgccatggccacttcatttcaagaatgagattaaaagaaaggggcactttcaaggatgtgttctgggtcactgtttcccatgatttcaccaatttcaaattgcaacatgacattgcagaaacaatacaggttaagctttacggagatgagatgactagagcaacaattttgacgtcagagttggagaaaagagaaaaagcactgcttattttggatgatgtttgggaatatattgatctgcaaaaggtggggattcctcttaaagtgaatggcattaaattgattatcacaactcgtttgaaacatgtgtgtctacagatggattgccacccatataatataataacaatattcccctttgaagaagtagaagaacaagcttgggagttatttctgctaaaacttggacaccgtggaacacctgc

SEQ ID NO: 70733 - DNA, 1001 bp, Glycine max
  Clone ID: PAT_MRT3847_34883C.1
tattcccgactttttctatatacttttgaattgtctcctcccttttcaccccctcccccctcaaaaaatctaaagacacaaaacaccctcctatactctataatggtttcttctaagatcttcttcctttttctcctctttctagcacaccttcatcaacatgcatctgtggaaggagattccagtttgataaagagaacttgcaagaacaccaagtactacaatctatgcttctcttccctcaaatctgatccaagcagtccaaacgcagatcctaagggcctagctgtgatcatgattggaataggaatgaccaatgccacttccacatcctcctacttgtcttcaaagttgcctaccccctccaacaacacaaccttgaaaagggtcctcaaggagtgtgctgataagtactcctatgctggtgatgccctccaagattcggttcaggatttggctaatgaggcttatgactatgcttacatgcacatcactgccgccaaagattacccaaatgcttgccacaacgctttcaaacggtaccctggtttggtttatcctcgtgatcttgctcgtagagaagatggtttgaagcatatatgtgatgtggcaatggggattatagataatcttgattggtaggtgcatgcatttgagtatatagcttccagtttgttatgcaaaccatgttatatctctggtgttatgtttggctaccttgtatcttgttaattatgttcttggtataatatattggacataaatgttttagtctttttgaatttaaataacgagcttaaggtatttatttatggaccaaaatttgtaattattaaaaatattcccccttatatactcattttgacaaattttaacatccaatatcaaaatcaatcagtgcaatacagtactcaattcattgaataaagtatgcgaggatttgttgtaagtcttctcgtacctacctgtctttgatttttaaattaaaaagattgtgcaat

SEQ ID NO: 70734 - DNA, 248 bp, Glycine max
  Clone ID: PAT_MRT3847_34884C.1
ggaagacgaagattgcattaatacaggctacgtgacatgtaggccatgcaggatgtcaccatttctataccacccgtgatggtcgccacttaacacttctgacatggtccgacgtgatataattttgccagccatgtttcctgttattcccgtcaccatgtgcccgaaatagcatcgttatgaaatggtcgttcgacactcattcacttttgatcccaccccctggatctgatgttcgaatccggaat

SEQ ID NO: 70735 - DNA, 977 bp, Glycine max
  Clone ID: PAT_MRT3847_34885C.1
tgctcgggtgcctgctgcagaagctttctcccaattcgggatttcaaaagaggaatacggctgcgagaagacgacagaaggggacagcacaaaaaataaagttgtcaacatcgctcctctcattcttccccccaaagaaaacatggctcctctcccgccagtgtaagctagattattagttttttagtgaggtgctgctgaaatccctaattcgactttccacttgattacgatcccttcacccttcttaggatggcaaatgctgcagaagatttctcccaattcgggatttcaaaggaggaaaaggataagcttgttggggaattgattaggtacatgcttttcaaaacccatcaaaattcagggtgccccattaagagagaggaactcactcaacttgttacgaagaactatcatcagcgtaaccttcctacctttgtgatcaatgaggctaaggagaagctttcctttgtatttggctatgaaatgagggagcttcaaagggcccacccttcttccaaagcccagacacggtcctcccaacaaagtgttgcggattcgaaatcatatattctcataagtcaacttcctcctaatgtatatgaaaaatatgttgtggatgttaatactgcgcatctatccggattcacttttgtgataattagtattgtatatcttgctggtggtaaaattccagaagaaaatctatggagccaaatgaggaggatgggtttgggtgaaactggatacaagtcatccagtccttggaaatgttaagcaagcattggaacttcttgttcagcaaaggtatttacagagagacgaagttaatggtcctgaaggcaataccgtatattatgagcttgccgagagagctttagatggacccatgaacgacagggttaaggaatatatctctccttaatttcatgtatgttagaaagtaactaattgttacttttttgtttagatgcttg

SEQ ID NO: 70736 - DNA, 382 bp, Glycine max
  Clone ID: PAT_MRT3847_34886C.1
cgcaaaaacacctaactgttcatacactctctctaccagatcatgtaacaacaactatttctgttacacagacaagctagaacgaatgacagccacactaagccagaagcgctacccttttacgcagagagagctatagctggactaggattaaaccgcatgatgctgcatcaggagagccttacagtgtagccagtggatagggaatgagagttagacaaggaagccaagacgaggctgatcaagctgttgagcgagatagctgaactaggagccgtagccatactcagatattacagagctatcgtgcagagctggatacgagtcgattcatatactgtcaaccttattgaaaggatcagcaccggtggtcttcactggg

SEQ ID NO: 70737 - DNA, 297 bp, Glycine max
  Clone ID: PAT_MRT3847_34887C.1
ggaagcccaaaataaaatttttggcactttattccataaggccgggccacttaattttttggaacgcttataagctaaacaaaaaagggataatccttatattcttccattcttggttccggctttatttaatataacattttcactgacacacacatggattttttcactcaaaaacccgtcgcatgccgggagaaaaaacccatgaatatttgcagcttttgttaaaaagggtttcggacaagcgcttgtaagggcccccccaaacccgctgggaaaaggaagttagcttgggcc

SEQ ID NO: 70738 - DNA, 1158 bp, Glycine max
  Clone ID: PAT_MRT3847_34888C.1
ttccacgcttccgttgaaagccaatctaactgaactggaatcacgtcatagcaataattatactgaggaagagttacattctgtaaaaaagttatctaaaaagttacctcccatacaagaagcaccaaagagttatactccatatatcaagtacaccaagcttcaatttaaggttgatacattctttgccgttggatcccctcttggtgtatttcttgcacttcgtaatatccgaattggcattggtagaggccaagaatattgggagcaggaaaatataagagaggagatgccggcttgtcggcagatgttcaacatttttcacccctatgatcccgtagcatacaggatagagccacttgtgtgcaaagaatacatcagccaacggcctgttttgattccatatcacagaggaggaaaaaggttgcatattggatttcaggaatttactgaagacctagcagttcgaactcatgcaataaagaattatatgaaatctgcaagggataaggtaatcacagtgtgtcagtcgaggaaaatggagaacatagaaggggagagttctgaagaggaagaacagccatcatatggatcttttatgatggagaggttgacaggaagcatgagtggacgaattgatcacatgcttcaggacaagacctttgagcatccatatctgcaagccattggagctcatacaaactattggcgggattatgatactgctcttttcatattgaaacacttgtatggagaaataccagaagattctgatttgttggttggatttactggggacaactcaaaatctgagagtacctctgttagttggtatgaaccgagagacacggttgaggaagatcttccgttgactttttcagacaaggttatggccagaagcttctcgagcaaagctaagaaggttctgcagaagcacactgcgtttaatttttaaatgcctatacacgatgtaatcgagagattgtgtaatctacggaagaatgtatagtagaagaagggttccccatcttaggattgtttcatatagttcgctagtgtacaattagaccctcctccaatgtacataaccaggggtgttaaagaaaaaacatcttttagtatcaatatatgagaaccgcatagtacctggtgttggcg

SEQ ID NO: 70739 - DNA, 586 bp, Glycine max
  Clone ID: PAT_MRT3847_34889C.1
tgccactatcgaggaccgcggcgcagtttatatccggggcgacgcgcgcatctctacggcgggcgcgctctttttttttttttactcaaaaattaccaaagcacatgcgactgctcctttataatcatagacgtacagacatcatagaagaccagaaaaaatgtgatataaacgatgcgaccacatccataatcaccattggaaagactggctatgaccagaagggtatccagccatattgcccggtgctatgcacactacacaatactcccgagacttgcactagggatgaaccgcgtaaactgatacaactggctgacagcctcaaaagctacatcttaaggcccactctgacttcagggcgcctatcatgagatgacgcatatctgacatgagagacgctacaagatgctagtcctcaataaaatcaccctatatatgagtgtgccaactctcatcagtgggaagctagaagaaattcttggcgtacccatattcagcaagctgactttagaatccaccctgagcagtgtgactgagctggtcatgagcacgattacatgaggacacattcaggacttagaag

SEQ ID NO: 70740 - DNA, 614 bp, Glycine max
  Clone ID: PAT_MRT3847_3488C.1
tatataccaatactagctagtagctagagagtagagaacatggagggcaaaggtttcacggaagagcaagaagctctggtggtgaaatcatggaacgaaatgaagaagaattctcaagaactcggtcttaaatttttcaagaaaatattggagattgctccagcagctcagcaattgttctcattcttgaaggattcaactgttcctttggaggaaaaccccaagctcaagccccatgccatggctgtctttgtcatggtaacaaagttggcactattggagaccataaaagaagcagtgcctgaaatgtggtcaccagccatgaagaatgcatgggaagaagctcatgatcagctggccgaagccatcaaatctgaaatgaagccctctgattagactctagtagttgctttctctcaaattgaataagattgatagggtggtggtgtttgggtctgtgcttctcgtttgtatgaattttaataatgtatctatgttgctattggggttgctatgtcggaaagtgttcacattttaacaattcagttattgaaggtgatgtgaattgtaaggaaagggaaaatgataaatgcatggatggtatgaattgttac

SEQ ID NO: 70741 - DNA, 235 bp, Glycine max
  Clone ID: PAT_MRT3847_34890C.1
ctcatgtaagacaggcctaaatttgatgacgaattgtacgtatgagtacaattacaggcaaaatgatttgctatcagtgttgcgagtatgcttatatctactgttgctgcagacatgtatcttgctcttgatgaagatgcgacatgtatacattaagcacacccgagcttggatactctccatacgacacgctatctgatattgctagcgagagattatatcatacactggcact

SEQ ID NO: 70742 - DNA, 465 bp, Glycine max
  Clone ID: PAT_MRT3847_34891C.1
aaaaaaaaatctttccctttttttaatcaaattaaacctgtttaagtttttggtggctcactaagcattttataaagggcgttgcttttgggtttggtttataaaaaaaataaacttgggtttattacaaaaatggaacttggtttttaagggccttttggcccctttaaagggaaggggggggatttgggggcccctgcttaaattaaaaaccttataccttttttaaaaaaaaggccaaacctaaaataaattaccccttttttttgtttgggaaaataaataacccctggcttttgggggccttaaccctcgggggtgcaatacaaataatggcccgggaaaaccatttttcactcaatccttggatcttggagggaaaccccaaatgagttccttttttttggcgttacccagataccacccgggccttggacatgattttttaccccctgggccaattac

SEQ ID NO: 70743 - DNA, 218 bp, Glycine max
  Clone ID: PAT_MRT3847_34892C.1
cggctcaagctgcgatacccagtatatgagaatagaaagatatgcccatacctatccccccgaaaattgagagatccatgtgcacatccctgctaaatgggtgcttcggcatcggtcacagaaaaatctatccatgagttcatggtcaaatatgctaagggcagagacgtcaccttcagcaccaataaagggctggttatccctgtggtttacgtcgc

SEQ ID NO: 70744 - DNA, 597 bp, Glycine max
  Clone ID: PAT_MRT3847_34893C.1
aaaatttttaaggaaaatgtttcactactgtacaagatgtcagaggatttcaatgctacttcattaaaacattcatgtagtctgtttatgcaggattaatttgtcccccggagatgtgaacctcggcacggtcctctggttcgtcacattttaccagacatatgcatgttcttctcaactttacttgtcaaatctcatccaactgattcgtgagaatccctagattttagccatgacaggaagaaagttgaaaatgtacaaagctgtaaatgttagttagatatagaaatcactgatcattattttttagcatgtggtgggggaatagtcattgtttgagattgagtaatgataggcagatatatataaaatggccatttaataaagtattcaaagtgagaatacctgaaagttaaatattaaatgaccatgtcttttgaaggaactaccattgaaagttaggcactaattagttttggccttttggggtgcacctaagccaaaatcccctgccaaattcataaacttgttgtctcatgtgtgaacaattgggcatttttgtaacaagaacacagttaatagcccccagtttggtca

SEQ ID NO: 70745 - DNA, 376 bp, Glycine max
  Clone ID: PAT_MRT3847_34894C.1
tacggctgcgagaagacgacagaagggaacccattgagcttagatgctttactagtgcttctggcatgatttttccatttttcccttaaataaattctggaagctatacattaacaacttcttgcagataccagaatgcagactggagactacgtccacttcctgatgagatgataaggtatgattaacttttaactagtcagatttgacacttgattcatcatttttttcaccctttgtcttctttttgcactattggattttaaatgtgtttggtttcctaaaatatactggagctaattaatgagtattctagttttgcgtgattgtttagcatactaggaatctatagaatctggtaatccttgttttgatt

SEQ ID NO: 70746 - DNA, 636 bp, Glycine max
  Clone ID: PAT_MRT3847_34895C.1
tacttctcccacctagtaagaaatagaaataaagaaaaaaggttaagaagttaacatcattaactcatttgacaaaagtgtatcttttttttcttctttttctttgcttattcttcccactaaccccatggctctacaccaacattttataaatggtttccaaccatgattttagcctcaacatcaaggtttttagagtttttgtgatcatataactattgtaattatgattgtatatataaactatattatttgtctgtaatttcatacaacatcaaagatttcagctagtcattgaagttccgtaatcatgtttgtctatacttgtttgtaatatcgattatcgtgacaaaatcgagactgtaactacaatttaaaaaatcttgatttcagccacaattttaaggtatttgaggtcttctttacaatcacacatgactgtaattgtaattacgccaattgaatttatctataattttatgtgatatcaattatcgtgacaaaagtgagactgtaactacaatttaaaatcttgatctcgacgaaattgcaaacgcgaccacgtttgcaatttataaccctcctatccactctctttaattgttctgccatttggtacactgtttcacccttttc

SEQ ID NO: 70747 - DNA, 975 bp, Glycine max
  Clone ID: PAT_MRT3847_34896C.1
ccacgcgtccgaaacgaacaacacaacccatttggatctctcttctttctttgatctccaatacacccttttcgttttttaacacttctctccacagagaaaaggagaaaagtgccgatcacgtgtcttgtgtggtcatcgatggcagcagcacctgcgattgaataatattatttgcttaattgtcttttttctttttatttgggaattcaactgtagagtgggcttctgttgttgaaggtttggagcattgtttcttataacacgtgacttatcggttatcaccactcttaacgtagcttacgtgtttgattaaatgctttaatgtgctctaatttaggttgggaaagagaaaccagaactaaattgagcttcaagaaactggaaaccagaaactgagtaggataaatctccattaatctaattgaattgcttttgttgatatgagttcagattctgcaaacaaacattgaaagataatggacacaattctatggcttcgaaactcctcagcatatctccccttgcaaccaaaaaccaaaaggttacaactcctcaaatacccagatgctttgtcctcaagtttgtcaaatatctttgtttttcatcagctcttcaccctgaacactttgttaaccatgaccattgcttcaattcagactcattctatgcatctcttattgataattctacccacaagagacaccttgatcaaatacataaccgtttagttatctccgggctgcaacataatgggtttctcatgaccaaactggttaatgggagttcaaatcttggacaaatttgttatgctcgcaagctgtttgatgaattttgttaccctgacgtgtttatgtggaatgccatcattaggagttattcgaggactattttcagggacactgttgaaaggttagatggatgacatggataggagtccatccagatggatcacttttctcatgactaacagct

SEQ ID NO: 70748 - DNA, 839 bp, Glycine max
  Clone ID: PAT_MRT3847_34897C.1
gttgggcgttgttttaatttttttgcccgaaggagaatatttttttttttttacagcaaaacgtgcctacaagtttccatttttaagacccctttggagagattcattgcttattgttcagtatcaactattcattactgatatattgcattggggttgtatctgtgagtccaaggtgaatatcagatacaaagagagaaccacattgagctgaatttcaagaattccctaaatcatccatggagcctgttcttcttccaagtctagtaataatgcttgctcttgttctgtgctttgaatcacttcctagtgttagggctcagtctactactacttctcccgggtcatcttcaacaagggaagaagcaaaggctcttgatgcacttctccaacaatttgcttacaaggacttggtgaatccaaaaacaggtatcatttacaatgcaactcaacttccttccaatttgactgggattgaggttgcagcattgagattaaggagtggaagtctaaggagaaaagggttccaggcatacaatgagtttgaaattcccaagggactcattgtgagtccttatgtggaaaggcttgtgttggtgtaccaaaatctggataataggtccagcagttactactaccctttgcctaattatacttatttggctccagtgttgggactactagcttatgaaggttcaaacttgtcggctacaaatttatcagaactagacatagatgcatctgagagccctatattggtcaagtttacggatgtaaaaccagctcctcatggtgctgttgcaaaaagtatttggtttgatttgcaagggttcttccaa

SEQ ID NO: 70749 - DNA, 484 bp, Glycine max
  unsure (1)..(484): unsure at all n locations
  Clone ID: PAT_MRT3847_34898C.1
gatattttgatgaaccgcgagcataggttgccgcaccttataaccggaaacaaaagcaatcgctacttgattccaagaatgtctcaatttcttcctacttttttgtgtacgatttcgtaagggaaagaaaatcactctgtgtgctggccacagacttggtgactcattttgtttaccattcttagtttatttgctgaacactctgctatacgatataggacttggtgtcagacttaaacttcttctgaaactttttcagttctctgtttaattccaagttcaagctggagaaatcttggatgagagctcccactatcgtatctggtataggacttggtggagggactcttgtattgactctccttactttcactctcttcttctcactgatccgcatagccagtcacagtggccttatttgaaaaacacttggagcgaggcgcaatgtttgctanataattgtctctggagacacaggggcact

SEQ ID NO: 70750 - DNA, 731 bp, Glycine max
  Clone ID: PAT_MRT3847_3489C.1
tatataccaatactagctagtagctagagagtagagggagggcaaaggtttcacggaagagcaagaagctctggtggtgaaatcatggaacgaaatgaagaagaattctcaagaactcggtcttaaatttttcaagaaaatattggagattgctccagcagctcagcaattgttctcattcttgaaggattcaactgttcctttggaggaaaaccccaagctcaagccccatgccatggctgtctttgtcatgacgtgtgaatcagctgttcaactgaggaaagctggtaaagtcactgtgagggaatcaaacttgaaaagattaggtgctactcattttaaagccggtgtagcagctgagcatttcgaggtaacaaagttggcactattggagaccataaaagaagcagtgcctgaaatgtggtcaccagccatgaagaatgcatgggaagaagctcatgatcagctggccgaagccatcaaatctgaaatgaagccctctgattagactctagtagttgctttctctcaaattgaataagattgatagggtggtggtgtttgggtctgtgcttctcgtttgtatgaattttaataatgtatctatgttgctattggggttgctatgtcggaaagtgttcacattttaacaattcagttattgaaggtgatgtgaattgtaaggaaagggaaaatgataaatgcatggatggtatgaattgttacaattt

SEQ ID NO: 70751 - DNA, 1203 bp, Glycine max
  Clone ID: PAT_MRT3847_348C.1
gttggacttctaattttcctttttgcaccaccccccagatcctgcctcactcttcttccttcctaggatgctgctcatggcctctaccctccctttcccaacactttccattcttcctcacaaggcacactgcaaatcaacaccaaaacttcatccacttcctcacatctcttcaagattgaatgttgtttcaaaagatcctcccatattattagatcaatcttgcaatgttctaaaaaatgcctctctttccctcacatcaatcacactcccctttttattggaacaaaaggatgtggcacttgctgttgaaggggaatttgggatattggaaggaagaacatttgctctcatacaccccattgtgatggcttctttgttcttgtacaccttgtgggcaggatatttggggtggcagtggaggagagtgaggactattcagaatgagattaatgagttaaagaaacaagtgaagcctaccccagtcaccccagaagaagtgccaccaccatcagaaattgagctcaaaattcagcaacttactgaggagaggaaagagctgctaaaagggtcttacaaggataggcattataatgcaggatccatacttctaggatttggggtgcttgaggctgttggtggaggattgaacacttggattaggacagggaagctattcccaggcccacatttgtttggaggagcagctattgcagtgttgtgggcactttcagcagcattggtaccatcaatgcagagagggagtgaaacagcaagaagtcttcacattgctttgaatacattaaacgtgctgctatttgtgtcacagcttcccactggatttgacattttattgaaagtgtttgagttcacaaactggccttgaatgatgtttcccttagatgtactccaatttgcaacaccaaaatcaccccaatttcatagtttaagatcacactttttctttttcttgaataaggtgtagaagtgtgtttaattaaaagtgaaggagacgaatataaatgtcattgtaattaattgggtagttgtagagtagtgaaatcagattccaaaagtaacttcgggatttatggcaatgtaaatcgtttttattttcctcggtgacatgtctgtcgtcccttctccccttgctgcccctcctgatcccatacctctaaaactatcagctcctcttgcaactgg

SEQ ID NO: 70752 - DNA, 232 bp, Glycine max
  Clone ID: PAT_MRT3847_34900C.1
taccaaggctgatgcacatggaaagggaaaagccgtaaaggatactttcttggaatggagtaacactaccataccaaatctaccagcaggaaagtctgaattcaatattgattatgaatgggaccgtagcatgagaatccgcgcagcgtataacatgaagaactacatgcaagttgagggattactgacgagcttgactctagaagacatgatgaaccatggatggatgcga

SEQ ID NO: 70753 - DNA, 243 bp, Glycine max
  Clone ID: PAT_MRT3847_34901C.1
attcaattttcatttaccgccaaacgctctctctcacttcagcactgtgaaagtgccatggaagcagaagaacaatttgaacttcctcatcaatctcacgattctccggttcaaggcatggaacgagtggtggctacggtgagcggctaccatggctccgagcgattcaatctcatcaagctgatttcacaggctggcggcaattacgttggtgctatgtcgaaatctataatcatctggtgt

SEQ ID NO: 70754 - DNA, 178 bp, Glycine max
  Clone ID: PAT_MRT3847_34902C.1
aggggggaaggggtttgtggccgaaaaaaccccgggagaaaacaaggacaaatacaaggaataaaaaaggcctggctcttgtaaatccggcgccggaatccactttcctgagggaaagatccataggccgggggaacaaatgattcttaccaatggccctgacggggaaatcgcgagt

SEQ ID NO: 70755 - DNA, 419 bp, Glycine max
  Clone ID: PAT_MRT3847_34903C.1
atgattatgtgctcatgacaaatagctgatattgcatgttttttatgctataactatatgagcaatatagtatggaaagactgttaatttgtattgtccttattttatatgccctacgtccgatgaggtgtcattttgttctttatcgggattgaaatttcgacactttgtagtagggagttccctttaaattgtaatctctaactaactttcgtgtgttgactgtattgtatagcctcctaaactttttatacctattttctgcaacttcttaatgcataggaaatagatgactgcaccttgaagtattttacttttacttatatgccacttaaatttcactgtgtggctaaaattggtacttacctgagttggcactgcgaattctctgggttcactgcattatagtggcacaattc

SEQ ID NO: 70756 - DNA, 511 bp, Glycine max
  Clone ID: PAT_MRT3847_34904C.1
ggcagagagcttttgtgaataatttattgaagttaatgacatcctttggtattatattacttttcttttagttatgtagtatggatagtcaagaaatggaaagtagtatagttgatgctttggctgcttcaagaaaacgtacaagagatgaggaagaggaagaagaacttgaacaagcatttttcattattgttagtgttgccactatgcttttgagtgcactgacttggtatcatgacaagtactttgttaaggaacctgcccgaaatttggaattagaaagacatagtttcctcaatcgtctatataggggaacaaaaactgattgcattgaacaattaagggtcagtaaaaaggcatttttttaagctttgtggaattttacaagagaaaaaggcaattggtaaaaacaagaaatgttcccatagctgaagttgtggcaatgtttttgcatatccttgctcacaacctaaagtatagagttgtgcactttaattattgtagatccatg

SEQ ID NO: 70757 - DNA, 315 bp, Glycine max
  Clone ID: PAT_MRT3847_34905C.1
gacacaagttatgaatatataaggcccacttttttttacagtgaaaacagccgaaacgaagttgttaattatacattgccgagagaaatgggtaaaagatattgtcacccaagatttaataattggtctattcttagcctaagcaaaggccatcttgttgcgatagaaaggaatgagaataaatacgttttatctggtgacataaagagaccaactatcgctgcagaaactccatatgtttgatgtattgcaaaaaagccttaactgaacttgtttggtactgagatatttgtacgcccttagttcagaactgac

SEQ ID NO: 70758 - DNA, 266 bp, Glycine max
  Clone ID: PAT_MRT3847_34906C.1
aaagagctgatttatgaaccgtgttgttagcatcaatgttcaacacagtttcaaacgaaaagcttggtatgctaggatatgccttacaacaaagacactaagtgcacacaagggagactcctaccattaacataagccagggcgtcctacgtgataaggccaacctgacgctatacgacgcgcaagtcaccgaggcacaaatccagacggatctatccatgaccaagtgtgactgggatcatcctatccacttgcagcccacaagt

SEQ ID NO: 70759 - DNA, 309 bp, Glycine max
  Clone ID: PAT_MRT3847_34907C.1
tcggggaattataataatgcttatttcatattagctgcctgtgacttcttatgcataatttactgttatagaaatggaagctatactgtgaattgtcatgtaaattgtcccttttcattacttgattggtaactcggtactgtatcaaataagaggccatttgattgcggggctttgtataattgacaatatctacttgtagaagtcagattcgcgacacattgtatgagaattaggtcattacattgaaatttctgcgatgattggaatatcaatggaagaccttatactttgctatgacatatattg

SEQ ID NO: 70760 - DNA, 405 bp, Glycine max
  Clone ID: PAT_MRT3847_34908C.1
gggggaccgatactgaggaacaaaccctgagacgactgcgaaacgctgatgctctgattgaacaagggtgctcttatcaaatattcgatccggtgctataccatgacaatctagacgagtgtcatgagagactgatggtaaatgcttctgaaccaaaaacctccagagtcttttggatgtctcacgaccatatataatgctgatttaactgttatcacggtgcagaacctattggcacttgacagatacgtcactgctacacctatatcaagcgctgattctgatagtaataacctacatgtaacttcacaacaatttcaaaactcatgaacaaccactgatgtgttgaatgcagccatccaacaagccctataaacattgatacaccaatggatcattcagtgt

SEQ ID NO: 70761 - DNA, 433 bp, Glycine max
  Clone ID: PAT_MRT3847_34909C.1
gctttttagtttattgcaaccgattccttgccgttgcctttctactctgatcataagttgttcttgaaatcatggattttgataaattggtaggtagtgcatccctctatgcattccttcaaattgttttggacaagctagcttcaactgaggtcgtcaatttgatccgtggagagaagaagttgcttcaaaagttgaagaccactctgataaaggtcagtgctgtgcttgatgatgctgagaagaaacagatcactgatgacagcagggtcaaggactggctcaatgatctcaaagatgctgtctataaagccgatgatttgcttgatgaactttctaccaaagctgtcactcaaaagcaggtaagcaactgcttttcccactttgtgaataataagaagatggcgggtcagtttgcattatatagagagtg

SEQ ID NO: 70762 - DNA, 166 bp, Glycine max
  Clone ID: PAT_MRT3847_3490C.1
agtaggactagaagcaggaggataaacagccgttttgtgcaagctcaagcggggagaaatcatcaccactatccccaccatcggatagaatgtagagactggggaacacaagaacatcagcttcactgtgtgggatgatggatggaaggataagatcgcgcaattg

SEQ ID NO: 70763 - DNA, 217 bp, Glycine max
  Clone ID: PAT_MRT3847_34910C.1
cttgagcctgcttctaatggtgcatcctgatgatgttgtgtttgggggatgatgatatcagcatacttggacctagctcatgccatggccacggccagggtgtttgatatcgatctgccacctacaccgacgccgtacatagtatccatcgatccactcaccgcgatctatgtcccttattgcatagctggcaaccaaggagaccgagtcaataacg

SEQ ID NO: 70764 - DNA, 334 bp, Glycine max
  Clone ID: PAT_MRT3847_34911C.1
tttcttaactgcagtggtgagaaaaaatagcgcgcctaatgctactgcaatgcatgtgggagctattgaaatcatcattgatagttacgcaagtcccgactgcaacatagttggcgcaatgcttttggttgatacttatcataccaatcctgaaaatgcagctcgtaatatatgtgctgcgcctttcagaggtggaaagcccattcaggtggtgacatctacggataccattgtgcatattgcaccacacacgaattcaaggttgtagcttttgagtaccactaccaatggtgatcttgtgcaaggaaaagatctagcaatggttcatgatgat

SEQ ID NO: 70765 - DNA, 274 bp, Glycine max
  unsure (1)..(274): unsure at all n locations
  Clone ID: PAT_MRT3847_34912C.1
gtcttcactctctacgattattntataaaanaaccatcttaganaaaattatccttctaagacggttcttaactaagagatatcttagaaagatacctttntaaaacgattcttagttaaaaaccatcttacaatggtagattntttaaaatggttgttcagagaaccgtcttagaatatatattntaaaaaaatatatattcggaaattctaagacggttntttccaaaaaaaattgtcttanaatatgtacattctaagaatgtttttatgt

SEQ ID NO: 70766 - DNA, 349 bp, Glycine max
  Clone ID: PAT_MRT3847_34913C.1
ctttcttaggcaaatggactcattgctcttgtgccaggttatggagaatagtaaaatggtgaagatttgctgaattggtgctggatatgtgggggggcctactatcgctctcattgcactaaagtgcccatccatagaagctgccgttgtagatatctataaatgccgcattgcagtctggaacagtgaccagattcctatctatgaacctggccttgacggcgaagagaaacacagccgcaacaagaacctcttgttcagcactgatgttgacaagcatgtctttggggctgacatagtgcttgtttctgtcaacaccccaaccaaaactaacggtcttggagctggt

SEQ ID NO: 70767 - DNA, 1278 bp, Glycine max
  Clone ID: PAT_MRT3847_34914C.1
tggatccaccaccctctaagttcgtaatcgaagcatcggaagcccttgccctggcggagtccgccgccgtgaccctcccggaactcctccccaccctggtccccgccgcccagcccctcgcccgaccccccatctccaagttctccgtggccgccgtgggcctggccccctccggccgcatcttcgtcggcgtcaacctggagttccctgggctccccctccaccactccgtccacgccgaacagttcctcatcaccaacctctccctgaatgcggagccccacctggtgtccctggccgtctccgccgccccctgcgggcactgccgccaattcctccaagaactccgcgccgccgccgacgtgaaaatcctggtaacctcggaggccacagcagaattcagggcactctctgacttcctccctcacaggttcggtccccacgaccttctcccccttgaagctccccttctcttggaaccccaccacaacaccctaaccctccaacactatctcaacgcccacgtgcccaatcacaagttgaaaattgcggctctcgaggccgccaacaaatcccatgcaccctacagtgggtccccctccggcgtcgcccttctcgactgccatggtaatgtttttaaaggctcctacatggaatccgccgcgtttaatcccagcttgggccccgtccaggccgccctcgtcgccttcgtcgccggcggcggcggcgactacgaccggattgtgggtgctgcgttggtggagatggacggtgccgtcgttaaacaagagcacacggcgaggctgttgattcactccatttcccccaattgccaattcgacacattcctttgccacaacaacaacaataatgaatattgaatcccttgttacgtctttggaagtggttcgaataattaattcaataatgaagtactagtgcattttaatcaaatcctttacatatttaattggactgcaccagcttcaagtaattaatatatctggaaggctgaggatatgcttcaatttggctttaaacttgatcacgtgttaatcatctttttaatactgcgtctggaaaccattcaaacaaaacaacaagaccagtatatatagctccatgcttttcgaatctacatgtgaccacctatatcagctatatgtaatctgttcacaattatgccgtattgttaacctagtcaattccctctgacgctcagaaggctccgattcttccgaccaacgacctccctaccgatttcgattggcgcgaaca

SEQ ID NO: 70768 - DNA, 946 bp, Glycine max
  Clone ID: PAT_MRT3847_34915C.1
ttacggctgcgagaagacgacagaaggggaggaagagaagagaggatagataggcctcagaagaagaagagagaggtctctcaacaatggccactgccactgtttcaatttcaactttatgcgctactttcggaacccattgcgccatttcccacaacccaaaacctctattttctcaacctttcaatctcaatcactttccttctaactcttacaagctcgctttctcgcctcgctcacctctttcaccccttcccaaggcctctgaatccgcggtagccgaaaccgaacccggttcggccgagcccgaaccggcccaaatttccccggcccaacctccctcctgggaacccggtctcttcgctgtcgtaatgattggcggacgccaatatattgttcacccggggcgacatcttactgttcagaggttaaaaggtgctaatgttaatgataagattgccttacacaaggttttactggttggcactgatacatcttgctacattgggaaaccaattgtaacaaatgctgtagtatacgcaacggtggaagagcagggtctagaccctaaagtaattgtcttcaaatataaaaagaagaaacattatcgcagaaacattggacacagacagccaaatacacgtatacggataaatagcattatgggctatgaaaactacccaaaagttactatggacgatatcaaatcagacgaacccgaatcatgaacatcttgtgcactgtgcctatactgtagcttcttcctctttaaatatgtaatcatttggtcatcattagttttgctttaattagaaatgtaatgtattgtaatattgtattgttgtaatctcccgcttacaaacacattgcaatttttctctccaactttctttcacgtgcgaattttaactcttctgccaaaaactaaaaaaaaagggggggcccc

SEQ ID NO: 70769 - DNA, 472 bp, Glycine max
  Clone ID: PAT_MRT3847_34916C.1
tgcagaggaagaagatggaggtggaatcgacacaggtgacggaggtggcagtggtgcacggaggaagaagggtagtggtggctggttttcggaagcagttttaggagaaaggcatccagtgagtattcgaggcggcgttgagcaacaagattggccaaggcagtcctcgctagcgggcgaaaattcaaggtgggttagcggttgttgtggattgcagtggtttgggctggaatggcaggccatggaaggcagtcatggaggctccatttggcgagtaatatgagttgcggtagttgaagttggtatggcagccatggaagctccgtttggtgagtggcagccatggaaggcaaccatagaagctccgtttggcgagtagcatgggttgtggtattggaagttggtatggcagccatggaaggcaaccatggaagctcaatgaaagcatcaatgttacgtcttggaattcgag

SEQ ID NO: 70770 - DNA, 826 bp, Glycine max
  unsure (1)..(826): unsure at all n locations
  Clone ID: PAT_MRT3847_34917C.1
gaaattgtcattttgtaagcaaatttattcccttacagaaagcatgttccaaaaacaggtctacaacatgaatgtcaatgctctaaaatgtacttgaggagtagagagttggagaaggagagagactaatgtgacgtcgagttagacttgctttgtaccttcaatggctgcggagaaaaaaagttggagaagaaaagaagagctgcagaataggaacgggctgcggctacgactgtgggaaagtgaagatctttaatttaaaaattaactaattaagtatggaaaaaataaaatattacacactattttacacaacaccaatacctattatataaataataaacatcactttcatatttcaaataaaaaaaacaataaagtcgtttctatagtcttattaaaaaatattaaactcttgaaatcgtgatccagaacaaacaaaaccttattattattatttttaaatactaaagtcatttctactaaaacaacttctataagtttattaaaaaatataaaaaatacttgaaattatgatttaaaaatataattttatttttttatgatttttaaaaaattcaacattctaaagtcatattttagaacatgacttttttatatgaagtgttgtttgtctataggcaataatattttcaaaacttacctatttttattttttaaaactaacccattcacttaaatttgcagtaaactctaaaccctgccatcaaatcaactttcaaaattacatgaattgatcactcttttttcctgtccgttgcaagcagcccggcccggtccaatcggacgcgtgggtcgacnccgg

SEQ ID NO: 70771 - DNA, 520 bp, Glycine max
  Clone ID: PAT_MRT3847_34918C.1
tcttctatcatttgatatgatagaaaggtccttggcacaaagtgatgtgcatcagaatcgaaatcaatatcctctagagacaggaatacccgactatcttggtgggctgcgaacataaacactccaccacccacacgaatccttagagctcgctcattgttctcataggcaaatcgattggctactgacacatggaattctacttgccgaactagaaccggagctcatgccaggacgttattatgcatactcatctcctgatgcatatgctcatgatgatgaggatctagtgatatgtggataaatgattgaccttgtagcgcatatgtgctggatgctacctgctgacaggtgccaacctgttgcactacctctacctgctgcttatgactgctatatggaaagagaacctgatagtcgccctgctctgttgccgtctgaagatgacccatatgcattctgattaagaaatatggaagcatgcataacgccttacagtgatcatgacaacacatccaag

SEQ ID NO: 70772 - DNA, 270 bp, Glycine max
  Clone ID: PAT_MRT3847_34919C.1
ctgttttcggggaaataccatgtgcaggatatcgattacaagaggtatcagatccgattgacagatgcgggtatcgcggaggatactgcttgctccattcctcgctatgttttacagagatttaatttcagtgatgatgaccgctattttttacggatgtgaaggagtatcaggatgaggattactatcctcgaaatgtagtgtttctgaactgtactaagaaagtgaatgatgatcctcgatatgttgaagtgaatgccgttcgtcgtt

SEQ ID NO: 70773 - DNA, 784 bp, Glycine max
  unsure (1)..(784): unsure at all n locations
  Clone ID: PAT_MRT3847_3491C.1
aatgaattttgtttcttattcgtcggtttttattttatcttttttgtaaagaaggggttcggttaatgaaaagtaaacatagaattaattaaaatagaatgatctattattaattattctgaatctttatctttgtacaatattttttttttgcaaaacattagttcgtttttttaactaatttagtattttttattacaataaacaatatctatgtttggaaaattttagaaaaagtattataatattcaatgttttacttgaaatagtaaaaaatgggaattaagatagataaaatatatggctaattaaagataaatatattttcataaaaatgtctttcacatcgaattctataacaatcaaaagctatactaattatatggcagttccaaaaaagcgcacttctatatcaaaaaaaaggattcggaacactttatggaaaaagaagggatattttacaacattgaaagctttttcattagcgcaatctatttttacggggaattcaaaaagctttttttgtaacaaatacaaacgttagactaatttcaattaactaggttcaacgaatatttttaaatacaaaaagaaatacgaatataaatttcatatataatccccttctgtcgtcttctcgcagccgtagagaaaaaataaaaaaaaaaaaaaaaaaaaaaaaaaaaaaaaaaaaaaaaaatttaaaaaactaaaaaaaaaaaataaaaaaaataaacaaaaaaaaacaaaacnancaaaaagggggggccgttttaaaaaaaca

SEQ ID NO: 70774 - DNA, 320 bp, Glycine max
  Clone ID: PAT_MRT3847_34920C.1
accctggccattgaccttgtgggggagacttcttaatttttaacataaatgcctccaacacttcttaaccaaataagtaaaaaatgtacttcctttttcccttccccccttaattaataacacaacttaaaaacaagggggcagttttttcacacactttgtccgtaggtcatcatacaaaaagggaacattaaaattgagggaaggaattacctgatacatctacattcccaaaaaatggaaaattttttttattggcattgccaatagctcctaaattcttaaatttaccaatttcaaaaaaaaaagggattcaaatg

SEQ ID NO: 70775 - DNA, 563 bp, Glycine max
  Clone ID: PAT_MRT3847_34921C.1
aaaattctcgcgaacattattagtttttgccatgaaaaagctggaaaagaacattcaagtacttttaatgttccttcgtgaatagcaagaccacaccactgtcgaacgcgtgctgcttcgagtgcacataagcatgatcgttgtcactacgctaaatctaacaactgcacacacatactgtcatgaaaatggcgactcaccggttggaatgggctcatgggaggctgaagagggtagccaaaacgtacacgcactggctgtatgacactcacactcctacggtaactaacatattgctggctaactcaactaatgggagtccagactatacactaatggctatggaggctcgtctaagaagacatggccattttactgagtgctcatacaaatctgccgacactggctataagacgcaacattgaatgtttaattacaaacatgcatgctgatcaccatgagaatgagaatgtgtatcaaaaacagtatcatgctctgtgtgatgtacaagctctacctactctaattcaattgttggagctagaatccaaacctaactatgc

SEQ ID NO: 70776 - DNA, 422 bp, Glycine max
  Clone ID: PAT_MRT3847_34922C.1
tttcattttcaaccagacaaatcctaatctttcaaaagatttgtttttgtatcaaattgaagtatgaaagttatttttaaacctatcagtcagatttagaactgcacctcatgaagttcaattatcaactcaaggggatcgaattcctgatctatgtaaggtgtgtctagattctagagagataaatataaattattttcacatgacccggcgaagtgaagatatcaaggaagagaatgataccggtgatttagacccttaggttatatcctaaattctgtaaaccttttgttgtagccaggatcactttagtagatgttgcatttgtttaggctctgcatgtgaaatgtctttgttttcaatgtgctgagcgattcttttattttattttttattttttcagctgttgaaaataaaaaatg

SEQ ID NO: 70777 - DNA, 1491 bp, Glycine max
  Clone ID: PAT_MRT3847_34923C.1
cggcaacaaggttttcacataaaagcatattcctccaaacaccaaatgaatcaaagataaaaacaaaaataatgaaaaatcatgccatgtcatgtcgatatcattgttcacatacatacatacatgccacatgacgcaaccccttacatccccttacatgagtgtgtctcatccttactccctcgattcttcctctgtttataaagcataccttccattttcttgttcctcaaaacacaaaaacaccataacatgggagagaaaaaagaagcggcgaagaatgaagcagataagaagcctgaatcaggagcaaagcaaaacgacgaaccagtacctgtcgttttgaaactcgacatgcattgcgagggatgtgtcaagaagatcaaccgcgccgttcgccatttcgaaggtgttgaagacgttaaggccgatctatcaagtaacaaactaacggttattggaaaactcgaccctgccgaagtgcgagataaactagcggagaaaactaggaagaaggtcgaactcgtttctcctcagcctaagaaggattccgccggcgataagccgccggagaagaagaccgaagagaaaaaaaccgaagagaagaaatcggaagataaaaaggcagaagagaaagctccgaaagagagcacggtggtgttgaagatcagattgcactgtgacggttgcgttcagaagattcgaaagattatcctcaaaggagttgaatcggtgaacattgagggagggaaggatttggtgagcgtaaaggggacgatggacgtgaaggaaatagtaccgtatttgaacgacaagttgaagcggaacgttgaagtggtcccgcccaagaaagagggtggtgataataagaaagagaacaaggaaggtggtggtggagatagtaagaaagagggtggaaaaaaacaagaaggtgaagacggtgcagcgaaggtggaggttaacaaaatggagcactacgggtacgggtacgggtacccacctccccctatgtactggtacggtcacggtggatacgcacctggtgaaagtagtagctacgaggcagaggttcaaccagggtataattcgtattcgaatcaagggtatgatggtaattacgggaattaccattaccaagggtataataataattacatgatggcacaaccaccacccccgttctacttgaatcctcaccatcctcctccacagatgttcagcgatgagaatcccaatgcgtgttccgtgatgtgagccaacgtcttgtttctcaatatttttcatgtatagacaggctgtaaataacaatttttatataaaattcgtaaagagagttttgtattaacgcatggttaatgacgtagagagcggtacggccggctggcttgacaaatccggttcatgtaactttttgttgtagcctctttttgtttgttctgcttcctttttgtgttctataattttatttattattatgaaaatttgataact

SEQ ID NO: 70778 - DNA, 408 bp, Glycine max
  Clone ID: PAT_MRT3847_34924C.1
gaaaacaaccagacgttgctactaatagcgtatcatatcatccttacgcacaagtgacacacacagaacaggtcaaaccactaggaccaaagtgacagagaacatagatacaccatgcattatgcatacatggcgagtacacgcattgacttcatccttaagctccgctacccgtatagatgcggcaccaattagcttacacatgtcactctacctatcgcctgtctcttgcactctagcattccactgtcttttctagaactccaaagatacgttatgtgactgctaagggatgcacgtggggtgcggggtgctctcagatgaccatggaagagaagcctctctctgacataccgattgctgaggatatgtacccactaatacgttagtcaagcatgagatgcaggt

SEQ ID NO: 70779 - DNA, 560 bp, Glycine max
  Clone ID: PAT_MRT3847_34925C.1
cagtgtctgaaaatatggtatttgaaatcttgttatgcttaatcggtgttagttgtttatcttgtaacaccgattaaatgttcagaccgaatacaaactagtcgaattcaaataatacattagctatttactactttgaaataataaattgcaattcttttatattttacattgttatatttacttaccggttcttgtgtaatgttatgcttcaaatgctttcttgagacgtttattctcccccattagtttgtgttattttgtgatgctctatggtatcaaattattataatttatttataaggtacaaataatgtgagcagatgtacttagcatgaataatttaggtgctggtgtttactaagccttctgtagttttcttatgaagaaaataatatggttaccttgttaaatttatatagatgggatttctaatctgcatatgtttttgttggttggtattttcttagtttatggtagtttttctatagtgtgtaacttggtatgaggctaaaaacttatcctggtgtgtgatttgtatacatattatcatcatacga

SEQ ID NO: 70780 - DNA, 635 bp, Glycine max
  Clone ID: PAT_MRT3847_34926C.1
ccacgcgtccgcggacgcgtgggcggacgcgtggggttcagaggttgaatgtattcacatttcagtttgccaaattattctttagtgtgaaaggaaaactctcagacattgaggtaacccagacaaagtcaatatatgtttttgatgttcatcatctggaaaaaaacgatgaaggaatatgaaccttacactgccttcttgattataaagttagggggttgcttcttgcttggtaaaaaaaaaaaaaaaaaaaaaaaaaaaaaaaaaaaaaaaaaaaaaaaaagggcggacagatataaaaaaaccaaacatacaaaacaaaaacatacaaaaaaaaaaaatggggggtccgttttaaaaaatccaatttactgtccgcgggcttacaacgtaataacttttaaataggggcccctaaataaatttaacgggccgcggtttaacaccctttggactggaaaaaccttggcgttcccaactttaatcgcctggcataacatccccttttcaccacttggtgtaaaatggaaaaggccctgaccgatcgcctttcccaaaatttgcgcagcctaaatgcccaatgggaccccccctttagcgggcctttaagcgcggggggtgtggggtttcctccc

SEQ ID NO: 70781 - DNA, 1483 bp, Glycine max
  unsure (1)..(1483): unsure at all n locations
  Clone ID: PAT_MRT3847_34927C.1
tacggccgctcgaagacgacagaaggggatcacttaagcaaaacaatgatggctggtgttagtggcagtagcactactcccttattgtgctctttgttctttatttcttccttactttttgcttcctgcacccatgcctcctcccaggcacctcctccaattgtggatggactttcatgggatttctataggacgagctgtcccatgcttgaagggatagtgagcaagcatctccagaaggtgttcaagaaggacaatggtcaagctcctgccttactcaggatcttcttccatgactgctttgttcagggttgcgatgggtcgatattgttggatggaagtccaaatgaaaaggatcaaccggcaaacatagggataaggccagaggctttgcagaccattgaaaatcttcgatctcttgttcacaagcagtgtggaagggtcgtctcttgcgctgacctcgttgttctagccgcacgcgatgctgtttctctgtcaggggggccaatatttcccgtgccactgggaagaaaagatggtctaactttcagcatagacggcacaggaaaccttccgggaccgtcttcccgaaccggccagctcctcgacagatttgccggcagaaacttcgacgccaccgacgtggtcgcgctctccggcgctcacaccttcggacgggcccactgcgccacattcttcagccgcatcaaccagacggacccacccatcgaccctaccttgaacaacaacctcatcaaaacttgtccctcttcccagtcccccaacacggccgtgcttgacgtgagaacccccaacgtgttcgacaacaagtactacgttaacctcgccaaccgacagggtctgtttacctcggaccaggacctgttcggtgatgcccggactaagggaatagttaactcctttgctgaaaaccagaaactgttctttgaaaagttttcaaatgctgttgttaagttgagtcagttggatgtgttgaccgggaaacaaggacagattcgcgccaaatgctccgtccccaacaagaagaaggtggtcacctctgtggtggaagaagagggagtggatttaagcgctcagatgtgagattaattaaggaatgtttgtttgttaataaattaatgaccatgtttcgtagtagactagtaatgtgatgtacgtcagttacataaaaggagtttctcccgtgttactacctgcattcctgcaatccttaatttctatgtttagaatgttttttatgacatgttattgtgttcaaggacagttttataaaatgagcccctcttggttaagggtttggattgtctccacctattggatttttcaataagagagaaagatacaatcaatatgtgaaaaaaaatcctaagttagctagcttgcatgaccattggttnttaagtaaattgcacttgtatctagtgttttttttttcaaattacactcgatactctttntatac

SEQ ID NO: 70782 - DNA, 461 bp, Glycine max
  Clone ID: PAT_MRT3847_34928C.1
aataaaataatatttagattggtatctaagggaaatgggcacagaccatgcttcatgaaatgaagtgaaccacaaaaaacaaaaaagagaagagtccaaaaagaaaaacgagggttataaaaaaaaagaaaaaaaaaacctgggggccgggccacaaaaaaaaaaagggagaggggggacacaaaaaaaacttgggggggggggacacaacaacaccacacaaaacaatttcctttcaaaaaaaaaaaaaacgtgtggggggggggaaaacctaaataaaagcggggggccgaatccaattgggggggggttgaccataacaccaaaaagccacaggggacaggagtaaaaaaaaaaacaatccgctctgggctggggaaaggaaaagaacagatcagaaaacacccccccccccctttgggaaagggaactgtactaaaaaaccaaaccctccactcaaa

SEQ ID NO: 70783 - DNA, 385 bp, Glycine max
  Clone ID: PAT_MRT3847_34929C.1
cttggatagaaaaaattacttgtatcgtaacctggacttggagaactcaatggcctgcatctctctcccaagagaatcctctttttgcatagttctctgtcttcatcttcagctctctgttcaaactgctttggcgctttctttataatcaggcactttatcatcttcaacttgaggcgaaggaccagtattttagagggaaccctaaccaagcggcgtaaacttgccttcctcttcacttgtccgaacttggtaacaacattactgccatcaccatgcacaccactactaaatctagccctcatgaaattgttccatcctctcttctttttcagaaagctcatcaaaggaagattcattttcacacgttgcctatcctttctgt

SEQ ID NO: 70784 - DNA, 244 bp, Glycine max
  Clone ID: PAT_MRT3847_3492C.1
ttttcctaaatcaacaagtaaagatggcaagggaagacttttcctgttgcatttgacgtacctgctacttcaattgcaagtgagccaatggacattatgactgctctacaacttgtgctgagaaaatctctcgcctatagcggtcatgcaccatgtctttatgaacgtgccaaagtgatcgataagcatgcttcacactttctggttttaacagaacaatgtgaccaaccctattatgtgaaac

SEQ ID NO: 70785 - DNA, 385 bp, Glycine max
  Clone ID: PAT_MRT3847_34930C.1
agagcggccgcgagcgggcggttttttttttttttttttttccatttaaccattaactataccataaaaatattggggaaatcggcattaacacaatactactcattattatagatacctaatatctaaatttttaagcaacaatatattaaataacttaacaaatctctcaattgtttttcttaaataagaaaaataaagacttataattgaataaaaccaataaaccaaaatgtgtggatgttactaatttcgcaatcacctgaaaagtatagagctcctaatctagaataagctacatgttataataaccagttcctgtatactcttcaaacttaaaaaaacaaagacctctccttgtatacagaattattattttgttttc

SEQ ID NO: 70786 - DNA, 376 bp, Glycine max
  Clone ID: PAT_MRT3847_34931C.1
ggcttcctcattgatctcttccccggctgttatctctgtcaaccctgccggggccgggatggttgctccattgactggcctcaagtgcatggctggcttccccaccagaaagaccaacaatgaccttcccttcattgctaccaacggaggaagagtggaatgcatgcgtgtgtggccaccggttggaaaaaagaagtttgagactctttcctacctgccataccttgatgatgctcgattggcgaaggaaataaaattccttcttaggaagggatggattccttgcttggaattctagatggagcactgtttctcgtaccgtgagcacagccagtcaccaggatactacgatggtacctactggaccatgaggaac

SEQ ID NO: 70787 - DNA, 380 bp, Glycine max
  Clone ID: PAT_MRT3847_34932C.1
cctctcccctctcccccgggggtattttttaaattttttgggggttaaccaccaatctaacaccactacaaaaattttttttttaaccaaggggagaaccctcacattatccacttgctaaattttaaaactctcactatctaaaaaattatttaaatgttcccaaacaaaaactaaatattacattccttcataacaaaaccttacccattccacaataaattagaactttcatacaagaaataattgtgtttatttaaaaatttgttccaaaccacaatgatcgcattggccttctcatagattgataagcttcccgggatctataacaagaaaactttataccgcccttaaattacaaatatgattactccccttaa

SEQ ID NO: 70788 - DNA, 566 bp, Glycine max
  Clone ID: PAT_MRT3847_34933C.1
ccacgcgtccggctagtttgctacccgaaggattcaatgggctacgggttcagaagcagttcgggcccacaacctgcgttctaccgtccgcctctcgtcaccgtcactcgatgtaccgctcatgaccgagtctgcagaatgctacgccttgctggagatgtggaggcagggaagggatagagtctgggtctctgatcacaccgctcatcggatttatcatgcctcgcgggagatgatccacggatcaacttacatttaggttctggatgggagagaaactgtttagccatctcagagagggatgacccatatcggatcatgatgagtatcacaaagtgttcccactaaacgccctgattcatcaacagcaaaggctatctgctctcggatcccattgagcagcaaatgatggccatggggcttagccaacatgcgtgtgcccattgcctggagaacattatggtgatagtccaaccacagatcagggattggcctatggctacaccctttcgcgtgccatgagagattcatcaagatagcgttgctcacgcctcggctatgaatga

SEQ ID NO: 70789 - DNA, 532 bp, Glycine max
  Clone ID: PAT_MRT3847_34934C.1
tctagcaccttccctatctaaatctcacggttgttgtagtgcttcaagcaatgtttcagcatttctgacgtcaaaccattgcacgtggggaggcggggggcacgcacggagctgttgttcagatatggacaacttaagccttttggagaagcggaagaataaagccctatggaagaccaaaattctgtcatataaccataccattgagtaaggactttgataacaattctggaaagaaacttggctgctaaaaaggaagatattaaaattgagaagcaattgagttgctgcaagaatacttgcccaaaaacagagaaaagaaattttgattttgaaatatcaggtagttacaactgggcttgacattcttatatgtagtgtgtgaaacttccatggctcaaagtattataaaacataattggcatagttgatatagttgttgactaataaggagtatcttcaaattaattgtaatcggaaaactgtcttctatgtccttttttttttggatttagtcttttgatccctttga

SEQ ID NO: 70790 - DNA, 351 bp, Glycine max
  Clone ID: PAT_MRT3847_34935C.1
actcgttaaattttgattttgatttgaagagggaaaattttgagtttgataatggcaaatggtaacacgcagcagcctggtagctattgaaaagtgtttgtctgctgttcgatttcgaccactcaaaccctaacgtttccaacttgcaagggcttcgctccagaagggttacgatggattttgacgagtatgagtatttagagaaagcagttgaaaaccctgaagttaatcacagggctaatggtggggacaaaaatgtgaaatccgaagagagagggcgtaatgggagttcaaagcataaggatgatgatgatgatgatgttgttgatctccatcccaggcattcaaaat

SEQ ID NO: 70791 - DNA, 254 bp, Glycine max
  Clone ID: PAT_MRT3847_34936C.1
tactacatcatcaggatatatgaaaaacttcatactgccccttctacaattttcaaatcccatctcattatctcttcattcccactaacactaatcctatctccttcaacaaaacaactacaatccactcacctactttccctccctctctcacacctctaccaatcccaaaaataataatacccatacctactccctcacctaattcaccttcaaaccctacacctcctttacctaccaatatcccttcttcc

SEQ ID NO: 70792 - DNA, 219 bp, Glycine max
  Clone ID: PAT_MRT3847_34937C.1
tcaaagcaggaattcttacgaagtgaattatggtccaaaattttgatgaacttgtctctaaactatgtaacatatacacattctcatttttgagtggcattatggaatgtgttcttctggcaacatgttttccttataaaaatgacttctgttataattattatgtcagatattttaagacacatatacatatatgtctgatatatctttaacttgaaa

SEQ ID NO: 70793 - DNA, 307 bp, Glycine max
  Clone ID: PAT_MRT3847_34938C.1
cgactccacgcgtccgcggacttatgtacatacgcatggcgctaccatgaacatgagttccaagcgctacaaggacatgctgtctgaagcaggagcaggacagttttgcagcatcgtcgcatgaacacatagcgaatggcagctccaatgggcatgaggctgcgactactggcagcatgccagaagcacaagattgaagctgtggagatcgagactggctcttctaatagttctgcagcttcatcctcctcagagagcgcggatattaaagcccccaccagcccccagagatgctctacatgccgga

SEQ ID NO: 70794 - DNA, 531 bp, Glycine max
  Clone ID: PAT_MRT3847_34939C.1
ccacgcgtccgggatcagaaggatatgtgataaagatgcgagatggaaagaacttgcgttgtgtccatagtaattttcaagggagaaatattccagagagtgcaccacaacctgctattgttttgaggattgaagatggaagcggaactttactcccgatcattgttttggagatgccaagcgttcttctgatggcagctattcgtaatgtccacattgcacgtccgaccatatatcaagttgtcaaggaaatgattgataaaatgggttatgaggtaaaacttgttagggtaaacaaaagaattcaagaagcctactgtgctgaactttatttaacaaaggtcaatgatcctacagacaacatcaccttcgatcttcggccttcagatgccataaacattgctgttcgttgcaaggttcctgtacaagtccatagaagtcttgcatacagtgatgggattagaccagtcgagccagcaagaatggcagtagcagctggcctatcagatgggttgttatttacagagcttg

SEQ ID NO: 70795 - DNA, 262 bp, Glycine max
  Clone ID: PAT_MRT3847_3493C.1
tcggaattcggatagaggcttgtatgtaggtttcagagtttgagagaagagggtggagggcaggaattgtgttcattcttctcttttgaccttacagtggatatcatattcatatggtagcttaaagccctaggtatagctagtttgattttgactctgacgctgggtttcatcaacaatttagaattaatgcgaacatcctataatcttgttctcattcgatctcgcctaccgccgctactcaccatttccaagcttatcg

SEQ ID NO: 70796 - DNA, 291 bp, Glycine max
  Clone ID: PAT_MRT3847_34940C.1
gctcatagtgtgtgattgatcggatgttgctaaggcgcggcttctatctaaaggaaggctgtggttgtgttcgttgctacatctcacctgacaatgcattgctgtggcggcaactgtggtcctggtagcttgtacacttgctataacggctgcactctctacgtgatatgcccagacttgaggttcactgagtcaacccacaccgtgaccttgttcatgacaattgctcctgagtacgctgaatctgcagatgcttacatgcatgtgcaccattataactcaggctgcaaa

SEQ ID NO: 70797 - DNA, 2049 bp, Glycine max
  Clone ID: PAT_MRT3847_34941C.1
ttttaatgatttgatttgctcccacgcgtgttgctgttgttgttgttcatggtgttaagtgatagataacagaagggagagcagaacctagaaatcgcgttggttcgttggtttatgacttggagtgaaaccctaactaatattgaagatgagcattcggaggttgagtgccgaagaatcgcaaacactttactctctcctcagagcagagcaacgttcgctccatgagatcctctcccaattcaacgctgcaatcccttccacccgccatttcactctctcttcctatctcctcatcctattgcaggacaataaggtgctcagcaccactgagcggttaatagcttttgctctgctagttgaggcttattcatcccagaaaccggcttcaaatcccttcataagctttattgtaaatgcttcctgtaatgaagggtccgaaaaagttgagagggcatttattctacagctactaggtcttgatagctccaacagtgggaaagagtttcttaaacagtctgcatcagattatgtgaaaggatttgatcagtcattacatgagttccctccactagatcagttgaagcagcagttttctgataaagttcatctagaactatatcgctgcttgtttaaagatggctctgtaaaaaatgtagtccccgacccagatgttcccccaagttgtgatgcagattcaatagagtttgatctgcgacctggaacaaaacctaaacatggggcaggagattgcagaacaggcttgtgagacttgttgtcaaatctttcattggaaggattaagtcctcactggatcagaccccttccaccaaggctgccgatacttgatggggcgccgggttggctcgttcctgagggcaatcatgaacttatgtgggactatggtatgtgtgttgataccagcagaggggctgcagtaagggacttaattgcaaaagctctgaagggagcccttgcgcctgcacagcaagagcaagtccttgtggagctggcaaatgatccaaagcttgtatatcactgtggactgacaccaagaaagttgccagacctggtggaaaacaatccccttattgcagttgatgttctcactaagttgataaattctccagaaatagcagaatacttcacagtacttgtcaatatggacatgagtctacattcaatggaagttgtgaacaggcttacaacagcagttgaactaccgtctcaattcattcacatgtacataactaattgtatagcatcctgtgtgggcatcaaggataaatacatgcagaaccggcttgtgagacttgtctgtgtttttctgcaaagcctcattcggaacaacattattaatgtcaaagatctcttcattgaagttcaagcgttttgcatcgagttttcacggattagagaggcagctgcgttatttaggctgctcaagtcattggaatgattttagtctgtcaattttctcctcttttctgttctatttcaagactttctgtagatatgtatctacctagagctaggtagcgttatgtactcattttctagttgtggacaataaatcaagattatagcttttatgccatttgcattttaattgtaacgggttatattttgaaatgttcatgtgagaatagagaatttagaatgtaattgaattttaatactatactataccccctaccatgtggttgtccttgtgtaaaaaaaaaaaaaaaaaaataaaaaaacaaaaaaaaaaaaaaaaaaaaaaaaaaaaaaaaaaacaaaaaaacataataaaaaaaaaaaaaaacataaaaataaaaaaaaaaaaaaaaaaaactattaacaaaaaataaggggcgaacttttaatgtgccaaacttaacatacacgaaaatgtggaacctaatccctcaaaaagtgtaacccaaagtcaattaaggagaacaatgtttaaatcattgaattttggaaaaccgggtgctttaaagatttaataaaggtcgtatatgtccataattagccattttgtgttaaagccaaagggatttt

SEQ ID NO: 70798 - DNA, 708 bp, Glycine max
  unsure (1)..(708): unsure at all n locations
  Clone ID: PAT_MRT3847_34942C.1
agggaagaaaagagagtttacccggaatactcaccagactttcaaaagattagaaatataggatatggtccctccctagccaatctcattctaagaattggaattatattagaaatgagggagatcgtgtcatgaaacaaactgatttgtgtatctgatatttgaaaatcactactgagaactaaaaggaggcacttggcagaaatagaatcctaattccccaggtattttggactagtgcgagatatttgggaatgaactatgaaatatatggaactcaaggccctgatgtttattgtatgacaattgaaaattactaaagatttccaaatctaaaaaatgcaaaaactagtgatcaatagtaaatatatttgttatccaactatagatgccttattcagagcatacttggaaatttaacacaaccatgatgttagatccccggtaatatggcaggcaagggacaatagagaaatgcaggatttctaggaatcttaaatgacaatgtcatgccaaacacagcctaaaaattaatagctggtgcacttctcacaaaggagtggatgataattggaagttgcaaccatctatgaatccgcataacaatcaaatttgataatatcataagaattctcaacatattcaaaaaccnaanggaaaaatcgagggnangcccggtaccggttcgccctaaagggngtacaaatc

SEQ ID NO: 70799 - DNA, 361 bp, Glycine max
  Clone ID: PAT_MRT3847_34943C.1
cggactgatgctgggaccgggactatgtcttcctgcatatggaacctcgggaacatctgaagctgctgttgccgaataatgagtgaggatcagagggtgctctgagactgaaactgatgaatccgcctccggcgattgaatgcttaacctgtcacccatggaagctgatgctgctgatggtgcacatccacgtgagaagccaaagacttcgcagaaggacaagacccttctgcttcctgatcccgtctagcctcctgccaaggcgcaactggtgcgatggtcaccaatgaggactctgcggaagaacatgttcacagccgatcatagcagctgctgagaggaagccgaaatgcagcagtcc

SEQ ID NO: 70800 - DNA, 379 bp, Glycine max
  Clone ID: PAT_MRT3847_34944C.1
ctgctaaaattcttacagaagggttgatacccatagacaaaaaaaagaggcgggttttgctgcttccgggcgctgaaaacatgactcccttaaaggtgggtccattcaaggcgcgaaactggcactgtacgctctacagagggtcgaccaagctctacataatgaatgggcatggcatcaaagcacggacgaaccccctgccgtcggtctgcactcgctagatcttgaagagcaccaagaacaaaggaaaacccgacctgaggaataaggccttgccagctgtcatacctaggcaatgcatgccaaggctccgaaaagaccgcatctacatgtacttcgaagacaaagcaagaggcctactgaatcccaagggagaaat

SEQ ID NO: 70801 - DNA, 320 bp, Glycine max
  Clone ID: PAT_MRT3847_34945C.1
cggccggatcggtcgcccacgcgtcgatgactcaacccttacccaccaactttttttaattcaaccaaaccatgccttgttttacttacacttatttagttggttctcaagcgtctgcaccattctttttttgaccttgttcaaattgccataacacctgtctgcggctgaaatgggacttggcactattggattgtcacggcattaggaaataaggttacttaaggctaagggctggggattacaggactaacacacgctagacttgtgcgctgaagggggaatttaagaccgagatggtttagttaaaagataatcat

SEQ ID NO: 70802 - DNA, 490 bp, Glycine max
  Clone ID: PAT_MRT3847_34946C.1
aacacactttaattatggtttttcttttatgatgagaaggttttgttaatgcgattggcagattctttttgttccttgtatatatgggggattcaaggatctaggatcagataaatggacctatagttcttgtcctttgtcgagacagcattactagaagaaagaaaactaattactcaaccgtgacaagagataattttgttccccttttttcaaagcgacaataataaaatgtgatcgtttttgactttgaaccgttcataattatttcttatattattcttccgccagaagaatttcaaccccaaagttcctaactgggaccctcttttaactaagcactaaccctgtattaactattaggttatgatgatgcttatgtaagagccaaccaatcaaagattacttccatccggggatggaaccaccacatgccttatatgagtctatggtttaaaaggagacttgaaatctaacgtgaaagtaataa

SEQ ID NO: 70803 - DNA, 269 bp, Glycine max
  Clone ID: PAT_MRT3847_34947C.1
atcattgtcattgtacgactctctgattagtttttcggagttcaattgagcgcaacgggatgatttacgtatcatgttgttggacatattagtcttatggggtgttgcgtataccctataataatgccttcggtgtctgctgatctccgtctagtttcttctatcaccacgatccattaggaaacttattttaatcgcctgaaaaatctcgaaaaatgagatcgtcgtagtaatcctatttaacactacgtcttgtcatactctttcac

SEQ ID NO: 70804 - DNA, 751 bp, Glycine max
  Clone ID: PAT_MRT3847_34948C.1
caagaagaagggtctctattctctaatttacctctgcagggcttgaaaccatgactttggtagagagagttgtggttttgtttatagtgatgacaattgtgaaggtttcatatgcagctgtatacaaggttggcgactctgctggttggactacccttggcaccatagactacagaaaatgggctgctaccaagaacttccaaattggtgacactatcatattcgaatacaatgccaaattccacaatgtgatgcgagtgacgcatgccatgtacaagacatgcaacgcatcatctcctattgctaccttcacaactggcaaagactccatcaacataaccaatcatggtcaccacttcttcttctgtggcgtccctggccactgccaagcaggacagaaggttgatattaacgtgctcaaggtttctgcagaagcacctactccttcaggttcagctttggcctctccaaccgttcaagcttccactgtgcccgcaccttctcctagcaatgctaccccattgatttctctaaatggatcttttggtttggtgggtttggccatgggaatcctttcacttgctttctctagctatgtctaataagaaagtgttttgtttagtttggtttatgtacttcttttggtttttttcttgtatgggaactcatcaagggaacttctccaactcctttgcctagattattgggacgtttgtaaaccattttgaatgacaaagaaaacatttattag

SEQ ID NO: 70805 - DNA, 467 bp, Glycine max
  Clone ID: PAT_MRT3847_34949C.1
gcagtaaaggttttagcatttcattggaaaaggaaatacaccggaggctgttctcatcaattaaaccccccacacactgttagaaaaggattgtcaataatatacgccatttccagacaccacacaaataaaaacataccatttatatatccacaaatggactatctctctccccctattgccaaaggtggggcaaccaaccccaaacaaagagaaaccacaggagacctatctctagctaatccaaccctcaaatccggccctcaatgtacattcccttcatctaccatcatattttggcgaacttaaaattgcatttatgtgtgaagagtgactcatgtaatgctcattactttgcttccaaaaacttatcatgggaatgtttctattctatatatgtagtattgtgaatgcttatcgattcattgtttttaaattaattaggatatcttttgtatcgacaatct

SEQ ID NO: 70806 - DNA, 347 bp, Glycine max
  unsure (1)..(347): unsure at all n locations
  Clone ID: PAT_MRT3847_3494C.1
gggcaagaaggattcgtggtgagcgtgcttgagttggtggttggaaagatgaagatgattggtggctgcggttggtgtttttgtttttcagattcctttttttattcaatacatggggttgttagggagggtnggctntgtgctngaaggatccttggtgagccatcttgacttgtcgtgccgaatgatcaacactattgctggctgctgttggagtttttgcttctcatatacctttttacatacaatatcatcnanattcctcccancctcacttcctcctccccnatnttccnncccctntcnaacctcnattcccacccctttcccccccttctctcctcctt

SEQ ID NO: 70807 - DNA, 1368 bp, Glycine max
  Clone ID: PAT_MRT3847_34950C.1
gttcttttgtaagataaagaaagtaactcagtttgcaagttaaatgtatgtttttgtttgagttagatacataatacatagttttcttcatttttttaatgtcaaagcaaatgcttcttatcaatgttgtcttcaggcattgctttgtatgatagcatctgggaaatgtccctttggtgcttcatgtctttccagtggtgcctttctactcctgctgtgtctttccagaagtttcttgatagttcttgatatcattttgttattcattttagatatattgaagagctctctgaaaatgaatctagagagcacaatccgaggttgtcaattctaataaaaccatgggacttggacatgtttctccaacttcgaatgtcaggcctgctagaaatgctttttcagaggcgagaacatatggcaccaggttagactctctcggaggttctgatgtccaaattccttgtgtgtctcgggttcggagaagtcgtccaagaaaagatattgcgtctcttatgaaattccatccaactggaatgggtgaggctgaaaaactgagtaataagctccttgagcatagttctgatgctggtagtgacttttcagacaaagttttgaagtcaagaatgcctgcaaagtttcatcaaccatcctcttctgaacctgtgaaagagcagtgtccagtaatatgcccgattgagctacggcaggaattgaggccaaaaagggcagatccatccagccatacctcagatgacaataatatagttactgttcctactgcaaaaggagggatgaggaggaagcatcatcgtgcatggactcttgttgaggtgattaaattggtggaaggtgtgtcacggtgtggagcagggaggtggtccgaaatcaaacggctctcctttgcatcatactcatatcgtacctctgttgatcttaaggacaagtggaggaacttgctcaaagctagctttgcactgacacctgcacctgcagatgaggggataaatttgcggaagcatggtacggctcccattcctgagaaaattttgctgcgtgtaagagagcttgctgagatgaattctcaagtgcctccaaattatagctcaagccagttagcatctggtggagggagtgtgcatggagatagatcggggtacttgtaaataaatactaaattccttatcaggcaacaaaaaaaaaatataaaaaaactaatttctgaactttgttagaccaatcctttcttggatgcatagagagtaagtagatgcaatcttgtagacagttgagaaattgattagatgtttatgcactgaaacgttgaatgaatagaatcgtgttactgttttgttggttgtggaataaaaa

SEQ ID NO: 70808 - DNA, 369 bp, Glycine max
  Clone ID: PAT_MRT3847_34951C.1
tgcactcgtgctcgagaaaccatcctatcagctaaaaacgttgaatcatttttacaagctgtaggagacattccagtgctagtcattgcaggtgctggaggttcgcttgtctctttggaatcctgggaagctatggcctcaaaacttctcaattctgtaagtatgcttttaccatcttgtcatgaattgtatgcaaaacttataaatgctgttagtgtgtattaaaggatgaaaatcggaagtggaaaatggatagggagaaaatgaaagctgttagatgtggctatacttgtatttcattcctgaagtttcctattgtccattttaatatcccaaacatttatcatggcatatgattctgcctcatca

SEQ ID NO: 70809 - DNA, 487 bp, Glycine max
  Clone ID: PAT_MRT3847_34952C.1
agcatccaaaaaactttccactataaccacgatgagaagaatgttgataaaaagggtactgtacgtcgtacaccaaattagcacacttaaatacctaagttaaatatcacgagcataattataacttgtttagaatacaacttcgcacatggcaggagcgggcaatatatggtcttttgggaccaaacaatggcacattttaatttttagaccggggaaatgccacctttaaactcacattaagacccttaaaaaccgggagggtaataagattagtagctgttttgccatatttgttgggactgctttgggggttggctttgaaaaccaacaagggatgcttcccttggattctgctgctgatgttccaaagaaatcccaatctgagaatggtagaagttagggtatccaagggatccaaaatgctgttgtgagggctgctggcttttccgaaaccccctggttgttgattttgtccctggaagct

SEQ ID NO: 70810 - DNA, 699 bp, Glycine max
  unsure (1)..(699): unsure at all n locations
  Clone ID: PAT_MRT3847_34953C.1
caatagcatctagccaataccaataccttctgtgcctaaataaatgaattaatcaaattccagccttgcaagctcttttctaggcttgattattgaaaccaacgcaaacacatcaatatctcaagacttgaaaagggtcaatactagaaaatatgttgataagtaggaaatgcaagaccctgcaggtaagttacctggctggtctgtaatatccatatataccgtaataggtctgtgcaagagtaagtagtagcaagacaacagcagcaaccaaagagataatggcccaaggattactgaagtaattgtgtctcaagcttgcacaccaagtattccatctatggttgtagtaccgattcacatcctcagacaatggggaaaggtaactgttattgatgtcaaacacaacctcttggcataagcggttgaaaaggtctgcaacttcagcatcactaccaagccaatgctcaattatgccacgataatgaaggtaccccacatcctctggggagttaatcaagttgtccatgaagataacataggatgtaatgtcattgctgcaatcaagatgacactgctcnnnggcaatcaggttgaggaacaaagacttggtaccgtcgtggatcaagagccgtggtattcgcagtttgccatccttaaatttgatgtcccannnncgatcggtctttctcttcttga

SEQ ID NO: 70811 - DNA, 154 bp, Glycine max
  Clone ID: PAT_MRT3847_34954C.1
ccgtctcaagacagaagctgttcacagttggacctgcttggatctgtatgtatttgcaacgccttataggattacatgggattactatttctctgctcgagaacatactttgaagtttgatttatgggaagatcctgcatagttgcaatttgta

SEQ ID NO: 70812 - DNA, 452 bp, Glycine max
  Clone ID: PAT_MRT3847_34955C.1
caagaagctaataagcacaattcaagttaaggtgtcaattttctgaaaactcatcctcttcctactccaatcatttctatcatacatttctaacatatgcttccatagaaaaaaggcataaccacgtcccatatcctaacaatgtcatgagccgtttcatgttgcctaagtctttatgcttacaaattaagagtttaactgcaaggttctttcgagaagggtaatgagagtaaaaagaagatccaatggctgtcatgggataagcttgctaggcccaagatataaagagaccttggatttctgatcgcaacaactttcaatatggccttaatttctgaaaagtggaggagaatcatgtgagtggaaaattccttccttgctgctactttgatagctaattatatatccctcgtgttcatcctttgcaagccaaggtcatcgaaaacgatagt

SEQ ID NO: 70813 - DNA, 136 bp, Glycine max
  Clone ID: PAT_MRT3847_34956C.1
cccccccggaatatttggggacactttgaagattttgacgcctgccccctaccaagctctgaattccgctcagagaagatggacctcaaattgcatgcctggaatacctatgttaccgcctactgctgaaactatc

SEQ ID NO: 70814 - DNA, 334 bp, Glycine max
  Clone ID: PAT_MRT3847_34957C.1
gggaaaaaagggaaaggccccaaattcaaattgagggggcccttgcacccaaaattttaagggaaaagggcccaatttaaaaaaattggggaaaaaatttaaaaaccaaaagtttttttttgccccaaaaaaatgggaaattccaaaaatgttcccccccatttccccaaaaagttttggcccctgggataatgacaaaacctttaaaaaaaaaaaatttttttgggcgaatttgtttggcccacaataaaaaatgggaaaaaaatgcccccctgaaaagaacacccgtggggattttaaaaggccccccctcaaaaaaacttggcacccaatt

SEQ ID NO: 70815 - DNA, 414 bp, Glycine max
  Clone ID: PAT_MRT3847_34958C.1
tcgcgatccggacgcgtgggtttttttttttttttttttttttttttttttttttttttttttttttttttttttttttttttattttttttttattttttttttatttttttttattattttatatttttttttattttatctatttttggaaagtttttatgttctttacgagaaagggataggcgatttttgaccaaaaacttaaaattacagaattttttcagttaaataaattagcaaaacttggaataatttgcaaaaacaaggagcttttttttaaaaaaaaaaaaaaatattgttgtgagaaactcaaaaaatcaacccttaatcataattgcggctaatttatacacatacgaaaatggactacatgttaggtaatagagggttttcttgagaaaaaaaaataca

SEQ ID NO: 70816 - DNA, 246 bp, Glycine max
  Clone ID: PAT_MRT3847_34959C.1
taacttcttcccccctacttctactcaaaccatggtatgagacacaaaatcatgttcaaacacaacccaagtaccaaaccatgattttccctaactttttatttgtaatgaaagttagtttactcagccaaactaggatttggggtgtgtgatctatgatcagaatgttctcttaatagtttggaatatttctgaattttaggaaataaaacaactctgttgactgattggtgtccataatataaa

SEQ ID NO: 70817 - DNA, 309 bp, Glycine max
  Clone ID: PAT_MRT3847_3495C.1
accaaattcagattcagatccactccagtgcactcacttcactcactcccattcccaatttctccatgaaaccctatccccacaatggccgccaccaccaccaaatcctctccaatggccgcaagatctcaaaacctccatgagctccttgactctcccacaaaaccctaaagctcaaaaacgaagcaacaagagcgtctgatccagggtcgccacgcatttccctcatctaacggcctgcgcgttatcacggcgccccttcagcggttctccggctacaagtccatgatcccacgagttctaccccta

SEQ ID NO: 70818 - DNA, 207 bp, Glycine max
  Clone ID: PAT_MRT3847_34960C.1
ctcgagccgggccgcccttttttattttttttgcccccataacaggctagtactatgttctaggtgaaaattgatgccacagataaccttattgggcaacccttggccccttatttattatagggtatatccattgcgtgtaaattaattaataattctgtcaatatcgctgatcagtcgttaaaggtgggattaacctctatacat

SEQ ID NO: 70819 - DNA, 1849 bp, Glycine max
  Clone ID: PAT_MRT3847_34961C.1
tattgacaagaagaaaaaagccttcttaccgaacatgacttgagctttccatggaagaagaacacgccgcaaaggcgccactgccggacgctttccttcagttcctggagaccaacgggctcgacccttccatttacactgctattgattccaccccacgatacattcggttgaaacccggtttcgaatcatgtattgaagaggttgaagcagaggtgaaatgcaaactcgaaaaattagagtggttaccgggattttactctcttccacctcacgttcaaattgctggttctagggcataccgagaagggaagatatatggaattgatgcagcttctggagctgcagttatggctttaaatatatcacctggggatcatgttctcgacctgtgtgctgctcctggtgccaaactttgtatgattttggaccttcttggtgattcaggctctgtggctggagtggatgttgcaaggcatcgtttggcagcgtgtaggacaatgctgcagaaatatatgattggtggtcggtgccggctttttgttgctgatggaacagcattttcagttattcctagcggattttgttctgactgcaaatcatgtgagtctggattggaaggaagagtggatgtgttcaaggagtggacatctagaagaccatggaaagagaggaaaaaggcaaataaaagtgggactgcacaattggtgtctaggtctcagcctcctgagctcatttattatggacaacattctggagttgttggtcttactaaaggagaattatataggactttatctgacaatgagattgcaaatcatggctatgacaaggtccttgtggatgcagagtgcactcatgacggttcagttaaacatattcagaagtttgaagattggggctggggaactcttcagcgccgtgtactagatgctgagaggactgatgacttgcatactcttcagttgaatcttctcaccaatggtttccgactgctaaaagttggagggtccctcgtctacagcacttgcagcttaactattgcacaaaatgaagatgtggtggaacaattcttgaaggaaaacgaaactgctgagttgacggagatagatgctgccagtgattggccttgcaagggtggtcgcataccgaaaacatggcgatttgaccctttaacatcacaaaccagtggactatttgtagcaaagttcacaaaagttgtcatttgatttttttcttccgtgctcagaaaatattctttttaaatgccggacagatttagtatactcctaatacattagaaagtttcatacaatagataattctttcactattattgttgttcttcttcttttgtagtcaaatacttatatttaatttgtcaagatacatgaagatgtttgtcgacttatttaatttatcaaggtgtattaagaagtttgtcggcttatccatttcagtaatatgattagcatttctactatgcttgtgttttgtcaaattttatgtgcttctcttgtagaaattctccatttagattcatattgcctctatcctcaaaccttttaaccctctttcccccaacctgattttgtctcagatttacaaaattatcaactttatgtagttgacctttaaggaaccacgacatctttctctttctttcttattttggtagacaccattaacttgcaaaaggttatgtcggatagtaacaggctaatgctgtttaagctaggaagaatttagctggtgggaatattttctattttcactttttttatattaattattacgagaatgtcacacgatttatgctatatatcttgttttcaaagatctgtacaat

SEQ ID NO: 70820 - DNA, 463 bp, Glycine max
  Clone ID: PAT_MRT3847_34962C.1
aatcaggcaatgggtttaaattttataacatcatcatcaacacaagccttataggcataaactctggtttttatttttattttcccttgaaacgaaagatacatacacacatacctacataggtttggtttgaatagctaaaagattactattatacctgctttcacgattgaaaaagttgcttaatctttttctcgagctattcctttttggctcccacaaccctttaaacttcctttccttccttccacaacacgaacgtgggcatcggctccaccttaaactccttcgccacaccctttaaagataaaaccctcacacaaaaattttttaagaaaaattgatcaatcattaaggcctttttgtttgcagaaaaagaaggcctatctaagaagaacaagaagagagaattgcagttaaataatctgatgagagcgatgcttttacaaggtattttaattca

SEQ ID NO: 70821 - DNA, 181 bp, Glycine max
  Clone ID: PAT_MRT3847_34963C.1
catgcgacatccactaactgggggaggaatgactggagcatgggctgatattgtggtgcagataaaaatgttaagctctttgggtgacctgaatgatgcacccacactctggaaatacctcgaatgattgtataccttgagtaaccctgactcatccaccattaatacatcgaccagtgct

SEQ ID NO: 70822 - DNA, 224 bp, Glycine max
  unsure (1)..(224): unsure at all n locations
  Clone ID: PAT_MRT3847_34964C.1
cgattgtatagcttaatttanagacccgatcacggaattaaacaaaaaaggggggggggcaaataatcaatacgattacaaaatctatatatgcctaaatacaaaacagaatgtatgaatattatgattaaatatataacatgacaacaaaagttttaacgagtaaacacccaccatggagcaacatccgatctgaaaactgtttcaacaccaaggaaacaaac

SEQ ID NO: 70823 - DNA, 708 bp, Glycine max
  Clone ID: PAT_MRT3847_34965C.1
gaacacacaaaacacttctattgatcactttggtattccacacatgcaaaacaattccctcctaaatgatttacttgcataatactgtatgaactttgaaaataatttatatagatgctgttcaacaaattaaaaatataaggaatacatcatagagcagtcccacttgttcaagagagaggaacacaaaacatgcccacctggcatggctactcttttattctacataaatcctctcatggtcatgacaacaacaacaaaaagcacactttatatgtttctttagtaccaaaataaagaagcacacacttaacagtgctagtcttggtaccacgttagtgcttcctttgtgatttgatgcctttaatagaagtcatcaagtgacaaattctcaacagagccaaaggtttcaactggcccaatccttgaaaaattggtcattgatccacccaaaaaatcaagaggggagtcatttgagaaggtagtctcatatatgaatgacatgcctgtatcattcactgcaggataggttacattgaagcaaccaggtttgttcacttcataatcattaaggaagatatcattgatggtatcactagtttcttccataaattcatcctgatcagaagcctttttcgcctgaataacataattgttgttttcactatcttggtaaaccaaaatggaatctcggacgcgtgggaagac

SEQ ID NO: 70824 - DNA, 311 bp, Glycine max
  unsure (1)..(311): unsure at all n locations
  Clone ID: PAT_MRT3847_34966C.1
ctcgagccgcccttttaatgatttgttagagggaaacnncnccgtcgatattaaatctcgctctagatgggaaaaagtaacctctacaaaagcacaatttgttagtggaaaaaccttcaaatatgatataatgggggctggttcacattcttcaggagatcttcccgaaacggaagatcaagaaaaacccaaaaagattgataccacattgagacaaagaatagatcctcaatacactgcgcgccacgctaaaagggcaacaaatttgtttaaaccgtatgtagatgatgttgaaacccccaaagggtcta

SEQ ID NO: 70825 - DNA, 282 bp, Glycine max
  Clone ID: PAT_MRT3847_34967C.1
gagagttctcattctctctctctctctcaataatttctctctctctacagttttctctatactccaactgtggtatttctgtcactgctaagatccccacctaatcgcctcgtctcaggctcatcagtcttttcccttctcttccaagctcataaactcacacacccacgtgcttcattttccccgtcggtctgggaggttttgttagtattagatgggtgtttctggcagggtcgcattcagagttatcgagcgtcagaggtggggggggggggggggggg

SEQ ID NO: 70826 - DNA, 817 bp, Glycine max
  Clone ID: PAT_MRT3847_34968C.1
attcaatccattctaaacaactttcctcatttacaaagcctccacttacaaaaaagaaaaaaaagcaccatcaataatctgtgaacaagggaaaccacacacatagctttaatttgatctaatttcttcatggaggaccaaccattatcatcaaaatcaaagactgctgctttggatcaaacccttcattcaattgggtttgaaattgaagacttgtcaccagaaaaaatctctggtcgtctccctgtcacccagaaatgctgccagccattcaaggtgcttcatggaggggtatcagcattgatagcagagtctttggcaagcatgggagcacacatggcttctggttacaaaagagtggctggaattcaactaagcatcaaccatttgaaaagagcagagattggtgacttggtctacgcggaagctacacctttaaatgtcggcaaaaccattcaggtgtgggaggtgagactctggaagattgatgcttcaaattcacaaaacagatccttggtttcatcttctagggtaactctactatccaacatgcccgtcccagatcatgcaaaagatgctgccaaaccgctaaagaactttgcaaaactgtaaatattcatgtcatttgttcttaagtgaaattcaaatttagcttgaatgtaattatatcaaaccaaggatccaaatgcattcggatcaattttctaatgcttcaagacgtagaccacgatagtcattgtggctcttacaaaattgttcaacgcttcaaaatgtagaccgtgatagacattgcagctcttacaaaattgttcacaaa

SEQ ID NO: 70827 - DNA, 531 bp, Glycine max
  Clone ID: PAT_MRT3847_34969C.1
cgccccacaaaacggatctaatttatgagcacgggcctgaatacatgcctcccaggctgcgaaagcttataggcaacaagaccctctagtgtaaggctgctcttaacaggggaccttacaaactaaaatgaagctaccgaaatgttgactcaggaaccatgtagggcccaattattatactgtgggaccgtctaaacacagttacatgatggaactaggctgcaactgggatcacttgtggcgacgaaaacaagatctacttggctagctataataggaaggttattatcaaaccccagctaaataccattgaaacaaagagtgctttatgtcccccgaagcaaaagggcaaaatctgtgatttctaaaacatgaaaccgataaatactttcaagcagtattcttgcatgcaccagagacatacttggacagaggactctcgagggcaagaacctcagggaactcgttctttgcatgggacgcagccatcttattgtggctgcccggagcaatgatgaccttgtcttgctc

SEQ ID NO: 70828 - DNA, 923 bp, Glycine max
  Clone ID: PAT_MRT3847_3496C.1
cataatgtcgcgaaacttaacagattacgcaaccatcccctctttgacttatggaatgttacggaactttacagattgcgcaacaatgctttctttcgacttccgacttgtcgcggaacttcatggattgcctaatgatgggtgttaagtaccttgaagcagtcaagtgaaggtgtgcatgccaccaaacaaatggtccccggacgaaattagggtatgacagttgcccctctttacttatcttttattggagatgtcataccctaatttcgtttggggaccattgtttgatggcatgcatcctttgcttgaccgcttcgaggtacttggcacccattgttgcacaatacgtgaagttccataacgtgccagaagtcaaaagaaagcattgttgcacgatccgtgaagtttcgtaacatgccggaaggcacctccttctgggtggcaagattctccctcttttccctattaatagcgggaggagggaagaaaaaaaatgttcaaccctcctggtatctgaggatcagttgaaattagtgagaaaaattgtttccgtgaagaaaatccaagccgaggcgcttccgtgggtgatttcgtgaagattttccgccatccttcattcgttcttcgtcgttcttcggtcttcaaccggtaagttcccgaaatcgaacttttcaattcattctatgtacccttggcggaccccatttgtttcgcatacttttattttcatttcatttactttccgtacccccttttgacgtgctttagtaatttatttaagtcattttctcgcctaatcaaaaaataaaataaatttccaccgatcatttgaattgtaatatatgttaatttctgttaaaatgaaattcgaccgttcggtcgtgccgtaaccacgttaatcgaaaaatatcttttttagt

SEQ ID NO: 70829 - DNA, 348 bp, Glycine max
  Clone ID: PAT_MRT3847_34970C.1
gtcaaagttagtaagtctggctacatgaggattaatatctcataccattggcaacatgtattatgacttggaggtgaaagtttgaacttaatcttttaaatgctggatcttcttttgcaaccttataaaagtatccctgcttgaaaatggggagcttattgttattatttggagaaccatctccttgagtcacttgaaggaatctgtattacttagcctagacatagagttcaatttgttgagaatctcaaaatcatggttaaagacatcgtcattatgctcaattgtaggattttgatgctgaaattaaacattgggggcttcttgcaacaaaatgtttgaaattta

SEQ ID NO: 70830 - DNA, 378 bp, Glycine max
  Clone ID: PAT_MRT3847_34971C.1
agaggaagacttctcgtttttttatttttaatttgtgcatgtagcatatgaatgagccagatttatgattgcaacaaagcctcaaagggtgaatcaaattattgttagagtagggaagtttgaagcaattttctgtacaaatatagaagtataaagataaaaaaataacccgcaggtggtgtaagttaataaatttataggtctttatcatttccaagggaaaatacatatatgatgtgagagcttgggcttaaactaattttttgtgctgtgcaccttgagactggattctgtttttacttgaaagttagatattgggtgattaacatgactaattgacatacagattttgtttgccatctgaaacttggtgtgtta

SEQ ID NO: 70831 - DNA, 232 bp, Glycine max
  Clone ID: PAT_MRT3847_34972C.1
cgaacctctcttttacaaaaatactcaaagccaggcgagctatgagtcgcagcgagtactaacggcagtataatgaacaagatctatatttttgcaaatgaagtagacaaaaggagtcattctacctaatataaacatgcgctgttcactaactggaacagaacaaaacattctgatatatgtacttgtacagaatgatgaacacatacgactgaatagagttccccaatag

SEQ ID NO: 70832 - DNA, 218 bp, Glycine max
  Clone ID: PAT_MRT3847_34973C.1
cgacccactcgtacgatttctactcaaacctacacccatttcatttttctcaattcccaatttcaaagtgaaatgggagattttcacaatcttaatgaccctctatttatacttcaccttacaatccctattccactacctctactacttactccctatgtcttctacgttgtcattcctaacgattaatctattaacctatcaaactagtctcataa

SEQ ID NO: 70833 - DNA, 535 bp, Glycine max
  Clone ID: PAT_MRT3847_34974C.1
atttccttaaaaaaaaaaaaaaaaaaaaaaaaaaaaaaaaaaaataaaaaaaaaaaaaaaaaaaagaacaaaaaaaaaaaacgcggactaaagaaagaaagacttaacttatataggcaggccaaaggcggggggcgctgccttgtggggaccaaccttaatttcggggccctgggtgtggttcgccattttttgtggggggccttattttcccttttttgcctgtttttttccacgggaagatttggaaaaccgcggttgttcccaaacgtatgggcctgggagcgccttcccctttttccccttggggggtttcataagggggcccgcccgggccggtttccttaaaagtggccggtcccgtgggccgttcccttccccccgttcctcgggctttttccctggggttggggccttttccttcctttctttacctttccctttgggtgggcgtttacccctggggttttgattttttggctggcgtttaccgccaccgattaggttttttccgggaaatgtttcacgggggggg

SEQ ID NO: 70834 - DNA, 670 bp, Glycine max
  Clone ID: PAT_MRT3847_34975C.1
attaattgctcatcactatatacaacaagtcttctaatgtcactttcttcttccagctttgtttccacgttctgcaattaaaagaaacaaggattcctttctcctccaaaaacaatggaaagcaaccaatcggcaaaagagatcacggtggaagtagaagagttcgaggacttgctgcccgtggtggcagagaagttggatgtggagacctttgtgtctgagttgtgtgggggtttcaagcttctggctgacccagaaacgggtttgatcactggtgagagtcttatgaggaactcagctatgttgggtatggatgggatgagcaaagaggaagcagaaaccatggttagacagggagatcttgatggggatgggaagctcaatgaaactgagttttgcatccttatggtgaggcttagccctgggatcatggaagatgctgagacctggcttcacaaggcacttgaacaagagctcaccaagtcctcaacttaaaattccaccctttagaaatcaattgtaagttatatatacatcaataagtgtgtgtggctgtgtacatgtgtcttgtatgtatcatgcaagttaaatatactcatttgacactccatgaatgctttctaaagggaatttgagtataataaaatgaatctgttcagtttgttcgatt

SEQ ID NO: 70835 - DNA, 335 bp, Glycine max
  Clone ID: PAT_MRT3847_34976C.1
gttacacccagtaaattttggctttgaatatatccggttatcttgttagttatctggaattgttgtgtctggttgtcttgtgtcaggttcatggtcaaatataaaataaaaaatgctatagcattgttgtttcctttagcttaagcatgtggcagccctccttgaattacagtcctagcttctctgtaggagactcctcactatacagagagccttggttgaaaccagggttatcctatcttgttgaaacatctagtgtcaaggattaacgcttaaaccttgaagtttataactagaatggtaattttcttataattcccccctcagtgcttaaa

SEQ ID NO: 70836 - DNA, 259 bp, Glycine max
  Clone ID: PAT_MRT3847_34977C.1
caagaaagaacagcaccacatactgttatgattaacctcttgcattagaaactgccttggaacattcatgggcaatccaatagccatgatttcaaagagccacagataaaaatcttttaaaggtaacagagcttacatttgcagataaagatggtagctgaggttctcctcttgttcctgtggagaattatcctgggctcaatgatgttggcatggtagcctggattatggaaatgtgtacccctgagttcccatctgg

SEQ ID NO: 70837 - DNA, 456 bp, Glycine max
  Clone ID: PAT_MRT3847_34978C.1
aggaggggggaaaaccaaactggggggcggataaaaaagaatcaacccctgggggccgatttcacaaaaaattctttgcagcaaatgttttcgtgccgctaatcaacaacgggttattgggggaagataaaatgaggcgcctagataggggaaccccttcctgacctgttcaaattgatgagggaagcctgctgcacacaacccttgattggtttcaggggcatgcagtttctttcaagcctccccttaatgcaccacattacttcctttttcgaccagccaatctttaactcaatattggccctgatgcaaattttgtatttttagccagcactattcctaaagccagggcacctccaaacaatgcttgaagcctcacaccgaagtacttacccatgaaaatcctatttttgttcttggaattggcttccacaaaactaaacttccacggttccc

SEQ ID NO: 70838 - DNA, 393 bp, Glycine max
  Clone ID: PAT_MRT3847_34979C.1
ataagttatgtatttataaaggttcttatatataaacattataaagtttgcagatcgtttagctgaactagattgttggtattacctactagctaagcattcatttattttgtaatttaaaatcgttgatgtataagaacctctataagttatgtatttataaataattttgtgcttcgatccttgaagacagaaaaaaaaactcatacaggtaatctcatcataatatttttagtattcctttgaaaaaaaatcaacagttatataaactccatgtataatagttagtctattaaccagtattgattatatttatctatctatctaagagaaataagagttatcttaattaattcagctctcaatcaacacaaaccatatgacgcacaaaga

SEQ ID NO: 70839 - DNA, 265 bp, Glycine max
  Clone ID: PAT_MRT3847_3497C.1
ggaggaatcagaatcgggagggggagaagaagagcaaaatcgccgagaaaatgagcggaacggggaagaaaggaagcgatgaagcattcaaggagggaaggaacatcgattgggatggaatggcgaagcttctggtctacgaagaggctcgcagggagttctccaaactccgctgcgcttgcgacgagggaaactcccaacgacaaaccaagtttagccaggaacatgagcccaaagaatgggatgaataagagaaagggaaata

SEQ ID NO: 70840 - DNA, 128 bp, Glycine max
  Clone ID: PAT_MRT3847_34980C.1
tgggttcgggtcgtgtgtcaataactcataactcttttgcagcatgtcagccgctcatatactatacccttttctttgtaggggaaggtaatgttgtgtctctaggtgcgaaaactttcccggagaca

SEQ ID NO: 70841 - DNA, 155 bp, Glycine max
  Clone ID: PAT_MRT3847_34981C.1
atcagttcccaagttgtttttttttttacatctcattttctatttgaatattgccagctaagaacaaaactgttaatcgacaatggagaagttcatgtgtagtaaaagcaaggtagactattcatatactaatcgtgaaaactaaagtatttttt

SEQ ID NO: 70842 - DNA, 586 bp, Glycine max
  Clone ID: PAT_MRT3847_34982C.1
gtttcagtgcaccttctaagtacacaccctcgtttatggatctgccacctagggagaccatgaagatggacctacacaacaaaaaatccatgccatcgatgtctccaaagaagaagttgacggcaaaatttgctctgatgaagtcccggccactatcggagcaggagatcttgacggaggtgactgctttagtcacaaaacaatttgcaatgcaagagattttgtcggaggaatttcgacactgtcgaatccgtaaactatcgtaacctctacgaggtgctctatgacccgtctttgacgttgtcgttgaccgtcaaattgtcatggttgttagagtcgtccagaaaatcactatcagttcttgaatgtgctcaagacttctttgacctcctcatctgagaaatccatcgccggcgaggctcctcagtcgaacaccaaagacggagcttcctctgcagttctctatatgttgtatttaccgtgtatcatcaaggtttgtccactttgttacccgtaaacgagtagaagaaaatgaccatgtgaatggtttaaataaattaaaaaaaaatctctgttttctgttttc

SEQ ID NO: 70843 - DNA, 202 bp, Glycine max
  Clone ID: PAT_MRT3847_34983C.1
caaccagagtgctcccaattgttgattcatacttccaaacgggtgggagctcattgggcttcttgtagtagcgaacaagtgggaggattctgctctcagcaagaaacaacctggacttggagcggctgtccttcctgttgctctcaggatgctatccaatggaaactgactccgtatccaaatgggaaagaacctgtggaag

SEQ ID NO: 70844 - DNA, 386 bp, Glycine max
  Clone ID: PAT_MRT3847_34984C.1
ggggctaaccgaaacttcatatgtatatttacatctatatgcatatctattcgggcgcattccatgccaatcctatcacactgaaacgggctgcaccatctcaaaggggacctgatttgacacttggcaaaaaatgcgtatgaattggtgggggggggaccactgttgctgagcagcgaggagctgggactgtccctgtaacgaccggggactaaaggggaaaagggaagaacacccaggatgccacttgtgcacctgctcctacaaatgcattgattgtttcagatggaccacgccggcagctatggttgaccaacagctgaacacacactgtgccgatgtgatcccggcactaaaccaccttgacgtgtgtaatgctatgtacg

SEQ ID NO: 70845 - DNA, 249 bp, Glycine max
  Clone ID: PAT_MRT3847_34985C.1
ctcacacaacacacatcacacaccatatcatatccacctctttgtatatctcaacctttattcccatccatcatctcatcacaatcctcccacttgcacttcctcttcacttccaccaatcacaccaacaatccttaacctctaacacaatctataccactatcaatctccttaccacattaacactatctcacagaccctaccttttcaaatacttaacaccactctctaaccactctacttactacc

SEQ ID NO: 70846 - DNA, 417 bp, Glycine max
  Clone ID: PAT_MRT3847_34986C.1
cacgcgcccggccggaactgccggacccacccacgccgttcgtttatagcaacaaaagacccagatcatgggacagatgcgcgaggactctgccacatatcaagggagctatagaacctatccttgggagaatcgcgagaccatactcccacatactaaggacaaagctttgaaaaaaaccgcccaagacccagaagaaaatgaccagctttacagtgcatagggagaccatcataaggcgagggccaacactggtggttacactgcctaataccatccagcagagcgaaccacacagaacatcaaggtgacattttaggagaaccactaccaatgcagaccccgttgaaggataagatcacccagggaggaccgtttgtgggacctgagctgattgttgcaggacatgaccctaca

SEQ ID NO: 70847 - DNA, 175 bp, Glycine max
  unsure (1)..(175): unsure at all n locations
  Clone ID: PAT_MRT3847_34987C.1
ctaacacatacactactctntctctctctcttattgnntggccaccaagagganancactagagatcaccagaattanggaaacgagtcgacaaccggatctggacttccaacgcacctactctaacttcaaggaggggagcatacaataacggctcagagcacaacaagaaccc

SEQ ID NO: 70848 - DNA, 275 bp, Glycine max
  Clone ID: PAT_MRT3847_34988C.1
ctcgattcggctcgggtaatacatccttcaaatagttgtcttcggcgtgatggggagtactaactgctcatgaatatgtcaagcctactcagcgttctaaatgaaagctgctcacggcaaatatcaccacactgacggatgacaaactagtgcactagcacttagaaagtgagcagattgagattttctcatgagaaacttcaagcagatgtctcatgtgttgtgggtggcttctgaggacaaggcgagcttatactcacaactccattatggat

SEQ ID NO: 70849 - DNA, 395 bp, Glycine max
  Clone ID: PAT_MRT3847_34989C.1
aacagggacttggttactctatgtgctactgcatttcatggttctaactcaactttttgtggccttctgtttctcgtatcgaccatttaaatgaaacttcaaatggaggagatggaggaaaccaactggtggctccattccttcttccttcttggtttatcctgaagctcgatctgctcaatttctatcctaccttccttatttctaaatactagacaactgttcctgtataggggaaagctgcccatcgctaactgcattgaacttaaatataatctatgtgttacttacatccacaccattgttttatttaccacccatgtcatgtgtttctgaatctatatgttgatgcgaactccatatggtcctcctttcgcacttattcaaggaacatt

SEQ ID NO: 70850 - DNA, 139 bp, Glycine max
  Clone ID: PAT_MRT3847_3498C.1
gggtttatgccataaccaatatctaattaagtatgctacaagcataaacaactgcagggaaatgacagtttatacacactctgcttttagatcacaaagacctcatggacgacaaaagacatagggggcccaacacaaa

SEQ ID NO: 70851 - DNA, 130 bp, Glycine max
  Clone ID: PAT_MRT3847_34990C.1
cggataacgaaaaatgatcaaaacgaactttctatcgacgtcttgcccatcgaccttagtagctagacgcgcatcagaatctgcattcgaagctaggcctatgatgtggaaacttgaaatagactcagtg

SEQ ID NO: 70852 - DNA, 237 bp, Glycine max
  Clone ID: PAT_MRT3847_34991C.1
aaagccaacccttggagtttttgcattaaaatgaagcctgaggggtaatttttaggggggttttaaaagaaaaagaggggtttaaattccaggaccccattttctcaaaaaattcccttttccatgtaacccagggaataccatttcaaaaattagtggccgtcgcaatgggccgcccccatccctcaagtttttctcaaaccatttttgaattttccccctgaacatttggggggg

SEQ ID NO: 70853 - DNA, 747 bp, Glycine max
  Clone ID: PAT_MRT3847_34992C.1
ccacgcgtccgtgaatatacaccagcaggacgggccctcaaggcaaaatatggtaaactccgtgctcggcaaaaggaacgacttgcccggataaaagcgattaaagaatcaaatcctgctgagggatttccaggtaatgagttactttcacattctccagccattgccaagggtggggatccagtggctggaccgatgcattcagatcaggaggggccttctatcaacctagaagacagacaactttctgaagcgaagaatagcaacactgactccttttcaaggatcaataagctttcaaaacataaaatgaccagtcattttgatgcttctgtcagtaatctaggtcgttctctccctgacatttttcttccaagtcaccctaaagtggggctgagcatgacaaactcaatgcccaccaacaatttgttgcctgtactgggactttgtgctcctaatgctaaccaaatagaatcatcggaaagtaatatttcgaagttaaattggagacatagacatggatccagacaagagtttccattcagtcttgccccttgctctgggacatccatggatgctgaggtcagaagtaaggaagtggcagcaaataccaagctggcagatgcatcaacagaaaatttacaaccaagtttcaaaaatagcatccctgataacagtctaacatttgttcctttttccaccctgtgtgcaaggaaaggaatctgatgcatttgaaatttcagtgct

SEQ ID NO: 70854 - DNA, 108 bp, Glycine max
  Clone ID: PAT_MRT3847_34993C.1
ggcgggagaaaaaaactggcaacgttgttgaagaataatactagccagggaccaccaccgtcaaagactgaccagtgacagcatatactccaaatcacgggtgtgaag

SEQ ID NO: 70855 - DNA, 271 bp, Glycine max
  unsure (1)..(271): unsure at all n locations
  Clone ID: PAT_MRT3847_34994C.1
ctgccgccatggccggcgccgtcgctgcccagatctcgggcatcncctcagcagtgcactgttcagctncggcctgctcgntgttggtgaccttggccagtgtctcgccctccagcaattgatccctcttgtcgttggccaaaacagcggatccgtggtcgagcccctcgacaactacctctcctccctgtgctccaacagcacagccaagtgctccaacgccaccctcacctcgggcccagtccaccgtcgagtcggcgtgcgcgtccga

SEQ ID NO: 70856 - DNA, 372 bp, Glycine max
  Clone ID: PAT_MRT3847_34995C.1
cgtccaagctgcaaaaagacgaccgaaggggaactcaaaaaccacactaccatagcataacccttcgaaatcctcctttaacgctcctcgttcgcaacctcaacctttccctgtctctgaaaaagattaaagttgtccctgccttactgctcgccgttctcggtgggaacaagaacccctccaacgattacatccacggaatcctccgctccgttggaatagaagccgattaagatatgaatgaaaccttcctgtccgaagtttatggttatgagataattgaaccaattgctgccggttaagaaaaactgggctcggttccctccggtggccgttgttccgttgcccttgccgctgctcctggttgaagtt

SEQ ID NO: 70857 - DNA, 172 bp, Glycine max
  Clone ID: PAT_MRT3847_34996C.1
gcgctggcgcacaaaagcatgggaaaaaaatgcagacgaggatgctcccatgatggtcatagtcaacccacgtgctatgttaaagcctccggtacctgctggatactacaataatgcctgtgcctaccccgcggcagttaccaccgcaggcaagcttggtgaaaatccagtt

SEQ ID NO: 70858 - DNA, 591 bp, Glycine max
  Clone ID: PAT_MRT3847_34997C.1
gcacgagggtttggtcggtactggaagttagcctagaggggatcacaacatgatcaaatcaatattttgatcatccttcaaaaactttacctaccatgtattgtcaattttgcatcaagagtaagaggtgtgcgaaagatgttaaaaaacagtccacaaacaattttggatacaacatcaagttttttggggtcaacacaaccaccattgcggccacattgatcacatttgtccacaatttcccacaatatcaaagatcacaacaaaccgcaacccttatgtgcaactatttattgagttgccatcggatggaaagggacagtgttcagtgttaactgaattagctttctcgacaatgaaaacaaactatagtactgacaaaagacagacaactagacaaatgcagtgtccagaacatcgtggaagcaaataaaacttaccaaggtagaaaggagttgagacaatccgaaggtaaccaagtttggcttaaattggctaaatgatcctctattatgaaacctgtataaccttgactactttgcagtttatattgaattaaatcagtttatgaatacttctactgtcaggtct

SEQ ID NO: 70859 - DNA, 1141 bp, Glycine max
  Clone ID: PAT_MRT3847_34998C.1
ggttggcctaattgggtcagtcccaaacctgtctgcgagaagacgacagaagggggatgcaatactgcaaagcactgcactgaattggattgggtttgcagcagaagcagcgaaggatatggcgattcttccttctcttgcagttccttcaactcccatttctcgggtaaagctgtttcaatgccaaccctgtcaattccatagatgcacagaactatatcttcctcatcaaacatattatactcgaactacatcaattaaagtatcaatggcagaccaaaatgagccgagtgaggttaatatgcagattgggatcatgagggagaaacttaaagaaacactgccagtctcagttcaagaatttccttggaaaaaaagctgagcatatactcctagacagactacttaatcttgcacaagagacagtgaagtggtctcttgttctgtttttcatctttagctctgtatctgacgttgtatatacattctccataaaccgtgaactggtaattcccgttggcctctttgttggctgtcttgcggctgatttcttgaaggagatatcacaagaattgtttcataaatctgaggaaaaggatttgaaacggcatcttctgggcatgtattgcctttttgtgtttgtcaaatttatgtccacatggtttgcagcactacctcaagtgtttcttttgcatgtcgcaaacgggggactgatgcaggttttgtggcatttgcgaatttttatggaagatggaaagaacaaacaagaaactagtagctcctctagtttggaggcttcatgatagatggatggataagttaagttttccagcacatctttatgagcagattgggttgaattctctgttaatatgtgaccaacatgatctgctaatctttctgccagtttctgctatgcttcttcaatatcatctagcagcaattaaccactcgcaatcatcttgcacatgttaaagtggttacttttttatgattatttaagtggatgatgcaacataggggaggagcaagttataagcatcatgtaacaaatagtagatgaacaacgactaattctgttaatgtctatgggcattaccatttcaatataaagaaagataatgctttttgttaaaatttg

SEQ ID NO: 70860 - DNA, 350 bp, Glycine max
  unsure (1)..(350): unsure at all n locations
  Clone ID: PAT_MRT3847_34999C.1
ngtcgnntgcacgcgtncgtnagctcgganttnggctcgagnncanagaataattccagttctgctggntgtnggnacnaacantcnannagttattgaggactcgtntttgntgggctatgnanacggcaatntctgcgagggaggaaatangnnaatctanatcgnatntccncnccngaaatnanaccactngannntngcagtnagnnnanccnntcaacgacagnctgagannacatccgcgagntncggagnatnnactgcaangcnnantagctgagtnaggagnantcaccacanagncacagngcnannngnnacnnagcnangnnaancacagcaanncc

SEQ ID NO: 70861 - DNA, 889 bp, Glycine max
  Clone ID: PAT_MRT3847_3499C.1
ccacgcgtccggtctgcacaatatcaaacaatgttatatcagcctttttaattgcaatgttatatctgccttgtttttttgcaaatatggtgagtttatggatgccttgctttctgtagtaaggtggcaactctcttagtatactaccaatctctaacagttttgttaacaacaacaatgtaccatttgtggttttgtaagcatcactgtacttggttttgttaacttttcccaaccaaggattcacaaaacactctacaagcttatgtcaagaaccagattttacatttaacaaccatcattgcttatgattaatgccaaaaaatactatttaacacaactgtaataaagtacctgtttaacaccatcactcaaactcaagtcacaatactttatttcataacattcacaaccgacaattgtacatttaggaatatatcatcaacatgaaaagtttcacaaacttagtcatattccactaaattctcaacctgatcagcatcacaagcttaaattctcaaaacaaagtgtctacccaaacttactcatatttcactaaatacatatttgaaggctaaatacaaaattaataccaaatttgaacacccataaaatcttctttcactaacataccaattcaacaattcctcaattacaatctgcatattacaaagaaccaaaaaaatccccatgactttcttcctaactaattacaaaatgtcaacatgttattggagccgaattactaccatttgcacagactcaacaaacaaaccaccaacaaccaataacattcccctacgacattgccaaattacattccctgctacattctcaaattacagacctcagatacataataaagacactaacaagcaaacacagaccc

SEQ ID NO: 70862 - DNA, 625 bp, Glycine max
  Clone ID: PAT_MRT3847_349C.1
ttttgtttttttttttttttttttttttttttttttttttttttttttttttttttaaacccaaaaactcggtgcgcttaaaaaaaatggaagggggggttctccccacccccccccattaaaacagaatgataaaaggggttttgcccccggctatcaaaaacccatttttgggaacaaaagttgcaaaatgatgggggaaacttaaaactttgcccaaaaaacaagcctcctaaaaacaaaaacccgggggcaagaaaccaactttttttggacccataaaaaaccaccccccctgaagaacccaaccccacgatttacttttttttttgggcagccttggggaccttggctccaaaaggaccctttttccccacgtttttggtgacccccacagcaacagttggacccatatccctgacaaaaaaacgaccaagggggggggaccccaaaaaagttccaccccccggggggtgggggggaatcattttaacaaaacccggatcacccttcttaaaaaactgggggtccttctcaagctttttgccaaaacgcctggcaattttgggcaggagttcaaaaaactcgacaccaaggggggaaggggggcaaccaaaaaccgggg

SEQ ID NO: 70863 - DNA, 580 bp, Glycine max
  Clone ID: PAT_MRT3847_34C.1
ccaaaacaaattccttttttatttcactttgaattgaaagtttatagatcagtatttcacagagcagttaaattcaaacccaggaccttgtgagacaataacctgcttggcagttgagccagatttccaatcagatactggatgatcactggttacatcctcagaatttgaaaatcttcgactagatgacggaaacaacaaaggtttcctatcggcaaataaattatccttctttatcccattttcatcccatagggagggggctaatggttgaacatccacaagaggggagaagacctccatgtcatccttgaagttataactagcacggggagcatgcaacctggacagggttccacctggccataaatggtttcgttggggagtttcttcggcagtagatacatttagtatgttggatgtaaaaccactgccagatgccgtaagtgaagaaccatcaaaggaggcacccagccgaccagagttcctagtacttgacactgatgtaaaaagagaattgtttgatgaagttgcagaaggtaaaggatcaggcattagtattgaatcttcaactgtatct

SEQ ID NO: 70864 - DNA, 226 bp, Glycine max
  Clone ID: PAT_MRT3847_35000C.1
tgttgagcaggcaattgaatctataatcgcccatggtcttattcaagatgctgaacagatgggtctttcattgatatcaattggatgcatttccacgtggaaagggaagccaaatggttattatgcaactaaatctgattggtcagaacttgccattaaagtatacataacatcttgtttggtattcaaagattgagatagatatgtgccaggagactttccattt

SEQ ID NO: 70865 - DNA, 341 bp, Glycine max
  Clone ID: PAT_MRT3847_35001C.1
tttgttgcgtgggcggacgcgtgggcggacgcgtgggcaatatttgcaaattaattggcatgacttgaaatttgccatatctttgttacccattacaaaatagttccatttttcattttcaaattaatatatgaagcgaaactgctatttggatcttcgtcttcagtcttcgtctcctcatccctatcgttcaatgaataggacgttgaacatacacaataaacttgtagctattcttcataatggacgccaatgcatttttgacacggcagaacttcaggcaagagtgataatatggttagcaagtcgagaaatggagggaagcacaagcttgcattctg

SEQ ID NO: 70866 - DNA, 981 bp, Glycine max
  unsure (1)..(981): unsure at all n locations
  Clone ID: PAT_MRT3847_35002C.1
cttcaatatttgcaaattaattggcatgacttgaaatttgccatatctttgttacccattacaaaatagttccatttttcattttcaaattaatatatgaagcgaaactgctatttggatcttcgtcttcagtcttcgtctcctcatccctatcgttcaatgcaagcaatctggactctttcttttcagtattttcgttacgattcccttcatttgtatatctcaggaattaagcaagtgggattcttcttacgttatttgctaattcttctcattttctgtaagatttttgtaggaataggacgttgaacatacacaataaacttgtagctattcttcataatggacgccaatgcatttttgacacggcagaacttcaggcaagagtgataatatggttagcaagtcgagaaatggagggaagcacaggcttgcattctgaaaccttattaatacatgtctcgcgaggcctttccataaagaaatcacttcaaaatttccttcagaggagaatcagaaagaaaaggtctcagccacatctcccttgtaacccaaaatgacaaaaatatgaattaaatcctagcttgttcccctctgggggcaggaaaaatccagatctgcacgagtataatactatctggtctggcacatttcttgaatgaagaaaggctctgccaacccaccaccacgacagctttgttaatgtcactgcaacataataattcagatttgcgtgcttgggcaaaatagacctgactatctggtcttgatgatgtgcatcttattttagattaactcttggctagtgagactttcgtgtctcatttgtaggttgttgtgcatttctaattcattccactgcaaaaaccagtaaactccagtccaatatgtgtattaatacacaggaatgagtcgattagtagttatatatttttttggtataacatgcataatatggatttgcaaatgcnnngacttaat

SEQ ID NO: 70867 - DNA, 368 bp, Glycine max
  unsure (1)..(368): unsure at all n locations
  Clone ID: PAT_MRT3847_35004C.1
cttggactctcgagagcggccgccctttttttccttgttctaatgctctctancaactttcttggctgttgtgatccgatgagtattcagtagcttataacacatgaaatgtttcagtatttatttcaaggtcgtcactctttatgcttataaacttancctgctatatgattgtttataaacttatattgaactagggttttatttcttattaattatacttcatctagtcgcttctaatttatcttcattgttcgctcccctccccttgattgatgcgcctactttccgcagtgtcgttgggggcgcctctgacggtggacagtctgcagaagctttgctcatctttagaacccattcttcgggga

SEQ ID NO: 70868 - DNA, 179 bp, Glycine max
  Clone ID: PAT_MRT3847_35005C.1
cttctatcgagatcttcaactaggtatcttcacaacctctattttggggacttgggccacaatgtcttgcagcttggacactttcaatgttaagtataattgaactatactcacgtcaaaattctctccacttgcacaaattacatgcatgctgaaactacactaatagccaaatgcta

SEQ ID NO: 70869 - DNA, 220 bp, Glycine max
  Clone ID: PAT_MRT3847_35006C.1
ccgcaaccacatcatgtccaacaaagccatgggtaactactccactccttactatctctctgctggccatcttaacctaggaccactaatggatcctgccttgcagtacgatatcaccgacaatgattatggtactttcctttgcggcattgcctactcgcctaaggcgattcaagtaatcactcgaacgcctgcgagatgtacactgaggaggcccgca

SEQ ID NO: 70870 - DNA, 459 bp, Glycine max
  Clone ID: PAT_MRT3847_35007C.1
ctcgagccgttcaatgcttcatcatggaagtgatagtacattcaaacatgacgacagtaagtggaaaaagcaggctgcgtactacaagaagttgagccctgagcttgggactgacaaaataagaaacataatggacatgaatacagtatatggaggtttcgctgcagccttgattgatgatcctgtatgggtcatgaatgtagtctcatcttatgctaccaatacactccctatggtttatgatcgtggccttattggaaccttccatgactggtgtgaagctttttcaacatatcctcgaacatatgacttcttcatcttgatagactcttcaccctagaaagccacagggtctttttcgtggtgaactcatttaaattgagactgattaaggtgcgaaatgaaatacgtgctgctggaaatggatcggatcttaccggctaatgggtatgcaatcat

SEQ ID NO: 70871 - DNA, 959 bp, Glycine max
  Clone ID: PAT_MRT3847_35008C.1
gtccgctcctccttgttccttttctttcgtcgcttccgtattattctcctcattcttggttgatggcattacaccaacaacgtgaggttggttattggatctctcactagttttagagagagagagagattcagaggaagagaaaaacgtgtggttatgtgattgtggaagagagaactgagacggcattgccaattctcccttgatctatgaaactgaccctgcaaatctgaggccacaatcggtagagattgtttcattttcataacaaaaaaaaaaagaacatttcagctctaagcctctaaccttatgagttttgagctggtttggtaaactgtgtttctcttccaatctattccctttgattccattggttcatctcaacaaacccttttgactgtctacccttctgttgcaagttctgtgatcctttttccatttctatggacgcaaaagaattattctccacaaatttgatagatggcactgttacctcacacatcaagaggcaatgcaattctcctcctacacttattgttattggtgctggaatatcaggaattgctgctgcgcgttgtctccatgatgcatcttttaaggtgattgtattggagtcaagggataggataggtggcaggatttatactgattactcatttggctgtccagtagatatgggagcctcatggctacatggtgcttgcaatgagaatcccttggcaccattgatacgcgcattaggacttacactctatcatacaggtggtgataactctgtcatatttgatcatgacttggaaagctgtatgctatttaacattgatggtcatcaagtccctcaacacattatgatggcagttggagacacttacaagagaattctggcagagacagtaaaagtgagggatgagcatcctgatgacatgcctattctacaagcaatttcaattgcgttaaat

SEQ ID NO: 70872 - DNA, 412 bp, Glycine max
  unsure (1)..(412): unsure at all n locations
  Clone ID: PAT_MRT3847_35009C.1
agcaagggataaagatggaccccaagncnggcatggnttctagaacatngnngnggctgncaacgagattctatccagaatagaatgatcccttgtcttttgatattggagattgacctgttcttgataagtttatgccaacagctgacaaaattgcttgtttcaagaagtggtgtagtgaaggatatgcactcaaaagtaggctgcacaatgaaataaccctgtgatatagaattatagatcaagagtttgatcattcagagttagataatactgatcaatgtttaatatatttgacagaaaaatgatgctcagcttctgtgacatcattgatcaggagctttagaaaagaacgattgtaagcatatncaatttgataaagagagatctgagattaagttttgaactgttc

SEQ ID NO: 70873 - DNA, 624 bp, Glycine max
  unsure (1)..(624): unsure at all n locations
  Clone ID: PAT_MRT3847_3500C.1
tccgggatccaattaataaatctcttttcatttcttttcttgcatacaacatgtactcaacaaagagcatagctgattcagcatcatggtgttgtgccttggcactattgtgtctaatactattggggtccataagggacaaccatgtgccggaggaggaagaccctgcggcggccgccaccacgagagggcggagcaacctctttgaaaggccgtgtgatgagatatatgtggtgggagaaggggagaccctacacaccataagtgacaagtgtggtgacccttttattgttgaacgcaacccacatattcatgaccctgatgatgttttccctggccttgtcatcaaaatcacccccacacccacatacaccaatactaagaaattgttcaagaggtagagcttctatagttttagttttctttttcttctcttttttacttttttgttttcttgtgtatttcattatgtatatggttatggtatacccaggtatagttgtgaatgatacgtgagaagaatataatatggagttttctttttttgatttttcaattttatagaagttgaaagtaatagtgataaacactttctgttnnattttcacaagagaaatagaatca

SEQ ID NO: 70874 - DNA, 545 bp, Glycine max
  Clone ID: PAT_MRT3847_35010C.1
tttttatcgcgtgggtcacaaggtagcacatttgaggggcgtggagaatctgtggatattgtcgatattgataattgggattgtagctgcaagggatggcaacttactggcatgacagcagggcacaccattgctgtgtttgaatgtgttggtaggagcccatatgattattgttcgagatacttcacagttgagaattatcgattaacatatgcagaatctattcaccctgtaccaaatgttgacaaaccaccagtccaaggtgaatctacttctttagttatggtaacccctccaccaacaaagcgccctccaggtcggccaaaaatgaagcaagttgaatcaatagacataattaaacgtcagcttcagtgcagtaagtgcaagggacttggccacaataggaagacatgcaaactatcatagtatcacaattaacaacataggaatcgtttttgaatcaaaatgcacatctctgagctatttccaacaacagtagagaattgagatatattttagtggctgcataggatttgattcagatc

SEQ ID NO: 70875 - DNA, 151 bp, Glycine max
  Clone ID: PAT_MRT3847_35011C.1
gaagagtttgaagaagcagcttgaatttgtcgctgtggagagcagaaccccagaacagacagtttcagagagatgggtatgaggtgcgggtggcgttgtggttccgtttggtttgtgggtggtggcgatgtgcattgcagggtacatagtg

SEQ ID NO: 70876 - DNA, 415 bp, Glycine max
  unsure (1)..(415): unsure at all n locations
  Clone ID: PAT_MRT3847_35012C.1
tccaatcttggtttttaaaaaactcaggcggtatgccgcgccactacaaatggtgatggcacttggcaacctcatagaattacactacgagtattctacgtccgataaaagctatggagacttgtactatagatggaggatccaacacactgtatcatgaatcctctgacacaagcacaagctgtagaacctgattaaagctactgtgatgcacgtccataacgccatcatgatggatgagcctaacgagctgaaactaatcanacatagggacatgaccaaccatggaattaggagtaccgatgctagctcaaaggttgatgacggcatactgtaccaaggctctcacacgaggcaaccggacctaaatggatgagaaggctgggcgggatgcaccttctatcgactgaaagca

SEQ ID NO: 70877 - DNA, 436 bp, Glycine max
  Clone ID: PAT_MRT3847_35013C.1
ggggaaaaaccttttccctttaaaaaccctggaaaaccttttaaaaagggaatttaaaagattttcttttccgacaaatggacccccaaccttatacaaaggtcccggccgggttaaacacttcaagcttttaaaaaaaaaaaaaaagaatccccttttttaaccgggggggggttaaaaaaaaaaattttcaaacccttttttaacctttttgggaaacccccccggggccttaaattttggaaaattaaaaccccctccctttcccggaaaaagtccaaattgcctcccactttttttttaacctttaaaagtcccttttttgaaaaaccccggaagggtttttttgaaccaagttttttttgtttttttaattggcgggggtttcccagggcttggggccccaaaaaaagcgggggttttttttgggtggggg

SEQ ID NO: 70878 - DNA, 783 bp, Glycine max
  Clone ID: PAT_MRT3847_35014C.1
cttgatgcctgctggaaatataataacgattttcccattggagaaggagtagttcctgatgttgttgatgtggaggaggaagagggtccaccgaggggggcgggtaaggaactgatccccgaaggccaaggtgatcgattcttcatacatggcgatgatatttttttctttggagaaggaggagttggtaataacgtggatcccccacaagagaatcaaactcagccaccaaataaccaagatgtgaggtcactttgtccttggcccccaccaccagagccattctcttgcagttgctgtgaagttcttagacaaataaattacaccaatggtaatagataaatattttttctatgtcaagttttgaataaccatatagataaataaatgtccacaattctatatattatttcgggtttgattaatttttccgccgtaatttttgtttcccgttttaaatttaaaatatatcgcaggtgttaggtttgacaagcttgagattcatggaacagtcggggtgattaaccacgcaatatgccacgttgaggataagacatcgaatcgtcctccaagggacacttatcaaataatcgagtacgttttctaacttctaagtcttgcattgctactactatttgcatgcatgcaaacaaagtttcgttgttattttatgttttagtatttacttgtcaatcttttaattacttttttgtctgcaattattatcagtttctgcaataaaaacacagaagaaataaggaatttcctaaatgtttactgtaa

SEQ ID NO: 70879 - DNA, 368 bp, Glycine max
  Clone ID: PAT_MRT3847_35015C.1
ggctcgagcttcgctcccacccttcgatgacctcctattctcccctcatcggaactcaaaggggcgatccgcgggattcatatagctaaaccgcaactttctcttcatccatcgcaagaactaggtcaatctcaaccgcgctcctccgagtaaaagcttcactcactcaaatactcttgagatctgtggggttcgattgcgaatctcactctgacgctcggcttagatcgtatgagatgacgattataccgaaaggcgactcggctcaaataagggaagtatgcaacgatcacacacagtgaggggtcgcgttgatccgtgaaatcgccgactagtataactacgagccgatggataccaagttcccc

SEQ ID NO: 70880 - DNA, 195 bp, Glycine max
  Clone ID: PAT_MRT3847_35016C.1
ccaccacctgctcaacgcggagctctatttttccgccttcaagacaaagttcctcagaaggtatcttactcatgaggaccactatcacccatttcgtatattcaagattcaacttgcttcgagccaagttataccataaattggacccctacgtcgatcacggaggcaccataatctccctttctcactacgttt

SEQ ID NO: 70881 - DNA, 418 bp, Glycine max
  Clone ID: PAT_MRT3847_35017C.1
atccacgtcgtgcgctgttccgtatgggcaaccataaaattgtaatgtgtgaggcattcgacaacaaaatgcagccccatgtgaccaacaaccgtgcgcgatgtaagcagacattggacgcggctgccaaagagcacgcgtggcttggcatggagcaggagtacacactgctggacgttgaccagcatacgttcggatggcctaaggcgccgttcggcttccccgggccccaagggccttattattgcggtgctggagctaacaaagcttatggtcgtgatattgaggactcacactatcgcgcttgtctttacgcgggtattctgatttggggtacaaatgccgaagtgatgccgggccaatgggaatttcaggtcggcccatgtgaaggaatccaaatgggagatcagctttggat

SEQ ID NO: 70882 - DNA, 230 bp, Glycine max
  Clone ID: PAT_MRT3847_35018C.1
aaaaaattcaatgaatcatcactcaataaatattatcagtacaataaatgatgttttatataaaaagagatatcagaacaaaatacaaaggttacaagagaaccctcaactttaaggtccaataaccagctggccttttggaacaaaaatttttaaaaccgattttcacccaaaaaatcattctgacagcacatttagtaacttctgaaccttttattacatgtttaata

SEQ ID NO: 70883 - DNA, 457 bp, Glycine max
  Clone ID: PAT_MRT3847_35019C.1
gcgggggccccgccgcagtatccgtggggagtcacacgcgcgggtaaaccctaacggcggcgcggggccttaactcaggctgtttgccaaggggggcgccaaggtcagggctgaccaccaacaggtaggcgatgtgtgtgtctaagatggaatcattgcttacatgaaagaccactattatgacacggagatgaggtcgcacgccatagatgccacaggcaaggtaggcatgccagggggcaccgatcctcacgacccacctagagattgaaatgatgggtgcagaaacagaacatggctacactgggggacacgctgtagcatacgctggggagacaacaatgcacatagactttgttataccccagaaaggaagaataacggctggaatagaagcctatgaaaagagagccaggacgacttgcaaggatgatggcttccatattgctatgaccaa

SEQ ID NO: 70884 - DNA, 265 bp, Glycine max
  Clone ID: PAT_MRT3847_3501C.1
acggctgcgagaagacgacagaaggggggattcgaatttgttcgaaagcccattggtcggacatcgtcttcactctctcaatcactattccatcgaggcatctacccatcgttctttgctttctcaatccctcccaatcaattgctgaaagtttgaattgctcaaatcatagttgcaaatctctaaggaatcgtactttctcaattgctctcatctcaatcggtagcgttgaggttggtgaaagacaagcgtctttgttggttgc

SEQ ID NO: 70885 - DNA, 669 bp, Glycine max
  Clone ID: PAT_MRT3847_35020C.1
ctgcggtaaaatggaatatttgatataatttataaaaccaaaaacgattttacaatgcatttgttcaagccataaccggagatctatatatttaaagaatctgaaacagtgcacctttactgttctgaactttggataacaccacactagctcctaattcaaaaacacaactcaaactagaggtgtcctctaaaaatttattcaactagggaaacaaaactaattttcccaatcttaggttatgggggtaaatgaagactaccaggatcgtaaattccagcaccaagagctatgaaaacccaaaatacgagaatacttatgacagcctttctcaacagctggtcagaattgctggtttggtggccatctaattcattagattgatgcagtgatggcaaacccctattgtcactgatatcctcctctctatcaatccggctggtcccagttgcatgaggttgcagaatatcccagttgccaattttagaacatctcatgcaagagcagctgcctccaagatatgatggtagggtcggaaaattgtcataaagtaccttccgatatacctctcctcctaacttcaacttcttcctagtagatggctttaaaacctgaataaaagtctgggcaataacacgaacaattgctggaagtcggatgataaacaaa

SEQ ID NO: 70886 - DNA, 685 bp, Glycine max
  unsure (1)..(685): unsure at all n locations
  Clone ID: PAT_MRT3847_35021C.1
gcctgcaggtaccggtcncggattccggtcgaccacgcgtccgtggacctggaccggggtcgactggctttggcggtgctggtgggatgggaggaggtggtggaggtgttggtggtggcgctggtggcgggcttggtggtgctggtggtggtagttctatgtatagattgccgggttcgggcggaatgcctgctggtggtactggagggtatccggatagtggacactatggtttatcagcttcctctgggtaccagaatcagcatcaccctccttctggagcttcacctatgcctagggttccgcctggttcgatgtatcccaatatgcccccttactactgaagaggtgtatcatcgcttattgggcgcagatgctttgtgtgcctctggtgattgcgtgaattgcagactatgtgctctggtgtaatgaatttgttagactgtacttttacagcctcttgacttcatctgccccctttttaagcattgattcatatggatgttgctagttaaagctgttgcgatagactagttttgtacttttagctggatcatctgggctgatacagcctgttttaaattatatagtcctggactttggtgaattttattagctgttgtatttagtaacattttcctatgggtagtattaacaaaaatttgttcaaagttgttgttttttt

SEQ ID NO: 70887 - DNA, 176 bp, Glycine max
  Clone ID: PAT_MRT3847_35022C.1
cccacgcgtttttttatatttgggcggacgcgagggcttataaaaacgccgcagtctcttgtctttcagaggccctaatggccgaaagcgcaggcggagaacctggaggggatagtaacaatgtctgtaacacatttataagatcgaaagtacgaaatcaaacatgcaccctttca

SEQ ID NO: 70888 - DNA, 285 bp, Glycine max
  Clone ID: PAT_MRT3847_35023C.1
gtaagcagttcattatatatatctattataatcggacagttgtttcacaggttgtgctccttttttgctaatagggcgaaaatcacattcttttactttacaatttctatatggggatgagccgatacatggatacaagacgctgctaagctccatttacgactacactttatcaatagatgccgactcctagaggaacacccctgccctaaagaggataggtcattatctttctactgtgtcagagactgtgatggacctcatgatatttataaatacatactg

SEQ ID NO: 70889 - DNA, 323 bp, Glycine max
  unsure (1)..(323): unsure at all n locations
  Clone ID: PAT_MRT3847_35024C.1
cgaagcnggatcctctagagcgggcgccccttttttacattattcatttctcacctatctataagaagatgtctcctacaacgataatttttgcgcaagtgaagaatggaaagtattttttgacccatattgcaagtcataagttcattaaccaaccttttgtataaaatatctaggttttggtgcttcctcctggaatacaaaattcttaatgttaaaggttttgcaaatttctttggaacacacatgctgaaaaatgttcatgggtcataaaatacctacaaaatgcaactgtttgttgagtggctgagcatgttacttaa

SEQ ID NO: 70890 - DNA, 300 bp, Glycine max
  Clone ID: PAT_MRT3847_35025C.1
aatagaattcattataaacaccaatcaatattttgaaagtgttaaaagagagtaaaaaacactctgtaaacattgccttcttacttcggcattggtatggctcccccactgtttgattaaacataactttgttggcatacaacagactccctacgtttaatttgaacccaaaaccttaagaagtgcactaatccaacaagaagggcgatcatataacccacacatctggcacatagggcaactctaaccatgggatcatcttggttaggctagaggatgccctatgcaccccaagaccct

SEQ ID NO: 70891 - DNA, 641 bp, Glycine max
  unsure (1)..(641): unsure at all n locations
  Clone ID: PAT_MRT3847_35026C.1
gcagttcattcttttgtgcatttctgaaatatcacctggctcgagattttccttcaggtcaggttgatgaaaggccggttagtaatttattacttcaagcagatgaacctaaatgcaacatggaagaaaatccttcaccaagtaaacattgcaatggagacatagatactggtattgtcaaccaggtggttgaaatagaagatggattatatactagggttgagcatacaatcgaatgtaaaggttctggtgctctaggaataaatttaatatcttctggcatcagtccttcacaaaaactggaatcaactgcagagaatgatttacaaactttcaactatgaggctacttgtgcagcaacaagcgcagttcttgtttcaaaattcagtgagaataataaaaaaaatccaggtcaatgaaaagatgctactatgcagtaagaaccatccagtcatgccttctccatctaatagcaggattcaaatgacaagaaatgaaggtaaggcaaagtccttatcagatgaggattcacatgacaataaatgaaggtaaggcaaagtccttatcagatgaggattcaaatgtcagtntatcaaggagggagagggccattaagtgttgatgcttcccagtgctggttg

SEQ ID NO: 70892 - DNA, 259 bp, Glycine max
  unsure (1)..(259): unsure at all n locations
  Clone ID: PAT_MRT3847_35027C.1
tttaccggaggaaacggggaatncacntctccctgctaatcctggttgttatcccacttctggtcagctttnttttttcccattnctacaggctactcttatggggcttaaagatattatcattgatgctcaccctggtgtgagtggagcccggcgcgccgccgannaaaatttccgggtccctggagtnactggacggtctcattcttatggtgctaccctacatcgccttgtccctgaaatcccgcccggacttgct

SEQ ID NO: 70893 - DNA, 337 bp, Glycine max
  unsure (1)..(337): unsure at all n locations
  Clone ID: PAT_MRT3847_35028C.1
agcagtcagtggtgaataataaattttaaggaaaattacaaacacagtgcttcaagaaactaatctaatctatggtgtgagtggttttagcgtttaacgtttatgttaagcaaaaccgataaccaattcgacccacctccttgtaatacgaaattatgggacgttcaccaacttgtgttatttttcctacatgcaagggtgcaccatcaaagtggggtcctcattttttaggcgtggccattgagagaaaattgacagagtttaaaaaaaaaaaaaaaaaanaaaaaannnaaaaaaattatntaaaaaaannaaaaaattttttttttaaaatatt

SEQ ID NO: 70894 - DNA, 349 bp, Glycine max
  Clone ID: PAT_MRT3847_35029C.1
ccacgcgttcggtcacgcttttagatcttatcctgactgtaaaccactcgaacatcaagagcctgctggaccttacaggccaaactggatccaccatcatcaatgggaagactcccgagaaaatctttgaccttatcattgaactgacttacccttgagagcacaggatttcccgacaacttactgttcttcctgaatgattgtgttgatcttataagatataagtcatgcaactgccctggggagtcatgctatgcttgatggcttatccaagatcttacttgaggatcagcctattctatatactcgattggtttatattcaagactatatctgatagcgagaacaa

SEQ ID NO: 70895 - DNA, 321 bp, Glycine max
  unsure (1)..(321): unsure at all n locations
  Clone ID: PAT_MRT3847_3502C.1
gatctagattactcgncaacacacttaacaaaactactctttactattctacaaaacggcacaccacgtgcttgggataattgatcatcctgtgttaaaataacaggtatatcgctatagctaataaagtgaacctatctgaacggacaaaaaaatatctacacgcaacttgtactgacctcttttaagtatacctgttcaccactagcccacatctgttcaatggagatacatatacaggcatccattgttgttagcagcacgggtacacatccattgtatgccttcgactgctatgcatatgcactttcgtcttctggt

SEQ ID NO: 70896 - DNA, 1824 bp, Glycine max
  Clone ID: PAT_MRT3847_35030C.1
ggaaagggcagaataaggtgtctctctctctctctctctcttggactgattcgcttcaaacgcatctatctcttcctcacctctttctactatcactacccttaaggcaaagttgatgtaaaggaagggggatgatcgtggtgctggtggcttctttctcaacggacacgatttcttccatttccattttcttctgattccttctctttctgcccatctcatctcatctcattttgttttggtccaccctcatcatattgaagactccgccatatagggggcatctttgtttctctttcattcttcttgtgtgtttgtgattattgccctgtcctctgcattcctttaattcccccattcatttcccacctttctctcacaaaccaaactcatcatggccgttcaagctcaatacccttccaatgtactactcttcctaaacagcaaaaccgggcaagaagcacatgattattcattgcaatctccgccaggacaacaactccttgatcaatcccatatgctattcaacaacggaggtactaattctcgaaagagaggaagagaaacaactgcagctaccgggattgcgccaaacgttatcaattcattctctttgcaatcccaatctccacaggcacagctcatagaactcactcaacttcataatcaaaatgtagtctccaccgggttacgcttatcctttggcgaccaacaacaacaaagacagcaattacaacatcatcaacaacagcatgggtgtcactcctctcctttcatatctctattatccgaagaggcttgtcttctcaaatcaaacaacagcgtgacgaaatagaccaattccttcaagcccatggggagcaattgcggcgggcattagcggagaagagacagagacattatcggacgctgctaagggcagcggaggaatcggtgttgcggaggctgagggagaaggaagcggagttggagaaagccacgcgccataacgcggagttggaggcacgcgcgacgcagcttagcgttgaggcgcagctttggcaggcgagggcgaaggcgcaggaagcaacggcggcggcgttgcaggcgcagctgcagcaggctatgatgatcggcgacggtgagaacggtggcgggggagggctatcgtgcgccgggggcggagcggaggatgctgagtcagcgtacgttgacccggatcgagtgggtcccactccgaaatgcagagggtgcgcgaaacgggtggcttcggtggtggtgttgccgtgtcgccacctatgcatctgcgccgaatgcgacacgcattttcgggcgtgccccgtttgcctcaccgttaaaaattcaaccgttgaagtctatctatcttaaaagtttaaatagattaaaatgaaaaaaaaaaaagattactttctctctctggtctctatctttttaatgaatggaaattgaaggaggaccttttttttagtcgttgtacatgatgatggtgagaaaactgagaaggttgggtagtttggccgtgagacccaatgttttttttttttttttttttttagttttcaatcctccttacattttatatttctcagtgatgtacatggatggccaaatgggtagtggagtggcctttaatttttttttttttgttgggatatttctctcctttagaaactgatatttattatattctttcttggataaatacttgactgagaatctgagatgccttgatgcctttccaaattcagggtgtcatcaatgtgttgttgtctccatttagatgtcagaatcttgcataatttcaaaaaatcctgttaatttgtc

SEQ ID NO: 70897 - DNA, 254 bp, Glycine max
  Clone ID: PAT_MRT3847_35031C.1
ggtctggaacctgtatgtttttcccattcactaagtgtatgctttcttgtaccacaagagccacacttgcacatgactctgcacttaaggcaatcacaagttgctcaatggaattcttctcggaagaaatcaagtgcattcacctaaggttcaaattataccaacacggccaactccacgaccactgggtgcgcaccaccacttttgtttctcttcgcattttctttcacccgcacccacgataactcccacca

SEQ ID NO: 70898 - DNA, 1148 bp, Glycine max
  Clone ID: PAT_MRT3847_35032C.1
acccctgcgcgaagcccacagaccaccgtgcactacttcccggtcctccgtccgccactgatgctccctcaacagcttccatgaccccagcttcgaaatcccgccaccgtccgatttgcccctccaccctacgtgcgttggactggcccgtatgttggtgttcccggagggagtgcagtggtggacgtggatgttgtggatgatgatgttcgagacgtactggagcgtgatgcagccgtggccggtaacgtggacgttggcgccgcggccgtccagggttttgtagctgttgaagatgagctcgtgttttaggtttatggtcatgtcggcggcgaagacgatccagagaggctcgtcctggatgacggcgtggcggagggtgccgggaacggggttggccgggtcgcggtcggaggagtccgtcacgatgtagatctgcccgcctttgccgcccatcgcgtatttgccgaaccctaggccgcactccgccagcttctgccggtccgccgcccagttcggatcgcaccgccagcagtcgtcgatggggtttccggtcagacacgacgacgacgacatgccttcttgttggtcctcctttgacagcatttcccttctccatagtgaggcattcaccttccgttggagatcgtggacgacggattcggggtgagggtgttggtggggtaaagtgaggttgagaagagcgttgattgggggtgagaaggaacttagaaggcacattaaaagaatgcaggtgatgtggagcattgttctttcgagcaacaaacaattatgatgatgatgagtttggggtttgggggttttgttttgtctgttttttgtgttgtaaaatgatatgcttgatgcttcctcttgaatgcacaattacctagagacgaataaaatttggggaaatgagaaagggtttttataataactaggtttataatagtaatggttgggtaattattctaggatggaaaaattaagttgctttgtgggtggggttttttttgtttatttggaaggaagagagagaaagagaaagagagagattgttttgtttagatgtttgtctctctccctttccaaaaatcctcatagaatttccaattctattctgcctccctcagttactcacattcttt

SEQ ID NO: 70899 - DNA, 486 bp, Glycine max
  Clone ID: PAT_MRT3847_35033C.1
ttttaataagtaatcatggagtgttaaacaattgaacagaaacaaattttcaatctcaataaaataataaccaagtcttattcaccaggtacatcccaggcataagttaatatgcatattgtggctctatttaaaaacaaacttctagtaacaaaaccatttattatatttttttaatgatttttcaatagaacaaattttcacccgcatttgagatgcctatgcaacataatttcaatcctcaatgatgtttttacttggtggcctgtgcgattatattactcaatgagctggcttcctctttggcagcttctactaaatcctcctgcaactcattaccataagatcagaattttgtgaaacacaaggttaattataaaatatgaggataaaattaagatgcaattcctttgatgttttcactgctattctttaattacaattagactttcactttagtaacttatgttgacttttagtttaaat

SEQ ID NO: 70900 - DNA, 353 bp, Glycine max
  Clone ID: PAT_MRT3847_35034C.1
ttaattaaacttcaaatccttggtcggcataagcaagtcctcgcacatggctatctggcttaatgattaggactgctggtccgttctcagcacaattactagttgtggcctgaacataagacgggggcggatggcctgaaccaaaaatgtcggatctgcgccgtaggatctcgagatggatcacgcctctggcaacaacattacaactagatgcattagatcgagcatcttcttccatatggccaaaatttttagggagggatccttactggtcgaatttgcaccttaaaggttccttcagatattctaggggtgcttgctacgaggacacttataaattgattcgttttata

SEQ ID NO: 70901 - DNA, 356 bp, Glycine max
  Clone ID: PAT_MRT3847_35035C.1
cccccacaaaaggggtttaatatttgggccataaaaagaatcccggccttccaggatgccaaaagcttttagggaacaagacccttttttttaaggggggttttaacagggggccctccaaactaaaataaagctcccgaaatgttaacttaggaacccttttgggcccaatttttatacttggcaccctttaaacccagtaccctgggggaactttgctgaaacgggaatcccttggagctttgaaaacaagaactcccggggtagcttttctagaaagggtcttatcaaaacccaacgaaatacccatgaaataaagaggggtctatgtacccccgaacaaaaatgcctaaact

SEQ ID NO: 70902 - DNA, 348 bp, Glycine max
  Clone ID: PAT_MRT3847_35036C.1
atacacatacaacatatttcgctacattaaaggctatgatcaactctctagcgcatgcatttcaccttaggatggcattcatctcctatatgatacatttacgcatataatcccatcaaaggctctgatccttattactcgttccttactcccaataaagccccttcagctggaacgtaataagagtaatctactggccctgctcacacacatatacaaacaccttaacactagagacacccagacaccaacatcgtaacaatgcactctgaaaaattatcattgactacagcaccatcccacaacattacttaacctacatcccatactatgaatctacaattatca

SEQ ID NO: 70903 - DNA, 324 bp, Glycine max
  Clone ID: PAT_MRT3847_35037C.1
caaaacccgctataaaaggaaccaaaccaaaaaaaaaaaaccagggaaaaaggggagaggccaaaacccactaaaaatataaaaaacccaaaaaaagaaaaaaatatggaaaagggcccaaaaataactttttaaaacttcaacaaatggggcaaaagggaagcccccaaaaaaaaaacaaactccatgcaaaaccagttttgttattgaaaaaaaaccgcggaattaacttcttgccccccccaaaaccggtaaactaaaaaaaaaaaaggcccccatttggacccacaaacaggggccccttcctggggaaactgggggggg

SEQ ID NO: 70904 - DNA, 236 bp, Glycine max
  Clone ID: PAT_MRT3847_35038C.1
cgagagtggtttttgttagtgcagaaacagagaaagatggatgaggagaatggttacagtgggagtatcagctctaacttggagactacaaaagcagagagatctgtgtggctgatgaagtgccctttggtggtggctaagtcatggcagacccatcctccttctcaacctctcgccaaggttgtgccctcccttgatcctctcaaccctgaggaagacattcctccggcggccaa

SEQ ID NO: 70905 - DNA, 748 bp, Glycine max
  unsure (1)..(748): unsure at all n locations
  Clone ID: PAT_MRT3847_35039C.1
attcccggngtcgacccacgcgtccgtctctctctcttacatctctttctatctgcttcaaccaacatgtcatggccattggcctcttccctctgtttctttgtccttgactaaaaatgtctgattttgcattttaaaataaataaaacataaagaggtgaaaatgttggggggaaaaaaagcaaaagtaattgtccctggttgtgccatctagttctgtgttctatgcttttgttgtgctttttggtgctgtgtactacttaaaaggtcttgaattcaacttcaaagtcaaaaagcatgaggaaacatgggtggcagttaccttaccatcctcttcaggtggtggctgctgctgtgtttctggctctggggtttgccttctatgtgttctttgctccttttgttggagagaagatgtatcagtacattgttattggcctttactcaccactgattattagtgtctttggactgtacatatggtgtgctgcagcagatccaggagatccaggggtttttaagtcaaaaaagtatcttaaaatcccagacagtaaaaagcttgctgaactaaagaattctaaattaggtgaagaatcaagttcatcaatgcatgaagtaaatgcttcaatagttggagctaaatctgtggataaagaggcattgggaacaaaaggaacttcgaaagatgcttcaattcagtagagaagagtacattgtcgtcttgttcatcctgtgtcctcttggtttc

SEQ ID NO: 70906 - DNA, 268 bp, Glycine max
  unsure (1)..(268): unsure at all n locations
  Clone ID: PAT_MRT3847_3503C.1
ctataagctagtttatcgtgaggagaatatgaagttgcttgtcttctttgttgctgcagtactcttggtcccatggccatgccatggcgcacgcacccagaggctccctctccgtatgccaactggctatggtgagcgttcttcggacgtacaatgcgcaagttttaggcttgctgtggaagcacacaacatccgagcctttncaatcattcctgaacactgccttgatccaacctaggactacattaatggcgggcgatttcgctca

SEQ ID NO: 70907 - DNA, 355 bp, Glycine max
  Clone ID: PAT_MRT3847_35040C.1
ttctttccgcacgaggccacaagaaggcggggggggggtataaggagaaacacggacagccaaccccgcgaccagagaggaaaggaccgcggcgcacgacggcgcaaccgcggagccaccacaggcgccgaacaagaaagagaaacgcaggggagacactcaaaggagcaggaaaagataaaggggaacgtggagacaaccgggaaaccatgggaccaaagggaggcggacccaacgccagaaacagcccaggggagacagcaaacggccaaaacgaccccccgagggagctcaacgccgacaacggcagcggccccaggttccggggccacaaacacaaccatggaacgcaccc

SEQ ID NO: 70908 - DNA, 559 bp, Glycine max
  Clone ID: PAT_MRT3847_35041C.1
ggaaaaaaacgaggccaaaaaataccattttcagaaaacatgttagccccactggaaggggaaaagtccggaacaagcaaaattttttttcccccttacgccagttccaaaaaacattaaaacccgacttgggtttcccctttccttcaaaggaaacccccaagtaccgaaaaagaaagggcattctcttttggagggggaaacagtggcaaccaaggaatttttgagggaaattgccttgcccgaattgcccggggtaaggttttgaaaaatgttcccaacaaagacaaaacccttgtttgccacaaaagtgctagggggccctgcccccataacggggacacctatggttccccctttaggcaaaaaaactggaggccctcagggctaaaaggggatctccgaaaaaaaaaagggcccccttgcttcatacttcaaagaattgggcttaaaaaagagcggccaacactttgaacaagggaaagctgagccccaggcctgcaccctagggctcgggggggcccttcccggggagcccggacacccggcccccgatgtg

SEQ ID NO: 70909 - DNA, 365 bp, Glycine max
  Clone ID: PAT_MRT3847_35042C.1
agaaaaatggtggtggagttgttgagagggagaaggttttcaagatggctagagatgtgtttgggaaggtggtgaaaaagcaagcaatgaagacacttcttgaactttgcattggtgattgaatggataaataaattctctttactttttcttcatttttattgttattgtttgtcttttggatgtcttttctttgtttaatgttctttctttacttgctgtaaaccatcaagttttcagctacgatcaactcaagttgtcatagtcacttatcatttacttgttatatgtaagccaatgctatgaataattttattgaacattgcacacctccttctgtgcaattgtttttcttcgtttaaaaa

SEQ ID NO: 70910 - DNA, 388 bp, Glycine max
  Clone ID: PAT_MRT3847_35043C.1
ccttcgtacttataaaaacaaaaccaaacctttcttactactactcccattcccacatttagacaacatggactaggacttcgacatgccgactgcggatagcaaagagcgaggtctttctcttcttcggtatcaccggtggcgacctcaacggcagtagcagcaaacccattttgaatgacggcgactagaaggagtatggtaaagaaaaggtgagaaaaagacgtcttatagtaggtgaaggatgggacacttctgaagatggtgactaagatcaagtttactataccggtaagccagacgagggaacaaaaaattcatccagcagagattggggaacctcttttagtttaacactttggacaaaggcaaggtattaaaggatggg

SEQ ID NO: 70911 - DNA, 391 bp, Glycine max
  Clone ID: PAT_MRT3847_35044C.1
tgttagcagttaacacagttacttcacgagctggtgctagttctgcgttccgtgtctattattcccctcaaactgctgcataatctttgttgtttgatgaacggttaaagtgtgtttgtttgagtggcagaatgttagaggcaacaaggtggttgttgggtgcaggtattttgatgtggatgttggcatggctgggagaatcagcaataggggtgaactggggcacggtttcttttcacaagttgaagccttccacggtggttggtctcttgaaagacaacaagattccaaaactcaatgtgtttgatgcatacgctgatttgcttaaagctctcatgggaagtgatattcaggggactgcttggaatacccaatgaatttttcctctttt

SEQ ID NO: 70912 - DNA, 188 bp, Glycine max
  unsure (1)..(188): unsure at all n locations
  Clone ID: PAT_MRT3847_35045C.1
tttttgttttanattatttgnnattggggattagggggaaatattgtgggaggggttgtngtnnnaagggttttgaaccccggaaccttaaatttttgggggaggagaacaataatttctcccccggtcaaaaaagttccaaaactttttccacaaaccgttaaaagggggggcctcttccccctccc

SEQ ID NO: 70913 - DNA, 443 bp, Glycine max
  unsure (1)..(443): unsure at all n locations
  Clone ID: PAT_MRT3847_35046C.1
gtcattatattgtaaaataatgactctttataaaaaaaaaaaaattccaaccaaggcttattttatatatatttgatgtcttggtgacctctattttggacaatagtcatgtgagagtgtccatgttgtgttttgtgtcccggttagaatctgtgcttcacaggttgcgtatgctattttgtcccttggttaaagtggtaggaaattgttaaagtgcttcacagttgcagttcatacatagaccctgattcgttcagtttttaattaacagctaacagaaaatctctataagtatatttgttgtcttggtttcttaatgttcgtgttgaaatgctccaatccattgtgcaaaattctttttttctttttcttcttcttgatttatagaactataagtaatagattatactcaactntttaaatccctagattgggatgttaat

SEQ ID NO: 70914 - DNA, 338 bp, Glycine max
  Clone ID: PAT_MRT3847_35047C.1
aactaacgcccacaataacttgatcatcttgcaaccttttaagctgttgctttcaatacactgaacgtgtcaccgtgccatcatcaccaacatctaatggacatctatcttgccacccccttgcacatttttattcagacctagataaccgtggaaaattaccaccaccttattcatgaacttgtaagccagaacttggaaaccaaccccaaatttccaaaacaatgttcatgctccaaacccgctaaaaaccaaaaatgtattggaacgtagaagcaagccacttctacttccactagtactacctaacagttatcaaaaaagaatactaactacta

SEQ ID NO: 70915 - DNA, 1095 bp, Glycine max
  Clone ID: PAT_MRT3847_35048C.1
cgctgaccccttgaatataaaccttgattacgctttatttgaatccaaaactgtaaccgttaaggatccggtttcgggtttggtttacactaacctgtttgaccaaatggtggacgcggtttattttgcgatgaagagattaggttttccgggtgttcggatctttatcgcggaaacgggttggcccaatggaggcgacttggaccagattggagcaaatacttacaacgctgccacttacaaccgaaacttcataaagaaagtcactaaaaaaccgcgggtggggacaccggctcgaccgggttcggctcttccgtcttttttattcgccctcttcaatgagaatcagaaaccgggtccgagtacggagcggcatttcgggttgttgcacccgaacgggtcgagggtttacgacgtggatttgtccggggaaacgccggaggcggagttccggccgcttccggtgccggagaataatgaaaagtttaaggggaggatatggtgcgtggcggcgcgccgggataacgcgacggcgctgacggcggcgcttgcgtacgcgtgctcgcaggggaatggcacgtgcgacccgatccaatcgaaggggaagtgttttaaacccgattcggttttctggcacgcgagctatgcgtttagtgcttattgggcgcagtttaggaaggttggcggaacttgttacttcaatgggcttgcaactcaaaccgcaaaggatccaagttatggatcctgcaagttccctagcgtgacactttgaagaaggaggaatcaaacaaaccaagcaaaatagagctttcgttacgcgatcatataatgattatttaatttcactatgtcgacattgggaattttgaattagggggatcgtttttactgtaggggatagtgtttctttcatttcatgaacgtatgttcctcctatagatagagcatccgaacccactaagaaggaacatacattggtgaatgattttgaatactccaaccaccggatcgccattatttaacaccatgttggtagaataagtgatgaggtgcaatgttttctgcttaaaaaaaaaaaaaaaaagggcgaccgcc

SEQ ID NO: 70916 - DNA, 388 bp, Glycine max
  Clone ID: PAT_MRT3847_35049C.1
ggcagaaccatcatgatgggttatccttcaagactctatcttgttttgcttttgtccatttgtggggtggtttctttagcttccccaattgaagatcagaagagagatagaattactcagcttccagggcagccaaagaatgtgggatttgctcagtattcaggttatgtgactgtgaatgagcaaaggggaagatcacttttttactggttgggggaggcaccagtgaagcgtggaccaaagtcaaggccactagtgttgtggctcaatggtggtccaggatgttcctctattgcttatggggcatctgaggaaattggtccttttcacattaagcctgatggcaagtcactttacttgaacccttatgcttggaacaatttggcaa

SEQ ID NO: 70917 - DNA, 526 bp, Glycine max
  Clone ID: PAT_MRT3847_3504C.1
ccggcacgcaaatacaacatcgttgttctgttctgttctgtagctaatagatcccatctactggtacttttattattctgtctccttcttcactttttttctccaatggaacactcaaaagatttggacgctctctattacttttaaacttcattttctgcctcagatcctttcttttcacactacctcgaaagaaaaaaaagacatgtataagaatcggttgcaagaattggctcaaagaagctgttttaatttgccggcctattcatgcattcgcgaagggccagatcatgctcctcgttttaaagcaactgtcaactttaatggagagacctttgaaagccctacattctgctctactcttagacaggcagaacatgcagcagctggagtggctcttaacactcttgcaaaaagaggtccctctggagctttggcagcaagagttctggatgaaacaggagtatacaagaatttgctccaggaaactgctcatagagctggactgaatcttcctgtgtataca

SEQ ID NO: 70918 - DNA, 246 bp, Glycine max
  Clone ID: PAT_MRT3847_35050C.1
tgcggggcatgtctactcttcacccagactctaaggaccgctcccctatcttgactacctgattcttaagccgactctattctttgctccctttgctgcagactctgcttttgctttatactctagaaaaggccgttggttgacctgtacctatgaatgctgactgctcggatagcgatcctctgagctatgtatatacatagctcataggaatgtctttctgcgggagaccacacgtcttaggta

SEQ ID NO: 70919 - DNA, 255 bp, Glycine max
  Clone ID: PAT_MRT3847_35051C.1
aataatttcacaattcttctcaaaaaaccaattataacttacaatatggttactctatagttggttttatctaataatttcacaattcttctcaaacttatttggattttcttttttcttaggccctgatcccaaggacaaaaattttggttcggttatttacttgcaattttagatttgttcagccatttgggctaattataacttacaatatggttactctatagttggttttatctaataatttcacaattc

SEQ ID NO: 70920 - DNA, 142 bp, Glycine max
  Clone ID: PAT_MRT3847_35052C.1
gcggacagcgcgtttacaagacccaagggagccaaaaccaggggcaagcagaacgacgtgatcccaaacggacacgaccgcaagcactggcagaacaaggagaagacttggacaaaacaaccagcacggaggaaaaggagac

SEQ ID NO: 70921 - DNA, 246 bp, Glycine max
  unsure (1)..(246): unsure at all n locations
  Clone ID: PAT_MRT3847_35053C.1
tttttatgaatttctgattntataccaagtacgtttaattcnttgaacaaacaaacaagtattttttcgtctttcttattctttagttatcatattcttagaaatattatcatgcatatgtcttctaattttccacagtcaatactgttgcatataaatcttttcactagttacatacacatatcagtatttcaattaatcttcttttattttacaggtaaaaattttggttattcttcttttttt

SEQ ID NO: 70922 - DNA, 435 bp, Glycine max
  Clone ID: PAT_MRT3847_35054C.1
ggattgggagaaactttacatgggaaacatttttttcacttggggcaaaagttttgaagccaaccatataaatcccaacttatagggaatttttaaaaaacacatgggccccctttttgattacaaaggagagatgccttattccgaaaaagttataaataacatttcacctgggatttcaaactaatttaaataaggcacatgtttaaaaaaaaataaggaaacctctcaaaacatatgggggttctacaaacaccacccacaaataacatttttttttgcagggggggttttcaccaacagatccagggatgtggcatggggttttgaccaaaaacttatgcatgtggcagatctttctagggtaaaaagggaaaccatgggatgcccttccatttttttggtgccttttgggccaattcaatccacaaattt

SEQ ID NO: 70923 - DNA, 555 bp, Glycine max
  Clone ID: PAT_MRT3847_35055C.1
tccgggaaaaggcagtagtagtgttactttccaatttgaattgttccattttcatttctttcgcaaaagttgcaactacttcctcagaaaaaaagtttctaagttaaggaaatccagagagacaaaaatggccggtgacggtgcagctacatgcatagacatcctccttgccatcattctccctcctcttggagtctttctcaaatatggctgccaggtggacaataaacaaatgtcatgggcgtttctgtctttcaactcagatattagtgtttctttaatatatcgccaatgttgtcatattcttatgttctgtttttaaaaccccttttgttcttagcttaagcgagagtggagtgtgtagcttactagcttgtgtatgtagtctctagatttggtaattgatttgaaatacacaatttcatttgtatcaacgatcttgttcatgtatcttatgtaaactgtgctattcattactttcaaattaataaatcggatttattcttattatatattgtgttttgatttttgaaaacgcatgagtttttgttaagc

SEQ ID NO: 70924 - DNA, 857 bp, Glycine max
  Clone ID: PAT_MRT3847_35056C.1
cccacgcgtccggataccttccaggcagataaaggtagtagtagtgttatgttgttactttccaatttgaattgttccattttcatttctttcgcaaaagttgcaactacttcctcagaaaaaaagtttctaagttaaggaaatccagagagacaaaaatggccggtgacggtgcagctacatgcatagacatcctccttgccatcattctccctcctcttggagtctttctcaaatatggctgccaggtggagttctggatttgtttggtgctgaccctttttggttatatacctggaattatctatgctgtctatgctatcaccaagtgatcaccctttaactttgtgtggacaataaacaaatgtcatgggcgtttctgtctttcaactcagatattagtgtttctttaatatatcgccaatgttgtcatattcttatgttctgtttttaaaaccccttttgttcttagcttaagcgagagtggagtgtgtagcttactagcttgtgtatgtagtctctagatttggtaattgatttgaaatacacaatttcatttgtatcaacgatcttgttcatgtatcttatgtaaactgtgctattcattactttcaaattaataaatcggatttattcttattaaaacaattttatttgtatcaacggtcttgttcatgtatcttatgtaaattgtactattcattactttcaaattaataaatcggatttattcttcttacgtattctgttttgatttttgaaaatgcattttgagtgtttgttaagcagttaaagttgttctgtcgatgtcattcatctgttcaatggggacaaggttcttgtattaaaaaaaaaaa

SEQ ID NO: 70925 - DNA, 190 bp, Glycine max
  Clone ID: PAT_MRT3847_35057C.1
cttcggagccttcgtgggcggaaacataaacttactccgcggaatcgtctacgtaatcgcccagatcctcggatccatcgtggactccctcctccacgacttcgaaactgtcattctctgttcagcattcgggctatccgctggaaacggacttggcaacgctaaggagttggagaccgttatttttttt

SEQ ID NO: 70926 - DNA, 289 bp, Glycine max
  Clone ID: PAT_MRT3847_35058C.1
cagggcacccttataacggataaacttgtcaactgtcaatggcatggactgaaaggccgatgctttaaaacatgacacgttgtgataacccaccctcacttaaaaggcgagggcatgaaacataacatttagtgcactaatgatatgaatacatgtccctgtaaaaagtgtttgctgacaacatcgtataagacaaacaagctactcgatataacacctttgaaataccataactatttggaaccgagcataatacctggctgagttcaaataccggaactccaactgg

SEQ ID NO: 70927 - DNA, 277 bp, Glycine max
  Clone ID: PAT_MRT3847_35059C.1
gtaccttttgattttgctgaatgtaaatgtctctttattgttttgatcattttgtttcatttgttttcttttcgtgtgttacagtatcgatgacaggtccaaccagaattatatgctctgcatgcttcccttgttccgaagatgtaaagatctttattgcaataattgtatcacaagcgcgatttgttgttttccagaccaagaaataatgtttgaatgtaaatttgtaaagaaatcgtggtgaatggaaaccgggataaatagagattgtagtttc

SEQ ID NO: 70928 - DNA, 242 bp, Glycine max
  Clone ID: PAT_MRT3847_3505C.1
gttatgctgatcttgtggaagagttatctcgtgcggatgggaagattgtgaagattactagtagtatggagatggggctgaccaccacagtgcttgtacgtgggtctaatcagcttgtgctcgatgacgctgaacggagtatgcacgatgctatgtgtgtagttaggtgtttggttgccaagaggaacatcattgccggcggtggtgcccctgagattgagctctccaggcagctgggtgcc

SEQ ID NO: 70929 - DNA, 227 bp, Glycine max
  unsure (1)..(227): unsure at all n locations
  Clone ID: PAT_MRT3847_35060C.1
aacaccagaccgtcatgaaaaaacacatgaaatccaaagataacactttctgttcacctaaagtcatctccatatccttaatcgatccatacgccacagnctcatccagcgacgaagagaatgttatgcgccggaggcgtggaagcgctacgtcaacagaatcgaacttcagccggcgttcaaacccgtcactacaaganagagacacgccggagacgccgccactc

SEQ ID NO: 70930 - DNA, 226 bp, Glycine max
  Clone ID: PAT_MRT3847_35061C.1
aatgcttaatttatttttattaggtcaagggtttattacaaagcgctgtttcgtaaatacattttcagggcgcgggtgccccttagccctctgcctttaaaaactcttttgttcttggctccattgagcgcggataatatacactaacatttctctaccataaaacccttttggcatcaataattgggggcttgactattagtgcaccaccaacaagaagaccaag

SEQ ID NO: 70931 - DNA, 578 bp, Glycine max
  Clone ID: PAT_MRT3847_35062C.1
aaggactacttatcgatgtgttcaaatgatattgattattacataaacagagaaataacatattcagaagcatgaaaataaaataacagacaacttgaacataggcaccctatacacaagcgagtgcatcatttcaaatctctacacaactacaaaaaaacctacatttaagttaagatacaaaaacagtagaaaattcgagttcattttatgtcatagccattagcagcttttatcactatctagtcttctgcaacatcttcgatttcctcatgctccggtactcctggaaggtagagaacattgttacatctgattaaaatctctcccaaatttccagtaaactgtccctcaatgtactcttcagtgttggccagctacagagatattcacagatattaaaaacaagcccagagccccaagtcaatgatcattcatatacggaacaaacacctaaaaattaatttagatatataacctgcaagttcatgtaggaatcaacggaaacgagatagccctttgtactccattccccaattgaggtttacaattaccggctttcccaggcaaattggttc

SEQ ID NO: 70932 - DNA, 395 bp, Glycine max
  Clone ID: PAT_MRT3847_35063C.1
atgctttatgttttgcttattcaaagactaattagcattcactagaatgccgaaggttcacagaaaaagataaaatttaaacttgagtaactttttttttttgggtgggcaaaacaaaaactagagtaactagctacatcttaaaagaatacggtaaaatgtttgaatcgataacacttgcccccccagaaacaatttaccaaccgaactttgcaaatgacagtacccttcctcattctaggcaaaattgactgctgattgcacatgctccacatcattggtcattagcagcgccattagcgatcacaccgttctcagcgggagtcaaactgatttgtttagttgtcttcgaatagaagctccgatacatggagtcaactctagtgagatataat

SEQ ID NO: 70933 - DNA, 880 bp, Glycine max
  unsure (1)..(880): unsure at all n locations
  Clone ID: PAT_MRT3847_35064C.1
aaagctagcaattcgggctcagccaaacaaaaccggaatcatatcccaaactccttcctccctctgggtcttgaggtacaaaaccctaatcaccgcttcgagctctgtcattgtctcaagttccaggtttcagcgatttcgatctcgcatagcattctacaatggccactattccagttaaccccaagcctttcttgaacaatttgactgggaagcccgtaattgtgaaactcaagtggggaatggagtacaagggctatctcgtttccgttgattcctacatgaacttgcagctggccaacactgaagagtacattgagggacagtttactggaaatttgggagagattttaatcagatgtaacaatgttctctaccttcgaggagtaccggaggatgaggaaatcgaagatgttgcagaagactagatagtgataaaagctgctaatggctatgacataaaatgaactcgaattttctactgtttttgtatcttaacttaaatgtaggtttttttgtagttgtgtagagatttgaaatgatgcactcgcttgtgtatagggtgcctatgttcaagttgtctgttattttattttcatgcttctgaatatgttatttctctgtttatgtaataatcaatatcatttgaacacatcgataagtcgtccttaatcatactcctatcatttgagtgttttcagaagaaatcaaaaaaaannnnnnnnnnnnnnnnnnnnnnnnnnnnnnnnnnnnnnnnnnnnnnnnnnnnnnnnnnnnnnnnnnnnnnnnnnnnnnnnnnnnnnnnnnnnnnnnnnnnnnnnnnnnnnnnnnnnnnnnnnnnnnnnnnnnnnnnnnnnnnnnnnnnnnnnnnnnnnnnnnn

SEQ ID NO: 70934 - DNA, 278 bp, Glycine max
  Clone ID: PAT_MRT3847_35065C.1
cgcattttgtaatttaatttagctaaatctaattaattattaggcgaagagttgtttttaaagatgaagctccttggttgttgaatccttatggtaattttgatttattattttatgtacttttattctattgtctcaatgatattaaggaaaagtcataaaataaaaataaaaaaaaaaaaaaaaaaaaaaaaaaaaaaaaaaaaaaacaacaataaaaaaatagtcataaaaatatatcacgtcaaaaaaccaaagataaagtctaaatgaaatca

SEQ ID NO: 70935 - DNA, 329 bp, Glycine max
  Clone ID: PAT_MRT3847_35066C.1
cccacgcgtccgcccacacgttttctttcttactgtgagagcggcgaagaagaggaagagcaatattgaaagacgccggaaagagccacaatgcgaatgcaaagatgccgccggagacgcggaatgaacgaaaatcagagacggcgctgagtggatcgccaaagaacggatgccacagcaagaagttcacatggatcagcaactgctactagaacttctagatggagcacggtgctatgcactccaaggactcgtactttcaggatctcactgagatcgccgccctatcatcgccgtggtttccggcgacgagatctgaacatactaat

SEQ ID NO: 70936 - DNA, 638 bp, Glycine max
  unsure (1)..(638): unsure at all n locations
  Clone ID: PAT_MRT3847_35067C.1
ccgggaatattaccgcttcgagcccgggcagcgtcccaagttccaggtttcagcgagcattctacaatggctactataccagttaatcccaagcctttcttgaacaatttgactgggaagcctgtaattgtgaaactgaagtggggaatggagtacaagggctatctcgtttccgttgattcctatatgaacttgcagctggccaacaccgaggagtacattgagggacaatttactggaaatttgggagagattttaatcagatgtaacaatgttctctaccttcgaggagtaccggaggatgaggaaatcgaagatgctgctgaagactagagagtgatagaagctgctaatggctatgacataaacagaactcgaatttctactgtttttgtatcttcacataaatgtaggttttttgtagtcaatgtgtagagatttgaatcaatgatgcactcgcttgtgaatagggtgcctatgttcaagttgtctgttattttatttttatgcttctgaacaggttatttttcagtttatgcaatcaacagtaatcaatatcatttaaacacatccataaaaaaacatttaatcatcatgctcctattatttaagcattttcagaagaaaaaaaaanaaaa

SEQ ID NO: 70937 - DNA, 1479 bp, Glycine max
  unsure (1)..(1479): unsure at all n locations
  Clone ID: PAT_MRT3847_35068C.1
tgaacgaacaaacacctctctttctcggaattcccgggtcgaccccgcgtccggacaccatgacgagggagaagcgttttgtgccataattctagtagggtttttgctcttcctccatgccaattccattcacgcgtgcgtcacagagcgagttccgttcactcattctgatcgacccagtttcggttttcaccctcgcgcaaagtagagattgttgtttcgtgcgcggaatttcgctctgcgaaggaaattcgtcgttaatttcgtttgcttgctgaggtaggaggattataggcactaccgtatgtagatagttacgtgttatttgaattgtactctggcacggttattaatggacgctatccactttctctcccccaatcctgatcttttgtcgctcacgtcctgggtcgctccctattacaaaccaactcattatcgaacctagacgcccctcttcacatccctaaattctgagccccttctttttgagccacctgatcatcctcagcttcagttttcatggggaacctgaaatgtgattcctttggatccacaaacggttatagacaacaacatctttcatccatggctgtattctgcaaaagccactgaaaattctttttttcttgtccatctggtaaggaaaattatccggtgacgtagaaataaatatgctgcgaacccgtttactacttcaaggaaagtctttaccctccactccggtgaatgttgcctgctgctgcataatgatagttgctgtggatttgaatgcctcacctgtgccagaggacgatcaagatgattttggagaccaggcacatgttgaagagtaccatactccagaagagcgtgtggaatctccagttgatattgctcgccgggaacgtgaagaaagaaaaagaaagttgaaaagagaacgttcagatgacaaacctgtgcaagtatcacagtcacctggacatgatcagttatttcatactaagatccttaaatcatatgatagaagtaagcttcctccaggttggttggattgcccttcatttggccaggaaatttattgcatgataccatcgaaggttccacttggtgaatcattcaatgactacatcattcctggtaaaagatactcatttaaacaagtgatacatcaacagagagttttagggagaaagcttggtctggtaattgatttgacgaatacttctcgatactatccagtagcagatttaaagaaagagggtatcaagcatgttaagattcaatgcaagggccgcaattctgtacctgataatttatctgttaatcattttgtctatgaggttacacaatttctatttcgtcaaaaacactcgaggaagtatatacttgttcattgtacacatggtcataatcggacaggatacatgatcatccattatctgatgcgcacaatgtcaatgtctgttactcangcaataaaaatattttctgatgtac

SEQ ID NO: 70938 - DNA, 224 bp, Glycine max
  Clone ID: PAT_MRT3847_35069C.1
tcgtaagtgacgatgcgaaggggcaacagtttgttgcgttagcaacatcaactctaacgcgtgtataacagattcagatacatgtagccacccatgtggcagcaacctgcaacgtgtgatcagaatattaaaaatatccactccccatgtcaactgtctgccgtggtcttcataatcccgaggtgacaagtgcaaattttaggcttaacatgaaagctgtcaac

SEQ ID NO: 70939 - DNA, 807 bp, Glycine max
  unsure (1)..(807): unsure at all n locations
  Clone ID: PAT_MRT3847_3506C.1
tggaagtcgtatcgtgttctcctccattcactattcggcgctctggcaattttccctcaaaatgtttttcatacaaggaaagagaattttgtaactcaatgcagcaagaatagatggcagtcaaagttgaggcttatccattactcggtttagataacaggaaagatcaatccctaaaatctgcaatataaatccttcatttcctgtcgtcatagtaatggaagcggcagcagtggacccttatacaactaatccaggtccaattgatggttcagtactgtatgaccaagacaagcatgtctctgcagcagtttgggatggacaggagcgtggtgccctcagatgtcatgaacatacttcaaagcttgatcagtggacacttactcataaacaggttgagttggtagataaggctggatttggatacttaaggtcaatcccagctattagtctagacaatcctcttatctcagctctagttgaaaggtggagaagagaaacaaacacatttcacttgaatgttggtgaaatgacagtaactcttaaagatgttgcactcttgcttgggctggggattgatggagaacctgtaattggtattacctataccgcatgcagttcagtgtgtgaaaagtatcttggtagatcaccagagtctggttacacaagtggcggaatggtgaagctaagttggttgaaagagttcttttctcgctgtcctgaagatgctccattggaagtgattgagcaacatactcgtgcatatcttctttatcttgtangtagcaccatattctccacaactac

SEQ ID NO: 70940 - DNA, 400 bp, Glycine max
  Clone ID: PAT_MRT3847_35070C.1
cgtattgatagtaaaagggcaacagctgtatcactgatgaaggttggtaaaaggagtcgacttaaaatgagttgtgtaaaaccctgtgctgaagatagtttgacaaagtctgagctaaattttgatgtgctgaaagaggcaaaaatgttctacttcaatacacattccctgcttgatcgtaacatgaggtcaactacattacaagccatcaagatttcaaagcattttggaggggttattttctatgatctaaaccttcctataccactatggcactctagtgaagaaactatgatgttcattcagcaagcgtgcaatctcgcgacattattgaggtcactaagcaagaccttgagttcttatgtgggatcaaaccatctgaagaatttgaccaccaaaa

SEQ ID NO: 70941 - DNA, 851 bp, Glycine max
  Clone ID: PAT_MRT3847_35071C.1
aattcggctcgagctccttctgcgtcccccaagcacctcacccattagccatgccgccgcgagcgttgaaggggcagaaatagtgttgttagtgagataccttggtggtattgaaattaaatttgtctatcaaggggaataactgattgttgttgcgtggaatacgggaagacgacagaaggggagagagaatggagaagaagatgactttggttcagactattgccactgctggcgtcttctctgcgatttcattctggtatgggttcatgtttggtagagagtcatcgcgcaaagaactctctcagctgatcgaagatctccgtcacggcggcgaaaacactccacctccctcccattcttgattgagctatctctttctttcaaatcgttacagtgtatgtctcttccaaatttccccctaacatttttgtaactagcgttgattctcaactctttagcttgttctaagtgcaccaaacaacacagtattgcagcttccttatattattaccgttatgaattatctctattagagagaatcttaatccaactttctctttctctttcaatttctttaacatcgttacttacactataatatgtctcttcttgctaatacccattttcaattttcctaacatcactttaatctggaagttgaggttgcttctcaactctttagctcgatcaatgcagcttccttgtattatggttttgaattatctcattttcagagaatcaggtagaaaaactaatgcccggattgtaatttttattaaacctctttggctcactaatattgtcttaatcggcaaatgttagttgttaatggttagtttttttttttt

SEQ ID NO: 70942 - DNA, 204 bp, Glycine max
  Clone ID: PAT_MRT3847_35072C.1
ggttgagtgaagagaatggctcccaagggtttaagctttctggctgtgctaatatgcgttccagcactgtcactgagtccttctgacgctgcagaagggcagaataatggccttgttatgaacttctacaatgaactatgcccttacgctgatgacattatcacatatcatgtcaagcttacatacatgcgccacaagaacact

SEQ ID NO: 70943 - DNA, 181 bp, Glycine max
  Clone ID: PAT_MRT3847_35073C.1
cgtcctcatcctggccctcaccagactcaacacccacctcttcaaaaaccctctcgagggctgcaaaaaccccaccggccccggaaaatacaccctcttgcataccctcacccacctaccaatggaccaaagcacccttggcatacatgaaaacaaacccgggggcaatgggaccaaacac

SEQ ID NO: 70944 - DNA, 299 bp, Glycine max
  Clone ID: PAT_MRT3847_35074C.1
ccacccttccggggaaagaaagttttttttttcctgccccggttgaccacggggggaaaatggcactgctgccatggctcaaggttccacccctcctgaccattgaaatctaatttttaaatcttacatgacgctttggaaagatttaaatttttcttataacaagttcattagaccacctgttagcaggcttgaagcatttgggaaggaattttcctcaaaagggcttgccattggggccatttaccgagctgtttttgacggccttttttgggtaacctgggaggatttttaaggtt

SEQ ID NO: 70945 - DNA, 295 bp, Glycine max
  unsure (1)..(295): unsure at all n locations
  Clone ID: PAT_MRT3847_35075C.1
ccagaagatcagatgatgatccagaacattgtttacaggaaaagacagatggttctatggtgcctgttaatggacaaaagagagttaagtcacttgtgcaaaaagtgtccaagaataaaaaactttcgaatagacacagccttgcagctgctggtacatcatggacttctggattaaggagaagcaccaggatcaggacaaggccattggaatactggaaaggggaaagactggtgtatggccgngtacacaaaagtttggctactgtcattggggtcaagtgtatttcacccag

SEQ ID NO: 70946 - DNA, 1443 bp, Glycine max
  unsure (1)..(1443): unsure at all n locations
  Clone ID: PAT_MRT3847_35076C.1
ttcagaaaggacagcctaagtccataattgtgcattgcatttgcttttcacatatacttaactcattcattgaaaaacgcagaaaagaaaacctagatgaaaaaagggaggggggaagagagagggagaagtgttatatttgccatggctgaaagttccagcaaagtacattaagaggcatacatggcagtcagtcttttcaacttgaaagatatctaacttagggaagataatatgactgctatatataaagtaaatgcaccgatgagtagtgagttcttggtaaacctcacttccgttagtaatccacagcctaccactaacaattcacacttcctaggggtagccaacacaataccaaaatgttactaccagcactagctccatctaatgaaaaaaaaaaaacattgggctattcagtcacccatggcctttcatttcaagccataataatgcattggtagtgcacctggatcaagttcccagaagcccttaagattgccatgctcttctgtcagtttgaaagctgggatttggtgggagaacctaagcaactcttttctgggtattcttagattgacagatgatccttcatttgatttgccccggaaaactgaagtatacccactaacaaactccagaactaaaacatttatgaacagatcagtttcttcaacaacttcaactatgtcatactcgcaattttccatctcaaaacatttcattttatttgtccattttctatataacgcccaaacgtcacctttcctcggaaagatggcataattcttattcttaccaacagcatcggcatgtacttgatgtgaaacacaagaggtggtactataaacactgagaaaatcatgtgtttcattaactttaaatctgccacaggaaataagaatatctttgtcttcccatttaatggtattctctggtagccagcagcaagtaagccagtaaacatgcaattcaagatccgggcttgtcgcaatctttttaatctgaccataatattttggcaatccatcctcatcactgtaaaatgcccaaatctgaccaatctgaaacttttcaagggccctcccagcatcaaaatcgaagaattgagtatctggaacttcgatggtttctgagcttaatactggaggggcacaacaattatcactgtcatcaacagaatccttgttctctcttgccaaattgcttctttccaaattacccttgggaatagatgcatctccctcagatgtcataaggagttctgatctatctgaaggacttgtattcacaaggccagatgaactatgaccaaccttcacatctgaagtttcaggaacagcaatctcttcaagattcactgacagagctccaggatcaagttcataagatcctgctggtacaccccggacgcgtgggtcgaccgcgggaattnccggaccg

SEQ ID NO: 70947 - DNA, 367 bp, Glycine max
  Clone ID: PAT_MRT3847_35077C.1
cagtcataggactcatcaccaacatcatggtcatgctgaaaatgatgaatcatggcatccggtgagatgactatcaatgttcttgtttttaaaacatgctctttttatctaagttttttccttttaagtgatcaaagtttctgacataagaggtgtattggtaatccctgcagttgcctgaaaaattgttcagaagcttggacactgtaactcgtatgttaagattcacagcaccttttccacttcttgcatttcctgtgtaccttgtaagttattctgctttgaccataatttgaacattaattactctttagtcttggtagaagaattgacatggtggctgttgatatttgaatccagtttagta

SEQ ID NO: 70948 - DNA, 288 bp, Glycine max
  unsure (1)..(288): unsure at all n locations
  Clone ID: PAT_MRT3847_35078C.1
gatgtccttaaaatcaccaacaatttcaatacaattgttggtaaaggaggatttggaacagtttatctgggctatattgatgacactccagttgcagtgaaaatgctttccccatcgaccattcaaggttatcaacaatttcaagctgaggttaaacttctaatgagagttcatcacaaaaatttgacctcccttgttggttattgtaatgagggaaccaataaggctctcatatacgagtacatggctaatggaaacttacaagaacatctatctggtanacgcagc

SEQ ID NO: 70949 - DNA, 839 bp, Glycine max
  Clone ID: PAT_MRT3847_35079C.1
ccacgcgtccttgacttgctctacctacccttctccaacctcaaatttaatgcaaaaagtatctttccttctctctcaaatgctttccataaccatggaagaagaagaagaacaagaaccaaagctgatccatggctccaaggccatgcgcatgcacactcctactcccaatcctaacccttcccaaacaatcatgagattggcctcacttgcgatcagcttcaacgtgcggttgaaatcatcccacatgcctcttcacatgcaggaacatgctctgcgccacactagatcacctttagccatccaccactctcattctccaaagccatccaaaggagttttagctaaagtatgcaaaaaggaggcactgcgtgatagggaagagtttcgggtcgtttgtgagtgacacaggtggagggcgtttgtgagtctcacaggtcgaggcttcatctacttctcaattgactcactttctgttcttctcttcaaaaccgaggttcacttggtcacgcaaccacctcctacttaaattttattttttcttaattttaattaatgttccttataacgtatatatacataatctagtactcttgattttgattccaatgacaacttttgttgtgtccttggttgtcttcccacgtgtgaactcaatggttaactctttgactacttacccggttttgaagattccttgtaaattttggcactaacaaatggcaataggtcattgatagcatgttcttctaaaggttgacgagttcattgtgaaacatgagataatgtgaaacttctggccttttattatatatgtgcatgtgaagaagttgggctca

SEQ ID NO: 70950 - DNA, 526 bp, Glycine max
  Clone ID: PAT_MRT3847_3507C.1
gggaacaaatccctctaacataaacttttactgatcattaatcatcacaaattgtaactagctatttgtggcgaaaaacgacaatatgttttttctgttgcaaatacatgcattagctggacttcactactcacgtgcaagtcacaaccaaacaaagtacttaccaaatacttttttatgtgaaagcccgaaccaaaactgttgctgccacaacaaatggccaaaatatctaaattctatctatctaactagctaattttaagtggacaaaaccacaagacaagcccatcaaaatcactgccgcttcagctacttaatcccgggaaaaccctagaacaaaatcagagttgatactcctcacgcttatggccaagacctttaaatattcaagcttcctcactccctcaaatgagcctgctctatttgcggccgagaacttgaactgggtcttgaactgagcaaaatggcttgcacgagatttcttttccttggcccgcactctggtctttgcacatgttatgggagg

SEQ ID NO: 70951 - DNA, 308 bp, Glycine max
  Clone ID: PAT_MRT3847_35080C.1
cgggatgttagcaagatttaaaagcgtggggagacatgtatacatgtcgaactcacgaaacttacctgaggaaaatgaatgaggctctgccttcaccgggacccatcagaaatgcaaggcttgcgacaaaacaaggggggctgtaggaaggagatctgacaatgagcctgagctttactggaactgcgataaatgctgacaactcacaaggccttcttgctataggcagttaatcatacgaccttggagccgtgtgctgctaggtgcactttgagctggtgatcaaggaaacgggaacctccaccatc

SEQ ID NO: 70952 - DNA, 285 bp, Glycine max
  Clone ID: PAT_MRT3847_35081C.1
atatctttcatcaacttcagaggctgctgaggaaaaattttccctacttagagaaaatgaaactttgctgaatgcaaataagaggctgaatcaagaaaaggagaacttgttgaagaacaaagacatggcggatgctcaaatagtcacattaactaagtccttggatgcaatgcagaaagatcttaaagacaaagaaaacctggtgcaagttttgaagcaatccttggagcaccaaagaaaggaactcaatgattgcagagctgagatcacttccctgaaagtgca

SEQ ID NO: 70953 - DNA, 255 bp, Glycine max
  Clone ID: PAT_MRT3847_35082C.1
tcggacttcggctcgatcatggtttcaacacgcagctcgatgtggtttgcgctaccaggcgtctcgtagggctatttcgcctcatgagggacaccaatggaacgttcctttggagggccgaagtccatactgctggatcgccaacggaagttgcgctcacgcgtcgcttctagcccggcttctgtcttgtaaacgttctgctataatactccgcacggtagcttcgcgcaattggctcttcaactaagcgcgatg

SEQ ID NO: 70954 - DNA, 400 bp, Glycine max
  Clone ID: PAT_MRT3847_35083C.1
gaacaaacaaataacagatttggtagtattcacaaagccaaatgacatatccttagttgctcaccccggtcatttcttatggtcgtgcaaatacgataactggtgtgaatgcatttgctgcccctctttttgttgtttcttgccgcggggttacaccgatcaccatttgaggtgctaaagtaatagatgctgatcctttaccttttgttctttgggccaaaattgagatggatgaagggtataatatagctgagtgctttacacagacacgcacggtacatagttacaagagtgagacgaatttattggatttaagaaccacatcccctgtttttgaatccacctaatcttaccaataactgctcgccacgtggacactgtgccacttgactccccactt

SEQ ID NO: 70955 - DNA, 266 bp, Glycine max
  Clone ID: PAT_MRT3847_35084C.1
tttagcagtgttacttagacactcaaatgaacataatttatttgctcattagatcgtggagcccctttgcttgttcttagcaaggcatgttgttcgacatagacttgttcaagtactcagcttccttacattaccttgctctatgcataattggctattgacatttttggtcattgcattctcattggcatcgaacatctgattaaatttgattgtcttttctatttttgcactgtggattattttctggttttggcaagcagaca

SEQ ID NO: 70956 - DNA, 289 bp, Glycine max
  Clone ID: PAT_MRT3847_35085C.1
ccggaaaaaagggatcggctcattccaaaaaccacagaacaggggcctcaccaggaattttcaccccccaaaggcccaaaaggaatcccgaagattcccccgggggaaaatggggaaagggcccccccccaaattttgccggggaaaaaaaaatccccccgatttttgccaccttaaagggcctaacccttggggcaatttaattgcgggaaacaattaggggcctttcccaccttgggggaaaattttgaaaggggacacaaaccgttttcaacccggggaataaaaa

SEQ ID NO: 70957 - DNA, 763 bp, Glycine max
  Clone ID: PAT_MRT3847_35086C.1
ggctcgagctcgagccgattcggctcgagccgttcggtagttgcccttgttcatcaccaattccatttcgatttttggctcacccaaccatcacaaatagaaactcactatcgcaaaacaaacaaactacaaacccagataagggaaaaaggttgttatctctgttaagtttccgtgtgtgagattttcagaatttgaatatggcgttagggtttgagggttatagttatacaacaacacttggaaggaaaagggttgtgttattacacagtgaagcttcttctctcaactccaattcaccggtgaattcattgaagagaatgtgtagcaagaaattcacatttgactctgaaaggtctcgccttgaggcccttcctcttgatgttctgataagggtgttgtgtggtgtcgatcatgaagatttgaagcaacttgttcgagtctcaaaaactgttagagaagcggctgaggttgctaggaggatgcattttgagtatagcactccaaagaagaaaaattttgctattcctaaaccgtttgatatagagggtgctggtgggtttgaggaaattgatactccaaaagccccatcgaagaaagctaagtcaaagctgattggtaagaatctagcaagcatctcagtggcattgtttgcttcccctaattaggaacacagtgactggaccaaggaaaaagaagcaacttgtgatggcaccagacaatttctcttgctttgaatagttctgtggacggattagattta

SEQ ID NO: 70958 - DNA, 467 bp, Glycine max
  Clone ID: PAT_MRT3847_35087C.1
attatacagttggttctcgacggtgaggccatggattaaagaccgcgctggtgtgagtgtgatatggagagagtaaaaggagggatttggaaagagcacgttggagggtagaggaatctgtattgaagagagataggcggggaaggctctcgagagcacaattgaatgcctttaatttttgaaagggaagtgcttttttcttcctcttttctctggtgcttcttcttcctctgttctccggcgacggtgcttgttcatcctcttttgtccgacagtgcttcttcttcctgttttctccgtgggtggttggctggttcgtcgtggtccttggttgctgctgtggtgcttttgtcttcttcgtggctgttgttcctttggtcttcttgatcgcctttgagatatggaattgttcacgtgatgaaggtaactgtatctgtcagattttcacatcacattcttgtgaatgg

SEQ ID NO: 70959 - DNA, 478 bp, Glycine max
  Clone ID: PAT_MRT3847_35088C.1
cgatgagggagagaaggaagagaggcaatgaccatggatatcgagagtggttgggatggttcggatctgacagagaaagagaaagaaaaaaaatgtgaactagacattcaatggttgactgttgacattattatcatgaagatgaaaacgaagagcctacgagtgattttaatgatttttgtttcaatagaagtgatgcactgcgaagggtgttggaaggaagagagagatgctcttttgggtttaaatctccgttttgattctgacacagattgttgtcaatgggaacgaatcaagtgcaactcctccacagggagagtggccagactcaatctttatcacttgttgcttgatgggtatctaataaattactcagatttttttgccttcaaagatttgaagagtctcaactgggatagctagttgcgcatacaatgaaagcttggaaaatctggaagttctacttgagttaattaca

SEQ ID NO: 70960 - DNA, 1244 bp, Glycine max
  Clone ID: PAT_MRT3847_35089C.1
atttggcatcaacaatcaacaatcaacaatcacaaatagaaactcactctttcgaaaaaaccaggttagttacgtgtctcattttatatctgtttttcttctcttcattctgttacgctatttttgaattttccccaaaatttcctttttagtttttagaatattcggaccatttatttgacctatcccctacaaataattagtttggttgtttggtactttccagatcaggggaaaagtttgttatatctgttaagttttcgtgtgtgcgattttttcagaatttgaatatgacgttagggtttgagggttatagttataccacaacacttggaaggaagagggtcgtgttattacacaatgaagcttcttctctcaactctaattcggcggtgaatccattgaagagaatgtgcagcggaaaattcacttttgactctgaaaggtctcgccttgaggcccttcctcttgatgttctgattagggtgttgtgtggtgtcgatcatgaagatttggagcaacttgttcgtgtctcaaaaactgttagagaagcggctgagattgctaggagaatgcattttgagtatagcactccaaagaagaaaacttttgctcttcctaaaccgtttgatatagagggtgctggtgggtttgaggaaattgatactccaaatgccccattgaggaaacctaagtcaaagctgattggaaagaatctggctagcatctcagtggcattgttcgcttccgctaattaagaagaacagtgactggacaaggaaaaagaagcaacttgtgatggcacggacaatttctcttgttttgggtagttctgtgaacagatagtattaatttgttatgtgtatattagttggtacttggtagattagagagggacttgatacatacttagaagatctcactagctgatttcacacgttttgaaatagtctttacaagctaaatcttcttcaattccttcattgaagattgctttgacttgtttgcaatctttctgtatatctataggacaagtagaaagtgggataggttatagatgattatttggagggaaatccttggcccttctagtgtgataaatttaactgtgcacagtccattaagcatagttttgtgcttctctaataaaatgagtaaagtttccgctattatgatttgattccttggcccttctagtatgataaatttaactgtgcacagtccattaagcatagtctctgtgc

SEQ ID NO: 70961 - DNA, 246 bp, Glycine max
  unsure (1)..(246): unsure at all n locations
  Clone ID: PAT_MRT3847_3508C.1
tttttaatccggaagggaaaaaatgatccctggggacattatcaggcgaatggcgcgtgcttcaagaataatgatctaaaagccccncaatatcattttgaacacgacatagagatacagggcattaatggacaattagaaaactaaaaaactaaagcgcataactattacaaacaaactttttacacatcataatattgtgtgcaacattcacattttgcctttctaggatgaaaacaatcttga

SEQ ID NO: 70962 - DNA, 4298 bp, Glycine max
  Clone ID: PAT_MRT3847_35090C.1
caggctttttctttttcttcttcttcttcttctttattttctcattttgccaaactaaaatagatttgttcgaattaaaatagaagtttttttggtaagttcttggcaacaaagggataaggtccaggagggccgagaatgagctgaacagaggaggagatcgtaaggtaaaagggacacttgagtctttctggaagaatattttgtcccttaacagcgttactgataccaatgctgatgcacatggaaaaggaaaagttggaaaggatacgttcttggaagggattaatacttcgttaccaactttgggagcaggagagtctgcattcaatattcattttgaatgggacggaagcatgggaatccccggtgcgttttacataaagaactacatgcaagttgagttcttcctcaagagtttgactcttgaagccatttcaaaccaaggaaccatccgctttgtttgcaactcatgggtttataacactaaactttacaaaagcgtgcgcattttctttgccaaccatacatatgtacctagtgagacaccagcaccacttgtggagttacagagaagaagaattgaagagtttaagaggaaatggaacgggagagcgcaaggaatatgataggatctatgattatgatgtctacaatgatttgggcaacccagataagagtgaaaagttagctcgtccagttcttggagggtctagcacctttccctaccctcgtaggggaagaactggtcgaggtccaacagttacagacccgaatactgagaaacaaggcgaagtattttatgttccaagagatgaaaatttaggtcacttgaagtctaaggatgctcttgagattggaacaaaatctttatctcaaattgtccagccggcgttcgaatctgcgttcgatttgaaatccacgccaattgagtttcatagcttccaagatgtgcatgacttgtatgaaggtggaattaagcttcctagagatgtaattagcacaattatccccttaccagtgatcaaagaactctatcgtaccgatggtcaacacatcctcaagtttccacaacctcacgtcgttcaagtgagtaagtctgcatggatgactgatgaagaatttgctagagagatgattgcgggtgtaaatccctgcgtaattcgtggtcttcaagagttccctccaaaaagtaatctggatcctgcaatctatggtgatcaaagcagtaagataacagcagattcccttgatctagatgggtacacaatggacgaggcacttggtagtcgaaggttatttatgttagattaccatgatatcttcatgccatatgtgaggcagataaatcagctgaattctgccaagacttatgcgacaaggactatcctttttttgagagaagatggaactttaaagccagtggccatcgaattaagtttgccacattctgctggggatctgtcagctgccgtcagtcaagtcgtcttacctgctaaggaaggtgttgagagcacaatttggctactagccaaagcttatgtcatcgtaaatgactcttgctaccatcaactcatgagccattggttaaatactcatgcggcgatggagccattcgtcatagcaacacaccgacatcttagcgtgcttcacccaatttacaagcttctgactcctcactatcgtaacaacatgaacatcaacgcacttgccaggcaatctctaattaatgctaatggcataatagagacaacctttttgccctcaaagtattctgtggagatgtcttcggcggtttataagaattgggttttcactgatcaagcactacctgcagatcttatcaagagaggagtggcaattaaggatccatcaaccccacatggagttcgtcttctgatagaggactatccttatgccgctgatggactggagatatgggctgcaattaagacatgggttcaagaatatgtgcccttgtactatgcaagagatgatgatgtcaaaaatgattctgaactccaacattggtggaaagaagctgtagagaaaggccatggtgatttgaaagacaagccatggtggcctaagttgcagacacttgaagaccttgttgaagtttgcctcattatcatatggattgcttcagctctccatgcagccgttaattttggtcagtatccttatggaggtttgataatgaaccgcccaactgcttctagaaggttgcttcctgagaaaggcaccccagaatatgaagaaatgattaataaccatgaaaaggcttatttgagaacaattacatcaaagttgccgactctcattagcctttcagtgatagagatcttgtcgacacatgcttctgatgaggtctaccttggccagagggacaacccacattggacctctgattcaaaagcattacaagcctttcaaaagtttggaaacaagctcaaggaaattgaggaaaaacttgtgaggaggaacaatgatccgagtctgcagggcaatcgacttggcccggttcaactgccatacactttgctttatcctagcagtgaggaagggttaacttttaggggaattccaaatagcatctctatctaagggagcctgtggtttactctaattactctatatatagtgcatgtgtaccttccaataaaaaagatgcaagactagagatccgataaatcttgcatcttatctaatgtttcaattatcttgtgttttaattaatgttgtaattgagctcacagtttggttgtggtttgcaaataataagagcagtgagcactattagtttgtgtttcaattatcttgtgttttaatgcagtaatggagccgcagattacgtaacacaaatttatgttattagtaaaaaaactgtattgtacgaatattttgtattataagtatataagaaataaaaattattagtattagttgtggctcatcagaagcatgccttgacaagatctgcaagagagcgtgattgtggaaatctcgaaggaacagattcgggcactgagcaaacgtgcaaaatccaatttcaaggaaaaccattcattctgaagataaaccttttaacttgagaagccgcgaccccatctactccaacaagctaggcaagtgctttgagatcaccccagagaaaaacccccagcttcgggacttggatatcttcctcagtattgtggatatgaacgagggagctcttcttctaccacacttcaattcaaagtgcgatacgagatacgtggtaatttaactgaatggagattgcagaacatctgaactttgactggccttaaaagaacgacaacaggagcagcaacaagaagagcaaccttcggaagtgcggaaatatatagccgtattgcctgaacaagatatatttgtagtcgcaggacggggatgcggaggtggacaagcgcgaccgtgaagctgaatatctttgctattggtatgaatgccgagaacaaccagaggaacttcctcgcaggttcgcaagacaatgtgataagccagatacctagtcaagtgcaggagcttgcattccctgggtctgcacaagctgttgagaagctattgaagaaccagagagaatcctactttgtggatgctcagcctcagcagaaggaggaggggagtaagggaagaaagggtccttttccttcaatcttaggtgctctctactgaataactacgtaaatgtatgctgtaagagctcatcgtgagcgtggaatgtatctgcccatgtaactataaaaacttgagctccacctatcttctatctactacgaataaataaatccagcatatgatgcttgtgttttggtcaattcccattcccacgcccacctcatcagaaggaagagcgaaagcaagaggaagatgaggatgaggagcagcagcgagagagcgaagaaagtgaagattctgagttacgaagacataagaataagaacccttttctcttcggctctaacaggttcgaaactctcttcaaaaaccaatatggtcgcattcgcgtcctccagaggttcaaccaacgctccccacaacttcagaatctccgagactaccgcattgtggagttcaactccaaacgcaacaccctccttctgcccaaccatgctgacgctgattacctcatcgttatccttaacgagactgccattctatccttggtgaacaacgacgacagagactgctacagactgcaatcttgtgatgccctgagagttccctcatgaaccacatactatgtggtcaaccctgactacaacgaagat

SEQ ID NO: 70963 - DNA, 616 bp, Glycine max
  Clone ID: PAT_MRT3847_35091C.1
gacaaatcaaaatcagcatgcactgcccttttgccacactgaagccatagctgtgggaattgtgcctgagggaaagaagcacaaacgagtatctaaggaagttctctccattgggatagtatgtggaacttttggaggagtagcaattgttgcactgcttttctttattatcagaagagaaagtgtcaaaagcaaaatcaagaatcctccaacaaaattaatatcagagaatgcagcttctggatacacctctaagttaatctctgatgcaaggtatatatctcaaacaatgaagttcggaacagttggtctgcctccttatcgagttttctcactagaagagattgtagcagctacaaacaactttgactcagcttcttttatgggtgaaggttctcagggaaagatgcacagaggtcaactaaaggatggtttacttgttgccattagaagtgtaaaaatgaacagaagctacagcactcaagatttcatgcataacatagagcagatatcgaagtacaggcatcgtcatttagtcagtgttcttggacactgctttgaatgttatttggatgattcaagtgtcagcagcatatttgttgtctttgagtatgta

SEQ ID NO: 70964 - DNA, 459 bp, Glycine max
  Clone ID: PAT_MRT3847_35092C.1
tatgaacaaattgttcatagtttcttattaacaagttctttatcagaacttcaataagaatgatctcaaaattcttattaagaacatggagtatgggtatatttgtttttatcaccttgagacaccactttctccttcatttccatctcttttccactcacgaatttcttgctctcaccattccaccttatttctgcttttctgccctgtttaaaaatcacagttacataccgaatttgtcagcaatacttttaccgttgggtcagttttttgttgattttgcgaaaattaattgtatttttttggattcaattgtaatatttttgttgtattttgcattctatcgctctgtcccattttttatgataagaaaccattgcttaaataagaaacgttcctctagctggctgccaaagcacccttcacctgtgcaatcttctttgggtaccattccctaac

SEQ ID NO: 70965 - DNA, 262 bp, Glycine max
  Clone ID: PAT_MRT3847_35093C.1
gtgaagaaagacagaacgaatctcttatcgccatctttatctttctagcagtgctctcaactattatcttattatatataatacatatctttcttctcttctgctctttgctatcatagccacttctacataaaactgtgctccaaccttaatcctaagaagacggggtaggactggagtctgagggatctctttcgaatgtggtgtgcccttggccggggcaaaaagaccaaaatgattctctaaagtggtagctctacga

SEQ ID NO: 70966 - DNA, 708 bp, Glycine max
  unsure (1)..(708): unsure at all n locations
  Clone ID: PAT_MRT3847_35094C.1
ccacgcgtccgctccagctgtggtacaagctcattctatcatcgtatgtgagcgttctttgatccaaaatgagcgagctttaactgaattttcgtctgccaataaaatatccattaccatgacctttggtatttatgcatgcaaaatcaagcttgttcaggccaagcacccggacaaaggtcgacataatcagaatgtgttttatgacctacttttttttttcttcctttccatgatgaaccgggccaagataatttgggtacttgttccttaccctgcagtttcacaagagcataagggaaatgtggcaacaaaacacaacagtttatgcacaacataaaggcacaacaactgttaccttcttgtttaccagtcttggctttacttgttttttaagaataaggttacgattttgtttcttcttttcttctgctttcattttggagagactgggcctgtatataatgagagttcgaccaatctgaccaacagccactgaaccagttgctgcttccaactgcttcaccacatcatctaactcacctggacagctcctacgtattttaatctgtaaacaccatccaggttgcaagttaggatccaagattttgaaaaacttcacacttctgcattntacaacaagttancaagcagaagaggaaacacaagatacacaatagtagactggcatattatgtgggctcaaaa

SEQ ID NO: 70967 - DNA, 136 bp, Glycine max
  Clone ID: PAT_MRT3847_35095C.1
cccgcgtccgattcctcttcctaacgtttccgttgactcattaatctcaaggtttcttcactattcagacccaaatccatcctagctgccccaactttgcacccaaaaatcgcaccactctttaacatcgctgaat

SEQ ID NO: 70968 - DNA, 483 bp, Glycine max
  Clone ID: PAT_MRT3847_35096C.1
ggaaaaaacaaaaccaaaatttttttactattttattttataaaggagaaaaaaagccgaaagggaattgaacccatcagttcaaaaacttttcgtttattttttaagggaaagccccgaaccccacaaattttcgggggggcccattttaaaaaaaaaacggggccccaacgtatcaaaccataaaggcaaaaacccatatccataccacaagcatagttccaaatttcggggaacaaaattttctttcccccttcttgggcggaaaggaaaatgttaatggggggactaaaaaaacccccccattacaaaacaggggttgatttttggctttttcacaaacatcacagggcagggggcatgaagagcccaaaagtccctgaccctacctaaaaccgccctttttatagccccataaccatgactccccacaaccaacattgcggcccggtccttatctaccgcatcacaaaaaacattttt

SEQ ID NO: 70969 - DNA, 272 bp, Glycine max
  Clone ID: PAT_MRT3847_35097C.1
cccttgtttccggcaaaaggctcttacatcctatctgtctgatttagatgagcagattgacgttatacctaaatctgacgcaatgtgaggggaatctgctaaggagtttgctccattgttcacaaggatactgcactacttgactaatgacgatgttgtcgaagaagactctatctggagttgagaagccgagctaaaagatgctgacgaggcagataaagcaattgttcaacaggcccaagaaataatccacaggcctaaagaggcacctg

SEQ ID NO: 70970 - DNA, 568 bp, Glycine max
  Clone ID: PAT_MRT3847_35098C.1
ccacgcgtccggcaaaacaatctcatttggatgtgcaaaggattgcaatcagatgccttggcctttttggccttttggaaaggaaaccaagtgcagaacttttgaaacagttgaggatttcatatattaaggggccgcattcaatcagtatagaggcttgtaaggcattaattgatctcgtgatgtggtatggtcctcaagaagttgacaagatgttaaacctcagtattccatgccaattaaacagtgagaagacgactttttctcctctgaacttttctgattcagaagaggaattagatgttgggacgcttgatatcttatatggcggctttgaaaatgatgactgggcgagtcctttacctagcaacgaagatgagtgcgttcatgctattcttggagaggggtttgccaaaattcttctcttaagtgacaactatccaagcataccagcttctttgcatcctgttattttatcaaagctcatttacttgtatttcactgacgtgtcgggacacttgcacagattgaagcaatgcttatctgttttcttcgagctttacccatg

SEQ ID NO: 70971 - DNA, 461 bp, Glycine max
  Clone ID: PAT_MRT3847_35099C.1
cccacgcgtccgcctaccatcaaaaaaaaaaaaaaaaaaaaaaaaaaaaaaaaaaaaaaaaaaggaaaaaaagaaaaaaaaaataaaaaaaaaaaaaaaaaaaaaaaaaaaagggggggccgttcaaaaggaacaaattccctcgctagaggggggggaaagaaaaaacttttttataggggaaaaaaaagccaatacagggggggggggttaaaaaccacatggacgggaaaaaaccgggggtaacaaaaataaagcgccgggcagaaaatccccctttcggaagggggggtaatagggaaaagggcagcaccgacggacctggcaaaaaaagggccaccctaaaggggaaagggaacaccccctgtataggcgaataaagcgcggggggggggggggttacgccaagggggaccgttacattggcaagggcccaagcccccccccctgagctttaaatc

SEQ ID NO: 70972 - DNA, 291 bp, Glycine max
  Clone ID: PAT_MRT3847_3509C.1
gacctatatctagaactgcgtaagcactccataggaactgaaatgtttcgggcagtctaggtgccctcacaagccggcacaaaaaaagatacatgggcgcgaggacgccaagccttacccccctgtggaatgatttaccctccgatttacgagaggaacttatatgatcacagcatgcttcgatccccaactaggagaggtaccaacatggattttttttgtacaggtgctacttgttcaggaacaataatcgcagctggttcaagcgtctagaaaaaaaaaatatgttct

SEQ ID NO: 70973 - DNA, 873 bp, Glycine max
  Clone ID: PAT_MRT3847_350C.1
cccacacaccctctctaatttttgaggcatacataccattcgctcgcggtgtgtgcaatacagcttctatttcaccttccccccccaaaaaaacccttggctttttccctcaccaacattgttcctttgttgttattctagctttcattaaacacacgcgtcgcgccaggtgtagaagaaacacactagccaacacaacagccaaatgtccatggtttagcgctcaagaaccttcccagaaaaaaaaaaacttctcttgcctcatcaaagaagttactaattacactcaaacaaaaatagcctaaacaaaatggctatgcttcttctcattccactgttcctatcatccattttactatccccaatatcaagcgcaacaacgttctcaccccaacccggaatctgctacggccagctcggagacaaccttccaccgccgcgagaatctgtctccctcataacctccgtccatgcgaagcgcgtgaagctctacgacgcgaacccatccatcctccacgcgcttcaagacacgcgcctgcaagtttccatcatggtccccaacgacctcatcttgaacatctccacgaaccaaaccctgtccgaccagtgggtctccgacaacgtcgtaccctaccacccccgcaccctcatccgctacctcctcgtcggcaacgaagtcaccagcaccaccgcggccaccgccacgtggccccacctggtccccgccatgcgccgcatcaaacgctcactgaaatcccacgggatccgcaaaatcaaagtcggaacctcatccgctatggacgtgcttcaaacctcgttccctccctcaaacggtgcgtttcgcaaagacctaactgcccccgtcatgaaacc

SEQ ID NO: 70974 - DNA, 420 bp, Glycine max
  unsure (1)..(420): unsure at all n locations
  Clone ID: PAT_MRT3847_35100C.1
acttacgcataagcttataaaccctncactctttagtcttaactctcctcctacccaaaatacagacaagttcatcatcaacttcaacttcctctattcttttcctatcatcaattctaactccttatttctattcatcataatcatctgtctccaaaagatcttattattacaatttcatcataatttaatcttaataccattttactacctctaaaaatccacatatctagtatctcttactatacaaatacacattattttgatttcaaaccaaacaactcttcaaattttcctccttcattattaatcttaaatttctaacactttactcttcttctttttttacaacttatttatatttcctcaaaaaattattcccctaccaaaaataaattaactttaattttaatttttttt

SEQ ID NO: 70975 - DNA, 279 bp, Glycine max
  Clone ID: PAT_MRT3847_35101C.1
tttcctctcttcatgcttcctaatactataactcaggtggttaatgcaaacgtatcgttgaagcgactagaagatttactcttagcagaagagagagtacttctaccaaatccacctattgagccaggattaccagccatctcgatcaagaatggatacttttcttgggatgcgaaggcagagagggcctcattgtcaaacataaatctggatatacctgttggttgcctagttgcagttgttggcagtacaggagaagggaagacatcactagtatct

SEQ ID NO: 70976 - DNA, 215 bp, Glycine max
  Clone ID: PAT_MRT3847_35102C.1
gcttccttcctttcccttgacgcggacgccaaccaccgtcgagcacccactgtccgccgtcgagcctctcagggacacaccgcaccacttggtctctctgtctctgaaataatcaagatctgtgcttgttctacaggctgccggagagctttgttccttttcctttcattctccttcagctttctgaaactgtcacagcaagttttattcattgg

SEQ ID NO: 70977 - DNA, 260 bp, Glycine max
  Clone ID: PAT_MRT3847_35103C.1
tgtcgggcgtgttcgcccttttttttttttttttggcaaatgcattctttattaaaagaaactaatgctgaatgatgttctatttggctttacatacaatcccatcacatgaatcgaagtcatagtttcacattattgtgactgataggcctaagatacattcctaaaataaaatagcagcagcgattatgcgaattacttttttttgttacctgtggttggatgaaacttaagagcagtggatgatcatcattatcaca

SEQ ID NO: 70978 - DNA, 3418 bp, Glycine max
  Clone ID: PAT_MRT3847_35104C.1
tcttcgcatcaatatagcatttgctggatcggctcgtgggccttagtctccatatttcagagtaactgtttcccaccctttttattttcgtttgctttttcattactgattagtgatcagtgaagagctggacccatgaccctttccatgttttgagagttgttaatctgaactgaagatagagattgaggaaaaccagtagctagtggttgtgtgttaagagtgatggatagctccgaaatcaagtcaccagcagaaggctcccaacaggggacaccaggaaattcactgcgtagaaagaagctagccatatacttcattgagtctgaggatagaaggatggcctttggtcgtgggtacacagcaggatctacaccagttgatatccatggcaaatccattgttgatctttcaaagactggtggttggattgctgcgttctttatatttggaaatgaaattgcagaaagaatggcttattttggcttttagtttaacatggtgtcctctaggttttatgtgatgcatagaccttttacaagttcatccaacgcagtcaacaatttcttaggaatatcacaagcttcctccgtgctcggtggttttctagccgatgcatatcttggacgctactggaccatagccatcttcactacaatctatcttgcgggtttaacaggaataacactatgtgcaacaataagcaagtttgtaccgaaccaagaagagtgtgaccaattttctctactattgggaaactgtgaggcagcaaaaccgtggcagatgacatacctctacacggctctatacatcacagcgtttggagctgcagggataaggccatgcgtgtcttcttttggagcagaccagtttgatgagagaagcaaaaactacaaggcacaccttgacagattcttcaacatcttctatctgtcagtgaccataggtgcaattgtggccttcacagtggtggtgtacgtgcagatgaaatttggatggggatctgcatttgggtcactggcaattgcaatgggaatatctaacatggtcttcttcataggcactccattgtacaggcacaggttgccaggaggtagccctcttactcgtgttgctcaagtcttggttgctgcatttagaaagagaaatgcctcttttggtagcagtgagttcataggcttgtatgaggttcctggcagacagtctgctatcaagggaagtagaaagatttctcatactgatgatttcaggtttcttgacaaggcagctctgcaattgaaagaagatggtgctaatccgagtccttggagactgtgtactgtgactcaagtagaagaagtgaagatccttatgaaacttatccccataccagcttgcacaatcatgctgaacgtggtcttaacagagtttctcactctctcagtccagcaggcttacactctcaacacccacttgggtcgcttgaaactcccagttacatgcatgcctgtattcccaggcctcagtgttttcctcatactttctctctactactccatttttgtccctgtctttcgacgcatcacgggccatccccacggtgcatctcagcttcagagggtaggaattgggttggcagtgtctattctatcagtggcatgggctgcaatatttgaaaggtacagaagaaactatgcaataaaacatgggtatttggctagtttcctcacagcaatgcccaacctaagtgcatattggttgttgatccaatactgcctcataggtgtggctgaagtattttgcattgtggggttattggaattcctatatgaggaagcccctgatgccatgaagagcatagggtctgcttatgctgcactagctggtggcttgggttgttttgtggccaccatcataaacaacatcatcaaatctgccactggcaacttagacaaaggccaaccatcttggctgtctcaaaacatcaacactggcaggtttgattacttctactggcttctcacagctttgagcatcatcaacttcgccatcttcgtatattcggcgcatagatacaagtacagggaacaccaagttcatgagatggagaaacatgaaatgacatatgttgggagctcctagctagctacataggaactcaactcataccaacacaaagtgctgtctttgttccattgaataacttgtaatagtcttcttgaatggtcaaaaattaccgtcaagattttcaatattaagtcgtcatagggattgaaaacgcaaactagctagggagtattctgcataagacaatggatttggtggtgatggacgattaaacacttacatgtaagcaaagatgaaaacaagataattgcataaatgtttttcttttatgaagatttatgcaagttagttgaaaatagtttaaatcagtcatctgaaaatatataaagtggtttttcttttactaaaaaaaactgctcgtgtggttagtaggaaactgattttgtaataagcatttccctatttatttttaataacccttcaatgttcatcaaaaattgatctatgggatgtttcatgtgttcctaataactacattaagttgcaatgctcagaagcaagtctcagtcacctattcaataaatactgcgagctatcaaaatagagtgaccaattaccatagttatttgcattcataattcgagtaatctaatgttttacagaagtagtaaaattattgaaagaccttgaaaaaaagttgatcattatagcagccacacaaagacactacatttccatagattgtaatccagttgaagcctttgatttcttcttctttttggatccatttttgttcacttttttcttgggttgttcctctactaccggttgtttgctctgtatatattgatgaatggcagacaggggatctgcttgaaagttaggatcattgagaacagcagaaattcgatctctttcagtcaatactagcatctgcctggatttacacgtaagtttgctgtcattcgcacaacctggtttctttgatgccttcacctcaggaagggactctaaaagtgaagatagattatatgccttcaatttcttctgccgcctttgttgtttgctctttttctttttcttagtaatagacttttgggcactcaaggaggtaacagcatctttcaccttggaataaaattggaccttcttttcgaatttgcgatcggactttgaatctaactttttcttgcccattgcagcaaaatctgagaggagggaggaacagatccggcggtgtcgtttcgattagggatagagatagtgtttcttaacggctaacaacagggattccactaccgtgctgcgctttgaggactgagttgttctctgcaaccaaattgagggatcccttctgtcgtcttctcgcagc

SEQ ID NO: 70979 - DNA, 524 bp, Glycine max
  Clone ID: PAT_MRT3847_35105C.1
atagaaatacattgcgcagagtataaggcattatatagctcgaaattacggcctcgacagaaagtgaatggaccacaccactctgcacatgttgctacaatagaacggtcactagggttgtaatacgggaagttcctgttggctctgagcacgtgttgcacaactgcacagatagcatggtctaagcgcactgttgtaattataaatggcacctttatcttttcgtgagtaaggtatcgaccaccggttttatgatccttatcaagggcaacctgatattgatggatctttgatagcaccctgtttcatgtacccttagaaatgcacaaggccaactaacactataatgacatgagcactgctgaggtactgaaaatgcaaaagaacaccgtcccacccattgctgaataggagatgaagcactcggtcctgtgaaaatgggctagataatgcccgggatccccagatcttggctgggaattggagagacattttgactctgcggggcactctaccataagatt

SEQ ID NO: 70980 - DNA, 375 bp, Glycine max
  Clone ID: PAT_MRT3847_35106C.1
gctgggagtgatggcattacatgaaagttctcgcatccacggagcgtgaaatccgaggggcttgactctgcgtgcagagagtgtccaaaacaaaaccccaaaaatttgaaataacactctcagtctcacgcattcttcttcgtctcccactccaccacttcgtaactccccaacctcaccaccaacctacgcgccgagatctaaaccaccgaacattctcgaaccctcccagatcgaacaagggcgagagtgatgggggatgagaaaggtgagaagaaagaaactagtcccagtgccagtgccagtgccgggaacgataagaagaacgagaaaaagaagaaaggttttatttcgcgaatttggaacgcgatattc

SEQ ID NO: 70981 - DNA, 466 bp, Glycine max
  Clone ID: PAT_MRT3847_35107C.1
acgcattcttcttcgtctcccactccaccacttcgtaactccccaacctcaccaccaacctacgcgccgagatctaaaccaccgaacattctcgaaccctcccagatcgaacaagttcgtgttcgttcctctctcccttttccttccacaccatttctcatttttcactttcttatttcttttttcttttttggttaggggcgagagtgatgggggatgagaaaggtgagaagaaagaaactagtcccagtgccagtgccagtgccgggaacgataagaagaacgagaaaaagaagaaaggttttatttcgcgaatttggaacgcgatattcaggtccaaccgcgacgattttgagaagaggcttcagtatatttccaaagaggaaaacgcggttgtgactagaatgagcaatagatctcgctcttggaggcgaacctctcgccaacttattctattctctggttt

SEQ ID NO: 70982 - DNA, 420 bp, Glycine max
  Clone ID: PAT_MRT3847_35108C.1
cgcctgttgagagtttcagacgggttatcaagcgtttcattgattttgtgtagctgaatatagccttcgtgcaaaagaagagataacaggtgcctctctcacggaacgatcatccatctgttgaatcatttctttaggttgaaaaacggaatggtgaccactccgttacacaatattgtaaaagcatgactaacaaagcatcttctatggaatcaatctcctacagaaagtctccatgcaaaggaatgaagaatatgctacatccaattgggcacatttgactgggtcgcttctgagtttctaaacaataatggctttcttctcgcttctgttctccatgaggttaatgtatccaacttttactttctgtagactgacacatgtacgtttggttcaaaatatttcgtctaatgtaaacgt

SEQ ID NO: 70983 - DNA, 405 bp, Glycine max
  Clone ID: PAT_MRT3847_35109C.1
ggctcgagagagcctcatgctggtttcaactttttcttgggtgaatctgccactgtgggcagcgacatctggtgaactctttggacctacaaccaaaaatggcgtgaataaacctaaaactgctacgctatcatccctcatacaaccacacaccaaatataagccgccatatgttcagatgacaccagatctatcctttgggcaatgccggtggagctattacgcagcaagttgtacctgaccactgatgaccggctgatgaaacacatactgagactggctcagcgcccgatccctggggggaggattaatcctagatccgggtggatcaaagtcaccatgtgaacataaaggcagagctgaggcaattcgagaattggacatccatgtctggaaccgttattc

SEQ ID NO: 70984 - DNA, 272 bp, Glycine max
  Clone ID: PAT_MRT3847_3510C.1
aggacttatatttctgcttgacccccccaagctttttcaaaatttgaaggtcaactcaaatgacctacatgtgggaagaaccgatgtttcctcggcgctgggcttcacctttactattttttcccggggggaccttgcattatgttttctggcttctacttacatttttcttaaatttccccaaacttgggcttcctttgtacaaaatcccctttatacagcccgggatatccggatttgtgtacctcggcatatgacctcttcaacacccc

SEQ ID NO: 70985 - DNA, 1427 bp, Glycine max
  Clone ID: PAT_MRT3847_35110C.1
tccaccctagtgaaagattcattgtatgcccatcattgaatatattagcccttcatcaaaccaagccactcaccatcgggtttttgttgaccttcccatacataaccttggcactatcatcatggagatcaatggagagggtgcatccccacacagcataaattctatcaagttcaaggtacctgagaaacagccttatagaacttgacaccacattcaacccccacaaaaatggatgaacgatccaaatgcacctatgtactacaaaggagtttaccactttttctaccaacataacccctatgcaccaacctttggcgagaaaatggtgtgggctcactctgtgtcctatgatctcatcaattggattcatctgaatcatgccattgaaccaagtgattcctatgacatcaacagctgctggtcaggctcagccacaatactcccaggtgaagaagaacaacctgttattttgtacacaggaattgataacaataaatatcaagttcagaacatggctatgccaaaggatctatcagaccctttcttaagggaatgggtgaaacaccctcagaaccctgccatgacaccaccaagtggtgttgaagtgaataacttcagagacccttcaactgcttggcagggaaaggatggaaaatggagggtagtcattggtgctcaaaatggggatgaagggaagacaattctctaccaaagtgaggattttgttaattggagagtggaattgaaccctttttttgcaacagataacactggagtttgtgagtgtccagatttttttcctgtgtccatcaatagcacaaatggggtggatgcatctgtccaaagtcaaagtgttagacatgtcttgaagataagctatctacgtagacatcaggactattattttcttggtaaatatgtctatgatgaggggaactttgttcctgatgttaaattcactggaactagttcggacttaaggcttgactatggtaagttttatgcttcaaagtcattttttgaccatgctaagaacagggagggatattttgggggtgggggtgaacgagtgtgacactagacaaaatggacattgagaaaggatggggctggtctacagtgtattccaagggcaagtttggcttgatgaaagtggagaaggcagttgatggcagtcgccaattgaagagatagaaaaactacgcgacaaacaaattagcatattggagggagaaactggttggggggatcaattattggaagtctcaggtatcactggatcacaggccgatgtagaagtgttgtttgagctacccgaactagagaatgtggagtggctagatggaagtgaagttgatcccacttgctgggtagtgaagagttgcacaagaagtggacatagggcatttggttggtagcttagc

SEQ ID NO: 70986 - DNA, 468 bp, Glycine max
  Clone ID: PAT_MRT3847_35111C.1
cacatgaatgagaggtcctgaaaccctccacgaaaattttacatcaaatactactttgtctgtcattgaaaattattgttgccatcacatatattgacttccaaagtcaatatttttcttgtttgtttaaccttgctttgaacataagagaagaaatgaagaataaaagaaaccttaatgtgacttgtctcaatcttgttaagcaaaggattgagcagaagcaaagaaaaccattgccagagttgatcatgccactgttcaatttgaggatagatgccaagatgttcaaaagcttgaacagattcttccatggacattggggcaggaaaccccccctcacccttcttagggggagtgttaaacttttgcgagcccggagacatcctcacaagcctcaatgacgtacgcctagcagttccagaggtattggttgagcctgtaactgtaatagggctcactatgccaaaa

SEQ ID NO: 70987 - DNA, 570 bp, Glycine max
  Clone ID: PAT_MRT3847_35112C.1
cgacaacagtgacccagacaatcgctttctgattccccgggaaatctatcacaatgccgtccaacagactcacctacaggcgtcgcgccccctacaacaccaagagccagaaggtccgcgtcatcaagacgcccggtggtgagctccgttacctgcccatcaagaagaagggcactgcccccaagtgcggggactgcggttccaagcttcagggtgtcccagccctccgcccccgcgagtacgcccaggtttcccgccccaagaagaccgtccagcgcgcctacggtggatcccgatgcgccggctgcgtccaggaccgtatcgtccgtgctttcctgatcgaggagcagaaggtcgtcaagaaggtcctccaggagtcccagcaaaagaagcgttaagcggttgcattgagtgaaggggtttagcatgtcaaaactgggtcttcggggttcatgtgcattatgggcagtctcctgggtcggtcggcttttacgatatcaaagcgatttttacgtccctcccccaggatgtagctgagtagggtcccgaatacatcccccagctccccgg

SEQ ID NO: 70988 - DNA, 279 bp, Glycine max
  Clone ID: PAT_MRT3847_35113C.1
gcaagagtctcgacttctttttatttgcggctttatggctccagagtatctatgtttggacaattttctgagaaatcggatgtatacagttttggagttatggttctcgagattattagtgggaaaaagaatataagttcatatgaaccacgtcgtgttgttgatgatggccttttaaaatttttctggagacattggagggatgaaacaccattcaacacattagatgcaaaattaaaggaaaggtattctgaaattgaagtcatcaaatgcattcaa

SEQ ID NO: 70989 - DNA, 1681 bp, Glycine max
  Clone ID: PAT_MRT3847_35114C.1
tccggaattcccggctcgacccacgcgtccgcggacgcgtgggcggacgcgtggggaaaaactcaaccttcttcgtagtagctttcatttgaagaaacccaaaactctctcaacaccttttttacctcatcattctctctctctctctctttcccttttatttacggtgcttcttcttcttcttgttgctcactaactaacaccaacttcacaaaaaaaaaaagacttaaccatggattttgaccttgaaaaccctcttggaaacttccacgaccttccctgcgacgctgtcccttccctcttcctcatcgaatccgaccacatccctcctccgaactactgtcagagtctcaaagccagcgacttcgacatctctgttagaagagatgttgtctctttgatctcgcagttgtcctgcaccttcgatccggttctcccttacttagctatcaactacttggatcgcttcctcgctaaccaaggaatattgcaaccaaagccatgggcaaacaagcttcttgcagtctcttgcttttctctagctgccaagatgttgaaaacagagtactctgccactgatgtccaggttcttatgaatcatggcgatggaggtgccatttttgagacacaaacaattcaaagaatggagggcattgtcttgggagctctacaatggcgaatgcgttcgatcacccccttctctttcattcccttcttcgtgaatttgttcaggctgaaagacccagcattgaggcaggttctgaaggatcgagcatcagaaataatactcaagtcacaaagagagataaaggtcttggaattcaagccatctacagttgctgcgtcagcccttctgtatgcttcacatgagttgtttccctttcaatatccgtgcttcttaagagcaatatccgattgttcatatattaataaggaaactgtagtgcaatgttataatgtgatacaagatatagccagggaggagtacgaatcggtgttgaatataaactcaacttcagacacaccggttaatgtgttagacgaacattttctgagcttggaaagtgaaaaaaccaacggaaccaacgttgttgtgacacaagagcaggacttcaaaagaaggaaaaccaccgattatggcaacaatcgcagggtcccgttttcacattttcatcaatgctgaaagtaccagaacaagaccacatttaatcatcatcaggtccatccccgagcgattaattaatattacattttcgtggtttaacaacaaaaataatgtggaaagcaaatgagaacacaataataggaagagggatagtgatggactcagaatgagaagagaagagaattcgatcaatagttagtggacaaaatcactgtaacgtgatccttgtacgaccttcattaaatctgttagttgtgtcaaggagcatggaagataagatggattttttttttttttgggtttcctaggagagcaaacaaaaagacaaagcgtgactttgaattgtagggttgagtgttttttttttttgttggctgttttgtagtcaagtgtggttctgtctcttagcttctggcaaaggaataatcacaatagtaatagtgaagcaaccaagtttcttggaaaataaaatatagtacttttatgtattaaaacaaaaaaaagaaaaaaaagaag

SEQ ID NO: 70990 - DNA, 156 bp, Glycine max
  Clone ID: PAT_MRT3847_35115C.1
ggctcgagctcgagccgtgtaggtttctgtgagatttttctctggggaggagtacgagacagttctaacgatgatgaggaggctcagtggatatatcaacagatggtattacctcttatgttcaggtaaggaatgggaactggaagaaatgaagtt

SEQ ID NO: 70991 - DNA, 249 bp, Glycine max
  unsure (1)..(249): unsure at all n locations
  Clone ID: PAT_MRT3847_35117C.1
ctcatggngaagtggagcggaggattgtntcccagctcttgaccctcatggatggnctaaatcacgtgctcatgtaattgtcattggagctactaatcgccccaacagcatccgnnttgnnaacccgaacttcaagtttcaggtttgancgtcagggcgttggatttgacagaacaaaaggtggatattagttttcagagttttgggtgtctgatgccacagccacaatantanatgtgcgagctttga

SEQ ID NO: 70992 - DNA, 503 bp, Glycine max
  Clone ID: PAT_MRT3847_35118C.1
gtttacagcaatgatgtcaaataattactctggtctgtttgtacaaaattcaatggacaactcatgatacaattgccgatatacattttgatcaattggacaactcaaataatttctagcaaggaacactaactatgttgcgacgcaatcttccagaagacagaagagaatgcctccattaattatattccaaagctgaacagaagataagcctagttttacacaactgcacacaaaagtagaactagaatcaacgagcttgtgaaaaatccaccattgtcgtggtattgtgacaagcagcccgaacttgtggaattagatggggccagtgatgtgccatttgttctggttccctttctaccatgacttccgggaaatatacaagaaccatgacttgggtctgtggtagtgacagtggcaacccctttaaaatcacaactcccaggagatttatccatcttctgataatatgcattgaaagcatatgtagaatgtgcaactac

SEQ ID NO: 70993 - DNA, 3146 bp, Glycine max
  Clone ID: PAT_MRT3847_35119C.1
ttggtctggagaagacgacagaagggggatgaatagatagagacttcatgtttgccttgtatggtagaatggttttaatgttatttatttatttttgcgtgtattggggacgtgcgagagacgacagaaggggaacacgatcttttcttacaccccctcaactacactacaatccacacttatagtcatgactcccccaccttcaccactctttataactcctctctccctcacattctcaccaccaccactatctccatctactactccttccccttattgacgacaccacattcatttaccatatccaacatggccgaggaagctccaaaccagacaaccacaccaccgcctcctcaagagtcagtggcgcaagtggaggaagtggtagtaaccgatgttccacagccaccagaaaaaacaacaaccactgttccagttgaagaaaccgtcactctcgagactcacctctccaaacccaataatgctgacgacaacgacaacatcatccctgaattcaaggaagaaagcaccaaactctctgaactcccagaaaacgaaaacaaggcactccaagacctcaagaagctcgttcaagacgctctcaacaaccaccacttctcttccaaagaagataataagaacccaccaccacaaactgctgctcacaaggaagaagttgtaactgaaactaaaactgatgctgccccagcaaaaaccgaagaggagcaagctgaaacaaaggaggaagaggaaaagaaggaggaagtgaaagaaacgaatgaagaagctgcggtggatgatgatggagcaaaaactgtggaggccattgaagagaccgttgttgctgtctcttctaccgttcagcctcaagctgaagagaaagcttcatcgccacttccgcctgaagaggtttccatttgggggataccgctgcttgcagatgacaggagtcacgtgattctgctgaagtttctacgctgtggagttttcaggtagaaggaggcatttactatgctgaagaataagattcagtggaggaagaagtatgggttggaggagttgatggaggagatgatcagggatgagttggataagggggtgttcatgcatggctttgacaaggagggtcaccctgtgtgttacaacatctatggggagttccagaacaaggagttgtacaagaagactttttctgatgaggagaagagggagaagtttctgaggtggagaattcagttcctggagaagagtataaggaagctggatttcaaccctggtggcatatgcaccattgttcatgttaatgacctcaagaattcccctggacttgccaagtgggaacttagacaagccaccaaacatgccctacaattgcttcaagacaattaccctgaatttgttgccaaacaggtgtttattaatgtgccatggtggtacctggcagtgaataggatgataagcccttttcttactcagaggaccaaaagcaagtttgtctttgctgggccttccaaatcaacggaaacccttttgagatacatagctccggagcagcttcccgtgaagtacggtggactaagcaaagatggagagttcggaattatcgatgctgtcacagaaatcacagtgaggccggcagcaaaacattcggtggagttttcagttactgagaactgcttactctcttgggagcttagagtaataggttgggaagtaacttatggggcagaatttgtgccaagctcagaaggaagctacacagtaattgtccagaaggctagaaaggttgcttcatcagaagaaccagtgctttgcaacagttttaaggttggtgaacctgggaaagttgttctcaccattgacaacacaagctctaagaagaagaagctcttgtatcgcttgaagaccaagccttccccttctgactaaaatcatcattgttatgtgtatgtgcaagtgggaaggggaagaacagtgccagaattgcttgcttacattcctgcatcaacttctaccaagacaccagtgcttcaaagattaactttccagctgttcatatatgaatataaagtttttgtttttaattttttggcctttttgttttgatgattattatgtgttcaaccatattatataattatatatacctctttctgtgtttttcttgctatgattatttattgttgttgttatcactgaagataaatatcaaggtccttctttcaaatttggggtatcttttgagttgttcttagggagggacttgttggctgttgccctatttgtatgttataaatatcatgtaaatttttgtggggtctctttctatctctgtcgctctgtccgtacctaagcatgaagtgtgtttgagagctgtcatgatctgtgttcccaccagggaaaaaaaatgatgtgaatgtctatcatggctctggacttctgtaatatgtcacattgttacattatggttgagatttagatcagctttgttttcttgtcacagccaggatcaaaattgtctatttagacacattatcagtcacaggatattctcaaactttcaagttaaatactatctcccaagatgttcaaagcttcaaagatgtggactttgctgctagaagaggaaagttttaatgataatcgtgatcatgtgtttcaatcatatataatttttctgtgtttctttaattatttattattgttatcattgttggaggggatcttttgatttttgaattcttattcatatatttggaggaggacataattgctctatttatctgtataaatttcatgtaaattttggtggggcctttttttattaatatatttgtctttttgtctgtaatttaagtctaaaatatgtttgatctgtcaaaatcattattgttatgtgtatgtgcaagtgggaaaaggaagatccctacctgaattgggtgcttacgttcctgcatcaactttcctgctgttcatatatgaaaataaaatttttttttttttttgccattttggttcaatgattaataagttttttcccatattaaataattttaaaaaaacccccttctggggttttggtgggaagaatatttaataggtggtggtatccctgaaaaaaaaaatccagctcctttttttcc

SEQ ID NO: 70994 - DNA, 379 bp, Glycine max
  unsure (1)..(379): unsure at all n locations
  Clone ID: PAT_MRT3847_3511C.1
tcagacgtgacatgcactcctccctaacctcaggaattcggttcgaggccggctgatacacagagtgctggaacatagcatagaccctacaacacatcagaaagacctggatgaaattttatgtgcattgagcacgcacactcatgatcaataccgcaacaacgatgatgatgatgggctgaaacatgtcaggtctcacagagcttagctgcatattaacactgacataagccacgcaaagacgccctcgagtacatatgaagcanaagttctgtcatgcagatgtctcatgagaaatgacaagacctttgtaagtgcttctgacgcgccaattactacatgagtgagaggcttgccatcaccgcttaaaatgagcctc

SEQ ID NO: 70995 - DNA, 335 bp, Glycine max
  unsure (1)..(335): unsure at all n locations
  Clone ID: PAT_MRT3847_35120C.1
atcatgcagggagactttgccggtacctaatatagtagggagcccgttctagtcagatctctacaatcctattagcttgaccctccatcttaggtcgatgttatgagctcatatgatgtacaatgctgatgcagtgtctagggcgttcttcaattttgactcctaggcgattcacttagggcagcgtttagagttctatggcactgaaagatactcaanaaccagccgcagagcgtgaatccaaagattatccttgagagtcacaactttaggggtagatagaattatatggcaggacaccagacctggccgttaccgaaaaaaccaatggaatg

SEQ ID NO: 70996 - DNA, 800 bp, Glycine max
  Clone ID: PAT_MRT3847_35121C.1
caggtcacaggataaatcttggttatagacttttagtcacaggattccaattacaaaacattaataacccaaaagtgaggcaacgaattacctgttaactttacactcccaaccacatataactaaagggaaaaattactctaccactgcaagaaattggggtcaattgggaactctctttcaataaaagctaggcctcaaaccatgttgggtctctgtggcagcaggagattataaaacttatcatgcaagaagaaattctttcccttgctatcaacagcctttttccacccacaccatcctccattgactattttctttaggtcatccgaacctgtataggggggatcaagtattaaaaatgcacaatctccacttgcttcattgtaatccactcccaagagtgtatatgcaagtacaccaccaccaatcataacaggtgtactttggttttcaaagtgcatcgctagctctcgacatttttctggaagctcagctccagatctaacattgatgactttgcacgtaacacccagaagtttgtccaaaacaaagctcaattcaatggcaccgatccaatctcgtgatccaacaaaaaaagggtctttatcaccaatttcaacaagtgtctgctgtatttccctatgagaaggaacttctatggatgtatagttttgaagtctgaaccatgaaatgatagtctggagaagaagcggtaagcacaaccccatcccgaagtcattagaaccattgtaagagatggaagtattcatagaacctgaacaagggaaacatttccc

SEQ ID NO: 70997 - DNA, 704 bp, Glycine max
  Clone ID: PAT_MRT3847_35122C.1
ggatgaatagatagagacttcatgtttgccttgtatggtagaatggttttaatgttatttatttatttttgtgtgtattggggacgtgcagaactgcttactctcttgggagcttagagtaataggttgggaagtaacttatggggcagaatttgtgccaagctcagaaggaagctacacagtaattgtccagaaggctagaaaggttgcttcatcagaagaaccagtgctttgcaacagttttaaggttggtgaacctgggaaagttgttctcaccattgacaacacaagctctaagaagaagaagctcttgtatcgcttgaagaccaagccttccccttctgactaaaatcatcattgttatgtgtatgtgcaagtgggaaggggaaaaacagtgccagaattgcttgcttacattcctgcatcaacttctaccaagacaccagtgcttcaaagattaactttccagctgttcatatatgaatataaagtttttgtttttaattttttggcctttttgttttgatgattattatgtgttcaaccatattatataattatatatacctctttctgtgtttttcttgctatgattatttattgttgttgttatcactccagataaatatcaaggtccttctttcaaatttggagaaaaaaaaaaaaaaaaaaaaaaaaaaaaagcggccgctctagaggatcca

SEQ ID NO: 70998 - DNA, 1358 bp, Glycine max
  Clone ID: PAT_MRT3847_35123C.1
ctttccactctttataactcctctctccctcacattctcaccaccaccactatctcgatctactactccttccccttattgacgacaccatattcattcaccaccctatccaacatggctgaggagactccaaaccagacaaccacaccaccccctcctcaagagtcagtggtgcaagtggaggaagtggtggtaaccgatgttccacagcccgacaaaacaacaactacagttccagttgaaagagattcgcaacctcaaccttatgagccagagaagaagaagcccgttgaggaaaccgtcactctcgagactcacctctccaaacccaacaatgctgaccacaccaacaacatccctgaattcattgaagaaagcaccaaactttctgacctcccagaaaacgaaaacaaggctctccaagagctcaagaagctcgttcaagacgctctcaacaatcaccacttctcttccaaacatgataataagaacccaccaccacaaactgctgctcacaaggaagaacacgttgtaactgaaactaaaactgatgctgccccagcaaaaaccgaagaggagcaagctgaaacaaaggaggaagaggaaaagaaggaggaagtgaaagaaacgaatgaagaagctgcggtggatgatgatggagcaaaaactgtggaggccattgaagagaccgttggtgctgtttcttctaccgttcagcctcaagctgaagagaaagcttcagaaccagaagccaccaaagaagaatcttcaccgccacttccacctgaagaggcttccatttgggggataccgctgcttgcagacgagaggagcgatgtgattctgcttaagtttctgcgcgcgagagagttcaaggtgaaggaggcattcaccatgctgaagaacacgatccagtggaggaaggagtttgggatggaggagctgatggaagagaagctcggggatgagttggagaaggtggtgttcatgcacggctttgacaaggagggtcaccctgtgtgttacaacatatatggggagttccagaacaaggagttgtacaagaagactttttctgatgaggagaagagggagaagttcctgaggtggagaattcagttcctggagaagagtataaggaagctggatttcaaccctggtggcatatgcaccattgttcatgttaatgacctcaagaattcccctggacttgccaagtgggaacttagacaagccaccaaacatgccctacaattgcttcaagacaattaccctgaatttgttgccaaacaggtactctcccacactccttccaattcattgtttctaatgataaattgttggaatttcaagtatga

SEQ ID NO: 70999 - DNA, 403 bp, Glycine max
  Clone ID: PAT_MRT3847_35124C.1
gatgtatcgaaggccaatgtttgatttcgatccaatgtagaaaattcacaactccctgacgagtcattgcaacactacgctgcagaagtgcagattagaaagaaaaaatcataatatctaagtaaataaaaaaataaaaaaaatactactgtggtcttatttttatgcactcacaatgctttaacttctgtgtgcttttaataacttaaaaacaacttttatgctctcggtaaacaatcgcgaatgcaagaagcaccattaaaagtgctcacaaagtaggcgctcatttaactcgtcctctgcagtgccgcagctcagtggccgcgtgtcctatggttgccaaatcaatcttaaaagaccactgctatcacatttaaatatttgttaaataaacgtattttct

SEQ ID NO: 71000 - DNA, 814 bp, Glycine max
  Clone ID: PAT_MRT3847_35125C.1
tggctactaatatgatcataactcacttatgcttggctagcaatctaacccatggacactcagacaatgttgttagaagagtatgtgtctttaattgcatgaagacacaacttaaaaaaatagctagtactatttaagtggtaaagaataaggatgtagtttgaaattgttcctttgtggaagggaaagaagaaaaaattgaaaatgattccttatactctttgaagccagcatatgtttaaaatcagattagaagcctggaaacttcctgaggattccattcatttgttcattattaggagagatccaatcattatatagcataagtagcgatacaatcttccccatttgaaaatttcttcatgtgatagaaaactttttatttgaactgttatgataaattaaaacgcagatatcataaatatggatatatatgtactgaaatccctatttgatcatgcttcaaatatatctgatattctgcataaactgggagtttgtcaacgaagaaacctttggcttgcaatttttgttaaagacaacattgagttttgtgatgcttacagattttgagtaactatggcatctcatcctgaatggcttcattttgtatccagatttgcttcagtggtgatccactaactaattatcgtcacttatgtttttttatcagtaaatgttagtttgttagttttgttggaaatgtcagtagggagattcaaaatcacgacctcccccctcccttctcccttcacccttgagcccgttattttttttatgtaatacttacatcatgaatcatgagggcgagccc

SEQ ID NO: 71001 - DNA, 364 bp, Glycine max
  Clone ID: PAT_MRT3847_35126C.1
aaaaaaaaaagcgggttcatatgggctcccctccaaacaacggggtccataaaaacgggaccaaacggaacccgttttatagaacaggaggggaaactagatctagccggaacaaaaccctcccctaaaaagagacaatcaaccggcaacaggaagggggggcatgttatacattttcaagcccccggaatacattcccaagttcaaaatcccatatcgggggggccaaacccccccccccccttttccccctaaaacccaaccccaaaagggggggcatccggggcccggggataccctgacacaagaacggtcatggtgctctcagcccaagggaaccccatttgggccatgccttccccgg

SEQ ID NO: 71002 - DNA, 232 bp, Glycine max
  Clone ID: PAT_MRT3847_35127C.1
gtttgttgttgtaactcgttcttcttcttttgttgttctgtgtttgtgtttgttttttctctcagctgaaagtgtcttgctgcggtggtaactgtggttgctgaagctcctgcaagtgcttcatcggttgctgaggctgcttgatgtacccagacttgtgctacactgatttaaccattaccgagacctttgtcatgtgagtatcacctgtcaaggctcattttgagggttc

SEQ ID NO: 71003 - DNA, 410 bp, Glycine max
  unsure (1)..(410): unsure at all n locations
  Clone ID: PAT_MRT3847_35128C.1
cgcccccccacgatgcgacaaagctggccccttgagaaaaaanncgnnctggccctggccgnccctattcgatggggccagaaaaacttagacagaaccagacacttattacaacaaagcactttgcttttgtccccttctatccatcacaaaacgacaacaatgaacaaccccatcccctccaatcacacgcttctcaatctcatctccactttccccaattcccttcccactacccaattctcattccgcttccctagagaataataataatactaccaattaccaaatatccctctttccacccacatataataatatccaaacgctcaaatatttttcaaaccacacaaaatgcacccattcaattcaattcatcaaatattaaatcagacacttcatatgctatc

SEQ ID NO: 71004 - DNA, 464 bp, Glycine max
  Clone ID: PAT_MRT3847_35129C.1
ctgttgttacaagacgacaacagaaggtggtatacgtcggagcaacagaaatcaagcttgtccacccttgattatcaaaactgaactatgccgattcgcgggtgctataatctatccaaggtaacgtatcatatcatgctcatggtgattcttatgatagcctgatcgataactagtaatgtgagaggtattttaacaccaggttgatgccatcaaacctgacctgcactacgttatacagtaagaaacatatcaaggacattgctcaagaagctgtgcagaaaggaagacgtgctgacaaatatctttactgttaagcggtttttccaatttttttgggtaaaaaaaatgggtgtttggggccccccccaatgtggaagttatccaaaaaagaaatatgataagccggaagttcgagatgcaaatagggaagctgtcctttttgaaattaaagagaggaacat

SEQ ID NO: 71005 - DNA, 158 bp, Glycine max
  Clone ID: PAT_MRT3847_3512C.1
tgcctgatgacaagatgttacatgccatgctcccttacctaagcttggagttcgggtggtgaagttgttcatgagaaattatctatttctaaaatattaagatgatgccattgccatgctggcgcagaaagctgatgcatcgaccaatgccatgtaag

SEQ ID NO: 71006 - DNA, 477 bp, Glycine max
  Clone ID: PAT_MRT3847_35130C.1
tttgggctgatttatgtgcttgcatggtctggaagatgatagaagggcatggccctgagaagatgatagaaggggtccccccggggggaaccggggtaaatagtaggcttcattttcaatttcaatccggaattcctccttcctagacctacttgcattgtcagccacaccatcggacctggggtagaccgtcgccattgtgccctcttgtccctacccacaaggccccgagccgccggcccccgaacacaaacggatgttaaatggcctacttagtcggccgaggagaagaagaagaccacggagagaaaggaagtcttctcgaaacgggagtagaagtcggaagtcgtcgtcgaaatcaaagagaggaagtcgaaggtcataaagtacaaaaaaagactcggtctcgacagcgatagcgacaacgatagcgacgacgagagcagaaagataagcaagagactctatcaggagtat

SEQ ID NO: 71007 - DNA, 426 bp, Glycine max
  Clone ID: PAT_MRT3847_35131C.1
tcttacacatcgcgatcttcctttttaacagatccattcacaccaacacctacatgcggggttttacatattacacaaccatacttaaattcaatgcactggccgtctccttacaaaaacttgactgcgaaaacaatggcgcaacccatcctaatcgccttcaaacacatacaactctcgccacctgacgtaatagctaacatcaccataaccgatcacccttcacaacacatgctccacctaaatgaccaatgggacccgccctaacccggaacattactcgcagcccatcgagatgacactcaccttatatccgcatctcacgccagtacccaaccgccagatcctcaacatttctttcctttctatctccccaccctcacagactttccccgtgcagcccaaaatcggtggcccccttaaggg

SEQ ID NO: 71008 - DNA, 1585 bp, Glycine max
  Clone ID: PAT_MRT3847_35132C.1
tggcaacagatggattctccagatcaaatcttcttggtcaaggtggttatggctatgtccatacgggagttctcccaaatgggaaaattgtcgcagtcaagcagttgaaatctgagagtagacaaggggagcgtgagttccatgcagaagttgatgtcattagccgtgtgcatcacagacaccttgtttccctagttggatactgcgtctcagacagccaaaagatgcttgtctacgagtatgtggaaaatgatacactagaatttcacttgcatggaaaggacagactacctatggattggtcaacaaggatgaagattgctataggatctgcaaaaggattggcatatttgcatgaagactgtaatcccaaaatcatacaccgagacatcaaggcatctaacattcttcttgatgaaagttttgaggctaaggtcgcagattttggacttgcaaaattttcatcagacacagacacccatgtttctacccgagtgatgggaacttttggatacatggctccagaatatgctgctagtgggaaactcactgaaaagtcagatgttttctcctttggtgttgtgcttttggagttgattactggacgaaaacctgttgataaaactcaaaccttcatagatgacagcatggttgaatgggcgaggcctttactatcccaagctttggaaaatggcaacttaaatggacttgtcgatccaaggttgcagacaaattacaatcttgacgagatgatccgaatgactacttgtgctgcaacttgtgtgcgctattcagccaggctccggcctcgaatgagccaggttgttcgagctctggaaggaaatatttctctagaagatctaaatgatgggattgcacctggacacagcagagtttttggttcctttgagagttctagttatgacagtgtccaatacagagaagacctaaagaactttaagaagctggcactggaaagccaagagcaaggcattagtgagtacagtggtcccagcagcgagtatggccgacatccatctgtctcaactagttcggaccagcaaaatacgcaggaaatggaaatggggaacaagaagggtagcaaccatgattctgggatacaagttcttgattgatgattcctatgtcttgcaaaattgtgctctccagatatcagtttgcaagtgcacctatgagagtggtactggtacagtggtacatataatttgttggtatattttgcaggtccaatgtacgaattggcttgcacacgatgaatagaagttagagttgtgtctttcttttttcctggtgatttttactatctaacttgcttcacaagtatggttcctgatttatttgatacacctgaagctttgtaaacttgattcattcttcgaagctaacatttgttttaactggaaaagcctgacattgggacttaaaagtgtggaggatgagggtattttgtatttatttggtgagctttgtgactgataatgcattatatgattcttcagttggtgtttttggtgagctcttgtgactagataatgcacttatatgattcttcagtctggtgttt

SEQ ID NO: 71009 - DNA, 1264 bp, Glycine max
  Clone ID: PAT_MRT3847_35133C.1
gacccacgcgtccgacggctgacgacagaaggggagggttacacgccgcattgctctcagcttcacaacaccatggaccacgttagggaaacctctgcttgggtagctagccgctcctcccacgttctcgttgactctgcaggaattgagaaagtggtgagcaccattgattccattcccaaggttgagtgggatttcgaagggattcactactttgataatggaccactcaccgttcagtacctgtttgtgttggacgctttaaatttttgcttctggcctgataaggatttgaattatgatgatttggcatctgggctaaaggcagctcttcaaaatgataaatctgcatttgatgctgatcgtctgcaaaagtacactggtccacaactgcgtgagcttttgaggtggcctagaccccttcctctggaagatgaacgagttaggttactacatgaggttgggattgaattagaaagaaactttgagggtaaagcatccaataatgtggagtgctgtggaaaatcagccatgaatcttgttgctctggttgcacgtcattttcctggttttagagaccatacagtgtacaaagggcgccaggtatttttatataaaagggctcagatatttgcagcagatttgtggggtgcatttaggggccatggatatggtgagtttgaagacattggctctctaactataatggcagactatattgtcccagctgtgcttcgacagcttggtgttttaaaatttagtccgacacttgccagtactattgaggccagaggagaaataggtccagggacggaagaagaagttgaacttcgggcttgctctgtacatgcagtggagaaaatgagggagctaataagtgtaaagtcaggaagacaggtgctcagtgtggagctggatctttggctctgggcttctggtgttcagtccgcatcgctgcagcaccaccgtacactttcaatatattactgagcacatgatatatggtaacatctagctatcaacaatttagttgttgaacaagaaaattttggctgttttaaggtaattatttaggataatgcttgaataactacctccttttgctctaaagttttggaatcagcttttgtaattttggaaaagagatacttaaccagatgctttcaaacttaattttgaatagccattgtattcggattttaggaccttaaatagtttacagggtgaacaattaggctcatggttgttttacaatgggaggttg

SEQ ID NO: 71010 - DNA, 275 bp, Glycine max
  Clone ID: PAT_MRT3847_35134C.1
ttgcgtacggtatgtcgaccacataatctggcatatattaataatgattgaggaactgctttttgaggtcgcccaacaatgggtgcgccaatcaaagaatctaaaatcactgaagttaaacaacctaacattggagaagtcaaaccttcatttgtgaccgcagaggttacttatagcctctccagttatagagcacatattacaccataatgcgatgcactcaaagagcatgacgtaatgcctctaccatctatacgcctcatcaccagagcctc

SEQ ID NO: 71011 - DNA, 369 bp, Glycine max
  Clone ID: PAT_MRT3847_35135C.1
catctgtcaaggaagaccatgaatgacccaaagggattgattccagattgccacaaacaatggatcctcaatataatgaggatcacgctcagttggtaacaatattgtttcaattgcctcttgatgatggtcaaacttctacaggccacatgctggatcttaaaatggctcacactaagacagcacttgccaaaaacacagctggaggaaccattctgccttgggatctatcggcaaattttctgacagatggcacttgtagagcgagtgttgattctcagcgcactcatcgaattataggaaggattaaaatggctgtcacagagggcacttgctgagagtacaatgcctagcattgtgctgtgctat

SEQ ID NO: 71012 - DNA, 801 bp, Glycine max
  Clone ID: PAT_MRT3847_35136C.1
acgacccacgcgtccgggttattctgatcctttttcactctccaaaaccctaaatccctctcaattgccatgaaccctccacccaccaccagcttccccctgaagggcgaatgcggcaactgcagctcgaaggagcggcgcctcctccaccggctctggatgcgcggcatgaaccgccacctgtgcacatcctgcgtcctccgcctccatccctcctccttctgcccctcctgcttcgacttcttcgaccagcctctctccgtcacctcctccgccttcgcccaccgcttcgtctcatgcaccaaatgctcctccctcactcacctctcctgcctcccttcccctcctccttcccccttcctctgtcccccttgctcccaacaaaccttctccttcttcccagattctaccgctccattagataaacgccgcgccatcatcctcctctgcgcctgcaagatcgcggcggcatccgtctccaaatccctcgccctcgccaggaccagagtcgaacgcaccgtccgcgaggccgccctggcgagaaagagggccagggatgctcttgaccattgctccatcgtcgacaagatcaagcgcctcggacttgaaggcaccttcgaggcttcaaacagcaagtacttgggaatgaatcataatcataacaatgttgtgagtaataaaaaagaagagctcaatggcttcgggggaggtcagggtaaggttaaaactgaggcgatgtccttgactgcccctgtcaacaaaaatgggaacaaccacgccaaatttgccgaatcgagtagc

SEQ ID NO: 71013 - DNA, 620 bp, Glycine max
  Clone ID: PAT_MRT3847_35137C.1
gcttgctctcttccggctcgaggttgaaactgccggaaaacacagcgtcgccggagtgaagatcggaaaacgcaacggaccacatgggtttctcgaagaatgccactctgcaggcaccacattcggagcgcgcacgctctggcggatccggagctgcgccgcaccgccgatagcgacgactccgaagtgctcctagaagccgtcgcaatgtccggactcgtcggctttctccgccagctcggcgacctcgctcagtcagttcgcattctctctctctctaacttctctctctaaaaccgcttccgtcgtcgttgcggtggttacgcaattcgagctgcgctcgtggtttgcttgatcgcgattagttattaaatttaatgtctcttgttcagctgcttgaggtttaagttcctccccttgagtgcggggttttgtcacaaactcatcattcatcattttttacaaaaggagggattgaatggcatcctaatcttcggtctgaacagaatcttgttacacgcggagacttacctcgatttataatggattcatatgaagagtgccgtggaccttcaagattgtaccttctggaaaggttgatgtggcagggggctgggcct

SEQ ID NO: 71014 - DNA, 319 bp, Glycine max
  Clone ID: PAT_MRT3847_35138C.1
ggctcacgtcactgtgtcgatcgatatggctagagacagtgtgatgaaaatgaaggtccttgtttgacttgattgctacaattttcctagcatgggaatgccatgcttactatatgttcgcgtctagaatgaacactggctatggtgccacgtactccggatgtgaaacgcgcaagttggatgctcgttctggaagcacacaacatctgacgctttcacaccattcctgaagagtgcgttgaagcaaccaatgaatacatctatggggaacagtatcgatcagactccaaaagagatcgccaacaagcttacttttatg

SEQ ID NO: 71015 - DNA, 143 bp, Glycine max
  Clone ID: PAT_MRT3847_35139C.1
gtatcatgagagggagtggaggtacatttcagcccacggcaggatgccccaggcgacaattgatcggattattccctctcagctacgtgttcccaggacctattgcgttttaactccacataatctctctgtgttaaattggt

SEQ ID NO: 71016 - DNA, 563 bp, Glycine max
  Clone ID: PAT_MRT3847_3513C.1
accaagggccttacctggtgattagttgttacatactttcatgaaaacaaatcttgaggcattcatttaacacaccacaaaatcaggtccaatagaattcctcctctcaaatcacttatcctcagcctgtcgattgaataattaggaagttttaaaggagtcctgcagttgctgccaatatagtgaccaggaagacaagcaaccttagtgttcaacacatgcgcttgcaaatgcagccttttttggcagtgttgagtgtattgctagcatagcatgcagtaatggaggatggtactgcacctgcactgtactaccttttctgatcttgaggaacctgattgagcccttctctaagaggcatatactgtggtggcggtggtgcttctacctccacattatggacctgaagtctctgatgttctgccatgaatacagtcaaaattagtgctcttgctatctcatcgtttgtgatggtcacaccttctgtgtttagttcaaatgagaataatgtaatgtcccttctccaagcactgcttctttatttgacttgtcaagtgtggaaa

SEQ ID NO: 71017 - DNA, 271 bp, Glycine max
  unsure (1)..(271): unsure at all n locations
  Clone ID: PAT_MRT3847_35140C.1
accacactctttacccttcataccctcttttttaactatcatnaacctcaattatggaagttttattaaaaaactaatatcccctatatatccttcttcaaattactctcaactgtaactattttaactctccaatttatattcttaaatttatttcataatatttttctttacaatatatctatcataacttttcctaattcaatcactccttatctaacttacatattttatattatttatatttacttttactaccatattttacttc

SEQ ID NO: 71018 - DNA, 112 bp, Glycine max
  Clone ID: PAT_MRT3847_35141C.1
atggacctgagttaatgagacatgctagcgatacggacactgatctactgtctatgactcatagcgtaacgagaagagcaccgagacaaacgcacgtgtctgccgatggctt

SEQ ID NO: 71019 - DNA, 664 bp, Glycine max
  Clone ID: PAT_MRT3847_35142C.1
cccacgcgtccgcccacgcgtccgcccacgcgtccgcccacgcgtccgaatttttcaatggtggtgtagaggggaccatggtaaagtagaaacgcgcacacatcattggatcaagtctccctcagtctctacgtacaagttgtgtgagtcagcgtcatcatcggtgatggagtgaggacgtgtgcaagtgttgccgttattatatatagctgcgagaagaggttacacggggaaccgctaatccattttgttcagtgtgggacatagaagctgttcttgtgtgtctgagagagagagatggagaaagaaacagagatgaagcaatccaagttcaagaggatttgtgtcttctgtggcagtagtccagggaacaaaactagttataaggacgctgctattgagcttggaagagaattggtgtcaagaaatattgatctagtatatggagggggcagcattggtttgatggggttgatttctcaggctgtttatgagggtggtcgccatgtaactggagttattcccaagacacttatgccaagagagctaacgttagaaacagtgggggagcatttcattggaaataaactgaaagaccatacacatttgcagggggacacacagaattaatctacatggttgtccctatcttagcacaatataa

SEQ ID NO: 71020 - DNA, 1947 bp, Glycine max
  Clone ID: PAT_MRT3847_35143C.1
ctcaattctcatcctatatattgcattcccatcactcccaacgccctctcaattctcttcctaaatccaatccttcttctctttcagccttatgggtggagtaaggaacgagaaatgaaaagaaacattttgttgtgtctgtgtgtgtgattgggttgtacttatctaattacgagaaaataaaatgctagaagaactcattacgttgcatacctctatgtacatcttccgattaaatcctacttcgccatcacagttggtttccattccccttctctgattctctccatatattatctcaaacccctctcacagaatgggaagtgctggaggaactgactatggtgcatacacttatgagaatcttgagagagagccttactggccatcagagaagcttaagatttccatcactggtgctgggggttttatcgcgtcacacatagctcggcgcctcaagacagaggggcattacattattgcttctgattggaagaaaaatgagcacatgactgaggacatgttctgtgatgaattccatcttgttgatctcagggtcatgaataactgcctcaaggttacagagggggttgatcatgttttcaatcttgctgcagacatgggtgggatgggttttattcagtctaaccactctgtcattatgtacaacaacacaatgattagcttcaacatgattgaggctgccaggattaacggcattaagaggtttttttatgcctctagtgcttgtatctaccctgaattcaaacagttggaaactaatgttagcttgaaggagtctgatgcatggcctagctgagccacaagatgcatatgggctggagaagcttgcaacagaggagttatgcaagcactataacaaggattttggaattgagtgccggattgggagtttccataacatatacggtccttatgggacatggaatggtggaagggagaaggctcctgctgctttttgtcgtaagattattacttcctatgatagatttgagatgtggggagatggattgcaaacacgatcatttaccttcattgatggaagtgttgaaagggtactgagattgactaaatctgatttccgagagccagtaaatattggaagcgatgagatggtcagcatgaatgagatggctgagatcattcttggctttgagaacaagaatattcctattcaccacattcctggccccgagggtgtccgtaggtcgtaattcagacaatacacttataaaagaaaaacttggttgggctccaactatgaggttgaaggatggactgaggatcacatacttctggattaaggagcagatcgagaaggagaaggctcaaggtattgatatatcagtgtatgggtcttccaaagtggtgcagactcaagccccagttcaactaggctcacttcgagcagcagatggcaaagaatgaggtggtcaacatatggctgtagtagtattcacctaaatgtttcaagtgaagagttggattatatatagcaactaaatagcggtatctggttatttttaattagctgctaaggatttcttatgtatctgctggttgttcatgtttgaatcggaagccctgatgttcctaatgtattttatatagttttttaaggcacttcgtggtgcttaaggtggtttactgcactagaagctctaaattatttgttttgaattttgatgtctaaataattgattagtaagcaaataatcttttcttccttgtgaaaaaataaaacaaaaaagttccatatgcagcatttgatgaaatatctccaacagaggaggcattagagcatgccaattcaaccccatcagatgctgctattagcaatctagcatgaacatactgcctcaagcaatccgggaggcatggcacggtgctcataacccacgtcacaaacttccctgcaggaagctg

SEQ ID NO: 71021 - DNA, 396 bp, Glycine max
  Clone ID: PAT_MRT3847_35144C.1
cttcactggataaatctaatccactcaaaatggtcctacaaaagacttgagcttttgtaacatacacaaccagagaaggtgcataaaaggcagcggaagaactccccaacaaacagaaaaaaaaaaaccaaaagccaaagctgacgcgggagaaagactaagacctcgaaaccggaagcagatggctctgaccaagcaaggaaaaacgctcccgcggctcatagtggatggaaagacaaaagacaaagatatgacaaaaacagaaccaggaccaaacacaaggaatggggtactataacaaaacagcaggaccaccacctggggaggaggaaagaagccactacccaccaatggatgctaaaagaatgggggatattgttgcatctcaagatgggg

SEQ ID NO: 71022 - DNA, 548 bp, Glycine max
  Clone ID: PAT_MRT3847_35145C.1
ttccattttccttccccttttctctccaaacccaaacccacttacctcttcacttctttttcttcttcttcttcttcttcttcttcctttttctcttccaccacgccaccgcgatccaccatgctgcaccacgaccctcttgtctctgacgtctacgccaccgccatttccggcgtcgttgccctgtccttcctcagattgttccaagaaactgcaaaacgagacctcttcgaccagtactgaaacttgggcatctttctttgctgctctcattccgggaatcaatatatttcggatgcttgttattggacttggaatattgaaagatgaggccacagtgaaatcaatgagcagatttggagattacaggttgcaatattgtacacttgaattccagagagaaatacttgaatctgtgaaacaatgaaaagtttgctcattctatagttaattttgtgtagaaaagtatatattattctctcaaatgattaagcagatgctgatcaatctagaccaaacaaaatggatatacttgactgtttcttatg

SEQ ID NO: 71023 - DNA, 173 bp, Glycine max
  Clone ID: PAT_MRT3847_35146C.1
tttctaaaataatgatatattacagtgtatgtagatggagggtgtcaatatatataccttggtacaagaaggggttgcttggcagaggatcaaactctcgccataaatgtgacaccccaattgtgatacatgctcttaggctatgaaaaaattatttacaccacttgtttgac

SEQ ID NO: 71024 - DNA, 233 bp, Glycine max
  unsure (1)..(233): unsure at all n locations
  Clone ID: PAT_MRT3847_35147C.1
ggctcgagctcataatattaatctatggctgaatggctaacctaattcctcagtggaactaatttccgagggctggcacagttatgaacgaccactgtgtagccagtgcctaacctattctttgctactctctanccgttatctgtcgtgcgtcttatggtcacagatgcgtaaaggacttactagtgatctgtgattgctatcatggagccacttaccttatcatcagagga

SEQ ID NO: 71025 - DNA, 1430 bp, Glycine max
  Clone ID: PAT_MRT3847_35148C.1
ggctcgagccacgatgctgcctcttgtccacagtccaaatcaggcatttccatgtgatctctagaggttgaaaaaatcaatgcgaggtcgacaggaaatcctcgcctccctcgcatgatgttcctgagtttcaacatgattagcggcggcaacacactccaaaggtttgaccctgtcgcttgcgtttcttctgtccctcttctcctcgcacccaccacacgacctactttccattttccttccccttttctctccaaacccaaacccacttacctcttcacttctttttcttcttcttcttcttcttcttcttcctttttctcttccaccacgccaccgcgatccaccatgctgcaccacgaccctcttgtctctgacgtctacgccaccgccatttccggcgtcgttgccctgtccttcctcagattgttccaagaaactgcaaaacgagacctcttcgaccagaaattaaataggaaacttgtacatataagtattgggctgatattcatgctctgctggccgctattcagtactgaaacttgggcatctttctttgctgctctcattccgggaatcaatatatttcggatgcttgttattggacttggaatattgaaagatgaggccacagtgaaatcaatgagcagatttggagattacagggaacttcttaaaggaccactgtattatgccgcaactattactttggcagccataatatactggagaacttcacctatttccattgctgcaatatgtaatctgtgtgcaggagatggcatggctgacattgttggaaggcgacttggcggtgaaaagataccttacaacaaaaacaagtccttcgctggttcaattgcaatggcaactgctggattcttaacttccattgggtatatgtggtatttttcctcatttggatttattgagggaagctggaaattggttctaggttttctgttagtgtctattgtgacagcatttgtcgagtccctgcctatcagcacagagcttgatgacaacctcacagttcccctcacttccatattggtgggcagtatcattctttgatatgaagcatattgcagtaaaacaaatcagacactaggaatcagttctctacatctttcaatctagttagaaaatgtttattatgcatctagttaaagtagtctgttttgttggcagaaaaattgactgatgtttgtagtgtatgctctcgatcaatatggaaacagaacaatttgcagtcttgtgttctttctattggatgaatgctcacaatttttgttcacaatccagcttgaatagtgctgaaagaatgagacaagatgatacttgaatagctacccaagctgtgtgccgtcattagtgctatcgcgggtactgccactgggggcggccgtttttaaggttccagagttcca

SEQ ID NO: 71026 - DNA, 659 bp, Glycine max
  unsure (1)..(659): unsure at all n locations
  Clone ID: PAT_MRT3847_35149C.1
tacgacctcgcagttctggtccggaattcccggctcgacccacgcgtccgcggacgcgtgggcaatttttcctgtgatcgctgcaactgctctttaagtaccaatttcctcttgtctcatcactagaatctcgggtagcatagtaaagatgtcactgtcatgctctttaatgaaatttgcttgatgcttgtttttattatcaattcttctccacatgtccaaaattttcacaatagtgacattgtggttttccaagatgccaacaatccttctatatttttcttgattggtcttagagaaatttctagaattttgtgtatttctagaaacttctccatctttctttccaccattttttttaattgagaccgtaatttaaactttgattggaaggcattctcgacaaagtcttcattatgccgtttcaatctttgcacatacacaatccataagttatatccctgataaagtagacaaatctttgttttgtcctccttanattcaagaagaaatttccgtaagaacccaagtgtcacactttgtttctttctctttccttcgtaccaagtgtttccctctcttaagtttctcacaaacatcttagtacttctcacacttctgattatagntagttgcacataccataagatcccatgacc

SEQ ID NO: 71027 - DNA, 382 bp, Glycine max
  Clone ID: PAT_MRT3847_3514C.1
cccccgcgcgggccccggcccggaatccctggggagtcccacgcgcgcgtatctgtccaggtatagccaaccggggtgtgaagcaaatttttgggtcctgatcacaaccagctgagactgctggccgaatactgtggccgatgaaacaatccaaaaacaagggccagtgcccacaaagggggccctttactaataccccactcggtgttcaaaacgcaaacagggaactcaacccaagacttacaatggcatgggctttggcccctagggggcagaacggggcccccaatacctacggcgaaagcagccagcttgaccaccttaaagatgatgctccagagagaaagtgtgctgaactaacaccctgaccgatttaaactaa

SEQ ID NO: 71028 - DNA, 400 bp, Glycine max
  Clone ID: PAT_MRT3847_35150C.1
gtcattaatttaatttcttcctttctgtatgtctttattcaagattttttcaagtctctggtaacggcagggggaaaaagaataacgcttacttttttgccggagaaaccccgcttacagaaggaagaattaccgcctggggggccccccttttgggccccccaagggcaccccccccccccccaaaaaaaaaaaaaaaaacccccccccgggggaaaagtaaagggggggcccccccaaaattccccggaagaccctgggggggggggcccccccaaaaaaagccctcaaccaccccctttggggcccccccaaaagggagtgtcccccccaagagagaaaacccgtgttgtcccaaaaatgccccgccaaaaggcccccccccaacgggggggggggc

SEQ ID NO: 71029 - DNA, 693 bp, Glycine max
  unsure (1)..(693): unsure at all n locations
  Clone ID: PAT_MRT3847_35151C.1
cctctcccgactgaagaaccttcgagaagcttgacctcggggactaccagtggctcacctacgggaaagtgttcgaatccgtctcgagtttcgcgtccggtttggcgtcgctcggccatcgccgggaggaacgcgttgctatcttcgctgacaccagagaacgatggtttattgcactgcagggttgcttcaggaggaatgtgacggttgtgactatgtattcgtcgttgggaaaggaagctttgtgtcactcgttgaatgagacagaggttacaactgtgatttgtgggcgcaaagaattgaaatcactagtaaatattagtggtcaacttgactcagtgaaacgtgtgatatgcatggacgatgatatcccatctgatgcctcgtctgctcagcatggctggaaaatcactacgttttctaatgttgagaggcttggtagagaaaatcctgttgaggctgatttacctctttcagcagatgttgcagttataatgtacacaagtggaagtacaggattacctaagggtgtgatgatgacacatggcaatgtcttggcaacagtctcttctgtaatgataatagttcctaaccnnngaccaaaggatgtctatctagcatacttaccgatggctcatatccttgaattagtagctgagaatttgattgcagctgttngaggttgtataggat

SEQ ID NO: 71030 - DNA, 357 bp, Glycine max
  Clone ID: PAT_MRT3847_35152C.1
aggcgtccttacacctcaaaaaagacgttcgaaagtttgagtgaatatttcattaaagggtcttctgtaatatataaatgatcatattctacttttgtatccataaaagacttttaccatcatactgaacacaaacttctatcgattgctgataagaatgatgaaaattcatttcaggaatcaacatctcggggaggataaagcctgtattgaaaacaacattaagttggttacttttgttgaatctaatgattctgcatttaatctttatattccttttgttatctcaactactttcttcaataataatatttacaatagtcaacttttcagatgaaataaatgcttccccattca

SEQ ID NO: 71031 - DNA, 1286 bp, Glycine max
  Clone ID: PAT_MRT3847_35153C.1
gcgggccccatcatggcctgggacccatgggacaagcgagtttgtataggtctgaggtcaaccgaaaacctgccggccagaccgacttgttgagaattgaaacactacaccatgctgataaagacaaaacagaagcttatatacttgaactggtcatctggcttcatcatctagtgagccaagtaagagttggtaatggaggaataaggtccccagtcaaatcgcccatatgttctcctacccaaaagacagggcagttatttacacagaaagcctgctcttcccccatgttaacggttgaagatcagcaaatgcttcgtgatgtcagcaagaggaaactaacacctggcattagcaagagccaagaatttgactctgccaagaccaggttgagtaaacaccataggctaagcaagagtagtagtcattccccaatcagtgaaagtaaaaatgatatattctctacaaggagggtaccttctgttcctgtcattgactttgatattgaccgaatgaaggccttggatgtcattgatagggtggataccattggaagttcttagttgtgtggcatatcttgatctttaagctgaagggctgggaatgctaaagttacatgaatctgttgccttcctcttgaacttgggtgctcccctatgtttcttgtgagccgtgagaaatgtttgttgatttcattggcaaagagtgatgtgagccatagtctttttgagattgttgtagatgattatgggacggggtcaaagggggtctccgtttttccttagatgtatatgtacagattacatcatcatacaataattgttcgtctatatgttttctcttctgctccccctatgtttcttgtgagccgtgagaaatgtttgttgatttcctaggcaaagagtgatgtgagccatagtctttttgagattgttgtagatgattatgggacggggacaaagggggccaccgttttcctgagatgtatatgtacaggttacatcatcatataataattgttcgtctatatgttttttctcttctctcaatcttgttgtgtgtgtgtatatatatatatatatatatgaaacaatttacataacaaactgtccttagagtatagagaaggtaatgagtaatgactttttttgtaaagcagatgaggaggaaaagagctttataagcaaaaaaatgtatttgtaaagaacatgttatttacagatagcgtgatagatgtttcttacatcaacagtactgaaagaaaataaatttaattttttttatct

SEQ ID NO: 71032 - DNA, 249 bp, Glycine max
  unsure (1)..(249): unsure at all n locations
  Clone ID: PAT_MRT3847_35154C.1
tagaataagaccaaggttctnattagagcctagtttgtgcaagtngcaanataggttcncattggaccnattcctttatccaagctcttttgcntgtcntgggaagaaaatgaaccaagacatgaatggggttgangctganaagagggcagcagaatggactgaganagtggattagangtncncgacaantagacnnnngtttaanagggnntgccanacngggnntnccaccagttgggcaagacc

SEQ ID NO: 71033 - DNA, 608 bp, Glycine max
  Clone ID: PAT_MRT3847_35155C.1
cggccgctcaggcggcgggcgggctttcccaaaattaatctctcatctttccccatccccttccatttttccaaaattttaaagcttcttgcatcctcgggtctttccaagcacaagaatgtgactagagaaaaggggatcttgtgaaaaatacggtgattgactttcccagcaacagtggaagacattgattgcgttctttaggtgaatagctaatttactcagcgacgtttttaaagttcctttgggagaagcaaataaatttcagaatatatatctttgacttcctaggatttgctgatgtacccaaaaatttgattatcttttggtaggtctcttttgtgtctgatgaacattttggttgtaactcagtacaatgcgctacacgggacaaggtagtaatagatttagggagaattccttcattttgaaatttaaatgattctctcttataaacatgatgaagatgtacttatgatattttgagacacttgatgattagtatttataattaacattgttattagtggattttggataatatggttaagggtttgtgttgtgacctgaaaccttgatattaaatggatggaatgagatatatttag

SEQ ID NO: 71034 - DNA, 205 bp, Glycine max
  Clone ID: PAT_MRT3847_35156C.1
ggcactagaataccaattttattcattgggaaggctaacaatgacaaatgtgttccacctccctcttccaaggaccaagtttacataccaataatattgaaccccccaaatatcatattctgaaaaataaaataacttgttttaacccactttcaacaacaacccagtttcaaacctctttgaaattaaaaaaaattggcttccc

SEQ ID NO: 71035 - DNA, 470 bp, Glycine max
  Clone ID: PAT_MRT3847_35157C.1
aaaaaaaaaaatttttttttttttaaaaacagaaaaaaaagaaaaaaaaagtcaagtagaaaatgtaaaaaaaaaaagggagacccgaattaaaaaggggcggcgagaaggctggttcaaaccttcactgcccgcaggaatgaaatctcggcccttttgttgggggtcgaagtcaatggcaagggcatcctgtaacaccactcggtcatggctgaccctgtggatatccctgctgagaacattcggaagctctctgattgtgcctatggggaagtctagaaatctagacaggacgctttagctttgccaacatgggttgctctggctgttcgtacaggaccttgcgtgtgggcagtccttagagcgcatgtgcacgctcttgttcgtgaagagtggcaatttgatgagtacctgcactataaggaagaacttgttgtcggatgttctcatggctactccgtgctggagtt

SEQ ID NO: 71036 - DNA, 456 bp, Glycine max
  Clone ID: PAT_MRT3847_35158C.1
gtccaagccaacaagaaaaaagggatattttcctacttggggacatcgttgtgaccattttgcatttcctcctcctccaccagctgatagaagacgggctggaccacgcccatgccctgtgtgttatattccagtggagcaagctatagctagtatgccaagttccccatcagaatctcccatacttcgcactttgacatatgtgcatgatgaaaatccaattgaaagtgagccacatggtggctctgattttggtggatacccttctctggaagaaagggatgctgcttttaatatcaaagagaccatgaaagtgcactgtggatttgtcaaaggaagcagacctggtcgccagacaggatttgattttgatgaggcggatctcttagagttggatcaataccatgatgtcattgttgcatctgccatatttggaaactatgatgttatacagca

SEQ ID NO: 71037 - DNA, 390 bp, Glycine max
  Clone ID: PAT_MRT3847_35159C.1
gagggaagtgcggtgtccactcatcatctatctttcctcggtcccgaccacacacaataacaatgtcaactctttgttctgcacttcctccatcatcatcatcatcaccctccatagcaaagttcatctccgaccaaccatgcctcaccatgctccaaacccaatgcaccaacatgaaagacctccaaaagatccatgcccacatcatcaaaaccggccttgctcaccacaccgttgctgctagccgcgtcctcactttctgcgcctcttcatctggtgacatcaactatgcctacttgctcttcaccaccattccaagcccaaacctttattgctggaacacaatcatcagaggcttctctcggagctcaacccctcatcttgcaatat

SEQ ID NO: 71038 - DNA, 742 bp, Glycine max
  Clone ID: PAT_MRT3847_3515C.1
ctggcaacagagtttaggatctttactgtcttggaatgtccttagaaggctctgtcattgaacaggtaacagagtaaaaaccccagagtcctttctttaaaatgaagagggaaagaatgggatggaaggaactattcaaacttcgtcttctttccttgtggcttgaagtctccccctcctcctctgccgcctcggaagcctcctctacctccaaagcctccccggcctcttcctccaaatccacctcttccacctctgcctccacctctgcctccgaaacctcctctgcctccacctcgaccaccaaagccaccttcacccttaggtttggcccagtccaaggtaactttgtttccgtcaatttctccatcttccatggcctccttggcagctttggcatcttcctcactattaaagtctacaaaaccaaaccctttggaagaaccagtttcccgatcagtgactattcttgcacgaacagagccctcaaatgattcttttaaggtctcttcagtggtatcctcagacagacctttgacaaacagagttttggatggttgacttctcgaattggatccttgcaactccagcctgattgttctgccctcaatttccattttattacaggaatttaaagcttctttagcatcttcaaatgaagcaaattctataaatgcatacccttttaggttggccatgtgggtttctggggcactttgataaaaggtgctttctcaaatac

SEQ ID NO: 71039 - DNA, 382 bp, Glycine max
  Clone ID: PAT_MRT3847_35160C.1
tttcaaaaacagcttcggctgctgatataaaacgtgcctacaagaaactcgccttacgaatggcatccagataagaacgtcgacaagagggaagaagcagaggctaaattccgagaaattgctgctgcttatgaggtctattattattatcttatggttacctgacctttctcctacagtctctaatcaggacgtgcctggtcattgttgaatgggaaatgctaacaacacatttctttttagcctgttttgatattaggtgaaatttaagtgggacctattaaattgtcttacttccattttggtgggacttgtaccaaattcacccaataagtgtgttaagaagagtgtgtagttactagcttttctctttttgggtatc

SEQ ID NO: 71040 - DNA, 395 bp, Glycine max
  Clone ID: PAT_MRT3847_35161C.1
agttcactcttcctcccttgccgcaacggttttagcgcatcttcatctagatttaccgaatatgggtacggaaaaggttcacatcattattgtggtcattggccatgtcgactctgggaaatccactaccatctgatcaccttgatttataagcctggaggcactgacaaacgtgttactgataggtttaaaaaggaagctgcttacatgaacaagaggtccttcaactctgccttggtgctcgacaatcctacggctgagcgtgacagatgaatcaccattgatattgctttgtggaactctgaatcaacatcgtagcattgcacagttattgatgcgcctgcacatacggatctcattaagaatatgactactgggacatcccaatctgactg

SEQ ID NO: 71041 - DNA, 436 bp, Glycine max
  Clone ID: PAT_MRT3847_35162C.1
tggagattgtatctcacttatacacatttctctctttagtaacttgttgagagttgctgcttgtaagaccggctgtttactggtttatattgtgatctctggcaatgcaccactctcaaggtgttattgggcctcattggtccacctgtttttcccgcacctcgacattacacatcattttgttgcatgtatgtggtcactatcggatccccattcctgtgtgttgatcttcccattataggtgtgcgctcctcataatggttttgacctgtcgagctctgagtgggcccatctctctttctgtcatttgaatttccttgtttgctctccctacccgtctacactctttgtcattctcttgggcttctctcaggatttttagctagtctgtattcctctcttgcccgctgtttctgttccactcgcttctgcccag

SEQ ID NO: 71042 - DNA, 564 bp, Glycine max
  unsure (1)..(564): unsure at all n locations
  Clone ID: PAT_MRT3847_35163C.1
accggtccggnaattcccggngtcgacccacgccgtccgcacacactcacacactcttgatagcttcatcatatctggctgtgttataattttaattaagaatgtctggagtttggggtttcaagaacggagtggtgaggctggtggagaaccctgagggtgaggcagcgtagggaagccgtggaggacgaaggactgtgcttgttcatagagcaagcagtgaggttctcatctattatgcagctttagagcacacactggattcacttgactgggagacggactatgaccacgctaatcttcttcaattccacaaacgctgcacctatcaccttatttacgttacgatagatttcatcatgttcatgcccatgctcatgtctgacatcctgatgaaaaacaagatcccttttgaagttagagacatacagagtatgagtgggaagagactcaacatcatacatatacggaccaacatgccaaccacttgcaaggcctatgtgcattgcaccctccctgctactactgtgcagagacagcttattgtcactatatgtactacta

SEQ ID NO: 71043 - DNA, 482 bp, Glycine max
  unsure (1)..(482): unsure at all n locations
  Clone ID: PAT_MRT3847_35164C.1
gaacacattagatagaagggcaacgccaatttaatttggactaagatgtgtgctccacatagacatgcaagtagcaaataaaatgtcttttttggtcagtagtagaaaataatagttttttctcttaagaaaaaaagcaaataagagtttcgatttgaaaatcgccaagtggccaaaataccactcggagccattgggcccgtaccctgctatactgccacgtttatcttgaattatgcatgcatgcatgcaatcatgatcactaagaacaaaggggcaatagctatagtgctataccataataccagcatgtaagaagtatggaacttccaaaaactttgtgctatttagtagatcttaaactattaatgctggggataggtgggcaaactcgttttatatcatctcgtgacatatattctttgnggctttatatttattcgttaagggtaattctctttgggaatatatatatggacagg

SEQ ID NO: 71044 - DNA, 225 bp, Glycine max
  Clone ID: PAT_MRT3847_35165C.1
cacctttgttcactcttcttctcttgcggacagggttttagcgcagttacttctagatttaaggaagatgcgcctggcgtaagtgcataataccatcggcggcattgggccgccgtacgctgtgaaagggactaccactgattttgtagtggaacaagcaaggaggtgtcaccgaacgtgaggtacaggggagatatagatcatgctcggctttcagcaccacag

SEQ ID NO: 71045 - DNA, 866 bp, Glycine max
  Clone ID: PAT_MRT3847_35166C.1
acgagcacaaaccacttccaccaaagtagttggcactactcttctagaatcataagggtgtctcgagcatctggtggcaaagacaggcacagcaaagtgatgacctaaaagggttaagagacagaagggttaggctctctgtgaccacagctattcagttctatgaccttcaagatcgcttgggttacgaccaacctagcaaagctgttgagtggctaatcaaagctgcttcagaagctatctctgagctgccttctctcaacaaccctttccctgatacccctaagcagcctagtgatgagaaaaggcctaccagtggtggtggtcaacaacaacaacaacaaggctttgatgatgcagatggagacacaaattaccaacaaaaccaaagccagaatctttctctctccaagtctgcttgtagcagcacttccgagacaagcaagggctcaggcttgtccctctcaaggtctgagatccgtgtgaaccgtgtgaaggcaagggagagggcaagggagagagcagcaaaagagaaggagaaggagaaagagaaagagagtgattttaacattgcacaccaccatcaccaccacaatgtgaacaacatgtctcacactgcttccttcactgagcttctcactggtgggattgggagcacggtaacagttaaccccaacacaacaacaacaacaacaacaacagcaacaagtcctaatggatcatcggttcatcagatccatgagggtcatgatcatgaggctaatctattcaacaagggaagtcaacaacagcaacagcaacaacatcaccattggtctcaaacagtgacacctatggactacttcagcgcaggccttttggtagga

SEQ ID NO: 71046 - DNA, 298 bp, Glycine max
  Clone ID: PAT_MRT3847_35167C.1
ctcgatctgtgggtttttttaaaagaacctgcaattacaggactgaaaaagacattaacgcacatataatcttggatacaaaacgcatatggagactgccaagcttgattcattgacaattaattacagcacaaagtgcatattgaaagatactcgaatcccaagcagagctaccaactgagcaatgaactcagggtgccttggccatgcagacccagtgactagatttccctcagagaagcatcggattatcgggtcaggctcaagccaagtcactcctgcccgaaccccattaaga

SEQ ID NO: 71047 - DNA, 595 bp, Glycine max
  Clone ID: PAT_MRT3847_35168C.1
gcacgagaaagaaggtcctttgtcactggacgaggttatagaagagtcagagaacttgactgatttcctgatggactttgaagaagaagaataatggcatgcctccttgtgaagcattccatgtcaagtggtgtattgcattgtgtagacagaatagaaggtttggttgttagtcttcattgtcaatttcctgaactatcagtaacttcttttaggcattgctacagtggatcgggtggtcaaggcaataaacattggagtgagattctgaatactacttcaagggttctagaaacattatcccaaagtacttgtatccacacctgtctacatatacaattttgatatctcagtcttcatacggagcttagcagataaattaactaggagagtgaccattccaatatgttaaatatattgctgcatattgttattttggtgcaaacttgaatctaatatattaagtcacatatcttctttctcagctagttcaagtaacgatgtcctcgtttattgtgatttacaacctcccgcagattttgccaaggcatgtacaagacttcaaatccaccccaatggtaaactttcgtttgtg

SEQ ID NO: 71048 - DNA, 1298 bp, Glycine max
  Clone ID: PAT_MRT3847_35169C.1
tacggctgcgagaagacgacagaaggactgttttcctttgtcccttttgtatcacagaatcttcctcgcatctctcgtattccttctccttctctctctcctcctttcccttcatttcctggttttggtttttctatggtcctgcctttccacacaatccactatagtttcttctataccttccttgtggatctgtcactatgacttcctcactcgtgaagatccaaggcgaacaggtcctcaccaacgattttcaggacctttcaatcaaagatctgagtgagaaagggactgaggcagagattcacaaggtggggtcttatggaagccatgggggaatctgtgctatctgcttggataagatagtgctgcaggaaactgctcttgtaaaaggttgcgagcatgcttactgtgtaacatgcatccttcattgggctacataccgtgagaaagttacctgccctcagtgtaaacatccatttgagttcctcaatgtccatcgctcacttgatggcagcattcaagattacatgtttgaggagagtgtgtgcctgctacttcgggcctcatggttcacacctttatctgttgaagaacatgtggttcatgaagatgcatatgaagacctagaagattattatcagtacgaggatgatgatgatgatgatgatatggatgaagtttactatggtggttcgtccagtcttcgggttattggcaaccgtagatggggagataatggttatgtcagggctggtcgtcaagaagctcggccagtccatcgtccaaactttcaggattcaggagcaagttcttcttcgcatgagccgaagaagaaagaggctgggaaaattatcacaggcagaagggcaaagagggcacagaaaagggaagctgctgacaaggcggcggaagcaaagcatcagcagcatttagtaaggttgggtaggaagtgattctattttatttatgtcaggccatggccttgaactttccttcccataagttaaatattttctttttctttacattttttttttcttgtacattgtttctgtgctctttactctgaagcatgtaatagatcttggggaaggtgttttagaataatggcttggtggggtggttggattatggaaactccgaactcactatagcattgaacaatttaggttttagttgttattatgctctcaatgcaggtctaagttgtacataatttccatgtgatgttgatacctcaacaatgttgatatctatctcaaagttaaaatttcaaacacaagaatagttaaagg

SEQ ID NO: 71049 - DNA, 710 bp, Glycine max
  unsure (1)..(710): unsure at all n locations
  Clone ID: PAT_MRT3847_3516C.1
gccctgtcaagaatacaacccagatctttctttttctgttttggatttgaaaatgccaaactggtgagctaagaggccttgaaaaaggagggacagggagcatgatgagtagcatggaggacaattagtgaaggatagagggaatcaatttaaggtggtggaaatattataaactaggccctcttgtgcattttatgctcaaagttgctctctcctttaccatccttgtctgagctctagcttttttctcgaaagcttcctttttgggctatatgttcacaaaaaccatttcccctgaacaccccattcctgtctaaaacacacttctctcaatatctatctctagaactagaatggctgaccatgatgcaaaagaagaacaaaggcccctcaaccaatggagaagaagcaaagggggattcatggcttccatgttcatttttgtcttgtcagcattggacaacatgggctttgtggcaaacatgatacttacttgaacagattcaccacatgcttgcttttcggatcactcgaggttctggctttggcaatgctcacagtccaagctgcttcaaaacatttacaccctgaagcatgtggcaagtcaagctgtgtgaaaggtggcatagcagtgatgttctacacatcactgtgcttgttggcattgngaatgggaagggtgagaggatccatgactgcatttggagctg

SEQ ID NO: 71050 - DNA, 386 bp, Glycine max
  Clone ID: PAT_MRT3847_35170C.1
cacacaaacgtttacaaaacatgaaaggaaaattgatgtcgacgccttgccattttggcaggtacttttgccttgatggtgaatgccactttggtggaagttcaccctaaataccactgcgcatttgccaacaaagaatgcagcggacacgattgggcctctactgtaagagcctcacctcaatctactcacactgtcttcattgccgtttccctcaaagaaaacgccgcagccacttgcgattctctcatctaccaatctgcttccaacttaactgctgctcatttgactttggaacaaatcaacaagatctttagaagcaatgaaaacatgaacgcagtcactttcttcttggaagaagaggattgattacgtcatcatggaga

SEQ ID NO: 71051 - DNA, 578 bp, Glycine max
  unsure (1)..(578): unsure at all n locations
  Clone ID: PAT_MRT3847_35171C.1
ctcgagccgcgcaaaagtatatgaacgaatacacctttggacaaagaaagcacgaaggcacagagagagaaacactgcgagagagagagtacgagacccccaccacccgaatttctcaaaacttgttaaacagtatcgaaaagttaacgaaattgaaagaatttcgcgaaatggaattcgaggatcaagaggagcaggaggaggagctgtgtatgggtggcggcggagcgggttacgacccgacccggatgaaggttccggtagcggcggagccggtaaggagcaccaacggcggcggcggaagggcgaggtacagggagtgtttgaagaaccacgccgttgggatcggaggccacgcgcttgacggttgcggcgagtttatggcggcggggatggagggcacccttgacgcgttgaaatgcgccgcgtgcagctgccaccgcaactttcaccgtaaggaggcggattcctccgcccgtggtccgcctttctccggcggggaccccgtatttaaattcctcaccacaaccccgccgncggcaagtttgctggngtacttaccgtccattccggcgggg

SEQ ID NO: 71052 - DNA, 259 bp, Glycine max
  Clone ID: PAT_MRT3847_35172C.1
tgttggcacattattaaatgcacgtcaaccgtcttttatattcacacatcaatacatatggaatagggtggacgttcatttactatgggggggtcagatactactaaaacaaaattttaatcaaaagacacttacttacaatttattatctcatatctcgaactacctaattaaaattcctaaacagaaatcatctactctatctagctaaccttgtcctttatcatggtttttgaacacattttcatacttttaaaac

SEQ ID NO: 71053 - DNA, 944 bp, Glycine max
  Clone ID: PAT_MRT3847_35173C.1
cttaattggttccccaaattatagtctatagagcatctgcaactaggtgtcatctacaattgaatagctttgtacacaacaaccttaaaatacacattctattccatacaaggcaaagcttattttcccccaaagaaaatcttctactctatatataatctataatatgcttataactcaaatcttttacaaggatttttacaatttaacaagagaaagaaaaaaaaaatgggccagacaatacatgcacccccagacccttcaaaatcgcctggttccaggtttttcctaacagaagatacagccaaaacatgtcagactgacatgagtgatacacagctaaggagatgaactatcatcatcatctgaggaattgtattgtctctttccaacaagtcctggaaggggttgtggaagcatagggttcactgggacagggaatctatgtgctgaactaaccatggttctctcatttatcataccaacttctttgcacaccctatcaagaactgttaagaagtctcttactaccatgaagattctaaatggatgagcttcttcctttgacaagtttccatggaaatactctgtgatctccttcacaagggatagtgcaacactttcttgtgcttggacttttagaatctcctcctcggccattctcatgaacttgttcattgactctctgaacttctggctgctttcatcggaccctcctgcttcatccagctgcacaacctctgcaatgtgtgcaatccctttcgagagcttggagacctcactgctgagacttcagagtccatcgcggcagccttcttcacatttgctcggacgcaacgcagactagacacgacttgcaggccgagccttctacacttggcatcatcgttcgagttcgcactcggtgttggattggtactcgagggacgtgcgccttcagttct

SEQ ID NO: 71054 - DNA, 946 bp, Glycine max
  Clone ID: PAT_MRT3847_35174C.1
tacaagaaagaatggctgctaggttgaaacacttgggtattagagtgaaaagcattgaagaagatgagcattgtgtcattccaatgggtggccccctcccagttctcccccaaagagttgttggaattggcggtaccgcaggaatggtgcatccttcaacagggtatatggtagcaaggaccctagctgcggctcctattgttgctaattctattgttcagtgccttggttctgatagaggtttttcaggagatgaaatatctgcacaagtgtggaaagatttatggcctatccaaaggaggcgacaaagggagttcttctgttttggtatggacatcttactcaagcttgatttaccaggcacaaagagattttttgatgcgttttttgatctggaacctcattactggcatggattcttatcatcaagactgtttcttcatgagctcttattttttggactctctctattttcttatgcttctaatacatctagggtagagattatggcaaagggaactcttcctttggtaaacatgatcaacaacttggtaaaagatacagaataatagacttcattctattctgttgtgtatgctacctatggtaaaagatacagaataagacgacttccttctattcagattcattttttgatctggaacctcattactggcatggattcttatcatcaagactgtttcttcccgagctcatattttttggactctctctattttcttatgcttctaatacatctaggatagagattatggcaaagggaactcttcctttggtaaacatgatcaacaacttggtaaaagatacagaataagacgacttccttctattctgttgtgtatgctacatatggtttgtgcttcaacatgtagtttcctactcatcttatagatttctgataaaaaataattgtgtatatttattt

SEQ ID NO: 71055 - DNA, 345 bp, Glycine max
  unsure (1)..(345): unsure at all n locations
  Clone ID: PAT_MRT3847_35175C.1
atgttgttggagttgggttttgtagtggtgagtgtgtgtatttttttaatacgtggtgttgattcgattgattggatgtatggggatggtgattaaattgttgagttcttatatttttagtttgtgtggtggttntaatttatgtgattgacatggtggatgtatgagatgtgaggtttagggggggaggaggattagttttggattcttggatgtgtggatgggagagtgtgtgtttgtgatgattgtttttgtggggtgttttggtgttgggtggttgtgtgttgttttgggagttgtggttatgttgtgtgctttgtttagtttggtggtgtgtgattgatg

SEQ ID NO: 71056 - DNA, 1241 bp, Glycine max
  unsure (1)..(1241): unsure at all n locations
  Clone ID: PAT_MRT3847_35176C.1
ccacgcgtccgccgtggtaacgtacagtggtcatagtttaacaaattaatagtaattagaaagatgaaggatgtgtgcaatgtggtgcagggattgaagcctgtgctgctaatggtagtggtgcaaatagcatttgctggggtcaatgtcttctacaagttcgcggtaaacgatggcatgagcttgagggtcggtgttgcttaccgctttgtattcgccacagttttcattgctccacttgctctcatcgttgaaaggaagaagaggacaaagatgacttggacggtactgtttcagtcatttctttgcggcttatttgggggatcattagctcaaaatttctacttacaagccctggctttaacttctgcaacgtttgcatccgcaatgtcgaaccttataccaggcataacctttatcttggccgtttgcttcggtatggaaagattaaatttgagaacagcagcaggaaaggccaaaatagtgggtacattaattggaattggtggggcaatggtacttactttcgttaaaggtgtgcatatcgaattcgggtcctttcatttgaaccttttgcatccccaaaacggtacgcacgcacattcagctaccggtgctcataccctcttgggttctctgtgcgccctggctagtggcatcagctatgcattgtggctcatcattcaggccaagatgagtgaaagttaccctagaccttactcaagcacggcgttgatgtcactttgggggtcactgctgtccattgtgttagcactttgcgttgagagggactggagtcagtggaggttgggttggaatattaggcttttgactgcagcatatacgggtattgtggtttctggggtgatggtggttgtgatttcatggtgtgtccacatgagaggcccattgtttgcctctgttttcagccccctgatgctcgtgacggtggccttggctggttctacgattttgaacgagaagctacaccttggttgcgtaattggagcagtgctgattgtgtgtggtgtatatgtggcattatgggggtatagtaaagagatgaagaagaagaatcaattagtgccagcacaaagcccccatgacaatgaatctaatacggtcgtcgaaattgtggtgaggtctgcacaagaagataaaagcaaccaaaacaaaacccatgaaattgttgcaaaagtagttagggataatgacgattcatgannngatggtcacgaagg

SEQ ID NO: 71057 - DNA, 241 bp, Glycine max
  Clone ID: PAT_MRT3847_35177C.1
tcgttttctgcgtccgaccacgcgttcgcccacgcgtgcgtccacgcgtgcgggtttttgctagaagcaggaagagaagagaaacaaacaaaccacaaaataatgaattgagctacttactatcggattgagatctcccaacagagagtttcacaaaattgccaagtaccttttttaggagcaaggaggagaagtaagaaccaacaaaaggtgatgtccattgatgtagttgactgtaact

SEQ ID NO: 71058 - DNA, 292 bp, Glycine max
  Clone ID: PAT_MRT3847_35178C.1
ccacaatctgctccctaaaatcatagaaagcttcaaatcaaaattatcaagggaggcacagcatgtgaccatttccaaggcaggtaaagattccaagcggaacggaaacattttcgttgctttgttaaacccctctgtctctttgtgttcagttttcaatgtttgaagagcttttatggaacaatgttagtactatattcttttataaatcttctcaataccttatacaaattaagtaagaaaagttgtaggaagaagttggaagaggatttaaaatttctcattcttgcct

SEQ ID NO: 71059 - DNA, 343 bp, Glycine max
  Clone ID: PAT_MRT3847_35179C.1
acaaagactaaactaaattaagtaatgggttctttacaacacaggctgaatcaaaagttataaacaattggaatagtttaatgagaactaatgatttctaattagatcttatcttccaagcataaaaccacaggacccaaataattgttgccttcttatgcaaatatatgaattgctaagcaaatttttgcaaaaacgtattataaaaaacttggaaacaaattaaaattattttttattgcaaaacatatgttacataaacatcctttgttagaatgttaataaaattctatacttgaaaattaaacttgttttgttaataattgttttatattaaagttaa

SEQ ID NO: 71060 - DNA, 581 bp, Glycine max
  Clone ID: PAT_MRT3847_3517C.1
ttttcgcgtccgcggacgcgtgggcaattcctgtctaaaacacacttctcaattcggctcgagtctatctctagaactagaatggctgaccatgatgcaaaagaagaacaaaggcccctcaaccaatggagaagaagcaaagggggattcatggcttccatgttcatttttgtcttgtcagcattggacaacatgggctttgtggcaaacatggtaagcatagtcctatacttttatggagtgatgcactttgatctagccagttcagccaacacactcacaaacttcatgggctcaacctacttgctttcccttgttggtggcttcatctcagatacttacttgaacagattcaccacatgcttgcttttcggatcactcgaggttctggctttggcaatgctcacagtccaagctgcttcaaaacatttacaccctgaagcatgtggcaagtcaagctgtgtgaaaggtggcatagcagtgatgttctacacatcactgtgcttgttggcattgggaatgggaggggtgagaggatccatgactgcattggagctgaccatttgatgagaggatccact

SEQ ID NO: 71061 - DNA, 295 bp, Glycine max
  Clone ID: PAT_MRT3847_35180C.1
gggaaccagaatctgataaaattaatcgataggtgcaacgccactgagccactggtatcaataataaagaaaaggtttcattcaaagttgtaatctgtgcaaccatcaatctttaaaaaggaatttattccaaaaatctggattcttaagtatgattcctaaagaatatttagcaacggcttggcaagctgaaaggcgtttgggaggatcatacgctaataatccatgtagcaagtaaatcagggaggaccttgaagagtccacattccgggttaaactatccttaagatgacca

SEQ ID NO: 71062 - DNA, 231 bp, Glycine max
  Clone ID: PAT_MRT3847_35181C.1
cctgttccaaattaaccttaaatttttaagaatcgtatttaccaaaatccttatcatcttatgtatggaacacattttggcagggtctacatttaaacactgcacccgccacggtatacaaagactctccccttccctctaaggtaacgatgcctatttgtttgcccccatataccatggctcaaaaataccttttttgccgataaacaatgttctgatttctaatgatgg

SEQ ID NO: 71063 - DNA, 524 bp, Glycine max
  Clone ID: PAT_MRT3847_35182C.1
gagataggcgcagagataggtatgaagatgatagaagggattatcgcagaagaggtcgagatagagatgatgaagatgatagaagggattatggcagaagaggaagagatagagatgatgaagatgatagaagggattacggcagaagaggaagagataaatatgacagggatagagatagatatgagaggcgcaggagagatgaacatgaagaagagcatgggcgtggaagggagaatggggatagagatggtaataggaagggtttacagcacggttctggtgaacttgaattatatgcagtttataaagggagaatctccagagtaatggagactgggtgctttgtacagttggatgacttcagagggaaggaggggttggtccatgtctcacagatggccacccggaggattaccaatgccaaagatgttgtcaagcgtgatcaaaaagtgtatgtaaaagtgatctcagtttcaggccagaagttgtctctttccatgagagacgttgatcaacatacc

SEQ ID NO: 71064 - DNA, 494 bp, Glycine max
  unsure (1)..(494): unsure at all n locations
  Clone ID: PAT_MRT3847_35183C.1
aattcggctcgagtacggctgcgagaagacgacagaagggcacacttaattaacacaaatgaagtttttcctctactacctgtatatgtatcagacctcataattactgcaacaaaaccgttttcatgggcaaccattcgagcccactgcaaaacgtcatctcaggttgcaaatacttacaacgcaaccctgacatattactttttacacaaatcatacattaaaccaaacaactgaaactgatcaacatgattacctgagaagtattaaaagagtctgaacaatcaacatgtcctttattcacaccacaatgttgctcatcttcaaaatccatatcaacttctttagacattgtattgtcatacgcccattaattttcatccatcttaattcaaactataactatcacctatttcaacattcaactaaataataatttgaacaatacaacaacctanataaatngactaaataataacttcanactatgaata

SEQ ID NO: 71065 - DNA, 338 bp, Glycine max
  Clone ID: PAT_MRT3847_35184C.1
cttttactttgtttaaaagtaaaagagcatataataggtagggccatcagactacggcggtccactggctgatgcttcgctgtcaggtccagagagcacgctcagctaaacgagtgccacatccaggggctcaatgccctcacaccggatgaccgcatagagacagacggagggctccttctgacagggcaccctaagcccacgccattgcagcgtgccagcgtcgccctctctcgctgcaccctcaatcgggacgcccttcatagaccttactacaacaactggccccaggcaatctacatgctacacggtaagggaattagtggcgcgatataccc

SEQ ID NO: 71066 - DNA, 105 bp, Glycine max
  Clone ID: PAT_MRT3847_35185C.1
acggacaagtaggcattcaaaagtatgtacccaccaaaggttctggtagacgcaggagttccacattcataacttaaatcaaaacccaatcgctcgccccatgga

SEQ ID NO: 71067 - DNA, 427 bp, Glycine max
  Clone ID: PAT_MRT3847_35186C.1
ctaaacatccctactttgttcatgcaattccccttttaaaaaaaaaaaaaaaatcaatgggggcgacaaataaataattttgtaataataaactttgccccccaaacattgttggggacgttatgggaatcgaattgggaacctttggggggttaattttaaaatactaaatctaagctttccttttgcaattacgaggaccaaatccgaacctttctttttccaaatcatattcaacgtagaaattctgctgctgatagttccccaaaatgatggccggaccgggggtttttggttgaccggcaccaccgggggaaacaacggggaaacataaaaccttggcatcgccgacaaacgagaaataattcgaaagcgggtgcgacattttggcgccttctttgaactgaaaagtaaactcggggaaact

SEQ ID NO: 71068 - DNA, 382 bp, Glycine max
  Clone ID: PAT_MRT3847_35187C.1
ctcaaaccatttttattcaaaccaaactgtccatatactcggggacgttttggtaaacactcaacaactataacactttctgcacataacaatcacctactcagatatcaacaagaaaattctcacatcacttcgtaaacgtaagaaaattagttttcttactagactcaatccttttccagtatctatactgcctgtcctttttatcgttaacaataaaattctcagttctaacgccactaatcctatgctgacgcgacttctttagaactgtaataatctcaaatatctggttaatgagtttcctattgcatttgttaaactagaattaatattttattcacttaaataaatcgcattactatatccaatgagtcttttt

SEQ ID NO: 71069 - DNA, 875 bp, Glycine max
  Clone ID: PAT_MRT3847_35188C.1
gctctatcacttctttcccaacccatcaattcttttggctaatcagtaattacccttaattttttggtccttcaatggaacgtgaagaaggcaaacaacctccccaaaaaaccccattacacaatcaacatgagcaagctaattctgacaacaattttgttcaacaaaataacttgcaagagcaaagtgggacattcacaacttttgcatcatttgaaagtgaaactgagggtgagtcctcttttgatgacaatgattatgatgctgattttttcctgagccaagagttcgaatcagaacttcaatttcttgagagtgaacgaagcaatgacaacggcgatgattatgataatgaagatgacgaacatatggaagaagatgagatcgatgtagatgaattgacttatgaggaattgattgagttgggagattttataggacaagagaagagagggttgtcagcacatgagatctgttcatgcttgcattctcacactttccattctgctgaaaacaaaagtggaattgatcgttgtgtgatttgtcaggtcgaatatgaagaaggtgaatctttggtggcaattcagtgtgagcacccttatcacacagattgcataagcaagtggctccaaattaagaaggtttgcccaatatgtaacatcgaaatttcagctcccaagatggttagttaagaatatatagttggtttttagatagtgtaaaatttatgcttccttactttgtgcaatcttaattaatttgaaatacttgagaaaataaaagctgctctggagcttaatttgtaacattgtaaataacagaaatttgatgttccaaggtataaaagtgattgaaaatcaaattatactttaaaa

SEQ ID NO: 71070 - DNA, 622 bp, Glycine max
  unsure (1)..(622): unsure at all n locations
  Clone ID: PAT_MRT3847_35189C.1
cacgcgtccgcggacgcgtgggcggacgcgtgggtcttttttcgggtgagggttttacactgcggcagctacttcggctccatcttctccgatctcctcaaactctatcggcgcagaaccaatcctatatcactatggggaagacacatggaatgggagctgcccgcaagctgaagtctcaccgtaggagacaaaggtgggctgacaagtcatacaaaaagtctcatctgggaaatgaatggaagaagccttttgctggttcatcccatgcaaagggtattgttcttgaaaagataggtattgaggctaagcagcccaactctgccattcgaaaatgtgccagggttcaactcatcaaaaatgggaagaagattgctgcatttgtgccaaatgatggttgcttaaattacattgaagagaatgatgaagtcttgatagctggatttggacgaaaaggtcatgccgtgggtgatattcctggagtcaggttcaaggtcgtgaaggtttctggtgntgtctctcctggcccttttcaaggagaagaaggagaagcctaggtcttaagcttgtgggtgcgggtcctctctatagtctatccaaaaaatattatgaattttgcttc

SEQ ID NO: 71071 - DNA, 617 bp, Glycine max
  Clone ID: PAT_MRT3847_3518C.1
ggctcgagccaaatctttctttttctgttttggatttgaaaatgccaaactggtgagctaagaggccttgagaaaggagggacagagagcatgatgagtagcatggaggacaattagtctaggatagagggaatcaatttaaggtcatggaaaattataaactaggtcctcttgtgcattttatgctcaaagttgctctctctcttttaccatccttctctgagctctagcttttctcgaaagcttcctttttgggctatatgttcacaaacaccatttcccctgaacacccaattcctgtctaaaacacacttctcaatatctatctctagaatggctaaccatgatgcaaaagaagaacaaaggccactcaaccaatggagaagaagcaaagggggattcatggcttccatgttcatttttgtcttgtcagcattggacaacatgggttttgtggcaaacatggtgagcatagtcctatacttttatggagtgatgcactttgatttggcagttcagccaacaccctcacaaacttcatggcttcaacctacctgctttcccttgttggaggcttcatctcagatacttacttgaacagatttacacatgcttgc

SEQ ID NO: 71072 - DNA, 243 bp, Glycine max
  Clone ID: PAT_MRT3847_35190C.1
ccggggggtttatgcaggggagacccttcccccccacacatgggaaatctcacctaccaattcttggcctaaaacagcctccctgggaaccaccacgggtcggatatagcaccaactaaccggtctctcgggtgaaagaggagagggatcaataaataggaggctcaaacctagcccgcacatgatcgagcaaaagacaccctgccactagcaccctcccaaatcgctagcaccaaatatccc

SEQ ID NO: 71073 - DNA, 620 bp, Glycine max
  Clone ID: PAT_MRT3847_35191C.1
tggctcgaggaccgtggtttcgtggaatctcatgatgtcttgtttagctaagaataacaaagaggagaaggctcttgaacttttcaatgaaatgctcgagcagggttttgaacccgacgatgcttccttggtcacggtgttacctgtttgtgctcgcttgggagctgtggatattggcgagtggatccattcctatgcaaattccaaggggttcctacaagacactattaacgtggggaactcgctcgtggatttctattgcaaatgtggcaacttgcaagccgagtggagcattttcaacgacatggcaagtaaaaacgttgtttcatggaatgccatgatatcgggtttggcgtataacggtgagggtgaagttggggttaacttgtttgaggagatggtgcatggaagctttgaacctaatgattccactattgcgggggatatagcgtgaagtgctcatgtggactaggtggatagagggcgcagacttatttgctgtctatgagtgtcaagtgtaaagaatgacctaatctggagcatcatcggtgagcctatgactacgcttagtcgttgagaacacgtgagggaagcttgtgatttgatatacaagcatgcca

SEQ ID NO: 71074 - DNA, 318 bp, Glycine max
  Clone ID: PAT_MRT3847_35192C.1
aagatgcattgttattcgttattcaggattgtagtccaagcactgcatccaagcttacaggatgatgaatgctcatcttgcaaggactgttgggaatggtgatatatatcatacagactttgcgggggagcagatacaagggctttgcgacttgattgcattgagactcctgtgctctagtgggtcatgagactggtgcactgtacttgtgcactgtcggcaaatactacgattccgatctatacaggatagcctgcatctttagcctcatgatgctacttgatagactgacaagcatttgcgactcattcatttgcc

SEQ ID NO: 71075 - DNA, 180 bp, Glycine max
  unsure (1)..(180): unsure at all n locations
  Clone ID: PAT_MRT3847_35193C.1
cccagcggaagggtggggtggaacccggcncaagggnaaacaacagngggcgcaggcacaagggagcgggaccaccccaaacaggggattcggggcgacggtcggagactctccggcgggtcgcaaaacgccggagcagcacagaaggggaaaacgtaccaacccggggacccagggaaa

SEQ ID NO: 71076 - DNA, 2648 bp, Glycine max
  Clone ID: PAT_MRT3847_35194C.1
acttccgtgaagactcatctcgaaaccctcaccttcaaaactcatctcgaaaccctaagcactcgctcgggttcgtgtagtgccaaaccctagggctcattttccagatctattcagtttttctctcctctcttttccgatccaccgttggagatcgaagatggtgtccgacgccagcaagaagaaggccgcacagaagaaggccgccgccgccgccaagagaggtggcaaagctgccgccgctgccgttatggccgccacctcttccaaagccgccgacaaggtcgccaacggaatcgccgatattcagatttcggatcggacctgcaccggcgtcctctgttcgcatcctctctccagagatattcgaatagagtctctatccgtcacattccatggacatgatctcattgttgattctgaattggagctgaattatggaaggcgttatggcttactcggattaaatggttgtggaaaatctacactgcttacagccatcggttgtcgggaacttccaattcccgaccacatggacatatatcatctaaccagggagattgatgcctctgatatgtctgcattggaagctgtcataagctgtgacgaagaaagattgaaattggagaaagaagcagaagctttagctgcacaggatgatggaggtggtgaatcccttgaacgcatttatgaacgattggatgccttagatgtaactagtgcagaaaatcgacatgctgatgcatgccatggtgacacgcgatttctccggaggttagagaaagaggattcctttagccggtgctctatttattaaccctgccatcgctttgctaagtgaaccaacgaatcaccttgatttggaagcttgtgtgtggctcgaagagaatctgaagaagtttgaacgtattctggttgtggtttcacacttcacaggatttccttaatcgtttatgtacaaatttgatcctcgtgcgaggcaagaagctagaagtttgaacttgtaatgattatcaatatgtactgacacgtcctgaactggaagagaacgagatgaaactagtactaatcggagcagaaaccaaaagactcaatctaggaatacatagcaatatgttgtgcctggatccacgctaaaagagaaccagaagcaaaaggaaaagtgagaactggtgcaaatagcctcaaggatggattacattatacggtgtccgagtggcccaggtttcgtataacgcagcgcacaaggcacagagtaagcacagaccactgtcaaaaatggtgcgttgtcaacttggagagaaggtgatcagatactaagttttggtatttcgttttactgatatttggaaccttccgcttccagttctccagtttgttgaggtggcaattggttagatactttaatctataagaacatagactttggggttggttgagactctagggttgcactgtttgctcccaatggcgcagggtagagtgcactagtacactaatgaagatatggacaggtgacttgttgcggtagtgatagcagggtccgacgtcatcgacatgtacaagatgaacaatatcaccaggaaatgggccgaatagctagacatgcaaatcactgctctccaaattattgatcaaggaatgccgaggagacgaggaagagaagatgtgggcagcttttgggaagcttgagctgccaggttaagcgcaggtaatgacaattaagaacttcagaggaggagagtggagtcgagtgggatttgcttgattaggttggagacagcctcattggctgcttttagttgagcctacgaaatcatgtggatattgagataattggcgcgtttgaatgaatggtgtgtgaatgtggcggtggcatggtatgattttaggctcataaataaggtcatacaagcggtttggcgaatggagaatataggggatatgcgataatcaagctgtgaccagatgcaggacggagacataatctaggattcgttggtcggcctgcaacattccaggggatgcttttttctttttacaaattattttccagcgtactcgccatgcccttaattttaaacatcccttctatattgtcattaatatctctttccagtttctataccacttagcaggttttgtttgggtccaaggagggggaaagaaatttaatgagggaaggagatagattttaaataaacattctgtttgtttgcttgaggagaagagggacttgttaggagaggaaaaatagttattttcttatttgattcacaatgagaagagagttctaaaacttgttatcttaaatggtagtgcttctaatattcgagaaaacatattttagagatttcaaggggcctctaaagtcgaaggcgggtttttttgacttaaacaatacgagtgtggatgctgccggtgtgtagtagtattcccttaaaaggttatgatttttgttcgagcagagatccgtaataattttttttaagttactatttcttgggcttatcatttatttgcctgggtgttaacaagcgtggatcaatgggatttccccttgaggaaacgaagctttttctacaaatgaactttttccccccagaatattattatttgtggtattataattacgttaattcctctcc

SEQ ID NO: 71077 - DNA, 1439 bp, Glycine max
  Clone ID: PAT_MRT3847_35195C.1
aaaacaattcttgagaaacaactgcgtcccccacaatccagtacctgaaaaatccactgcctctctctctctctcctaaccccccccccccagcaaatatatacccttccttcccacaattctatgatcacaatcttctctttctctcctacttctccgcctccttcaaaatcgtcatcaatttcgcgtctttctttctcaattctcttagattctcaattgggtcttcaaaaatgcggatgagttgcaatggatgtcgagttctgagaaaaggttgcagtgaaaattgcagcatcagaccctgtttacaatggatcaaaagcccagaatcccaagccaatgctactgtgtttctcgctaagttttatggtcgtgctggtctcatgaacctcgttaacgcaggccccgaacatcttcgtccagcgatctttcgctcgttgttgtacgaggcatgcggtcggatagtgaacccgatttacgggtctgtcgggctattatggtccgggagctggcagctgtgtcaagccgccgtggaaaacgtcttgaaaggcgcgccgattacgccgatcacgtctgaagccgcggctagcgggcggtgcccaccgctcaaggcttacgacatacgccacgtgttcaaagacgagaactccgccgccgcgtccaacgaaactcagcaccaacgagtcaagacccgctctcgagtgaagcgacccctcgccaagcccaaatccaccgccaaccaaaacaacaacattaacactaagaatacgggaaccgaattcggatcggatgaaccgggtttggtggcatgcgattggaccgaggaggcgttgaaccggtctggaagtcacgattcgacgctgagccaccagtcggaggcggcgaatgcggtggaaagtgagagcattttgtctgctgagacttcgatcctcttccgagatgaaccggaatccaacccgaagcgcttggaccggaccgatgatgttggtttagagcttacgctagggttcgagccggtatcaggtgcgcagcacgtggttccggtgaagaagagaaggattgatttgaaggattttagtggctcgtcgtgcaagatggagctggggcttgaatgctcggcttgaggactagtggctcggctcagttttgactcatcggctttctgtgtttgatataagagaacagaagtacagaaccgttttagtgttgttgttgttgttgttttttttttgtaatttgggttattgttaacccctttgtgaatgcggtgctgtacaacagtacaaactcaaacatgaatgctagtaagtagatgaacaggtgcatttcaaaattgttaccttgggccaccaagctttcttgtcattttaagtattttttattttaaaaatacgaatggcataattcatttagattataaaagatagaaatttgagttt

SEQ ID NO: 71078 - DNA, 2278 bp, Glycine max
  Clone ID: PAT_MRT3847_35196C.1
ccctctttttaaactaacctcgaaccctaatcactcgctcgggttcgtgtagtgcaaaccctagggctcgttttctagatcttttttttcttctctcttttccgatctaccgttggagatcgaagatggtgtccgacgccagcaagaagaaggccgcacagaagaaggccgccgccgccgccaagagaggtggaaaggctgccgccgccgccgttatggacgcgtcttccaaagccgccgacaaggtcgccaacggaatcgccgatattcagatttcggatcggacctgcaccggcgtcctctgttcgcatcctctctccagagatattcgacgtgcgtgcacgaagttgagcgcctagcccggcacctgggtctgtagcatggccattcttccttgtttccaaggtcaatatactggttctcctttgtgaatgtaaccaaataagatagagtctctatctgttacgttccatgggcatgatctcattgttgattctgaattggagctaaattatggaaggcgttatggtttacttggattaaatggttgtggaaaatctacactgctgacagccattggttgtcgggaacttccaattcccgatcacatggatatatatcacctaaccagggagattgatgcctctgatatgtctgcattggaagctgtcataagctgtgacgaagaaagattgaaattggagaaagaagcagaagctttagctgcacaagatgatggaggtggtgaatcccttgaacgcatttatgaacgattggatgccctagatgcagccactgcagaaaagcgtgctgctgaaatcttacatggtcttggctttgacaagcaaatgcaggcaaagaagacacgtgatttttccggtggctggagaatgaggattgcattagcacgagctctatttatgaacccaaccattcttctacttgatgaaccaaccaatcaccttgatttggaagcttgtgtgtggctggaggagagtttgaagaagtttgaacgtattctggttgtgatttcacactctcaggacttccttaatggtgtctgcacaaatattatccacatgcaaagcaaaaaactgaagctctacactggtaattatgatcaatatgttcagacacgttctgagctggaagagaaccagatgaaacagttcaaatgggagcaggagcacattgcctcaatgaaggaatacattgcccgatttggtcatggttcggcaaaactagctcgccaggcacagagtaaggagaaaacactggcaaaaatggaacgtggtggacttgcagagaaggtggtcagagacaaagttttggtatttcgttttactgatgttgggaaacttccccctccagttctccagtttgttgaggtgtcatttggttatactcctgataatctcatctacaagaacattgactttggggttgatttagactctaggattgctctggttggacccaatggagctgggaagagtacgttactgaagctaatgacaggtgacttgatgcctagtgatggcatggtccgacgtcataatcatcttcgaattgcacaatatcaccagcatttggccgaaaagctagacatggaaatgtctgctctccagtttatgattaaagaataccctggaaacgaggaggagaagatgagagcagccattgggaaatttgggctgtcaggtaaagcgcaggtgatgccaatgaagaacttgtcagatggacagaggagccgagtgatatttgcttggttagcttggagacagcctcagatgcttcttttggatgagccaactaatcatttggatattgagacaattgactcgttggccgaggcattgaatgaatgggacggtggcttggtgcttgtcagccatgattttaggctcataaatcaggtggcgcatgagatatgggtatgtgctaatcaatctgtgaccagatgggagggtgacattatggaattcaaggcgcatctaaagtcgaaggcgggtttatctgactgaaacaatacgagtgtggatgctgccggtgtgtagtagtattacattaaaaggttatgatttttgttcgagcagagatccgtaataattttttttagttactatttcttgtgcttatcatttatttgcctggttgttaacaagcgtggatgaatgggatttcaccttgaggaaacgaagcttattctacaaatgaactatttcaaccgagaatattattatttgtggtattataattacgttaattccaaaatgtt

SEQ ID NO: 71079 - DNA, 1882 bp, Glycine max
  Clone ID: PAT_MRT3847_35197C.1
caatttacctcctctctcactattccatcttcttaattactcatcactcttcttagaaactagtctaacaattaggttttgaagggcacacaaatatacgagatcgaaatagagatcgcggaagtgttgtacggcatgatgagacaatccagtacctgaaaaatccactctctctctctctctctgtccttaaccctccaacaaatatatacccttctttcccacaattctatgatcacaattttctctttctctttctctccttcaaaatcgttgtcaatttcgcctctttctttctcaactcccttagattctctccatcgggtcttcaaaaatgcggatgagctgcaatggatgtcgagttctcagaaaaggttgcagtgaaaattgcagcatcagaccctgtttacaatggatcaaaagcccagaatctcaagccaatgctactgtgtttcttgccaagttctacggccgtgctggtctaatgaacctggttaacgcaggccccgaacatcttcgtccagcgatctttcgttcgttgttgtacgaggcatgcggtcggatattgaacccgatttacgggtctgtcgggttgttatggtccgggagctggcagctatgtcaagccgccgtggaaaacgtcttgaaaggcgcaccgattacgccgatcacgtccgaagccgcggctagcgggcggggcccaccgctcaaggcttacgacatacgccacgtgtccaaagacgagaactccgccgccgcgtccaacgaaactcagcaccaacgagtcaagactcggtctcgagtgaagcgacccctcgccaacaacaacgccaagcccaaatccaccaccaacgaaaacaacaacaataagggaaccgaattgggttcagctgaaccgagtttggtggcatgcgagtggaccgaagaggtgatgaaccggtctggaagtcacgattcgacgctgagccaccagtcggaggcggcgaatgcggtggagagcgagagcatgctgtcggcggagacgccggagacttcgattctcttccgagaagaaccggaaacgaacccgaagcgtgtgagcgatgatgttggtttagagcttacgcttgggttcgaaccggtttcacgtgcgcggcccgtggttccggtgaagaaaagaaggattgagttgaaaaattttagtggctcggctgagagtggctcgtgcaagatggagctggggcttgaatgttcggcttgaggaactcgtggctcggctcagttttgactccatcatcggctttctgtgtttgatacttattacaagagatcagaaccgttttgggttcagctgaaccgagtttggtggcatgcgagtggaccgaagaggtgatgaaccggtctggaagtcacgattcgacgctgagccaccagtcggaggcggcgaatgcggtggagagcgagagcatgctgtcggcggagacgccggagacttcgattctcttccgagaagaaccggaaacgaacccgaagcgtgtgagcgatgatgttggtttagagcttacgcttcggctcgagcggctcgagcggctcgagctcgagccgaatcggctcgagaaattttagtggctcggctgagagtggctcgtgcaagatggagctggggcttgaatgttcggcttgaggaactcgtggctcggctcagttttgactccatcatcggctttctgtgtttgatacttattacaagagatcagaaccgttttgttgttttttaattactttttttcttttttggtaatttgggttattgttaacccttcctttatttttttcgtcggttgtgaatgcggtgctgtacaaactcaaacatgaatggtaagtagatgaagaggtgcatttc

SEQ ID NO: 71080 - DNA, 798 bp, Glycine max
  Clone ID: PAT_MRT3847_35198C.1
gacgggtcgaaccacacatcacgtaatgaataattgatgaggaacgtgcagttgtggataaactcataaactcttctttgttgttaggttattggagtttacgaatgaatggtctgttgaggaagatggcgtgctatatcttgaacgagaatcacacttacatgataaaatttcatgaaaatttgtgcaagatacctcagatgcgggaatggacagctgatctggaggcagtttctttggcgggtaatgagatagaagaaatcgcagagggcacatcacctaattgtccacgcttgtccaccttcatcttatctcgtaattccatcagtcatattcccaagtgttttttcagacacatgaacgctctaacacaacttgatttatcatataatcgtagattaacatctttgccaacaaaatctaataaagttgcaatgccttaatctttcccgcgatttgtatttatcattgttacccggatgcgcactgcccggtatctacaagcattaatatgattggacacggggtgcggcaattcgctcctcagggtaccggaaggcttgcaaaatctaaaaaagttgcaatggcttagtctttcccgcaagctgaatttatcattagtaccgttatgcgtactgcccggtttgagcaatatgcaatatctggatctccgcggttggtctggtataaaagtagaagatgtaaaagggatgactatgcttgaatgttttgcagtaagctttctcgatcaggattactacaaccgttctgtgcaagaaattcaggacactggttatg

SEQ ID NO: 71081 - DNA, 387 bp, Glycine max
  Clone ID: PAT_MRT3847_35199C.1
gttaacgatgacgtgtctgatatgatatgcatggctctcagacagatgcctcgttttggcgaagcgacagagcagctccgtgtcgccgtcgtgggcgaggtgagaaactgcgtcggagaagattcacgcgaagaccattggttgcatgcccggtattctccactgcatctgcaactacaataaccggcgctctcgtggattccttacattcggtgcgctgggccccacaccatatctggttgcggaatctttctctggaaattgttttagccacacatattacaaataggattattctttgccgttgtgcttatactcaggaaagagccggattaataagaaccccgcgggcgccggatattcggagtcagccgacgatgaacggag

SEQ ID NO: 71082 - DNA, 333 bp, Glycine max
  Clone ID: PAT_MRT3847_3519C.1
agccacctctctggggggggttatttaaacattcgcacgcggtcacaaacatcccaacagtgctcgacacaatatgactccggcgacggctcgccacgacaagggcggctgcagaacggaactatgccgaaaaaactcaacgctccaaaacaagggccgctaaagaaacaacctggctcaaaagcggcaccactataagacgggcagtaggacaggatggcgtcaatttgggggctgatactaaggcaactgaaggacccatagtggctgataaaaacagggagaaaaatgatgatatggcacccaacatatattgccgaggaacaggcacac

SEQ ID NO: 71083 - DNA, 113 bp, Glycine max
  unsure (1)..(113): unsure at all n locations
  Clone ID: PAT_MRT3847_351C.1
cggangagtgaaatcnaacaaccatagacctagaagangagcattccaatntgaatggcgatgngcacctgngnagcaacaagtggagggcagaaggtgtggacagannttgt

SEQ ID NO: 71084 - DNA, 350 bp, Glycine max
  Clone ID: PAT_MRT3847_35200C.1
aagggggtaaccaactctatttaaacacactttaaattcccattactcactattattcgcctatttcatttaacgacggtcactaaataattacaacaactgaattcaaatataacaaccatgaaaatctcaagaaccagctgcctcatcacactttctcaactgtatgtaaatgcaaagacattgcacacaattacaagcaacatgtacaatactttgacaacatactggaccgtatctccacactttttctactaaacacccgaaacaacaattttatagtgtcttgtgatcctattaaccccacttacttcaacattctatggtcatcaaacacttctctttagatt

SEQ ID NO: 71085 - DNA, 251 bp, Glycine max
  Clone ID: PAT_MRT3847_35201C.1
acacaatatgccaaatttcactcgccttcatacattgtaaattcttgtcatttggcatattgtgttgagtaaaaacatacaaaaataaaataaaaagacgagaatttacaatgtatgaaggccagtgatatttgaccttttttaaatttctgtgtcctcttgtgtataataatagatggaaattcattggtcttagagatgtttgtctggctcattaatcaaagggatgacagagacatgttcttcattga

SEQ ID NO: 71086 - DNA, 381 bp, Glycine max
  unsure (1)..(381): unsure at all n locations
  Clone ID: PAT_MRT3847_35202C.1
nancaannagcanaacaaaacacgnaancagcacnaacaannaanncanacnncnaagnnncnccncanccncacantncancancaaacaaacnaccancnncaacannacaaacnaanaccnnncaanacaaanaactnaancncaaaccncannannannanaacacnnntancancananaaaaacacanacacaanaaannnaacnananacannacacaaaaacacanacacncanaaancaaannnnnanannnaaaaccacnanaacanaancannacnacananancnacaacancanaancacnaaaaaannaanacannaananaaaaaaanaaannnnananaacaccacanaaaaacaganacncnna

SEQ ID NO: 71087 - DNA, 1011 bp, Glycine max
  Clone ID: PAT_MRT3847_35203C.1
gacacgggacgtgattatgggatctgtagtcctgtgactccgaacaccctcctccctctatatatctatatccaaatctcccttcaattctcaatctctgaaaccacaattcacaaccgaaacagtttccatctctctcacaaaatgacaacaatatcaaattgctcccttctcttcctcttcctcttcctctccaccctccacatagcttccaccctctcaacccccaccaacttcatcaagtcctcctgcagcaccacccagtacccagccctctgcatccagtccctctccgtctacgcctccaccatccagcaagacccccacgagctcgtccagacagccctctccctctccctcaaccacaccgaggccaccaaaaccttcgtcgcaaaatgcaacaaattcagaggcctcaaaccgagagaatacgctgccttgaaggactgcgctgaagaaatcagtgacagcgtcgaccggctcagccggtcgctgaaggaactcaaattgtgtaaggtgaagggtgaggacttcacgtggcacatcagcaacgttgagacgtgggtgagttcggctttgaccgatgagagcacttgcggcgatgggttcgccgggaaggcgctgaatgggaagattaaggaggcgattagggctagaatggtcaatgttgctcaggttactagcaatgctctctcgcttattaatcagtatgctgcacaacactagggggagttgggaagaaagtttttgttttttgttttcgttttttcctttgaggggaaaaaaaaaaagaacaaacagttctatgtggttggttaatggttaattttgtgttttgtgtggtgtatgtaattgtgagtttttatagagatatggatcttgtgttgcttctgatcaaatgtgaaatatgagttctgtttttgtatgattttctttgttgctcttctctctacctttgattcagtaaagtaatgttccttagtccggacgaacacagttttctttgagcgt

SEQ ID NO: 71088 - DNA, 489 bp, Glycine max
  Clone ID: PAT_MRT3847_35204C.1
ttttcccattgaatttgagtagatttttttatttattcttaattgtaactgtaactcactttggttttatgcagaataatacaggtctcaagagattgagttgctggggaagaagagaggatcttgtggacaatggctagaagttagatacacacaaatatggagcagcagagttcaaaccaattaaacagcatactgatccgtttctcaaagttacagcaacaaaatactttaggtacactagtatgagcgatgcacttcattatgcagctttccaagaagaaaatagtagagtaacattccttccatgtatctaacacccctgatagcatatgccaaagcaaaggactcaagttctgccatttcttgtgatgttagtttgccagacaaagctaaaatgttttggttaaagttctgaatttaatttggtgggttggacacacaccttttccttggtgacaattgacaacctaggccgatgcaagcttt

SEQ ID NO: 71089 - DNA, 132 bp, Glycine max
  unsure (1)..(132): unsure at all n locations
  Clone ID: PAT_MRT3847_35205C.1
ggatcgagagtaacgtacaaaccagtttttctgtctgcactcttactacattancttacattacatacacacacaaacttcacttctgtcagaagagctaagacaatgtgtgagtttaaggcacacacattg

SEQ ID NO: 71090 - DNA, 225 bp, Glycine max
  Clone ID: PAT_MRT3847_35206C.1
aaaaacaatgggggtttggaggagcctaaaatttgatccatattaagggttcataataaagggtctgtctgtacaatttttttttattttcataacgggaatgcggggctaaacaaatttttccacaaaaaataaaaccatgtttttttaaacaggctccggctgggttggtttaaagtttgaaaagtttgtttgggaaatccactccccaaatgaaaaaagaaa

SEQ ID NO: 71091 - DNA, 128 bp, Glycine max
  Clone ID: PAT_MRT3847_35207C.1
ggctcgagcactaggacctgcatgcactgtatcttaagtgcacattgactgatgatgtggaggaatatgagctctcgagaagattgacacgtacatgtccacgtactcacgaagatggcatcaggaga

SEQ ID NO: 71092 - DNA, 648 bp, Glycine max
  unsure (1)..(648): unsure at all n locations
  Clone ID: PAT_MRT3847_35208C.1
ttctctagagcggccgctttttttttttttttttttttttttttttgtacgaatgttaatagtatatttataaaaaagataaaaagatattaatactatatatagttcagaaaagaaagataaactcaaaggaagataaaataatatatagttaaacaaaagaaaaagaacaaacaaaggagaaaaacgcacaagataaaagaaaacacaaaggatagataacacctaagtaccaattgatagaaccctaatttgcggatccaatttttagcatcaacaagcttggaaacctatttgaaatcctctgaaattgcaaaaaaataattaaaaaaaagcaagaattataaaaggagatagaaagaataacaccttaatcttgaaagattgataaattaaggatgattcgtcacaaagaataaaattatttgataaaaatctacggtttcacataagaatctcttaactgtgtttaatatgaaatttcataaaaaactatcaattaaggaatttatttataattcctactgtttaatcccaacttaggcccaataactaatctaataattaaaaaaaaatagcaataaaaagataatagcccattacaaatcccttctgcgtctnctcgcaaacgtacggacgcgtgggtcg

SEQ ID NO: 71093 - DNA, 232 bp, Glycine max
  Clone ID: PAT_MRT3847_35209C.1
aatcgtcgagtgttggtacccttttggttacattagctcatatatgagctcagaatcactcctcagccaaagctctttaagaggattgacaaacacagggattttatgaagatttcgcaggggataagatgaaccagtgttacacaactcatgtgtgctttggtgaatttgacttgtctgcctcggcctgtgcactttacaccttcaaaactggtttttgctgtgcgttgaa

SEQ ID NO: 71094 - DNA, 212 bp, Glycine max
  Clone ID: PAT_MRT3847_3520C.1
aggattacttatcgatgagttacaaagcgagttggggtgtggggacaaaaccttacggaatgcgtaatattgtacgcagattaagataatgtgcacgtaaagataatgtacgcagtttaatgtacacatatactagatattttgatgtaaccccagtgtggaagaataagaaaaagaaactgttgctcctgagggcgtagggacacttgtca

SEQ ID NO: 71095 - DNA, 354 bp, Glycine max
  unsure (1)..(354): unsure at all n locations
  Clone ID: PAT_MRT3847_35210C.1
ctccaccgacaacactcttttcttctcggcccctattcccctcanccgatgcgncctccaacgatttcctttcctcaaattctcgcgcgataagatatgtttttcgccttgtgaggttttggctaccgcgatggcgtccaaaggtcccaggtccaggattgatcacgagagcagagccaaacggcaganggctcttgaagctccaagggagcctcggcgacccaaaactcattgggaccatgtcttagaagagatggtttggctatcaaaggactttgagtcagagaggaatggaattagctcaggcaaaaaagtactttaagagcagcaaggatgttagatcagctacagagt

SEQ ID NO: 71096 - DNA, 423 bp, Glycine max
  unsure (1)..(423): unsure at all n locations
  Clone ID: PAT_MRT3847_35211C.1
agaggcacaaaaangacaaancanancccaaacccgacaaaggggaggcagaggcacgacaacgnaaaagggagagggcaaanctcacacaagcgangcgaaaaaaggccacancacaagcggctacgaaacaacaagaagggggaacatcccaagagaaaggngcagaaanagcngaaccaaagccccaagaaaaagggcaagagaccacgacagcaccacaaccgacaacaacnacgaaaggggaagaaccacaggaagagaagaaaagngcancaccaacacgcccggacggaaaggcacaacaaaaaaaggaaacgccngaagacacaccagcgcaaagccgggcaaaaccaaccaaggagcaaaagggncaagagggaagggcgccggaacccacaccaacaccaacaccaacaccaa

SEQ ID NO: 71097 - DNA, 281 bp, Glycine max
  Clone ID: PAT_MRT3847_35212C.1
cctcgtgccgaattcggcaggaggcctcgtgccgaattcgcacgaggggactgtgttcaatcgtttcctctcgggctggagtactggatttaaagtgaagatatgacgtgtaaatgtaaaggagttcaatttcggtgcacgagtccttcaaccaggataaattatttggagaataatttttttgaaaaaattaaaatgagatatgttggacatttttagtgtaattgatctctttattatcttaaaataagagtgtaacttgttttttattaaaaaaaaaa

SEQ ID NO: 71098 - DNA, 194 bp, Glycine max
  Clone ID: PAT_MRT3847_35213C.1
atgggaattgtaattaattgttctttatgaagtataatcagtttaaacaaaccagtgtaccacaaaaaaacaaccagcacctggttatcaagccttgccgtgttcccataccattacatacacacaaaccacataatagtttttttaattatcctggtcctcccggtgatggtgaacgaatgaactcttgggga

SEQ ID NO: 71099 - DNA, 914 bp, Glycine max
  Clone ID: PAT_MRT3847_35214C.1
cccctataaaagtattatgtggggccccataaaaaagaaattggttccgccacaccggggtcaaaaattgtgtctcttttaacgcgcgcccccccaatttttttttgttttttatattatttgtgtttttttgtctctttctagtattttttggttttttttttttttttttcttgtctattttttttttttttttttttttttttttttttttttttttttttttttttttttttttttttttttcaagctcaaaaaatttctttgatttgatatcaaatctcacatatctttaccaaaaccgaggttcaatatatcagaagcctatacacaatacagtaatcatcttattctttttcttttctcaccagggatgaagaacttacttttatgttctcaattctcataaagtggtgagttggagaccattcacaatcctctctgtgacatggagtataaatgtataatgcaatcaaccatacatacagtaatcactaacatgtacaagtatggtataattttgaataacctccgaaaggatgagatgttcagatgactgcagcagcattacaatgcatatactttcaatagggctaacacttaatgcgtcgaatgtgccttttttttcccaaagaacatcaaaacccatgggaaaaatgacttcttcttcttctttccagtttttgcatctgcggatgctacactgtttgaatgggaaaaagactttggagtggaaaagtaacgtgcaggaataggtccactacgagtttggccaatgctatttgcttccttgtgtctttcaaaactaacctcaggatttttactactctgcttcaccactcctctttggcctgattcaccggcatttcttcgctgttgctcgggttcagccctccattttcttagttcttgct

SEQ ID NO: 71100 - DNA, 223 bp, Glycine max
  Clone ID: PAT_MRT3847_35215C.1
gcttggtcttatgaccatggcctacctcatgcactgcgcagagcacatacatcctgggaccgccatgaacttttggatcccctttgagaccataacgaagccaaagaataaggactagaagcccagaatcaccgtgaagcccaacaagcctgcggtggttctggtccacggcttatgagccgaggggatcatgacgtggcagttacatgtaggcccacttacg

SEQ ID NO: 71101 - DNA, 368 bp, Glycine max
  Clone ID: PAT_MRT3847_35216C.1
tcgcccacgttttcgagccagcggagaagcacaagcgcggccactcgggaggcgggaccagagaagccccagcactctaccaagttcacgctatgcatgcccaacaccacagagcacagcaagggcgactctacacaccgacaccacgagaccacgcaagagcacgcgacaagctcctcaaacaagcgaaaagacagtcaaaaccaccccgggtgaaaaccaaactcaaactactgctgcaaccagaagcaagataccaagtgatcatcacactgcaaaaccacctgatcatgggggaaataaggaaccatcgagtggcaacaatcatacccaagtttctgatgaggataaagctgcaaagaagacaa

SEQ ID NO: 71102 - DNA, 562 bp, Glycine max
  Clone ID: PAT_MRT3847_35217C.1
tacagctgtgagaagacgacagaagggggcggctggggtacgactacagatcgggcctatgggttatatctttaagattaacatttcttctgtctgaatgtatacacagtctggagctgacgaagagaaccgcccatcagtgcacgcgtggtaccactactacgaagcagaatggcatcaatgagtggagaggcttctatcgctgctagagatggggtgagaaatgctccgttgtcatgctctctcagatggctacttacggaagacgagcgattaacaccgagagtccctatcgatccttaagggaccttccttctggatctggttcttaaacggctcagactcactgctaggctgtgggagccggacctcgcggagcttgctatgcagggactcgccgatgcccaccttgtgggtgctcttgatgacactgaggtgtgtggcggtcctgtaattccctttactactgtgcgagaggacattcctgtgccaccaccgattggtcgctagcgcgctgccactggtgggtgtgaccattaaaaagatgtgtgggtgtagctgt

SEQ ID NO: 71103 - DNA, 527 bp, Glycine max
  Clone ID: PAT_MRT3847_35218C.1
atgaatgcccggttattggattcgaacttggtgggaaacacagactagtcattggcttggtgctcctgcgctaatgaaccttcttattattgatctgagcccggcaacgcactggattcgatcaatccctccgtctgcattagcatggtgacgatcggaggaaaacggccgtgcagtaatagtagggagaggaatgcaacaaacatgctgctaagaagcatgacgaaaggggctggacagtcttctagtgagaagatgccaccgatcgcttagatgagctcgccagctgctgaaagctcgcctaatgatgggacaaggctggagcgacatacctgaggacggcctgtggtcattggacgctggaaagcatgcatgaggctggccaggcccatgtcaatgcggctcgttgctaccaagagactcatataatcgagtgtgtctcttgcttaaaccgcgctgtcaatctttgatgagacatgggaagactctctatggctgctagatgtctgaaggaaatagctgagtcg

SEQ ID NO: 71104 - DNA, 118 bp, Glycine max
  Clone ID: PAT_MRT3847_35219C.1
cagagtgccgacggtgaaatcgagatatacatccggaagtgttgttgggaaagtacaagatagatatgattgaggagatacaccccataagtggtttcttcagctccaattcaatctg

SEQ ID NO: 71105 - DNA, 341 bp, Glycine max
  Clone ID: PAT_MRT3847_3521C.1
ctcaaccctctcaaccacacaatcctcacgtatgtgcagagtctccccattgccatccacttaaccctcgcctacgttcagcaagacccatgggccacacagtatggtcccatcagcaggaactttatcattggccctggaccagaatgcatgccctactgtatcgaagtacacaatatgatcacatgcagtatgacgatggtcacatctcatcctgagaagtatccgagggatactgaatatctctggcttcggcaacttagtcacgatagcatcattaattgctccgtatctcacagaataggatcgatgcaggtcttcgatccatacgtcaatacagt

SEQ ID NO: 71106 - DNA, 537 bp, Glycine max
  Clone ID: PAT_MRT3847_35220C.1
cttgcctttaatcttgttgtgttcttcaagtttcggtcttagaaatcacagatcttgctttaatatatttcttgggtttgtgttccttttcttgagtcttagaaacatcagttccgaatttcattttgtaagccctatttcaagtttttccttggatatgaactgtgaatctgtgataccatattagaatttatgtgtgaaccatatcttagaatgttatagccaagtagcctgtttgttcaaagataccttgacactttggactcatggccctcttgctcttaactaactaacgtgggacatgttctccaacactccactagtttgttaatatataatggaattataaaattcgttctttattcttatttaactctccattcccttattttcttttcaaagcatatgtgatattgattttaattatttttgtttttatattttgaagaactgaaatggtgttcagatttggtcatccagagcactatctttgtggtctgtttagcacatttatcttttctctcttttcttacatat

SEQ ID NO: 71107 - DNA, 1880 bp, Glycine max
  Clone ID: PAT_MRT3847_35221C.1
cacaatacaattaagctcatcatactggtcctgaaattggtgaataaagttgttttgtggtggatgagtactgagtagtggtgccttattgtgggtggagagttccaaagggatcgcattgatctaattcttgtagatgtttacacttgcaagctttgcatgcaattcctggattcagatgttattcagtggttcacttattggatcatgcgatcccttaggaactttccatcaactctaaacatcttgttgatccatttgaggaattaatttcataggttcatataatggcgactgattcttctaatggtaatggacatcaccaaacaacaacaaagcaaccttctttgtcgtctacactgcgcttatccaaattttttcagtccaacatgagaatcttggttactggaggaggttaagcaagagtgggtagggttttgggctggtgtttttgtgaagcttgagatcaggaattaatttcagtggttcagagaatggcaacggattcttcaaatggtaatggacatcaccagacaacaacaaagcagcctcctttgccatctcccctgcgcttttccaaattttttcagtccaacatgagaatcttggttactggaggagctggattcattgggtctcacttagttgacagattgatggaaaatgaaaaaaatgaggtcattgttgctgacaactacttcactggatccaaggataacctcaaaaagtggattggtcatccaagatttgagcttatccgtcatgatgtcacggagcctttattgatcgaggttgatcagatctaccatcttgcatgccctgcctctcctattttctacaaatacaatccagtaaagacaataaagacaaatgtgattggcacactgaacatgcttgggctcgctaagcgagtaggagcaaggattctgcttacatcaacttcagaggtatatggggatcctcttgtgcatccccaacctgaaagttattggggcaatgttaaccctattggagttcgtagttgctatgatgaggggaaacgggtggctgagacattgatgtttgattaccataggcagcatggaattgaaatacgcattgcaagaatctttaacacatatggggcacgcatgaatattgatgatgggcgtgttgtcagcaacttcattgctcaagcactgcggggggaaccattgacagtccaatgtccgggaacacaaactcgaagtttctgttatgtctctgacctggttgatggccttatccgtctcatggaaggatcaaacaccggaccaatcaaccttggaaacccaggtgaatttacaatgactgaacttgctgagacagttaaagagcttattaatccaggtgtggagatcaagatggtggagaacactcctgatgacccccgacaaagaaaaccagacatcacaaaagcaaaggaattgttgggctgggagccaaaggtcaagttgcgtgatggtcttcctcgtatggaagaggatttccgtctgaggcttggagttggcaaaaagaattaacttgtttttcgctcctttggtgacatgttaaagtagaataataagtgagatgggtctggcccgttttcaaaattttcgtcattatagttattgttacgattatgatactgagaaagttggggggcctgaaatttggcatctacagctatcagattgctatatttgttgttttgtttagcaaaagactgcagcatgtcactacaaattttgctgtttgtaagacgattgaattgaaattctttcctttattctggttatcttttcaactttcctttgttaaagtgtctttgagaactgagcttgaggaattttaattacatagtccggaatcatcatgcc

SEQ ID NO: 71108 - DNA, 426 bp, Glycine max
  Clone ID: PAT_MRT3847_35222C.1
cttgggctcgctaagcgagtaggagcaaggattctgcttacatcaacttcagaggtatatggggatcctcttgtgcatccccaacctgaaagttattggggcaatgttaaccctattggtagattccttcatttcattctcaacttgctaaagcgcttataataaggaactatttctgtatctttttatacatattaataaagatgtagactgaggacttaaatatatgataatatcaggagttcgtagttgctatgatgaggggaaacgggtggctgagacattgatgtttgattaccataggcagcatggaattgaaatacgcattgcaagaatctttaacacatatggaccacgcatgaatattgatgatgggccgtgtgtcagcaacttcatttggtcaagcactggcggggggaaccattt

SEQ ID NO: 71109 - DNA, 439 bp, Glycine max
  unsure (1)..(439): unsure at all n locations
  Clone ID: PAT_MRT3847_35223C.1
ggaagaaagttgttttgtggtggatgagtactgagtagtggtgccttattgtgggtggagagttccaaagggatcgcattgatctaattcttgtagatgtttacacttgcaagctttgcatgcaattcctggattcagatgtgattcagtggttcacttattggatcatgcgatcccttaggaactttccatcaactctaaacatcttgttgatccatttgagccaaccataacttcaatgtcctgcagtctccactggcagatctcgatgattgccaagctcaataaaataagacaaattaatattattgaaattgtccatatcatatttcactttctatcgttaggttagtccataagctagaaatgagtaaaatatatagtttcacagcaatatcatctcttcattccattagagtggggaagaagtggngaaagg

SEQ ID NO: 71110 - DNA, 388 bp, Glycine max
  Clone ID: PAT_MRT3847_35224C.1
attcaaagcttgaagtgccagaaggccctcaattgccagaaagatgccgctttggagattcaacgctttataagggggcatttaactcggaatcagctattaggttccaagtcacacacagttactcctattagttgcatttcaagaccatttggctttcgtagttttcaactggaactattcttgttttcggttgtgaaattgcaacggtggtggaagggtctcttgttgcttaaactaaagaataaatcagccatcattattcagtcatgtacacgtgggtggatagctaggcgaaaggctactgttttcagacaccatgttgttatccaagaagatgctgcattggtgattcaacgctatattatggggcatttaattcgaaatc

SEQ ID NO: 71111 - DNA, 487 bp, Glycine max
  Clone ID: PAT_MRT3847_35225C.1
aaatcgccagtgacctgcttgtccactagcactttggggaacaagatcataattctcaacgaatgaaaagaaacactgggggaggaaacagtgctttacaatgaccgttcttaggccctgcctggaacggaaactagacctgaggggcggggaaaatccgtggactctgtccatatgtccctacggctatacttctgacttgcccctggtcattgaacaaaatatccttttcaggaacaagaaattctgcacggcaggtgggtattggaggggagtgatgggatgctcacacaaaccccctatagtgagccttacgatcctttctttgaagaagctctgtttttatgggaaattaggactggcggaaaattccaaaaggaaaaagcccgtgaccaaacccttctccaggctcaattctccgccctgaccaggtctcctcctgtatgagccggtggtgtgacactctgacaggggggcttgggccctc

SEQ ID NO: 71112 - DNA, 955 bp, Glycine max
  unsure (1)..(955): unsure at all n locations
  Clone ID: PAT_MRT3847_35226C.1
cttttatttccccaaattgtgatttcnttggatttnngtggggctgtggcctgtggatgcctaatcggttttcacttcacatcccggtgacgtcagcatcggtttctgcgtgcgcaaagtcgcttgcttttggtgcccccaaattcccatttgctattaacgtgatcctctctcaattccttttcagtaatcgaattagggttttcaaaaagtcttccctttttcccttcgtcctgtggttccgtgaatcccttcaacaacaatcaccctagcatgtgagttggtgatgagcggtaaaccctattccaaatgctgacttgcatttgaggtgtcttttcaaactacattctttctggaattcgataataggagattcttgaattaaggtgatcatagaatagaagcttatggagtcgtatttgtagcttctgagaattttggtttggagctgttggctaaaagaaggtgctccttcagaaagtggggtattttgcacatggctccaaatctgaggctaagattatgtgttcccttgttgtttttgttgttgagttttctcttgaattctaatgcggaattggatcatcaagtttcacataaggtcatagctgctcctcataaagatgtagggacaaatgtaattgatggcaccggtgtagagaatgcttttaattttgagaatgccaatagtgtggtgggtagtcggaagggtggaagcagtaaggtttcggtttcgacggttgcgttgtttactctggcgatggcagctgccactggcttaggtgccgtgccattcttctttgtggagcttgatccgcagtgggctggattatgcaatggaatggctgcaggtgtcatgttggctgcgagctttgatttgatccaagaagggcaggagtttggtgctggaaattgggttgcactgggattcttgctggtggaatctttatttggc

SEQ ID NO: 71113 - DNA, 955 bp, Glycine max
  Clone ID: PAT_MRT3847_35227C.1
cgtttctgtgcgatgcttcgccacggcgttccgttccgccactctaaaaacgctagtttctccataaggcagaaatcgagcggcggaagaaggccgaagaagaaaacgtaccacagagtgcccgaacttgacagagtaatggagctccgcaagaagccatccatgattctccacctcagctccctcatccaatcccaaccccaaaccctcttccctccgcgacctcgagaagcacgtgggcttcgtccgcaaatgggccttcatgggcctcatggagaagcatccctccctcttccgcgtcgccggcacgcccccttccgtctccctcacggcccgggccctccgcctggcccaagaggagacccatgcccgagcccaaatggagcccctcttggttactaacctgcggaagctgctcatgctctgcgtcgattgcagggtgccgctcgaaacggtggagcttcttgggcctgagttgggtctgccctccgattttaaggattgtttggttcccaagtacccgcagtttttcgcggttaggcggttccgtggaagggattcgcttgccttggaggattgggattccactttggcgctcactgctagagagtctaggttggcacaggaaggagttgtgaacctgaaggcagatggaaataggaggaaggtgaagatttcaagagatgggaactatcttggtccatttgcattcaaaatgaattttcctgcgggttttcggccaaatgttggttaccttgagcagcttgagaggtggcagaagttggagtttccttctccttatttgaatgcgaggaggttcgatgctgctgatccgaaagctcgaaaacgggctgtggcagtgattcatgagcttctcagcttgaccatggagaagaggatgacatctttacagctggatgcatttcatgcagagtgtctttttccatctaattta

SEQ ID NO: 71114 - DNA, 308 bp, Glycine max
  Clone ID: PAT_MRT3847_35228C.1
ttcttcaacgacctctttatgggacgggggatcccagctcagcgcaacggtgctggctatgccttaaaatgcctcacacaccaacaaaaaggcccttgcccgctgcagagcctgcatatgcgagagcgcaacgggtacctgaaaggtggcgccactgacgacatccaccatcctggccgtggagcagatcactgttaccaaggcttatggcgcccattgaaatactagaaacagaacaagctcttcatgaacgattacattgtctacatcggcaactggatatactgcgtacagaattccatcctaat

SEQ ID NO: 71115 - DNA, 605 bp, Glycine max
  Clone ID: PAT_MRT3847_35229C.1
ttgccgctgctacatcgttggagtgccgccttgcttgggggggggggggggcgtgttgcgttttaggtgttgtttgggtttgctgttgagtgggggtgctagtttggtgagattgtgtatcctgttgggtatcggttgggttttggggcgcggtttatgtaagtgtgggattttgctgacgggttgtggcgggtggggtgtgcgctaacgtgtgagttatagtgtgagtttgatgttgagtgtgagtttgccttgtgtcaggcgcagagtgccgatgcgaggtttggtgagtagtgattatatgcttagcattagctgtttggttatcgatttgtatgtgggttgtagtagccctagacgtacactcttggtgtggccaagcactagaggtagtgagcagatgatcacactcacattgcgtgtgacgagcattaaggcagtggcagtcatggtgagagtgattagcacaaccacaatggctgcataggtgagaggggtttttggtatgggtacaccagcaaggttgaggcgaagcgctgggttgtataggacttgttacgcgggtagtagtaaacgtgttggagaccggtgtaagatgggaaaag

SEQ ID NO: 71116 - DNA, 219 bp, Glycine max
  Clone ID: PAT_MRT3847_3522C.1
cgggaggatagtgagactgcatatggggttacatatggttaggatgtgattaatctaactgattcatatttcatataataaattcctcgtccacctgaataatatctgggtcattgttgacttgtggagtatcctggacatgtggagaatatttaacctgtaaatcctgcatattaaattaatacatgatgtctcatatgatctgattcttgcataata

SEQ ID NO: 71117 - DNA, 1395 bp, Glycine max
  Clone ID: PAT_MRT3847_35230C.1
ggtacgacctgcaggtatctcggtccgccggttcccgcggtcgacccacgcgtccgaaaaaccctttcgcttattttattatcgttttcctttctcccgagtgttctcctttcttgcttccttctccggccatctttatcctgatggcgtcgtctctgggaattgcttgcggtggaaacaacgccaaattagggatcccaaagcagcggtgtggttcggttcttcagccgccgtgctccctcgctatggggcgctcgacggcgagggtggggaggatcacggcggcgatggccacggccacggcggtgatgaccacggccacggcgaaggagcaagagactaccactccgatgatgatggcaatggagctgttcgggaaacgcgatggaggagccaaaaacgacgctgttgagggacaggagaggctggacaggtggatgagagagtcggtggtggagatcgtgaagaatttgaaagaagcgcctctgctggtgcaggtttttcccaaatcggcgacgatgacgacggagaagaggatggtggtggaggactggccggcggtaaaggagcgctgggaatccggtgagacgccggtgccggagggagtcatattcgtggaggagttggacggagacacggcggaggatggcggcggagagaggacgacgagggcgtggggggtggtggttcaggggaagggcgtcgggtgcggcccggtttgttatcttttaaagaccgttcgggtcgggtcaggacccggttcgggaatggggatttgttcgacccatttttgtttggtgaaagtgaaggacttcagggaaacggtgcagtcgcagctaaaaaattgttggcttttgcagagccagtgccagtggaataactataaatgaatcaatgaaaatattcaatattgtacatttttttctcattgagtaatttttttttggtgccacggttgttgcaattattatagccaatagattttcgactgtgaaaatgtacagagtgaaataccttttaagggaagttcgtcttcttcaaactgtcaaatattattattattttgcattactatcaatcaaggctgccttgccccgtttcttgaagggtttacttttattgaattttattatttggtcttcatttgatcacaagtaatgaaggggttcttactagtgtatgcattttttggtgctacctgtagctagttgatcttattttatttatcattgtttggttcatttaatcattcggttaattcaagattgaatagatgttgttccatggtagtgcaatgatagtattgctagggctctgtacacacactacagagtgaatatatgatcatgtgattttgttcttcatttgatcacaactaatgaaggagtttttgtt

SEQ ID NO: 71118 - DNA, 303 bp, Glycine max
  Clone ID: PAT_MRT3847_35231C.1
cgggccccgccccggaataaacctctggggcgacgagtcattaccggggggcgccccttttttttgggggtttttagaaccaacagagattttaacacgcaacaatcatcaccatacaatagtctaacaaatacaggccacgcaagtaaatacagatgctacacacaggcacacacacatatatatacacacagatttagatcctatcatgaactccaatatcaagacatgggctcggtaaagaaagataatacatatatatatacatatatatacatatatctatatatatacatatatatc

SEQ ID NO: 71119 - DNA, 1970 bp, Glycine max
  Clone ID: PAT_MRT3847_35232C.1
tgttgatttgagtcccatattgtttgtttttcgatggctaaattgttcagagcgtttttcttcaagtctcttttcttcttttggtaccgttttctctttaggcaactcaggaacctcgtccgtttccacagaaccattagcaattctttttcgggtgcaacaacacagtttaacaaatacctgaaattcccctctctaatccaccgatcagacctcaacgatcacacgttgatctttgatgtcgaaaacgcgttgttgaaatcctcttctttgttcccatatttcatgctcgtggcctttgaggcaggggggcttataagagccatagttttggttcttctatacccttttgtttgtgtgctgggaaaagagatgggcttgaagataatggtcatggcatgcttctttgggatcaaagcttcgagcttcagagttggaaggtccgttctgccgaaattcttcttggaggacgttggtgcagaaatgtttgaggctctcaaaaaaggagggaagacagtgggagtcaccaatctaccccatgtgatggtggaaagcttcttgagagagtatttggacattgatttcgttgtgggcagggagctgaaagttttctgtggatactacgtaggattgatggatgacacaaaaactatgcatgccttggagctggttaaagaaggaaaaggatgctccgacatgatcggaatcacaaggtttcgcaacatacgcgaccatgatgattttttctctcattgcaaggaagtgtacgtggtgtcagaagcagacaagaggagctggcaaaagctagcaagggagagataccccagagcccttatatttcacgatggaagattggccctaagacccactccaaaggagtccatagcgatgttcatgtggctaccgtatgcaataatcctcgctgttattcgcatttccctcgctctctcactcccatttaccatctcaaccccctttttggtctttagtgggatacgtctcacgaccacagcatcatcagcgcccacaggctcccacaacattaaacagaacaaggggaatgtcggtaatctctacgtgtgtaaccacagaacattattagacccgctctacatctcattctcgctacagaacaacttaaccgccgtgacctacagtttgagtaggatgtccgagatcctggccccaataaaaacggtgcggttaaccagaaaacgcgacgaggatgccaaaatgatgaaaaatttgctggggcaaggggacctagtggtttgtcctgaagggaccacatgtagagtccggtatttattgaggttcagccctcttttctcagagatgtgcgatgagattgtacccgttgcagttgacacccacgttagtatgttccacggaaccactgctggtggacttaagtgcttggacccgttcttcttcctcatgaaccccgctccagtttacactgttcggcttctcaaccatgtcttcactaattcacaattactatcatctcacaccagtaacctttaccaagaggctcataattcgaggtttcaagtggctaatagggtccaaacacagattggaaccgcgttggcgtttgagtgcactaaactcacacgaaaggacaagtacttgatgttagctggtaatgaaggcattgttaattccaacaccaaatgcataagcaagtccaactcttagtggatcgatcgagatcgagagctagtacgttaccctttgtaaagtcgccaacaaccatgttagctgtgtcgtaaatgaccaattacatatacaggatccatgataaagatagaatgccaatcaaggggacctcagtaaattaaaattaattaaattcgtcctattcctttctcttgattgttattatttcaaactttgtaataattccttgtgtggtacaaaagcaattttaattctcatctatatatagtccttcttattatgcaatt

SEQ ID NO: 71120 - DNA, 525 bp, Glycine max
  Clone ID: PAT_MRT3847_35233C.1
gcttacaatttgttgaaacaattgtacatattgaatgaaggaccttttggaactcaattgaataaatattgaaagaaaaacaatttgggcaaaaaaatagcttctttaaattccttagagcacgtgttggggatcttaaaatggcaagcacattgcccgggacaaaagctaattctcttggggctggggggctaacataaacgggaaggggcaccatctacatgcaaaggcaaggacagaatggacctgcaaagcaacggcttaaaaaaaaagccttagggcacgcgcttttttgaaattcaaaaacgcacaatgttcttggtcgggaaaaagggtgattttcttggggcggcccggcttacatacacgggaaaggcaccatctactacaggctttggatgcaacgacaggggcagggacccaataacatggtagcacaacagatctaaaaaaagtattgggccctgacatgcatgccccgccttgaaagaaaaaacaccctggcaccaaaaaaactcataaaag

SEQ ID NO: 71121 - DNA, 476 bp, Glycine max
  Clone ID: PAT_MRT3847_35234C.1
ttcacgcgtccggaaagcgcgaggagggtaagtgagcgtgtgtgtgaagactacgatcattctcacactcactttctctgtcccctcttcttcgtcgtctccgttctcttttatccgcttctatttttccaattttgccctccgctttttccccatttcccaattttgccctcttcttctaccatgacctacttgaagtcgtagctcgagtccgtgttcgcttttccaattcccaatttcccaaactccgtagggtttccgtcgaataatggaacctcgagttgggaacaagctccgcctcggtcggaaaatcggtagcggatctttcggtgagatctatctcggaactaatattcacacaaatgaagaggttgcggttcagcttgaaagtgtcaaaaccaagcatcctcaattgttgtacgaatcaaagctgtgttcaatactgccaggacggaatgggattccaaatgtgaaat

SEQ ID NO: 71122 - DNA, 170 bp, Glycine max
  Clone ID: PAT_MRT3847_35235C.1
ttcgctcatacggggactcaatttcttgtcagagtgttctattttctttgagtaaccctagacttacttgcaccctttgaaacccaatcccaaattcaagtgacttactgggactagatcgtatcgcttcctgttaaggtgtccacagcagaaatattaccattctctgt

SEQ ID NO: 71123 - DNA, 288 bp, Glycine max
  Clone ID: PAT_MRT3847_35236C.1
agcccgtgcctctgcttgcttagcccgtcgtggcgcgctacctttgcttttccaaaggttctaacttcctccatctctctgatgcattattcggggggcatctccatctattttgttttttctgcgggctttctgttgcgggcagcggcccttggtgattcatggctggcaccctaagggcgcagtggctgacttcttccggccccatggttggtgggcttgttttttatccctccttcttcgggtttttcgtgcctgtgtattacccgggtgcctttcctgtcactc

SEQ ID NO: 71124 - DNA, 917 bp, Glycine max
  Clone ID: PAT_MRT3847_35237C.1
ggcaggagggtatccacatctggggcaaaggtggcaaggacaagaacactgccattctttggcatggtaccgtccacgctcgcgaatgggtcaccaccatgaccgtcgaatacctagcctaccaactcatcgccggctacggcaaagactccaacgtcacttccttcgtcgacaactacgacttctacctcatccccgtcgtcaaccccgacggcttcgtctattcccaaacccaagaccgcctctggcgcaaaaaccgtgccccgcccctccccggcgccaacacctcgcacccctgctggggcgtcgacctcaaccgcaactggccgcacgaatggtccggtgtcggctcctccaacaactcctgcacgcagacctaccgcgggcccagccccggctccgagcccgagatgagcggcatgcagcacttcgcggacaagctcgcggactcgcacggtctcaagctcttcattgactggcacagctacagtcagcttatactgagtccgtacgggtatagctgtgaggttgtgccggagacgaatgcggagcatgtggagcttatgggtgccaccgctgatgcaatcgagtctgtctacggcaccaagtatacgactgggccgacttgtcagactatttacgctacgaacggcggcagttctgattacgtttatgacatttcgggcgcggagtggagtctggcattcgagttgagggacacggggacttatgggtttattttgccgccggagcagatcctgccgaattgcgaggaagtgtgggcgggtatccaggttatgttgtcgttgatctgatctgaagattagagaaatggaagtggagaacaccagcaagagtggttggatgagcatgtagtacgtacgcactcgatcgatcgaatggcatcccccaatcct

SEQ ID NO: 71125 - DNA, 306 bp, Glycine max
  Clone ID: PAT_MRT3847_35238C.1
gaagggaagcaagatacacccacccattacgcgaaaagcatttgactgtggatgacagagcaaagcggtggcccatacacaaacgaaacagctaagtgccaaaaaacgcccagagcgaacaaaaacagcgcaaacgaaagagggtggcaaaaacctggttaggggggggggacacccaacaataaggggggcggataaaaaacgcccccttcggggggaggggggcgagaacaatattgacgaaaaaacccaaaacaaaatacaccagggctgggctctaaacaaggcagcagtgcaacgcccatc

SEQ ID NO: 71126 - DNA, 213 bp, Glycine max
  Clone ID: PAT_MRT3847_35239C.1
tttttaacaaaaatcgaaagcatacattattgctgcagtttaataataatacaaggtgtaaaataaattcttactcgtatatatacataaacttaatgaacaaataaataaatattaatttatatatctctttttaagtattttaagtaaatatagtaatttccattactacacactctcaaaataaacccttgacttagttgtatggacctt

SEQ ID NO: 71127 - DNA, 444 bp, Glycine max
  Clone ID: PAT_MRT3847_3523C.1
tggagcagggcaagtggattcataattacatagatgaaaacagaatcaaggtggatgctgtggttggtactgcccttattgaaatgtatgctaaatgtggttgcatagagaaatctttcgaaatttttaatggattgaaggaaaaggatactacctcatggacttcaattatttgtgggctggccatgaatggtaaaccaagtgaagcacttgaattgtttaaagcaatgcaaacatgtgggttaaaacctgatgatattacttttgttgctgttttaagtgcttgtagtcatgcaggattggttgaagaaggccgcaagttatttcattccatgtcaagtatgtatcacattgagccaaatttagagcactatgggtgtttcattgaccttcttggcgagccggacttttacaagaggcagaggagttggtgaagaagtacca

SEQ ID NO: 71128 - DNA, 844 bp, Glycine max
  unsure (1)..(844): unsure at all n locations
  Clone ID: PAT_MRT3847_35240C.1
cgtatnngtactggatannaatactgtacccatattaatgcaacatgactgaaggatcannnnnnnngtgttaacattgcagctagatgtggcccagtccggacggaccttcacggtcccgcgtgttagtgctgcccttgtccaggtcggtcgttcacccagcatgatctgagacgaatcctgttggattgggttgtagcttcttcttcgtccgccgcgaaatggaggcgtcgcgtctgccgtgttccaatggtggggatcgcttggctgctgttttttgcctttctggctgacctgtgcgggcttcccgtcactgtgcagatagcagcatctactctggttgagaaaaaagaagcttcaaagctgctatacaagttatggaaggacaactacttgtatatggagaaagtaggtgcaacggcgggagccaagcaaataactattttgatgtggaaagtgaataagcctctactttgggaatatgtactggacgagatgtaccatgctgccttaaatttgagcctaagaatggcttttgagcaggaaaaggatgaagagcttttaaaggttcctaaagacaagcgtcaggggccagggccactgcagaagaaatacaaacggctactaaatgtctggttactcctgggatcatcattgatgaaactcgatgatgctctgatgcttttccatgacttttgaatataaattttgggacactcgttatgattttttttccattaatagaatgacttatattttaataatcgaaaaaggtactacgaatgccatggcagtgttcatgataattcagtgtaaggaattcgatctaattggcatgcaaaaa

SEQ ID NO: 71129 - DNA, 382 bp, Glycine max
  Clone ID: PAT_MRT3847_35241C.1
gcgctaaggagcgcttcatcaagaacatctctggtcatatggagactgtgaccgacaaggagattatcaagcgccagattgctatcttcagggaggtgtctgaagacattgcttcacgcatggagaaggcgactggtgttcaagggtaccctggtatctccggtctccgattcaatggaacacacaacggcatggctaagtctaaggacaacaaggtcgcgaacggtatgactggcatcagcgcaaagtacgctgagaagaacaagaccaatggtgctcccaaagctggtacgcacaaggagctcattgaaagtcagtgagcatggtgcggagttgaaacaatttctgtataattagcgaacaaatcttaatgtatgatttc

SEQ ID NO: 71130 - DNA, 354 bp, Glycine max
  Clone ID: PAT_MRT3847_35242C.1
ggctcgagctcccgttttttattccttgacttctgttcgcactaaactctctgatgatcaacataggatcgatcaattaatcaatcctttctgtagcagcactccattaacaaacgaataatcaagatacttcaatacggtgagcttctcagaaatctctgcaggagagcgctcttcaccagcacatcctagagcttagattaagtctcagcgatataaggaccatcatgcctatgagtgtaaagaggacaacactggctataaacagcatctccatcctgagcagccagagagatgtcaacagtatggtgaacaaactctacagctacgagatagcagagcccgataccattg

SEQ ID NO: 71131 - DNA, 438 bp, Glycine max
  Clone ID: PAT_MRT3847_35243C.1
tgttcaggaatctagccagaaaagaaggcggcttttagggtgggagaacataagatatctctcaccatggaaaactacttttacaccgttagatatatcaattttttaaatgaatggctgggatgttttgttatttttcctttttttcttcattgttcccgatctatccctggtgaaaccctaacgcccccaactctctcaccgttgagcatctcctttctctctcgtgccacttccgtcgcgactgcggcaacgacaccagcgaaaccctcacccatgtgacactgcgccgcaactgcaatctcgtcttgtttcctgcatacaacaagatcgacagcaaactaaccatggccgccgccgtcgccgccagcgatgaaggacgacggggtcttctacaagttgacggtggttctgacagtgatgtgcggcggtacgaca

SEQ ID NO: 71132 - DNA, 358 bp, Glycine max
  unsure (1)..(358): unsure at all n locations
  Clone ID: PAT_MRT3847_35244C.1
gacccacgcgnncggccacgcggccgcccacgcgnacgcngaagggnanagccgaaaacctttcagaagaagaaaggaacggcncgaaagagagggncaaanccanggacacagacaacagnggaacaancacaancgaagaggggaaagccggncgcccaaaanngggaacgaaacnanccgaagcagaagcaaggcaganganggaagcggccgacgcaganggaaacggaaccanngaanacanggaaggaagaaccgcgaccacgcacangaanagaanggaaagagaggancaccgananaaagccnnngaacangncgacaanngaaagagcggggacancacaaaggaaga

SEQ ID NO: 71133 - DNA, 1190 bp, Glycine max
  unsure (1)..(1190): unsure at all n locations
  Clone ID: PAT_MRT3847_35245C.1
aattcctatttttattttggtctcttctctttctgatcggcgattgtcggaagctcctattcatcgccgccaccttgcgccgaatcggacccacttcggatccgagggccacccgaatccttccttcacagtttttgtttttccagagcaaaggcttcacctttaccatttaccacacaccactgtgtccatacaaattgggttttgtgttttcccgtttttagcgaagtgagattcacacccaattttgcttcatctcgcaactacacgtggcgatcttgctcttcttcaactccccattatcgtctccaatctcaacatggaaacgaggttatgtatgatattggaaaagatgttgggctggtcgtagtttctgtttcaagagttcagttgtgaagtgatcttttgttcctacatggaagcaaacaaggaggaagcacttaaagcgatagagattgctgaaaagcgctttgctctgagagactttgccggtgcaaaaaactatgctgtaaaggctaaaacgctctgtccaggattggagggtatatctcaaatggtggccacatttgaagtttacattgcttctgaggtcaaacataatggtgagctagattactattcgattcttggattaaaaccttttgcagataaggaggctgtaaagaaacagtacaagaagttggcggtgttgcttcacccagataagaacaaatgtgtgggagctgatgaggcatttaagcttatttctgaggcttggacttggctatcagatagtgctatgcgcagttcttatgatctcaagagaaatgtgcagttgggtgggactaaccagacgaatttgtctcctgcccatgctacaggggccgcaggttataacaagtgttccaatttgtcaaccccttgtggtgggcttgacaccttttggacaatctgcacctcttgtaaggttcagtatgagtatctgcgcaagtatgtgaataaaagactctcttgtaagaactgtcgtggcacttttgttgctgttgaaactggggcggccccacaaatggttcgtttccatattcttggtcatatgtagcaaatgggtatgggagtcacggtggggctgtgatnnnnnnnnnnnnnnnnnnnnnnnnnnnnnnnnnnnnnnnnnnnnnnnnnnnnnnnnnnnnnnnnnnnnnnnnnnnnnn

SEQ ID NO: 71134 - DNA, 389 bp, Glycine max
  Clone ID: PAT_MRT3847_35246C.1
agccttgaatgagatttggaataacgctcttgacgtctattagtttttccatattccaagccgcaggctatgaaacttatgggaccgaaacctccaactttcctgttcctttgggtgggggggagtacctggattcatggtaaagccgaaaatgatcctttaaagcccggtgaatcactgaatttttcaaaatcacttatttctaaaagccgccaatattccaccattatttttcctattcttgaagaagattaatattacttaaggatacagtccaaaaaataaaattttgaatggggtcgaattaaaaaaccctttaacaaggattatgaatttttattcattaacacccttggcgtgcctaaaataaaattctcattcgggaaaaa

SEQ ID NO: 71135 - DNA, 349 bp, Glycine max
  Clone ID: PAT_MRT3847_35247C.1
gtcttttcgaagcgggggctatgggtggctatgctgaagctccccattcaaatcgtgtgctcagcccaagaccaatgtacctaagagctctcaacttttatgactgcgtgagagtgagtgctacctagaattgtgtggcagaccgagtgtgccaaaaggagtatgagaccttagctagaggagactcgctagacgtacggctcgagcttgctaggatggtatatgatacctgatatccaatacacccaggcgaagatcacttgagagagagcactgtattgtcaagaggctcgttggaagttttatgcaaagacgtgacaaaattgatgctggagtaggcattctatca

SEQ ID NO: 71136 - DNA, 121 bp, Glycine max
  Clone ID: PAT_MRT3847_35248C.1
gcagacgacagaaggcggcagacacagttgatgacgaagttgcgcgagatcaaagctgaatgatctttgatggagtcatgtgatagctcgcacgtaggcagtgttagttgatgctgatgta

SEQ ID NO: 71137 - DNA, 355 bp, Glycine max
  Clone ID: PAT_MRT3847_35249C.1
ctcacttcacaattagcccacacactgtcgaataggttaatgtttgtgggctaattgtgaagtgagcactcgcggtagtttatgcactaattcgcggccttctgccaattctcccttcttcattaacttcaaactggttcccaacatgttacccagaaaacgcgattacagactttgctaccacctgtagcagcattatccaagcccctaatcgattgttgttgtgacttgttccaaccctaccatgctccatatttttgagaactttaaattgaccgttggtcaattatttaaaccagttctgggtgccaataatgcactgattaagatgcaggttccaccaaatcttattact

SEQ ID NO: 71138 - DNA, 196 bp, Glycine max
  Clone ID: PAT_MRT3847_3524C.1
gttacgcgtccgctcaacgaatctgttggacaccgtaaccatgtgaatgggatcatcattcccttacaccgacctgtgccactaccgtagcgaccatgatagtatatcctgcttcaaacgcacatacataaaatgcgccacccaacaccatacccatgaccggacgctcacccactccctagatcgagagttcaac

SEQ ID NO: 71139 - DNA, 426 bp, Glycine max
  Clone ID: PAT_MRT3847_35250C.1
tactgctgcgagaagacgacagaagggatccgtatgtttaaattatacttacggatcaagtttatccatacaaatcatacagatcaatgacgaactcccgtaccttcaatgtaggataattttggaattaatgaaaaatgttgggcgcacaagcaatagagctggtgcacctagcatcactagataacaaaagacaatcttgaatcaaaccatcaaaataactaaatagagctggacattgcgagtttttgtttttttgggttttaaatttaattttaaaagtaaaatgtgtttgaccaaaatgaaacttaaatcatttcaaaaaaaaagtttgaaacattttacacttatttttaaaacaaaaaaaaagattttattaatttggttttaatttaaaaaaaactcaaatttctcacatttaacaat

SEQ ID NO: 71140 - DNA, 249 bp, Glycine max
  unsure (1)..(249): unsure at all n locations
  Clone ID: PAT_MRT3847_35251C.1
ccacgcgtccgcccacgcgttcgcccacgcgtccgaaaaaaaataggttggtgagagagacccatatgaatggtcggggagagatcctaattttgtaagccgtgcagagagagatttgttctctcataggttagagtntcctcgatcggtcaaaagaacacgtaaagttaacttattcaagccactcccaacacaacacaaaccgtgtgttaaccatcgtatagatggtgtgaacccctaaaccctaat

SEQ ID NO: 71141 - DNA, 412 bp, Glycine max
  Clone ID: PAT_MRT3847_35252C.1
cccacgcgtccgccaacgcgtccggggggattttaattcgccgattttaaaagatgagtaggtttaaaagggatgcttggggggaagccatttaaggaataatggccgtttccagggggaagaatcgcaaattgggggggaccatcgaactccaaatggggtggaaaaactccgatccacaaagggccaggcgtttaaggggttttgtaaggttgcccaacatccttggcccaaggaggaaaattggcatgctgggggatgctcaccatgttgaaaaggcggggaaaataggactggactggttggatgtggaagccctgaaaaggttaaccaaaattaagaggttggggaggaaactggctaaaagagcccatgcctttttagcttttgaagcagtcattaagcaaattcc

SEQ ID NO: 71142 - DNA, 421 bp, Glycine max
  Clone ID: PAT_MRT3847_35253C.1
gccagacttaaaatggcgttcttagactaagaacagtcaccctgccctgtgtagagagagcatttccagaaccgcacatcagcactgtattatatattgcgctgatggatcaagacaggattctcccactcaaataagaatgggaatacatctcatcagtataaaaactgaagagcctctggaagacggagaaaatgactgtcttacatatgggccatcgtccaagcaaggttggcgtgcagcactagaagatgctcatgctgcagatactgcactggatgagaccacttgaaacatgggtgtctatcatgggaatgcaagccaggaaggatggaaggaaagagccatgtttaacaatgaccaggagcagcagggggagccagactcctctgggggtattggcacagacctggatgatgcc

SEQ ID NO: 71143 - DNA, 488 bp, Glycine max
  Clone ID: PAT_MRT3847_35254C.1
atctcctctgcgtgcagttacttcttctctttgcacagtctcttacctcccttgttactatctgtttcatgactcatagccacagggattacctgacccctggaggtgtatagttctcgacgcgtatgctgtgactatgaggctcatatctagcccctggtgggaattcgcgaggcgacgacgatgtctcatcttcatcctgaggcggctctatgatggtcgcacactcgccgagtagtagatctagaaggcttcaacccttcatgttgcccttcgactccgcgatggtatgcagatcttcgtccagactctcactggttgaagcataaccctagaggtcgaaagctctgacaccattgacaacgtcaaggccaagatccaggacaaggagggaatccccccagaccagcaacgtctcatcttcgccggaaagcaacttgaggacgttcgcaccctcgccgactacaacatccagaaggactcaaccc

SEQ ID NO: 71144 - DNA, 375 bp, Glycine max
  Clone ID: PAT_MRT3847_35255C.1
aaagcttattatggtgggtgttcattaggaaattacgcctgtattttattatattataaagtactaacgcatataaatttagatatttacttaaaatggttattttcactgaaagccacctaataaagagttccttgtagttggtgaatgcagagatcgagaattagattcatcctattgggagttacctttctcccaccgagtgttcgcaatattaaataaacaagtgctaagaaaatgaaataagtactgatgtaattctgtcaaaaacaaagagctcatgtaatattgctaactaaaaagatttatcttatggtacgtttggaagatatgaaagcgagtgaaagaaaaaataaaaaaaactttttttttggt

SEQ ID NO: 71145 - DNA, 420 bp, Glycine max
  Clone ID: PAT_MRT3847_35256C.1
atggtggggacatggctttttttccaagttaaggcaatatgcaacgcaagaaaagctataaaagtgtttcaaaggcatactgctccaatcatcgaagttagcttctcctcagttctccccaaatctccctcctcaccttcatgttcactctttcaatctcttttcacccccggatcaactttcatcataacagctaagtggcaacttcacagggtaaaagcacaaacacggttgatccaaaaaaaatataaacaaggatataaggacagaaaggagcccttaaaattatatcaatggtgtccaacagtgaaagattgtggatcagatattgacatggggatgagcaaaaactcgtgtcacacgtccactggttgttttaaaatgcagggagatatttcaatagcttccaagataacctag

SEQ ID NO: 71146 - DNA, 157 bp, Glycine max
  unsure (1)..(157): unsure at all n locations
  Clone ID: PAT_MRT3847_35257C.1
attcagagcttgaagtgccaanaatgccgctcaattgccagaaanatgccgcttgtggagattcancgctttataagggggcatntaactcngaatcagctantanggtccaagtcanacnnagtnactcctattngtgggatttcggtacccattt

SEQ ID NO: 71147 - DNA, 3148 bp, Glycine max
  Clone ID: PAT_MRT3847_35258C.1
ggctcgagattcatttgattgtatcagacaatcggtgatcaaaactttcctaaaaaattcctcatggtgttcacatttccaactcttctgtccatgaagctccaaccactttcgctgcttcttgtgatgtacttctgtgcatttgctacttcttctgagattgcttcagaagcaaatgctttgttgaaatggaaagccagccttgacaaccacagtcaagcttctctctcttcatggattggcaataatccttgcaattggcttggaattgcatgcgatgtgtccagttctgtttccaacataaatctcacacgtgttggattaagaggtacgcttcaaagtcttaacttctcattacttccaaacatcctcattctgaatatgagttacaactccctgtctggaagtattcctcctcaaattgatgccttgtccaatctcaacactcttgatttgtccactaataaactctctggtagcattcccaataccattggtaatttgtccaaactacaatatcttaatcttagtgccaatggtctatctgggcctgttccttgtgaagtgggaaatctcaagtctcttctcacattcgatatatttaccaacaacctctctggaccaattccacctttattgggtaacttaccccatttgcaatccattcatatttttgaaaatcaactctctgggtccattccttccactctaggaaatttgtccaagctcactatgttatctttatcatcaaacaaactcaccgggaccattcctccctctattgggaatttaacaaatgctaaagtgatatgttttattggaaatgatcttagtggagagattccaatagaattggagaagcttactgggttggaatgtttgcagctagctgataaaaattttataggccaaatacctcagaatgtttgtctcggtggaaacttgaaattctacactgctggtaataacaatttcactgtctaaaaaccaaaaagtttgaggaagtgctacagcctttaaagaatcaggcatcagcaaaaacttctatctggggatataacagatttttttgatgtacttccaaacttgaactacatcgatttgagtgataatagttttcatggtcaagtttcacctaagtggggaaagttccatagcctcacaagcctcatgatctccaacaataatttgtcagggcttatcgcaccagaaatagctggagcgttgaacttatgtgtatttcatctattctccaaccctcttacaggaaccgtattgatggaaaaattggactaacgtctccctcatccaacaaagcccattgataaggatgtggcatcaattgcaaacatagcaatagcctgccttcactgaaagtccacgatctcgccctaccatggagcatgttgccaatgagctcgtaatgtcatggagctcatcttcaatggattagctctagatctgagccagaatagatttgagggaaatattcctttagagattggcaatttggattatcttacaagtcttgatctgagtggaaatttgttgagtggaacaataccaccaacgcttggaggaatacaacacttagaaagattgaatctctcacacaatagtctttcaggtggtctctctagcttggaaggtatgataagtttgacatcttttgatgtatcatacaaccagtttgagggtccacttcctaacattctagccttccaaaatactacaattgatacattgagaaataataaaggcttgtgtggcaatgtcagtggcttgacgccttgcacattattaagtgggaagaaatctcacaatcatgtgactaagaaagtcttgatatcagttttaccccttagtttggccattctgatgcttgcattatttgttttcggagtctggtatcatttacgccaaaattcaaagaaaaaacaagaccaggctacagatttactatctcccaggagtccaagcttattgttgccaatgtggagttttggtggtaaaatgatgtttgagaatattattgaagccacagaatattttgacgacaaatatctcattggggttggagggcaaggacgtgtttacaaagccttgttgcctactggtgaactcgttgctgtgaagaaactccactcaattccagatggagaaatgctcaatcagaaagctttcacaagtgagatccaagctttgacagaaatccgacatcgtaacattgtaaagttacatgggttttgttcacattcacaatactcatttttggtgtgtgaattcctggagaagggcgatgtcaagaagattttaaaggatgatgaacaagcaattgcattagattggaataaaagggtggatattgttaaaggtgtagcaaatgctttatgctatatgcaccatgattgctcacctccaatcgttcatcgtgatatttcaagcaagaacgttcttttggattccgatgatgtagctcatgtcgcagacttcggaacagctaagtttcttaatccagattcatccaattggacctcatttgcaggaacctatggatatgctgctcctgaacttgcatacacaatggaagcaaatgagaaatgtgatgtgtatagttttggggtctttgcgttggaaatattgtttggagagcaccctggtgatgttacatcttctctattgctatcatcttcgtccactatgacctcaacacttgatcatatgtcattgatggttaaattggacgaacgtcttccacacccaacaagccctattgataaggaggtgatatcaattgtgaagatagcaattgcttgcttgactgaaagcccacgatctcgccctaccatggaacaggttgccaaggagcttgcaatgtcatcgaggtcatcttcaatgtcaccacagacacacacagagatgaaagactgaacatactaaaccataaacatgctccagttctacttagttcttttttatgttttcttgtattgtcacacacttttcttatactaatgtttttcatgtatttcaaaaataaaaacctgtaagctttactttctatcctctgctattaaaaggaaggaaacagggttagcgtttgcaaaaacttgtttttgctctagaaaatatagcttagatttctcat

SEQ ID NO: 71148 - DNA, 1107 bp, Glycine max
  Clone ID: PAT_MRT3847_35259C.1
ctctgttgtataacttgcactataataatgtgcttctaaagataccacgtcagcttacctctttacctatttagggaactgttacgattatggactggatattttgactatttaatggagctaaattcaaacaagtctgccaactatgcgtccttggtgacagctcagcttgttgtgttggcatcacacatggtattgtttggtctactcatgtgcttgaatttcattgaagtcaagttgtatcttttctgggctgggacttcctgataatgatgcttggtacatgatcgaaacaattgcagagaggaacagcatcggatccaatcaatttataaagatcagagggttcttgtctcatatccagcaattacacaatggatactggggaatcacctcaatgaaggcacagtctgtgttattacttgcactgccatccccgcattctaaagataccaaagatgagaaccagcaaccctctgaggcaactggtgttggtagaaactgggtgcagagtatgttcagccgaaataaaacaactagatccagctcatttagtcgcgttcatagatggacgtctgatggaggaaactcagctacaaatgagaatgggacttctcgcaaacaagatctgtcaagtggtggccagaaaaagcttcataccaatgttcgcatacttaggggtcataatggtgccattactgctctccattgtgttacaaaaagagaagtgtgggatttggtcggtgatcgtgaagatgctggtttttttattagtggaagcaccgactgctcagttaagatctgggatcctagtcttcgtggttctgaactcagggcaactttaaaaggccatactagaactatccgcgccataagttcagatagggggaaggtggtgtcaggatctgatgatcagtctgttttggtgtgggataagcaaacaactcaacttctagaagagcttaaaggccatgatggaccggtcagctgtgtgcgcacgctctccggggaacgtgtgttaactgcatcccatgatggcaccgtgaagatgtgggatgtaagaacagatagatgtgttgcaactgttggccgttgctctagtgctgt

SEQ ID NO: 71149 - DNA, 126 bp, Glycine max
  Clone ID: PAT_MRT3847_3525C.1
ggaagcgcccggcctaaccaaccctgacacttccgcttacgcgttcgctacgacatcatcgattcagactgccgcaaaaggcctggccctgccagacagaatgcaaggacgcacgcctcacaacaa

SEQ ID NO: 71150 - DNA, 414 bp, Glycine max
  Clone ID: PAT_MRT3847_35260C.1
gagactctgataaattcctgcaacgcctcagacagaggcggagaattcgccgccctagaaaaatcttcccaatcaaataaggcggcaagaaacgctttttcctttttctctttctctcactactttctctctctacaacctccgatgtcccctcccttctccattgcctccttccccgtcctctctctccggttgtggtagttggaaaaggaagggtttttttggcggcaatggagggggaaccgagccagctgaagcgtgccgcgattgatgcctctgctggagctatctccggtggcatatccaggacagtgacgtcacctctcgatgttattaagattaggttccaggtttcagttttactctctccatcgcacttcactttctaattcagcttcactcgtactcgcattt

SEQ ID NO: 71151 - DNA, 579 bp, Glycine max
  Clone ID: PAT_MRT3847_35261C.1
cggacgcgtggggtttatttttgagataggacaaactggctactctaccgtgggggactgggtgataagggagaagaaagctgggatgctgggtgggaagaagaactggctcgtagcaggagctcgggctcaaggatagcataacccatgctgagcccaagattggccatctttcaatacagaatcgtttccaatgctagtgtaaaaggaacaaggtcattactgacggctcatggatatctcatgggcagttctggcgtgtgctgataacgctatttcaaggtatccacctttatgccagaagatatggggcatatttccagcttgtctcgcgctttatacaccgaatttaccttctagctgcactggctggttcaattgtagcaggtatattgagtgaactgtctttaccggacatatatgattatatgtgggctaggattcctactggaggtggaatgctgcctaacgcaggtgaactgaatccggtgatgaataggtgtggactatggaaatctgatacatcaattgctcgcctctgtcatgctagtatgggaatgctcaagtgaacacccatgg

SEQ ID NO: 71152 - DNA, 356 bp, Glycine max
  Clone ID: PAT_MRT3847_35262C.1
tactcggtgttttctttttttttttctttccgtgaataaattacaattaatgtgctatataaataacaaatatctaatgaaaactgtacctaattataaagctgaaccaaatttaccattactgcagggcctactttacttagtgacctacatacttctaacatatggacgctactatatgaccactgaccatccctatgtaaatagctatttattcctcttaacataaggttatcagttcctaatcacactactgcgtaaaaattaccacttctttatctaccaccctatcaagagtttatggatcatttggaaaaaaacaacccatcacattgcctatgaaacttgaaacacta

SEQ ID NO: 71153 - DNA, 529 bp, Glycine max
  Clone ID: PAT_MRT3847_35263C.1
cattttataatttataagagtaatttttttatattatataaatttttaatatattttatttagtttcaactttagtaaatatgttagtatacaaggatgtaagcgattcgacctaatatctgatcccgtccaattcaatttaatccagttagatttgattcttgttattcacacccccaattctcctaagtacactcccaacccccctcttgtacctctcaattatatattatatcttttttcttaaagaagaaacccattttgctttaccgaaatgttctggaattacatatacatattccagaaatgtatctccataactatgatttacagtttcggagatatacttttataataggtatatattttcaataaaatattacttaagaattaagatgattgatgataaatgaaaaaaatgataactacttatcttatattcatatttatttgtcttattttcatcctatcattagtattatttaaattctatctaaaatcttattttgctgttatctttattattatt

SEQ ID NO: 71154 - DNA, 698 bp, Glycine max
  Clone ID: PAT_MRT3847_35264C.1
cgcttgtgctgccttcgtttgcgtttttatcacagaggaattaacatatatatagcaagcatggcagtcacactctacgaccttagctcttcctctgggttgaagaaacttgatgagtaccttctcccacgcagttacatcaccgggtatgtcactgcttttatgcttcgtttgtatgtttttttttataaatcctcgtttcttaagtgataaacaagctttaatggctattacagtattaggaatgcataatatgtaagaaaatcaggcttaattactttggctaaaattaaggtaagttagtttttcatactgctatcattaatcaaagataaaaggcgtatttccctttcagtaggattgtgctaagcgtaagggaaaaatgtgtattttaagcattcacaaagaagcagtgtattttagagcaattatagcttgtatgaggttacatgcggctgctatttacctgttctaactgtttttaaaagggtattgacataataatatttcaatcatagatgagaaagagtcagattatggctttgctattatttgctgcctaatctctttgaccaaccgaataaattcctcaataatctatgacccttgtcaaatcagaatttcccactttaagaaaaaaaattgctatcttgtttcaaatgagataaaaaaaaagagactaaaaaattgattgatat

SEQ ID NO: 71155 - DNA, 247 bp, Glycine max
  Clone ID: PAT_MRT3847_35265C.1
aaaatattgggtagggttttgttaaaattgcccggcactgaatttcaaaaaaacaacccgagctttaaaactcaaatttcaattttatatcccaagtacacaaagctaataatcttctttttgcctttattcaacctatcactttttattttaagacattccctctttagaattttgcacattggtcaccttgttttcaatatattttaaacctctctcaccaacaatttctatgttctcttccctt

SEQ ID NO: 71156 - DNA, 762 bp, Glycine max
  Clone ID: PAT_MRT3847_35266C.1
aaagaaacttcaaagtcctgagcatgaaatggataaagggaagactaagaaatctcatggtcatggtagtgaccgcaaaaagtcaagacgtcattcatctggtcatgaatcggatgaaggacgacacaaaagacacaagagagaccactgcagagaaggagatcttgaagatggggaatttggtgatgaccatgtggatagatgttgatctggattctggcctgagattggaacacaacgtgctaagggaaattcagaagtgttcacgaaatggtcataactcataatcgagaaatcattctctcagtcagacgcaagctgcgaggtgcttcacccaaataaaagaagagaccagaaacaatgacaacgtggttccatctgatcttattctcttggcatattagagaataagtacacagcaatattaatcactaacaggtcacatatcaagtcaaaagcggcatatatgctttaatttgcctctatgtgttgacgagcgaaatcaactcattataatgcagaagaagacttaggcagcacaatttctgtatctatctcttaatgcaatgagtaatatggtccccctccccttctagtatttatattactagagaaatggagagattttacgggcatgttgctatccctagatgataaatttttggctattgtagaattttccgagttttagccttagtcgccactagattgtataccaccttaattgcttaatctatgaaaaactgtcaaatgtcccatcat

SEQ ID NO: 71157 - DNA, 591 bp, Glycine max
  Clone ID: PAT_MRT3847_35267C.1
ctcataaaagtaggtattgctcacctatggttaagatgtggtagtaggggtgggggcatgcttagtttgatagtgagatggaaacagccaccccattcaccatgttgatcattttgtttacgttttaccgtttgcaatttgaaaatcagtggcggttgcaatggccctttcatttgttctcttcattgctaaatctgttgttaccttgtttccaaatctttctctggtatggtgcaaccgtcgctgttgctattaaagcatatatgatcatcagcatttgaatacgttttctttagcaccaataataatccatgaccgttcatgcgggtcccaagagccagtgtatacgttttgtcagttaacatggccagaaaatctggggtaaggttaggaataatttatatagagaggatttgataataaagtaattttatttgtttatatgaaaatcaactgctgatattttaatgcatacatatataatgttatgcacaccatgtaacatttacagctaatttttgtatcaactactgaaatttcttaatttactttccccttaaatatgtttttggttatcaaaaaaaaaaaaaa

SEQ ID NO: 71158 - DNA, 372 bp, Glycine max
  Clone ID: PAT_MRT3847_35268C.1
cccacgcgtccggttgtatcttttggagggtacaatggacgttacaacaatgagaaaggcaaaggtgatattgtatcagtcttgaaggctgagaaagaagagttggaatcatcactgatcaaggagaagcatcatgctcttcaactaaagcaagatctggcagaagctgagtcttgtaactctgacctttacaaggtagtgatcaccatggcatctcccagttaaagcagcacctatgtcaccatttttcaaaccaaagatctgctacttcttagggatagaggtgaagacataggtaagaagacataggtcatacttgagttgtgagatatttggatgcaaattgggcaggttctcccactgataggagat

SEQ ID NO: 71159 - DNA, 217 bp, Glycine max
  Clone ID: PAT_MRT3847_35269C.1
gtccgctgcaaggatagcaacaggcatcatgctcaggaggctcatcgacgtgccaagttcaagttccctaggtcgtcgacaagttatagttaggaggtaccttgggctgcatccgttgagccgtactgattatctcaatttcaagttagcggaatagcgttgtgctcgatggtgtagctacaaagcttactggggtaccattgatctctggtagctc

SEQ ID NO: 71160 - DNA, 181 bp, Glycine max
  Clone ID: PAT_MRT3847_3526C.1
gcacacctgcagtgcccacctacttacgatcaacaaacccacaacccgaccccagcgacggcctgcgactgatatggctgccggagccattgacaacatagcgaatctacatgaatcgtaacggacaaagggggctccatcgtcaaagcgttaacattccttgagctcagtttcctgcaca

SEQ ID NO: 71161 - DNA, 297 bp, Glycine max
  Clone ID: PAT_MRT3847_35270C.1
gtgcggctacagtgaaacctcgaattactcatgggaatatgtgctctctgtgtgatcgtgtgtatctcttactattgcctgcgatattcaagccctaatccttacgagcaacatccgctgcggaaacggaatgatctagcacacagaaggttaactagtgttctgccccatattatactcattaaacatactgcgcctgatccaaccgggaatctgccgacgccagctgattgacggaataggcctatggccgctcagagcttgcttgatgactgaccatttttgcgacggctggct

SEQ ID NO: 71162 - DNA, 194 bp, Glycine max
  Clone ID: PAT_MRT3847_35271C.1
cgaagacatgagaatgagaacccttttcacttcaactctagaaggttccagactctcttcaaaaaccaatatggccacgttcgcgtcctccagaggggcagcagacgctcccaacagcgtcagaatctccgagactaccgcagtttggagttcaactccaaacccgacacccttcttctgccccagcatgctga

SEQ ID NO: 71163 - DNA, 1256 bp, Glycine max
  Clone ID: PAT_MRT3847_35272C.1
ctttctgatttggtctcttttcgttcgacttattctactgactacaaatggctagctcacgaagaagacagcatgttcaataaataataagcataggagaggggagaaagaatgtgtgcggttactaaattttcgatacaaaattgtactcaattaatgtgtcactcaataaattgattagcattttcacatgaagccgtatatatgaggaatcatagcaatacagtggtttaaggggcattggaggtatgatatattcaaagattactatgtaaagattgtagttgagacataacttcttttctgacttgatctctttttattttccctattgtggtgagttgaaatggcttcctccatacaataaacatttttggtatcttaaacctgcttaaatgattttctatacaatattgctgaatattctttctagataggagaaactcttcatttgaagcagacaactgctctgaccatcaataattttctcttggatggatacatgctttaaataattctctaaacaaagcatctaaggtttctttaaagatagcagaaactattcatttgaagcagacaactgctctgaccattgccaattttcccttagttggatacatgctgctaccatctctgtcaggtgagcatctgggattcccacaacaacaacacttgcttgatccaatgtcacctgtgtcaagccaggcttcattattcggatttaatggatttgtgagagtttggtcccaataccttagcattatatgtggtcctctagttagaattctcccaatgtgaccagaagcatctgcacttatctttagttctatatgtggtgcagccttgccaacacaaacaccttgttgctggtgaatgagctttgatcctgccacaccaaatgcttgaagggactggcttgttgtttcatgcattggctcatagagtgtcaggaatgtcaatgaagaacatgtctctgtcatcccataagctgaaataagtttagctttgtggaagaatatgctagtgtccttgatgagctcatgtgagaggcttccacccccattaagaattttcttgacagtgtctcccccttgccaggtctctttgtgcctaattatagaaatcagactagccattattgcaggaactgtgataaaagatgtcaccgcatattgctccctcgcgccaactcctgattctgcatcaaattttggcatcaagacatggcaacctccaaccataagcatggtcatggc

SEQ ID NO: 71164 - DNA, 122 bp, Glycine max
  unsure (1)..(122): unsure at all n locations
  Clone ID: PAT_MRT3847_35273C.1
gacaacncgaatcccttattaagcaggggtttcgcggcgcgagacggtgacactggcacagnacantcacngngncgatntctagcacanagntaatgnaatancnangaacatctacaagg

SEQ ID NO: 71165 - DNA, 331 bp, Glycine max
  Clone ID: PAT_MRT3847_35274C.1
aaattagccatcattagaccttttctaaaaaaaaaaaaaaaaaaaaaaaaaaaaaaaaaaaaggaaaaaaaaaaaaaaaaaaaaaaaaaaaaaaaaaaaaaaaaaaaaaaaaaaaaaaaaaaaaaaaaaaaaaaaaaaaaaaaaacaaaaaaaaaaaagaaaaaaaaaaaaaaaaaaaataggggaagtggatatagaagaataaggtgtacgtcgcggaggtgaaaaccatagagtttattaaaggattacgcaatgtatataaagggggccgaggttaaaaaagtagctaactagtaaaacctatgggatccccatagtaaaatactga

SEQ ID NO: 71166 - DNA, 374 bp, Glycine max
  unsure (1)..(374): unsure at all n locations
  Clone ID: PAT_MRT3847_35275C.1
agcgcttgaattcaagcgttggaatgatgcttatcttctatttatatatgctactcatgtagcaaaaggaaaagccataaccaacgccagaaactagcagctataaagcgaaaccgcaaggaagncttgaaggcaggaatgaatggaacnnaatggccttctaatggctcaagaaaaataggaagaagagtttctagataagtgttaccttgtatgtgattttcagaacataattagttttgctaatttttaggtgaatctcgacttgtactcttgctttcacgatcttctttttgtcataaggttttttaatgatctgtttttccccccttanaaaatggtttttttaagacaaaagtataagttggttataa

SEQ ID NO: 71167 - DNA, 328 bp, Glycine max
  Clone ID: PAT_MRT3847_35276C.1
gaaagccacatccttagttatattcggcatctttttacattatttttttaaaaagggatgggggggcccactatgaaattggatcctttccattaagcctctggcccgcccacaaggagaaaaaagggcgggcctttccttttttaagggtcaaaaaaaaagcgggttaccaaagcatagctagttttcaaatttgcttaacacgcagcccccaacttcccttaaaggtttgccctcccaatagtgaacccccccccaaaaaaaaaaaaaaacggctcaaattattgaaaagcccccccctccggggatgtaactatttaaacttgtc

SEQ ID NO: 71168 - DNA, 632 bp, Glycine max
  unsure (1)..(632): unsure at all n locations
  Clone ID: PAT_MRT3847_35277C.1
agattatttaaacttttatgtgggtaaataagttagaatctgagatgaaataagtcaatctacaaagcttgtccctatgtttgaaaacaacatagatttaagcaacattgcaagaatttttaactcacatttgagacaatgcccacatacttcgcatctcttggaatggttaattttggttaatctcatgtataatttactcgaatcttgtttgatggtaagggtgtattttgaatttttcatttagcacaacacaatacatattggtgatgtaggacattgtgaatatttagttcaaagagacgctttaccattcatggtcataggagaatggtttagagcatatatttggctatggatgctcaagagtttgaaggctattattagaatttggacttagggcctaattcaatcccataaaatcagcttgtaacttgtaagnngaggactgtccaagctttaatgtaggacattgtgaatatttagttcaaagagaggctatactattcagaatcatannagaatgatctagngcatatttgttaatttggctgagtgctcaagaatttgannnnnnttattnnantttgggcttannnnntaactcaatcccataaaactagcttgtnncc

SEQ ID NO: 71169 - DNA, 319 bp, Glycine max
  Clone ID: PAT_MRT3847_35278C.1
ggaactttgttgcatgtgtgaacgggctgttatccattcgggagcggctgagttgcttggacagagagtgtcttcttctagaaaaaagaacaggcccttgcctacaagacccacctgtatgcactgtcgaccgaacccggaataccccaactcttgctggtgtttttgacagacttcgctaattgcgtgattgcatttgctgcccactgcgtctggtgcgaaagtgtttctctttggaacatgaccccgcaaaagacataatgggcgcgcctaacattggtgctgggaacagtgaagaagccttctatcggtatcagat

SEQ ID NO: 71170 - DNA, 1101 bp, Glycine max
  Clone ID: PAT_MRT3847_35279C.1
acgaggtaattttcaaaaacaatgcaatggggtagtgatgctgttgtagacactaccacaaaagcaatattgctgccgcatcagtgatgcaatcagcactttgaaactatgttttacttttttttattgccaaaagtggaagggatttgaatccggtacttcctcctccttctcctcctttcatccttaagctcttccttctccaccgtaagtgaatcttatatctctttcatttcactgtgttgcaagttagctgataaaataaatgttgcaagttaattgcaagagctagttttgtcattttgataaatacaagcggtaattattttttagccctttaatgggtctctcttactattttttatgtgttttttacactttctcaacagtggagtgtccccctggatttctttctcgatccccaacatcactagctagctccttgtacacactctacaaccccacctagctacatcacttaattagttttaccaatttcaaattctcacctgtcactagctatatttcataactgatcattaccaactcatcactacatattattggctaggattcaccattagacttaagattagttgatttattacatatataagatgtctagcaggaggtcacggtcaaggcaaacaagtagttcaaggaatatcaccgatgatcagatcaatgatcttgtctctaagttgcaacagcttcttccagagattcgcgataggcgctctgacaaggtttcagcttccaaggtgttgcaagagacatgcaactatattagaagcttacacagggaagtgggtgacctaagcgagcgtttatctgagctcctggatacaactgacacggctcaagctgcaataattagaaatttactgatgcaatagatcggtgcagtagttaatttatcgcataattcatagttaacacttcagtacttgtgaaccgatccagtcagtagtcgcgtatttcttattctctttttgtttcactttttttttctggtttttgtccactaatattcatgattactgcttttgcaaagcccattttcctaagatattaaataaaagtctgagtttgcgctttgct

SEQ ID NO: 71171 - DNA, 199 bp, Glycine max
  Clone ID: PAT_MRT3847_3527C.1
atgcaagctcttactggttttaagccttctcttagtttcactgatgctgggtgtgaggtcattagattcccttcagaatggaagggccatttccccaacatgccagcgccttaagtggtccaactatgaaggcattcaatttggccaccggttccaaattcggcggtattatttaaccggttggaatttgaacaagccc

SEQ ID NO: 71172 - DNA, 301 bp, Glycine max
  unsure (1)..(301): unsure at all n locations
  Clone ID: PAT_MRT3847_35280C.1
agagcannggctgcacaagctgcnngnatcancanncnncnctnnaccttctcagcggagggctgcaagacaaagtcttnggaccaagatcactccaatctccatttggcttctccagaaaagcctcctttcttgttaaggcagggagatacttttttttttaagcaaggancagacagaccnnngnggnnngcagcaaagcaaagcccccccccacccggaggcagccccccgggngacnanggannngacccncngggacnnncagacccngaaggaacaggaggggncanngagccga

SEQ ID NO: 71173 - DNA, 1117 bp, Glycine max
  Clone ID: PAT_MRT3847_35281C.1
caatggaacgatgtaaaaaacaaatttcatatatcattacttttctaaacatcttggaatctcatgtgaatgtgtaaatcataaaagctgtagctaaatactggttgccattttgtgcaatcagtgcagatgattttcactgattgacagatttcaatccagctagtataatatttacaaagtaaaaattatgaattattttatagttctaagatcatggtgatttatcttttgtaaacgatttgtgcgaaaggatctaatttatgcataattatttgaatattttgagctgctgagtttatgtataccaatgtttgaaatagatgttggtgtccctgggaagtggaccatgggatcagctatttggtggaggaaactccagcctttggtgtggcagctgttgcagcccttgccagtggactcatagctgtcttgtttattccccgacctggtggtcaaaagccaagcctagaagcccagtatgaggtattatgttctttctgcatttggcactgatttgttttgaaagagggatgatgaaaatgaacaggtagcaataatttgtaaatagttttgttttacttttgtttgattgtagtctttatattgaggcttccattcatcgaaatacccccaccagcctgcccaatttttttgtaattttgaataattgttacatggatatattttcatcttaccggttattatttatagaccttcctcattgtaagttagttcttctcgtgcaagatgttcttttcgaggttaattgcaaagaagttaaggcatcttccatgggttctaaagttccatcttgggcaacattctttcccacaagacgagttgctgctgattgggaattattccacatgaaaaattcttttatttttaggaaattctggttgagcattagtagtgcttctataatgaagtgttagaatcttatgcgtttgtgcgacttgtttgtattagtggcatgaatgtgttaagtgggcaacagtgaacatgtgaattttgctgatggaaaccttgatggggacatggcttaatgctccttattttggtataagtatttttctcttaaaaataaaattcttgaacgactggtttgatttgt

SEQ ID NO: 71174 - DNA, 460 bp, Glycine max
  Clone ID: PAT_MRT3847_35282C.1
gtttgtaccattatcgctgcgcgtctcacaggcggacggcccacacaggcggttacatcttgaaataccaatgtgcagattgaaccactcatgaattgagggctatagcttatgagaaccactaccaatgtctatgctggtcacagaatagatctctcattggctaaagcacacgtagcatagtgcggtgtgcagtcttgacatcaggtatacactccaactgcattgttgaaactctgtgtctgcaaataagacaagagggtctaattgaatgagcaatgttgagcgggatgaaatacgtggatcatagctcccactatcctaaatagaatgagactttggagggagacttttccattgatattaaatctcgctctatattggaaaaagtgatccgtacagacgcacaatgtggtcgtagaaaaacctcactagatgatatgatgcggggtgggccaca

SEQ ID NO: 71175 - DNA, 864 bp, Glycine max
  Clone ID: PAT_MRT3847_35283C.1
taaagatgagtagtagcagcagtaacgttaacttggagacccgttctccgcttgatgaggttatttgctttaacaaagggggactcttcgaccttggccaccctcttctcaaccgcatagctgagagtttcgtcaaagcttctgggattggagtggttcaacctggtccccgtgacgtccagtactcagctgttgatggtgcaatgcttccccggccccgtcatttccttttctactttgtctagagttagacttgactaccaatgagttatgtttatgtgtgtgtgttaattagaacatttttctttcaggtacattattaatatatccctaatgtccctattatgggtttgttgtaggcaacaggatggataacactggcggtatgccttcagaagtttctaatgccaagaaacatcgtttgcatggtctcagaggagagaccagcagcaaatcccttgaggcaatggtgaagaataccgggaaagagtctttacaatggggattggcagcaggaatatattccggactcacatatgggttgaaggaagctcgtggagcaaatgactggaaaaatagcgcaatggcgggaggaatcactggggcaacacttgcacttacgtcaggagacacatctcaagaacatatggtgcattgtgctatcactggagctgcaatctccaccgctgcaaatcttttaactgggatattttaaacgggtgccctgtttagtgttaagaatggatgttcagagattgatacatttttcttttctgtcttaagattttcgacagttccttggtacatgtatgttttaagaagaaaaaaaaaaaaaaaaaaaagatagcaagcatttgctgggcg

SEQ ID NO: 71176 - DNA, 912 bp, Glycine max
  Clone ID: PAT_MRT3847_35284C.1
caacttactaatcatattgtctttatttttctggaatgttatacagttataaaatatgaaaataaatctataacaacaacatcatcctgatccagttcgagaaactccttatttaatgatatcttgtcttgtctctcggatcattcttcagtacccttacccttaatagcacgcactctctgttctcatctcctctttgttgtagaagaagaacacacccgtttctaatcattattagacttgatctcaacgatgaaggcaacactgcttcgtccttgttctggtcctctgattctcgacacacatagcaaccgaacctcgtcaacgatgagacacgcttccaccgttgtttgttgctcatcgaagaaccaaccctacatcccgaagctcgagccttttagccgaaccaagtttgaaagggccgttaaagaccctcctttaatcgaaaaatctgagaaagagatcttagattattgttcaacgcttgaaggagaccaatcatatagctgctggcaggcttattttgagctgaaagatcttgaaaaagagtccccaagagcagacatagagaggctgattctggagactggtggtgtaaaatccctaataggatgcttgcatgggatttcaatcatgcacaaagtaaagaagggtgacatgaatctgagcaaggatgtgaaatcagaagaaggtgagagaatgtgtcccatacctgatggattgccaaaatctgctgatgaacttagggaagaggagcaagcaagaatgcctgattcaccatacactaagcttcttaggaccatgggcaggcaccctgcatggtactctcctgcccctgaccatgaaacagattgatgaatgatgattcccatacatactaagctcaaagggaatgaatatatttctcttttg

SEQ ID NO: 71177 - DNA, 822 bp, Glycine max
  Clone ID: PAT_MRT3847_35285C.1
cttcactatgtatactaaatttgaattgtcaaatattcattgaatgaaactttcaagaggcggatgaaaaaaaaaatctaatgaagatataacaaatgaaggggcatcttttgctagcctcagcataaactaatattccccctcattattcctctttctttttttcactcttttgctttcctttccctgggttccttcaaaattcttgtaatctctgatctttgggcagtaatcttgattcttaacaaagcaagttagtggaatcagtgcatattttggattccatttcctaactcatgatgatacctgactagagttgtgaggacctagcaagtcatcacagttattttcctcacacaggcactcatgagggttggcataaaaatagtcctcctcctttggcttatctaatataactcttcgccgagttggctgagcaattctcgtctcgtgaacccgtcttacagcatctgcaaactcaatccatgaaagggttccattctgatgcatatcaaccaattctaccaccttttttcgatccaataaaatggtccttttaaaaccagaatacctacgatgaccttccactagttttgccatgttcccatcataggtaggaacaaatgtgttactggcttctgaaaccataaaatccaaggctgccatctgtgatgaatgattctggaactgccgcaaatcatcccaagttagcaatgtgtcctttttcacaatttgtggaaatgaagctcttaattgtgcaagtctacgttcaccaccataaatctcaccagctgcaatatacatttgggtttccctaccaaa

SEQ ID NO: 71178 - DNA, 1489 bp, Glycine max
  Clone ID: PAT_MRT3847_35286C.1
acaccttaatagcacgcactctctgttctcatctcctctttgttgtagaagaagaacacacccgtttctaatcattattagacttgatctcaacgatgaaggcaaccctgcttcgtccttgttcgggtcctctgattctcgacacacatagcaacctacccttaatagcacgcactctctgttctcatctcctctttgttgtagaagaagaacacacccgtttctaatcattattagacttgatctcaacgatgaaggcaacactgcttcgtccttgttctggtcctctgattctcgacacacatagcaaccgaacctcgtaccacgcactcttttcattctttctctgttctcatttcatcttctacacgcgtttctaatcattattagactcgatctcaacgatgaaggcaacactgctttgtccttgttcttctgctcctctgattctcgacacgcatagcaaccgaacctcggcaacgagacacgcttccaccgttgtttgttgttcgtcgaggaatcaaccctacatcccgaagctcgagccttttagccgaaccaaatttgaaagggccgttaaggaccctcctttgatcgaaaaatccgagagagagatcttagattattgttcaacgcttgaaggagaccaatcctatagctgctggcaggcttattttgagctgaaagatcttgaaaaagagtccccaaaagcagacatagagaggctgattctggagactggtggtgtaaaatccctaataggatgcttgcatgggatttcaatcatgcacaaacttaagaagggtgacatgaatctgagcaaggatgtaaaatcagaagaaggtgagagactgtgtcccatacctgatggattgccaaaatctgctgatgaactgagggaagaggagcaagcaagaatgcctgattcaccatacactaagcttcttagaaccatgggcaggcaccctgcatggtattctcctgcccctgaccatgaaacagattgatgaatgatgatcaccatacatactaagctcaaagggaatattccctttgagggcacaagtaataacatagtggagtagctataatacccccatgtgaatggaatgggtgtaaatctttggctttttttctacaaatgtaattattttgcattactcataatgtcatatatgtttcaaggagtggtaggttaaattgggggacaacatactttcatcaatgtgaatgaattgtttcaccttttttttttgccccttacaaggacaattgcgtttcatgtttttaatgtactgtatggtttaggaactcgagttagatcaatgattagatgcttttgaatattttttgcaaagcaagaaatcacgtcaaattgggataaaaattattaaggtgacacctactgcttttatataaaaaaaaaaaaaaaaaaaaaaaaaaaaaaaaaccaaaaaaaaaaaaaaaaaaaaaaaaaaaaaaaaaaaaa

SEQ ID NO: 71179 - DNA, 450 bp, Glycine max
  Clone ID: PAT_MRT3847_35287C.1
cccggatggaccgcactcgtggcacccgctcgttaaaacaacagaggctgatctaacatgtttgtctcacatgctatgcattcgaactgatgcactggatagacggacacatacttaaagccctctgtcacaaagctctatctctacagcaagagacataaccattgtaaatcaaactgattccaatgagatatcctcaattgatgacatggtagatcaacatctgtatgtcattattttaacccaacaaatggattcacaatgaaacaaacttatgcctctttatcaaacagtattgacaagtcttatcattcattaagaaattgtttaattattgaaatatgccttctctttttcaaatatattactctactgaagttgatagtcactttcatgatttttaaaacccaatccatcattagaaggtttttgaaattcacttttatccaa

SEQ ID NO: 71180 - DNA, 686 bp, Glycine max
  Clone ID: PAT_MRT3847_35288C.1
tcgttctacgcgtccgctctttctttctttctttccctctctttttcttttccctcactctcttcatttacactctcaaatttttctgaaattcaaattcaaatttcgtttgtttgtgtcttgttacttccatggctgacaacttggacgacggcgagttttggctccctcctcagttcctcaccgacgaagacgacgacgacacatcgttttgcaacaacctcactgcccaaaactacgccgtttcgaggtctctgttcttcagctcttcctccagcgagacggagagcgacgaggaggaccacctcgccgagttgactcgccgcgtcgctctcgaactcgatctcaacaacaagggcgtgtttggggatggtggtggttctcctcagtcaaccctgagcgtgtttgagaacagcggcaaagggtcgagtccaaacgacgccgttccaccccacgtgaactcctcgtccacgtgggatcttctccgcgccgccgcatgagaagtcgagaggatttgcgacgaaagctgtaaccgttacggtcaaaactttctgacaccctcttccattgatgcttctgtcaacaacccaatgccgttaattgcgctaccggcgttggcctgggattttactctcaacagaagcagcaccaacagcaaccatttgtttgttaccagcagttacagt

SEQ ID NO: 71181 - DNA, 334 bp, Glycine max
  Clone ID: PAT_MRT3847_35289C.1
gtaagaagtgacaacgtatagaaccgaccgcaaatttatccacgaagaggaggatgacgactacgacaacaattgctacgactacgactaatgacaggaattctaatacgactattgctaattgtgacttcatgtaaagtgattcatctataacttatcttctatgtacactgcttttcttatcaattttttccgttttcgtttgctccttttagtgtaacaaaatcggaatcgaaaacagtatctgtctctagctaaggtttttgctattgctatttcaactatgctctctctaattcgatcatcttagagaagtcttaagatttttacctac

SEQ ID NO: 71182 - DNA, 2260 bp, Glycine max
  Clone ID: PAT_MRT3847_3528C.1
ggctcgagattttctcgggatccgccgattcaccgtgcgatcccggggtttcttcttttttttcttcttcaaccccttcttccatttcctcttccttcttcttcttcttcttcccccccccccccccctaccccaccccttttttccctttcccacgcgttcgccttgctaaaattctctttctaattcacaattttcttgtaaattaaacatatcgagcaagcatattcatttcagcatggtcctcaaaactgagtccggaattgcctaccccacgcgtccgtacggctgcgagaagacgacagaagggcacggctgcgagaagacgacagaaggggactcaagcacaacatctctatcgagtaaattaactatgaagcctaccctactattatccctttccttcctgcctctctttgctttcctggctctttcagaagatgttgaacaagttgtggacataagtggcaaccccattttcccaggtggcacatattacattatgccatcaacttggggcgctgccggtggtggattgaaactaggccggacaggaaactcaaactgcccagttactgttttgcaagattactcagaaatcttccgtggcacaccagtcaaattcagcatacctgggataagccctggaatcatctttacaggtactccacttgaaatcgagttcgcagagaaaccttattgtgctgaatcctccaaatgggtggcgtttgtggacaatgaaatccaaaaggcatgtgtgggtattggtggtcctgaaggtcatcctggtcaacaaacatttagtggcacatttagcattcagaaatataaatttggatacaaacttgtgttctgtatcactggctcaggcacttgtttagatattggaaggtttgatgccaaaactgtatcgagtaaattaactatgaagcctaccctactattatccctttccttcctgcctctctttgctttcctggctctttcagaagatgttgaacaagttgtggacataagtggcaaccccattttcccaggtggcacatattacattatgccatcaacttggggcgctgccggtggtggattgaaactaggccggacaggaaactcaaactgcccagttactgttttgcaagattactcagaaatcttccgtggcacaccagtcaaattcagcatacctgggataagccctggaatcatctttacaggtactccacttgaaatcgagttcgcagagaaaccttattgtgctgaatcctccaaatgggtggcgtttgtggacaatgaaatccaaaaggcatgtgtgggtattggtggtcctgaaggtcatcctggtcaacaaacatttagtggcacatttagcattcagaaatataaatttggatacaaacttgtgttctgtatcactggctcaggcacttgtttagatattggaaggtttgttgaatctcactgagcatgaggccttcgacattgttttcatagaagcttctaaggttgatggaattatcaagtccgtagtttgaatcaaatcaaataatgtcaagggtagctagatagtgttgagttaatgcttaatcatatgtttgtcgttgtgatatgcattaagtactctgctcccggttgctaacaaaaccccaatgcaaaaataagtgataaaataatggttttgctttattgtattctcatctttgttttaatctctttttatcgtaaaccttttcttgcttcctggatttctattaccttgctacatcatggcttgggcaatcagtattctgcagcgtcggcgacaaagacaagaggctgcagcactagcagcaacccaagttgcttttgttctacaatctgggcagcgtagaggtttacagtttgcaatagcaccaggatcacccacactaccccaggaacaagtataataatttgtatgcttttttattttatttttgtatgaatgaatattaagaaggctttgttgaaatgccgtgcatttttactctttactttcagctgtaacgttatgtacatgtacatacttagggggtgctaaaacgatgtacatgaatccattggtatccattcaattcatctatctatgaatgtaaccgaatccatccacttactatatattaagagatttatatgcaaaataaggattaatggtctaatctagctcatgtttacttgggatttgatgtgagcatatctatttggtgcttgcatctaattgcagtctcgaaaatggaattgagtt

SEQ ID NO: 71183 - DNA, 610 bp, Glycine max
  Clone ID: PAT_MRT3847_35290C.1
ggctgtcggaaagaataggaggattttcaagggaaagaagggtggcaagaagaaagccgctgatccctttgccaagaaagactggtacgatgtcaaggccccttccctcttgcaggttaagaatattggcaaaaccctcgattctcgtacccagggaaccaggattgcatccgaaggactcactcatcgggtttttgatgtctcattgtctgatctccatggggatgaagaccactcgttctagatgattcgtttgagagctgatgacgttcaacggaagaatgttctgacgcactactggggaatggatgtcacagctgacacggtgaagtctctggtgcgaaaatggcgaactttcatctgagctgatgctgatgcttagaccactgatgattatacattgaggatattcgtgattggctctactaagatgacgtctaactatgtgatgatgatctcgtatgcgcaatctaccctaatcagacatgatccgaggaagatgagagatatgatggtcaccctagcactgcatgttgattgaatgaattggcgcccaaggtcgttccgggaatgtttgctaagagaatgaaaagggacatctagcatctat

SEQ ID NO: 71184 - DNA, 383 bp, Glycine max
  Clone ID: PAT_MRT3847_35291C.1
tctcgagccgattcggctcgagcaaagcttgagatcacaaaaccagtttctggagtcttgtattttgggtacatgctgcttctttcatatggtttctttgtggtcactggtaccattggtttctattcatgcttctggttcataaagctaatctacgcgtcagtgaaaattgactgatccatggcttgtcaaggaaatgggtggattgctaaatcattttagtataggttgctttgatgctatgattttattcaaatatatttttccaggtatcatatttggtatccttgtattcttttcctcttgattcaccttttctaattgaatatggtcattggtttgtctgacatactcatgaggaccattatcttgctgtcctcaat

SEQ ID NO: 71185 - DNA, 504 bp, Glycine max
  Clone ID: PAT_MRT3847_35292C.1
tcgggattcggctccgagtcacgtttcagagaaagaatgaggatcgggtgataggtattccaaagtaatctactttgttggattagaatgaataaaagggtgtagatctgaagtaactcttttatagttactcttgaagtaagtgaatcctctctctatatatacgcacttaaaatttatacagccgtggtattttccatggtaaataaggatgaaaacatagtattgttttaacttttaaccgcttagtttcctaaagtactcatggtttaagataacagttgaaatgcatactgctgttatttggaatgaggagtgattgttaatgttaggacttagtcatgaaatctgtttatgattaaaatatattcatgtgtgttaggaatgcattttgatagatcatataattttttacacaaagtcaagtgattggtcaggttgttaaatttattattactattattattttgcatttttccaagagtttactgtatagcaagaatt

SEQ ID NO: 71186 - DNA, 831 bp, Glycine max
  Clone ID: PAT_MRT3847_35293C.1
ggctcgagcctccaccccttagtccttttcctcaaagggactaccataatttttctctcccaaacaaacccaagagaggaagaaagaaagaaaagagtataaacacacaatatctctttaaactcttgacccttctcttggaggcatggctttcccaattctcttccttctcttcatttcccttcccttctcctccgcaaagctcaacgtcgattactacaaaaacacatgcccagacttcgaaaaaatcgttagggaaaacgtcttcaccaaacaaagcgctagcgtggccacagcaccgggtctccttcgcctcttcttccacgattgcatcaccgatggctgcgacgcttccctcctcataacttccaatgcatacaaccctcatgcagaacgtgatgcggacctcaacctttctctctccggtgatgccttcgacatcatagttaaaatcaaaaacgcattagaacttgcatgccctggtgttgtgtcgtgttccgacatcgtggcacaggccacaagagaccttgttaagatggtcggtggtcctttttaccccgtgaggctggggagaaaggatagcactgaatcagatgctgcgagagtgagtgcaagccttccaacaccaagcatgaccatggaccagatcattgagaagtttacctcaaagggtttcactgttaaggagatggtggctttgactggggcacacaccattgggttcacacactgcaaggagttcatccacaggatctacaacttcagcaagacctctgatgctgaccctatgatgcaccctaagctggtccaagggttgaggtccgtgtgcca

SEQ ID NO: 71187 - DNA, 201 bp, Glycine max
  Clone ID: PAT_MRT3847_35294C.1
cgctatgggagtgaggtagcggagtgatttgcttcaacgcacattttgtcaatgacgcggactcttttttatacagttgccgaagacgcgacggcgtaaagctcctcccggtgtgtgcggtgtcgctgcccctcccgagcgggagtgaagaggcggagggagaagggagaaaacgggaggggtggaaggagttcgtggatt

SEQ ID NO: 71188 - DNA, 417 bp, Glycine max
  Clone ID: PAT_MRT3847_35295C.1
tttttttttttttttttttttttttttttttttttttttttttttggggttttgggtttgggggaaaaaaataatttttttcaaaaaaatcccagccttttggggctttaatgggtttcaaattcttgaaacccaacaacattgaaacaagggttctttttactacaaaaaagcttgggcccctacaattaatatgggaaagggaccttttttgggggatataattcagggggggaaaaatcccttaattttgggaccgtgtcacagccaaaagagtccccccccttttgcatttggaaggggggtcgattatggggcattgccccacacaacaacaagggggtgaaatttttggggggttgtgcctggcaaaataaaccaccctgggtttcaactttgggggtgttcttgggacat

SEQ ID NO: 71189 - DNA, 659 bp, Glycine max
  Clone ID: PAT_MRT3847_35296C.1
gagagggaggtacgaaaattgatcgctgtcacttaagagtccaaagataagaaggtaaggtatctattagcaataaatcagttctaaaatggcctattgaaagatttagaaaaattataagaacccgttgagtagtttaataagtaacaaaatcaataaattggatgtataagataaaaataacgaccacatctagagtaaaaaagtagagtatcaagtgtcctaaggaacaaaaattgtaagaacagcattagaattaagatcacaagcatttgtgaagtattttatgttgcaggactaagtgcacgttctatttcttccaacgatcgaccttttgtttccacaacgttacgagctatgtacacaacagtgagaagacagacaattgagaagcccaagtacactatgctgataccaaacttgttaactacactcaagaaatagagcccgatgacaaagttggagatccaatgtgtgcctaatgacaaagaaattgcttttgctctgattcttgatgcaaatatctctggtagaagaagggcaggcacaggaccagcaccaagagagaatgataggacatagaggacagtcccaaggactgcaagggtgccagagtatggagcagggaccttccagtgaaagacacgaaaagaagcaca

SEQ ID NO: 71190 - DNA, 311 bp, Glycine max
  unsure (1)..(311): unsure at all n locations
  Clone ID: PAT_MRT3847_35297C.1
gatcngcantcacncagtacgtanagctcnnaattcggctcgcgcagcaggagattngttnngggcagnaccgncgcttgncgccnnctccacantcggnttnncnangnggattnccanaggcnngatnggnngnngnnnncncgccgatgnncnctttnanaaggttngnntggnnagnnatcnaagcccctnncanncttncanagtcacancatagctngngctncancncaatcctctcgtannncagnnaacnanngnttgcctncngncggaannncaggggannngannatcgaangagntcn

SEQ ID NO: 71191 - DNA, 804 bp, Glycine max
  Clone ID: PAT_MRT3847_35298C.1
tttttctttttttttaaatttgattcagatagtagcagaaatgaaggccataggaaagatatcagggccaacagctctaaccggtttaatcctatattccagagccatgatctccatggtcttcctgggctacctcggcgagatggagctcgccggaggctccctctcgatcgggttcgccaacatcaccggctactccgtgatctccgggcttgccatgggaatggaacccatttgcgggcaagcctacggcgccaagcaattgaagaccctgggcctaaccctccagagaaccgtcctcctcctcctctcaacctccctccccatctccctgacgtggctgaacatgaagaacatcctcttatggtgcggccaagaccagcagatctcctccaccgcgcaaaccttcatcatcttctccatccccgacctcttcctcctctccctcctccaccctctgagaatctacctccgaacacaaagcatcacgttacccctcacctactgctccgcaatctccgtcctcctccacgtccctctcaacttcctattagttgtccactttaaaatgggagtgtctggcgttgcaatagccatggtgtggaccaacctaaacctcttcatcttcctttcttcctttgtttacttctctcgtgtctacaagactcgtgggttccccctagcaccgactgcctcaggggatggtcttcccttctcgcactagctgttcctaactgcgtctccgtctgtctcgagtggtgggtggtacgaactcatgatcattctctgcggactccttctcac

SEQ ID NO: 71192 - DNA, 463 bp, Glycine max
  Clone ID: PAT_MRT3847_35299C.1
tagaccacacatatcatgcatatgctgcatttgaagtaactgcgaacttctcccgccctaaaccctttgaccactcggaacactttgaactttctgaacactttgatcactcggaatactttgacgacacggaacacttcgactgcccaagacaatttgaccgaacagctttcacgctcaagccttctcgacgtggtccacgtccagcttctgctcgtcgtttccgtacgattccgttgagaattgatcgaccttggtcgacttgaactttcgagcgggcaccttggcttggaaaagcatatgaatttcgccgaaactcctatctttcgtctccggaagtctgaaccagcaccagataaagcagagagcgttggtcccggcatataaccacgcggtgtgggcggcccagccccaagccgacgcgttgaccatccgcggggtcaagatgttgctaaacaccccg

SEQ ID NO: 71193 - DNA, 457 bp, Glycine max
  Clone ID: PAT_MRT3847_3529C.1
ataaataatattgcgaaaagcatgatccaattttaaaaataattttcctgtgaaacgaggttatacaatccgaccacaaacactgcatttgaaattgctatcaggagttaccatctgtttccccagtgaccatatttctagaatcctatgccactaaaatataaccacatgcacgcataagaccgtgacatgtgcaaacatgtcttttatcacacatacaatccagtcactaaaacacaatctaattcgtgagcttccaagaaaccaagcatggatttactagtcatgggtcgccaccattggggcaatgttctgttctgttggcctatggtcataagttgtgaatcataattaaaaaggcaactaacgtgtcaaaaccaaccaaccaacattgcggcttgtgcttattcacgatatgccactctgattttaaaccctttactcaacatatattggt

SEQ ID NO: 71194 - DNA, 366 bp, Glycine max
  unsure (1)..(366): unsure at all n locations
  Clone ID: PAT_MRT3847_352C.1
acctctgcaagngcaaactccnnagcaactttatattctccacacgcgctttcacgaccacttctttctctgaccttattgcttctcccacagacaacaacaaaccaccacatggtggtggtggtggtttgccggagagagctggctctggtggccggaaagtgacggccacaccaccacctggtatggcaccatcttgcgcgacgaaatctggtgactcacactgtggtgttgctacagccttgagcacttgttacattacaagctcagctgttccgcttaagtcttcgaacacttgtgccgtctccaacaactggagcagttgctggtcggaccctcaagtggcagaggaggacaagacggaac

SEQ ID NO: 71195 - DNA, 194 bp, Glycine max
  Clone ID: PAT_MRT3847_35300C.1
gcttgctcaatgctcaagtttattattgggaatcaaagagcctgtgctggaatcacagagcatagttcaatggacccgtaatgcagcaactcctctatcatttgctcgatgtggtcctcttcaagaggcttgaactgttgagcattttccaccttaaccttcttgaaaacccaattcccctctccttcttgctc

SEQ ID NO: 71196 - DNA, 908 bp, Glycine max
  Clone ID: PAT_MRT3847_35301C.1
ccggaattcccccccccgtccggcgtccgctttccaatacaataatcactaactgaatattcgatcggagatgtctgccgccgccgaagaagctaacgctcccgccgtcgaaaagccggttgaggaggtgaaggcgccgaaccccgcgaaggagaagaaacctaaggctccgaaggaaaagaagccaaaacaggccaaaacagcttcacatcctccatattttcagatgattaaggaggctttgatcgctttgaacgagaaaggaggatcgagtccttatgcgatagcgaagtacatggaggagaagcacaaggcggtgctccctgcgaatttcaagaagattctaggtctgcaactaaagaaccaagctgcgagagggaaactcgtgaagatcaaggcttcgtacaagttaaccgaagccgcgaagaaggagaacaccgccaaagtgacgaaggccaacgctgagaaaaaggaatcgcgtccaaaacgaagcaaaaccgcaaccgccgctgctccgaagaaaaccgaggcggttaaaagggcagcgaagaaggtagggccgaagaagacgaagaaagtgtcgacgcctgcgaagcccaagcagcccaagtccattaggtctccaaccaagagggcccggaaagcagccgttgctgcggcttgatacttgtcttgtttagttaaaactatgacatatatatgtagatatgaaaaggtgtgggtgtgggtgtatgtgtgtgccttgctgcacaatcttgaagaaagttgtgtagtgtaggatggtagatagtttagtgttctgcaatgttcgctctaataagtgatctaatggagatgagttttactgttttaaatcaaaaaaaaaaaaagttgacggctccctagcggacgcacgcgtgcgtccgcgt

SEQ ID NO: 71197 - DNA, 616 bp, Glycine max
  Clone ID: PAT_MRT3847_35302C.1
ggctcgagccttcactcacttttttccactatgaaactctgaaatgagatcaaaataacataacacaaaacgcaaaaccctaatctctgcaattcctgtgcgtggaaaggttcgagaatggtttcgctggaggaatctcgctcgaattcgagccgtttccccttggcgaggagttaccagtaccactcctcggtttcgtccaaaacgcagcgtcaaattggaaggtccatgcgcactatacgctccaatttcttccaagacgacaacagcagcagctgctccttcaccgagaaatccacgtgtctctcggaaaacctcaccgactccgtcgtcgacctccgtctcggcgagctggcgctgcggaacagcaaatcggtgaaatactcgccgacggaggaggagctcctcgatttgtcgcaggccttcagcgacttctccgcctgcagcagcgacatctccggcgagctgcagcgtctggccacgctgccgtcgccgaagaagagcgacttctccggcgagaacgaggcgccggagccggagattgagccctgcatggggttcctgcagagggagaatttctctacgagatcatcgagagcatttcgccggaggatct

SEQ ID NO: 71198 - DNA, 518 bp, Glycine max
  Clone ID: PAT_MRT3847_35303C.1
ggtgaactgccgtttgcagctccaaacttctaaacatgcctttaatgatgcatgctgttgagattaatagctaatttagataatatattgtggtgatccaggtaagacttataaagcagagactcaaattctaatttaatagttgatatttacttatatttttaaagtatattgtttgttaaaatgagggtgagccttggcacaatcgtaaggttgctgccttgtgacaggattgaatattagaaacaatctgtccacttgtaggggtaaggttgcatatatctacccttcccaaatcacactaggtggggacctcatgcaccaagttgcccttaattgtttgttaattagattaacaagttccacttgattttgaaattctacaaaaagctatttacggagttagtggattctcacatatacacatataatgtactttcaaatacattattacaaagaaaggttcaggagctgcttctatacaattattgtttcttataatttgttttcatacactc

SEQ ID NO: 71199 - DNA, 306 bp, Glycine max
  Clone ID: PAT_MRT3847_35304C.1
cgcgttgtctcgtgggatacaagaggaaagcacttgcgggtgagagttagattgagaagcagatggtccattctacatcacccaggacaacataggtgtccatatttgagagctgaagagcccgtttgtcacaaccggcattacgatcatgatccccgctactgaagacatcatacaacctataacagccggtgctcatgaagacgctgaccttgcagtggatgctgctaaatagacgctccctatctcaaaggcactgattggactccagctgctggctctgttcgtgctcgctatcaccatcca

SEQ ID NO: 71200 - DNA, 154 bp, Glycine max
  Clone ID: PAT_MRT3847_35305C.1
tatggcttaagaaagattgaagggacatttgatacaaaaacagaatctattactgacacagaatatttggtgatgaacactttttacatgctacagcggttcaatgctaataatgtcgcccttgaaggtagatcaactaattcatgaaggagaa

SEQ ID NO: 71201 - DNA, 2148 bp, Glycine max
  Clone ID: PAT_MRT3847_35306C.1
aggctccttcgcctttttcttgctcattctcaagtaccctttctattcttttctccgtacttgatgtcagtattgttttcaatcatttgttctactataagtctggtcatgacaatagaacataatctccttccctatcatcaacctgggaagtgcactcgaaaaatgctacatagtgcgtcggtaatctccaggacgtggaaattatatgatcgatttttattgtttacttataagcccacctggcttcctatgaaccttggcagaatctctaaagctctagctgtctctcctgcagtgtaccctaactgtcaacaaaattgtattcaatgacattctcaataatgctattaagtcaccaagatgtaactcgccactttaatacgttgcggtcagctcagcttatcatatgaaagtcttatttcaacaatgattttcagtaccttccactgagaactcattaaaccaaggtaaaacaagatattgaatataccaaaaacatgggtatcctttcactaacttcgaaggggtatttgccttttttattttcatattcacttcaggcctttttatcttccatgtaaatgaaagatgatgggccacatttagactggttttcttgatgttggtcatcctcacataaacatctcttgtgtccagataatgtgtatgttcttctttttaacctaatataaaaactttctttattagagctacagatgcattggcaggctaattccatcagatatgtgagaattgaatcctgttagataagcaccatccatgagtgaatacagcattttatccgtcttgcatgtatataattcctttgggtctggttatttcatctggttcactacgaccccattatttggtttatacctggtaatcctttttagattgttcttgtgagcaatatacaacacaagaggccagtactcatcagctctggcgttaatctctttcgaggaccacagaaactcaactttcccactatccagatccatcccaacagccttccaaatctcgatcaagtaacggcccacggtttcaattttcttcaaatctcctcccatcttgttgttgagcttggcaaaccaatcagcaatccatattttgacgaggcaaccagcagatgttagcttgttcacattgattgtcttcataacaccctgagcaatgtgcattcgtccggagggttcgaagccatcgtagcaaactggttcgggttttttggtgaggaggttaaggagttcgtcttcctgaatgcattcttctccgacgcttctcacaatttgaaatttctcttccggagtcaaaagatgagttggactgggattggatgattgggggatctgagggtcggagacggacaacgattcgacggcttcggtgggtggttgttccattgcgttactctctcacaggcaaaaaaaaaaaagtcaacgccagagagagacgaacgcacggcggcggcagtcagagcgagagagcgaagaagaagggctgcagagaattgtgaggctgaaaaatgcagaggctgatatgttccagttgaaggctcatgaggctaaacgagaggccgagaggcttcaaatgattgctcttgccaagcaagataaatcagaggaagaatttactagcaactacttgaaacaacaattaaacgaggctgaggctgagaagcaatatctgtatgagaagatcaaattgcaggagacttctcgtgtatcacagagcagtagtgggggtgacccctcttcaatgctgatgtattccaaaatccatgatcttctctacagtgttcctcccaaggcagacggtcaatctaatgagtgccaccctttcagaacaaacccatgagtactggttcagtgtatgttataatcttttacatattatagcaatgttattctgttgcacaattgatgaagagttagtctaattccattaggttcaagacaatgtaagccttttgtagatcaaagaggtactagtaagtaaaggcttaactcagtttgaaatttggtttgttctatggggtatatgtatgaatacgcatttgtgacaaatttttgattgtttcttgatttgtggaatctaattagttagtcaatatgttttaaaagaaaaaaaaaaaacaccaaa

SEQ ID NO: 71202 - DNA, 554 bp, Glycine max
  Clone ID: PAT_MRT3847_35307C.1
gcactagtaaaaaatatgttaatggaaagattaatatcaaataatatgaaatgactaaaaaatgtaacacttttaaagatggcaacaatagatagcagatgatttttgggtcactagcaccaccttcctttaaaatgaatttagaagccaagttttatatgtgtcttagtaccaattggacactgagaatatataaaagggtagcagaaagatgaacagaatttgcagctgcagtccctcataaaaagcagtttgaatccttctatcaaattatgttattatggtctaacactgaaactatttcattcatcccatttcctactattggcatttgggctccttttatcttgtcttggtaccctggccaaaacatcatactccaatagcatatctttttggtgttgtttaacatgcaccttctctgttctatctcagctgttagatgagggtgatatctacataagtgtaaaaaggtatatataatcaatgattataagagctttctgatccatgctgtggctttgagggtgcattgtagagccatcactatcttc

SEQ ID NO: 71203 - DNA, 385 bp, Glycine max
  Clone ID: PAT_MRT3847_35308C.1
aagcaaccagcatgctgaatgatgtttattcgtacttagtttccagaatattgaattacttcccatataagtgactacaacgggatgggatggacatatacagatatcaaaaagccaccacaggcagcaaatgagtctccgactatagctgagataatgtagtatcactttcttcaatctcatcaaattccactggtttcccacaaacaagcttcctgtaaatcaaatatcaaattataaggacatttatacattcatatattaagaatcaacaacttagaaataaaacaatacaatacagctatttcaaaataaaaacagcaaattctctaacaaaataaaacaaataatttataaaaacaatggattagatgcaactagatga

SEQ ID NO: 71204 - DNA, 285 bp, Glycine max
  unsure (1)..(285): unsure at all n locations
  Clone ID: PAT_MRT3847_35309C.1
tantnctananngcgagcngccgctcgcgatctagaaccttcccttntccaacatgccaaacgacagcgttncgggtcttttcttcttcgttangctcttanaatgcctnctntctgntaatttccacgntgnccatattttcctaacgagtcaactccatgacgntgactcagtganttggaatggtaccggcccaaaccttaantanaagccggtgatngggatcttgaccaacccngcganggtgncttngncggtcnnaangganggngtttttaatngcg

SEQ ID NO: 71205 - DNA, 553 bp, Glycine max
  Clone ID: PAT_MRT3847_3530C.1
gtttcctcatgaggtccaattcaacactcagtcggttcatttaggcttcactcttcagacttagttgagcctcaccccttttggttggattcaattcatctcagtttggcgagcctaagccattctctcttgactgttttatccttcctagtcaaacaggacaactcacctattatgtgaatttggggcttattgttgttactgataccacataagagggaagaagtgatcctcaacattagcggtgcagttactccgatgccaaacgatgccccaacatgaatgtggaaggggagaagttcagatggttctttcaactactataagcagaagcctagagggtaggaggaatagatcacttgagagatcaagagacagtcaaagatcccttttgggtcaagattaaatctgtagacttagagtgaatacttctgacttgccactggggatactattgaaatcataactaagggagaatttacaactgttacgacagcgttattattatgcaacatggaaagctgatggaacaagatatatgatgctaataact

SEQ ID NO: 71206 - DNA, 444 bp, Glycine max
  Clone ID: PAT_MRT3847_35310C.1
cgtgtaacaataatagtctatacacacaaacatatgcatcttagtaactctatcagtagaaactaccataattcaggacatgcaacagtcatcggatttgacaatttatctcagcaataatatagctaactaatcaacaattcctgaaaataatcctaagctatctttatccagatacactggttaacacgttggcaagtgtaccaaattgtcacaagtagtaaagtaagcgaaagtccaagtgtcgaatccacatgaactttgtttgtacttagattaatgcaaacccaattttgaagcaatagacaaagaatttaaaataaagataggaaaatagatgagataaagatttaaagatcaaaattgaagattaagaaaattaaaaaattaaagtaaaagattaaaaaattaaagattaaaaaaagaaaatcagagcgtgataat

SEQ ID NO: 71207 - DNA, 815 bp, Glycine max
  unsure (1)..(815): unsure at all n locations
  Clone ID: PAT_MRT3847_35311C.1
ctctaactttcgcatattcgaaaaccaaaagcatgggtcagggaacaccgggcggtctgaaccggcagggtcttccgggggaccggaagccggacggcggcgacaagaaggagaagaagttcgagccggcggcgccgccggcccgcgtgggccgtaagcagcgtaagcagaagggcccggaggcggcggcgcggctgccgacggtgacgccgctgtcgaagtgcaagctaaggctaaggctgaagccgcaggaggagaaggccgaggaagacagatccaaggtcgatgatctccgaggttctcctatgagcgttggtaacctagaggaactcattgacgagagtcatgccatagttagatcctcggtggggcccgagtactatgttggtatcttgtctttcgtcgataaggatcagctcgagcctggatgcgctattttgatgcataacaaggttctctctgttgttgggcttcttcaagatgaagttgatccaatggtctctgttatgaaggttgaaaaggcacctttggaatcatatgctgatattggtgggtttagatgctcagatacaggaaattaaagaagcagtcgaacttcccctgacgcatcctgaactgtatgaagacattggtatcaagccttctaagggagtcattttatacggcgaacctggactggnaaagacgttgctagctaaagctgtggcanactcgacatcagcacnnnnnnnnnnnnnnnnnnnnnnnnnnnnnnnnnnnnnnnnnnnnnnnnnnnnnnnnnnnnnnnnnnnnnnnnnnnnnnnnnnnnnnnnnnn

SEQ ID NO: 71208 - DNA, 280 bp, Glycine max
  unsure (1)..(280): unsure at all n locations
  Clone ID: PAT_MRT3847_35312C.1
ttttttacctcgaacaactgctgctctagaagacgtcttcaaatcacttttatggtaacaaaatttgcctattttcctcatccccctcccccttggggttcttagattgtcatgatgtttaagtaatcaaagactaattttacaaagctggtagggctaacagtgtgaagagattcaaatgctcttgcattgttgtgtaataattaanagttaaaactattaattcaaataagagaattgaacacttgatcacttctacacctttgggtttccgttattt

SEQ ID NO: 71209 - DNA, 1702 bp, Glycine max
  Clone ID: PAT_MRT3847_35313C.1
gtggagaaaataccatggcgcttgcgtggtaaacacggggcactggtttcgaaccctcgttgtggttaggtcttctccactcgaatttgctatcgctaactttcgcatactcgaaaaccaaaagcatgggtcagggaacaccgggcggtctgaaccggcagggtcttccgggggaccggaagccggacggcggcgacaagaaggagaagaagttcgagccggcggcgccgccggcccgcgtgggccgtaagcagcgtaagcagaagggcccggaggcggcggcgcggctgccgacggtgacgccggtgtcgaagtgcaagctacggctgctgaagctggagcgcataaaggactacctcttgatggaggaggagttcgtggcgaaccaggagaggctgaagccgcaggaggagaaggccgaggaagacagatccaaggtcgatgatctccgaggttctcctatgagcgttggtaacctcgaggaactcattgacgagaatcatgccatagtttcgtcctcggtggggcccgagtactatgttggtatcttgtctttcgtcgataaggatcagctcgagcctggatgcgctattttgatgcataataaggttctttctgttgttgggcttcttcaagatgaagttgatccaatggtctctgttatgaaggttgaaaaggcccctttggaatcatatgctgatattggtggtttagatgctcagatacaggaaattaaagaagcagttgagcttcccctgacgcatcctgaactatatgaagacattggtatcaagcctccttaagggggtcattttatatggcgaacctggaactgggaagaccttgcttgctaaggctgtggcaaactcaacatcagcaacctttttgcgtgttgttggtagtgaattaatacaaaaatacttgggagatggtccaaaacttgtgagagaacttttccgagttgctgatgatctttcccctatctattgtattcattgatgaaattgatgcagttggtacaaagaggtatgatgctcactcaggtggagaacgtgagattcagaggactatgttggagttgctgaaccagttagatggttttgattcaagaggagatgtaaaagtgattcttgcaaccaacagaattgaaagtcttgatccagctctgctgcgacctggtcgaattgacaggaagattgaatttcctctccctgatatcaaaacaagaagacgcattttccagatacatacatcaaggatgacattagctgatgatgtcaacttagaagaatttgttatgactaaggatgagttctctggagctgatataaaagcaatatgtactgaagctggcttacttgctttacgagaacgccggatgaaggtgacgcatgccgacttcaagaaggcaaaggataaggttatgtttaagaagaaagaaggggtgccagaaggactgtatatgtgaagcatcttcatcatttaccccggccttctttctttattacagtctttttgttgttctgtgaacggatgtttgtattttgatttgtggtcgtttatgggtctacattatcacgggatttaatctcaactatagttacatagctttctttgatttaaaaaaatcgggaaaattttcctgccatttcttcaaagttttctttcaatttccttgaggcatcaaataaaaaaaaaaaaa

SEQ ID NO: 71210 - DNA, 261 bp, Glycine max
  Clone ID: PAT_MRT3847_35314C.1
aatttattaaaaactatatttatttgagtgaaattcatttaattaggtttgccctagttcatgcaagtggtgcacacttaattttaactacatgtggcatcaacttaactcttttcaccttctaatacagccactcctgttcctgcattcaatttaaatcccaaacatccattttcaacatttaatactggctggttccgttaaacaaaaatttatgatcacaaatttttttaatgagctcactttttgaagaggcattac

SEQ ID NO: 71211 - DNA, 293 bp, Glycine max
  unsure (1)..(293): unsure at all n locations
  Clone ID: PAT_MRT3847_35315C.1
agcggcaagacctggaagttcgtctcgcacatcgccagtngcggcgaangcgccccaacaacggcctgacccccgtctgggagcccttcctcatgctctacaagaacaagctcatctgcttctactccgaccagcgcgatcccaagtacggccagaagatggtccaccagaccaccaccgacctcaagacctggggcccggttgttgatgatgtcaagtacccgacctacaccgaccgccccggcatgccgaccgtcgccctgctgcccaacggcaagtacatcatgtcgtac

SEQ ID NO: 71212 - DNA, 507 bp, Glycine max
  unsure (1)..(507): unsure at all n locations
  Clone ID: PAT_MRT3847_35316C.1
agtgcctcctccacgttacgcttcagcttctcgttcaggtacggcaacatctccttcacgtccatcgttcccttcaccgtcaccaagtccttgcttccgtcgaggctcaccaattgaacacctgcacacaaccaccaccatcaccctcatcaaatgtttatattaattaattattggttttatacagagtacggtggttttgaagatcaaactacactgtgacggttgcattgcgaaaattcgaagaatcattcttaggttcaaaggtgagagagttgacctaattcatttttaattaaacatttgattattttaatataagtaattaattaattaaacattngatgagggtgatggtggcggttgcgcgcaggtgttccattggtgtgcctcggcggatgcccggtcttggtggctggtgcgggancgatggacgtgtgggggtagttgccgtccccgaacgtgatgctgacgcganncgtggcggtggccccgggcgcgtgggtc

SEQ ID NO: 71213 - DNA, 366 bp, Glycine max
  Clone ID: PAT_MRT3847_35317C.1
gctattaggttggaggtggagtgcggtcgagggtaactaaccaacgctaagcagttgttgagtttggttggtagtagatgagcgaagtgttgactatgtctgacgtcactggaaactagtctgcagtaaccaccagattcactacattacgcgctacccaccaatatgcctctcctctccactttcttctgcttctgtctctcacagttacttatgatcttcatctcatgatgtaaagaacagatatgagattctaaaaggctgattgattaagtttgaatgccttaatgacattctgcaacaaccacagatctggctgttgctataggtctgcattaaggggcaggatcaacgtgttttgcattt

SEQ ID NO: 71214 - DNA, 297 bp, Glycine max
  Clone ID: PAT_MRT3847_35318C.1
cgagatcctaactagttccctatcaaaacttactgcgccagggtcaaggtccaaatatgttctgacaatcctacataaatcgtgaaaatacgcacaaccgtcttgactatatcttaacaggagtgagatgcactgcacacgatttatttgatcgcatcatgatagaatagttgagcagctagaactaacctcaccgtccatgttacaatggacacaactcaaacaatgtgactaccgatggaaatcatttatggcgctcacaccatcaggaacgagcaaactcaatatctcaaactc

SEQ ID NO: 71215 - DNA, 1108 bp, Glycine max
  unsure (1)..(1108): unsure at all n locations
  Clone ID: PAT_MRT3847_35319C.1
tgagacatatttaaatactaaatatgaatatttttttcattaaacattagttcattatattatatatatatatatattataagagactaatataacccctagacaaattctggttggcctaattatatgttctctctttacacacacaagattcaataactgtcaagatgaagtaaacatgaccagaggtaaataccaccacatgatgtgtctctctcccattggcctttcagaaagaaggaaacattatccttccaagtagttccaaccagtttatagtgacatacataggagtaaattgaatacacaatctagatcagtttctgtctccttcttttttcttggtgtctgataattggttccgttcactaattgcccaatatcattactctaacactcaaaagtttaataacactacgtaacgaagaaagaaacattacccttctaaaccagtagtactatatattgagtgtgtccacacacaatattgcatacacaagaatctcacccccacagtttctggcaccaacatggatcaagagaccgaaccacaacctctgacctcaaagatctcaacagttgtaccagcaaccccgcgaggcgacgaggacggcgcgtaccacctcagcaacatggacctgctcatgaagctgcactacatcagagccgtttatttcttcatcaacgacgcagcgcaagggctctcgatttatgacctcaagaaacccatgttcccgctcctcgaccaggtcgtgcaactctcgggtcggatccgggtttctgaatcgggtcggcccttcttgaagtgcaacgatgctggtgttcgcatcgctgagtaccaccacgaccacacccttggggagtggtttcagaaaaatgggtgctcccttcaaggtctcgtccatgatcatgttcttggccctgaccttggcttctctcctttggtttttgtcaagttcacttggttcaaatgtggagggctctctctangactcagctggtcccatgttctaggagacgctttttcagccttcagcttcatcaccaagtggagtcaaatactggcgggtcacgcgccgccaagaatgcttgcatgtcaccaactctc

SEQ ID NO: 71216 - DNA, 470 bp, Glycine max
  unsure (1)..(470): unsure at all n locations
  Clone ID: PAT_MRT3847_3531C.1
tgcgagaagacgacagaagggtacgatatgaaattatacagacaagctttagcttaatactatcaaatagcaacggtgaggtaggccaacgccaagtcctggctcatattttattattaatattattggaatttacgctgcatgtgtatcttcgggttcaatattaactaaaaacaatgaattattagtataaagggattaaaaattataacaactacataattttttatttatcagtgaacaactatacataaatttttttgaaggaacaactatacataattaagtacataaaagttgatacaaattacaacccttacattcgttatatataattccacttcagaaggtaatacgacaaggttagtttccgcgcttactaggtagtcaaggggtnntttttttttttttatgtattttttnntttaaaggggggttagcttttttaaggtattaagggtggttacaaa

SEQ ID NO: 71217 - DNA, 314 bp, Glycine max
  Clone ID: PAT_MRT3847_35320C.1
ggctctcttgagaagattgctaggtacttcgaagttggatgatgcattatctccgaaagggaatactcatgctaccgaatggacccaaagttggagagggctaacatcgaccagaacacaatgggcgagtttgtcatccgtggtatcacatacactggacactacgagcctgttgagggaatgtgtgatattctcgacgccttctagaaggagaccggcgacgatattgccatccacgtagatgcagcatgtacgtggctttatagccctcttcacccactcggaagctggcaagaagtggcactctgagctac

SEQ ID NO: 71218 - DNA, 1496 bp, Glycine max
  Clone ID: PAT_MRT3847_35321C.1
ggactatagataaataatgaagatgatcccttcttcagaatccctgcaaatttcctttgacttagatacttcttatgcaactatagtgaggctaagagttggtgcataattaatcaaaatgttggccatattccacaaagcttttgctcatccacctgaagagctgaacagtcctgcatcttacaaaggttccaagaagcctaaggttcctgaggaaactctcaaagatttcctttcccaccatccctcacatcttttaatttgaatacttcttatgcaactatagtgaggctaagagattggtccataattaatcaaaatgttggctatattccacaaagcttttgctcatccacctgaagagctcaacagccctgcatcttacaaaggttccaagaagcctaaggttcccgaggaaactctcaaagatttcctttcccaccatcctcacaacacttgctctatgagctttggtgatgctgctgttctagcttatgtccgtcctgatcaatctttctctcgtcatcaaaggctgttttgtgggatcgatgacatatattgtctcttcttggggagcttgaacaacttgtccctactcaacaagcaatatggattgtcaaagagtactgatgaggccatgtttgttattgaagcttacaagacactccgtgaccggggtccataccctgcagatcaagttgtcaaggagcttgatggcagttttgcctttgttgtctatgacagcaaggttggcagtgtctttgcagcactgggttctgatggaggagtgaagctgtattggggtattgcagctgatggatctgtggtgatctctgatgatctagaagtcataaaagagggttgtgccaaatcctttgctccctttccaacagggtgtatgtttcacagtgaaggaggtctgatgagctttgagcatccaatgaacaagttgaaggcaatgccaagagtggacagtgaaggggccatgtgtggggccaacttcaaagttgataagttcgccagagtcaacagcattcctcgagtgggaagtcaatccaattggatggaatgggaccaacattagcttaaaaataaagccttaggataatgtaaaataaaaaaaaaaatgtcatctatgtatgctcctttcctaacttacccttctgaatttgttttgttttctgcttgcttgtgttgttttcctgtttccctttccggcattgtacatattgaattactttttcatacatgttaatccgttgatcatggtgcttgtgagtgagagagattagcacggttcaagtcaagaactcgtgtgttgcagtgttttatacctgaagaaggggtcctacgttatacatgaattaagatgcactaagtaggtcatcggaattgtaatgtaaaatggatgacataatgtacaaaatggaaataaaagggatgaacaagaacaaattgcatgtttggatttactttggtgatccatgttttcatac

SEQ ID NO: 71219 - DNA, 291 bp, Glycine max
  Clone ID: PAT_MRT3847_35322C.1
aaaccaaatcacaaatgtgattccagatgaatcctaaaatacttttttggggcaattaaaacttgatactgcacatgggtaccataaaacttggtaattttgcaataattcaggaaaattttttacagttcaagccttttaaagaaagaaaacctttttttagaagaagaaaaacccaaggaaatttttttttgggggcggggattcatacgggctatacaggttagtcacatttttacttttggcactaaaaaaaatgccataaaatttttttagggatgccaaaacttt

SEQ ID NO: 71220 - DNA, 416 bp, Glycine max
  Clone ID: PAT_MRT3847_35323C.1
atatcaataagcggaggtgatcaccatttatatagtctgtattctccttgcctgttggacatgtttagattcttttgtagaagtttatgtgagaaagaaattcgaacagaaattgcgtatcaagactttattacagattactctttatgcaaaaaaaaaaaaaaaaaaaaaaaaaaaaaaaaaaaaaaaaaaaaaaaaaaaaaaaaaaaaaaaaaaaaaaaaaaaaaaaaaaaaaaaaaaaaaaaaaaaaaaaaaaaaaaaaaaaaaaaaaaaaaaaaaaaaaaaatttaaaaaaaaaaataaaaaaaaaaaaaaaagggggcgccccaaaaagtttacagttttttttacggggtgtgagggtttaaaactcctttaaggggggcccaaattttatatagggggcgggtttttta

SEQ ID NO: 71221 - DNA, 194 bp, Glycine max
  unsure (1)..(194): unsure at all n locations
  Clone ID: PAT_MRT3847_35324C.1
cnagcctacacattgnancgaatncgtnatcctgantaccatgtnaagttgaggncanattngtccnnagactacatggantcanacaagccagcanctgagcttgtgaaantcaaccctacaagtgattatgctcctggnctggaggatacccttatnntgacantgnanggtattgctgcnggcatgcaaaa

SEQ ID NO: 71222 - DNA, 405 bp, Glycine max
  unsure (1)..(405): unsure at all n locations
  Clone ID: PAT_MRT3847_35325C.1
tgttgtggtgagtttgtgtttgtttcttctctgacctgaaaatgtcttgctgcggaggtaagtgtggttgcggaagctcctgcaagtgcggcaacggctgcggaggctgcaagactcgtaccctgacttgagctacactgagtcaaccaccaccgataccttggggatgggagtggcgcctggttagggttaatgggggggggcttgaatgggcgcgcccagttagaaccattggttgcaaagttgaaccaactggttctggcaccccctggcttggnaagggaggggtggggaaagcagccttcaagcaaagatggcccttattaaggaataatgataaactatgagggggtagcaaaaaacttatgtattatgtctgggatggctttccgccctctggtgttt

SEQ ID NO: 71223 - DNA, 417 bp, Glycine max
  Clone ID: PAT_MRT3847_35326C.1
cggacgcgtgggtttttgagtgacctgttgaattaattgcttacactttatgatagtataatgtgttaggatcaacaaaaaaaaaaaaaaaaaaaaaaaaaaaaaaaaaaaaaaaaaaagggggacaatataaaaaaaaaaaaaattacaaacacgtgaatgcgcacgaaataaatcttttatatagtgacctaaaatcaatttactgtgggcggttttacaacagtgagacagggaaaaaactggggttacccaaattaaaatccttgtggaacatacccctttttccacatgtggaaaaagcgaaaagacccccaccgatagcccttttcaaaacattcgcatattcaatggggaaagggacaccccctgtatcggggcataaaaagcggggggggtggggggtataacgcacag

SEQ ID NO: 71224 - DNA, 403 bp, Glycine max
  Clone ID: PAT_MRT3847_35327C.1
ccccagaaaatggtccggccattggaacgggggttggcccttccccaaccttggtttattggtttggcaatggaatttttgtaattaaaagaattccaccacttttttccgcctgggttaagggaaccttaggcccctttggaaaccggcttatttaacctaccaccaaacccaaaagggcccgggccttaccggtatttggcttccaagggaccggggtttaaccaccacccttaccggagccggcggttccaaccccggtaaactggacctttcttatttgggcaggccttagggattggggcccttggggtggagaaaggggttggctgatttttatggaccccaaccccccaaaaatggggagggtggccacccaggaggcccatttcccaaggattct

SEQ ID NO: 71225 - DNA, 408 bp, Glycine max
  Clone ID: PAT_MRT3847_35328C.1
gacaaaaataacataactatgattaattagtcagggtcagtccattaagttcccctcgcatgacatgtgtcaggtagggaaaggctcttaaactgagtacacacttagagaccattacatttgcccacactgattatataaccataactgactaaacccacagagagtttaatacataaactacaattaataatcatagaatgataaccaaattatgcaaggctatcattatcatcttataattaataagttgagtatatatatatatggatgaggtacttaatcataatctggagacctgcgagtgtaggaattgagactgagctccaaggaagcacgggaagcattcttgaacccttcttcagtatgataccagccattttcatcatagttataggaattagactt

SEQ ID NO: 71226 - DNA, 375 bp, Glycine max
  Clone ID: PAT_MRT3847_35329C.1
cccccaagaaaatctacaacaaatctttcaggttatcactatttttctgggtccaatctaaaaaaaagggctggcctcctctgggcaggagggcaaaggaaatagtaaaacggaaaacaaatggggggggggaaataaaattagcaaaactgggaaaacaattttgtaaaaatttccggttaaagggggaaaaaaaaatacaattcctttaaagagggccagattccattaaacaaacgggggaaccggttgggggatagcttcctaacaagcctttgggcataaaaaaaaacctaagtttttgaaagcctttttatgttttgggcatccccggaactaacaatttttttccccccactggggcaactggttggg

SEQ ID NO: 71227 - DNA, 423 bp, Glycine max
  Clone ID: PAT_MRT3847_3532C.1
atacagagaaatatccggacttttccaacgaaactcaccagaagatccttgcttttcctttgaaagctagctttcctgcacctcactgctgctttgtatcaggaataaaatccaagctaaaaatttgagctaacactaccttattatacataattccctctgaaccatatgatgcctccacctgaaccctgccctgaaactctaatagaatgaaaggggggctctctaaccttgttcgtccttacatactggcctacttctattcgtggactgaggacaccccttgcccctcccactcttgctcggagtgcccttgggtcccatccgacgctctctgctcaagactctgtctgacattgacgctccttagcataccatgtggattattgcgtatgcttgctcgtactgggcttactgggggat

SEQ ID NO: 71228 - DNA, 533 bp, Glycine max
  Clone ID: PAT_MRT3847_35330C.1
gataacctttattattcaaaattccggtcttactgccagcctggtttggaggggaagaattgcattgctgatgagcattacttgccaaccttcttccagatggttgatcctggtggcattgcaaactggtcactaactcatgttgattggtctgagagaaaatggcaccctaaatcatacagggctcaggatgttacttacgagcttttgaagaatatcacggtatagttctgctaaaactctaatttttacaacaatgcatattcattcttttcggcaagcatctatgcagaggagagggatagccttgtcgagggtaaacctctggcatcatcatcacatcccagtcttaatctgtttggatatctaaggatatgggtgaaatggaatgggttagattattttacaatgaaattgaagtttcccttccattgtttggatggtgagtaaataataagttatccaataacctcaaattagggtaaaagaaatacagatattggatgaaatgggatggaattagattccatcct

SEQ ID NO: 71229 - DNA, 418 bp, Glycine max
  Clone ID: PAT_MRT3847_35331C.1
gagattaagtcatgggcgagattgtggcaaccataaacatacttgagtgcatttgggctcaatccagacctccaaatatgatataattggtgctggttcacatacctacacatagattttccttgaaaatcagaagtatcaatgaggataacctcaagaaaagattcgatcgccatgtttgatgacaaacgaatcagatcctttaataacatttgaggtgtcagcgctcatcatggataacaaattctgcttaaatttgtctctagatgatgttgaaactccaaaaggtttcatgtcggatcttaaattattcaatctaaaattgcacttaccaaaaacacaatgggaggaaccattctgtgttgcgatctataggcaaattttttgacagaggtgcattttagagcaagtgtttgat

SEQ ID NO: 71230 - DNA, 269 bp, Glycine max
  Clone ID: PAT_MRT3847_35332C.1
cttgttttcaatgatgatatccaaggcaagaaagaaaaaccttgcaggtttgttagcagcactcaagatggttagtgggaccctggcagagatgacttatttgttccttggtgctggggaggctggaactggtattgcagaacttattgctcttgagatttcgaaacagacgaatgctccaattgaagagtgccgcaagttggtttggctggtggactcaaagggtttgattgttgatctcgtaaaggctcacttcagccattcaagaa

SEQ ID NO: 71231 - DNA, 548 bp, Glycine max
  Clone ID: PAT_MRT3847_35333C.1
tgagtgcttagtcactaagaagaagagataagccggaatcatgactttacacactacgcatcttgaagcacgatctttggtctaagtaacgatactaccgaagactaaattaacaataagaagcttataaaaaatttacaaaaccctaaacccggaaccggcgcaagcaagaacgcggtttggaacttggaaccattacagagtccagagcaatgtgtaccctcgaacccgacgtcatcggcatccgcggcttcgagctacgcctcattcgctgtaccatcactttctcacagccctcggattcccgccacgaacttgaatcgttggatggccacatcaacgacctcttgaattccatcgagcgcggcaactacgtcgaagcactcacctccgaaccttccttctccctcgtattccgactcgacggccatgaatcgctgccactcgacgcggaccgagtctactccgagttggtccaccgcgctgagtcctttctcagagacgccgccgccgccgaacagcgtcgcagggcaatactcgtcatgtgt

SEQ ID NO: 71232 - DNA, 305 bp, Glycine max
  Clone ID: PAT_MRT3847_35334C.1
gcaccagatttaccggaatccccatgcttttctccagttaagtaaacttaattcaaaatttctgagccaccttcaattgattcatctttttaacaattactgtaactagagtacttaaccgtagaactatagcaattaatgtcaccatgtgttgtccttcatttaacagttactccgtactcaattattcccttcgtttttaattataatttctttaaattaattcatgtttttttaaaaaaaataatttaattaatcacattaaattaattaattatattattatattaaaatgatcatttttt

SEQ ID NO: 71233 - DNA, 159 bp, Glycine max
  unsure (1)..(159): unsure at all n locations
  Clone ID: PAT_MRT3847_35335C.1
agctcctaggcggcggccgctctcgggggngggaaaacagaagacaaaanacnnaagggattaatcggcggggtcttgccttttaatgatgaacaagtcaagcaagagttttcctgattcctttggtttttttataagcgttgccctgatacctatatg

SEQ ID NO: 71234 - DNA, 129 bp, Glycine max
  unsure (1)..(129): unsure at all n locations
  Clone ID: PAT_MRT3847_35336C.1
ggggttccgattgaacagaattcgaacggggacgcactttcaattttcgggacaaaactggtcttcgccgttgccctacagcctaaaaatcaatcggttaggccttggggggcaccagcnncaggtgcc

SEQ ID NO: 71235 - DNA, 323 bp, Glycine max
  Clone ID: PAT_MRT3847_35337C.1
cttgatttttggttgtgaacttctcatgaatgatgagtgcgggacgcgaattccattccttctatataatgcactctaggtgatgaggaaagaactctctcttcccatggattgatcgatggggaaatagacacatggcatcgcgactcagacattctacattgatttttgtgggggggctggtaacatatgtgggcgctggatcacctacattaactgtgttcctggtgatcttgtatgcccttttacctaattttgtagattctcatgcgctggtcatgcacagggccaacttgctaaaatgtccttgagatgccaatctg

SEQ ID NO: 71236 - DNA, 1626 bp, Glycine max
  Clone ID: PAT_MRT3847_35338C.1
caaaataaagtaaagtcggcttcgtttatttcagaacacgagagaaagggagagagaaagttgataaaaccgtcaaatttgattcctctgaattgaggtattgtgtaagggcactttctgttacatcgttttttcattttgattttggatggataaaggtaaaggtgccaaggcattagcgacctctttgcaaaacctcgatttgaatcctccatccaacatcaagtccaagtcttccattacaatcgcccaccctcaattccccggattactgcctaagaaggcaaagcctctgagtttagtcagcctttgtgttggagttcttggaagacatttggaggatattattgcagatttgagtgaaattgctatcaacttgccagctgatataaagatagcagtggcagctattgctagaagaagaaaattgctgaatgatgatgtcctgatcgcattagctgatacttcctgggaaatccttgatgtctccggctcagatgtctctgattttggcttaataaaagcagctgaagtatgtagattcattaaagctctagatataagccggtgcaccaaaattactgctaatggtatatctgagcttgtgaagcactgccatttattggagacattgagatgcggagggtgtccaaggagtgacaacactgcacggagatgcttaggcatatttaaaccaaagtttgatgattatgtggaggaggattcctgggaggagcttgatacgaaagaaattgccagtggtgcacaatcactcaggtggctagtatggccaaacattgataaaaattctttagaggacttttccaccgagtgcccacgtgttgtggtaaatcccaagtcatcaccctttgggtttaagggaactgaggttcctcaggaagcattacaaaatatcctattggatgatgaagttgtcaaggacattgatcccagaacatggacaatgcatgggtttgcattgaagcccatgtctccatctttaagttccactgaattatcagtagctgaaaaattcagacttgcatttgtggaaagggacaaccgattagctccgaagcgagctaaaaatgctcggcaacatcagcgccgtgcagtgcgggaattgatgctgatcagcacaagagccaaggcaatggtcttagcctcacaagtgagcaagtcccttcatggccgaagctcatagaattctcacatcacatgcatttttcagttgcctcaaaatgtactactaacttcttctgtactgtatatagtaagaagttgttggtcacacagattttgaatcttaagatatctcctttgacaagtcagaaagatcagagctttcaatttttgccttgtttgaggttctgaccaagtgaagcggggttattcctctgtcaaaatcaaaactgcttataatggaccgttatgagaatggttgatgagaaaaagaagaacacggcaatttacaccctgtgtgaaatatctcaaaccgtttccaatataatttttctaatgcaaaagttttggctgcaacttaaattttgatttcagacagatgcggacaggtttttaagctacaagtatatgtgtcgattggagttagtaaaattgattttggat

SEQ ID NO: 71237 - DNA, 505 bp, Glycine max
  Clone ID: PAT_MRT3847_35339C.1
gggtgttttttttttttttttttttttttttttttttttttttttttttttttttttttttttttaaccccacccaagggcaaaaattcatttggggatggaactccccctcctgctttttaatccaaaagaaaaactggcttattttttatcatcgaggggccatagttttcagagcccttcccagaccagaaaaaaaaatttttgggggacaaaggcgggggcaaataaaaaaaaagaagcccccccaaaattggggaaagggttcctcacgctgaaggaacaggggtatccttgactgactcacgccatgggtacttttttggaccttccttggccaaaattttaaaaacaaaggggggcggggcaacaacaagccgggatttgatttccataaggcccttataaacaagatcaattgttttttaaacggacattccactagggggggggcggcccctctttggaagggaaaaatggggcccataaccaaaagccccctttt

SEQ ID NO: 71238 - DNA, 406 bp, Glycine max
  Clone ID: PAT_MRT3847_3533C.1
aattatcccatgttttctagggattgaggaaactgaaagcggaatcctattaatacataaattttcggttaatataaccacgggtgattcaaattatggactactgacgagataaactttgacttgacagaataagaaaggagggaagtgattaaaagtagaggcattgatggtgatgatcttgcaaagtgagctgatgaatttgaacaacatgttgctaatgaaagtctcaaggatcaaattcatgctggagacaaggtgaatcttactaaagttaataagacaggcataaggtatgaaccgatatgcagagtgtggggggagaggacaaactacttactgatggaaagttgtatgagggccaacatatggctgcacttaacattggtggacgtggaaggcatgt

SEQ ID NO: 71239 - DNA, 204 bp, Glycine max
  Clone ID: PAT_MRT3847_35340C.1
ccgttactaaaccgaaaaagatgcaagatatattaggcgagcattctggtacagtcattgtactagaacacgcggtgctcaccatgtgctaccgattaaggatatactactttgcacgtatcccagactctaagaaagcgcttccatttaggtgagaaccagtgcaaatcccgatgacttgaactgtggggggaagggcttgcg

SEQ ID NO: 71240 - DNA, 594 bp, Glycine max
  Clone ID: PAT_MRT3847_35341C.1
gtcatgagctgagtgttggagacccatcaagaaaaattgtggagatgatatttcaaaaagcttggtttaacaaatcaaagccagtgaagaaggtcagaacagtcctcagggtgagttactcagaagaagtccttgaaaggtttgagaagtatagagaatatgtcaagaaggtggcctctgagcaaaatccaaggaatccaaggagcgcagttgatgggaacgaactgttgcagttctatggtactacaatgagatgttttcaaggaaaatctgctaagaaagttcatgatctgtgtaaagatccatcttgttatctttgtcaaataattcagtttaatttcaacacacgatatgccgagattcacttgaatacaagtgacaaagagtcgagaaacagaacaactgccactgccagagtacataatgtgaaaaaagctgcaataatttgcaggataattgctggaactgcagtaaatgcagttgatggtgaatatgaagggtctcactcaactggggtgggagaaatgcagtttcccctaccatagtttgtagtaaaagatccccagttctattcttcctggttttgtaataatt

SEQ ID NO: 71241 - DNA, 116 bp, Glycine max
  Clone ID: PAT_MRT3847_35342C.1
actcgttagaacacctcagagaagactacagaatgttatcactatgtaattatacttgggctatcggcattaattaaatcacgtcgtaactactctacatatgacgaatgcatata

SEQ ID NO: 71242 - DNA, 875 bp, Glycine max
  Clone ID: PAT_MRT3847_35343C.1
cccacgcgtccgtacggctgcgagaagacgacagaagggggggttctcctttggcagaaaaagcgatgattgattgcttctctctatctccacatttcttgcgtactcttcccttccgcaccaaatcaaacctttttcttatcttcctcgattcacgcaactctaatatcttcaccttaattgacctttgcgtgatttcggtttgaccaggtcgtttatcgagttttcgctttgacccttttacctctttgatcttcttcagtgtagaattctccgaattgaggtatggggaggctgtttgtgacccatctggaggggcagatctatagctgcaaacactgccgcacccaccttgctctctatgaagacatcgtttccaagtctttccacagcagacatgggagagcttatctcttcagtaatgttgtgaatgttactgttggagtaaatgaggacagacagatgctcactgggatgcatactgtggctgacattttctgtgtgggctgtggatcaattgtgggttggagatatgagactgctcatgaaaaaagccagaagtacaaggaaggaaaatctgtacttgaacggtacaaggtgtcaggtcctgatggcaataataataataattattgggtcagccatgaagcacatgttggtggaagtgatgcagatgatgcttagtcatctgccattgacaattcaattgtacattccttaatcccccttcttctgttgttcaatgaatgttgatcttattagggcaatttagcaacattagctttttgcccaaaagacaattgaaatacatttgtttgttaattctgatgtaaaaaaaacacttctaatcaatgctgtttatctagttgtaaaaa

SEQ ID NO: 71243 - DNA, 370 bp, Glycine max
  Clone ID: PAT_MRT3847_35344C.1
ggggggggaagggaacttttttttttaaaaataacattaattggtcccctaagcccccaggggggtgaaactagcaaactttccctgttaataaaattgaaaaaaagtcctgtttaaggggaatgtttagggccaaaaaaaaaagggggtaaccaaaccaaatccgaaaaactcctttaaaacccacggttcctaaactttttatttatatacttgggaccccaaaatgaaaaccccaatttatttttttttttcctaaaatgctcatggggcttaaagggtcattattaaaagctttaaggggtgtctggatctttatttgcaaaagatctttttttttttaatttgcctcaaagaaaacagttttaaa

SEQ ID NO: 71244 - DNA, 396 bp, Glycine max
  Clone ID: PAT_MRT3847_35345C.1
gctaaaacaaccactattttgtggcttattttcaataacttctgtataactactatatttggatatttatacaatgcgaagccgaagacaacgtattgggccttggaggcatatgccctttttatgtagaacaagcaccaacgctttgggggtaccataatcctccccaagaaataaaagaaaaagtgaacacacagtcctttaaggacaagggaatggggagaacctatctccctaatcactttgattacggatggcagaatcacatgcagcacttgcaactccaaaccttttaaaataacaatgtataacatgtgttataaaactaaaaccactttcccacccaacttcaaccaaacctgtattatcaaactccatagaatctaatgatttaaa

SEQ ID NO: 71245 - DNA, 445 bp, Glycine max
  Clone ID: PAT_MRT3847_35346C.1
ggactagaatcatgaaataaatttttcacatacatacacattaaggggtacacaataaagttttcacacttttctaacatttcccatatgaaaaacatatcatttttcacattacttgaaaggggtgacacacaagaaatcaatttcatctatccacacacacacacaaaaaaatgtagatcaatgcagcttttagatccatccccgttccttctccttttgactattcttttgttgaatatctttagctcctcctcttctaccagatcctacttgcccccttggtgccaatctccccctacttccaatggaaactctaactttctccatccctacatttacaccaaccttcctcatgtgctgctgaagtggagacttaacctgtattttcttgtgaaggcttcttcttagtatgctaccaatcctcttagcaccacttctaact

SEQ ID NO: 71246 - DNA, 965 bp, Glycine max
  Clone ID: PAT_MRT3847_35347C.1
agagacgagacacctcactcgacaacgcgcgcgccacttgtttttcgctccgtcccataatccaaaccaccctctgattcccgaacccaatgacttctccgctggtggcggagggcgccgccattacggcgttccggtcggtgatgctccgggtgcatcaggcggcggagagatccgggtccaagcccgaccgggtccgggtcgtggcggtttccaagacaaaacccgtcactctgattcaacaactctacgacgctggccaccgatacttcggcgaaaactacgtccaagaaatcatcgaaaaagctcctcaggtggagttccaaatctggccatggtccagagtgtggacaatcagaaggtagcaaatcatcttgaccgtatggtatcaacccttggaagaaatcctctgaaggttttggtgcaagtaaatacgagtggagaagaatccaaatctggtattgatccttccaactgtgttgagcttgcaaaacatgtgaaattgagctgcccaaacctagtgtactctggcttaatgacaataggaatgccagactatacctcaactccacagaactttcagagcctatcaaattgcagaactgaagtatgcaaggcacttgaaatgcccgaggaggaatgtgaactgtcaatgggcatgtctggcgattttgagttagcgattgagatgggtagtactaatgtaagaattggatccacaatatttggaccgagggagtatgcaaagaaacaataatagcaagaagttgtaatctctcccttcctccctccctccctctctctctctctctcctctgtctatctatgtatacatacagactgtattcattaatgcacagatgttatgaactgtattgtattcatttacctttgtaattgacgcgatggaattggtaataataaagttcatatctctacaaaaaaacaaataataatcgatatgc

SEQ ID NO: 71247 - DNA, 1925 bp, Glycine max
  Clone ID: PAT_MRT3847_35348C.1
tcgaatcgactaagcaagatatatcacaagatatggcattcgacgcttatttccttttgggcctcatagctcttgttacttgtttagcacttccaaagttacatgcgaattagaagcagatacagtttcacctgttattgacatttcactcaaccggaacagtttcccagaagggttcatctttggggcgggatcttcctcgtaccagttcgaaggtgcagcaaaggatggtggtagaggaccaagcgtatgggataccttcacccataattatcctggtaagatcatggatagaagcaacggagacgtggcaattgactcatatcaccactacaaggaagatgttgggatgatgaaggatatgaatttggattcatatagattttccatttcttggtcaagaattctcccaaaaggaaagctaagtggaggtataaatcaagaaggaatcaactattacaacaaccttattaatgagctaatggctaatggtatacaaccacttgttactctttttcactgggatcttccccaagcattagaggatgagtacggtggcttcttaagtccacgcatagtgaaagattttcgagactatgcggatctttgtttcaaggaatttggtgatagggtgaagcattgggttactttgaacgagccatggagttacagccaaaatggctatgcaaatggacgaatggcaccgggtcgttgttctgcatggatgaatttgaattgtactggtggcgattcttcaacggagccttatttggttacacaccatcaacttcttgctcatgcaaccgctgttcgtgtgtataagaccaagtatcaggcatctcaaaaaggtttgattggtataaccttagtagctaattggtttttgccgttgagagataccaaatctgatcaaaaggctaccgaaagagcaattgacttcatgtatggatggtttatggatccgttaatatctggagactatccaaaaagcatgcgatctttagtcagaacaagattgccaaagtttactacagagcaatcgaaactacttatcagttcatttgattttattggtctaaactattactctacaacatatgcttctgattcacctcaactaagcaatgccaggcctagctacttaacagattctcttgtcactcctgcatatgaacgtgatgggaaacctataggaataaagattgcttctgattggctatatgtttatccaagaggaattcgtgaccttttattgtataccaaagaaaaatacaacaatcctttgatttacatcactgaaaatggtataaatgagtatgatgaaccaatattatcacttgaagaatctcttatggataccttcagaattgattatcattatcgtcatctcttttatcttcaatctgcaattaggaatggcgcaaatgttaaaggatattatgtatggtctttgttcgacaactttgagtggtcttcaggctatacatcgcgatttggaatgatttttgtggactacaaaaatgaattaaagagataccaaaaactctctgcattatggtttaagaattttctgaagagaaaaaccagactttatgcctctagtaaatagtattgtgaagttagtttatcaaatgattatattggtaaattgattattgatttttatttattattcttttattcaaaagaggtcctattggacttattggggaaatagagatttgttagatttttttttttctctaaagaggtcctatcggacttagaaggaaatagagatatatttgatcattctttcattctaaagaggtcctattagacttagaagggaaatagagatgtagatttgttgatagttgctgctaatgttacagtaataagaaggaaagaaacgttatgaatgttatgataaatatgtcattgac

SEQ ID NO: 71248 - DNA, 1109 bp, Glycine max
  unsure (1)..(1109): unsure at all n locations
  Clone ID: PAT_MRT3847_35349C.1
cggtgtccaaccacctcaacatagagacgagacacctcactcgacaacgcgcgcgccacttgtttttcgctccgtcccataatccaaaccaccctctgattcccgaacccaatgacttctccgctggtggcggagggcgccgccattacggcgttccggtcggtgatgctccgggtgcatcaggcggcggagagatccgggtccaaacccgaccgggtccgggtcgtggcggtttccaagacgaaacccgtcactctgattcaacaactctacgacgccggccaccgatacttcggcgaaaactacgtccaagaaatcatcgaaaaagctcctcagcttcctcaagacgttgagtggcatttcattgggcatttgcaaagcaacaaagtcaaaacacttttgggtggagttccaaatctggccatggtccagagtgtggacaatcagaaggtagcaaatcatcttgaccgtatggtatcaacccttggaagaaatcctctgaaggttttggtgcaagtaaatacgagtggagaagaatccaaatctggtattgatccttccaactgtgttgagcttgcaaaacatgtgaaattgagctgcccaaacctagtgttctctggcttaatgacaataggaatgccagactatacctcaactccacagaactttcagaccctatcaaattgcagaactgaagtatgcaaggcacttgaaatgcccgaggaggaatgtgaactgtcaatgggcatgtctggcgattttgagttagcgggaatgaattgacaattaccataggaatgaggttctttgatacttgatgtgatgctgatagtgtatgatgggtagtactaatgtaagaattggatccacaatatttggaccgagggagtatgcaaagaaacaataatagcaagaagttgtaatctctcccttcctccctccctncctctctctctctctctcctctgtctatctatgtatacatacagactgtattcattaatgcacagatgttatgaactgtattgtattcatttacctttgtaattgacgcgatggaattggtaataataaagttcatatctctacaaaaaaacaaataataatcg

SEQ ID NO: 71249 - DNA, 267 bp, Glycine max
  Clone ID: PAT_MRT3847_3534C.1
tttttgcttgggggaagccggaccaacaagcgagggccaaatcagtcagatttcgggactagcacggccatctagccgtcacaaacccaagccgcatactcgggacataccgctgagccatcttctaaccctaattgccaacatggaatcggaaaccctatatgacaaccctatgcttctgtttacccctcaccaatcaacctcacgtagggatctctccatgtctccgaccccccaggtaacatctgctacagctgatgaagacct

SEQ ID NO: 71250 - DNA, 371 bp, Glycine max
  Clone ID: PAT_MRT3847_35350C.1
aattgcaggcatgtctagcattgaacttaacgtaaagcagcaaggagaaccaacccgggttcagcctgcacaggaaacagaaaagggactctacttcctttcaaacctagaccagaacattgctgttccagtgcgcacggtttattgcttcaaatccggttctagaggaaacgaggatgctgcacaagttatcaaggaagccttgtcgaaaattcttgtcccttattaccccatggctggcacgttgatgataagcttggaagggaagttaatagtggataaccctggggagggtgcggtgttcgttgaggctgaagcagatgtgacattgaagagattggggacttgacaaagcctgaccctgatgctct

SEQ ID NO: 71251 - DNA, 1818 bp, Glycine max
  Clone ID: PAT_MRT3847_35351C.1
tgcaggcgtccggggacgaagcaacgaatgtaaaaaagagaggttgaagaagcaagcaccaacgtgaataccctaattcggagggtttcagttttcgccctcttttctcatctccaacatcttcgtcgtcacggaggctagtcttcctgttatcacaaacaatgtctgacggtcaagaatcagacaagaatattgagatatggaagatcaagaaattgataaaggcattggaagctgctcgaggtaatggtaccagcatgatttctctgataatgcctccacgtgatcaaatatctcgggtcactaagatgttgggagatgaatttggaactgcttcaaacatcaaaagtagggtgaaccgacagtctgtgttgggagccattacttctgctcagcagaggttgaaactatataacaaggtccctccaaatggtttggttctttacactggaaccattgtcactgaagatggcaaggaaaagaaggtgacaattgattttgagcctttcaagcctatcaatgcatcactgtacctctgtgataacaagtttcacacagaagctctaaatgaacttttagaatctgatgacaagtttggtttcattgtgatggatggaaatggcaccctttttgggactttaagtggaaacactcgtgaggtacttcacaaatttactgttgatctaccaaagaagcatggtagaggaggtcaatcagctttgcgttttgctcgtcttaggatggaaaagcggcacaactatgttaggaaaacagcagaatatgctactcagtatttcatcaatactgccaccagtcaacctaatgtttctggacttatacttgctggttctgctgacttcaagactgagctaagtcagtcagatatgtttgaccctcgattgcaagcaaaaatattaaatgtggtagatgtttcttatggtggggaaaatggattcaatcaagctattgagctatctgcagagattttatcaaatgtgaagttcattcaagagaaacgcttgatagggaaatattttgaagagatcagccaggacactgggaaatatgtctttggggttgaggacactttgaaggcactggagatgggtgctgtggaaacactcattgtatgggaaaatttggatattaataggtatgtgctgaaaaatggtactactagtgagattatcataaaacacttgaacaaggaacaagatgctgatcaaagcaacttccgtgattcagccacctctgcagagttggaagttcaggagaagatgcccttgcttgagtggtttgccaatgagtacaaaaaatttggatgctccttggaatttgtgaccaacaaatctcaagaggggtcacaattctgcagagggtttggtggcattggtggaattcttcgttaccagcttgacatcagatcatttgatgagttatctgatgatgaagtgtatgaggattctgattaagtgcctggtactgcagaacccttactttgttttggatgattgcgtcctccaagcatgatttggatactattgattatggttctaagacttagactttgccctttggtttttgatccataagatgtgtagcattcacttttttcctttcctctgcttcatacattttgctattttgttactcaatgtatgcttatggcaactctgccagattatgcgctgattcttcaagaaatagcactcaggaagtcatgattcgaagtgttttattttattctcttgtgatatctagatgaaggtggcttctggattttatagtattaatcttggttacatgattgatgattcc

SEQ ID NO: 71252 - DNA, 557 bp, Glycine max
  Clone ID: PAT_MRT3847_35352C.1
ctcgcgcccaattctgcagagggtttggtggccctcttgagatttgaattggtcacaaattccagggagcatccaaatttcaagagggctcccaattctgcagagggtttggtggcattggtggaattcttcgttaccagcttgacatcagatcatttgatgagttatctgatgatggagaagtgtatgaggattctgattaagttcctgttactgcagaacccttactttgttttggaagattggggccttcaaaaatgatttggatattattgattatggttctaagacttagactttgccctttggtttttgatccataagatgtgtatcattcactttttccctttcctatgcttcatacattttgcatttttgctattagtccatgtatgcatatggcaactctgccagattgtgcgctgattcttcaagaaatagctctcaggaggtcatgattcgaagtgttttattctagatgaaggtggcatctggattttatactatttcttggttacatgattgatgattcaaataactcgtgttgcagtcttgtt

SEQ ID NO: 71253 - DNA, 374 bp, Glycine max
  Clone ID: PAT_MRT3847_35353C.1
gtcttcctttcgtctctttatccacaaagtagtagacctttacgcgctagtgtgtaatgttcgcacacataaccaatgtacatggactgaaaatagctcatgtaagctgaaacaccacttgtataggtggtatgcagtagctaccgatatacagtagaagttctctgactgatttcctacaatggttgagaatgctagcattagagacattcatggcgtctatttggagcagtacctggtgcttgatgatctgacagttggacatttggcgtacgaagatctaaagctgattatgcttaacgcttagaaggcgatctttatctttgcgaggaacactcttccaccgacggctttacttatgtctgccatttacg

SEQ ID NO: 71254 - DNA, 124 bp, Glycine max
  Clone ID: PAT_MRT3847_35354C.1
tcacataaatgctaggcatccaaaaactattggaaaatcatacaattcgataaccaaagcctgctttttggccatgacttgaaacaaaatttacaatcccttttagatggggctggttataaat

SEQ ID NO: 71255 - DNA, 374 bp, Glycine max
  Clone ID: PAT_MRT3847_35355C.1
gacatttctgtctgctatggggcatgatagttgaaaggatacaatgccagatgatcctgtcattggggggaagtagacaaccatcatccatgttgctgcatatggtcctcaaacctgatttttcaagttctctaatttcatggcaccattgcatgacaccatgtcacaaaaaactgtaaggattcaaacgtcacacagtacaaccctcattgtattttgctatctcgcaaccctggcttttgacatttgtctatgaaccttatgggtggatgaatcttactggacaaacttgcaagattgaatcgcacttataccgatttctccacttatgcacttgtatagaggagctgttcggaagagagctgaccaatgat

SEQ ID NO: 71256 - DNA, 504 bp, Glycine max
  Clone ID: PAT_MRT3847_35356C.1
gaatcatgcaacaaaaaatggtactgtgattgagataactattgaggatcaaaatggaaaagaaacagaagagggaaacttgaagaacatcatgaattcggctagcaatgtgtgattaattaaccaatgaacaagtccaaagagaaagaaagaaaaaagcaaaaaaaaaaaaatgaggtcaaaaaatattttaacataaaagtacaatcactctacttggccaagtggggcctcttctcaacccaagaacagtacgagtactttggagtttaattagggttcttcttttgattaatgcatttgccttaatttgtagttgtcatatgttagctggtcatatgttagcatgagcatctctctttggcctcttccatcgctctcactgtagtaaaacgtgtaacaacgaatgtatcttctcttctttcattgtattcctcagtcaaactcgtcaattctctctttcctttgaacgcgtaataatatatgttcatgtgatgggctgag

SEQ ID NO: 71257 - DNA, 144 bp, Glycine max
  Clone ID: PAT_MRT3847_35357C.1
gggttctgatgctcattggcttagactgcagggaccatggtaaaaatccaggtagcaggtgtctaggttgtgtattggtaacatgatagagtgtggtaaagagaacttatgatttaaatgacatgaatgctcggatttttgatg

SEQ ID NO: 71258 - DNA, 329 bp, Glycine max
  Clone ID: PAT_MRT3847_35358C.1
ggctcgagcacgaacacaacgcacatcataacaattgccaaacccaaccattgctttttggctaccggaagcattgacccaaaaccatcaaacccaaatccctttatcattcctaactacaactcatcaaagccttgcagcccaacgaaccatcaatcgttcacggtgctgatcgggtacaggaccaacctctcaccaccagcagagaacggctgtcacttagctgtcaactctaagccattgaactctcatacttctaaaacagtgctcttccaacgattggaactgttccgaacaaagaggaatctatccgtgcgtgaagaatccat

SEQ ID NO: 71259 - DNA, 430 bp, Glycine max
  Clone ID: PAT_MRT3847_35359C.1
cccacgcgtgcgaatacgcataggaagtgtgaaagatagagagcccgctatataccctgtgatgggcttttacaagggcctctatgaaagccaatatagttcataatagattggaagacgtagtgtgagacttaatattgctaagaattatggcttcgataaaagcctctatgaaagcctaactgctcatgaatagatgaatgtatgtgagactcaaaatctgtggggaaaattgactactgggtggactactcattgagctagacatcgagctatatcgatgttgattaagattgaggctcataatgaggcatataagatgtcatccatgaaaactccatgtggaatcctacgttggccttgacatatgctatatctatgacttaatttcttgcctctgtctatttctcaaaaaaaaaaaaaagggcgg

SEQ ID NO: 71260 - DNA, 410 bp, Glycine max
  Clone ID: PAT_MRT3847_3535C.1
agctcggaattcggctcgagtacggctgcgagaagaccacagagggggcccatacactagataacctgattttgctgcttcgagattgaggaaagagtaggatatttctacttaaatggtactccatcctccttccatccattctcctagaaaatgattaccccatttagttcatgaaaaacaaaatgagtaaatacccataatttgatcctaaaaaagtaccccatttagttcatgaaaaaacaacaaataattctaaaaaatataaatgagacattttaacctttcttgtacactttttaatattttcaaggatcacttgaggtcgttcatgctctctttaagagaattatttaacacccattgttcaagaactgatgttatacttaaattacaaagaccataactga

SEQ ID NO: 71261 - DNA, 237 bp, Glycine max
  unsure (1)..(237): unsure at all n locations
  Clone ID: PAT_MRT3847_35360C.1
aanggattggtgcatgcatgatttgatcantagtgtaaagttgtcttcgtatactttngtataaattttttggtancaggctatcnagatctntcgggncatattggcantctttaggtattagtgttccangaaaatggagaanattgcaattccaccggnttnagataatattntctntcnggggnntntnatcgnattgtggcttnnaaaanantggcagnngggaacccnctg

SEQ ID NO: 71262 - DNA, 2151 bp, Glycine max
  Clone ID: PAT_MRT3847_35361C.1
attaattccaggttggacatagttcaagcatttgtagaggacactgctcttcgccaagatctgaggcagcatctgaaaagaatatcagacattgagcgattgatgcacaatattcagaagcgacgagctggtctgcaacatattgttaaactttatcagtcaagtattagactaccttacatcaaaagtgctttggaaagatatgatggacaattttccacaatgatgaggagtaggtatctggaacctattgagttatggactgatgatgagcacctgaacaaattcattgggcttgtagaagcttctgttgaccttgatcaactggagaatagggaatacatgatttctccaagctatgactctatactagctaacctaaaggaccaacaagaattactagagagccaaatacaaaacttgcatagacaaactgctgatgatcttgatctgcctatggacaaggcattaaagttagacaagggcacacaatttggacatgttttcagaatcacaaagaaggaagagccaaaaataaggaagaagctcaatactcagtttattatactggaaacccgtaaagatggagtgaaatttaccaacacgaagctcaagaaactaggggaccaatatcaacaaattcttgaggagtataaaagttgtcaaaaaaagttagttgatagagtagttcaaactgcggcaactttctctgaggtgtttgaatctttagctgaaataatttctgaattggatgtattactgagctttgctgatttggcttctagttgtcctactccctacacaaggcctgacatcacttcatcggacgaaggagatattactttagaaggatgcagacacccttgtgtagaggcacaagactgggtgaattttataccaaatgattgtaagcttgtcagaggaaaaacttggtttcaaataataacaggacctaacatgggtgggaaatcaacatttatccgacaggtgggtgttaatattttgatggcacaagttggttcctttgttccttgtgacaatgccagcatatctgtccgtgattgcatttttgcccgtgttggtgctggtgactgtcaacttcgtggagtttctacctttatgcaagaaatgcttgaaactgcatcaatattaaagggagctactgacaagtccttgataatcattgatgagttgggacgtgggacatcaacttatgatggatttggtttagcttgggccatttgtgagcatattgttgaagtaatcaaagcacctactttgtttgccacccactttcacgaattgactgcattagcccttgaaaatgtaagcaatgattcacagaagcaaattgttggtgtggcaaactatcatgttagtgcacatattgactcatcaactcgaaagctaaccatgctatacaaggttgaacctggagcttgtgatcagagtttcggtattcatgttgccgagtttgcaaacttccctgaaagtgttgttaccctagctagagaaaaggcagcagaattagaagacttttctccttctgcaacatccttaaatcatactacacaggaggtaggttctaaacgtaagagagcatttgaacccgatgacatgtctcaaggggctgcaaaggctcgccaatttctagaagcatttgttgctttgcctctagaaaccatggacaaaatgcaagctttgcaagaagtaaagaagttaacagatactttggagaaggatgcagaaaactgtaattggctgcaacagttcttgtagtatgaaaaaaaacatagtcagtacccatgcatgttgtgaattttgaagagcttcttgatgtacatgatgtgttcaatggattgggtaaaaaacagaactgtaccagggtgttttgttcatttatacgctgagtgtagggaaggttaaagcttctagcatagccctgctagaaaagagaaatgtgtattcgaatcttgcttgccttttattttagttttcaaaatgttaaaagaccatatgggcttgcgtcctggtaccctatggataatatatttaacagctattggtcgtattatcaaagcatgttttccagatttgtctgagtatagaaactttaccattaatttattcaattttacggttgagatagac

SEQ ID NO: 71263 - DNA, 305 bp, Glycine max
  Clone ID: PAT_MRT3847_35362C.1
ggctaggcgttaactactctcaacgtgcttatcctcggatttttggccatgaagcatctgtaattgtggagagtgtaagggaaggagcgagtgtatttgatgaaggggtcatattagttgcaatactcaatctggagtgtggagtagtcataagtgtcaaggtggacatcaccaacttgggcgagggtcccacacttcaatctaaacataaatgagttggggtgatctgcccaaacactgttgtccataagctttggcacgaaaccctaaacttcgtgaacggcatggacatctctgattccaag

SEQ ID NO: 71264 - DNA, 262 bp, Glycine max
  Clone ID: PAT_MRT3847_35363C.1
aacaactaataaagagacaaaaaacggagggaggggggtaattatcaaacaaagaattcaattccttatcagacatcataatactttaacaactagtaatacaataattatacattataggacattaaaaaaaaacgatataatgaataaaatgtgtttaagttcgcttggtaagcataatattttcatttatatttctggaagttctatttaagtataccatacaattaacattataatttatgttaataaccaattttat

SEQ ID NO: 71265 - DNA, 556 bp, Glycine max
  Clone ID: PAT_MRT3847_35364C.1
gtatattaaagtctcaaatatttatcttaagttgcacccaaagaaggtattgctctccctttgcccttcccctcacagtctgcaactttatatgtttcaggcttttaggttcaagctcagtaatgcactattactgaagatgtttgatttgttaaaacttagaagttctgatttaatagaattactttgaaaagttatctttcttagaaagaacattgtctcctgctactttatatgttttctttggagtgtattaatcctcctctttcttttgcttttgcttcctttctaccgatttgttagatactattgcttttcatttcatggtcatttttatgagctttaaaccaatgattttatttttttgtttggcctttcatcagttacatttacccttttccttcatgatattgccaaaatgattatacgtttttcaactttttgcataattctctggtttttattttagttttatattgttttgatgaattgcaatgccttttaaatagtacttttgaacctttaaggttcaatgctggggctacaatgttataca

SEQ ID NO: 71266 - DNA, 1096 bp, Glycine max
  Clone ID: PAT_MRT3847_35365C.1
aaaaaagtcatttaaacatgaccataatataaacattaaaatgatttgaaccgaaaaatgacatgtcataataaacctacaaccataataataaatttcccgattcattcttgaaataaaaatagaaaataatgacaaggaatccccaaaagaagccctcagaccagcagaggcaaaaaaaaaaaaaactaaataaaatgaaagaaatgaattgccatagatgatgacatagctggcaagatgagaattgagaataatgctatctcaagcatagtcttgcttacactgcacaccggcttctgcagctcgacgaggtttgcttttacgcctgcttccattatgccgaaaaccattacactttgtcaactcatcagtatttgatccgtttacaacaacattaattttctcatcaattggttctattttctcctgtaaatttcgttttctttttctcccatgttttgtagtattcaaatttttcatctctttgctagacactacattcttaacgttgtcaccaccacaggcatcctcttctaatatttcctcaatttcttcttcatcaaagtcatccttaaacagtttttgtggcctccctcttcttttttgcttaggaaccttttcatcttcaccacttattggatcctcctcattgctaatagttaactttttaccctttcctcttcctctacccataatctcaaaatccgagaaaatatttttgttttatcgatcaatatgaagtgaaggttaagatttataataattcatccatcctggtcaagtcaattaaactagacctcctaaacaatccgagaaaatatgatcatacaaactagtatgtcacaagaataattaaggataacactaagccatcctgacacaaagctcaaccgatgtggaacttgcaaaggcccattgagtgggatcgatggttccacagaagcgtaatagttgtggctggcttcttacagcaagaggccaaaccaaacagagagagaaagatattgtttgtctattgactggatctctattctctccctactctatgtatccccttctgtcgtcttctcgcagccgtcggacgcgtgggcga

SEQ ID NO: 71267 - DNA, 125 bp, Glycine max
  unsure (1)..(125): unsure at all n locations
  Clone ID: PAT_MRT3847_35366C.1
cncgagcccgtttctacgtggtttcccggcatcgaggacgcaaagcaaaacctcagcaacanaacaanggcgcnnaaaaccctatccactttctnctcaccnctttctcgtcccaacaccaaatt

SEQ ID NO: 71268 - DNA, 273 bp, Glycine max
  Clone ID: PAT_MRT3847_35367C.1
caggatgtctacaaaattggtggtattggtactgttcctgttggccgagtggagactggtgttctcaaacccggtatggtggtcacctttgctccagtcaacgttacaacggaagtaaaatctgtcgaaatgcaccatgaagctttgagtgaagctcttcctggggacaatgtgggcttcaatgtcaagaatgtgtctgtcaaggatgttcgtcgtggcaacgttgctggtgacagcaaaaatgacccaccaatggaagcagctggcttcact

SEQ ID NO: 71269 - DNA, 480 bp, Glycine max
  unsure (1)..(480): unsure at all n locations
  Clone ID: PAT_MRT3847_35368C.1
cggccatccaagctgaatacatctggattgacggcgatggtggtctccgatgtaagaccatgaccatcgagaagggcaagccctcctccgtctccgagctcaaggagtggaactttgacggttcctccaccaaccaggccccgggagagaactctgacgtctacctccgccccgtcgccatgttcaaggacccgttccgtggcggtgacaacatcctcgtcctctgcgagtgctacgacaacgacggtaccgtcaacaagtccaactaccgagcgcacgccaagaaggtcatggactctgccaaggagcacgagccgtggttcggtctcgagcaggagtacaccctcttcgatgccgacggccaagtctacggatggcccaagatgggtttcccgggaccccagggcccgtactactgcggtgtcngtgccggcaaggtctttgcccgtgatttcatggagggccactaccaagcgagca

SEQ ID NO: 71270 - DNA, 143 bp, Glycine max
  Clone ID: PAT_MRT3847_35369C.1
ctggatcattcgtttgaccctttctcagagtctctctctagaaaagccaacacctggctgctgaaaggtgctctctccctatgtagccttgacacacttctaactgtgaaatccatgtttagcaatacaaaaaaagagcagcg

SEQ ID NO: 71271 - DNA, 862 bp, Glycine max
  Clone ID: PAT_MRT3847_35370C.1
aattagcccagataattccagttcagatggtgctgatgtcccaaaagggagaccaatgtctcctgggactttagccttgatgtgtgatgagcaagatacaatgttcatgacggctgcctcccccattgcgccaatggctcatgcttgcaatacatcttcacaatttccttatggacaaggaatgacagaggtttatcctgagcaagaaaggattgtattaacaaagtttagagattttctcaatcgggttatcaccatgggagaaataaacgaaacaaagtgttcttcgttgaccagaaatgaattagagagtcaaaaggacccaatcatcaatggcattggaaatgccagttctgagatagtgctacagcagggagccactagcaatggtgttactaaacctgctgtttcacctttggctacaacttcgacatctatgatccctggtaatattgccgaaaatggggagaccaaggtgaagatcgaaaaagagatatgaaaggaatctaacttagaaggatgtgcagagatacgattgaaagaaaaaataagaatgtctttaaggtatgctagagcttgtgtattataattataaaaacattgccattcttcattttctgccttatctgaaaggtctgttaagcatacaggccccgccattagcgcatgtaggatattttttttttctttttatcaattttcttgttctactttggtcattcatacatatctaaattaatttttcagcttcaacattgctttattgcgatgcttgtaaattgctgagttataatttcataaattatatcgtttagatttttcgttgaatgacttccataacttgtaatttaaaatatacatt

SEQ ID NO: 71272 - DNA, 620 bp, Glycine max
  unsure (1)..(620): unsure at all n locations
  Clone ID: PAT_MRT3847_35371C.1
cttaattttaaaattataattttaaaaaaaaaaaataaaaaaataatatattattattaataaaataaaattctattgaaataacaaaaaaaaaaaataaaaaaaaaaaaaaaaaaaaaatgggggggccttctataaaaaaacaaggttaactgtcgtggtttccaaanttaacttttttctataatgacaccaaaattctttaaatttcccgctctttaacaacttttaaaaaggaaaaacctggcttttaccaaaataaaacattttcaaaaaaattcctttttacaaaaaaggtttaattacaaaaaagcctcctacaaataacttttttaaaaaatttcccagcttaatagcatattgagacaccccttttactgaacataaaccctgaaggtttttattaattcccccaattttactttatttatttagaagatccttaacacccctttatttcgatatattcatttcatttttaagctaaatttcgcatgcttttacatacaaaaatttttaaatatttgggggtttttttttaaaaaaatacccccaaaataaaaattacttttttctcgaaaaaaatataataatcccctaataaaaacaatttattttaa

SEQ ID NO: 71273 - DNA, 150 bp, Glycine max
  Clone ID: PAT_MRT3847_35372C.1
tcggcttgagtatcttactcacactcatcggactttctcaaatctctatgactacctattgttgccatccagtaacggtgaaattgtgtatccaaaatgggtagttaaacataaacacactctcctaagaaagcccttaaatttttcatc

SEQ ID NO: 71274 - DNA, 1235 bp, Glycine max
  Clone ID: PAT_MRT3847_35373C.1
cccatgtgtatatatatataataagcctataagttgcatttaatttacagcctggtacgtgtgaagtgaagaataatcttgtgaatcgcgtaagctctctcaactcaactggatccgggtcacaaccgtcttgaaattaagaccaactgggtcattgatcacaatctcaattggtagcacaacatcaagggaaagtgaaaaagaaaggtatatttgatcagggatatggcaactcgaagatatgagtttggaaggatgaatgaggctagccacccagactccatcagagctgccttggctgaattcctctccacttgcatctttgtctttgctggagaaggctctgcccttgctttgcgacaaatttacaaggaaccagggtcatcagcgggtgagctagtggtaattgcactagctcatgcatttgctctatttgctgctatttctgctagcatgcatgtgtctggtggacacgtcaaccctgccgtcacttttggcgctcttcttggtggaaggatctccgtccttagagcagtttactattgggttgctcaacttctaggttctatagtggctgctctcttgttgaggcttgtcactaacaacatgagaccacaggggttcagtgtgtcaatcgggcttggagcgttccacggtcttgtacttgagattgctctcacatttggtctgatgtacacagtctatgcaactgctattgatcctaaaaggggtagcattggctcaattgcacccttagccattggattcgttgttggggcaaacatccttgctggtgggccgtttgatggagcatgcatgaaccctgctcgggcttttgggcctgccatggtgggctggagatggcactaccactggatcttctgggtgggcccattcattggagctgcccttgcagcactcctgtatgaatacgttatggtcccaattgagcctcctcatcaccaacctttagctggtgtagattactagttaatttgggtattatgaaatgtacctatgcctatgtttgtgtgtttttcttttctcttgtcgttatctgaattcatgtatgcaatttccttgatgctggtttggagtatcaacactaaaaacttgttaagtgtgtatgtagatgtagtcctcgatgatgaataaagtgtgacccctacccttcttcaaaaaaaaaaaaaaaaaaaaaaaataaaaaaaaaattaaaaaaaatatttatttattg

SEQ ID NO: 71275 - DNA, 350 bp, Glycine max
  Clone ID: PAT_MRT3847_35374C.1
gaatttaggtggttcaatgggagctacagctcaaagcatctggaaatctaatgtattacagagtggtgtccatcatgcagtgaattcagactcttatagaggcatttttgggtctgatggagagaagtatgctggatatgtacaacatatcatttacttcggaacttctggaaatgttgcatgctttatttctgaagccatacagggagtgggggaaatacttgaattggctcctggttagttgccagctgcgcacaatcccatcaaaaaagcaggaggacttttcattgctgatgtatgccaagctggctttggccgcactggtagccattgttggggatttgaggccc

SEQ ID NO: 71276 - DNA, 445 bp, Glycine max
  Clone ID: PAT_MRT3847_35375C.1
aaaattggaaacaaagatggcaaaagagaaaactagcagtttataaaagagcaaaacgaaggttcttaaaaaagtctgggaaaaaagagtttcatggcgaccataaactgactggggagaaaaagtaaaaaaaaataattatagccgatcagttaaggacatagagctaataacaggataagaagggcaagcaataggagggcacatacataagaaaattctacaaaggaaaagataaaaaaagtaaagaataaaatgaagtactagcaagaaaaaattggaagatcaaggcgaaaaggagaaccgggagaaaagtaaaagacaaaagagggaaaagagaaaagaaaaagaggatgaaaagaatgaaaagaactggcaaaaattatgataaaaagaggaaaattactaaatcaaaaacaagagaatccaaaaaaaataaagccaa

SEQ ID NO: 71277 - DNA, 149 bp, Glycine max
  Clone ID: PAT_MRT3847_35376C.1
cattgtgaatcaacaccctgtctgttgggtcacatttatcactatatcgggtggctcatcattctcttttccctttgcctctatctcacgccgtcttccgagcttacattctctttctttcgacgtcatatctctcttatcatgtaacc

SEQ ID NO: 71278 - DNA, 2766 bp, Glycine max
  Clone ID: PAT_MRT3847_35377C.1
gagatacaatgcctaaattaacccttacctcactatcttcatttcaccatgggttccacaaaattaaatttgggcttctttttcactacaacactggtatttctatgtggcaccgttcttcaagatggtgttccaagcgccttagagcatagtgtgatattagtggagtttcttctacaatttgtgtccatggagaaaaattctcttgattatagtcctttgctttctcctcgtggtgatgaaaatggaagtgagacaacagcatctcctcttgtgtcagctactaaatggactctcaagactttgatcttgatgatctttgttctatgggcagctttcatcttttgtctccctgcaaagcctgtgaatacggtgttctcaatatggaatgatctcaaccgttttttctcttctggactgccccaattctcataattgcatttcttgccatcgcacacctaattcttactggggaggatcagcttcaggggaagaagacgtccaaacttccaaggtttcgcctatggacatttcctgtgcttgtgaagggaccatttggggttgtttctgccacagagcttattgggattgtcctcgttttgttgtatgttatctgggctctctatgcttacactgtgagggcgcttgattttatctctgaatttgatgtgtcgtcctttagagacaagagcataatcatgtttaaagttatgggacttcgcacgggcgcaattgggttaatgtgtttggctttcctatttatcccagtttcaaggggatctgttcttctccgctatatagatatcccttttgaacatgccacaagatatcatgtatggttgggacatcttacaatggtgatttttactgtccacggactcctctatgttgttgcatgggcaatggaaggacaccttgtacaagaattagtacaatggaaagatattggtgttgccaatctcccaggagttattagccttctagctggtttgttaatgtgggtgacctctcttcccggagtgcggacgtggaactttgagttgtttttctacacccaccaattatatgtagtctttattgtctttttggccctgcatgttggtgactttgttttcactatggctgctgggggaatatttctctttgtgcttgatcgatttctgaggttctgccaatcacgaaggacagttaatgtgatctcatctagatgcctgccatgttgcactgtgcgaattggttctgatgcgtaaacctggaatgggttagatacaatgcactaagtttgagatacaatgcactaagtttcattttcgttcaagtccgggaactatcatggctgcagtggcatccattcagtgtttcttctagtcctttggatggaaagaatcaccttgctgttctcataaaggttcttggcaaatggacagaaaagttgagacaaaggattactgatgtcgatgcacaaaaagattcatgtgtcataacaacttcagttgaggggccatatgggcatgaagtaccataccacttaatgtatgaaaatcttatattagtggctggtggtattggactctcacccttccttgctatattgagtgacattctccaccgtgttagggaggggaaaccctgtcaatcgagaaatattttacttgtttgggcggtaaaaaaatcaaacgagcttccacttctctcaaccattgacatggaatcaatttgtccatcattttcaaataaagtaaacattgatattcatatttatgtcacccgagaatcagatcctccattggaagagggatatagttacaaaccaataaaatcttcattctgtcctatggctagtgattgtggcatgtctgttttggttggtacaggagacaatttttggtctggactatatgtcatctcatctaccgttggctttgtgatattgctggctttgttgtatgtttactacgtaaccccatttcacatagaaacatggtggtacaggggactactatatgtaatctgcatggttgcaagtgttgttatctttggtggttctgtggttgcaatgtggcatatttgggaaaagcaaaattctttgaaggacaagtccaatgatacaaaggttgataagattcatcagaatggctctttggctaccaaggatcaaagtcaagtcagtagtattgctaagtcaacggtcattcattatggttccaggccaaactttaaagaaatttatgactcgatatcagagaaatggggccttgttgatgtgggtgtcatagtttgtggcccttcaacacttcagacaagtgttgctgaagaaatcaggtcacacagtatgacaagacaacgccatcattccatcttccatttccacagtcacagctttgatctctagcttccctaatggaagatggaagacatgcattcactaaagaaaaaagcatatatatatataatgtgtattgtatatagcagtaatcaaattctagaaccctttgtagcattggtgctatagtagcctacagtccttagaagggttctaattctaagcgggatgatatgattttactccttaattatgtgaatatatgcattatcactcagacatatttatatgcaattttcagcttccttgtataaaaaaaaaaatttatatttgtttgtcttttatttttattttcattttcattcccaatttttatttgtcatgctaacaatgttattcctcggttttatgtgccctctttgtatctcatctctccgatgtgt

SEQ ID NO: 71279 - DNA, 866 bp, Glycine max
  Clone ID: PAT_MRT3847_35378C.1
ccacgcgtccgtctaaattaacccttacctactatcttatttaccatgggttccacaaaattaaatttgtcttctttgtccgtacaacctggtatttctatgtggcaccgtgcttcaagaagttgcaacaagcgccttagagcatagtgtgatattagtggagtttcttctacaagcggaacaaaaaatttgtgtccatggagaaaaactctgttgattatagtcctttgctttctcctcgaggtgatgaaactgcaatcaagacaacatcttttcttgtgtcagctactaaatggactctcaagactttgatcttggtgatctttgttctatggacaactttcattttttctctccctgcaaagcctgtgaatgagttgttctcaaaatggaatgatctcaaccgtgacactccttttggagtcacaggaagcatttttctggtcttcactgccccaattctcataattgcatttcttgccatcgcacacctaattcttactggggaggatcagcttcatgggaagaagacttccaaacttccaaggttccgcctatggacgtttcctgtgtttgtgaagggaccatttggggttgtttctgccacagagcttattgggattgtcctcgttttgttgtatgttatctgggctctctatgcttacactgtgagggcgcttgattttatctctgaatttgatgtgccatcctttagagacaagagcataatcatgtttaaagtgatgggacttcgcacgggtgcaattgggttgatgtgtttgactttcctatttatcccagtttcaaggggatctgttcttctccgctatatagatatcccttttgacatgccacaagatatcatg

SEQ ID NO: 71280 - DNA, 716 bp, Glycine max
  unsure (1)..(716): unsure at all n locations
  Clone ID: PAT_MRT3847_35379C.1
ccatcatatcattcattcagaatcactttccatgcttcccatagccttcaaccctcttggtctcttcttgttacttttcttctccctaacttcatatctctcttggcacatatcagtcaaccacgccccgggactcaccaaaagtaagctttttttttgtttttggccctctttttgggtcgctgaggaagcttgcaacccttcatggccagaaaatcttcctctttctccttgcttgagagagtgatgtagagcttgggccaaactagggctcgttcttcgccgttgatgccttcgccgccggtgacgtgtagtaccggtcctccttctccggcgacgccgatttccttgtctcgccggccgatgaccggagaatcgccccgtcggaattccttgtaaggcgattaagttgttgatgatgatgatggtgatgatgttctttttctggcacagtgaggccagagcgatgatgctccattgcagaaccaagtttccttctgattccaccgttgagcctcgctgaaatccgagggtccttcaccctcacacatctcagcctcttcctgttcccccactgcaagaaaaactctggctccgaagccttgcaatctttctggttcctctcttctgtttccataaccaccaaagtgtgtgaaggattntgcctccacctcaagatctgtgtctctctgaagagacaacaaccctttgtgaaa

SEQ ID NO: 71281 - DNA, 199 bp, Glycine max
  Clone ID: PAT_MRT3847_3537C.1
cacggcgtgcagacgacgacagatggcgatcgttcgtaatccatcaatcaggaaagatacagaaggtttcatcttagctaaatttggacttgggtcctacaatgcttgcaccgatgaagagggtggattactcgctcgccgacaaggtggagatcttacgaatctatgagggctgactctgctcctactacccggccac

SEQ ID NO: 71282 - DNA, 1276 bp, Glycine max
  Clone ID: PAT_MRT3847_35380C.1
tctttttttttttaaggtaagaaaatattttttcttaattaattgaaatggatcggatcggatcggatcgaattgtttacaaaaaaacatgagggggcaacatacatgccacacaaatataaaaacaaaaaacttgaatcatcatcttcatcatcaccatctccaaaacattcctccaagcttcttcttaaaagggctttttcttccccctcttgcggatccgctcaaatgttttttctttccatcatcatcatcatcatcatcattcagaatcgctttccatgcttcccatagccttcaaccctcttggtctcttcttgttacttttcttctccctaacttcatatctttcttggcacatatcagacaaccacgccccaggactcaccaaaagtaagcttctttggatgattttggctctctttttgggtcgctgaggaagcttacaacccttcatggcgagaaagtcttcctctttctccttgcttgagagagtgatgtagagcttgggccaaactagggcacgttcctcgccgttgttgccgtcgccggtgaccttgccgttctcctccgccgaaccccgcgtcgtgtagtaccggtcctccttctccggcgacgccgatttcctagtctcgccggccgacgaccggagaatcgccccgtcggaattccttgtaaggcgattaggttgttgatggtggtggtggtgatgagagatttctttctcgggcacagtgaacccagagcgatgatgatccagtgcagaaccaagtttccttctgattccaccgttgagtctcgctgaaatccgagggtccttcaccctcacacatctcagcctcttcctgttcccccactgcaagaaaaactctggctccgaagccttgcaccctttctggttcctctcttctgtctccataccaaagtgtgaaggatttgactccaacctcaagatctgtgtctctgaagagacaatcctttttgaaaattctcaatgatacaaattcaggctcagatgaagggtgtgtgtttttttcctatgcaaacaaaaagaaaaaagaaagagaaatcacagatcttcttttctggtgttaaatttgcaaggtttcttcctttgcaaacgttttttctttcaattcttagtctctccctcacacacctcttcctctctctgtttgggtgtgttttctgcagcactttctctcagagtgaaacggagtttgagggttattctgctcctgtttctcttctcttcttctcttgtgcggacgcgtgg

SEQ ID NO: 71283 - DNA, 349 bp, Glycine max
  Clone ID: PAT_MRT3847_35381C.1
gtataaaaatattttaaaataaacgcaattttgataaaaaacgcccaactacttccgcaaattacgtacaatgcgatcttttacagcttttacatactaagacacaattcttctttaataaccctagcgagcatgcggagccttcactaggaacccggaaccctttggccaccctacctttcagcttacttcattacctatttcctaacaggagacaatttctgaaactgaaaaaagctgaccataaaaggcaggctttcatttttgaatagagcttagactcaacataccagtccctactgttttttgagaataaagtgatcaccaaacaaaagtgtatcagatactc

SEQ ID NO: 71284 - DNA, 626 bp, Glycine max
  Clone ID: PAT_MRT3847_35382C.1
ttttcagaagagaagaaaagaggagcacataataaccctcaaactccatttcctcacagaaaatagagatatagagagagaaagtgctgcagaatacacacatacacaccacttcttcaagagagagagagaaaatcacacaaaagcacacacacacacacccttcttcgagtctgaatttgtatcattgacaattttttcacaaagggttgttgtctcttcagagagacacagatcttgaggttggaggcaaaatccttcacacactttggtggttatggaaacagaagagaggaaccagaaagattgcaaggcttcggagccagagttttttttgtagagggggaacaggaagaggctgagatgtgtgagggtgaaggaccctcggatttcagcgaggctcaacggtggaatcagaaggaaacttggttcttgaatggagcatcatcgctctggcctcactgtgccagaaaaagaacctcatcaccatcatcatcatcaacaacttaatcgccttacaaggaattccgacggggcgaattctccggtcatcggtcggagagacaaggaaatcggtgttgccggacaaggaggaccggtactacccgatcgcggggtacggcgga

SEQ ID NO: 71285 - DNA, 1401 bp, Glycine max
  Clone ID: PAT_MRT3847_35383C.1
ttttttttttttttttttttgagaaaatatttttgcttaattaattgaaatggattggatcggatcgaatcttactcgtttacaaaaaaacattgagggggcaacatacatgccacacaaatataaaaaaaacttgaatcatcattatcttcaccattcatcaattcaaacaacatcatcatcatcatcaccatctccaaaacatttcttcttcatgcttcttaaaagggcttccttcttcccccttcttgtggatccgctcaattgatttttttttctttctttccatcatatcattcattcagaatcactttccatgcttcccatagccttcaaccctcttggtctcttcttgttacttttcttctccctaacttcatatctctcttggcacatatcagtcaaccacgccccgggactcaccaaaagtaagcttctttgaatgattttggccctctttttgggtcgctgaggaagcttgcaacccttcatggccagaaaatcttcctctttctccttgcttgagagagtgatgtagagcttgggccaaactagggctcgttcttcgccgttgatgccttcgccgccggtgaccttgccgttctcctccgccgaaccccgcgtcgtgtagtaccggtcctccttctccggcgacgccgatttccttgtctcgccggccgatgaccggagaatcgccccgtcggaattccttgtaaggcgattaagttgttgatgatgatgatggtgatgatgttctttttctggcacagtgaggccagagcgatgatgctccattgcagaaccaagtttccttctgattccaccgttgagcctcgctgaaatccgagggtccttcaccctcacacatctcagcctcttcctgttcccccactgcaagaaaaactctggctccgaagccttgcaatctttctggttcctctcttctgtttccataaccaccaaagtgtgtgaaggattttgcctccaacctcaagatctgtgtctctctgaagagacaacaaccctttgtgaaaaaattgtcaatgatacaaattcagactcgaagaagggtgtgtgtgtgtgtgtgtgtgtgtgtgtgcgtttgtgtgattttctctgcaaacaacaacaacaacaaaaagagagagagaaatcacagatcttctttctcagttgttaaatttgcaaagtttcatatcttcctttgcaaaacaatttttctttcagttcttattttccttcacacacctctctctcttgaagaagtggtgtgtatgtgtgtattctgcagcactttctctctctatatctctatttttctgtgagtgaaatggagtttgagggttattatgtgctcctctttctcccacgcgtccgcccacgcgtccgcccacgcgtccg

SEQ ID NO: 71286 - DNA, 172 bp, Glycine max
  Clone ID: PAT_MRT3847_35384C.1
gaaaaccatcaagtctgatggtgtagctggccttaatagtgtgtacaacgtatcatttgttcaaagaatagagaatcgaggtctttacttcgcaatgtatgattccctgaacccaggaattttggatgtagggttgaaagatattcactttgctcaaatccttttgggatgg

SEQ ID NO: 71287 - DNA, 420 bp, Glycine max
  unsure (1)..(420): unsure at all n locations
  Clone ID: PAT_MRT3847_35385C.1
gttattgataactttttgtaggttgtgtgtaagtgtaagtagttcatgtgttttgtttctattaagttttgattgccctgcgttgttgttagtgtgtttatctgttttgtgtgtgtgctgttttttctggctgtagtgttgttcctttgactgtgctatttattcttgttttgcttttagtgttgttgggctgctttgtatgctgtttggttttatttgtgaattaagttgatttggcgctatgaggtttattgccctttanagagaaaatttgactcacttgtttatgtcatggatagtttgcttgtgtagcgctgtttttactgtatatgtgcatgctgaaggagtttccaaacatgtatgggatgttttccctttgtcttgatctttgggtttcttgccatgatgtgtttttctttt

SEQ ID NO: 71288 - DNA, 514 bp, Glycine max
  Clone ID: PAT_MRT3847_35386C.1
ggctcgagtctcggccatggaagaattacggaaactcgagaaagtacagagcatgcttgaattcatggaatcacattcacggggcgtttcaaactccgatcaacactctaaccgcttcctcgctaatttcattcttttcttgatcgaaccctgcggagacctttccatcaaccacaagtgctccttgctctcccactttattcccactgtcagttccacttcctcatttgaatttgcatttgcatttgcattttcatttcatttccctttcgcttttgcagctctcatctgcattcctcgaagacgcgtatcaacaccaccttttcaccacctctaaacaacaaaattctggtggttttcaacaaagtcttgttggaaattctttgcttagttgcaatcagatgaaagaatacagtttgttgcaaagatgtaatgaaaacgctgccatggtcgggctggattccatgcaaatggcaaattctacacttgaggatttttgcagatcttattttat

SEQ ID NO: 71289 - DNA, 513 bp, Glycine max
  Clone ID: PAT_MRT3847_35387C.1
tgctccagtccatttcgcagcaaactgtttgggatcaaatggtaacagggaggacaccattgaattttgattctagcaagcagagcttttgtcaattttctattgaccttctcggtggaggaattttagtggacaaatctggagattggattacactaatacataattgtccaattaggaacttgttgtgagttgctgcttggaagagaggttgtttaatggttaagatagtgatgtctggtaatgcagcagccaataggagtgagtgggcctcattggtacaagtatttttaacaaacagtaacaggacagagcattttgatgcatgtaagtggacaaaagtcgaaccacattcctgggaattgatctttgcaaagaggtgtgtggccccaataatggcatagaaatgtggggctctgtgtgggcagatcactcttcatggaatttgagtttccttattgacattcccaaacagtctacagtgtttgatatactctagggaattgctcaaga

SEQ ID NO: 71290 - DNA, 321 bp, Glycine max
  Clone ID: PAT_MRT3847_35388C.1
aaaaaaaataatatacaaacataaaaaaaaatataaaagcacaccaaaattaaaaaaaaaacaaaaaaaataaaagggcctgggggctctaaaaattcttttttatggaacactaaaaagcacaccatgggctgtggcattctaaacacttgaattgggcgaaacccggcctttttttacgttttggggatggaacaacttcggcttttcccaatttacccaaatagcaaaaaagccccccccgtcccactttccaaaaaggaaagaagcctgattgtgaacaggattggacccttttctcaatcttaaagggcgaggggg

SEQ ID NO: 71291 - DNA, 278 bp, Glycine max
  Clone ID: PAT_MRT3847_3538C.1
ggaggttgcagagagccgacatcacaccactccactgcacccttagtggctgactgagactacatctcactatcaatctgtcaagtttaaacaaagtggcatgtaatactcaaacctagaatttataagagttattaataagaactacggcacacactggcaaatgcacataattagagccaatacacccaaagaccaaatcacattagacctctaccttaccagaagattatctgttaaatgacctgaaaatcatcttcctcatacatgactaacac

SEQ ID NO: 71292 - DNA, 171 bp, Glycine max
  unsure (1)..(171): unsure at all n locations
  Clone ID: PAT_MRT3847_35390C.1
gttgtgtttgcacccatggcactgcaaattccttgcaagtcaggagggaggagataggcggagaatctgcagtgtagcgttgcatgtgagttgcatggatgcggagctggaattataatgaaagagggccttcaggagagaggagatggngagaagttgttttggttctca

SEQ ID NO: 71293 - DNA, 203 bp, Glycine max
  Clone ID: PAT_MRT3847_35391C.1
gattccattgtgtaataaccaatcatcgttagttcttcagtaatttattgtgggattctattccaagattttgagaatgtctaactgtgggtgtggaagcatctgcagctgtggcagcaactgcggttgcaacaagtactcctttgacttgagttacgttgagaagactatcacagagactccagttttgggttgtgggcctg

SEQ ID NO: 71294 - DNA, 684 bp, Glycine max
  Clone ID: PAT_MRT3847_35392C.1
gcaaagcactcttgcatacatccataaaaagggattaattaatatgggcatgatcacttcaacatgaaaagaaagtcaaagatcatctgaccaagaggatcactaaatttcaaaataaataaggcaaagatagaccctacaggatattggcagtcaaaacaaaaccatatccatttgacattttgcatcaatttatagaaaccttcgttggggcctggggggggggaataaatggaaggactctgattggacaaaactttgccatcatgtacatttccctttcatgacaactccttcaaaaatcccatcaatgccaaaattacctgaaaattgatgcggatctacagggccgggcagctggaacgagacaaaaaattggcccggggggcaaaggttgcgagtttgcatttcaaatacctgagagtacctggatacagtattctctccagttgtagttactccaaatatcaacactttaccatcagtgccaacctcacagctgaattcccgttcattcctcttcacccctggaagagacaagcgaaacaggtatgcatcttcacactctccaatgtccacaagccccatggttggcccaatcccccctgtagccacagttccagtcaacccaaaaccattcttggtagcagccacaatatcagaccattccttcttagaaggccg

SEQ ID NO: 71295 - DNA, 575 bp, Glycine max
  Clone ID: PAT_MRT3847_35393C.1
ggctcgagatttcgcttcttcccccgcaaccctacccctcaatccccaaccctccgaatccgcaccagatccactcccccaatccgcaacaccaccctcatccacgcccatcgccacaaaccctaatcccaatccaacgcttcttcctccgccgcccgctctcctctttccggcgggcactccgccgcaggtccccggcgtactccctccctcattccgcccgctcgctccgcaattctcccccgtcccctcgcccaacccggccttccaaagccctgccgttcctccgcccggcgtgaccggcgccgccgtggcagttccgccgacgcagatgcagcagatgctttcgtaccagattcaacccggtaatccggccctgcggaccttcgctccgatccccaacggttacgctgcagctccgaccataactcccgcgggtgggtcattcattcattcattcaatcgtttgatgttcctttgtgaatccgcatttaaattcgatttaatttagtgtaattcaacgctccttcgttggatgcttcaatgtttatgactttggattattagtattatca

SEQ ID NO: 71296 - DNA, 265 bp, Glycine max
  Clone ID: PAT_MRT3847_35394C.1
ttacacttttgaggaggtggtacagcacaaccagaccaatgattgctggctcatcatacctggccaggtgcttgatgtcacccatttcatggaggatcatcccggacgtgatcaagtactataatgtgcaacagggaaagatgcaaccaatgacttcccatatgtgtggcacatacattctcctagagatatgatggtaaaatactacattggtcagattgatgcatcaaccaagccactaaaacagacctacattgcacctcat

SEQ ID NO: 71297 - DNA, 317 bp, Glycine max
  Clone ID: PAT_MRT3847_35395C.1
tccctttctaaacaaatggaaatggcaatattacttttcacacacaaacacaaacaacattactttgtacattttacatatcacacttgacatacatctcaacaacctcactcaacgcctacaacagctaatactgccactcataacattgcctcatcacctacacgtatttacaaccatagttctactaccaatcccacgtctccagaatgctctactatgtgcaccaatctcaaactttcataacacacaataaatataacaaaacttcaacactaccacacaatcaaagctacctaaccttctttacttacaaa

SEQ ID NO: 71298 - DNA, 306 bp, Glycine max
  Clone ID: PAT_MRT3847_35396C.1
ggggaaaggcggggagttttcaaaacaaattgttttagggaaaggaaaaaaaaaaaaaaaaggcaaattaaccggaacttacgcttcaacccaactcctggaaacataacacattgaacaaggaaaagcaaaatcggtgaacctagcttaaaaagactaattatcaagggtcagactacagcggggctggctagcttttaatttaaaaaatccccactggccaaaggtcccaaccaaaaaaacactttttgtacaacaaccaattgcattttataattacctaggtaaggataaattacttattta

SEQ ID NO: 71299 - DNA, 236 bp, Glycine max
  Clone ID: PAT_MRT3847_35397C.1
caaaaaaaaggttggggtaaacattaattccggggtggttaacggggcctcttcccgttaaaaataacttgtttttgaaacttgtgcctgtttttgggaacctggccccaattgaaaaccaaaccaaagctttgaaaaattaaattttttttccccccccattggggggctggttccaattttagggggttgtaccaaaggttgctttgcaggttacattccactttggggggatt

SEQ ID NO: 71300 - DNA, 361 bp, Glycine max
  Clone ID: PAT_MRT3847_35398C.1
ctggtcagtcctcttttaaatggcactttgcacttggcattatggttttatccttttcttatgtggaactttttaatgagtttattgggcgtcgggacttgggtattgtatgacactcatgcaaacttttttaacttttctagattattggaatgcaatccattgttgttttcagtttattgagtttatttggcgtcggttcttggttatttataaggatacatatctgtgtattttttttcggccaccacgacatgctccattttacgctactccatcgcacctatctttatggtggctgtttggttttccgttatgaaccgccatcccgcattaacaacatgggattattcgacgttcg

SEQ ID NO: 71301 - DNA, 715 bp, Glycine max
  Clone ID: PAT_MRT3847_35399C.1
gaacataaaaacttacataaaccaaaaatgaaaaaacaccaacttataggaataaacattaaaaaaaaaaaacactaacttacaagaaccaaaaaaatatttaagccacaattcaatcataaaagcaaactgcagtttccccaatattcctactttacagtaaaaaccaagaaccctaggaagacacggaccaaagaagcatgccatttctatgcttacgacagaagagccaaaatcagtggtctgattttgccatatttcttaagttggctaacatctgagcagcggctgaatctcttgcttcgtgaggatgggcacagaggttacctccacaggaacactcaaagtctagtcctttaacagctacagtagcttggaatccaccatttgattcagatacacggtaaattggtagtagccaactattttcacgacatataccatctagttcctcacaaggactttgcataatgagcactgcctctgtcagtcttctctgcttaatatatggaggtaagtgttgatcctcaagatgttggcacgtccttccttgatttcttacccatgtatcattacagccttctatgagggattcgatacttaactccaagtcatcttccccactagttaacattctctgaatttttttatcacacagagcaatctcatcctctatcatgcgctgctgaagagccagtgcattcctcttttgcat

SEQ ID NO: 71302 - DNA, 266 bp, Glycine max
  Clone ID: PAT_MRT3847_3539C.1
gaagaagagaaattactcttttttgcgcgctacataaccaaaacgcttttcctcaacaacaccgtgggtgatgacatattccaaatactatccaacttctatggaacattctatagatacaatctttctgataatggcacacatatggatcccataggctgcgcctcactggatcatttcctcaaattcctataccgacggatctctccctacatttcctcccaacaaacaatctgggccaactcctcccattctgctgccttcct

SEQ ID NO: 71303 - DNA, 864 bp, Glycine max
  Clone ID: PAT_MRT3847_353C.1
tccgatcttattggactgccaatgaagcatatcaatttgagcatcataaagcgtttgtgtttctagtttctagttgttcaatatatatcctctcatgtgaaaaaagttgatcaagtgatcattcacaccatgggtggcgtcttctaccatgaagaaaagccaccaaaccataccaagagatgcaaattcattgcagggactttgaaagaagtgttttcccactgtcaaacttttagttgtctgaggctttcaactgcaagccttgaggaggagtgccccatcattgatgatgttgatgaggtgattgtttcagaggttagaagccaagttatggagaaacaaaagcacaagccaagcccattgagagaaggtttttccttggcatactctcctgcaacaagggaactgtatgtcactcacagtcacacaatggcaccacaagcaagggtggtagtaggtgatgaagaacacgacgaaagagaagagtttttttcggttaaaagttgtctctcgtgctgttcttcgagtgctgtgagtgaccaagcattttattctgtgaagacaaacctgtctagatgttcaagcatgaatgaggttgaagtctcagaatattggagacgttcaataattcaagagttttgccactgcgagggatggccttttgggccgacccgtaaagctgtgttacttccaccactgcctaagtcaccgtctgagtcatggttgtcgcgcaaaatacaacgaagtaccaaagttacctgaatttatttggcttttacatgttctgttttttcctgtcttcatatatagactatatgaactcttgcacaattaagtaacacttgattgatcaataatctttcc

SEQ ID NO: 71304 - DNA, 1444 bp, Glycine max
  Clone ID: PAT_MRT3847_35400C.1
caagaatcgtatagaactcaattgcaactagctaatggctatgcatggaacttcttgtttggtgccttctgttctggagctagcaaaacaacccatcatcgaagttccagaacgatatgttcatgccaatcaagatccacatattctttccaacacaatttctttaccacaagttcccatcatagacttgcatcaattgttgtctgaagatccaagtgaactagagaagctggaccatgcgtgcaaagaatggggtttctttcagcttataaaccatggagtggaccctccagtggtggaaaatatgaagataggtgttcaagaattcttcaaccttccaatggaagagaagcagaaattttggcaaacaccagaggatatgcaggggtttggccagttatttgttgtatcagaggaacaaaagctagaatgggcagacatgttctatgctcacacatttccattacattcaaggaatcctcatcttattcctaagattccccaaccattcagagaaaatctagagaactattgcttagagctgagaaaaatgtgcatcacaatcattggccttatgaaaaaagctctcaagatcaaaacaaatgaactctcagagttatttgaagatcctagccaaggaattaggatgaattactaccctccatgtccccaaccagaacgagtcattggaatcaatccgcattctgattcgggtgcccttaccatccttctccaagtcaatgaagtggaagggcttcaaataagaaaagatggaaagtggattcctgttaaaccactctctaatgcttttgtcatcaacgttggagacatgttggagatactgaccaatgggatttaccgaagcattgaacatcggggaatagtcaattcagaaaaagagaggatttccattgccatgtttcaccggcctcaaatgagcagagttataggtccagcaccaagcctcgttactcctgaaagacctgcattgttcaaaaggattggagtagcagattacctcaatggattccttaaacgtgagctaaaaggaaaatcatacatggatgtcattaggatccaaaacgagattggtaaataatttatgttcataggactaagcctgaaattgaatgatagaacaagtacacagaacaataatgtcacagatggtagccaatgtgcaaccattgtagcaataaaagttaaatcactgttcatggtatcaagctgaacatatataccttggaagctaatgtgggttagtaaaaatatgtcatggaacatcaaatgcatgttcttgaactaattgtctgaattgagctataggcgtgtctcaaacattttagtatctgtattcattactatatataaactcttttagtaatgaagttcaagtaaacacttattcgataaaaaaaaagggcggccgctcgcgatctagaac

SEQ ID NO: 71305 - DNA, 523 bp, Glycine max
  unsure (1)..(523): unsure at all n locations
  Clone ID: PAT_MRT3847_35401C.1
tcgatctattcgctagcnaatgtaccagatgccgtacaccgggggtttaggctgggaatccacatgtacaggctaaggcttgtggtgtggtgtttacaagtccgtatgaagttcagagtagcaactgtcagatcatgacgtgtcaagtcgggtttatatgcaggctattgtaaaatcatcgtcttccacaatgtgttcttctgttcggtgggcattggttcaaggttaagcatggtcagcccggtggcaaacatctgaggtacagccgcaactttctcaacccgatgataatgtggctggggagagggaaacacccgcggagccgactgctgcaggtgtcactgactagcccaccagagagagtcgtctacgtgcgcaacaaaaggagtcaaagtaagttcgagagctggcccataagcctgccgccgctgctgcaggcttacggggcctataccaagtgtcccaggaacgcgtcgggctagcaacgcctanagaaaaccacaagcgtacgcataccacttgt

SEQ ID NO: 71306 - DNA, 367 bp, Glycine max
  Clone ID: PAT_MRT3847_35402C.1
accttataaacgcgaacccaaagaaaatcacgttccctgcgctcttcatatgagaacaacaactcctggggcaattaataacttggaatggggctttgaagataaaacacttttcaaaaaggcaaatcttacaatttaaaggtgcaaaaaaattaccattatttgtccaaatggatatggcaagagtactttactcaaattgataatgggttttgaaaagccaaccggggttcaaattttccttaccgagcataaagtattacctaactatttttagcacaatcatgcttctgcactttatcttgaaaaaacaccgctcaatacagtagacgaagctccacatgacttgatgattgatgatattaaa

SEQ ID NO: 71307 - DNA, 441 bp, Glycine max
  Clone ID: PAT_MRT3847_35403C.1
cgggacatattaatgatcatcagccatgcactgattttagactaagggaaccagttcatccctctcaagagttttcagatgaaaacacctggacggactgccatgcacagagcaagatccctgagaaatacaatgatacacagggatgattttgaattacactttacgcacttgtattttgagtgctgggaagctgattgtgggtgtggctgatcaagacaaccatgcttaacaaggccatcgatttcactcatgcgtgagaggccttgtccatgcgatcactagggttggtccaggtccagatcattactgtgagccgaagtgttgcagtggggttcatggtccttccagaaatgccccagccaacaaaatttttgcgcctactatgaaaccaatggcgatgggtgcaataattcccaaattaccctttttggggtcaat

SEQ ID NO: 71308 - DNA, 353 bp, Glycine max
  Clone ID: PAT_MRT3847_35404C.1
ccaatcaattgattagtcacaaagctgaagctacacctggattactttttgtaaagtaaacaacaaatccattacaaaaccggaagaggcagaggcagagtgttacagaatgatttttttcttatcaaataagctaataatacattgttattattattatactacaacaaaaaaatggatatggcagcattatgttatttaatgccttgacggtcctaaatggatctaaaagaatttgaaaaatgatggtaatgatttgacagggtcctgcgagtgcgtttttttctcttttatctctgtgaactaaggcaagcctggatctcttccaaagagtttcctttggcttctgggac

SEQ ID NO: 71309 - DNA, 1084 bp, Glycine max
  Clone ID: PAT_MRT3847_35405C.1
ccacgcgtccgctcagtattttcaccactaaacccctaattttaaagataaacttcaatctataatctcaatattttaaccaccaaaaccctaattccttgaatcctcatcgacgttccgaaaggcccaggcgttcgtttcgcgatactgcgcctcttcctccgtcgtgtaatcgttcgtaaccccaaaataatccctcacgaactccacgctcttgttcttgatggctttagcaatgcaacgactcagagactcgaggagcttcttcgtgttgaggtaattcgcagcgatgatcagatccttcatctcgtagaggttcagcgccgccgcgaaccgctcctcgaactccttcaggttgccggcggagacggaggcacggcggtgctccttgcagtactccaccatccgggcgagttcgcggccggcaacgttgtggagcggaattgcgatggcggcggaggtgtcggcggaggtgtcatcgatgtaggcctgcaccgtctccatctccttcgcgatccacgcttccacctcaaaggtgacaccgtctaaggtctttagcgaaaccttcgcttcttctttctctccctcggttgttgcggttgcggcattcttcgattcttctaccttagtgatcgaaagcttcttcgattcttcttctgtagccgcaatcggaacgttctttgattcttcgtcggtgattttctgtgtttccgtcttggattcttctgcctccgcgggcttcattgttaccgtcttggatgattgtgcttctgccattgcttcattgttaatctctaacatttcaatcttggatgattgtgcttctgccattgcttcattgctaatctctaacatttcaatcttggatgatcccgattcttttgccattgatttgcttttgcaagagaaccaagagaggaataaaacaataaatttagtgaaaagggaattccacaaataatttatatttgcgatcggagctattttgtatgttataatttttttccttttaatcgttgcggtccagtgggatttgattgtgataagacttttatttttttaataaggaaagatgtttttaatt

SEQ ID NO: 71310 - DNA, 201 bp, Glycine max
  Clone ID: PAT_MRT3847_35406C.1
ggctcgagccgcgagcggccgccctttttttttttttttggttatcatcatgaacctaaaacaatgggatgcatttgtgttttttacatgtggttggctaatgctgttactatcttatatcttttgccatgtgattgctattatgaccactatgaattgaatgccatctgcttgggtttgcagaacaagaaaaccgataat

SEQ ID NO: 71311 - DNA, 2405 bp, Glycine max
  unsure (1)..(2405): unsure at all n locations
  Clone ID: PAT_MRT3847_35407C.1
ccacgcgtccgcaatatgactgatcttactgatgtggtgtcttctttagctgggttaaatttgtcaggtgttagacatgcagagccagccagtcttttgaaatctaagctacaaatggatgttgataaccatgctgatgttctactaaacacgcaaagcaatgttaatttgcccagacataatgatattgtgacaaaccttaacacctttagttcaaatgaccatgtcaatctactgaaaaaaactgcttcttctgctaatcttcgctcaaaagtgcattctactggaaatgcagcaagtttgccaagtgcagacttcactggccatgttcctagtgcatatcttgtaaactcgaaattgaattctgtttacgataataatctcgagacagctatgagacttcgcagagatggacaaagtttagatgcacaaggaaaccatgttggtcctgaacttcattccacaactctggacccacgcttcatccaatgcttgcagcaaagtgctgattactcgatgcaagggatgagtagttctggtcatcctcttcaaatgagaaatttccccgatgcttcacatggagatttggagggacttaggaaagcatatcttgagacacttcttactcaacaaaagcaacagtatgaactaccacttctgagcaaatctgggctgactaatgggttctatgggagtcagccatatggtcttggcatgccatattctggaaagcagattgcaaattccacacttccttctcttggatctggaattgatctcgtggttcaagtcagtactgatcagtaaaatagccgctttattcagcagaaattagaaacagcatcagtataagagaagaccaagatatttcctgagatcattcctcatgctcgtgccttgatgactgatgtttttggaaattatgttatacaaatattttttgagcattggtacagatagtcaaagaaaggaattagccagccaacttacaggtcatgttttacctcttagtctgcaaaggcatctgtagaagagaagaccaagatatttcctgagatcattcctcatgctcgtgccttaatgactgatgtttttggcaattatgttatacaaaaattttttgagcatggtaccgaaagtcaaagaaaggaattagccaaccaacttacaggtcatgttttacctcttagtctgcaaatgtatggttgcagagtgattcaaaaggccttggaggtggttgatgtggatcagcagggtcaaatggtgtctgagctcaatggtgcaataatgaaatgtgtacgtgatcaaaatggaaaccatgttattcagaagtgtatagagtgtgtccctcaagataaaattcagtttattgtttcatccttttatgggcaagttgttgcactttctactcatccttatgggtgcagagttatccagagggttctagaacattgtgatgatcaaaatacacaacaaattatcatggaggaaatcatgcaatctgtcagcactttagcacaggatcaatatggaaattatgttattcagcatattgtggaacatggtaaaccacatgaacggactaccattatcagcaagcttgctggtcagattgttaagatgagccagcaaaagtttgcttcaaatgttattgagaaatgtttggcttttggtagtcctgaagaacgtcagattttggtgaatgaaatgcttggcacttctgatgagaatgagcccttacaggctatgatgaaggacccttttggaaattatgtagtgcaaaaggttcttgagacttgtgacgatcgaagtcttgagctgatcctttctcgcatcaaggttcacttaaatgcactgaagcggtatacttatggcaaacatatagtttcccgtgtggagaagctgataaccactggagaaaggcgcatagggttgttggcctaattcgttcatcctcaggcatccaatgaaggtcttggagacaagtagtccgtcctctcttactgtcccaacttttccttttgtacagctaacatgaatgtttatatcaaagtttcccctgcaagctttactttatataaagcattggagataaatgcgatcagcttggccattagaataaattactttttcttactttgcttgatttcgttactacaacaacttgactgaaaatctccgtaaggagagttaacttaggatgtcaagaatagacggcaatgtgtatttattgtgtatgtatatgaggtccattgtctgtaaagaaaataatggtaaatgacttattgcagtaaccagagtcattattagatcaggctctaaacttctatttcatctatgtaaataatatgctgcgaattttcttgcgttaaattctttgcgtttnaaaaaaaaaaannaacncc

SEQ ID NO: 71312 - DNA, 1302 bp, Glycine max
  unsure (1)..(1302): unsure at all n locations
  Clone ID: PAT_MRT3847_35408C.1
cccgcgtccgtgcacaaaccttacacctttagttaaatgagcatgtcaatctactgaaaaaaactgcttcttctgctaatcttcgctcaaaattgcattctactggaaatgcatcaagttttccaaaggctcgagtcactggccatgttcctagtgcatatcttgtaaactcaaaattgaattctgtttacaataataatcttgagacagctttgaggcttcgcagagatggacaaagtttagatgcacaaggaaatcatgttggtcctgaacttcattcctcaactctgaacccacacttgatccaatgcttgcagcaaagttctgattactcgatgcaagggatgagtagttctggctatcctcttcaaatgagaaatttccctgatgcttcacatggagatttggagggacttaggaaagcatatcttgagacacttcttactcaacaaaagcaacagtatgagctcccacttctgagcaaatctgggcttactaatggcttctatgggagtcagccatatggtcttggcatgccatattctggaaagcagattgcaaattccacacttccttctcttggatctgggaatccactctttgagaatgaacgtatatcacgcttaagttctatgatgagcaggccttttgaacttccagatantcattgatcatgtggttcaattcagtactgatcagtatggtagccgctttattcagcagaaattagaaacagcatcagtagaagagaagaccaagatatttcctgagatcattcctcatgctcgtgccttgatgactgatgtttttggaaattatgttatacaaaaagtataattagcttgtacaactgaatactgagtactgtcataaatatgctcttttttattgggttattgatttaagaaattcatgcttgacatgctctattgcagttttttgagcatggtacagatagtcaaagaaaggaattagccagccaacttacaggtcatgttttacctcttagtctgcaaatgtatggttgcagagtgattcaaaaggtgcctttcaagctttatgttatcctattattcaccatatatgaacattaatttatgcctgactcttagaatcccatttcctcaatttttccataagatgatcccctttttcccttgtcaaactttagtcctgtgtttatagggacaggtgacttctgttatgcaaatctgtaattttggctcagttctttttcaaactaatgaatgtttattttaatatcaagtaaataatgaagcacttgagatgttcttgtgtatt

SEQ ID NO: 71313 - DNA, 628 bp, Glycine max
  Clone ID: PAT_MRT3847_35409C.1
tcctctagagcggccgcttttttttttttttttttttttttttttttcgcctgatctaataatgactctgattactgcaataagtcatttaccattattttctttacagacaatggacctcatatacatgcacaaaaaatacacattgccgtctattgttgacatcctaagttaactctccgtatggagatttctgtcaagttgtagtaacgaaatcaagcaaagtaagaaaagtaatttattctaatggccaagctgaccgcatttatctccaatgctttatataaagtaaagcttgcaggggaaacttggtgatataaacattcatgttagctgtacaaaaggaaaagttgggacagtaggaggacttcttgtctccaagaccttcattggatgcctgaggatgtatgaattaaaccaacaaccctatgcgcttttctccagtggttatgagcttctccacacgagaaactatatgtttgccataagtataccgcttcagtgcatttaagtgaaccttgatgcgagaaaggatcagctcaagacttcgatcatcacaagtctcaagaaccttttgcacaacataatttccaaaagggtccttcatcatagcctgtaagggttcatt

SEQ ID NO: 71314 - DNA, 302 bp, Glycine max
  Clone ID: PAT_MRT3847_3540C.1
aatatcttatacataaccacatttaacataatttttgacaaaccaaaaacaaacacgttgaacttgtgccattatcaaacaggtagcgccccacatcatcaaacttacagaactcattatttgattcactaaccacgataacaaacacataactaccttgctgtacatgctcaaacatttgatattagcccagcatcactctacccagaatcctacatcggacgagtagagtatcattattatcaattacaaagcgttcaatctacaacttcatcaaattgcttcacaaatcaccaaaaatt

SEQ ID NO: 71315 - DNA, 759 bp, Glycine max
  Clone ID: PAT_MRT3847_35410C.1
ctgatgcttcacatggagatttggagggacttaggaacgcatagaccacgcgtccgcccacgccgtccgcccacgcgtccggctgcgaaaagacgacagaaggggggcttactaatggcttctatgggagtcagccatatggtcttggcatgccatattctggaaagcagattgcaaattccacacttccttctcttggatctggaaatccactctttgagaatgaacgtatatcacgcttaaattctatgatgagaagttcagtgggaggttctggtggctcatggcatgctgatattggcaataatatagagggaagatttgcttcatccttactagatgagttcaagaacaagaaaaccaggccttttgaacttccagatatcattgatcatgtggttcaattcagtactgatcagtatggtagccgctttattcagcagaaattagaaacagcatcagtagaagagaagaccaagatatttcctgagatcattcctcatgctcgtgccttgatgactgatgtttttggaaattatgttatacaaaaattttttgagcatggtacagatagtcaaagaaaggaattagccagccaacttacaggtcatgttttacctcttagtctgcaaatgtatggttgcagagtgattcaaaaggccttggaggtggttgatgcggatcagcagggtcaactggtgtctgagctcaatggtgcaataatgaaatgtgtacgtgatcaaaatggacaccatgtta

SEQ ID NO: 71316 - DNA, 463 bp, Glycine max
  Clone ID: PAT_MRT3847_35411C.1
gtattttatttttctgttttttttttttgctgagctcttataccttggaatttaaagataaataattatatttcttctttatacaaataaaaaccttgtaagaataagccccttttaaaagtctattttgggcttttccaaaaaatcttacaagcaattaattcaatctgccccctaaaagaattttttgggggattactgttgggggttcacctcacaatattcaaaaaacccaccggtggttttggttgcctgggctggccatgcaactttttgcatatttgacaagatcctttggtccaggcatattgataagccctacccaaattatttgccctagccgtgattttaccaacaatgtgggctgatttttttcggaagtttgagaatggggggtaaatcaggcccctattataagatttccgtgaaccttgggcacccaaaggttcagaggcctcccaaa

SEQ ID NO: 71317 - DNA, 322 bp, Glycine max
  Clone ID: PAT_MRT3847_35412C.1
gacagaacagcgagaaataatactcatatgattacatacacttagagctgacatgctaacaatacgaagaaaaacattcttagtacaacaaattgttacaatgtgcagaggacacataaatcgggggccaagccactttaactatactttgaacataccaattgtacggggctacagcacccgtccaatgtaatatgtaataagactattaccatagtgacacgtgcatctaccactgatatgacgaagacaactgaccctcaatggtgcaaagagatacatatcagatattctgttcatcaaggaaaccacatctgatgct

SEQ ID NO: 71318 - DNA, 575 bp, Glycine max
  Clone ID: PAT_MRT3847_35413C.1
ggcgcatcaccacttggcatctggtgggagttcctgatttagacaggacatgttatttctatggaatttctcgtgataatatctaaatttttgttctccatatgaaaaaaaaaaaaaaaaaaaaaaaaaaaaaaaaaaaaaaaaaaaaaaaaaaaaaaaaaaaaaaaaaaaaaaaaaaaaaaaaaaaaaaaaaaaaaaaaaaaaaaaaaaaaaaaaaaaaaaaaaaaaaaaaaaaaaaaaaaaaaaaaaaaaaaaaaaaaaaaaaggggggccctttttaaaaaaaaaaaattttccaccccgggccccttaaagcaattttttttttaaggggcccccaaaaaaaaaaaaagggccccgcttttaaaaccccccgaggggaaaaaacccggggggcccccaataaaatgccctggaaaaaaccccccttttccccggggggggaaacaaaaaaaaggccccaccaaaaacccttcccaaaatttggcgccccccaatattggaaaaggacccccccccttcccgcccttaaaacggggggggggggggggtctcccccggggggtgcctttatt

SEQ ID NO: 71319 - DNA, 459 bp, Glycine max
  Clone ID: PAT_MRT3847_35414C.1
tacggctgcgagaagacgacagaagggtctgcacctccaattgcttcctgcattctttttcgacttctgtaatgaccaatctgaaatgtaaaattacatttcagattaattacagattttggcttctggaatggttaattctgaaggtaaaaaaatatatatatttcagaaaaagtgcaggaagccactgccccatttgttcctgcaggaatagcccaattggagctacgccagatatgaaatctcgagagcttttccttttttctttatataaatttgtccaaaaaacgaggttaaaaaacgctgacatttggtggaggcaattatgaatgtaaggagaagaaaaaagtgccggagatggtaaacttttggtggagacaattagctgcattaacatcacgagagcacaaacaaaaattgcattttacgcttatgccttggacatatattttatgtaaa

SEQ ID NO: 71320 - DNA, 459 bp, Glycine max
  Clone ID: PAT_MRT3847_35415C.1
gtgccagagtggctgtgcgacaccaagcaccacacgcaacttggcaccatgagcccaaaaacggccgcgcctgcgaaagactaaaaagtaacaagttaaactaatggttattaggattaggaacccgggtagcacttggtgaagcaaaacgcgacagcacaagccgcagccgactaacacacggagggtgtgcccgagcccgcatttaatgtgtattatggaggggtttagtgtaaagcgactgcaaaaactgcggctgcaactatggtacgtatataccgggtcgcctgagctgtttatgctaccgtggttataccttaccaggctaaggctgcaagattgcgtgtcgcattggttggattaaggagtaacgcagcagcgggatagtatggcgccagctatataacttaggcagcgggtacgcctcagctggctgtcttttccgctaaatagtaggtg

SEQ ID NO: 71321 - DNA, 387 bp, Glycine max
  Clone ID: PAT_MRT3847_35416C.1
gggggggcccccgggggcaaaaaagtttcctttaaaaatttccccttaaaaaaaggggttcattggggagggtgccaatttttaaacaaaaaaaagggaagttcttctataggggctagggggcctttttaaaactggtggaaaaaagttttaaaacaatgggggtacaaggggaaggatcgcatcccccagaaaggggaaactttgggaacttaaaccaatcatgctaaaccccccataaaatgccccggttatagggaaccttttaggcatgaaggaaacttgttccgcattaaatcccggggaaggaaaccttccaatctggttggaaatggggccccaattgccaggggggcctttggaacaaaaaccaacgaaaagtttttg

SEQ ID NO: 71322 - DNA, 147 bp, Glycine max
  unsure (1)..(147): unsure at all n locations
  Clone ID: PAT_MRT3847_35417C.1
agacaacacatttctgcacaatataatagaaagatntctccatcacgtaaaaaatgggcactagtttcatgctaatttctccaccgtctctgctcaagcctcaccaagtacccctcacgactccattccctcttcctcaaacccatc

SEQ ID NO: 71323 - DNA, 292 bp, Glycine max
  Clone ID: PAT_MRT3847_35418C.1
accttagaccgcgagccggccgccctaacagggggggatttttagaggactcaccgtataaaacgaacgaaaaaaacggaggccacagatggcaatcccgagaacacaggcaaaaacatgggccagggccaagaaaaagtaccgatagggggcgtgcacaacctaagaaattaacaccaacgactaccaagactgaaaaacaatggaaagctgcctgcacaaaagcaacgactatgacaaaaaacccaaacccggggcctgatgcacggagggtggaaatcttgaagccaac

SEQ ID NO: 71324 - DNA, 497 bp, Glycine max
  Clone ID: PAT_MRT3847_35419C.1
gacaaaaaatggccggcacgatcactatgagaataacagagcatgccaacaaatacaaagaggccacgagagccagaaattgccaacataataaaacagcactttcccttattagaaccaaaacctttctatcgatatcccccttctcgagattagtctttctgcataataaaattacacgacaaaacacaaaaaagttatagtatagcgaacaacattagcagagctatacaaacaaaactgacgtttatgattccaacataagaacctaacgattgaaaaaagcctaacaagttatgtgtgaacatactctacaactcattagagttcattcagacatgcatcttaattcacaatggctgagaaaatttaatatcaaaaagccccaactcaactgaagagaaccctttgccaagcttctgaatggcacaaaacattgtgctgctcgacccaacagcactgatgcccatatgcgtaagatcctctaaggttagcac

SEQ ID NO: 71325 - DNA, 284 bp, Glycine max
  Clone ID: PAT_MRT3847_3541C.1
tgttttcttggactcaataagttatttaaatgaagttagttttagcatttattttttattcatttcgtttggggatgagagcaagtggctactctttcagtttctttatgtgttcagattaatttcacattaagttgtcaaagagcatttggtccccatattgcgggattatgacatgaggcagcagaggtggaatataggagtttagctactactatggcagaaatgatctgggctcaatatcttcttacggaactttacatcataattcctactcctattgt

SEQ ID NO: 71326 - DNA, 386 bp, Glycine max
  Clone ID: PAT_MRT3847_35420C.1
gcgtattcccttcccaattcggcgaatagtttaaataataacacatcactaaacaccatctttatttcaaattttctacaaccatattttctttctcgtcaacctgcatacttctttaatctaaacattcacaatgaaaacattctttattaatagaacaacttaaaatactgacaaagcaaaacccaaacatggctaccaaacaattttaacttacaaactgtaaaattaaatgatcaacaacccatacttatatatctttcacccgatgagcagaaaaacattctccatacttatatcttatacgtatactcatcatccccttcacccacataattaataaccatatccatcccatcaaaaactatattctgattataatcatc

SEQ ID NO: 71327 - DNA, 370 bp, Glycine max
  Clone ID: PAT_MRT3847_35421C.1
ggctcgagctctatccgttctgatcgcgagctccgccttttttttttttttttatattggcggggtcgggattatattaacatcccacatatactaattcatcagcttatcatatatttcagccctctaaactattgttaagttaacattgttctgttatacgctctatcattaacacctatatatacacgaactactaataacttgtgaatacattattttgctatcctacaccacaaaaactaagacactcccactcttagaatgatacgtaattacctttatccccaaatatgttattatctcattaacatccctcaaacttcttaaatttacatgacacatataaattacacttcatcatttcttt

SEQ ID NO: 71328 - DNA, 512 bp, Glycine max
  Clone ID: PAT_MRT3847_35422C.1
aaaaaaaaaccccccgcggggggaaagatcaaaaaaaccaagggaaccttttttcagcccgggaaactttccaatgtttggaaagacccacccaccccagggggggagtagcccaagaccccagcccccgggggccaaaatttgcgggccagggctaggccggaccctccaaaaaaacccggggggggacaaagcatttggatcaaccttaaaccaaaaaaacctggggacggggagctttttcctcgaaacttgggggagcccccaacccaggccggggcaaaaaaacccgcccgggtttgggggaggggttctaaaaaaaacaaggttcggttcttgctttgcggggggtaagaaggaaaaagcaggggagccggccctcccaaaacctttgcaggaatttggggggcccgagggggcctgccaaaagggcaaggtaacccaaataaaaaaggcccccctggggggcaaaacatttgtgataaaaagcaaacactctttgcaacaccaaa

SEQ ID NO: 71329 - DNA, 329 bp, Glycine max
  Clone ID: PAT_MRT3847_35423C.1
gggaaggcgaaatatatattatattattgatgtatggacaaaatggtaatattgcaatatgtcaaagtatattctggcacaacttcatttcagccggaagtaaaaaatgtcagtccggcatgtttgcctaccatcatgtcaggttggggtttgggaaggattatatatatcagcagtgactagtgaggttgtttccataacagccacaaactctgtgccccccatgatacaaggtgtggcaaactaccccagaattcaaacttacatatgtaaatggtttccaaaaaagctgtatgcaagttaaaacaagaaaaatattcccgaatgat

SEQ ID NO: 71330 - DNA, 441 bp, Glycine max
  unsure (1)..(441): unsure at all n locations
  Clone ID: PAT_MRT3847_35424C.1
gaggaaaaaaagaagaaaaaaactggggagatattctgatcagaaaaattggggtttgaactttgaagcattaaggaactacgaaggcatcaatttctctttcttcttgggaagaattttcttctgcgcaccgaaattgcatcttctacagtggtccatctgttcttcttctttctgcttctgggttggtttgtctttgtatccttgatggaatggaaggagaaagtgtttcaagttcaagtaagtcacaaaatgatgtcatagagaaaatgtctctcaatgagggcatggaggatgggaatggggaagcgccagagcacggtcttcaaaagttggtacaatttaatgaggaagttgaagaacctaaagttgggatgactttcccttctgagcaggagatnttcaattattacactaattttgctcagcataaggggtttg

SEQ ID NO: 71331 - DNA, 287 bp, Glycine max
  Clone ID: PAT_MRT3847_35425C.1
tttgttatgtttctttttctcgggggagaccgaattaaagcattttacagacaggatcatagccattttcttgcccggtgctaagcaactttgaggtttaagtccaaacaagtcaagcagactgaaatttgtctgttgcattgcatcgagactaatacattaaactgggtaatttgggtaacaagatccccccttcttaataaaattgtcagaacaaatgattgaattattgttcgcccctaagctttggataaaaaagcagggccaacacccgtttgggtcaaaac

SEQ ID NO: 71332 - DNA, 356 bp, Glycine max
  Clone ID: PAT_MRT3847_35426C.1
tctagatcgcgatctagaacgtttctttccacggccatgccattgaagatgatgacacaagatctcatagacaccgacaacaagaagaactcaagttttaagagtggtttctacaaagtcctttaaagcatctgcctcaagttgtgtcaaatggataaaaaatttgtgcaagagaaagaatgaatccaggaaatgagaggatatattgtgtgcgcttgtaattcagcaccacggcagatactggtttagtatttttttatatatatttttttgctttaaatgaattgaagctgaagataccatgatcttgagtcttaggtctaaccaatatgaacaaagtttcagtgttttaatcc

SEQ ID NO: 71333 - DNA, 182 bp, Glycine max
  Clone ID: PAT_MRT3847_35427C.1
aacaatttgttgggcaaatttgagactatataggcatatcctcactgcaccccatgtggtgtttactcaagaataacagcgcgctttgacattgatgccaatggtatcttaaatgtctctggcaaaaataaaaccactgccctgaaaaataagatccgtattaccaatgacaagggtagatt

SEQ ID NO: 71334 - DNA, 296 bp, Glycine max
  Clone ID: PAT_MRT3847_35428C.1
ctcgagccgaatcttctcgagttgcgatatcatttgtgtcactggatggactgccaccccaatgcattatgttcaggctacaatagattggtctagaacctcttatggatgtgttcccaggacctattctgttttaaatggacagaatcctcttgtgttgaataggtgcgaaaagaaaattgaccttccctcacagcacttgcagaagtgtatttcagaacgcctgattatatatgctgcggagctggagcaaaatattcatttactgttgagcttccaaatgctgggttttcaat

SEQ ID NO: 71335 - DNA, 318 bp, Glycine max
  Clone ID: PAT_MRT3847_35429C.1
tatttttaataaatatttttttcttttacaatttttattttttgaggtggtttttaaaaatttttttcccctcatcttcatcatatggaaagcacctgatgcattacctagtccaaactgtttccgggcaaacaattaaattaaccaaaaaacccccaccaatcaacccatttttcacccccccccatggaggaccaaaaagatatgcttcctcctttattgtttccctgttttttattcatataacttttgccccatgccccaaaatgaccttttttacctattaataaccttgggatggccccttggcatacaaaa

SEQ ID NO: 71336 - DNA, 262 bp, Glycine max
  unsure (1)..(262): unsure at all n locations
  Clone ID: PAT_MRT3847_3542C.1
tttcanatggnaaaatcaattctaattngcacttgaattactacctttaaatgaatgggcttcttacgttaatatcattccaattnccaaataagtntcatnaacaaactcatttgtaaattanatggaatctntnattttganattcttaacttactgtaagtgaaatttgattgactcggatttcaaatggaaaangcaattatnatttgcacctaggaaattgatatgctaagtcggaatgtantganttctgtntnct

SEQ ID NO: 71337 - DNA, 256 bp, Glycine max
  unsure (1)..(256): unsure at all n locations
  Clone ID: PAT_MRT3847_35430C.1
gaacataaactagcaagtatcgaacggtattaatgacgactcaagacaactggaaattngactgttcactacaatttcatcgaaatatccaacccacatgagagcagcttgtcaagaataaggatgttatcatattaagcgttgtacattctatacaaaatattatatagtacatttttatacaagtacatgaggaaccacgccctttttgtttgattgttatctgatgtaaaccaattttagcaaacaatgttat

SEQ ID NO: 71338 - DNA, 888 bp, Glycine max
  Clone ID: PAT_MRT3847_35431C.1
cggaattcccgggtcgacccagcgtccgcagaaagcagatgcaaatctacaatccaaaccacctcaagaaagagctgaagacaaggctagtagtagttcaggcacaaggccaaaagaagttgtggaatctgttcctgttcaaaatcaagcagctgcccaaaagttacttcagaagttaaatcacccaagtcagaatgatcgacatcataggggttggaaacataggggcaaggggaaacaagaagatccagttgtattcactctggaagaatatgaaaacagaaaggcccagacaaagccttctattaaagactgggatctagatatcagtcgtgatgagcatcttgctagacagcttcaaaatcaactagaccttgaagattctcgggtaggaaggggtacttatgaagacaaggcacaagatattaggatgagtatgttcgcatatgaaagggattctgacagcagccatcaaatggggcaaggaggaaggggaaggggaaggggaagaggaaagggtagaggaagggggagaggaagacatggttaactatcatgattttggtttcaagtgtttcttgtgaagatgaaaatcttggcttcagaatatgttaagagttccttgggcaaaatccaacgacaagacaatcgatagcatagggttcagttttcaaggtgatcaacctttgtgctttctttgttaaatgtatcataaattgggtatttatattcttttctttccatatagattgatcagtgaacttatcaccacatttcttattttgaatatactgaagcagagttcgagtgcttaaaagctcaaaaaaaaaaaaaaaaaaaaaaaaaaaaaaaaaaaaaaaaaaaaaaaaaaaaaaaaaaaaagaaaaa

SEQ ID NO: 71339 - DNA, 478 bp, Glycine max
  Clone ID: PAT_MRT3847_35432C.1
cctcacgcgtccgcccacgcgtccgcccacgcgtccgcttacctcttcttttcttctctttactggaggagctggtcctcgaaaccagtagacttgcccaagtctatcagtgacagtgccaccatacactaccacctgcacataaatctaaacatagaatcgagaacagattacaaatcagtgtattgggttgaaatcgcattggaaaatctcttgcagaagagaaaaggccacaattgtagatgcgaaagtcgtggttgatggtggtgcaagaagcaattgaagatctgaaatccatcatcaacggagaaggtaagaaagagaatgaaaggagaaagagcggggaggcaggcagagaaaaagacaaaatgctatatggtggttctgatggctccgtcgtaccagttatgcttgcagtgacactctcctcggcaaatcaagtttgggttgcgcacgctagaacgtgtctttgtaccat

SEQ ID NO: 71340 - DNA, 1311 bp, Glycine max
  Clone ID: PAT_MRT3847_35433C.1
ctcggaattcggctcgagctctttctttctgcgtgttgttggcacaatggagtctctgttatctgtaacatcttcttctctgaaattcttagtgagagcttcatgggacacacagcagagactcccttacaatcccaacgctcccagaaagcttaagaataacattgttgcaactcccactcccactgctccaattacgcgcaagagggagcaatacatttccgatcttctcaagcgcgccactcctctccccaccatagggcatatagaagaagtacaagatgaaacctatttggggtatgagaaatggctcccaactccaccaaaagtggtcaagcctcgttccgtctttaatgctgctactttagcctatattggtgactgcatatacgagctatatgcccgtaggcactttttattccctccccttagtattgaagaatacaatgatcgtgttatggcagttgttcgttgcgaagctcaagatgcattgctgcagaaacttcttgagagtaacttcttatcagatcaggagagggatgttcttcgatggggaaagaacattgtttccagcaaaactaagacgaaaaaacgtgctggtgcagctgtgtataatagagcatcttcactagaaacactagttggctatttgtatttgacaaatgtgaatcgcttggaaaagctgatgttagagttgggattctcagttgactcttccgtggctttgaatgttgaggaaatagtagcaggtgagttgaacaatggataaatatgatcttcaggcaatcggaattccacaggagcaggcaaaacagtttctgaagattttgtttgatccattgtattcttctgcaaagcatgacttcctcttttactttggcgggagaagctgtatcagaaccacattccaacagcatatatttccatgctatagattagaagccttcgaggtccttcataacaatttttctgctgcacaaaggttctggcaccgtagtttgttagtaatgtatctttttcagaggcgtaaagtcagaagaagatagtaatgcagcgaaacttttggttttatgtgatagattcgtgatgggatttgcaaattttgctcgaactttgtagagttggttggttcatgtgcgaattttgttgactgaatattagggacagagaccaagatgtctatttgtattattacttttggaattattacctctagtcttttaacaacttcacaagatattaacagtattcaaattattaacaatttgaatagtttggaggaatcttttatttttaaaatgatatcattct

SEQ ID NO: 71341 - DNA, 446 bp, Glycine max
  Clone ID: PAT_MRT3847_35434C.1
catagagttaccgcaaagccagatcactggattaagcacctcataagtcatatcattcataggcacctcacggataatgaagagaaaagagaaaaagttggaatagacagatggatcaagagtatttactttaaactatatatatatatatctataggtgtattaaatattcatacaaaagctagctcgttagtatctcatctgacttctacatgcatgataggaatggataacaaagagtcactcctacaatcactgtatcattaatagctgcattacctgaactcagtattcagtagcatcggcataaagagacgtgatgaactgatcatgtgtcaatcatgatgacatcaattctttttatcgacgattattaattattaggtttcgttagcaaatatcgaaccacattgatctttctgctttcctctaccactacggatggc

SEQ ID NO: 71342 - DNA, 1962 bp, Glycine max
  Clone ID: PAT_MRT3847_35435C.1
gcttttggaccatttcaagcattctggtcccaatggacagcatgtttgcatggtgtttgagtaccttggggacaatcttttgactcttattaagtactcggattatcgggggttgcctattgccatggttaaggagatttgctttcatattctggctggattggattacttgcaccagcagctttctatcatacatactgacttgaagcccgaaaacatcttgctcttgtcgacaattgatccgtctaaggatcctaggaagtctggggcgccacttattcttcctaatagtaaagataagatggcgatggagtcagcagggatgaaagatacgaaaatgttgaatggggatttggttaagaatcataagaaaaagattaagagaaaagctaagcaagcagcccatggatgtgttgagaaggaagcttctgaaggagttgagggtaatgctgaaacctctggggctgtggagtcatctcccaatgcgagttctgcgagagaacagacttctagttctgcaggaactagtcagttatcggatgctgatggaacaaagttgaaagagcagggtaacaaaagaggaagccgctctatgagacagaagctgctggcatcggttgatctcaagtgcaagttggtggactttggtaatgcctgctggacatataaacagtttacaaatgatatccagacaagacagtatcggtgcccggaggtgatccttgggtcaaaatattctacatctgcagatctttggtcctttgcttgcatttgttttgagcttgcaactggagatgtattatttgatcctcacagtggtgacaactttgatagggatgagatgtttaaagtgttgttcaaattcagagacagctgctggtttagttgtgcagcaacttagtccagcaggcaattgtaaatggagttggcctatggtgtgtttaatgaattttgggttaggtttgcttggataatttggagcagttctttattgagttcgaatgtttggcagaagcaagaaggttaaagtcttatggctatttgttttgtatgctgtcatctgattccttcaactggtgtggaatgtgggatagctttgaaatctctgcttaaggagaaagtcaaggttgtttatccacacattcttaaagtggaaagagctgataagaaacatgttaagctgaagtgtctcagacaagatgccgaaatgtatcttcccaagttcttgtgaacaatgtaaccattaatttcataatttaattggatttgcaagtcaccctttgagagagtgaatgaaaatggtgcattttggaaatcaatctatgatggataacattgagtcgtgaaccttatgatccacatgtttgaaaatcaacctcaagatgtgtattgtgagtttttcacaatcatgcttggtcataatctgtccaaaccaggaaattgtgtgctctgctagttgacctcgtgaacttgggcattaggtaaatttaaatctaggaggtcagattcctttataaaagcattgaagcccctcatagtaggagttacctcatcacctattaatttttcattatgaaatttcaaagcattgaaataatcccctgcagatgagcacacaagcaatatacaaaactcagctcctttcaaagaagagagcttggcccgagcattgtgtgatcttaacctgtacatagtaaaccactaaccactgatgtcccctttcccaattatatgaagatggactgcatctgggacatggagggagccagtctttttagataccctagtgattggttttagatgaaggaaaaatctgtcatgaaccaactattttgaaaacttaagctgttaggtgaagacacatgaatgcttttattttatttaattttttatgctaaatctctaacataccccaaatgtaaaaggatatttgtgctcaaagcatggacaattcatgaacat

SEQ ID NO: 71343 - DNA, 430 bp, Glycine max
  Clone ID: PAT_MRT3847_35436C.1
aatatttcggattcatacttgttcttggaggcgtacgtgtgttgtgctttcaaagaaagttgatttattttgtgaaacgaagaatcgcattaccagtaatgcattcacccttggatatttttttaatccccaccttaaggttgtactaaaccaaatcttggaccttacgaaacttttcaatacttttgtttcgttcgtatttatttcattgtggcattttatttttgttatcgaggtagcactagctgcacctgataaaaatttattgtgtttttaatcagcaataaaaatttattattggaagcacaacatattaattctccttatacgtagtacaaaaagtattaaaaaatagcatttaatttaatatcttgggaacgtaaaatgctttaaatattttctacttcatatgattagaagggaaagtagt

SEQ ID NO: 71344 - DNA, 485 bp, Glycine max
  Clone ID: PAT_MRT3847_35437C.1
caagcagaagcatgaatagaagattgaggtgataagccagctgagtttagcaataaatgtgctgcagcaggagaatgcaaagatgacaaactacattgctaaggaatccaccaagaaatggaagaacccatttgagatcaacaaacttgtggaagcattttcggtgaagttgttcagtggcactccaaagaatcagcccggtgttgagctctctagatgtggttaacaaagttagcagattgagtaattatacacaacaatatttataaagatgtctatatttatgttaggaacttatgacccaaaaagcctaggcttaaaatcttttattttatatattatatgttccttggttttgaatcctagtgtgagtacttgtcatattcattatattcttttgaatgtcctttctttagcgagttgtattacaaccaattgttacaaatttgcatttgtattccttataatatacgttgtccattcca

SEQ ID NO: 71345 - DNA, 535 bp, Glycine max
  Clone ID: PAT_MRT3847_35438C.1
gttgagttgagaacacttgaactatttgttctagtaaagccatggatataagaaattgttgcctttcatgcaagagaaccatcatgaaatcaggaagctattgttgcaatgagattgagcatgcaaattgtaaatcaagtaagatgaggtggaaagtgttgtggatgaagctcaagaaagagaagaagaagctgtttgagtctgcatcctctccccttcaggtcccttatgatccatacacttactctcagaattttgaccaagggactgcaaaggatgagccagataacttctctagatccttctctgttcggtttgctgatccttctacttctagagtacttatgaagaaaagggtagtttgaggcaaggctttggaaacttgatatttaactatctctgattgcaatgtttagtgtgcttacattaatgtacctctaactctctcattttcccctcaacacttggcctgattccatgtggtaaccacttttctgaataattaatctaacatgtgaatatatgtgtttcttaa

SEQ ID NO: 71346 - DNA, 278 bp, Glycine max
  unsure (1)..(278): unsure at all n locations
  Clone ID: PAT_MRT3847_35439C.1
ttaaatttngggnnnnaaannggggccggggnttnaancggggttnaaaagggcnttncngggggaagnttttccgggggcttcgggaagggggnnttgggtttnccanngtncggggtatnnnnnnngnnnnnngtatggtagtcntctttgcggtntctgnnncgngtcggtcgtcntnngcgnntgggctcggnaggcgaagagnctgagtggagtacgtggctgnntgtgnggttggttatgtgggtgtagatctnntgggagnntcttnctgn

SEQ ID NO: 71347 - DNA, 423 bp, Glycine max
  Clone ID: PAT_MRT3847_3543C.1
attcactgaatcactgttctctctctagttaattaaaaatggtcacttatgtcgtcaccaccaccttgttcctcttccttgccatggccatcaccaccctttgcctccaagaaattgaggtgctccaaatggcccaaaaccatgtttctcaagccaagaatttgattggaaactctttgagattgcatggcttgggaagcctaagtctttctgatcaaacaagtgctacaatagcccttagtgattgtgccaaactctatgaggagagtgagtctcggctctctcacatgatgtctcaagagagttactacgccaaagaagatgcactcacatggatgagtgctgtgatgacaaatcataggacttgtttggatggattgaaagaaaaagggtatattgaagctcacgttttggataggaact

SEQ ID NO: 71348 - DNA, 152 bp, Glycine max
  Clone ID: PAT_MRT3847_35440C.1
gaaaacaaattattttcattaaattgggaaacaacacatacccaacatttttggggatccccacaaaccggggggataatggagcatatagttagattcgcgctcacttacatagatggggggcgagggataacagagaattgggatcctgc

SEQ ID NO: 71349 - DNA, 421 bp, Glycine max
  Clone ID: PAT_MRT3847_35441C.1
cggttgcgttctcggtcgccaagagggaattttaggggacaaaactggagattgtatcacacttatacaaaatctaccaattagtaacgtagatgagagctgctgcttggaatatcggctgattaatggttaaaattgcgatgtctgagaatgcatcagacaaaaggattgattgcacctcattggtgcaaggtattgtaacaaacaatggcggtcactgagcattcatgtgcgtgttaccggacaaaatctgaaccacattcctgggaatagagctctccaataaaggtgagtgatcccaatactggttctgataagcatagtgctgagctggcaaattaaactcaatagcatttgattctgcttattgtcaagcccaaacagctcacaggttctgatattctctagggaatctctcaag

SEQ ID NO: 71350 - DNA, 513 bp, Glycine max
  Clone ID: PAT_MRT3847_35442C.1
atctcctagtctgcggcccgccttcttttttttttcttcacagaaatataacatgatttataccttctctcttttaactatattcttcccctcttctcctttttcatgaatgtgaagcgctacactctaccggctccctcctatattttcccattaggactaacatatcattgccgtggccatgggtgcccctgtaatccattactttatgcctttgctaactgaacactctaaacacctcggctgttacttttattatggggtaagcatttattactcttccttttgacactaacatgggactctccttctataatcttgacacctccgttactttctttcttaaggagcacctgctgcccttctatcatgggcctagatctgacttttgattagcacctgcacactgacactttaatactagtgctgcctgctcatccattttttttgccatgcccagatgatgggcttaaagttctagaacctcgaggccgtggctgaacctgtgaatgt

SEQ ID NO: 71351 - DNA, 474 bp, Glycine max
  Clone ID: PAT_MRT3847_35443C.1
ccattctttcgtatatttttcatatctgtttcatgatattattttttgtcccatccgagatggctgtggggtgccaatcatttcttattaaaaaccaaatcgtcccccttcaatatcccttggaaacccatgttttacagcccaaagtttctctctcccaaatttatactccgtgcggggaacactgcaagggggtgaatactcattatctttaccccgaaagccgccttccagaatggggcctttattaaatcctcaaacgtatgccctacatgaacatatccccttgaactacctccaagcattttctatttacacgtcaatcaatcgttggccgctgggatgtatcacaaccttccatgataatgggccacccacgccccaataactcaggcgactttggtcaacaagattttttttctaaagagaaacttgctacccttcccagggctataggactgctaaaaactgccc

SEQ ID NO: 71352 - DNA, 437 bp, Glycine max
  Clone ID: PAT_MRT3847_35444C.1
aaagggtaattaaaaggtccatgtaaccattagtttcgataaaccaccgaaacgtcattactggaatttgttttaacatggacaagtatacgagaaccacgtggaaaaatagaggacggtcaaatatttactataacaatcaataacgacaagtacattagcaaatatataaaaatccaaaaactcctttcttcttcacaagaggcaaagtccaaaatagagctagtaaatccactggttccaaccttttattttttgcacgagcaagacactaaatcgcaactagacaagcacataatgtgtagacaagcaactttgcagtacaccaccttaaaaagactttttggcaacgaatacaagcaggtcaatgacacgtgagctgtatccccactcattgtcgtaccaagaaacaagcttcacaaagtcccacgcgtccg

SEQ ID NO: 71353 - DNA, 1210 bp, Glycine max
  unsure (1)..(1210): unsure at all n locations
  Clone ID: PAT_MRT3847_35445C.1
ccacgcgtccgtcttgttgaggtcatcaataatacaaacaacacaagttttgctcaagaaaatgggtctgcacagagggaagcaaattccgctcttgtggagccttcaaaatcaagcttatcaattgctggtggcttatctgctagcagaggtgcatctaaaggctacaacacagacctttcttcatctcagaacttaaattctccggttagagatgtggaaaacccttatggaactagtggtgtcaccacaagaagttcattccttggtctcactggattgctgaatcttggcaatacttgttacatgaatagtgcaatacagtgccttgttcatacaccggaatttgctaggtacttcagggaagactatcaccgagagataaattggcaaaatccattgggcatggttggtgaactagccctagcatttggtgagttgcttcgaaaactatgggcacctgngcgaacaccaattgctcctcggccttttaaagcaaagcttgttcgctttgcacctcagttcagtgggcacaatcaacatgattctcaggagcttttagcatttcttcttgatggtcttcatgaagacttgaatcgtgtaaagcacaaaccatatataaaatctcgagatgctgatggccgacctgatgaagaagtggctgacgaattatggaatcattgcttgaattcaagcgcagatcaagtatttttgatgcaaaggctggaattgcattgaataagaactttgtgaagcttgtttcttggtacgacaatgagtggggatacagctcacgtgtcattgacctgcttgtattcgttgccaagaagtctttttaaggtggtgtactgcaaagttgcttgtctacacattatgtgcttgtctagttgcgatttagtgtcttgctcgtgcaaaaaatgagaggtctgaataaatcggtttctggaaccagtggatttaccttgttaggagcattagctctattttggactttgcctcttgtgaaggaggatggagtttttggatttttatatatttgctgatgtacttgtcgttattgattgttatagtagatatttgaccgtcctctatttttccacgtggttctcgtatacttgtccatgttaagacagattccagtaatgacgtttcggtggtttatcgaaactaatggttacatggaccttttaattaaccttacactttcaat

SEQ ID NO: 71354 - DNA, 633 bp, Glycine max
  unsure (1)..(633): unsure at all n locations
  Clone ID: PAT_MRT3847_35446C.1
ccacgcgtccggagaaacaaaactttaggatctcttttagaccaaggtttgatataaaatggactgcacctacagcagaagggtctttcaactgatgctcgaggagacactcataatctcacactgattctattactgtgaattctgcttctgctgcatttgatctgtatatgagagttcaaacatcttatcctgatgatttccactcataaaagagaagagtataatattccaagagctattccgcttactattgatggagttgagttggatttacgtatgcgtgggtttgaattcttcagtttggtttctgcatacgctatggattccccaaggcctttgcatttgaaagcatctggaaggatcaagtttcagggaaaggttttaaaacctaatggcaatattagcgaacaaaattttgaaatgacaaggcagcatgtgcaaatgttggagaaaggaattgcagatagtctcattggcgaggtttcaatctctggtctcaaactgaatcaactgatgcttgcacctcagttgtctgggttgctgaggctttctcctgngggtatcaagctggatgcctctggtagaactgatgaaagtcttgcagtggagtttgttgggccactacagccc

SEQ ID NO: 71355 - DNA, 670 bp, Glycine max
  Clone ID: PAT_MRT3847_35447C.1
cagccaaagggtaaatgcttgccttgatgaacgagacaaagacaattgttctagtttatcttcagccaaaggattattggtatatatgttttcttaaaaagaagctttgagaaccaataattactaaaaatagaaagaaaaacaactaccaagagaatagcaccagtcttgaaagatccaagagaaagcatttcaattccctgaatacagaaggcaagacccaatgtattatttgctagccaatgcttctgcaaagcataccacacatacaaaaaaagtcccaaggattccagcaacgacctatgactttataaactcaatctccaaagctgtgtaagaaaattgttaagcaaaagtatatcattttgcgttatacaagcaagttaatgtcaattctagaattccttgggcacaaggataacttttttaacttctctagtcgacttgcataagtggagatattcatggtatgcaaatgtcttgcattttcgcataatatatcttgcaaatcgaaactcaccttttgagcctccataacatctaataaaacatgttttaaggtgtaatgaaatgcatgaagggacagatcgagggaatggccaatctgctcctttgttgcctctagcatccatgttaatactcccctatcaattataatttttgaacaaaa

SEQ ID NO: 71356 - DNA, 411 bp, Glycine max
  Clone ID: PAT_MRT3847_35448C.1
ccacgcgtccgggcccttcgctccgatccccaacggttacgctgcagctccgacctaactcccgcggtgtcttgattgaattcattgagaaaggttggagggcttcatattgcttaaagaccacctctctacaaacaactcattttttgaagccgacaatgtttgcaactgaatgaatgcacacgttggccttgtgtcatgaggtattgcaatcttttctctctatcacagtttcatttaattttttaatgctgcaacgtatgctgctgtataaaaatgaacttataattcaactagaattctcttattaaaccacacgtacataagatatgcaaggggtgctatgggcggtgggggggtgagatggggggggaagcctggtgtgtgggggggggtgggacgggggggggc

SEQ ID NO: 71357 - DNA, 393 bp, Glycine max
  Clone ID: PAT_MRT3847_35449C.1
agagagtagtgagtagtgagagggaggaagcagaagtgaagcgatgaatgccccagatcgttacgagcgtttcgtcgtccctgaaggcacaaaaaagttttcttatgagatggacacgaagatcatcaatgcgtcatccttcaccatcgagtaagaggagcacactatcaacaacatcctccgcatctgcacagagaccccaatgtcttgattgtcagatacaagcttcctcatgctcttcaatacaaaattattgtcagggttagcgtcttttccttattactactactactgccttctttcaatttcatggaatagtttaggttttagttctaagctatttcgaccatatagttagttagggttaaagaataagacccaaatcctactttt

SEQ ID NO: 71358 - DNA, 129 bp, Glycine max
  Clone ID: PAT_MRT3847_3544C.1
ccttcgttcactcatctggtaatgcggctagggataccgcgcagcttcttgtatatttaaagaagatgggtcaggaaaaagagcaccacaaaattgtggttattggacatgtacactatggaaagttca

SEQ ID NO: 71359 - DNA, 666 bp, Glycine max
  unsure (1)..(666): unsure at all n locations
  Clone ID: PAT_MRT3847_35450C.1
gccataaaaactgataacataatattttgtgaatggtttccatgtaggttaaccaataggagtgaaagacaaatttcattaaaaacaagaatgaaaaaaagtgggaaggaaaaagactagggtacattacaacaacaaaaatgtcgttaaaatttttctagtttactaccattaattactcaatcagttaatgacatgttcaaagaatggttacctagtagccactattgatttgattaaccacttgagcagttaattactcctaaattggaagtagagaaaaatttgcctccaccaagttgaaattcttcccaagacaaagtgtacatcatgagtgaggcgtatttctacatagccttggagaaaggtgagaagttgttcgaataaccacctagatcagcccctctgacaattttctttcgggggaggngggtgttatatgacaacaagttttattttataaataaatggatcaaacaatgaaggggtgttacatgacaagttgttttattttataaataaatggatcaaacaatgaagggggttgactcacacttcgaatggtttgttcacgtggcataaagtccagtgtgagtcatcccctggagcaactagactaccaccatcagtgcttatggactcagcacctgaacatgatattaaagc

SEQ ID NO: 71360 - DNA, 153 bp, Glycine max
  Clone ID: PAT_MRT3847_35451C.1
agcgtttaatgaagaaacaaccacttctgactattggtcgctcactgtgaccggcttgatgcagcaaatatatgcaaccagagatctatccgattacttgtgggactccacagatgttgcgaacaatatcaatgacagattatagacgaatgc

SEQ ID NO: 71361 - DNA, 126 bp, Glycine max
  Clone ID: PAT_MRT3847_35452C.1
cgagactattgcttcgacctctccctgatttatccaaaagcctaagataacatcatctacaacctcattcattactaccactcccaaacaagggatgctcccaccatcatcaacccggtccaacta

SEQ ID NO: 71362 - DNA, 247 bp, Glycine max
  Clone ID: PAT_MRT3847_35453C.1
ctcacgcgtacaataataactgcattttcataaatacaattacttcacaattcttccgtgagacataatccaggaaatgttcaatgaattggtttattatcactgcctgaccgaagtgtatcttgaagccttcacagattgtgctcttaacgatatcgacctgggtgaatatgtttgaactcacgacgattgcatggatgtcatgtcttccaaagggttgagcttactttcagttgatgttgctggt

SEQ ID NO: 71363 - DNA, 340 bp, Glycine max
  Clone ID: PAT_MRT3847_35454C.1
gggtgccttcttttttttctttcttgttattcttttttgttgtttttttctttgttttctaagaaaacaagcgcccccctttttttctcacaggttaacataaaaaaaaaatttgtttcttgtccggctcccaaacttatccttgcgatcgcagccgccataccttttctcttttttgtgctaccccctgggggtaaaacccttttcttcccaggaaaggagaacccaactttcctttttccccaattaccccctttggggcgaacttcggggcccccatttaataaaaagggggtggggagcccccaatccctggcttttattgtaaaacccccaaacc

SEQ ID NO: 71364 - DNA, 265 bp, Glycine max
  Clone ID: PAT_MRT3847_35455C.1
tacggctgcgagaagacgacagaagggctacatcatcggctactatgacacgtcaaaactgatgtaaaaagtcttgtagaaccgatgtagaaagcctactttgtaatagtgttatcaatattttggttgtataattatgtttcttgtcagaacttcggtttgttgtataatactttggttgcttccaaactttctggttgttgtttaaattctttttgttggctgaattgttgttattattcatgtatgaagttatacttttaaa

SEQ ID NO: 71365 - DNA, 416 bp, Glycine max
  unsure (1)..(416): unsure at all n locations
  Clone ID: PAT_MRT3847_35456C.1
taacaccctttttcaaccagggcagccacaggagaanattgagccagtgtgcgccagacaccgaaagacgcccggcacgagaaccagaacgacacccccaaccacaagaaccgcacggccaccgaagcaaacacccaagcaacaaccacaacaacgagaaagaaggaggaggacgcaaaagaggcgcagaaaaagaagagcgaggaggagccaaaggcccggcgagccgaacacagaaaaaaccaaaaggagaacggaaccgaaccccgacaccaccaaccacgaggccccacangaaggcagcaaaaccccagccaacagaaaccagccccacacacaacaaccaagacaggcgaagcngcacccccgctcgctccaacaggcgcagaaccaaaagcgggaaagaaaaggcagag

SEQ ID NO: 71366 - DNA, 301 bp, Glycine max
  unsure (1)..(301): unsure at all n locations
  Clone ID: PAT_MRT3847_35457C.1
cacaaagcacaaagcaaagctcatccttgagttaaaaaatggcagcagcttcttccatggctctctcatccccatccttggctggcaaggccgtgaagctgggcccatcagcccccagaagtgggaagggtgagcatgaggaaagancgtccaccaagcagtctcctcangaagcccatggttacggccaagacggagtcnangtaacttgggccaattctcntggnganccccgtctnaacctaaccggtgagttcccaggcgaantanggctgggacactgntgggtttccgcanaccc

SEQ ID NO: 71367 - DNA, 352 bp, Glycine max
  Clone ID: PAT_MRT3847_35458C.1
ggttgattaggaaatggatgacgaggatgtgaatgaaagtttgcgcgagacgaaccagtttgatgaagagttcctaagagatattctgcagcagccagaagagggcggtgaagatctgaaaaactcatcgatcatgtcgtctctatttccaacaacttatatactgtccttcgacaaatccgctgctgaattgttaccaactgaaactgatcatcgtgattattcttcttcccaattgccctcatcatcaaattcaagggccaaccatggaaccaacaagaagcctcgaagcgcttcggagtcactggatcacatcatgtcagagagaaataggagacaggagctcaacagc

SEQ ID NO: 71368 - DNA, 136 bp, Glycine max
  Clone ID: PAT_MRT3847_35459C.1
tgcctcaataaagactctccggggtgagaggtactatatatcaaaggaaccgtatggcgctgcattattacagatgaccatcacaaaccctagtgcctaaaatcaaagaggagacgaaaatcagacaacaaactcg

SEQ ID NO: 71369 - DNA, 163 bp, Glycine max
  unsure (1)..(163): unsure at all n locations
  Clone ID: PAT_MRT3847_3545C.1
cggacaangccgccacgttgcgcaccgaggaggagctgatgtcatgtacgagagtggtctgaagcacggaagttacaagcgtcgcagagggagcgtcagttcaggcactngtctgacgcaatcggagacgactnantgatacgngtntnacggatcggcattg

SEQ ID NO: 71370 - DNA, 1448 bp, Glycine max
  Clone ID: PAT_MRT3847_35460C.1
gcacgtagttcttctttcgaaccaaatccgcccgactacggctgcgagaagacgacagaagggggcattggggcatgcttttaatttcctagatctcccaaacaaattgtagcataagtcccatggccaaagagactagtgttgtttatctatatcccagcaaatcacaagtttggggtgagaattttgatcataaaaaacttgtaataacaacactagctgctaatggaaagaaggaggagagtaatggagcacctaatgacacatatcctgcgtttcccgggtggtatgctgatgtttcctggccaggagaagcacacacatataaaatagaaaagattctattccacgggaaatcagaattccaagagcttcttgtatttgagtcttctagacaaggcaaggttgcaattcttgatgggcatatccagctgacagaaaacgatgaatttgcttaccaagagatgctcactcaccttgcactctgttccattccagatccaaagaaggtgctgcttattggagggggagatggtggaattcttagggaaatatcacgccattcttctgttgagcatattgatatatgcgaactagaccaaatggtcattgatgtttattcggagtttttcccggatatagctgttggttacgaggatccccgagtgcatgttcatatcagcgatggagttgcgtttatcaattctgttcctgagggcacttacgatgtcattatatcggatgcttttccagcaatggggcatagtgctgatgttcttgctgatgaatgcttcttagaatcagtagcaaaggctcttcgacccggaggagtgttctctgctccagcagacagcctgtggcataagaactttgtggttgcagacaccatagcaaattgcaagaagatattcaaaggctccgttaactatgcttggaccacggttcctacatatgcaagtggggtgattggattcatgctttgctctacggagggtccaccagtgaacttcaaacatccaataaataaattgaatccagagaaaaatggggtggcaaagggacctactaagttttataacccagagatccatgctgctgcattctgtctgccttcttttgtggacaaggttgattgatccaacagacattcataaatgactcggtagcattaaggaattgctgttagttaccctttgtttttgctgtgtcgttctgcatatttatgatattatccttttattatgttatttagttttattttatattccctaaaatattagatgttacacacgtgtatgattatcatctaatgtaaggtttgcacctattgaggtatcaatgaaatgaaatctgaaatttagttttttctctttaaaaaaaaaaaaaaagccgaattccgcgcgacgcgctctctctctctctctctctctctctctctctctctctct

SEQ ID NO: 71371 - DNA, 487 bp, Glycine max
  Clone ID: PAT_MRT3847_35461C.1
ttacgttcttagttctccacgccaaatatagcataagtgctgattggccatatagctattggcatattcaattacctttttaaaagcaaagtccaatggccaaatagactagtgttgtttatcaatataccagcaaatcacaagtttggggtgagaattttgatcataagaaccttgtaataacaacagcagctgataatggaaagaaggagagtaatggagcacctaaagacatatcctgcgtttcccgggtggtatgctgatgtttcctggccaggagaagcacacatatataaaatggaaaagatcctattccacgggaaatcagaattccaagagcttcttgtattcgagagtgatgtgaattgtgcagacatctagacatggcaagattgcaattccggatgggtatatccagctgacagaaaacgatgaatttgcttaccaagagatgctcattcaccttgcactctgttccattccaaat

SEQ ID NO: 71372 - DNA, 673 bp, Glycine max
  unsure (1)..(673): unsure at all n locations
  Clone ID: PAT_MRT3847_35462C.1
atttgatgcagggcatagtgctgatgttcttgctgatgaatgcttcttagaatcagtaggaaaggctcttcgacccggaggagtgttctctgctccagcagacagcctgtggcataagaactttgtggttgcagacaccatagcaaattgcaagaagatattcaaaggctccgttaactatgcttggaccacggttcctacatatgcaaggcatttcttatctaactatatgtttacttttctaaattttatatattaagagaagcttttggtaacaagtgtttctttgtttttgtttaccagtggggtgattggattcatgctttgctctacggagggtccaccagtgaacttcaaacatccaataaataaattgaatccagagaaaaatggggtggcaaagggacctactaagttttataacccagaggtaatctttcagatcacttgcttgttttgcctttataagaatttaaatttattcctatcgtgccttttatttttgttactacttcagatccatgctaacgcnttcagtcaccaatcttttgtggacaaggttgattgatccaacagacattcataaatgactcggtagcattaaggaattgctgttagttaccctttgtttttgctgtgtcgttctgcatatttatgatattatccttttatt

SEQ ID NO: 71373 - DNA, 182 bp, Glycine max
  unsure (1)..(182): unsure at all n locations
  Clone ID: PAT_MRT3847_35463C.1
ctacattgagagagctgaaccaagatcaagccccatttgtacaacttattgtcagtttggtaatgagttgtttagttagggaggtggggatgaggatcggtgataaaatgaactagtatgtataatcggtagtttcattcacatgaactcattaattcacctatttttttatgtttttccna

SEQ ID NO: 71374 - DNA, 382 bp, Glycine max
  Clone ID: PAT_MRT3847_35464C.1
tacggctgtgagaagactacaaaaggaccacacatcggacattcatttctacacatccttaacggggacgatcctatcaaaactactgcaactagtaaaaataacctcttatttaacttctgtcattattctgattgagtgaaacatagtatcatcggtattgtcagaataatacagctattttttccatggactgccaaacgaacaaaaaatacctattttgatatttgattgaacatataaaatccatcacttttctcccaaggttaaaggaaatttatgtttaataaaaatgtcgtctttattaataattcatgtgaacgcaatcattcttgccacgttatacattttttattatgtacctatattcaatacttttgcc

SEQ ID NO: 71375 - DNA, 194 bp, Glycine max
  Clone ID: PAT_MRT3847_35465C.1
cacaattattatgtaaataataggcctggaatgttcaccacatgagcacaattgacataaaggttttttgccacccaactggttaccttataagaaatatctaaaaggtctacgcttgaagataaaccggcaaaaaagattcttatattgggcttacaaaataacctcagactcctctgtaagaagcctgggca

SEQ ID NO: 71376 - DNA, 399 bp, Glycine max
  Clone ID: PAT_MRT3847_35466C.1
ggctcgagcgccgctttctccgcgctaagtgcttttaaattcgaccacgttcagatcgtggttaccgaatcaggggggccgtcttagggagattgtcatgtggtgcttgcaaacagtaaacaacagctgatgcgcacatcgggtatctcgtccggtagatctcgaccgttggtggatcccctctcatgcccatagcggacctcttagtttatctgttcacacttttcaatgagaaccaatagcccaagccttcttccgagagtaaactcgagcttgcctaccctgacgagaggaggggtgacactgatgcaatcacgtctgtagatctcgtggtctacctctatcacgcggctcgggtgaagagcgagtgactgcaaaccggtactcctgcgccgacgc

SEQ ID NO: 71377 - DNA, 318 bp, Glycine max
  Clone ID: PAT_MRT3847_35467C.1
atggatacaaatcagcaaagaagaagggtttcagaagcaaagaagaagaaaggtttcggggtttcggaagcaaagaagctgaagggcgtattacagagcaagagtctggtcaggacctgctcgaatcgaaaagagaggagagtctttaagaaggaattcccaggttcaaagaagtatttacgaagtacaaagctaagacaagaaagaggacttcgagctattgggcaattcgaactggtgtatggacgagtcgaagtcgaggcagcaagagttttggacttagcgacacttggcgttaggatagcgttcgaccgttag

SEQ ID NO: 71378 - DNA, 415 bp, Glycine max
  Clone ID: PAT_MRT3847_35468C.1
tttatttattttttattttaccaatttaagcctcattccctatattttaagaggatatggaacactaactacccctccaaatggacaaagaccttaacaaatcttaccctaaaaccactttacccaccaatatttactttctaccccctttaatagccgaagccttattcgttgtaaactttacactctttggtgttacactcttaacatggcgctttcttagcaggcgctactttattcgttgccggcttcgcaacaggagctgttcttttccctggagaagaccgtgtcgacacccttgaagccttggcgggcttttttttgggctttgcctcgggctaggcaagaacttcctttgtttaagagatggcttgggctcatagcttggcttcatgggctaaccctttgggcttgg

SEQ ID NO: 71379 - DNA, 417 bp, Glycine max
  Clone ID: PAT_MRT3847_35469C.1
agaggaaaaagattatatcactttcattaataatcaaatgggaaatagaatttggaatatggtcaaacacttggggactagcaaacatcttgcttccctagctagagtatgggtttacaagattagtttgcctcctaatgagactcaccgttaagttgggaacaaaggataatttggctctacacttagagagtattacattgaaatctgaagaaccaatagaaggttttgaaaaataaccagttacaactttaaaatcagtctcaaacttgattttttggagacctatttttgctgcccaaaaaaagtgggttggaaaacagataaggattctggttttggggtccgccataaccatgcacagattggaatttggcgatgaagaattgggcttgactgtttctaaaataatattcc

SEQ ID NO: 71380 - DNA, 903 bp, Glycine max
  Clone ID: PAT_MRT3847_3546C.1
ccacgcgtccggccgattcactactcgcacggcacatgcaccctcctctatctctctctgcagcataagcacagcatcatagaccctttctcaaaaaatagggttcctccgttagggttagaggtcacaccatcttacactatactaacccctagccagccagcgagtttgagtgcttgggggtgcaatggcgggagtgagggaacaggaccagtacatgccgatagcgaacgtgataaggatcatgcgtcggattctgccagcgcacgcgaagatctcagacgacgcgaaggagacgatccaggagtgcgtgtctgagtacatcagtttcatcacggcggaggcgaacgagcggtgccagcgggagcagcggaagacggtgaccgcagaggatgtgttgtgggcgatggagaagcttggctttgacaactacgctcaccctctctctctttaccttcaccgctaccgcgagagtgaaggagaacctgcttctgtcagacgcgcttcttctgcaatggggatcaataataatatggtgcaccccccttatattaattctcatggctttggaatgtttgattttgacccatcatcgcaagggttttacagggacgatcataacgctgcttctggatctggtggttttgttgcgccttttgatccttatgctaacatcaaacgtgatgccctgtgatcatgtaagaacaacaactagtgcatgctgctttttcccttggttagttatattcaagcccaagcccatgcaggtgcaggtgcaactatttagcttcatctacaaatcttttttcctctcttctaaacatgctttaattatttagagacaatacttgttattcattgttatgctcaattgctagcttctattcatcgtcgactgtctgt

SEQ ID NO: 71381 - DNA, 369 bp, Glycine max
  Clone ID: PAT_MRT3847_35470C.1
ctgcagggcactcataggattataggagtgaaacacatgggggccacaggtggtgttcctgagatgacagggacattgatggacttggcctctgaattgttcttgcagggggccagccatgtttgatgtgtacaccttctgatctaaagactgtgaagtgtgcaaccctgcatgcacagaatcaatgactatggcattgaatccaagtccgtgttctgatgcatggagtatgataaatttgcagcattccggacttcattgagatatcatccgtgtcactagatggactgtcaccccaatgcaggacgttcaggttgcagtggattggtgtatatactttcaggaatgtgcacccaggacctatagtgt

SEQ ID NO: 71382 - DNA, 119 bp, Glycine max
  Clone ID: PAT_MRT3847_35471C.1
ggctcgggcacgcgtcagtccaagctgtcagagcacgagtccggggaataggaataacaggtcatggtgcgagaatactacagaatgggacgatacgcatgtttctgaaattgctgggt

SEQ ID NO: 71383 - DNA, 310 bp, Glycine max
  Clone ID: PAT_MRT3847_35472C.1
agatgactacggctgggacactgctaggctttcagccgacccagaaaccttctacggagaccgtgagctctaagtgatccactccagttgggccatgctgggggccttggactgcgtcttccccgatctatgtgaccgctactgggtcgagtattgagaagctgtgtggtgcaaggccagggcccagatcttcatggagggtgggctggactactagggcaacccaatccttgtccacgcccacagcatcctcgccatctgtgccagccaagtgatcgctaatgggtgctgtgaagggtgatggtataga

SEQ ID NO: 71384 - DNA, 1112 bp, Glycine max
  Clone ID: PAT_MRT3847_35473C.1
gaatacttcctttttctttagcaaatggcattcttattcttcccctctaagggtatctttctctctagctttttgttatgctttgctattctgtctttgggagctgaagctcgtagatcaccatcacccatctcttctctcattagcaaagagctttttgattccattttcatccacaaagataacaatgcatgccctgccagaaacttctacacctacgactccttcatcaatgcatccaaacgcttcccaagatttggcaccactggtagtccagccacacgcaagcgtgagattgctgcctttcttgctcagatttcacatgaaaccacaggtgggtgggctactgcacctgatggaccctatgcttggggattgtgcttcaaggaagaaattagtcctcaaagtaactattgtgattccaccaacacacaatggccttgttatccaggacaaagttacaaaggcagaggaccaattcaactctcatggaactacaactatgggccagcagggaaggctttgggatttgatgggttgagaaacccggatgtggtgtcaaacaattcattgattgcctttcaaacaggtctctggttttggatgacagagcaaaagcccaaaccttcttgccacaatgtaatggttggaaaatatgtgccaacacaagctgacatagcagctaatcgaactaaagggtatggcctagtgactaacataatcaatggtggacttgaatgtggaattcctgatgattcaagggtgaatgatcggattgaatactttaagagatatgcaaccttgtttaaagtagatacaggacctaacttggattgtgcatatcagaagtctttccaaactgtagcttagcttttttctttcctggtgtattttttcttttcttttctgttataatttctctggcatagatttaacaataatgtactgaaagcatatacgatatacctagttagtggcattttccctttgtaatttatttctacaagtctatgaatacgaagctttatgatgcacctagctcctgattactagacgctgtagccaaaagaaacccaccaggtaaccaaaaataacatgaaaatgttcaaaat

SEQ ID NO: 71385 - DNA, 432 bp, Glycine max
  Clone ID: PAT_MRT3847_35474C.1
cccacgcgtccgcccacgcgtccgctccttgaagctgattagaccaagacgatcatcatagtacacaattcatacatcatggcagtcctgaccattatcacgcatgacagctctgccgttgtgggacaacttcgcagcgtttctgtctatagcgtgaagagcgatcatgagtaccacggtggcttatcactcgcgagcgcggcattgatggcggttctcactacgagcctgtataacacggacgagagcccgcgccgcacctttgaggccagcataaccgatctgaccgaccatgtcgttatgtacgtgcgcatgctggaagctactgtcatggtatgaatgctattactctctatgatgattgactgattgagccattacatgagaaaacttaggtcactcaagatgaccatgggaactattcacaaacat

SEQ ID NO: 71386 - DNA, 334 bp, Glycine max
  Clone ID: PAT_MRT3847_35475C.1
ggcctgcccgggaaagggtttaatactcatcgaggaccacataaaaccattataactgggattatagcctgcgcccttcagcataaactgcggtgctgatttccacatgcaaaagacagcaactactccttttaagaaaacctcaaaagcatgttgtataagcagctttattttcagaataatgaggggcaagaatctggacgtactagtgtattgcaaatacaacctgtgaccagcaggagtagtaatcagtatattaaccaacccatgatgagcggcaaaagaagtataatgacgtgcaccacaatattgaagggtcagcagaaaaatagct

SEQ ID NO: 71387 - DNA, 220 bp, Glycine max
  Clone ID: PAT_MRT3847_35476C.1
tcgtccgctttttctttttttttttatgatttctgttttagctacacaaagtgtttattccgaattcgcactggtttaatctcgatttagataaaaatttggaacggtgtatcgttgatattcaagctcagactcaattctataatccactgatgcaaagtggacaatcaaattaattacacatgaactttaaccccattctttgtcataccaataaaca

SEQ ID NO: 71388 - DNA, 541 bp, Glycine max
  Clone ID: PAT_MRT3847_35477C.1
ccaagaattcggcaccagaaaagaaaaagcatgagctgcaatggttgccgagtcctccgcaaaagatgcagcgagaggtgcagcctgagatcctccctgaactggatcgattgtccgcatgcacaggcccatgcaactctcttcctggctaagttcttcggccgtagcgacctcatgtttttcatctcctccgtcccactaaacaacagacccgcgctctttcagtctcttctgtttgaagcgtgcggacggaccgttaatcccgttaacggtgccgtcggactcctgctgagcggtaactggcacgtgtgccaggccgccgtccacacggtgctcgccggaggcgttctccggccgctgtcggaggttgtggcgccatcagaaagcatgttctctcatcagttccagtctctggcgtcagattctttgaagagaagcagcgatgcaacagcaccggttatgtcgaccatggtttctggagaatcagagatttgcagcagcgacgatgggaaaaagcttttgaatctgttcgtctagttat

SEQ ID NO: 71389 - DNA, 443 bp, Glycine max
  Clone ID: PAT_MRT3847_35478C.1
aaacccgcagggtttttatagacaccaagttcaaaaaatatcccgtttaagttaacggggggcgaccatttgcatgttaattgaaatttagagacaaaaaacctggtggtgcgaaagcaattttacaggggaaaaatcaggttgaacccactattgattttgatgaaggctgttggcattcaacttaagaacggttttgccgttctctcttaaatttttaaggggctgaaagcttgtttcaagttggctactttcttgaatatacatattttgcattggaaaaaagagagacttcctctggggcccaagggacaattctaacttcaatgaatcctcactttggggctggtcatgcctgaatgtattctctaatccaaaaaacttttgagcgaacatttttgcttctttcagactcttctttatagcacttaatctacctttgg

SEQ ID NO: 71390 - DNA, 302 bp, Glycine max
  Clone ID: PAT_MRT3847_35479C.1
ggttccccattgaacaacgaaagaaaatcgttcatattattatttagttcaaagtctttattcttacattattacttttattaaccataacatgtagtagatgcttgcttaattataaataagcatattataaaaagtctcgcgatcttggctcatcatgcttgggcaaagttgaagaggtcaccacatttgactccttgcgagggcagggatgaggggctaaccccacccttggcccttgaaagaccaaccccccccggttttttttcaaatggagggccccttagggaatttcaactttt

SEQ ID NO: 71391 - DNA, 565 bp, Glycine max
  Clone ID: PAT_MRT3847_3547C.1
gagagagagagagagaaacttcgtagagataagatgggatgcacttcgctgcttagaagccccaagaaagaagaacaagaagtgcccgatgccaattctaaccaaccttacacctatgaagatttcaatattttggacgaactcgaaggggtcttgagcaccaaggaagaacaagattcttcgttgccgcaacaaaaatcttctagtagtgaattccattgggatttcatggaatgggaggagtttcaaccccccaatattgaagaggaaggagaagatgaaaatgaagggaaagagaacaggaggagcaaatgcctctttgatgaggaggagcaagagatgaagattgaaaacaataataatattgttgggttttgggaaatggatgatgagaagatggtggctttgaatttgaacttgaactatcaagaggttttggatgcatggtctgaccgaggctctctatgggctgatgattgttctctttcattcgccaccaataatgcctactatatgggagaagtgccggtattggaagaagagagagcaagaagagaagcatgtg

SEQ ID NO: 71392 - DNA, 276 bp, Glycine max
  Clone ID: PAT_MRT3847_35480C.1
gtctgacatactgtgccgaaactgacagttctttatgaataccatgttgcccatggatgagagatggtgccaaccattgcatggagcatgcccatcgaatacattgactgactgatgtacacaatcttaacatgaagaaagaatgctaccctgatgcatagggctcatatgaaccagctaatcctcaatggaaacgactctgtacaaattgttgataagatggccactgtagctgctgctctgctggcacgcagaactgctttcattgatgcattc

SEQ ID NO: 71393 - DNA, 331 bp, Glycine max
  Clone ID: PAT_MRT3847_35481C.1
gcacgagcaaaaccagttgatagaacaagcctcacacattctaccaaagtgcattacatgatggtgccaccatgtatctcctttcttgataatctcgaagtaatttttttgtcaatatagatctcttgtacattgttaaaatagaggagctgaaatgtgctgttttgccgtggcaaacagcaagattggtgagaagtttttctcacaaatgatatttttttaaaaaggaacaagcttattgatgcccaaaaacaaataactcattaaatttctgtgtaactttttatcccgtagctgacaagtaaacatataatattatccctattttgct

SEQ ID NO: 71394 - DNA, 543 bp, Glycine max
  Clone ID: PAT_MRT3847_35482C.1
ggatcaattgttggatgatgcagactctactagcaaaaagcttggcaaggatagggctgaaaaggaatcatatttgtttcggtcactcttaaataacaatgcattagtggcatttggttctgactggccagtggtagatatcaatcccttaagtggtattaagacagcaatgaaaaggaggccccccaactggcaaagtgcatggattccatctgaatgcatttcattagatgatgctataaaagcttacaccatttctgctgctcgtgcaagcttccttgacaaagatcttggatccttatctccagggaaactggcagattttgtcatattgtccactgattcatggaaagactttgctgaagatgcatctgcaaatgttgaggaaacatatgtttctggtgtgagagcatatccttgaagcttttccattttcagttaggtaataaatttttggttaaattataaaattcttcaaaaatgtttttattttattccttatatgaaaaaaagctctagattttagttgatatgtgaaaaaaa

SEQ ID NO: 71395 - DNA, 531 bp, Glycine max
  Clone ID: PAT_MRT3847_35483C.1
atatgagactacactgagcatcgtctagctatctcgatcgaactgtccaaggtcctgtcaccagggtcgcctggaaaacaaggcagaaggaatgagtgactgaccagaaggaagtaagccaacaatattttatcaaacaaggcaaggaggggtggtgggggtgcagcggctaagagaggagagagttataaaatataagcgtacggtacacgcggatcatatatgaatggagtacaacaagagtaataccaccccgaaaaaaaaccaaagaaaacaaagccacaacgggagccgaatggctgttagcgagaaccagccaaatgccggtaacaggagcaatgcgtacccaaggtacagggatagcggtgcaaggacgggaagggaacgaggtaacggcacggcccccaaccgagaggcgagagccgaggcaaaacgactgaccgataagataaccaaggcaagccgggcgggccagaccgaagcgaggagagagcccaggccacggagagcttggatggcggaaaggaagga

SEQ ID NO: 71396 - DNA, 293 bp, Glycine max
  Clone ID: PAT_MRT3847_35484C.1
ccggttgcgagaagacgacagagggggaaacaatgcttgttttattttatttagactcatctttcgacaccattcgatcttacttacactgacaacccaaaggatcctcctttagttgaaataaacacatctaattaaataaagagagagagagagcgtcagagagagatagaccctatcactagtacatgtactttacgagcattgctcaccaaacagtgcctcagaaaacatatgggaagatatctcgttgttcattgacatgggatcagatggccacagagaatgcacaa

SEQ ID NO: 71397 - DNA, 430 bp, Glycine max
  Clone ID: PAT_MRT3847_35485C.1
ttgcttttttttttttttctttttcttttttttttttgtttttttttgtgtggttttttgtcttattgttattacaaatttctgttctgagcggaaagaaaaaatgcgaaaaaagatgcgggcctaaataacagaaagaggggggccgaagggcacatttcaccccccctgatgcgtgccgaaggctgttactttgcctcaagtctcagagagagggcacaaaagaaaacctcgaaatcaagaaacagatgaaacccacccgcgcccaacgtggtgcgtgcacaaagacacagacccgggccccgtttgttgccatggtaacccacaacccttgtggaaatcttgaaaaaaagacgccctcacgtaggggggcactcgctggaggcataccccaaagaaagggcggggcaacaaagcctttttttaaaca

SEQ ID NO: 71398 - DNA, 142 bp, Glycine max
  Clone ID: PAT_MRT3847_35486C.1
aattcggctcgagctccaacgacattacagtgttcaatctcaaacctttaaacgacggtcacacacgacacaatccatagccattctgatacgcttattatttaggtagaacaacagtctgtttttccaaaatgtggactgt

SEQ ID NO: 71399 - DNA, 201 bp, Glycine max
  unsure (1)..(201): unsure at all n locations
  Clone ID: PAT_MRT3847_35487C.1
ttatcatttaactctgggtaatttcttgcttaaaaaagttccattacgcngtcctagtcaaatactagtngatccacatcagaganatcntttgatcccaccttccagaaggcttcccaatgggacttgggaatcctgtnnnncgnggtatcncatnanctnncagtgnngcctcntagnncccnaacaggngcctncngc
